United States Patent Application Publication US 2013/0129668 A1 - sequence listing, part 20

SEQ ID NO: 327549 - DNA, 122 bp, Homo sapiens
ctcatttattctgaacttttctgtgatttgaatttctacctattaggctttcctatattgcgatatgagtgtccaggagccaggacagagaataagacacattttttaaaaagggataggct

SEQ ID NO: 327550 - DNA, 122 bp, Homo sapiens
ctgattgggctaaaggcgtaccattgttctgcacggctaagtgcccaggttcttcctaatcgagctgaacactagtcactgggtccacggttctcttccgtgacccatggcttctaatagag

SEQ ID NO: 327551 - DNA, 122 bp, Homo sapiens
ggacagacaccagagcctggggaccgcggagtgaccgggtggggctggagggcggcgccgcgccttctggggagacgcggaggtatcaggtaatcccccggcggcctgcgccaggcagtcat

SEQ ID NO: 327552 - DNA, 122 bp, Homo sapiens
gtgggaggtgagcttgggccgttctgggtcccgatgcctcctggctgtgcagaggcaggtcgccttcctttggccctgttgaatgagtacagctctaactgctctggggagtgggagggtga

SEQ ID NO: 327553 - DNA, 122 bp, Homo sapiens
gccactgcactctagcctgggcgacacagtgagatgccatctcaacaaatatccccacaacggaacttttcagagatattctatcaaaactgcctcttaattctctatgatcagagctggcc

SEQ ID NO: 327554 - DNA, 122 bp, Homo sapiens
acctactgacttacagctgaacccacattcccagcagcttcagcctgggggctgggggagcgggcagaccgagctcagaaaggcaggggagggtaaagaggactgtggggttgcccctttca

SEQ ID NO: 327555 - DNA, 122 bp, Homo sapiens
ggctctgcagagctgacagaggccgtgttgggtgcggcaggacaaggctgggcgtgcaggcgcctcctccacagggcactgctcatgcgtcacagctgccagacggaggctccccaatggcg

SEQ ID NO: 327556 - DNA, 122 bp, Homo sapiens
gggcgggtagagccaggagcacctgtgaggaagtgcactgccattttcgtagctgcttcccgtgtgtctcagttacacacggctggcatgtgtgcactgatgagacgggaacgtgatggttg

SEQ ID NO: 327557 - DNA, 122 bp, Homo sapiens
ttcctaggtcctactcagtatctgccttgcggatttcatagataaggcctacacactcaacggacttccttcccttctccagctcctcattaccctaaaaaaacgtctacaaacccactccc

SEQ ID NO: 327558 - DNA, 122 bp, Homo sapiens
ccttccctccccagtgcatcctctgtcctcgcagctctggtctatctcttccgcagctgccggcaggcggctgcttcctgcagtgagtcactcccacactgccccattttggtgcagcgaca

SEQ ID NO: 327559 - DNA, 122 bp, Homo sapiens
atctggttgcagttttaggatctctgctttctccccatggttgatcagtttcacagtattcgatgtagcctgtgtttggccattatagtttttttgtagtttcatttttaggggtgtctaat

SEQ ID NO: 327560 - DNA, 122 bp, Homo sapiens
gggccctcagtgtggccagctgcagcggatgctacatttctcagaaaacagtggcagagccgggagagtcaagagtggaacaaaagacaagacagaaaacaaagcagagaccaccaggagca

SEQ ID NO: 327561 - DNA, 122 bp, Homo sapiens
cgcggtggaggagtgaggcaggcgggagcggggcggggaggcgggtcccgggaccacacgcgcggctcggcacttccccgtcatcggcctccaggtctcccgctgggggtcccccaggatgt

SEQ ID NO: 327562 - DNA, 122 bp, Homo sapiens
gactgacagtgagggggcgggggcttagggaccaggggctcgaaggaggggccggtggcccgcactccaggtccttggggaggagagggctaagaaactggtagtcttatagggaccaaggg

SEQ ID NO: 327563 - DNA, 122 bp, Homo sapiens
ttgtcatcaatatagtttatgtattcctccacccaactgtgagttcctcaaggacaggggcggtgttcatattcatctttgcatcctcttagactagcttcccgcacttggtctagtgtata

SEQ ID NO: 327564 - DNA, 122 bp, Homo sapiens
ccagtgctgctgacacctgccatgcacgtcagcatcttcatctgatgtcctcaggggagccggctgcacctcacaccatccactctgcaaagcaaagcagccctgggaacagccctggaaaa

SEQ ID NO: 327565 - DNA, 122 bp, Homo sapiens
ctatccctgtgatggtagctcagcgagatctggggacctggcgctgagcgcgttgccagccgggatcttcctcttcatctaggcctgggcgctggcgtgagaactcggactgggtcctggac

SEQ ID NO: 327566 - DNA, 122 bp, Homo sapiens
accattacagcttgcaccattactgcagccttggcttcccgggcttaagtgatccaccaccgcttctcaagtagctgggaccacaggtgcatgccaccatgccgggctaattttttttatta

SEQ ID NO: 327567 - DNA, 122 bp, Homo sapiens
acccctggaatgggttaattggatggaggtcttttacctgcctgtgaaaggtaaagaatgcgtgacatcaataatgataatgataacaaattaaattagtagaatgaatgaatgcttccatg

SEQ ID NO: 327568 - DNA, 122 bp, Homo sapiens
agcttgtagcgctccgcttccgctggcttccgcacccgggcctccagctccttctcccgccgggcgatctcctgctcctgcactgccacctgctgggcccgctccaccacctgcacctgcac

SEQ ID NO: 327569 - DNA, 122 bp, Homo sapiens
tacggtggcaccattggtgccgctcatcggttcttttcaggcggcacaaagtcctgcacacgtgtgggccaggtctccaggagatctaggcagagtgaaatgcagattttggggtcccctct

SEQ ID NO: 327570 - DNA, 122 bp, Homo sapiens
gatttgctaattgctttattcagaagagaccccccggagtacagcttctttggttaagcacggagttgaggtggaggagagcagtagaaggctggaaatctgctggatgtctcattctgggt

SEQ ID NO: 327571 - DNA, 122 bp, Homo sapiens
tgttcacggaaggtgccgcagaccgatggttatgttagaaactgtcactcgtgtcctgtccgctttaactctgcagactactggaagaaaatccgtcaagtggacgagtgaggcctgggagc

SEQ ID NO: 327572 - DNA, 122 bp, Homo sapiens
tgttgaatagttgacattccgcagaccgcggcggcgcttaagccgcaagccgtactagcacggagggcctccattggacagctgtcactcaacatctcgcactcattggctcctccgttcca

SEQ ID NO: 327573 - DNA, 122 bp, Homo sapiens
gggcggccgagctgcgcctctcacactgtgtgttttgtctgtttttctctcccaaggtcccgtttccctctgtgcggcggccggcgggaccataagggcttaactcatatatttaacccccc

SEQ ID NO: 327574 - DNA, 122 bp, Homo sapiens
gtggcagtggctgcgtggcgctggggcggcggcaggggccttggggcggtctgagggtgccgtgaagaggtgagggagggctggctatgggcggccggctggggtgggggacgagcaccggg

SEQ ID NO: 327575 - DNA, 122 bp, Homo sapiens
gggggtgggggagttgcccattaattcattcaggaatatttgtagactgaccacctacagcgcgcagagccgtgactggtcgtccagcatacagtcatttctagataacagccacatggccc

SEQ ID NO: 327576 - DNA, 122 bp, Homo sapiens
agaggacaggacacagccccaccctcttgccaaagggtccacagccgtttccacaggccacgtgtttccccgtgatcccagactcctcgcccgctgtgggacggaactacagggcaaaccgg

SEQ ID NO: 327577 - DNA, 122 bp, Homo sapiens
gagcaatgtgtgccacgtactggatgggaagcgtcacaggctgataacgtgacctttgcgcgcagctcaattattgcgcgggctgggggcggggcctgcggggaagggacagagccaagccc

SEQ ID NO: 327578 - DNA, 122 bp, Homo sapiens
cccagagcagtagattgctgtcgtttgttactcagagctggacttgcggtgggggcttggcggggctctctgttgtcctgtttcaacctcggtcttaggcaggccctatgcacctgggcctc

SEQ ID NO: 327579 - DNA, 122 bp, Homo sapiens
gcggaacttagggtacctctctcccacaactagaatggacaggccagaggacagtcatagcggtttccttaaggctcaccaaaggcaggtaagctaaggaaagaagctccccacctcctatg

SEQ ID NO: 327580 - DNA, 122 bp, Homo sapiens
agaggttgacggatatattcagacgttacgacacggatcaggacggctggattcaggtgtcgtacgaacagtacctgtccatggtcttcagtatcgtatgaccctggcctctcgtgaagagc

SEQ ID NO: 327581 - DNA, 122 bp, Homo sapiens
cggggcttagacagcagtacactggtatgtcctgtctcaggcttatgtcaattctcctgccgtcttactacagcatgaaagaacttgatcattgacacaccatagtgtttctcactggtcca

SEQ ID NO: 327582 - DNA, 122 bp, Homo sapiens
taccttttcatctcggcccactactttgagaaaatgcctctaaatatttcatgggcatctcggcccttctcagagcctccacaggaagctcaaatccttcctccttgtctcattaattcgca

SEQ ID NO: 327583 - DNA, 122 bp, Homo sapiens
gtgtgttagaacttcaggagaatgctcaagcctgcttctgataatggccttcagggaaaacgctgtcccaaaccactaagaactttctgttgaaagctacaggtaaaactaatggataactg

SEQ ID NO: 327584 - DNA, 122 bp, Homo sapiens
gctctttcctgcgcttgcgtgtccaccacacgcacaggaccacgcacgccagccacagcacgctgaaggcaccacacagcacaggcaccagcagacctggggaccggggagaagagccggtg

SEQ ID NO: 327585 - DNA, 122 bp, Homo sapiens
ttttcagtgcagcagtgaaagtagcattattcaacccaagacttaggaccgaaatgggagcgaatgatagtgacatcagtgtggaagaacttcgatgtttacactgaataaaagtgtagaat

SEQ ID NO: 327586 - DNA, 122 bp, Homo sapiens
gtcataatttaagcgtgtcccagcctgacaagaaggtccatatggtctttcagtgaggcgcgtggagcggtgatttatgactgtcaccagcccagcgctgtctccgagacattcaaggaccg

SEQ ID NO: 327587 - DNA, 122 bp, Homo sapiens
tcgggccaccagacggggggcggcagcagaggcggggcggggcggggcgcggcgggacagcggcccctttgtgcctgagccctttgtgcccagcccgcgcgccccgcccccaccgccccccc

SEQ ID NO: 327588 - DNA, 122 bp, Homo sapiens
gcggggctaatgaacctgagatacagttagaagactggacagatttgctgttggactgaacgaggggtgagggaacaggggtaggcttgcacaaggaagtggtaccattttccaagatagga

SEQ ID NO: 327589 - DNA, 122 bp, Homo sapiens
aggtgaagtcgcagcagcaccagaaacacgtgcactttattgaatgccattgtagaaaagcgtgtgaggataaagggctgatacaggactcggctccgggggcagggcgaggaatggaagtt

SEQ ID NO: 327590 - DNA, 122 bp, Homo sapiens
gttggggtcatgccagtggtacacttctgtgatcagagggggactctgggcccctgctaccgatgggctgggatcccaccagcggcccagaggaggcctccgcacagccgcttgtcagcctg

SEQ ID NO: 327591 - DNA, 122 bp, Homo sapiens
ccaaagctctagctttctggtgctaagcggtgatttcctcctggggaatcctgagctctccgagaaggttattatgttgcaaaggtctgcctgcacagtcaatgcccagagatgtgaattag

SEQ ID NO: 327592 - DNA, 122 bp, Homo sapiens
gagccgaggcgggactcaggtggcgggggcgggtcacaggagagcacctcagtgacatcccgtgtctccccgtaggtggccttggagatgctctttactggtgagcccatttctgcccagga

SEQ ID NO: 327593 - DNA, 122 bp, Homo sapiens
cgatttcctccgcctcttccaaagcggtaggtttccttcctccgcctgcctcttaaataacgtggtatctcgcagtttggctgaaacctgaattaaatgcaatgcttttttgacttttactt

SEQ ID NO: 327594 - DNA, 122 bp, Homo sapiens
tttttttttttttttttaaggtctagggtaacacggggcttttaagtgcctctccgcggccgcctggtggtccagcccgggccgctgcagtgcagccacacggggagggacacggcgcgccg

SEQ ID NO: 327595 - DNA, 122 bp, Homo sapiens
tgttatttagacacattatttatgtatgtgcatttgtttaatagacatgatttatttcagcgttattctacagcagagtgtaagcataactcataagcagggtcaacccaaaaattgtgtga

SEQ ID NO: 327596 - DNA, 122 bp, Homo sapiens
tatgtgcactgcatcatgaatgttattcacgacatggtatgcacacagcactgcatcacacgtgttacccagaacctggggccacactggatcacaaacctgaacaccgtgaaactcatctg

SEQ ID NO: 327597 - DNA, 122 bp, Homo sapiens
gagcattgcagagcttgctagagaggcacaggaagttgcctgaagtgaaggagggggtagcggctgcagaagctaaagcttccgccaaacaaaagaggacagcacttccggtcacgccatcg

SEQ ID NO: 327598 - DNA, 122 bp, Homo sapiens
atcccagtggctgccagtcgcttggtgccgcgggctggggtggacggggacgggtggacccgccggaggcaaatgtccccggcaggctcaggtctctctgaggctccgggtggggaggcaaa

SEQ ID NO: 327599 - DNA, 122 bp, Homo sapiens
acgcagtcccaccgcggcccaccgcggctcccgggcggcctgggctgtacctgtgcgcggcgtcctttctgcgctgagccagggcaccccggagcctgcggcctccttccccgcccctgcgg

SEQ ID NO: 327600 - DNA, 122 bp, Homo sapiens
agagcatgggaaccgtgcgtgggcccctctgccgtccgcgtgcgccctagcctgaataaccgcgcccacgcctcctagttaggggtcagcccattttgggcctccactgccggctcttcccc

SEQ ID NO: 327601 - DNA, 122 bp, Homo sapiens
ctcatcaggcgagtgccccgcgtccccctgattgccgtgcgcttccaatcgccttgcgttcggtggcctcatattcccctgtgcgcctctagtaccgtaccccgctcccttcagccccctgc

SEQ ID NO: 327602 - DNA, 122 bp, Homo sapiens
aaacaaatagccatagtgactcatcccacattaaattcatgatcactgacctgaagtacacgcctaaagcaacctgcaattattctttcttcccccagtctattctctccatttcttttaaa

SEQ ID NO: 327603 - DNA, 122 bp, Homo sapiens
tatcaacatttactcaattagaaattaaaattggtatttctaagcgcaagaatacacatgcgcacattccattaaccgccactgcaatggcgtcatcacatgttatgtgatcactggaaatt

SEQ ID NO: 327604 - DNA, 122 bp, Homo sapiens
ttcaaattgcaagcaaggaggccgcgaggcctgacgggatttgtagtcggcgctagacgccggcgcgcacgcgcagccggggccggggcggggcggcggcactgcggtgaaagccgaggcag

SEQ ID NO: 327605 - DNA, 122 bp, Homo sapiens
gtttttgtgagcaggccccaatcgcggtgtgggcggagcgagcggctgagaccacgaggacgcaaggccagcgccgccagggagacgagggaggggaggagcctgaggagatcggagtgctc

SEQ ID NO: 327606 - DNA, 122 bp, Homo sapiens
aattgagaatagaacgggagacacgctgtataataatgatcatgcccatccacctcaccacgtcccagcagcaaccttctctcttcaattcaatacctattgcatccacctccccctttctt

SEQ ID NO: 327607 - DNA, 122 bp, Homo sapiens
agtcccaaactcaggaggttcctgtcccaagaagcaatgtaaagtttgaaacgagccgagcgcggtggctcacgcctgtaatcccagcactttgggaggccgaggctggcgaatcatttgag

SEQ ID NO: 327608 - DNA, 122 bp, Homo sapiens
gcggtccctgttgcaagtcatctcccgaaagggcggggccggggctcatcccggaaggaccggtgtctaggtcaccctggagcgctcaccccaccggcacccgtgcccaagcccgcccctgc

SEQ ID NO: 327609 - DNA, 122 bp, Homo sapiens
atccatcctcctcagcctcccaaagtgctgggattacaggtgtgagccactgcacccagccgagtcgtgtgatttctaaggtaatagctgaaatattttgctgtgagatatatatgtatatg

SEQ ID NO: 327610 - DNA, 122 bp, Homo sapiens
ctgaccgacgtttccatggcaggtcgtctgcagggcctggagacctggcctaggtcctcccggggcctgccggaccacatgttgcacatgggcctggtgtccgttgcaggtctggggggtga

SEQ ID NO: 327611 - DNA, 122 bp, Homo sapiens
gggggtttacgcagcaaagcctgaggtcagtcggatttccttgctcttccccttggttcgcgtggtcccatctgttaacagacctggatcctggacacaagccccatcagagggagagcttc

SEQ ID NO: 327612 - DNA, 122 bp, Homo sapiens
ttagtggaatgtttgaggttaggcacctgaatgaatgggtgtttctctgcagataactagcggcattgtttgaggaaattgattcccaaaaaacagtgcttatctaagatgctgtagtaaat

SEQ ID NO: 327613 - DNA, 122 bp, Homo sapiens
agctgcgcggcgtccttggaggcaggtgctggcggcaagacgagctctcggaggatgctgcggcgcggggcgcgtcgcccccctcagtccaccagagcccggatacctcagaaattcggctc

SEQ ID NO: 327614 - DNA, 122 bp, Homo sapiens
taccgtaaggctgactgtagacgtactcgggatctctcgtcgacttgtcctcaatgaccacgctcgagcgtaccttcaccctagagaaaagcctccactttgggcaccagatgtaggggtgg

SEQ ID NO: 327615 - DNA, 122 bp, Homo sapiens
cttcctcctagtgtcaccttggcccctcttagaagccaattaggccctcagtttctgcagcggggattaatatgattatgaacacccccaatctcccagatgctgattcagccaggagctta

SEQ ID NO: 327616 - DNA, 122 bp, Homo sapiens
tgcaaggacaaatctgacgaggaaaactgcggtatgggcggggccagggtgggggcggggcgtcctatcacctgtccctgggctcccccaggtgtgggacatgcagtgatttaggtgccgaa

SEQ ID NO: 327617 - DNA, 122 bp, Homo sapiens
gtgttcctggtcaccccagggcagctccagataacgtggcaggcaagagtcacccagatgcggccttcgccccaggggctgaccgcacaccgcagaccgccctcgcccccaccccagcagag

SEQ ID NO: 327618 - DNA, 122 bp, Homo sapiens
agagcctcggccctagcattgcacttggcctcatgctggagggaggctgggcgggtacagcgcggaggaggagggaggccaggcgggcatggcgtggaggaggagggaggccgggcggtcac

SEQ ID NO: 327619 - DNA, 122 bp, Homo sapiens
ctatttagttaattaattcttgggtcatttattgttacccagtttttaacctgtttttgacgactgtgtctctgtttatgcaagaggcaaattgtctagaaggggtgtagctaggtattaaa

SEQ ID NO: 327620 - DNA, 122 bp, Homo sapiens
tgcctaccaccgtgtcacaattgcctgtggtactctgtacagtaacgccttgtccagcctcgcgatgacgatgatgcttccataaggccctgcatgggataaagcagtcccacatgaccaga

SEQ ID NO: 327621 - DNA, 122 bp, Homo sapiens
cagggcctttaatgtgctaatacgcatggcgaatctccaagagggaggcagagcatgtggcgcagcccagccttatgtgaccaaggaaccctttcatcacagtggatttctcaggaccaaag

SEQ ID NO: 327622 - DNA, 122 bp, Homo sapiens
cccccatacttgctctggatctggatggggctggtttgggtcccgtaaggatgctgcttccgtaggctggtgacatctctaggccttgtgccctcaaaccccccccctccaaggccttctcc

SEQ ID NO: 327623 - DNA, 122 bp, Homo sapiens
acctgacaacggtcagcccacagggcattgccttgagaaggccatattgttctgcggggccggggccctggcccacggggtcctgagacgtgaagtcgagcgaggcatgcggaagactttcc

SEQ ID NO: 327624 - DNA, 122 bp, Homo sapiens
aatatgagctgctgtttttacattattgttgttgttacacacagtagtccccaccttatccgcggtttcactttccacagtttcagttacctatggtcaactgcagtctaaaaataggtgag

SEQ ID NO: 327625 - DNA, 122 bp, Homo sapiens
cctggaactggagcagccaagggcaggtctacaggtcactccaaagacaaaggttcagcccggtgaccagcttgaatgggagaaggcaggcagggcagcctggccatcacccaactgcacaa

SEQ ID NO: 327626 - DNA, 122 bp, Homo sapiens
agtaaaaaattcaggctcttaatcacagaaatgtactgcttcccaataacaagtgcctctcgaggtggcccaagtaagccccttttctgtggacttgaaagaaactatctctcacattctga

SEQ ID NO: 327627 - DNA, 122 bp, Homo sapiens
taaattctgcttggattcatagaactcacatggacgcaatttccttttaatcagttctaacgtacctgtcatttctcgaggtaacccctttttctgattaggccagcaataaaacgactaga

SEQ ID NO: 327628 - DNA, 122 bp, Homo sapiens
gagccaggagaggctccactaagactttggcaccttttcaggcctggtaagaaacatttacgatctactctctttgaagcccgctacctggaggcttcctctgcataaataagaaccttggt

SEQ ID NO: 327629 - DNA, 122 bp, Homo sapiens
aacgcctttggctgcaggtgaaaaatgggttgtagggcaagcctgagaggtgttgggagtcgctgtggccagtgttaggaagcagttccacagcgccacctcaaggaacccccactccatgg

SEQ ID NO: 327630 - DNA, 122 bp, Homo sapiens
ggcaagatggctacggcagggggtggctctggggctgacccgggaagtcggggtctccttcgccttctgtctttctgcgtcctactagcaggtgaggcctccccgcccgtgagctccgttct

SEQ ID NO: 327631 - DNA, 122 bp, Homo sapiens
cgcatccggcgccttccaggtggggcgaaggtcgagcgccagaggctggcgagggacccccgcccagcttgacgcccagctgcgcccgacgccgggggaggcggagcgcggggaacccgggc

SEQ ID NO: 327632 - DNA, 122 bp, Homo sapiens
ccactagctgttgttgactgggagccccttggcttttaagcaggatttgacccaagggctcgcagtgcgtggtgggtccaggggcaggagttgaggcagaaagacaagggcagggacagctg

SEQ ID NO: 327633 - DNA, 122 bp, Homo sapiens
tccacctcccctcagccgagcctagagtagaggggccaggcatcctccccaggggaggggcgttgaagcaaggagcctctcctgggctgtcctagcctcacatttacttgaccacaataacc

SEQ ID NO: 327634 - DNA, 122 bp, Homo sapiens
cgctctagccggctctatctcgctgccccgccgcgggcgcagagctggcgctctagcccacggagttggttaactcctctcaccggcccctggaaagggttccaagtcctttagtacccgac

SEQ ID NO: 327635 - DNA, 122 bp, Homo sapiens
agctgacgcggcggcggccaatgggagcgaacgccggagcccgctccccggggaccgcggcgaccgaggcagcaaagttacaaacagcccccagcccgcccgcccgccgcccgcccggcaga

SEQ ID NO: 327636 - DNA, 122 bp, Homo sapiens
gtatccacagtacaaacctgtctacaaaacccagtgtttgcttgagagctgtatatttggcgtgtaacattgtggctggcatatagtaggcactcaataaatatttgtggaatgaatgggtg

SEQ ID NO: 327637 - DNA, 122 bp, Homo sapiens
ctaagtaacaaagtgttgcgagagccgttcacagtgggcttgctcacttcctcttcctgtcggctgcagtttcccaggcggtgtctccggggttgggcacacgagagtagcgggcagaagcc

SEQ ID NO: 327638 - DNA, 122 bp, Homo sapiens
agagggaagtgagatggggactacggggtctccagtggttcaaaccctgtcgttcctccgcgttacagagctacagcggtctccgggtggcgaagtgcggagacggggttttggagacggtg

SEQ ID NO: 327639 - DNA, 122 bp, Homo sapiens
cagacctaaggtctgtgttgatgttaatgctggggggatctaatgaggcgtgtccacccccgtctttcatcatggcctgagctagattttcaggttaactctggaatgcccttggccaagag

SEQ ID NO: 327640 - DNA, 122 bp, Homo sapiens
agctgcgcctgtgagggtctgctctgctgttgtgcgcatgtctgtcctcgatctgcgagtcgggctgtgtgtgcctgggcggagtctgcctttgtcggtctgtctgtgctatttctgtgtgg

SEQ ID NO: 327641 - DNA, 122 bp, Homo sapiens
tcctgaagacagcccttaaccaatgactaatgatatgagtaaactctgaggtgtgacctacgttaacaccagaactaccctgagggactgagctaaaattaccctctatgggaccttccttg

SEQ ID NO: 327642 - DNA, 122 bp, Homo sapiens
cccacggtgtccggcggccctgtctcctgagcgtcgggtttcgtcagttggattcagacccgcgttcctcctgaaaaggatcggaaagctgggtttttaatttttctgccatcacgtttccc

SEQ ID NO: 327643 - DNA, 122 bp, Homo sapiens
agacgagagaacggaaggacgttagtgactaacatctgggtaagcccgggctcttggccccgccctcagccccgcccccagctggccggcttctccagccctcccctccccatccgcacccc

SEQ ID NO: 327644 - DNA, 122 bp, Homo sapiens
ttcagcgcaggatcagagtcccccatccccaccccacgcgaagggacgcaggattgacagcgaccctgaagaaatgcagtcgagagctattgtgaaagggcgctggcccggaggccccccag

SEQ ID NO: 327645 - DNA, 122 bp, Homo sapiens
gaagcgccgccgcctccagtccctcccaaatccgaggcggtgagtgagcgcgctgggggccgagtcccgggtccagccagggcccaaagcccgttctcctgggccccggccccggagtatgt

SEQ ID NO: 327646 - DNA, 122 bp, Homo sapiens
gctcatagacacttcccagacaggtgaggcgaaatgggtcctttcaaaattgatcttagtcgatgaataagtccactcgctacaggctaaataaatacattcatactcaccagctgccttct

SEQ ID NO: 327647 - DNA, 122 bp, Homo sapiens
gaccggccccgcgaggcgcgcagggtcctcacttgtggaaagaaacgggcttgtccttgtcgtagcggttcttgcagccgtaggcggagcaggactgcaccatccttccggtcctcaggcac

SEQ ID NO: 327648 - DNA, 122 bp, Homo sapiens
accatgatcagagagacacattccctgcggacggcgctcccatcggatactggagggacgcgacactagaggcaggcagtacttcagggtgaccataagtctcccaaacagccacaacggct

SEQ ID NO: 327649 - DNA, 122 bp, Homo sapiens
cattttttgtcctggtgttccagctgggacgattcactgaagaggacaaaacagctgtggcgaaactggaggccatctttggagcagactttacgaaatacgcgattatgctgttcacccgg

SEQ ID NO: 327650 - DNA, 122 bp, Homo sapiens
agccaggtttccagctcctaggtttgaaaagttctatgtgcgcttgaccggggggccttacgtacgtgaattgggtgagggcctgagacaggcgggtgagcacttgccccacactccagcca

SEQ ID NO: 327651 - DNA, 122 bp, Homo sapiens
cactaggtctaggagatgtacctttccctcctgccgtatgcagcattttcaggtgatccacggtcatctgcaggatctcggctttttctagcttagcagatccctaaagatgagaatggcaa

SEQ ID NO: 327652 - DNA, 122 bp, Homo sapiens
agggtgcaccgccgctggatgggtgcgggtcgctagccaggtcaggcgttctgtggcctccgcccctcccccggggtccctgggctcggtgccccccgggtggactcgcccccactccgggg

SEQ ID NO: 327653 - DNA, 122 bp, Homo sapiens
cgcggcgcgtccggcgctgggggactgttgggtcagaaagtcttcagggagcagctgttgcgccctccctaggcccgccgcttggagacgccccgccccctgccttcaacggccgcccggcc

SEQ ID NO: 327654 - DNA, 122 bp, Homo sapiens
tcgcccgtcgcgcttaccttccgtttttgcgatttctgctccgaagaccgagggcgggctcgtcgcgtccaggaccggctcagcagcacatagaggggaccttcctggcgtgcaaagcgctt

SEQ ID NO: 327655 - DNA, 122 bp, Homo sapiens
gcaaagccagctgcttgcacacaatccccaactccccacggcccccacagaacagttcagcgatgaggcccctcaagtcccatggacgaagacggcttcccggaccctgaagtccaatctcc

SEQ ID NO: 327656 - DNA, 122 bp, Homo sapiens
gcccgccttcctcgcgggcagcggcgcagcctgcggggcgctgcttctcgggctctgcgccgccctctactggcgccggaaacagcgcaaagagctcagccactacacgggtgagctcccgg

SEQ ID NO: 327657 - DNA, 122 bp, Homo sapiens
catttactcttttgccaccttgtggtcagagttggatttatcacccaggtgcatctactgcgaaggagagctgtctctcctaaggatagccccaactgcctgcattctgtcagatctttgtg

SEQ ID NO: 327658 - DNA, 122 bp, Homo sapiens
ggggccggaggggggatagggccgggatcaggcgctcgggtcgcgggtcctgagcaggagcgcagcagtgcccgggtctcgggtgcgtagccagccaccgctcgttcctcgcgccctgcgag

SEQ ID NO: 327659 - DNA, 122 bp, Homo sapiens
gtgccctctgcaagcagatgccgggagcctgggtccactcaggtgtcactgcgtgaatctcggccttgaacggctggactggaagaatccatccaccctcaggtgtcactgcgtgaatctcg

SEQ ID NO: 327660 - DNA, 122 bp, Homo sapiens
ctccagagggtcaaggggactccagacaatagcgatcacagtcggccaaaagcctctgtccgctcccactcattcgcccagctcatcttggcattgaaaacggaagccgggtctgtctggaa

SEQ ID NO: 327661 - DNA, 122 bp, Homo sapiens
gcatcacgggagctcgcggtgcgcccgggtggcgggctgctttccacgcacctgcacctgcgcagccctccaaggcgctcttttggaggagggacttctctttcggtaaccagctcccttgc

SEQ ID NO: 327662 - DNA, 122 bp, Homo sapiens
acccatatacccgctacctagaaaaaacattaacattatactatacttatttgatctatccgtcaacccaccttatgcctttcaaagtaagttgcagttatcaatacatttctccctaaata

SEQ ID NO: 327663 - DNA, 122 bp, Homo sapiens
tttagggacacggggcggctgtggctgtggcccacggctcgtggggagcccgagtctgtgcgcagggaacgccgctgcgtggcctctctcgggcctgtgccgcggaggaaggcggcgcccgg

SEQ ID NO: 327664 - DNA, 122 bp, Homo sapiens
ccgaggtggtcggcgtcgggggacagttcagtcgattgctgccgggacaaagtgtaaagccgaggagtgtctattccagagtggggtcattaaaagtgattagctctagagtagtgttaaaa

SEQ ID NO: 327665 - DNA, 122 bp, Homo sapiens
ctttttgagtaaatcaaccttttatgccaaagaggtacaaagccaatctggtggggaattcgggaaaggggagttaggggtggaagggagaaagaaacaggaacccctctaagtggatcact

SEQ ID NO: 327666 - DNA, 122 bp, Homo sapiens
caggactaggttgctgacccacagcagagacgtgtgcacagacatgagcatgtcaacacacggacgacacacgggcctgggtccggggacacagagacacagacacaggggaagacatgcag

SEQ ID NO: 327667 - DNA, 122 bp, Homo sapiens
ccggggcggggtgagccggggctggagggcgggctggggtcgggcccagtcggggctgcccgcggggccgggagcggggagcgtgctggtcgggagcggctcctccgccggcttttttcacc

SEQ ID NO: 327668 - DNA, 122 bp, Homo sapiens
tatgacaacagtagtaagagaagaaggttcagaggatacaaggtaacacacctacataaacgacctactgggtacaaatattgtaaatcaacataggcctagaaaaggtggtcagatgctga

SEQ ID NO: 327669 - DNA, 122 bp, Homo sapiens
cctggagagcgtgaggactcgctcggcgtgctctgcctccaccctcagctctctctccttcgtctccagcctgcacgaggccgactcagccagcgcctcctccgtcagcctcttttgcagct

SEQ ID NO: 327670 - DNA, 122 bp, Homo sapiens
aggaggggcacacagagcttgaaaccaccgcccccagtactccccctctcccccaaggtgcgtcctaggcaggtccagtgacaaacatacacaatttctagagttaccgcggctggcaagag

SEQ ID NO: 327671 - DNA, 122 bp, Homo sapiens
tattacgaactcaaaagtcaaccgctgaagagcaggtgagtggtgacagctgggcagaggcgcaccgggcggctggggggcactgcgtctgccactctggggcgaggagagcgggtcgcggg

SEQ ID NO: 327672 - DNA, 122 bp, Homo sapiens
gccggtgctggctgggagttctggtctcaggcaaggtggggactgggcacatcatcaatacggtaagcacacaccagtttgtgatgataatgatgatgctctttgtttcctctgggtacaga

SEQ ID NO: 327673 - DNA, 122 bp, Homo sapiens
cccacccccaacacactcacttttctctgttaaaaatcacgaagtcttgctggatggcatcgaggcagtcttgaagatagtcattctcctgtggatggaaaggcacacgtgagcgtggggga

SEQ ID NO: 327674 - DNA, 122 bp, Homo sapiens
acaaggttgccatggtgaccacgaccaggcagatgaaacgaccccagctgaccatggttacggtaccaatccccggtcctcttccatatctccatgtggacgttaatcccatctgcacactt

SEQ ID NO: 327675 - DNA, 122 bp, Homo sapiens
cccaggcagattctggccctggagtacaggcctgcgctgtcctgtgctgcgtgctattgtcggctgtggaatggccgccaaaatcccagctgtgctgccagaacctaatcccctgttccgct

SEQ ID NO: 327676 - DNA, 122 bp, Homo sapiens
ctggctcagtaaaggaagttaccaaatgagcctcaatctatttcaagtcatatctagtcccgtacccctcattctccttccttagtatttgaagacaacaggttcagttggcagatattgtt

SEQ ID NO: 327677 - DNA, 122 bp, Homo sapiens
ctgtagtgaggcctatattcacctccccaggactctcagtttcttatcctatacaggagccgatggcaaacattttctgcaaaagtccagagaataagtattttaggctttaggggacatac

SEQ ID NO: 327678 - DNA, 122 bp, Homo sapiens
tgggaagtttagagattaatgttatgcaaacctaagcttgaggcagtaatactcaaggtgcggacaatacagaagcagtgtatgtactgttttgtttttgtttttgagacgctctatcaccc

SEQ ID NO: 327679 - DNA, 122 bp, Homo sapiens
ctcagctcccagacaatctcctctaaaaagtctttcctgactctccgactgtacggggagcgccaggagacccgggtgccctgtgcaaacccctctcacaccactttcaccactcagtaact

SEQ ID NO: 327680 - DNA, 122 bp, Homo sapiens
atcatccagcaaggcaaacgcgaaatcggcagcacgccacctctggtactgcacctctgacggacaggagggcaaccaactgccttaaacaacgggaaggaagaggcggtctaaattcgtcc

SEQ ID NO: 327681 - DNA, 122 bp, Homo sapiens
cccttcaggccctcctcagcaaccctgtctaaaatatttcaacttgctgtttttactcatcggactcttccttttgtatcattttcacaacttataattatatatatgcatatatttatata

SEQ ID NO: 327682 - DNA, 122 bp, Homo sapiens
catataacaagtatgtagcctttgcaatttccagggcagtctacaggtttaaaatctggccgtcctggagaatgggcagaagaaagctgaagggagccttttcccacagcccttcccttcct

SEQ ID NO: 327683 - DNA, 122 bp, Homo sapiens
gactgcagccttgccagctgcactgggttgtagtagaccccatgctgcttaatatagggtcggttgaccgagggcggggaagccttggaacaacccccgctttcttctctgggattgatgtg

SEQ ID NO: 327684 - DNA, 122 bp, Homo sapiens
aagcgctgtctgggaaagcgaactacaagtcccagagttcctcgcgccgggggctgtcctcggactgctccaggcattgtaaggctcttctgttggcccagtctgagctgctgctccgcctt

SEQ ID NO: 327685 - DNA, 122 bp, Homo sapiens
gtcccccgccctctgacgcagcgtcctgagccgtctgctcccagcgccccatccgggccgcgcaccgtggggttctcctctgtagagcggcctcttcttggtcactcactcatatattcagc

SEQ ID NO: 327686 - DNA, 122 bp, Homo sapiens
agtggggggccaggaagccaagtggtcatgctgtgtcaggacaggtgggcacctcagctgcgtcaggtgccgccagcggctgggtgggaggggctgaggaccaagcccccaccaggcagagt

SEQ ID NO: 327687 - DNA, 122 bp, Homo sapiens
cacttgtgaccagagagggccagtacagggcacctgcaccatcactcttcctgacagattcgtggcagacatcactagtccatcccagcaccatttcccacggagccccatgatagctccag

SEQ ID NO: 327688 - DNA, 122 bp, Homo sapiens
ctcgcggtgagtgttacagctcttaaggtggcccatctggagttcgttccttctgatgttcggatgtgttcagagtttcttccttctggtgggttcgtggtctcactggctcaggagtgaaa

SEQ ID NO: 327689 - DNA, 122 bp, Homo sapiens
cagctgtgtgtgtccagagtggtgctgacagcctctgttttcggcaggggccggcactggcgatgttgctgtggtgatcgtggacccacagggccggcgggacacagtggaggtggccctgg

SEQ ID NO: 327690 - DNA, 122 bp, Homo sapiens
ggcaagcacttacatagtgatcctatgtattctaagcagtttacatgtattactttatttcgttatcacaatcccctacaaaacaggagttttttttgttgttgtttttgagacagggtctg

SEQ ID NO: 327691 - DNA, 122 bp, Homo sapiens
acggtggccgccctggaggacgagctgacgcagctaatcctggaggggctgatcagtgcccgtgtggactcacacagcaaggtggctgtgggctgcggggcggtgggggcagctgggggtga

SEQ ID NO: 327692 - DNA, 122 bp, Homo sapiens
aattcttcttgggattattttggacctgtctcaaacttacttgcctttttctctccattacggtgagaaatcactcctcatcatttctcagcaggatctctgagtgctcgctaagtgtaggg

SEQ ID NO: 327693 - DNA, 122 bp, Homo sapiens
tgccacaggtgagctagggttttatgacagccgtggctgcagtgagtctcctcgacctctcgccagctgttacccagcaaagcaccttggggagggtggggctgcccacttccggggagggg

SEQ ID NO: 327694 - DNA, 122 bp, Homo sapiens
cggctcctgctcccaacacaaccatggagacaggcacgtccgcataagccatcccagaaccgagtggactcactgctcaggagcacgaggaggcccttcagcctggggaaaaagctgggcca

SEQ ID NO: 327695 - DNA, 122 bp, Homo sapiens
caatggggctccccattatccccacccctttggtcccagtccccttctctgcaatgggcacgcatagaggagagacaaagggtattagacgcaacatcattggcccaggggagtccgagaag

SEQ ID NO: 327696 - DNA, 122 bp, Homo sapiens
gggtgtttgggggttctgggatgtggggcccagtgagaaagctgccccccaacactgtggcgtggagacgctcgagtgtccgcgtgacggctggggagggtgagacctgctgggcttgggac

SEQ ID NO: 327697 - DNA, 122 bp, Homo sapiens
agttaggagtagcccaaacagactacagggccgttttcccacagagcaagtgagaaggcccgtggccgcaaatcacaagcgccagctcagagctggctggcgggtttgaggtgccatcatcc

SEQ ID NO: 327698 - DNA, 122 bp, Homo sapiens
tctccacgtgccttgcatacaatagaggatcccagcaacatttgttaaaaaacccatccccggatgctcctctagacagtactatcttctcctttttgccctataaaccaactgctgtggct

SEQ ID NO: 327699 - DNA, 122 bp, Homo sapiens
ggcaatccctaatgaaagtgtgcggccaccttccaacaaaactctatttacaaacaccagcgtccgacggccttgcccggtgggccctgactcggtggcggatgacagaagcaagtgcctac

SEQ ID NO: 327700 - DNA, 122 bp, Homo sapiens
cgcgttgggggaggggaccctaggggggttggcgcggttaagagccccacgtgagaggggcggaagtccttgccaggagccggggatgcgcggctggcgggtcccttccatcacgggagacg

SEQ ID NO: 327701 - DNA, 122 bp, Homo sapiens
taagacatggccgtcatttccccctgcggatggacatactggggcacagcctcagtggctcgtgttcactcagccaaaagtagctgccaggaacccgcgcaaggagctctgggtctccgttc

SEQ ID NO: 327702 - DNA, 122 bp, Homo sapiens
tcaaaacacatgttcaaagatttgaatgaaaaaacttcgactctctctggaacatctaaccgatacatcatttgtgtgccttaaattttttcttactgtcaggaacacttttatgtctttaa

SEQ ID NO: 327703 - DNA, 122 bp, Homo sapiens
aatacctgcctcagcggattgcaagtgtttagaacagtgcctagcacatattatgtgttacgtttttgctaacttaagaaaggtggggggtcggtggaagagcaggcatcgggaaggagtca

SEQ ID NO: 327704 - DNA, 122 bp, Homo sapiens
ttaagcgaaagtggaattggcagactcgagtggtgcctggaaatggtgatttgtgctgctcggttgtggggaattgtaaggcaggaagggctggcggagctaagatccgacaggctctcttc

SEQ ID NO: 327705 - DNA, 122 bp, Homo sapiens
cctgcggctggcagcccggcctgggtagcacggtcctcggcgctcggctcggaattcgcacgcctctccgcggcgacctgtgcacagccccctcggcctccgcctccgtgctggccgccgcc

SEQ ID NO: 327706 - DNA, 122 bp, Homo sapiens
ttatcctaaaactgtgagacaagtactgttgttataagcttcattttctgatgcagaaaccggggcacaagaacttgcctataatcagtcacacagctaagaggtgttttcttctgtaaagc

SEQ ID NO: 327707 - DNA, 122 bp, Homo sapiens
gaaatgcaatcccagctagccatcagcagacaatctagaaattaatcctcaaaaaggaagcggtgacaaatgggttttataatgaggacttgaagccaggcagggcagagggcaggcgcatc

SEQ ID NO: 327708 - DNA, 122 bp, Homo sapiens
agtactccattgtgtggatggagcagattttgccccgctattcatccctcagtagagggacgcttgggttgcttccatgtttgtttgtttttttgtttttgttttgctgttttttgagacag

SEQ ID NO: 327709 - DNA, 122 bp, Homo sapiens
cgtgggagggggagccagggctgttgggcgcagccgggtaactgctcagagggctcatgtcgagcccctcggtttcctccgtcctcgcgagtcaggcggcctctgccgggcgggaggcggca

SEQ ID NO: 327710 - DNA, 122 bp, Homo sapiens
tcatttggggatctcacttctaaatataatagtaacctttcacccccacattttaagtgccgtaattacataattaaaaccaattatgtcatttaacagagactttgtcaagatacggcaag

SEQ ID NO: 327711 - DNA, 122 bp, Homo sapiens
tccagatatccgtgctgagatctgagccccgcaaatctcttcagcgaaaggaggaaaccacgttcataattagaagactgcttggaaggctggaaattgtgacctttgaagagttgaggtcg

SEQ ID NO: 327712 - DNA, 122 bp, Homo sapiens
acccctgactgtgatgaaatgcagctcctcaggaagaatcttaaaacaggatagagcacacggccccccgtgtcactcgcctgagttacaacgttcctgaaacagtaaatgaacttgacctt

SEQ ID NO: 327713 - DNA, 122 bp, Homo sapiens
ggcagcgagactcttcctgtgcacctggggaacacatgtgggtcactccaccgcccacctcgcaccagcccaaccgccccagccctgccgtgccctaccctgttccaggctctgcagcagct

SEQ ID NO: 327714 - DNA, 122 bp, Homo sapiens
tcaaatattcctcaaacaattacaaaatacagtcatcctctgtatgcatgaatctgcatccgtggattcagccaatcacttactagtttatgactctgaatgaaataatctcagtctcagtt

SEQ ID NO: 327715 - DNA, 122 bp, Homo sapiens
acttggcagagcagcggtcacacgtccacagtgtcttgctgtttctcaggcgctttcgcacgtgggggcttttcctgtgtgctctcctctgccgatggcctttccctagcctgtgtcctcaa

SEQ ID NO: 327716 - DNA, 122 bp, Homo sapiens
ggatttgagggctggaaacttcgggctatggcgcgcgggcctgggaaactttgggcggcgcgaccttgactagaagtgtggggcccttatcgctgagtttgtggtcccccttttctctcagc

SEQ ID NO: 327717 - DNA, 122 bp, Homo sapiens
cattagcttgttagtaatgctctgaccaagccgagatgcccattctcttagtgatggcggcgttagggtttgagagaagggaatttggctcaacttcagttgagagggtgcagtccagacag

SEQ ID NO: 327718 - DNA, 122 bp, Homo sapiens
tttcctgtgctgttctcgtgatagtgagtaagtatcacgagatctgacggttttataaagcgtagttttccctgtacaagctctcgcctgccgccatgtaaacgttctttgctcctgcttcg

SEQ ID NO: 327719 - DNA, 122 bp, Homo sapiens
cggccacttcatcagtcccctggcttcatgtctgtggtatgtcctcctttggatggatgtcgagtgcagacctgggacagctgctctcagggtctcctgccccaggagcagtgacgtgtcaa

SEQ ID NO: 327720 - DNA, 122 bp, Homo sapiens
gtaattttttttgagagacagggtcttgctgttgcccaggctgcagtacagtgatgggaccgtaattcactgctgcctccaactcctgggctcaagtgatcatcctgcctcagcctccagag

SEQ ID NO: 327721 - DNA, 122 bp, Homo sapiens
gcgcggcgcaaagcccggactggattccagaggggcaggcgggggtgggggcagcgggcacgcaccagagccaattttccttttctttctttctttttttaagttaccaattttctaagtcc

SEQ ID NO: 327722 - DNA, 122 bp, Homo sapiens
aaaaaaaggcgcaaaggctccgttcaggccctagatcccgcgatacaaactttctcggcccgccccagcccgctgtggcgggaacattctggaagtgacggcaatctctgcggcagtcttct

SEQ ID NO: 327723 - DNA, 122 bp, Homo sapiens
cgagcggtttttttttttttggtttgccggatccgccatattgacgaggacgggcatccgcggctgcggacgctagtctccgccgccgccggagccgcaacctctccgcacccggccccgtc

SEQ ID NO: 327724 - DNA, 122 bp, Homo sapiens
cgtggtctgcggcccggggagtgcttcgaaactactgggagcgactgctacggaagcttccgcagagccggccgggctttcccagtcctccgtggggtaggtaaagaagggctccgtgggag

SEQ ID NO: 327725 - DNA, 122 bp, Homo sapiens
gtccccttgctttatacccttcatgccctcaaggttctaccacagtgtccaggatttgtccggaggctccagacagcatgaggctccctcgaaccgccccctgaatgagttgctaacccccc

SEQ ID NO: 327726 - DNA, 122 bp, Homo sapiens
gggttccccctctggaagcggccaggtgtggcgtttagctctttgccacgggtgcgggtgcgaccaacccccaagcaggctcaaacgcgccctttcccgggtcaggccgggcggggccggtt

SEQ ID NO: 327727 - DNA, 122 bp, Homo sapiens
agctggggctcgcctgttgggagccgcgtccgccggtgttggtgtctgcacttggaaggacgtagggaatgcgttgtccctgctaggtacttttcagtcgcagagttctcttcttcttcttt

SEQ ID NO: 327728 - DNA, 122 bp, Homo sapiens
gacctcgggttagcttctgttgtctttgtggatggttttcctggagcggcctgacgttgacgtgttctctggtcccatgtcttagcggggcatggtacggtttcgtgcctgacgcgtgcatt

SEQ ID NO: 327729 - DNA, 122 bp, Homo sapiens
cacaacacagagccaggaggaacatgttagccactttctatatcagtggcgatggctttacggcatgctacaagctgtggatatgaaaatgagtgaagctcatggcgcatggtgatagtata

SEQ ID NO: 327730 - DNA, 122 bp, Homo sapiens
gtggttactgtagacgtctgaggtcccgaaacctgccttcgtgtcctagtcctggtccttcggggggccatctcttctggcctctggttccagttgtggaaaaggaatcaacgatcctgcaa

SEQ ID NO: 327731 - DNA, 122 bp, Homo sapiens
ggcggcggcggcggcagaaggttctgctgacagcggctccattataagcgctctggggcccggaaataaataaccgcgcgcacgaggcgccgccgccgccgccgccgcccggaggaaatcag

SEQ ID NO: 327732 - DNA, 122 bp, Homo sapiens
tggaacacctcttttacgcacggagactttattgagttttccagggctggcgtaacttctcgtctaaaatccgttttttcttccatcctgactggaacccagaggagggaggaggtggcggg

SEQ ID NO: 327733 - DNA, 122 bp, Homo sapiens
ccagccctccgtatccgaccagccaagacaaaccaccatctaggcccaaaggcaggttagcgtgtggcaaaacccaatagctgcattcaaaacccagttctgacaacaacaagctatttctg

SEQ ID NO: 327734 - DNA, 122 bp, Homo sapiens
aaataaaaataaaaaagtattaatgaataatccttacaacagtgatgacattttgtcatacggaatcttagagtagaaggtatctttaaacagtgcttctcaaattttaagatgtgtgtatg

SEQ ID NO: 327735 - DNA, 122 bp, Homo sapiens
ctccgtggcaggtgagagcgggagctggggcggaggctggcggggcccgtccgggaggcgcgcggtccaagtcgcaggcatctcttcgcctcttcccgtcggatcccatcccgggatgtcgg

SEQ ID NO: 327736 - DNA, 122 bp, Homo sapiens
tccgtccacttattggtggagaggcaggttggggagcatgtaccaggcctgtccccaccacgtgccaccctctctgtcttccccagggctcccagctcagtgtggacatggctgagagcgcc

SEQ ID NO: 327737 - DNA, 122 bp, Homo sapiens
ctacgagagcctgggttagctaaaacaaagacaagctacaataacgtcactggcactgcacgttggaggaagtcacaaatgtgatttcttgtttttttctgagagtatggccataataataa

SEQ ID NO: 327738 - DNA, 122 bp, Homo sapiens
ataccttctgtggggagctcttcctccatcatggccaatctgtcatctctgtcaggtcatcgtatattgagtctttttccccaaatcatctactagactcatgatttcctcttattttactc

SEQ ID NO: 327739 - DNA, 122 bp, Homo sapiens
ttggcgggaaagaagagtcctcaccactctgcatgtggttgatgagatcctttttcagagcgtccccgctgatgtcggaatcgctgtcgttgaaatcactgtcccctttaccgctgtctttg

SEQ ID NO: 327740 - DNA, 122 bp, Homo sapiens
cacacattgctggcattcgcacgcatagggaggtgtgatcgtcgctgacactggagcttccgtgtctgtgtgccaggaggctccgagatctttcccggccacacccagcactcacatatggt

SEQ ID NO: 327741 - DNA, 122 bp, Homo sapiens
cacactgcccccgaagttcctttcccattggctatctgggaattgagttttccaataatgcggacgctgattggtcaatccaggacggttgctcaagccattggcgcagccgccattggagg

SEQ ID NO: 327742 - DNA, 122 bp, Homo sapiens
gacccttagcgagtgccaggagtgccatgtctggccttgtctctaactctgtgacgagcacgggtcacttaagcttggggggcccacagtttctctgcaccatctccctcctgggagatgtt

SEQ ID NO: 327743 - DNA, 122 bp, Homo sapiens
ccgctgagaaggctcccgccagtagaccatgactggttttgctttgcattctcagtgccacgtacagtgcctggaatacaggagggtggcctaaatgttggctgaatgcatgaatggtcatt

SEQ ID NO: 327744 - DNA, 122 bp, Homo sapiens
ccggacacctgcccggcctggccttttccagccacttgcacgggcagcagttctttgggccgctgggagccggccagccgctcttcctgcaccctggacagttcaccatgggccctggcgcc

SEQ ID NO: 327745 - DNA, 122 bp, Homo sapiens
catttctgcctctccttcatcatctgtactgacttgcagtcatagtacatctgtacccatcgggttgttgtgaggttggtttttctattcttgtatgacaaacttagcagtttaaaccagca

SEQ ID NO: 327746 - DNA, 122 bp, Homo sapiens
gttgaaaacaaaaggaacccacaaaaacagagctggaccagctggtgcagcaggagctcccggagcccccgatgctgcatggcccaaatgaaaatgccttgcagtcacgacgactccgtgtc

SEQ ID NO: 327747 - DNA, 122 bp, Homo sapiens
agcggttctcctgcctcagcctcccgagtagctggaactacaggcgcgcgccaccacgcccggctaatttttgtattgttggtagggacggggtttcaccatactactcaggctggtctcga

SEQ ID NO: 327748 - DNA, 122 bp, Homo sapiens
tatttcaaagaaaatcaaacgttcgataaccgacttttggggtgactgactcaggaataacgacacacagagaggggtggcagcgcctttgctcattccagaccctgtgggctggtggcctt

SEQ ID NO: 327749 - DNA, 122 bp, Homo sapiens
gttgtttgaaacaataaataaaattgacaaatctttagggagactaagaaaaaaagacaccggagccaaataaataaaatcagagttgaaaaaaatagagacattagaactgataccacaga

SEQ ID NO: 327750 - DNA, 122 bp, Homo sapiens
cctggagccgcacgaagaggtggagaactaaggcggggcgcaggtttccagtaaagagctcgatccgtgatcctcgtgaaagaattaatgtctacctgatgaaacttcctcgagggatggcc

SEQ ID NO: 327751 - DNA, 122 bp, Homo sapiens
ccctttcttcggtgctttgccaccagcagacgccccgtggaattgaggagctttgttctacgagctcgggaacgggacttgggagggacagcccctgtcccaccctgccatgccctgttcaa

SEQ ID NO: 327752 - DNA, 122 bp, Homo sapiens
agagggtgggaagggctgcagagtcagggctgcacccaagaggagccacggagccggagccggagcggaggcccccaccgagggccccagggcctggcaggttccggaagagacagggccag

SEQ ID NO: 327753 - DNA, 122 bp, Homo sapiens
tcatctcggcgcgccgctgccagggctgtacacctgctggctgccatggctgaggtgggccgtaccgggatcagctacccaggcgcgcttctcccacagggcttctgggctgcggtcgaagt

SEQ ID NO: 327754 - DNA, 122 bp, Homo sapiens
gctcctgcgatggccccggagtgagtcccccagaggagccggattagggctggaggcggccgagtcccccgagaggcccctcccgacattcccgcccccgcgcgccgctccccgggtcctcc

SEQ ID NO: 327755 - DNA, 122 bp, Homo sapiens
gacttctgcgttaactggctttccacccttgcccagcacggttactttctcaatgatcaccgaaccgcgcaatccgacggccgtttcttggtcttcgcttcttcaccgtctctaaagctctt

SEQ ID NO: 327756 - DNA, 122 bp, Homo sapiens
ccacaggggtgaacagtttctccagaagacagctgaccgaaaccgcagcagttgccaaggcggctggaggagggcggagaaaaggcggtaactggcaggcaaggggcgtaacggggtggggc

SEQ ID NO: 327757 - DNA, 122 bp, Homo sapiens
gtctcctatgtgatctgagcatgagttacacgggcagcgactcctatgtgatctcagcagcgtctcctgcatgacacaggtagtagctcctctatgacccgggcagcgactcctgtgtgacc

SEQ ID NO: 327758 - DNA, 122 bp, Homo sapiens
aatgcctacctgggagtgctctcaggatccacgttgctcgggctggccagagtcccccaccggaatgttccacagggcaggcttaagtcacctaaggagctgcctcgaccatccaccaatca

SEQ ID NO: 327759 - DNA, 122 bp, Homo sapiens
ccgcccctgggcaggctcagacgccgtgagtcaggggcagagcagggcggtctgagcgtgcgggcgacgcgggtctcactcgtccgctccgctctggactgcgcgccacgctctggggtccg

SEQ ID NO: 327760 - DNA, 122 bp, Homo sapiens
cctccgcagagcccgttcccagcggcccggccggccggcccgggacccccacccgccccccgcggcccaaccaactattattaatggagattgatgaggccggacacgccgctttgtgaaag

SEQ ID NO: 327761 - DNA, 122 bp, Homo sapiens
gatggagctgcgggctcatcagtttggggactggcttcatcgcttgttctgtccagcagtcgcgtcttctcggactccttgttccagcttgaattcctcttttgccctggctccactctaag

SEQ ID NO: 327762 - DNA, 122 bp, Homo sapiens
gtgttcacttagcctgtcctggactctgggtgtagcatttcgatgtccagaaaatacccccggcttcagctcatcacacaaccaaggaaggagctccacactgacactaagggtgcatcctg

SEQ ID NO: 327763 - DNA, 122 bp, Homo sapiens
aatcaacaaaagggcagaggtaagttgagatggagagaaaaaaaaaaaaagaaaaaaacacgctactggaagttcacacacactcttgtgtgtgcaggaagtctaggtcaacagaggggtag

SEQ ID NO: 327764 - DNA, 122 bp, Homo sapiens
gcactccacgttctaagcggacggaagctgcccatcgagcagacaggaggaagcgcagagcgtaaccatccgtgctgttgctatgccacgctgtcctgagggacgtggcctccgactgccat

SEQ ID NO: 327765 - DNA, 122 bp, Homo sapiens
aattgtaaaagataactcaaagtggtcgccaatatttacagattgggagtttgttgctttcgggagtttttcattttttgagataaggtcttgctctgtcactcaagctggagtgcaggggc

SEQ ID NO: 327766 - DNA, 122 bp, Homo sapiens
aaaatgaacattttcaggccccactcagacctgagtcagcgctcagtgggagcggagccccgcagtcacgttgtgaccagctcttcaggtgttaggccggttgtcccttcgcgtccttcata

SEQ ID NO: 327767 - DNA, 122 bp, Homo sapiens
gggtttggaaagcgagtcggctcactagagctattgttttacaccacctgtttgtgggagcgacagctgggctgccctcagccctggagcccagggagttactgggactgtacaccattaca

SEQ ID NO: 327768 - DNA, 122 bp, Homo sapiens
aaggtataaagccctcaagtgcagggtgtggctatgaaagtcggtagaggaagtagagggcgaatgatgtttgacgcatttgaggagctctaagttgttgaatctaagttgttggatgagtc

SEQ ID NO: 327769 - DNA, 122 bp, Homo sapiens
ctccctcctcgtcctccagagtcgtgtattgcctgagtcgtgtattgagtgcttactgagcgctccctcctcgtcctcctgagtcgtgtattgagtgcttactgagcgccacctccttgtcc

SEQ ID NO: 327770 - DNA, 122 bp, Homo sapiens
ctgccgggtccggattactgcggcgacctcgggggctgcagctgcagtggcggaggcggccgccgggcgcttccccctacccagactcccggcgctggggcccgccgccccccgcagcagct

SEQ ID NO: 327771 - DNA, 122 bp, Homo sapiens
tccgagactgaagagtgagcttcctcctttttccctctgtctcccttatatccttatgggcgtgccttctaacccaggctgcaaataaaggtttgacaatcctgtctgttcagattccatct

SEQ ID NO: 327772 - DNA, 122 bp, Homo sapiens
cttggtgttcagcaccagccgcccccccagccgcatcatcttttctttcaacaacagatgcgcccgtgtttcatctatggatagagctgagccgaagaaagacattgccacagccaacagca

SEQ ID NO: 327773 - DNA, 122 bp, Homo sapiens
ccatctgattttttttaataaaagtttttccttccccattataaaattagcccatgcttacgggatttatggaaaaatagataaaaccgttgtgcaaagttccagctcccaaaggcaattgc

SEQ ID NO: 327774 - DNA, 122 bp, Homo sapiens
tgtagaataagcagagatagtcagggcttcagattatagtttgggttgggtgccagcaggcggtgtgctggggaaggccacatagcccctctgggccttgggttctttttcccatgaatgag

SEQ ID NO: 327775 - DNA, 122 bp, Homo sapiens
tgctcctgctgtgtaatcactaccttcttattattagcaagaaaacgttcttttcttagccgggtctcaaggtagcagctagtttgacaaggaaagacctttgggaagggtagcagcctaag

SEQ ID NO: 327776 - DNA, 122 bp, Homo sapiens
ctttgatttcccatcccaaagtgcttagtgcagggtaacgctcaacgtatagtgaataaacgtcaactggaagatggagctaaacttccccaggagatgctattgcctcagagaatcaaaac

SEQ ID NO: 327777 - DNA, 122 bp, Homo sapiens
tatttcttccccatggcacttggggcacttggcgcattattgtagcttctgagcttaagccgggtgtgtgtgtgtgtgtgtgtgtgtgtgtgtgtgtgtgtatgtatgtatgtgtgacgctt

SEQ ID NO: 327778 - DNA, 122 bp, Homo sapiens
gccccaccctgactcaccgggggcagtgctgacagctggttccggtcaagccacagctcccgaagattgggcagagcccccagagtgtctggctgcaagaaggaacagagaaaatagtgact

SEQ ID NO: 327779 - DNA, 122 bp, Homo sapiens
tgactgggaaagagaagaaagggtcctgccatgcctctcctgtgagccaacagtctgatgcgcacttcagggtcactgtttccagtgtgcaagtccttggctgttggaatgaaatgtctgcc

SEQ ID NO: 327780 - DNA, 122 bp, Homo sapiens
ggatctgcggagttgatagttgtatttacacgcgtccggagctgcgccccgaggtgggggcgggggctcccttcttttcccctccccttaggtcgagtttcacgcgcacgtgactcgcccgc

SEQ ID NO: 327781 - DNA, 122 bp, Homo sapiens
cccgcccgcgcggctcccggacttgagcggcggatgctcggggatcccggagctgccagacgcgcacgccccccaacacgctgcctggtccctggcccgcagccacctccttgcttcccacc

SEQ ID NO: 327782 - DNA, 122 bp, Homo sapiens
tgagaagcgcgactcagagccgggctggcgcccggaaagtttagcgacaggctgggtacccgtggcagcggcacatggcagcaggtgggggcgactcagagtggggggcgcccccagaacag

SEQ ID NO: 327783 - DNA, 122 bp, Homo sapiens
gtttgtggccccaggaccccccaatattgcagtgtgtagaacaacaactgctcttgatagcgaggttgagatgagcattccactttgtgtttctgaactgaggcatattaatggagcagact

SEQ ID NO: 327784 - DNA, 122 bp, Homo sapiens
atgtttgaatccagaattttctgcggtcttcctctcagcaacaggcagcagtagcaggagcgctcagtctacattctgcctgaaaggtcactcagtacaagaagcttttaatagcctgcaga

SEQ ID NO: 327785 - DNA, 122 bp, Homo sapiens
ttccccaggggaagtccaaatcggcactgactactcggagacgtctgtgtctgaagtagccgatccgaggctccaggagccacgtggtctgagtgaccccagaaggatgcttctgctgtccc

SEQ ID NO: 327786 - DNA, 122 bp, Homo sapiens
gcccgggcctgctgctgcagggcaggcaggcaaaggcggccctgtgcccggcagtgagatcgcccagagctggggcgaagaaagagggggcgtggggaagcagtgcggagcctccgggacta

SEQ ID NO: 327787 - DNA, 122 bp, Homo sapiens
tgtcagagtgaggctatcatcacacatcgcaggcatctggaaaactccactgtacacttgcgggagaaggcgaggaaaaggcaagtaacaagaatagttttgaccttgtggatccatgaaag

SEQ ID NO: 327788 - DNA, 122 bp, Homo sapiens
acaggagtcataaagatcaggccccagcgccggacacaaaggccaagggttcccgggagccgcgggtattcagagccaggagaggggtcccggcgcggagggtgctgcggcccagcctcctg

SEQ ID NO: 327789 - DNA, 122 bp, Homo sapiens
aggaaaacgcagcttgagatctactcgaagaactgaccctcagctctcacaggctgccgccgagctgcaagcatgccgccgctccactcgggtaaacttcggagtgagttacctgcactcgg

SEQ ID NO: 327790 - DNA, 122 bp, Homo sapiens
catcagacgccagggacagctcccacgtgccccgcggcctctggcacacggccagacgcccgccaggctgagcccccaccaggccctacctggcgagtgcagggacccaggctggcccgtgg

SEQ ID NO: 327791 - DNA, 122 bp, Homo sapiens
gtggagagggtggagcttgggaaggaggtgatagcaacaacagatcctgagtaactcatccgggctgcggccaggacaatgaaggaaccaaccagctggattttctggaaaccagccctaac

SEQ ID NO: 327792 - DNA, 122 bp, Homo sapiens
tttcttcattggacatatcttccagacagaaaataaacaaagatacattagacttatctgcgctatagaccaaatggatctaacagatatttacaaaacatttcatccaatggctgcagaat

SEQ ID NO: 327793 - DNA, 122 bp, Homo sapiens
ctggagagcttgatgacggattgggcttgtttttctcggtctgttttcccccgaggagagcgcacacactggggggcaggaactttgtttcttttgagcactgacgcctcccagtgcctaga

SEQ ID NO: 327794 - DNA, 122 bp, Homo sapiens
catgcacacagcaggctgctttctgttctgcaactccccttagccagatagtggagcagccgggcaccaaaggcacccagacaccaggcctgaccagcctctagggcttcctgctccagctg

SEQ ID NO: 327795 - DNA, 122 bp, Homo sapiens
gtgtccatcaacacacaaattcgtaaaaaacacacatggcctcgccatcgtgggtaaaatcggccccacagcacgtctgcaccagcgggccgttactcccatgccgttcttctgtgtaatat

SEQ ID NO: 327796 - DNA, 122 bp, Homo sapiens
ggtgcgggcagactccgccagcgccgcggccgcggtcgggctggctctgcgctggggtcccggctgagagcgccacctctcctagcccaggcagctgccgcagggactctcctgcaccgcgc

SEQ ID NO: 327797 - DNA, 122 bp, Homo sapiens
ggccgagccttcaacctcggagaactagacgagaagataaagattcccttcccaaattctcgcaatttgcgaccgcggggctcctagtccaaacaggaagcggcaatagcctgggtcgcagg

SEQ ID NO: 327798 - DNA, 122 bp, Homo sapiens
ctcggtgggagctgagcctgtcactcatcctctgcgaggtgcagccttttctccttcctacgggagatcagtgtttaccaatccaaagaagatgctgaaataaaactccacaaactaagtca

SEQ ID NO: 327799 - DNA, 122 bp, Homo sapiens
ctccacagccagctccgaggctggcccacagctgcacagaagagaacgcgtgtgtgctcacgtctcctcccccagtagcaccagtgccatttgtgactctgcagtgaggacgtgggtatgac

SEQ ID NO: 327800 - DNA, 122 bp, Homo sapiens
gctcttcctgctgcgccagtgcctgcgctcgctgggcggctatgtgctgtcgctcgtgcacgatgtgcgcttccaccactttcccatcgagcgccagctcaacggcacctacgccattgccg

SEQ ID NO: 327801 - DNA, 122 bp, Homo sapiens
ggggctggacgtgtggatgtggaactgcggccacggcacagttccggggccttccatgcacggaaggaaaagccgtcagttatcgaacgcctgctcagctctgggtcgcctgtttaccaagt

SEQ ID NO: 327802 - DNA, 122 bp, Homo sapiens
agattaaaacccagacaggggaggttaaggacaaaaaccgcagccgcgctgagtcgttaccgtccacaggacactggcggtccgagtcgctgctcatctccgctcccccactccaggctgcc

SEQ ID NO: 327803 - DNA, 122 bp, Homo sapiens
ggggtggacgtggctgggagacagccctgctctctggcaggctctggggagtgtgtggtacgtggcatccgcactggtgggtgtcgtgcgatgatcgagacacggatactgggtgtctttcc

SEQ ID NO: 327804 - DNA, 122 bp, Homo sapiens
tgcccttggtctacgacagtagccaaggtcaggagtggcaccgtctggagcctgggatcccggtgcagagggctcaggtcccagcagggtcaagccacagagccgactgcagcctcacagac

SEQ ID NO: 327805 - DNA, 122 bp, Homo sapiens
aactttgaactctccatttcaaaaactgaatttctcctccccctggttaggaaaagcatccgatgccgagcgtctccattcaagctctccaaactttcagcattttttcatttgaagcttgt

SEQ ID NO: 327806 - DNA, 122 bp, Homo sapiens
tgaacccccaacagagccaggcctagcacagaaagccctgcctgaaagtacctggagacacgagtctgtcagtcttgcctcattaagtgtatggtcgaatttctgtcactcgaattctgtca

SEQ ID NO: 327807 - DNA, 122 bp, Homo sapiens
aaaggtggtcacgaagggtagggtaggatggaggaaacagagggatgaggccagaggctgcgaagctgcagttacgtgggatggacaagtccacacatccggcgtacagcacgaggaatcta

SEQ ID NO: 327808 - DNA, 122 bp, Homo sapiens
ccgcggccggggtaacagaaacgccggctgcgctgaagttcttgttaaacagccccgcgtcggggctgtggtcacagtaaagcaaggcgatcttcgcacacagcaagtgcgaggctctgggc

SEQ ID NO: 327809 - DNA, 122 bp, Homo sapiens
gaaatgcctggactacctattcgaaaactttcatcttcattcttcttagagacattatgtcgtcatcacctgctgccactagatggtgcttgtcatcgaaacaaaggtccttcctcctttct

SEQ ID NO: 327810 - DNA, 122 bp, Homo sapiens
ccacactcacgtcatcgccatccacgccgggtccacactcgcgtcatcgcccacccgcgccgggtccacactcgcgtcatcgccgtccgtgccgggtccacactcagtcatcgccgtccgcg

SEQ ID NO: 327811 - DNA, 122 bp, Homo sapiens
gcctccgcccgctggccgcactccgagcctcgcgcctagctcccaccggtgccgcgacgacgaccacttccgtgtccacgtcaccttccgcgaccactgagatgggctgggccagagcggcc

SEQ ID NO: 327812 - DNA, 122 bp, Homo sapiens
agcggctcccacccgggaagggcgcgggttccgaggggcgccccgggtcttcctcgaccccgtttcccattggcctgccctcttgcccgcttccccaggaggggcttccagttgcctttaca

SEQ ID NO: 327813 - DNA, 122 bp, Homo sapiens
cagtgacagtgatcctggtgcccgtctcagcacgcctgttgtctgtccccctgtggatgacgtggccgtgtctgtgaccgtggctgggtctgtgaccgtgaccatgtctgtgactgtggctg

SEQ ID NO: 327814 - DNA, 122 bp, Homo sapiens
ttaaaaaaatttgcatctgggatttttataacaatataaaataattccatgctcttttttcggtgtgaaaagttcctctttgaaagaaataggattttgtcaatatctccaccactagcata

SEQ ID NO: 327815 - DNA, 122 bp, Homo sapiens
gggatttgaggagcccctctgcctggctgcccagtctgggaagtgaggagcgcctcttcccggccaccatcccgtccaagaagtgaggagcgtctctgcccagccgcccatcgtctgagatg

SEQ ID NO: 327816 - DNA, 122 bp, Homo sapiens
aaaggggagaagggagaggtgctcggccgcagccaactccaagtggctccatgcagcaggcgaacaaagtctccttgaaggccacctggactgacgcggagtccaagcagcccaggtgggta

SEQ ID NO: 327817 - DNA, 122 bp, Homo sapiens
ggcagaggcgcctcgcagcgcgtggccaaacgtgccgcctccagaaaccgagggcgccggcggtgggaataccaaccttcacttgaaaatttatgtaaggaaagcttggcggcgaaacagga

SEQ ID NO: 327818 - DNA, 122 bp, Homo sapiens
cttctcagtacagttacacaaccttggttttgagagcagggacccatatgagtaatgactcggggaaaacccagaagagagtaaagaatgtggatctgctagatgctaaaaaacattccaaa

SEQ ID NO: 327819 - DNA, 122 bp, Homo sapiens
gcgtccacatgcccagcctgtacagctgtggcagcagctacggcagtgagaccagcatcccggccgcggcccacaccgtcagcaacgccccggtcactgagtacatgtgagttgacgtgggc

SEQ ID NO: 327820 - DNA, 122 bp, Homo sapiens
tccgggaaggccaggctgcctgggatgaggtggcagctcaaggagaaaacctcctcctctcgggctttgccactccaagactggccctttaaactggagaccatgatgtcaccatagacagc

SEQ ID NO: 327821 - DNA, 122 bp, Homo sapiens
tcacccatttaagccaggaacagaacactgaatcaatccattctttgatcactggcagcacgttcttcctagatgcaagatcatcccttcctccccacctccagggcctcaaacctgctttt

SEQ ID NO: 327822 - DNA, 122 bp, Homo sapiens
cacaaggcagataccttctgtccaacagctgcgttatccagacccacagcgtgggggaaccggcacagcaaatggtttacaaaccctaagcacagcttctcctggccgcggctgtttgcatc

SEQ ID NO: 327823 - DNA, 122 bp, Homo sapiens
ggtggccaccaggatttgccgaggagaggagcagaggttcacctgctacatggaacacagcgggaatcacagcactcaccctgtgccctctggtgagcctagggtgaccctggagagggtca

SEQ ID NO: 327824 - DNA, 122 bp, Homo sapiens
ctcggtggggctggagcggctggcttacctcctcgtggcttacagcctggacgcctcagtcgcctcactcctgggcctgctgggcttgtggctgccacgcccggtttccctcgtggctggag

SEQ ID NO: 327825 - DNA, 122 bp, Homo sapiens
cccccgaccccaggccagggcctctctggtgtgggggctgctgcccatgggtgtcagaaacgcggggcaggtgaggctcctgcaccagcagcagcaacagccgcagctgactgcacccaaga

SEQ ID NO: 327826 - DNA, 122 bp, Homo sapiens
cttgtgggtcctgggtaaaaacttggtgaggtatttctgcccatcccaacatctttgtcccgccaagctggaggtcccatggtgagccccagagggaaggaaggggagggggctgcgagagg

SEQ ID NO: 327827 - DNA, 122 bp, Homo sapiens
aatgataggatttggtcacatctcccataatgcactctcagaagatgactgcaaactctccgctgtctcatattttgtaatagaatatgaatctagctgagatgaagttaggagagccagcc

SEQ ID NO: 327828 - DNA, 122 bp, Homo sapiens
ctaccccattcaaatttgtgtcttccttccagctaacaccccagggaaatgcagtcggaccggcactgcctgaagctcagcttcttgcctcgcagggtccctgaatgtcccaggtccttccc

SEQ ID NO: 327829 - DNA, 122 bp, Homo sapiens
ggttgggggccttttggccggtgacggagactgcccaggtgtggtcaccatgttcctctccgcggtcttctgtaagtggggctggagacgccggtaggggttacggcgagggttagggggcc

SEQ ID NO: 327830 - DNA, 122 bp, Homo sapiens
cccaccagctggaccacagtagggaacacgtccatcaggctcgtgggctctccaatcactcggccggccgggagcacccccggccagtggaagatcccgggcacgcggatcccaccttccca

SEQ ID NO: 327831 - DNA, 122 bp, Homo sapiens
cgtcgcctgcctgggctgcccggggaccctcctgctgcgtcagcacagagcctggaaccgcggccaaggcaggaagctcccctgtgaaggcaccaagcacggcagacgccctcacatcgccg

SEQ ID NO: 327832 - DNA, 122 bp, Homo sapiens
gaacactaaagagaatgatactatcatcacaggatttgaatagtgaagagagaaaactggcgaatgggactttagagtctatgtattttttaattaaaaaagattggaatcaattataatca

SEQ ID NO: 327833 - DNA, 122 bp, Homo sapiens
ttccactggacagccggcactgtcagaaatcctaccttagcagctggaccaaggtctcaccggagaagatgtgtcaattcaatttcaaggtccttttatacaatttaatcaaaggtcatcat

SEQ ID NO: 327834 - DNA, 122 bp, Homo sapiens
ctcagcctcacctgttgctctgtttctgactacttttctctgcctggcccttctccccaccgggatgctgctcccttctgtcagctgcctactttcccatcccacccctgagtcttggagga

SEQ ID NO: 327835 - DNA, 122 bp, Homo sapiens
agagatgagaggcattttcctgcccgagcggaaggacagagacgcccgctggggtgggcacggcaggcccggggggaggctggcgccccgcagtaccagctgctcctcctcacctccacctc

SEQ ID NO: 327836 - DNA, 122 bp, Homo sapiens
ggggtggagccggcggggccgtcgtgccgcccgtggccgctggggacgctggtgccctcccgccccgcccacttccccgccggtccgcccctggctagagaagccgcagcccgcagtgtccg

SEQ ID NO: 327837 - DNA, 122 bp, Homo sapiens
gggatccgcggggagggacccgcagaccgaggaaggcatgcagctgccccacaggtggcccggcctcttcctggccccctcacgtacatgtgcagagaccgttccttgtcttcggaaggtga

SEQ ID NO: 327838 - DNA, 122 bp, Homo sapiens
ggcggcttctagaaagcgacttctcccccgccccagttctttgagtcaagggccgatcctcgggaaagaaggcctggtgaaccccatgggtagacccttggtctctaaggatgcttcagaat

SEQ ID NO: 327839 - DNA, 122 bp, Homo sapiens
tgcatttgtctctcgcggaaagccctcacaagcgaaaacggggtcacagtgtggtgtgggcgggcctcagggactcacgggaacattgaggaaggcagaagaaagaagcgacaagaccgtcg

SEQ ID NO: 327840 - DNA, 122 bp, Homo sapiens
ttgagttactgcatttcctaatttcatggtcataacagcctcctgtctaccgactcagaacggattttaccaaaactgaaaatgcaggctccatgctcagaagctctttaacaggctcgaaa

SEQ ID NO: 327841 - DNA, 122 bp, Homo sapiens
aaaaatcgtaactcacggttttggtgaaaacggcccccaaatttatgggatcgcttggggcgcagcgattgtaaatcaaaaggcactggacacctccctcccccatccccgaagcagctcgg

SEQ ID NO: 327842 - DNA, 122 bp, Homo sapiens
tcccttctccaacagaatcccttgaaggggctcaggtttttaaaaacaattcaggaaaggcgttttctttggtttcttctgctttccagctgctagcacaaaccacctctaagactagggag

SEQ ID NO: 327843 - DNA, 122 bp, Homo sapiens
ccaggatgataaccggcatcggtatcagctttccctggttcagtgatatcccacgaagttcggggcggggaggaagtcactccaggatcagaggccgcgtcggttctgcttggggcatgggc

SEQ ID NO: 327844 - DNA, 122 bp, Homo sapiens
ggatattcagtcttgaattaaatgatgtgctgtcaacaatccagtctatgtcatgtagcacgatcagtgtgaggcaggaaaatagcgtctggaggcaggaaatataaggccaattcccactt

SEQ ID NO: 327845 - DNA, 122 bp, Homo sapiens
aatacaaaacagcctggacgttgctgcaagcggcctggagctcccgaatggtgacccactcgccgacagcctccctccctctctcctccgctcttctttcctgactaaagccttcttgaagt

SEQ ID NO: 327846 - DNA, 122 bp, Homo sapiens
ccctctccttccctggctattacgatacacatcgcaggggggcgggcgacgctcgcgacgcggggagaaatatcagcccctcctgacattacaagccacatggcaggggatggacaccccca

SEQ ID NO: 327847 - DNA, 122 bp, Homo sapiens
catcttggttgagggcggaagtgaggactgtgtcgcgctggaggagcccacagattctcccggacccacgtggaagcggcactcaagatggtaggagaatgagctcctgtttcggaggtccg

SEQ ID NO: 327848 - DNA, 122 bp, Homo sapiens
ctactaggatagaacctccggtagcagatgtaggcaaactcaaatgtatcaaaacaacaacgggccaggtgctgaggctcatgcctgtaatcccagcactttgggaggccaaggcaggtgga

SEQ ID NO: 327849 - DNA, 122 bp, Homo sapiens
gaaaaacagggaaacaagcctgtttttttcagctaatatgcatagctgtctttgttctcacgggctctgaaaggagaagtaaataggaacttcagcaaggcagcaagggtgagaggtacttt

SEQ ID NO: 327850 - DNA, 122 bp, Homo sapiens
tacccccatgaaacacccgcgggctcaaagaggagcctggatcctgactggtccaggaggcgtgcggggccgcggggcccctccggcttgggccaggcgcgttgccaagatgcccggggaag

SEQ ID NO: 327851 - DNA, 122 bp, Homo sapiens
attgaccatgagcagcaggtggttgctttcctgcatctttgcctcagcttccctcacgagcgcctcagccgcctttagttcattgttgtgctttgaaaggacgtggcttgctgcttctttca

SEQ ID NO: 327852 - DNA, 122 bp, Homo sapiens
ggatgattgactttgttttaggggctacttcccactgcctcatctctttcttgaaaatcccggtcattgctctatgccttaggaaccagagagaatcatctgtacactctgaaagggtctgg

SEQ ID NO: 327853 - DNA, 122 bp, Homo sapiens
gaggatgcgtatttgtgacttgctttcctgtacagtaagtgctgccgcctcaggagcgggcgcagtcgcttatggtgccggtgagcctgcgcggcgctggcttttgctcctctggtgccaat

SEQ ID NO: 327854 - DNA, 122 bp, Homo sapiens
gcccttgcacacggctgcccacttcggcctttcggagctggtggccttctacgtggaacacggggccatagtggacagcgtgaatgcccacatggagacccccctggccatcgccgcctact

SEQ ID NO: 327855 - DNA, 122 bp, Homo sapiens
gcctcaagtgatccacccaactcggcctccccaaggattgggatgacaggcgtgagctaacgcgcctggcccagatttttgaattagggatactcaacctgttataaatatatatatatata

SEQ ID NO: 327856 - DNA, 122 bp, Homo sapiens
acatgtggtcctgatcctcagggaaaccttttcagttagcggtgacttggcccttgcatccgaaaccaccacacaggcttgtgttttttggctggaaatgaagacgccctctgccccacagc

SEQ ID NO: 327857 - DNA, 122 bp, Homo sapiens
gtacggatgcattagaccggcctatgaaaggctgtacaatttaaccgctgatgttgcagccgtcgcgcccttctgctgggggacctggcctagtcagctactctgatctttggggctcatca

SEQ ID NO: 327858 - DNA, 122 bp, Homo sapiens
tgggccgcccacacctgtccccggggcgcgctgtcctctgcccggcagctgctgccgccccgcccgctccgccgcggcccccacacgctctgcaacgcgtccttggcaacctgaaagaatcg

SEQ ID NO: 327859 - DNA, 122 bp, Homo sapiens
acccccataaagatgcattttctagtaactaataaaaactggtcctgaagacaatagcctcgcgctcatctaaatacccgttgggatattgcaaattaacaccttgtaaagcaacccaatta

SEQ ID NO: 327860 - DNA, 122 bp, Homo sapiens
gccattagaaccatgagcaactacagtgtgtcactggttggcccagctccttggggtttccggctgcagggcggtaaggatttcaacatgcctctgacaatctctagtgtaagtaaacttta

SEQ ID NO: 327861 - DNA, 122 bp, Homo sapiens
tctgtgctgccatccgggcgcagatcctgctctggctgtggtccatccctgtagatgagccgccagaagtggtggatgccgcacaccaccccctgcagcctgccaccccaccaacttcccta

SEQ ID NO: 327862 - DNA, 122 bp, Homo sapiens
cggccggcggcgtggtcagcacccgtcaggctgatttactggcgctcgccgcccgccgcgcggcggcaatcagccgccgccgccagatctattattgatgaactttccgaggcccgctaatt

SEQ ID NO: 327863 - DNA, 122 bp, Homo sapiens
cagcgttacgctgattttcgagcttttcctggctccccctggctctttgctgtcgtcactcggttctccgcccatccccgtgcgcacgtgttcgctgtgctagccccgtgcgagctgagctg

SEQ ID NO: 327864 - DNA, 122 bp, Homo sapiens
ggggcagggagcaacccaaggctgcctacgaggcacagccgaggctctgtccccaggcagcgcggggctgaggctggcgttccgtcattgcttcctgagctgccccactgagagacacgccg

SEQ ID NO: 327865 - DNA, 122 bp, Homo sapiens
ccgggggaaatgcggcctctaagctctccgctgaggcggcttggaaggaatagtgactgacgtggaggtgggggaggtggctggcccgggcgaggcccagggagagggagaggaggcgggtg

SEQ ID NO: 327866 - DNA, 122 bp, Homo sapiens
ggatggcctaccgctgttctggagtctgtgggcgtgctcttccacgggcgtgctcttccacgggcgtgctcttccacgggcgtgctcttctgttggcatgctccctcgatgtccttccgctg

SEQ ID NO: 327867 - DNA, 122 bp, Homo sapiens
ccccggccggggttactgccggtcatcgcagcgcatccccggttttcctcgcgggtgcggcggggaacccagacccgagacggacgtccacccacccgacggcccctccttagcagcttccc

SEQ ID NO: 327868 - DNA, 122 bp, Homo sapiens
ataaagggggctgaaaggaggatgggtggtccttgaggaggggaagggtctgcagagaatcgctcagacaccaggtattacccagctattcccccaagacctggagggtccaaactcctggc

SEQ ID NO: 327869 - DNA, 122 bp, Homo sapiens
taaccctgctgagacagtcagtgctgtgtgggggccggggaggggccggggttccatctccgggaagaatctcatgggatctgggccctgcaacacaagggcctttgaagtgagacgaggag

SEQ ID NO: 327870 - DNA, 122 bp, Homo sapiens
cgccggccgtgctccgccggcttccccctgcccctcgcggctaagccggggactgccgggcggccctgcgcgctcggaagagcaggttcctcaacccaggccccggcccctcccgctaagct

SEQ ID NO: 327871 - DNA, 122 bp, Homo sapiens
agcaatgtgtgaatggacaatgttgaatgaatgtctgggtcagtgatggagagccaggttcgtctttaaaatctagggctcgtcacttatgaagcagactcctagtactggagtgactctat

SEQ ID NO: 327872 - DNA, 122 bp, Homo sapiens
agaagggtaaggggagataaaagaaagcattggaaaacagtagtaaatagatattgaactcgagctgtggatggatcttgcagaactccctcttaggatgtgaactgagaaggtcatgtgat

SEQ ID NO: 327873 - DNA, 122 bp, Homo sapiens
attcaccaacagctcaactgttacagctgaatggatggaccagttcagtcaagcagcaaccggtttactccttcctctgctcaattaggcctctagaatgttcatcttggaaaggaagttaa

SEQ ID NO: 327874 - DNA, 122 bp, Homo sapiens
cagcccgtgagaagaggcataagggaagccaaggccaaggccgcctccctccactcagcacggccaggccttcccatgtgggagcccctcacgcccctggcaccaggaagggaggggattgg

SEQ ID NO: 327875 - DNA, 122 bp, Homo sapiens
ggcagccacaaggtgtgagtcacacactagggagacagacatctgttcaacacagaattccggctttgctgaactgcaatgcatattccctcttctcactagtacagaaatgttctgcaggc

SEQ ID NO: 327876 - DNA, 122 bp, Homo sapiens
aaggaaagtggccaagaacaaagccaaggccctctccagagcagaactggggttttgattcgtaattagctgagcggggagaaatagcccaagaaatgcacacagccccaaaaaggccccac

SEQ ID NO: 327877 - DNA, 122 bp, Homo sapiens
cctcatcttaggttggatgtgcagtttggtcacgttggcagtatgagtgaagtggaaatacggagggaaaagttcacacctacagatgtaaacctcacagtttactaagcaatggttgaagc

SEQ ID NO: 327878 - DNA, 122 bp, Homo sapiens
tacctagctgccctggcagactcccagggaggaaaaacagcgtggccttggcagctgccccgaggaaggagcccacaggtgacagggagaagccattgccattccctgtcctggcccccttc

SEQ ID NO: 327879 - DNA, 122 bp, Homo sapiens
tttcgggtgtagagggagcaggggcctgcggggacctggtgtgggtggagtggggacaagcggtggagaagggtacgccagggtcgctgagagactctgttctccctggagggactggttgc

SEQ ID NO: 327880 - DNA, 122 bp, Homo sapiens
ggtctgcgtggatcggtccttccaggacaccgtcgccttcccggccgcgtcggagtccggcggcgacctgcctctgaaacatggcaggctcggatgctggtgagtgtctccctggggtccca

SEQ ID NO: 327881 - DNA, 122 bp, Homo sapiens
atgcttccctggtccctgctctgctgctaccttcctgagcacacgtcagccactgggacccgccctgccactgaatttaacatgatctcatgcccctgtgacttgttcttcactttgcctcc

SEQ ID NO: 327882 - DNA, 122 bp, Homo sapiens
tacaaacagcttgtacatacccttaagcactacaaaagcatccctgtcttatgactaatacgtaaagccattcttgtttaactgaaggcaatctaagggtgccttctctcatggcagtacca

SEQ ID NO: 327883 - DNA, 122 bp, Homo sapiens
tctgtgcacacaggaattatgatgtgagctcagtaagacacaacctcacgattggacatgcggaggtgactcaggcccaagtcagggttacagctagcctcccggtaaacaactgacccatc

SEQ ID NO: 327884 - DNA, 122 bp, Homo sapiens
agcaccctgtgcatgcatctgttagagcaccttgtcacattgcctttgcccatgtccttacgtcttttcccaccagatcaagtgcagaatgctacatcctactcacctcatagccctagaat

SEQ ID NO: 327885 - DNA, 122 bp, Homo sapiens
ggaagctaaatctcccattggtggctgtgacagtggtgagaagttgctattactcataagcgcgcacacacacacacacacacacacacacacacacactttactgtaaacacattgaatgc

SEQ ID NO: 327886 - DNA, 122 bp, Homo sapiens
gaaattatttgcattttctttgtaaatcatctgaagaattgtgcaacacaggagtgcattcgggaagaaaattcagacatcagagataaagcagagttctcccttggctgcatctacaacct

SEQ ID NO: 327887 - DNA, 122 bp, Homo sapiens
gccgtcctactccgcttcctcgcgcaggtggcaggtcgcctctggcagaacctcttccttcgttcccagtccccagcctcttggcgttttgtctgacgcctcttttgtgtcggactcgacgc

SEQ ID NO: 327888 - DNA, 122 bp, Homo sapiens
gccccccagactcccgggctgggaggagcgattggccgccgaggtgggaaagcaggcctgcgccttggggtctccgcgaggtaaggagccctggctgcccccacgggtcgggcacacaagcg

SEQ ID NO: 327889 - DNA, 122 bp, Homo sapiens
ccgcttccgctttggtgggaaggacctcccttcccccttatagaaacactttctccaggccgggccgggcttggtaaacctcagccgtgcctgggtagaggacgccgggctgggccgagcgg

SEQ ID NO: 327890 - DNA, 122 bp, Homo sapiens
acaccaaggcaggtgcagtgtgggcggggctgggtcctgggctttatctttgagcgtttgcggaactggggcaggggctgccaagtgcacggccccagagtccttgcccagagcagctgcct

SEQ ID NO: 327891 - DNA, 122 bp, Homo sapiens
acgtcctctattacagatgacaaactccatggggcctcttggaatacttggtcaaactgacgatatccacagccctatacctaccatgccaaaagctacctgtggtgcttctgatataatca

SEQ ID NO: 327892 - DNA, 122 bp, Homo sapiens
cgccttctctgcattccttagcactctgtgggtcctgctcatgcgacattgaccatcaagcgtggtaatggctgagttccttatgggctccccctctagactgtatatttcttgaaggtgag

SEQ ID NO: 327893 - DNA, 122 bp, Homo sapiens
ccctcggccccggggcactgccacattcagtctaggcatccccttctgctagactctctacgtttaggccccaagtttctgggagtgaaacgatgagggacgccaaataggcggaagaagcc

SEQ ID NO: 327894 - DNA, 122 bp, Homo sapiens
gcagcagcgagttttccgtaccggaagtgctggtgccacttccgactcctctttaactcccgccccttaaggctgagggcccggaagtcccctccccggaagtgaaattggaggcggaaaca

SEQ ID NO: 327895 - DNA, 122 bp, Homo sapiens
tgcgaggcggctgaggcggtggcggtggaggcggcgggaacccggatatggggcgttcagcgcacgggagcggggcggggcctgcgggggcggggccccgggccgggccaggactgatggag

SEQ ID NO: 327896 - DNA, 122 bp, Homo sapiens
aaaagaaacatggatcatggagagtcacagttatcgcagccattaaagtgtctaagaatccgtgtaaccaatgtcctaagacaaccagcttgtaaccagctgtcctgagttgctactgtaga

SEQ ID NO: 327897 - DNA, 122 bp, Homo sapiens
atttatattcagtacaaatttcagaaggtgagattagagagaatcagcaagagactacatcggtaaagaatatgaatccttagattcagtttctatgtgagaatttttttaagtccaagggc

SEQ ID NO: 327898 - DNA, 122 bp, Homo sapiens
ggtcaggagccttcgcgccgcctgccgccgagagggggcagcagccgcctgcaggaccagcgcccagtgcccagcgcccagccgggcccgcctgcaacggaacatcttttgcttttggaaac

SEQ ID NO: 327899 - DNA, 122 bp, Homo sapiens
caggacgtgaagatagttgggtttggaggcggccgccaggcccaggcccggtggacctgccgccatgcaggacggtaacttcctgctgtcggccctgcagcctgaggccggcgtgtgctccc

SEQ ID NO: 327900 - DNA, 122 bp, Homo sapiens
tagatttacatgcacatgagttaagagcccaggaattctgtggggtgtgtcagggaacagcggtctccacacttctcatttccttcctttctctccagagtccaccatgttcacctctcagc

SEQ ID NO: 327901 - DNA, 122 bp, Homo sapiens
acaagtttatgggtttctgagcagctcctttgatacctgcaaggagataccggtgaaaatcgtccaaagctttcttcctacccgaggaattcgtgtgccagttaggccgggtagagggaaag

SEQ ID NO: 327902 - DNA, 122 bp, Homo sapiens
atgaattcattaattaagatgctggcagacagccactccacacacgccgccatccagccgcgctaggtaatgaggttttagtctcctgacccccgtcaagtggcgcagagccagatgtaggc

SEQ ID NO: 327903 - DNA, 122 bp, Homo sapiens
taaatgtcatcattgcttaacaagtgaagggtaaaaagacaattaactcactgaagactacgcacagaaacacaaaagcctttgcttctgtggttataggtttaccaaaggcacaaagggat

SEQ ID NO: 327904 - DNA, 122 bp, Homo sapiens
gaaactgtaaacacaatgcagttcaacagaagatttgtaaaagaggaataagaagaaaaacgggtgtccatcatcagccttcggcggcccccccgctgtctggcggacacttgttagtggct

SEQ ID NO: 327905 - DNA, 122 bp, Homo sapiens
agagcttcccctggtgttcctgctgggtacataaaggatcttttccattgtcttttatgtcgtttgtaaattgaatcacctcatttgttctgacctggataattttctccgttaatgcttgt

SEQ ID NO: 327906 - DNA, 122 bp, Homo sapiens
tccggctcccagggcgctcaagtgggcgctctcagaggcagttggccgagagcacggaggcgcccaggcacagcaccggcggagtggccagcagagggccagggcagaagcgcaaaagctaa

SEQ ID NO: 327907 - DNA, 122 bp, Homo sapiens
tcattagctagtggcagccccatgacctgttggctgaggacgcctctgcccaatgggagccgcctgagggacctgagaggaagctctagtgaccgctttcccaacacacctggtccaaacat

SEQ ID NO: 327908 - DNA, 122 bp, Homo sapiens
aagacttgtgcagatgattcgatggagagcagactggagtgacgggcgaatcagctgggacgctgccgagaacccctgtgccttttccggtgcaggaagaaatggaggggaagcttgtacgt

SEQ ID NO: 327909 - DNA, 122 bp, Homo sapiens
tggagatgtgcacctaaaggaggcgcatctggggacggacacatctggcactgaggccctcgccacctgcctcgccacctggcgaccctgaccccaccacactgccttgaggtaggaaaagg

SEQ ID NO: 327910 - DNA, 122 bp, Homo sapiens
ctgcgggcgccgagagcgcgtcgtctgccgcctccgtgcgccgccgccgcctctgcgcgacgcccctcggccaggcctgggaaagcgcccgccccgctccacaccttcttaaagccccgggc

SEQ ID NO: 327911 - DNA, 122 bp, Homo sapiens
gaggagggtgcgggggcggggcgcgggggcccggggaggaggggggaggggagagagaagcgaggcaaaaaataaccgaggaaggaatccaggcaatccccagtccacccactccggaaaaa

SEQ ID NO: 327912 - DNA, 122 bp, Homo sapiens
caagctgcccagagcagtcagccagtccctctggtccagaccctaccaagctcacttaaacgaccacatccgtgcttgtccagagctgctgttcagcaagcagcaggaacctaccaggggaa

SEQ ID NO: 327913 - DNA, 122 bp, Homo sapiens
aggaaactccatgccccgcccctgaggtcaagccgtaaatgccattaagggccttttattcgtattcatcacatcggagatcatctcttcctaggaagcttttaaaaaatccccaggttgga

SEQ ID NO: 327914 - DNA, 122 bp, Homo sapiens
cctgggctacatgtacttttaccgcaggataccaagctaaacctcaaatataaaaattggcgaaaagaagccatacgcctttttaatttgccaaaaaaaaaaagaagaagaagaagttgaaa

SEQ ID NO: 327915 - DNA, 122 bp, Homo sapiens
actaccaacaatgaaattttcaaatccaactggcaggagagcagtggattggaaagaagacgaatatgcttagatgaggcatgtgaggcacctgggcagaaaatttaaagagcacttactgc

SEQ ID NO: 327916 - DNA, 122 bp, Homo sapiens
cctctcccttacagagattaaataccagtaacatatttgccagaataaaataattttttacggttttccccacaatgtctgctcaggtccaactatcaggaacactgaaattctcacagcct

SEQ ID NO: 327917 - DNA, 122 bp, Homo sapiens
ttgtctttgggaggcatttacagctcgaggacattgctctgtttcattgaaagtactcagcgctagcgtcttgggacatggctggaaggggtgttgagcccgattgggtaataacagatgtt

SEQ ID NO: 327918 - DNA, 122 bp, Homo sapiens
tcattcattccgttcactcattcattcattccgttcactcattcattcaagatggggtctcgctctgtcacccaggctggagtgcagtggcacgatcatggctcactgcagcctcgacctcc

SEQ ID NO: 327919 - DNA, 122 bp, Homo sapiens
ggcccccctcagtcttgtggacctggccgggagtgagcgacttgaccccggcttagccctcggccccggggagcgggaacgccttcgggaaacacaggccattaacagcagcctgtccacgc

SEQ ID NO: 327920 - DNA, 122 bp, Homo sapiens
ctgtcacccacagacatcactcacacccacactgtcaccataagagctgacacccgcagacgtcactcacacccacactctcaccataagagctgaggaccacagaggtcacttacagccat

SEQ ID NO: 327921 - DNA, 122 bp, Homo sapiens
aaaaccatagactttggtgctggaaggaatttacgctgtcttctagccggtctccatgtgcgtttgagagagaaaaacagggcccgacgtggcagagcgcgcatctccccccagtccacctc

SEQ ID NO: 327922 - DNA, 122 bp, Homo sapiens
gagaccgcgcctgagccacagtccagtttttaaggccttggtgtcaggccgttttgctgacgagaaagcctgctgctggtgacaagatggaactggggctgtgtttgtttcccaggacggtc

SEQ ID NO: 327923 - DNA, 122 bp, Homo sapiens
ccttccgggtcaggccggccgggagcccggcgttcccagcgtgctccggcgccagcacctcgcggactccatgcgtgactatccaggcgcccagaccagagagtgatgccgattcttggggt

SEQ ID NO: 327924 - DNA, 122 bp, Homo sapiens
cagccctgagaggacgaggggacgctgcgctgtggggaaagtccgggtggcaggaggtggcggggctcctggaggaggtgctgggatgcgctgctgtggctgcagagaaaggtcccgaggac

SEQ ID NO: 327925 - DNA, 122 bp, Homo sapiens
cttgctttcgtagagggaagctcaggaggataagcccggcccccagaggctggtgagtcccgcaggcaggggggcaggtgggaggggagggcgacagtccccagggtgcctctttgtagggc

SEQ ID NO: 327926 - DNA, 122 bp, Homo sapiens
taggtgctgattgttcacacatggagcttcaactctagagaagaaggtctaattctaaagcgagctaatactttttcagtgaatgtagctttgcagagagagttgacaaaactgtgtataag

SEQ ID NO: 327927 - DNA, 122 bp, Homo sapiens
ttaaatttcttggtaaacaaatgagtcaaatattttgttattctacactataatataattcgtaacaactaacagtgggataaaagcaagatttggtttggattctgagagaaattggaaag

SEQ ID NO: 327928 - DNA, 122 bp, Homo sapiens
aactggggctgcacgtggtgctcatgggccagcgcgagttccgggtgtgcacgggctcagcgggccctgcactcagagctgccggccagtgccgctggccccaggcagtgaggggcttagca

SEQ ID NO: 327929 - DNA, 122 bp, Homo sapiens
tgcaaagcttccggttctgggggaaggcgtggcttccgcgctctttgaaatgtccggcgccggaatgtctgggtgctttggttggagagggtcccatttccagtcattcttcagcctggtga

SEQ ID NO: 327930 - DNA, 122 bp, Homo sapiens
cgcgccactcacctgtgggatccatagcgtcgctcgcctcagagatggaagccgccattccgccacggcgccgaaagtcgtcatcaagctgcgcgcagagccacgccccgcggccgggcggg

SEQ ID NO: 327931 - DNA, 122 bp, Homo sapiens
taaacaccaggaagacacaagttatattctttcacacacaaaaatgaactatggtccagtcgtttacttatatttcacgtttactgagatcctatgggattctttctctgtgctttggaact

SEQ ID NO: 327932 - DNA, 122 bp, Homo sapiens
gcctccacctcttttccctgagcgttttcttcctgcccctgctttccgtcccgtctctcccgtccccgtctggtctcagtctctgcccgtctctctggtatcggtctctgccgtctctctgg

SEQ ID NO: 327933 - DNA, 122 bp, Homo sapiens
ctcaggttaagtaggcagaccccgcgggcgggatggtcaaagatatttagttcccggtaccggagggctaggtgccaggggcaatggggaaacagccaaatggcgtgggttgagtggaagat

SEQ ID NO: 327934 - DNA, 122 bp, Homo sapiens
tgtgggcggccgaggacccagaactgcacagcctgagccccagattgccaatgccttaggcgctcccgcagagtcgagccccgcagcctgtctgccggggccgaccccggaatctgccgcgg

SEQ ID NO: 327935 - DNA, 122 bp, Homo sapiens
aggctttggagcatcgtgcctgtgtttctcgcagaagacccccacaagtgaaaacggggccgtagggtggcttgagcggctgcagaaactcatgggaacatcgaggcaggcagggggataag

SEQ ID NO: 327936 - DNA, 122 bp, Homo sapiens
attctgtgagctctgtgttgagaatatataaatatattccaaatctgtctgtttcttccacgtacactattatcagtatcatttctcacctagactactgcagtggtttctttgttcccact

SEQ ID NO: 327937 - DNA, 122 bp, Homo sapiens
ccggctaggccgcagcagccccgcgcccagggagagaggaggaggggaagaggccgagggcgccctgctcctgggtcgccgaagccccggaggctttgtgtattcggaaccggattcaccac

SEQ ID NO: 327938 - DNA, 122 bp, Homo sapiens
ccacactgaggctggggaggaaggagactgtgccagccacccgggcctgagctctgcagacgctgtggctttgcgcatttctcagcactctgcgtttatgacctttccggccagatgtagca

SEQ ID NO: 327939 - DNA, 122 bp, Homo sapiens
cttaagcagtccactcacctcagcctcccaaagtaccgggattacaggcatgagtgacggcgcccagactaggtggtcttttttccgggaaaggtgtattttaccttctacactgaagatgt

SEQ ID NO: 327940 - DNA, 122 bp, Homo sapiens
ggtattctatatatatttttccttaaactgtcaccttttctctacattttaaaagacacccggagttgctctcaataagcacatcacttaacacttggccagttgggtggggtgccatgttc

SEQ ID NO: 327941 - DNA, 122 bp, Homo sapiens
ggaggacatgcgttcgaattcgcgagaaaacttatttaaaagaaaaagaaacaagttttccgggccctgctgcagacttacctctcacactcactgggattgggcaggttatgaagatgagg

SEQ ID NO: 327942 - DNA, 122 bp, Homo sapiens
gaaggaggcgcccagctgcgcgcctgggccgcccgtcgctcccaggtgctgccgcctccgcgtcgcctccatggctgccccgcaggcccctcggccctgcctttccgaggaagagaccggtt

SEQ ID NO: 327943 - DNA, 122 bp, Homo sapiens
gagcagggatccctaagccctgggctgcagactggtacctgtcactggcccgttaggagccgggccacacagcaggatgtgagcaacaggtaatggagcattaccgcctgagttcgcctcct

SEQ ID NO: 327944 - DNA, 122 bp, Homo sapiens
tcaccatggtaaatctcctgcagggagccccctccgcagaactccatgcagatccacaagcggtcattcctagggacaaagagctggggtgggcacaaagcaggtcacatgggggctgcctg

SEQ ID NO: 327945 - DNA, 122 bp, Homo sapiens
ccacaagtcaaaacgcgctttcactctgtctcggcatactctgcttccctgtaacacaggcggtggaaattccagatcggaaagatacacgaccgtatttcactcccatgcggattgctata

SEQ ID NO: 327946 - DNA, 122 bp, Homo sapiens
gtcgcgcacactcccgtggctgtaacagtttattggcagcccagaggggcgaaggcaccgcgggggagggagctcagcctgagacatgcagaggaccgggagccccgggggacgtcggggtg

SEQ ID NO: 327947 - DNA, 122 bp, Homo sapiens
ccagctcaacccagttagccagaggatcccagatgtcaaaaagccaggggcataaacaggcgcagggaggaaatgcacccggggaggcgagcgcctgttctgccctgggatggatggtgggc

SEQ ID NO: 327948 - DNA, 122 bp, Homo sapiens
tgccaactcaaatggatgtttctgctgagccaggagcacacactgggccagcaaagcccacgccaagcgaaaggagagcctgggcctatgggatacagagttctctttgaataaactacctg

SEQ ID NO: 327949 - DNA, 122 bp, Homo sapiens
agaagaagagtggctctgccgagtccttgactttgaactttggatctccaggactgtgagcgagtaggcctctgttgttttaagccacgcagtgtatggcattttttttttaaacaatagtg

SEQ ID NO: 327950 - DNA, 122 bp, Homo sapiens
tggtcccgcaggaagctgtggttaattttccgcgtgtccgtgtcctcgcccattgaaggccgtgcccggtgctctgggcatgccccgccgccacacaccgatgcaatccgcagaggtcgcgc

SEQ ID NO: 327951 - DNA, 122 bp, Homo sapiens
tgttttaggtattggggatataccaaggaataaaacaagattcctggagggagaggggaacggacagcaaacaatagacacaatacgatcgtgaggtatatagttaatgttggtgatgagtg

SEQ ID NO: 327952 - DNA, 122 bp, Homo sapiens
gcgcccacctgcccggcccggcgcccagggccacccacacgcacggcgccctgatggagacgctgctagactaccagtgggaccggcccgagatcacgtcgcccacgaagccgatcctgcgg

SEQ ID NO: 327953 - DNA, 122 bp, Homo sapiens
aacgggacggtgacgtacacgctcgggacattgtctacgcacagaaaaattccctacatgcgggaaaacgggatggtgacgtacacgctcgggacgttctccacacatgggaaaatgggaag

SEQ ID NO: 327954 - DNA, 122 bp, Homo sapiens
agtgcctggtgagtttcccagcgcaccctgctcactgctgagacgtcgacgtcggaaaaccgccgcctggacccctgcttgttgtgtgaggctgctttgcgcacaccctcctgtcatgcctc

SEQ ID NO: 327955 - DNA, 122 bp, Homo sapiens
caccccacccggtggaagtccgaggcctgagggggggcatcgagcggggcgtgggaggcccgcacgctccccacccccagccgcgacccggaggaggggaacgtgccgggaggctcgagtcc

SEQ ID NO: 327956 - DNA, 122 bp, Homo sapiens
gaggcggccgccgccccattgtctgtgaacaaacaaatgtggtccttccacatagtggaccgttcttcagcctcagaagagaaggaggttgtgacgcaggtcacagcaggcctgcaccttga

SEQ ID NO: 327957 - DNA, 122 bp, Homo sapiens
tcagggctttgaaataaaggcaagccagtgacttgaagtggcactcagctggaggaacagcggccttgtctgtggctgggacaggcatgagctacattaaccttgttggggtggtctccaaa

SEQ ID NO: 327958 - DNA, 122 bp, Homo sapiens
gggggcagcgtggttatgtggctggaccgccgcggatggctcagggttcttggacattggcgctacgaccttaggcgccctagctttaccaggacttggagtggcgataagggcccaatggc

SEQ ID NO: 327959 - DNA, 122 bp, Homo sapiens
ttcttacttcagggccatagaactaagatcgcccacacgttccccttaaataagacatgtcgatgggctaatgactaccacactattaaccagtcacaggagcaccatcatgcagttggtat

SEQ ID NO: 327960 - DNA, 122 bp, Homo sapiens
ttaaaattattagtgtgtttgtttggtccagaaactgagacaatcacatgacagtcaccacgaggagagaaaatttaaaaaataaaaataaaaacaaaaaaaattttaaaaattaaaaaaac

SEQ ID NO: 327961 - DNA, 122 bp, Homo sapiens
gcaaggaaaccaggctcagagaggtagagtgatttatctaaggtctcaaagtgaatttgccgttgggtcaagactaattataataacaacaactactgacgtttatatgggcccggcattgt

SEQ ID NO: 327962 - DNA, 122 bp, Homo sapiens
gaccagggcaatcaggcacaccggctgccaccccaggccactgcaccaactcctggaggtcggtgctgtagctgacttatccaaggaaagtgaggcacagcaagactgaggtcccatggctt

SEQ ID NO: 327963 - DNA, 122 bp, Homo sapiens
cccctccgcagcgatagttcacgctctcggcggggctgtaccggaagttgcctctacttccgcccgttccggggcggggcttacttcgcagcgactacttgccgcacttccgggctgccagg

SEQ ID NO: 327964 - DNA, 122 bp, Homo sapiens
gaaagcagtgttttgtttgttttttattctcttggaattttataggcactcaggaaataacgtagagactgaaaccaggtaggaagcataaaaccagcaggaactgaggtggcatttattca

SEQ ID NO: 327965 - DNA, 122 bp, Homo sapiens
cccagaatagcgtggccgggacagaggcacagccaccggaggccagacctcgaaatagctcgtgctgggcagccgggggtggcgttgcctgcacggaagagtgcggaggccacctcctgggg

SEQ ID NO: 327966 - DNA, 122 bp, Homo sapiens
actgcaggcccacgggaatgctcggtgttggactcgcaccgcgctccacggctgtagccccgcccacagcccctacccacggctcccattggccaaatgtctccgaggggggagcgggggga

SEQ ID NO: 327967 - DNA, 122 bp, Homo sapiens
ttgatgactcaccactggaaagcgctccctgcaatccctcacagttcagacaactaagtccgagatggaaggcaacgtgtgactcacggcacactccttgtaacgcccgggcgccgtccatt

SEQ ID NO: 327968 - DNA, 122 bp, Homo sapiens
ctgttcacaggaaaatgctagctaaaacaaacaacagtgactgtctggcaagggacgcatcgaataatgcttatgagtcttttgggtctttttttttttaatcttgggatcgagtgattgat

SEQ ID NO: 327969 - DNA, 122 bp, Homo sapiens
tatcgttcccatgtattttaacctaaatggaatgtatcttcccttccaagctgcctaaagcgctgttttaggttcatttattttattatgttcagaagcatcaaataaaagttaaacgtttt

SEQ ID NO: 327970 - DNA, 122 bp, Homo sapiens
tcgtgaaacgagggcgccatctagtggctactctcctgttgctgcatccaccaccctccacgtaaaagaccgactacagcctctatttctatggattcaggagagtttgcctctatctccct

SEQ ID NO: 327971 - DNA, 122 bp, Homo sapiens
gctgctgatgcagcccgagggcgccctcggcgaggagctgcaagtgccgcagcccagggccgccagttggctgaacttaggctccatcaagaagtacttggggaagctcttcaacagcaggt

SEQ ID NO: 327972 - DNA, 122 bp, Homo sapiens
gtcacaatctcaagggagaaagacctcaaaaatttgtggatgctcatgtctggaaaagggcgactgtggttcataccaaactgagaagaaagagattcatgagcccagcctgccccacggca

SEQ ID NO: 327973 - DNA, 122 bp, Homo sapiens
aggggaacgcccgtgcctgaacctaagaggtgtgactctaccaagtgggaaaggcaagcacgcatcatgccagtgcaaaattacaaacagagacgaccagccgttgaagtcaagacacacac

SEQ ID NO: 327974 - DNA, 122 bp, Homo sapiens
cagcaggcagcgctggacagtgaccccggagcgggaaccagggctgcgctgggcactgaccgggccctggtaccggggattcaccctccccggggtgttcctgggccttgggtcgcctgggt

SEQ ID NO: 327975 - DNA, 122 bp, Homo sapiens
ccggaaggaggcggagacagcctcgcatggcgcgcgcgtccacctcgccgttccccctcgcgcagctccaaccaaagagagacatccaaccccgggggagtgacaagggggcgggattgctg

SEQ ID NO: 327976 - DNA, 122 bp, Homo sapiens
cagtgggccagggaaagggagccaggtgctgtcagggtcaaagtcagcagtggcttggttcgctccttaaattaggaagggtgaatgtcctgtttatatttggttaaaccctgaaagagggt

SEQ ID NO: 327977 - DNA, 122 bp, Homo sapiens
agcgagtacccggctttccccaagatcgttgattggccagggcagccttgagtaaatcaccgttccggaagtactttctaggaacttgggaggtataactctatgatgacttgagggtgctc

SEQ ID NO: 327978 - DNA, 122 bp, Homo sapiens
gtgtcgccatggttccctcgccggcagagacaagagcagccgctagggggcagggcgccacgagctctggaccgagtcgcagactggttggagatcctcagccaacctggggttcccctcct

SEQ ID NO: 327979 - DNA, 122 bp, Homo sapiens
attttaaagtatcctgtttctcccctttccaaagcactcttaagatgagacacatcagtgcgccaacctaaaagacttcctgatttaaaacgcagttgcaactttttctttttttctttttt

SEQ ID NO: 327980 - DNA, 122 bp, Homo sapiens
ctacagaacagcccaaagcctcttacgcaggacaacccatagcagtttgattaaaatcagcgcaaacccattcccatttggtgaggggggagggggaggggcaagcctcagtgcctgactca

SEQ ID NO: 327981 - DNA, 122 bp, Homo sapiens
ttctaccattctggaagctccctagaatctcctggaatgcttaatggacctttccagcaccgaaattcaagaattatgactcatcggtcagcagaaaagtgaggataccttttcctaaccta

SEQ ID NO: 327982 - DNA, 122 bp, Homo sapiens
gagcggaaccctccaagtcgcggcctgaggaggaaggaaaagggggcggcccgggagagccgctgcgaaatcagcaacgggcgggaaccaggttgcctccctgagtcccttctctccccggc

SEQ ID NO: 327983 - DNA, 122 bp, Homo sapiens
tctctccgtccccgatccactcgggctccggcagctgctgcttgggcgccttcggcatcgcggtggcagaactagaaacgagttacagatagaaactagaatatgctttttaaaaaaacaaa

SEQ ID NO: 327984 - DNA, 122 bp, Homo sapiens
aagaagggagagccgagagccccacctttgtgcgtgtgataagaacagagctcggcttctcgccacctgttcacaaaggggtcccagtccctgactcaagaacagtgttgggaggagatggg

SEQ ID NO: 327985 - DNA, 122 bp, Homo sapiens
tctgctattttcatttatcttggtttcagcctattttgcttgtctggacactacagtccacgggagcctaggtcgagcgaggtccaagaatccccagggtgggcagggagggtggaagaggg

SEQ ID NO: 327986 - DNA, 122 bp, Homo sapiens
tgtggtcatgttcatgagatgtcgccgcagtgaggttagtcatttactaccacctaacaccgtccttttctgacaatgccgtccatgaggggatgtcccctgaaggcagttattctgccaaa

SEQ ID NO: 327987 - DNA, 122 bp, Homo sapiens
agactttaacatccaggtgaggtcccggctgtgcatgcggccgctctgcgtggaggtgcgcgctcccgtcgcccgggctgccctggcccagagctgcgcctgcctgggggctgccgcctcct

SEQ ID NO: 327988 - DNA, 122 bp, Homo sapiens
gacatttacaggatgggtggaagaagataaagagcagtgtgctggtaaacaaagctgattcgtagatgtgtaacatttgctagtttgtatgagataaacattcctatcatgacttatttttg

SEQ ID NO: 327989 - DNA, 122 bp, Homo sapiens
aaacacagatactagggcccaacatcagagatacatacaagacgtatagaattaggatctcggcagtatcacagtacttttaataagtccccccaagtaatttttatactcaccatcatttg

SEQ ID NO: 327990 - DNA, 122 bp, Homo sapiens
agagccattcattccagcaggtagaggtgccacaggtggcggattcaagggcggcatgcccgacatgggtggcagtggggtcatgggtggcacagaaggaactgggggaatcgggggcacag

SEQ ID NO: 327991 - DNA, 122 bp, Homo sapiens
caggcagatccaagtttccccaacctctcagagaatatgacgccctgcccagcattcactcggttcctgagctcttggtggagaaggtgtctgcaaagagccatccaccctcttgaactaag

SEQ ID NO: 327992 - DNA, 122 bp, Homo sapiens
ctcatatgcataatcatgaccaatgcgaatgggattaccattgacttaagccaattatgacgtccccctgggcctagggtaggactccactcccctgcaacacacgatcctctgaacaaaac

SEQ ID NO: 327993 - DNA, 122 bp, Homo sapiens
tcagccagtggcagagtggtcataagtgacactaaaaggtcttaagtgaaagggaaggtgcgcatgcctaaaatcccagctgtgccgtgaatgaaccaaatgtctttgcccaaaggcagctt

SEQ ID NO: 327994 - DNA, 122 bp, Homo sapiens
tggtccctgaaaatttctttcccagaaaacttgcatttgaaaaacaatgccattccaattcgccttttcctaaagtaaactcataaatagagacaaccaaactttcgctctcagcccagaga

SEQ ID NO: 327995 - DNA, 122 bp, Homo sapiens
aggtaagactttcagccagtcctgcgctggccagagtcgccgggcccgtgggaatcacggcggctccacgtctccgggacagcagggaatcccaggggcctggtagtgacaccggagggtcc

SEQ ID NO: 327996 - DNA, 122 bp, Homo sapiens
gacccggcgggtggccactgccacccgaactgaggatgagaagaaggaagttggaaggggcggtggatgcgcccagggactctcccagcctgggctctagccccgaaacggtccccggagtg

SEQ ID NO: 327997 - DNA, 122 bp, Homo sapiens
cagccttctgcaccgtgacctggatgacaccaagatgcagaagtcactgtccctcctggacgccgagaaccggggtgggcgaccctacacggagcgcccctcccgtggcctgaccccagatc

SEQ ID NO: 327998 - DNA, 122 bp, Homo sapiens
gctgcaaagattttggaggcgtgtcttcgccagccaatggcgaggttactctcgggccagcgtatcttgaagttttggactggtcttcctgggcaggtaattcagatgactcaactctcagc

SEQ ID NO: 327999 - DNA, 122 bp, Homo sapiens
ccccaccgtggaatggcctggcccccccagccccaccacccccaccccggctgcagattacggagaacggcgagttccgaaacaccgcagaccactagcccacccagcatcagagaccttct

SEQ ID NO: 328000 - DNA, 122 bp, Homo sapiens
atcaattgagctgaaactggcaagaacgtaactccagggagctcacaacacgcaaggacccggatttcccgctgcctgaacgcccaatattcgcacactgataagaacgcctccccataact

SEQ ID NO: 328001 - DNA, 122 bp, Homo sapiens
gcgactcggggcatgctggaatttgtagtttttgtcggtcgctctaatggggcggattcgcgaagactaggacgtcttgggcttctggccgcaagtcccgtctctggaataaccttttctag

SEQ ID NO: 328002 - DNA, 122 bp, Homo sapiens
ggtttcggaaaaaaaaaaaaagaaagaaagaaagaaaagaaaagtcagtgagtaacagagcgaaaaaagaaaacagaacagagcagaaaaagaaaacagaaacagtccaaactccatgtcct

SEQ ID NO: 328003 - DNA, 122 bp, Homo sapiens
gaaggcgaaggcaggtgggggagcttctctgttgcagaccacaggccgccctggtcccagcgcagggcagaagcaattgtgcaagctcgcctctgaccccagctctgggtgttgcttgaggg

SEQ ID NO: 328004 - DNA, 122 bp, Homo sapiens
caccaaacggagcccttaaagggcaatgctctgcgtgtgccacggtgcccaacagcatctcgtgccagctgagctgcggtgtgtggacccggggaatggaccgggctggacaacctctaaga

SEQ ID NO: 328005 - DNA, 122 bp, Homo sapiens
gcaggagcaccgtgcccaccgagggtgtcagagtgacaggggttgccaggcaactccacccgggtggctgatgcccccgtttttaaaggcgttgggtgccgagaattcccctcctgctgcta

SEQ ID NO: 328006 - DNA, 122 bp, Homo sapiens
aaagaatatccatacacctttaactagtcacacttacttaaggggtcacaccccaccttccgctactggcatttctgaatctcagagtagtcttgattcaaggagaacgtgtgttattcttt

SEQ ID NO: 328007 - DNA, 122 bp, Homo sapiens
ccattgtcgaacatgtcctgggaggcggggtccaggctccagtagttgcccttgcctgggcggcccggctcgcgggggatcttgacgaagcagtcgttcagcgagaggttgtggcggatgct

SEQ ID NO: 328008 - DNA, 122 bp, Homo sapiens
tgggggtagaagcggcagagaccgcatattccggaggggctggctccaggccacgcgagccggagctggagacatttccagagccttgaggatggcaccggccctcgcacgctcaactcctg

SEQ ID NO: 328009 - DNA, 122 bp, Homo sapiens
ctcgcaggggaactggttcagcagcacgcctggcctctcctggctgagtttcctgcagggcggaggcaggtgcgccagctcaaggggaggccggcagtgcctagaagccctgactgggaggg

SEQ ID NO: 328010 - DNA, 122 bp, Homo sapiens
tttcagagaaaagaagttcgaggcacaagcctgttgggtggggcgcaactgcagtcccagcgagctgaggatggctgcgccaggcccccttcctgccgctgctctgagtccaggggctccga

SEQ ID NO: 328011 - DNA, 122 bp, Homo sapiens
atgcttccccaagtgcttgctagaagttacttaaaggcaatactgaaacaactcagaactcgaagtctctctatccatatacagcactatcagttcatttagtcaccctagttagattcacc

SEQ ID NO: 328012 - DNA, 122 bp, Homo sapiens
cagccagtcaagttgagaacagcagcagaaacaggaaagggtatttgccttctctaaaaacgtgagaatgcacgagcctcctggtaaagtctggaggggctggagtaatgtagctgcaggaa

SEQ ID NO: 328013 - DNA, 122 bp, Homo sapiens
gcgcaggtccattcgggaattactgcccagcagccgactaagttgcattccttgaatcttcgcagaaaagacaattcttttaatcagagttagtaatgtggacagtacaaaatcgagagagt

SEQ ID NO: 328014 - DNA, 122 bp, Homo sapiens
tgatgtttaatacaagcatgtaccaaatattggggacttcactacacattcgttttttatcggacatgtaaatttaactagacatcctgttatttatatggcaattctacactctgagggaa

SEQ ID NO: 328015 - DNA, 122 bp, Homo sapiens
tgtggttattttgcacagctctctactctcagtccaatgtttggaaatgaggatgctccacgtgctaccctaaagaaccatttatgtaagtggactaagctaaaactgccacagctaaacta

SEQ ID NO: 328016 - DNA, 122 bp, Homo sapiens
gacgtggacgagatccccgagtgggtgcaccagctggtgatccaaaagctggtggagcaccgcgtcatccccgagggcttcgtcaacagcgccgtcatcaacgactaccagcccggcggctg

SEQ ID NO: 328017 - DNA, 122 bp, Homo sapiens
ctccggcccgccccttccacttccggtcttacccggctacttccgctgctgtttcgtagccgactgctgaaggctggtttgcgtcgacatggcggttaccctgagtctcttgctgggcgggc

SEQ ID NO: 328018 - DNA, 122 bp, Homo sapiens
gtctcggcctcttcgcatatccccctccgtgatcctgccttccccccccaccgagcccatcgcaggcagagacacctcctctgcagccccctgggctgcagcccctaagggagagagaacct

SEQ ID NO: 328019 - DNA, 122 bp, Homo sapiens
ttgtgttaagtaagatgttaacatcaggaaactgggagtaggagaactctaccatttttgcgattttctgtaagtctaaaagtatttcagagtaaaaggttgacatttttcatgaatgctat

SEQ ID NO: 328020 - DNA, 122 bp, Homo sapiens
catgggttgagcacttaggaatgaggctgtctgccaggataaagaagtgtcccgaggccccgtccccgcttccggggcgctcgcgctcctcctctccgccccctcgctgtgggctcgcgcag

SEQ ID NO: 328021 - DNA, 122 bp, Homo sapiens
ctccaaggcgcggcgctaccgaacggggcggagccaggctggacggaggcggggctagagcgaggatcccgagggagcgccggggtggggctggttcgtagaaatgaaaaatgacttttttt

SEQ ID NO: 328022 - DNA, 122 bp, Homo sapiens
tcgagcctgagacaggagggagccctggggctgcacaggcttggctcagggaggcagacccgagctgctgcctccattttgtttcctgctcagcttggtctgtggtggtggtggtggtggtg

SEQ ID NO: 328023 - DNA, 122 bp, Homo sapiens
cgggagataactgaatcacaaggggaggtttctcccagactgttcttgacgtagtgaatacgtctcacgagatctgatgatctgacactgttcttgaggtagtgaatacgtctcacgagatc

SEQ ID NO: 328024 - DNA, 122 bp, Homo sapiens
agctaactgtatccaataattttacctatctcagctttgccaaggatcaaccctggtctacgcagttagcaggttaaagtaaactgacaggtctgatttccaagggttccaaacttggcttc

SEQ ID NO: 328025 - DNA, 122 bp, Homo sapiens
ggaaagacaagtgattaaaaaaaagaaaaaaaaaacaatgctgtcaggagcagtggctcacgtctttcatccctgcacttcgggagcctgaggacgggtggattccttgatcccaggcaatc

SEQ ID NO: 328026 - DNA, 122 bp, Homo sapiens
gctctgcgcgtgggcggggagcccggagcctcgccggggcaatgtcatctaggtgctcggcgctccactgatccggcccccgggggtgggcgggcacgtttgcctcggatggtctaacaggc

SEQ ID NO: 328027 - DNA, 122 bp, Homo sapiens
aaggcacggcgtcccttcctgcgtattgtccacatttcctgagccaacagcaattagttgcgctgctgaagcgcatgggtgctgggatcccgaggtgaagggggcgtggtcctgatcgccga

SEQ ID NO: 328028 - DNA, 122 bp, Homo sapiens
gccagcccatgcaactgatccacaatgctgacccaaagcctctggtccttgctgatccagcgcctgacacagagcccctcacatgcagttttaggcctattttcctggcacctggctaacct

SEQ ID NO: 328029 - DNA, 122 bp, Homo sapiens
gtctcagatgcaatcgcgcacccaaattgcatcctgtgaacagaaaaagtctcaaacatgcgtacaaagaatattcagaagcagaagcaatttctgaagagcgaggcccgggactgagttgg

SEQ ID NO: 328030 - DNA, 122 bp, Homo sapiens
caggaagccatcaagccagctgattccaggcaagcaggtccaagttatcagattcacctgcgcagagcaaatggctaggaagcggcttccggatctcttgaagggccatgcagtgaaggtcc

SEQ ID NO: 328031 - DNA, 122 bp, Homo sapiens
caaatgaatgaagggctgaggctgaaagagtgcaggcacagtgctaaaggcgtctggtaccggtctggtgctcgctcactcgctgtgactttaagcagaaccctccccgaaacttcgtttct

SEQ ID NO: 328032 - DNA, 122 bp, Homo sapiens
atgacgaccgccatcttggagcgcctgagcaccctgtcggtcagcgggcagcagctgcgccgcctgcccaagatcctggaggatgggcttcccaagatgccttgcactgtcccagaaacgga

SEQ ID NO: 328033 - DNA, 122 bp, Homo sapiens
aacggagcatcgtagagggaaaatgccagaaagcaggcagtgcaccaatgaaaacaggctcgcgggagaaccaaagggtggcaagctcagcacggccagtagctttcaccctcggttgccag

SEQ ID NO: 328034 - DNA, 122 bp, Homo sapiens
ggatctgtgtgcggtcagcacgtctacaggattctagaatggatgacgtccccaccccggcgctctaagccccgttccctcctcccgcacctgccctaggccctggggtttctaccagggga

SEQ ID NO: 328035 - DNA, 122 bp, Homo sapiens
aagtttttattatttcttagatggctataataaaccacttatttggttttctggtccccacgtattcttgactctgatccatcctccacaccacacccaaagtgatctttccaaaaggcaaa

SEQ ID NO: 328036 - DNA, 122 bp, Homo sapiens
aggcgagtgaaggacctagggactggaatctcattggccccagggctgtgcccctggactcgctctcgggaagccaagccaggtccaactgataaccgcattccttgaggaccctcggccgg

SEQ ID NO: 328037 - DNA, 122 bp, Homo sapiens
tctctgttctgtctaccataaaccgatttctcaacttcctaccagacccaggagcagagccgaagccgcccggggctttgttaggccggggggaaacgttttttggtctcttgcttctgatc

SEQ ID NO: 328038 - DNA, 122 bp, Homo sapiens
caaaccctgtccacctggccccaaagcctgaactgcttggattacacggcatttcccctacggtctccatcttctggtcatctctgtatgaaagctgaaacaagagggtagagtgacttgtt

SEQ ID NO: 328039 - DNA, 122 bp, Homo sapiens
cctaacaggccgttctgccgctggtattgccgctcctctgtacactgtccgcgccgcgtgcgggtccctctgctaggaccgcgccttcaacgcggaatcgctgacatgagcccagacggaga

SEQ ID NO: 328040 - DNA, 122 bp, Homo sapiens
gcgcaggcgcagagcgtgccgccgcggggccggggtttgcctccaccaccccgcgccgctcgggcgctcttggttcttcccaggaaagggcaatggagtatatcctcctcgcgctgagcaca

SEQ ID NO: 328041 - DNA, 122 bp, Homo sapiens
gggccgtgggcagaaggtactggcttgtaaaggtgttggggtcgctgatgggttgggactcgggagacttgcggaacctccaggagctgccgcgtttagagcaaaagttagctcttttgctc

SEQ ID NO: 328042 - DNA, 122 bp, Homo sapiens
tgtcaggaacatgaaataagaggtggaaacaaagggatggcaggggatagtactagaaaacgagcaagccagaactaagaggctatgcaagagaaagggcaggcagaaaaggtcactggact

SEQ ID NO: 328043 - DNA, 122 bp, Homo sapiens
cggaggcgaatcgctgaggcccggaagtgacgcaatcgcggagccggtcccgggaaggggcgtggttccggttagcctctgccactcgtaggtaggccaggcagagcgaagctgtctgaccc

SEQ ID NO: 328044 - DNA, 122 bp, Homo sapiens
ccatcagaacttgaggttatacaggctgtccagtaagtggggaatagcacaaacccttcccgaccctattccagatacatgattaaaacagacagaaaatgatcctaattgcatattcacca

SEQ ID NO: 328045 - DNA, 122 bp, Homo sapiens
gactcctctgcccctgccctgccagggagttgcccacctgccattcgatcaactggaaggcgatgacccagcatccccaaaagggttgttagaaagccacccgcgtccttcaacactggaag

SEQ ID NO: 328046 - DNA, 122 bp, Homo sapiens
gatgggtgagatttgagtctgttgctgaaccgaggaaaatgagccccccaagccccatagcgaggtagagtttaaacttcgggacagagaggggatgtcaaaacaggcaaagtccatgggag

SEQ ID NO: 328047 - DNA, 122 bp, Homo sapiens
ggtctctgagatgccatcactcacagcttctccccatcagccagggccttggacacagcccgagcctgagttgaaacctggccctggaacaggaagtgcttggaagcttccctgccgttgcc

SEQ ID NO: 328048 - DNA, 122 bp, Homo sapiens
gacgccgcgccctcgcctctgggcgcctgcgagtctgcggcccgcaggtgacggagctcacggtgtaagtgcctccgggcacccccgatctaaggcgggatccacggatcccgtgtggcccc

SEQ ID NO: 328049 - DNA, 122 bp, Homo sapiens
caacacaaagaggcaacacgtaagaggtagtgtatcaccggctaagatgtatatgcccatcggggacctgaatacagcttagtgttttggaaaataagacatattagactgtggcttgtaat

SEQ ID NO: 328050 - DNA, 122 bp, Homo sapiens
ctgaggcccggcgaggtgctggagggagcggggcgcggatccggcccagatgggcagctccgtccgcggggtcagggccgggcttcggcttcaccgcagcctcgcctgagcgggcgcctctg

SEQ ID NO: 328051 - DNA, 122 bp, Homo sapiens
aggggaaaagttacagaagacccgtcaaagcgcccaaagcaatttgtcccttcttttcttcgccagcggtggctcacggatccctaagggacagctggggacccaggcgcccccagcccagc

SEQ ID NO: 328052 - DNA, 122 bp, Homo sapiens
tccgctacggcgcaggggacgggaagggagcggaggcgagcgagttgctgccgcagctcccgcagtgttttctgtcaaggtcaagcatacccactctttgacaaggctgcctccgaaatccc

SEQ ID NO: 328053 - DNA, 122 bp, Homo sapiens
tcacggtgcccagagatgcacagcgggattttcccgccacgccatgcattctccacaggccgagagtgtgctgtgaaaccgcaaggctgaaaccaccttcacgctgggagcaaacgaaagga

SEQ ID NO: 328054 - DNA, 122 bp, Homo sapiens
aagctctacttttatacacctttcatattgaaaaggaagaaatctgatagcatcttccttcgtgaacaatagttcagagtacaagtccagggggcttcccaatagtcagcttcaatgttaag

SEQ ID NO: 328055 - DNA, 122 bp, Homo sapiens
cgggcttggggatccactgaagcgggaccggcagcagcaacagggacaggcccaccaggacgctggcgcccagcgaggtcagccgcgtctccttcacgttcacaatcctgcggtggcccgag

SEQ ID NO: 328056 - DNA, 122 bp, Homo sapiens
gtctgtggttgttcctctccacaccgggtcttagacctgggttgctaagagctggcccaccgagccctgctccgctccagctccctggaggcgtctagtgcaggagggtgaagtactgcttg

SEQ ID NO: 328057 - DNA, 122 bp, Homo sapiens
aaaaccactagcattccaatatgtattcaacagcaagctaacaatataacaggagaaaagcgatagcaaaaaaatgagacaacattctgaagaatttcacataaaagaagattcgaatacct

SEQ ID NO: 328058 - DNA, 122 bp, Homo sapiens
tgttgaacctaaacacaaaaatggacaattttccaagtatctttgggtctccattctgaacgctcccatgtatacacattaaatttgtatgccttttctcctattaattttttcttctatta

SEQ ID NO: 328059 - DNA, 122 bp, Homo sapiens
agtttgcagatgagcttatggggggcaatcttaaaaagtccacagcagatgcatccggctcgaggggccatcagctttgaataaatgcttgttccagagcccatgaatgccagcaggcaccc

SEQ ID NO: 328060 - DNA, 122 bp, Homo sapiens
acactggtttggtagcctcagaggagctcagtagggagggccaggaacctaaggttacagcgaggtctttagagctgcacaggcctgcctggtttaatcccagttcttctgctaattggctg

SEQ ID NO: 328061 - DNA, 122 bp, Homo sapiens
tacgaagcacgtagcacttagaatgggagctagcactgatttttcctagatccaaccacacgagcaagcaggcacctaactaaacaaattgtgacacaatcgtgacagcccggagactgcat

SEQ ID NO: 328062 - DNA, 122 bp, Homo sapiens
ttcagcaaaaaaatcctccaaatgattcaaacaggactgtatactcttcctctctctccacgggtgtatatgtgtgtatacatatagatattatactagcaatttagaaaatttcctgagcc

SEQ ID NO: 328063 - DNA, 122 bp, Homo sapiens
ggtcagaagcaaggctttccatagttgtgcacacattcctgatggtctctgcgtggtactcgtaagttcagacaagccatattaattccagacttaatcatcaacatttccaccaatcagga

SEQ ID NO: 328064 - DNA, 122 bp, Homo sapiens
cggcggccgcggggaacgatgcaacctgttggtgacgcttggcaactgcaggggcgcccgcggtccctgcccccacgccctccgcgcgggccccgccaccccggccccgacggcgcctgcac

SEQ ID NO: 328065 - DNA, 122 bp, Homo sapiens
gatcctccacgggcgaggatcacgtagagacgtgtagagacgcgacgaagcacgaagacccgtgtttgacgggttgccaggtgcctacatcagagctcattaaattacacattaaatagatg

SEQ ID NO: 328066 - DNA, 122 bp, Homo sapiens
gtgatcccaacactgagtgagtcaacacagtaactgatgccaggattctgtagaggcccccggatatttcaaattccaggacctgcgcacaagcaagtgacccgccttctctctcaagttgg

SEQ ID NO: 328067 - DNA, 122 bp, Homo sapiens
gcgctggcaatggactaggaagctcggctgccgctgctactgctcccccctgggctccggcgagagcctttccctgtcaagcaagaggggtgaggatcatatttttattttggaaactaaaa

SEQ ID NO: 328068 - DNA, 122 bp, Homo sapiens
agtgcactgagacaggcaattgtgtgtgtgtgtgtgtgtgtgcgtgcacatgtgtgtgtgcgtgcacacgcgtgcacagtgcctatgattaaaagggtctgttgggtttaatggatgcattt

SEQ ID NO: 328069 - DNA, 122 bp, Homo sapiens
acccctagtggtcggtaacgaccggaagcagagcagccgggcagggctgggaggctcaggcgtccgacaggcagctctggatccggtccacccactgctgggccgagggcacgtcctgggca

SEQ ID NO: 328070 - DNA, 122 bp, Homo sapiens
ggttccgcaagactggcctggaaagagccgcctctttctgtcttttgtgtgctttgtcaccgcggcactggcagggtgtcttaagcctattgaagccgtccaggaaatgtgcgttgaatgaa

SEQ ID NO: 328071 - DNA, 122 bp, Homo sapiens
gtcttcctagcagaagctgtgcgtccaaggaggtcctcctggccggattagccgtgcctacgctcctgaagacgctaaatgggcaaattgtcagggagcagggcccgggcagggacaccagc

SEQ ID NO: 328072 - DNA, 122 bp, Homo sapiens
ggccctgtgtgagttctgggtgggcgtgggctgggcgggcccgcactcggagaggctggccggcgccaccggccttgggcagtgagagttaggcgggccagcagctgcggagggtgcacctg

SEQ ID NO: 328073 - DNA, 122 bp, Homo sapiens
ccaggacctgcaggagcagaggctgcgaggccagccacgtccacctcgatcacgtcacctcgtgggcagaatggcctacgccccatgtcctcccagccccacccagaacccacggtgagcac

SEQ ID NO: 328074 - DNA, 122 bp, Homo sapiens
cggggccgactgccaagggaaaggatggaaagaagtattcctcgctcaacctgtttgatacgtataagggcaagtccttagagatccagaaacccgctggtgagagtcctgcaaagatgctt

SEQ ID NO: 328075 - DNA, 122 bp, Homo sapiens
ccgcggggattttggcctaaaccgaaaatgaaaccgggtaaaggcgactggggctctctccggtcgagggtctgggcgggttccgcagatccaccttggggtggatctcagacggggagact

SEQ ID NO: 328076 - DNA, 122 bp, Homo sapiens
gggcgtggaagggggccggggaatttgaggccagataacgggaagtgtgagccgattggccggacttctcactccacggcccagccgtttacggatcgcggaggccatccatcaaaagaatt

SEQ ID NO: 328077 - DNA, 122 bp, Homo sapiens
gcatttttagaaacaaaatatacaaagtgagaaaaaaaccttcagaggacagatgaatgtcgcttgggttttaaaaaggaagggtgttaacatgcataacagaaataaatgatggctagcta

SEQ ID NO: 328078 - DNA, 122 bp, Homo sapiens
tcaggatagattagcttttagtagataagtcaagctccgttattttgttttttgcttttgcgtgtgtgtgaaattgagatggcagctttgcacaaaataaacaagatgttgactagcacaag

SEQ ID NO: 328079 - DNA, 122 bp, Homo sapiens
cagataaagcggtcactggctcgcctgcccttctgctggggcactcaccccgcccgctgtcgcccatcccgtcccgtccagcctcccctggctccggctccggggtttgttgttctccgcct

SEQ ID NO: 328080 - DNA, 122 bp, Homo sapiens
atttagttctgaaatttacaattgttgtactatgcaaatgaattcccttttgctctctctcgttctcatgactgaaatgaaattttaatcccccatctgtgacttcacaaaaatccctatgg

SEQ ID NO: 328081 - DNA, 122 bp, Homo sapiens
aagaacgaacgaaatctacgcggacccttaggtctccaaaaaggaagcagccctgcattacgtttaaacaaagagcccagcgcccttcagctcctgtggcttgcggtgatcgtattgtggtt

SEQ ID NO: 328082 - DNA, 122 bp, Homo sapiens
caagtgagaccccatctctacaaaaaattttaaaattagcaaggcatagtggcactcgcccgtaatcccagctactcaggaggctgaagtgggaggatcatttgagtccagggggtcaaggc

SEQ ID NO: 328083 - DNA, 122 bp, Homo sapiens
gggccccagcgtccagctcctgacaacgtgtggctgcagtgtcacccatggggccctgggcgggggctgctgaggggtgtatggaaactctgtactctgctcaatttccctgtgaacacaga

SEQ ID NO: 328084 - DNA, 122 bp, Homo sapiens
cccacctgctcacaaggcgcagggtgtacagcggcgggtgaccgctagatggcggcggagcgcctccgaccacctgggtcgggggtgtgtcggggatgtttcctggagagaggggaggaaag

SEQ ID NO: 328085 - DNA, 122 bp, Homo sapiens
gctttgtttgccattatcttctgtttgtacaatgagccacaagtgagcaccgccttggcgcgcacccaccttgcccgggcctctgtcccctccagccgcgctccaccggcgccctcgccccg

SEQ ID NO: 328086 - DNA, 122 bp, Homo sapiens
attcagggcagggacatttccattagaatggtgctcttaaaaatagaaactgaaccggggcggtggtcaggctaaggccaagtgtttaagaagtagagtgtagctgccagcgtagaaaccca

SEQ ID NO: 328087 - DNA, 122 bp, Homo sapiens
tcctgggatgtcaacattggaagggcccccagagatctgagagtccaaccctttgtctcacgtgccatctcagttgcaaactgggtttagatcccaggttgtctgcctcccagaccaaagtt

SEQ ID NO: 328088 - DNA, 122 bp, Homo sapiens
aggagacagcccccgcaccgccccttttcgattcgtttgcatgatctacggcgcggtttccggcggcagagacatgttttccggtcgtcccttggctcgattttcttccggggcgggacttc

SEQ ID NO: 328089 - DNA, 122 bp, Homo sapiens
ttcctctcctccccccgcccccccgggcagtgcccgctgcgtgttccctgattcggcccccggctgtgcaatcagctccaggtaacctgcggggacccgtaattgctctggagttgcctgcg

SEQ ID NO: 328090 - DNA, 122 bp, Homo sapiens
ggctagatcttcagggtgggcttcgttcttgtggaaatcagtcaagaaagatcggattcgcggttatttatgcaaatcatctgggtggattgtgtacggagttaaactgcgccttctggacc

SEQ ID NO: 328091 - DNA, 122 bp, Homo sapiens
tgaggttctgccaggcgcacacctatgccggcggcctccaagacgtggagatcactgcggcgctttctcgccccgccccggcccctgcaggccccgcccttggtcatgaatatttaaagaag

SEQ ID NO: 328092 - DNA, 122 bp, Homo sapiens
gaaaaatggctgaatctacttcggaaaagaataaaaccgttaccccaggatctcgcaaagcgagaattgactggtaactgccatcacgcttccaaggctcatcattcactgggctactgacc

SEQ ID NO: 328093 - DNA, 122 bp, Homo sapiens
tccggcgcctggctctgccgggcggcctgggtggggccggcgccggggctcggccccccccgcccctctgcggcctctgagcagccattggccgcgcccccgccccacttcccgccccgccc

SEQ ID NO: 328094 - DNA, 122 bp, Homo sapiens
aacctctcaagctagggctgactacaaacgacaaagtcctgtaacacagagctcagatagcggatttcaaacgttttgttcatgaaaatgtaacctctgtgtcgtcttggaacagtgttcag

SEQ ID NO: 328095 - DNA, 122 bp, Homo sapiens
gagttagagctggcagagtccaattgctcagagcgccgaggcgggggcggggcagggggacgcttgcaggtccggtggtcccgcgggctgcgagcccccacggccgaccctagctgcagacc

SEQ ID NO: 328096 - DNA, 122 bp, Homo sapiens
cagagggacacagccaacgtggggtcccttctaggctgacagccgctctccagccactgccgcgagcccgtctgctcccgccctgcccgtgcactctccgcagccgccctccgccaagcccc

SEQ ID NO: 328097 - DNA, 122 bp, Homo sapiens
ctttgcttcccagtaatttcggttcatacgtcaacttttccttccgttgcagggtagcggcgaagaaatccaccagaaagacaatcaaagtaacattaaaaagctcaaattttacaaaagtt

SEQ ID NO: 328098 - DNA, 122 bp, Homo sapiens
gcacaatgcccactacaaaggcccttgagaatttaaataacaaaagaaatgacagcccagcgcataataaggactcaaccaaagttgtttcttcgtatcaatcaagcattgcattcagccat

SEQ ID NO: 328099 - DNA, 122 bp, Homo sapiens
cgctgtgagcggcggcgagcaggtgagaggttggctggcggcccgcgacaggcagcaaagcggtgtgtgccgggcggtgacacgtggacgccacaggaaagagaggaagcgcctgagagtcg

SEQ ID NO: 328100 - DNA, 122 bp, Homo sapiens
tttacatgtaaatatatgtttacctacaaatatatctttaataagtaatacggtgtctgtcgcacatatattatatcgtgtatgtaatgtataagtatttatttcgtttgcttggggttttg

SEQ ID NO: 328101 - DNA, 122 bp, Homo sapiens
ctaggatatcagtaattatatcctcctcaaagaaaacacaaaatatttccaaacaaaaatcgctgttgccagatcagactattaaattgtccacagcttctcaaattttcttatacagagaa

SEQ ID NO: 328102 - DNA, 122 bp, Homo sapiens
tctttcaaagtagcctcattgttcttcagtgatgtcccaatttgtcccgggtgtggctggcgagggcgcgtggccccggaggtgctggtggtcctgtgggtccatgcctcctccctgtgtgt

SEQ ID NO: 328103 - DNA, 122 bp, Homo sapiens
tagcaaaaaatgcatgctttcctaagaaaacagagcctcgctttacactgggaacacatacgtgctgtgaaactggactttgatttaacccctgcgagaggaaattctgatggaactgtggc

SEQ ID NO: 328104 - DNA, 122 bp, Homo sapiens
accttaatttaaaacatttacttttgaaacctactagtcgtaaaattgaaccgcagtgaacgagcacccagctcttaccacgactcactctctggagagttctggcgcctcggcgctggctc

SEQ ID NO: 328105 - DNA, 122 bp, Homo sapiens
ttaagagctgtaacactcaccgcgaaggtctgcagcttcactcctgagccagcgagaccacgaacccaccagaaggaagaaactcgtaaacccatccgaacatcagaaggaacaaactccag

SEQ ID NO: 328106 - DNA, 122 bp, Homo sapiens
ccgggatccagcccctggggggacgaacggggagactgaggcgggaggcggggccggccacgatccctacacccagaaatctagctccgggaaggagggacacctaggcgaggggtcgaaaa

SEQ ID NO: 328107 - DNA, 122 bp, Homo sapiens
acattgcgggtgttatcataatactctgaagggggggaaaacgggtcggggggatgtaggcggtgctgaaatgaccggctttgaagaacctgcaggcaaagtttcgtccaatcgtctgagcc

SEQ ID NO: 328108 - DNA, 122 bp, Homo sapiens
ttctgctcggtcagcaaatggctgagctggtacatctcgctctccaggtaggagatctcgcgggccgtctctatgaactgccggtagttctggtagacgttgcgcttcaggttctgcgccgt

SEQ ID NO: 328109 - DNA, 122 bp, Homo sapiens
gcggcgccgggtggggatggggtcgcagacgctgcagatcctccgacagggggtgtgggccgcgctcagcgggggctggtactacgacccgcaccaggccaccttcgtgaacgcgctgcacc

SEQ ID NO: 328110 - DNA, 122 bp, Homo sapiens
ggaccctgtgccgcggcggagtccaagatggcggcgtgcggttccgctgtgtgaaacgagcgcggggcggcgggttactcagctccgcggagacgacctccgacgacccgcaacaatgaagg

SEQ ID NO: 328111 - DNA, 122 bp, Homo sapiens
ctcccaggccttgtgtctctcccagactctgggcaggcaattccccagacatgggaagagcgtcatctgcaccactgaaaattatgaaaaatctccccaccatgatatgatgtctgtgccct

SEQ ID NO: 328112 - DNA, 122 bp, Homo sapiens
ggcagcacttgttaggaaatctttatgtagcatgggtcacttaccctggtgaaggaaaggcgaggaaggcgtcgagttcagacttcaaatacacatgaggtacctgggattaggggaaagaa

SEQ ID NO: 328113 - DNA, 122 bp, Homo sapiens
actacaggcgctcaccacaactggctaattaaaaaaaaattttttttagggacagggtctcgccaagttggctagactggtctcaaactcctgctacaagtgatcttcacgcctcagcctcc

SEQ ID NO: 328114 - DNA, 122 bp, Homo sapiens
agtcccgcggcggggcggggcgctccccaatcccgcccagctgcgcccccggccggccaacgctgcgccccgccccctaccgggacctaggcgctgattggcccctgagagaccctttgcgc

SEQ ID NO: 328115 - DNA, 122 bp, Homo sapiens
attatgtttttgcctgtcaggacatcggcttataattttggaaagcattcacagttggggcgggtaagacatagataaagaggccaatcacaataccaggggtaagatcaataggaaaacca

SEQ ID NO: 328116 - DNA, 122 bp, Homo sapiens
aaattcaaagcccactctgacccttttcctgttgcccatttcacaattctgctgtatccccgcttccctatccccacaccctctcctgcagccatgtcccaggcagcctgcagttagtggga

SEQ ID NO: 328117 - DNA, 122 bp, Homo sapiens
gtcccatagctgtactgcccaggtcgagctttctaaccccaagatgccactccgttcagacgttcccatcctccatccctgagacccggggcaggatcgcagcctaggggcctcacgggccg

SEQ ID NO: 328118 - DNA, 122 bp, Homo sapiens
tgacctcgtgatccacctgcctcagcctcccaaagtgctgggattacaggcatgaaccaccgcgcctggcctattttttattgattttttagagatggagtcttgctttgttgcccaggcta

SEQ ID NO: 328119 - DNA, 122 bp, Homo sapiens
aaccggaactgggtacaggcgcgatgtccacactcaccattttgacagttgtttggatcccgttcaaactggcagtcacacttgtagtgtgtttaggagcagtttttgcacaacttaaggaa

SEQ ID NO: 328120 - DNA, 122 bp, Homo sapiens
gttgtcgctggcttggttctttggcccagcctcccccgctgctaattgccattttggcaccgggtggaaaggcaagttcaagagggcgggggctctcgggaatcgctggatgtcttcttcct

SEQ ID NO: 328121 - DNA, 122 bp, Homo sapiens
ggaggcggggtcaagggggcgtccccggctagggagggtgaactgggacctaggcccgggcggagcggggtgggctgtgtccttggcgccggggctgggtctagggttgagccggcggctcg

SEQ ID NO: 328122 - DNA, 122 bp, Homo sapiens
ttctcacaaagaagttagagaagatggttagccagaaagccctatccctgtttaatgaaacgtgagctattgtgatgagtgccctgtattttatgtatgttacaagcctatttggtttgcat

SEQ ID NO: 328123 - DNA, 122 bp, Homo sapiens
gagtagattccagctcaataagccactttctttgctcatccctcagaagccactcctcatcggttcatgtgttatcctgagattgcagcaactcagtcccatcttcaggatccatgtctagt

SEQ ID NO: 328124 - DNA, 122 bp, Homo sapiens
cccgcaccctccaaccaatggcgtggctcgatcggctcctatgcaaatctgcagaggcctcggcattcattgagaaaaggagtgagcccgccccaccctccctctgttccctctccagtctc

SEQ ID NO: 328125 - DNA, 122 bp, Homo sapiens
tttaaccaggttttctttttctttttgtttcccacttatacctttcctgcaggttccactcgcttttaatggcactccttgagagatttctttgagggagatggggaggtgctcagtgttgg

SEQ ID NO: 328126 - DNA, 122 bp, Homo sapiens
atcactgtagtaaaatcttcgagtgggaaaaatataaagaaaacaaaatccaactaaggccgtttttccccaggaaaggcattagtcaggcagccgctggagccagccacctctcaagagcc

SEQ ID NO: 328127 - DNA, 122 bp, Homo sapiens
agtccttgtcgctgaccctccccaggcagctgggggctgaacgaggaggagcggctgatccggcacctgtttcaagagaagggctacaacaaggagctccggcccgtggcacacaaagagga

SEQ ID NO: 328128 - DNA, 122 bp, Homo sapiens
agggcctctgtctgcccagctgcctccccctttgggttttgccagactccacagtgcatacgtgggctccaacaggtcctcttccctcccagtcactgactaaccccggaaccacacagctt

SEQ ID NO: 328129 - DNA, 122 bp, Homo sapiens
actataattgttgctttttgaactttcggggtgggggtgggtgatgtagcaattgttttgcgtagtttggcgtatatatgttagaatttgtttttaagttttacttttgggaaacagttaaa

SEQ ID NO: 328130 - DNA, 122 bp, Homo sapiens
cggtcctctcttgagagtcggcttttactgcttttgtggttctgtaaagtccgtagcttacggttggcaggaaacattgacgggcggctctttgagccagcgcttctgtcattcctgtgcac

SEQ ID NO: 328131 - DNA, 122 bp, Homo sapiens
cactgatttgttgttcaggaacaggaaatgaaaccccgcagctttgaacacaataacccacgccagcctcaggctcatgaatattcagcaggctgcttgcgccttgcaaccccgcctccgtt

SEQ ID NO: 328132 - DNA, 122 bp, Homo sapiens
ttcatcccatcctatcagggtcatgctatcaacatgacttgctaatgtttatgttaacctcgatcacctggctgagatagtgtttggccggtatcttcactgtaaagttactctttcccttt

SEQ ID NO: 328133 - DNA, 122 bp, Homo sapiens
actcgcagcacctggattatatcaccgagaagctctggcgcaacgcgttgctcgctggggcggtgccggtggtgctgggcccagaccgtgccaactacgagcgctttgtgccccgcggcgcc

SEQ ID NO: 328134 - DNA, 122 bp, Homo sapiens
tctgtttgtccagtgacctgcccctgcccccagcctccctgactctgggattctgggaatcgactccatgactccagcctgctcagagttccaggcaggcaggacaggctgctctgggagcc

SEQ ID NO: 328135 - DNA, 122 bp, Homo sapiens
tttgtttcaaacccagcaccttggatcctgcccaggcggccccataaaaggaactgctcccggctgggatatgctttgggctactgtgtgcccatgtgcggtcacacctcgaggacatatga

SEQ ID NO: 328136 - DNA, 122 bp, Homo sapiens
ccctctgcccggccggtgtggaccgtcccggccattgtttacgggggatgcccgtccagacgcattgttttggccgtttccaacttgccccggccctttccggggcatcgcgggggacccta

SEQ ID NO: 328137 - DNA, 122 bp, Homo sapiens
aagagaaaccaccctggcctggggctggtgtgggttttggacctcgggcaaaactttccacggtggactttcctcatctgtaagtcagggatgtgaaccccgagcttgcgtaggctcctctc

SEQ ID NO: 328138 - DNA, 122 bp, Homo sapiens
caacatgtatctgtccattattaaccctctgaggagctagaaatgcagaactatccacttcgttgcctataaaaacagatcctcaaattaaaaaaacaaatacatctgatttgattttctcc

SEQ ID NO: 328139 - DNA, 122 bp, Homo sapiens
atgcagcggccactgcggctgccgagcggcgtcttcccagagcccggggctgtgcccgcccgatgcaggatgcaactgaggaagcccgctccaaagcaaaacaaaacaaattcctccagcca

SEQ ID NO: 328140 - DNA, 122 bp, Homo sapiens
taagggttaagatcaacgagagtgggccatcactgtttcctagaacggccccagcaaagccgccgggggagatgagggtaacttcctgtttctgccttccgggtttgagagtttaggaccct

SEQ ID NO: 328141 - DNA, 122 bp, Homo sapiens
gaagcattagcctgcctctttgagagggatgaggagttctcggcttctatatttgaaaatcgaaaaataaatattttccttggtacagctgtgaagatagaaataaatgagattgtgtatgt

SEQ ID NO: 328142 - DNA, 122 bp, Homo sapiens
caatacaaagagtcagaggtataataaaagaataaagaatgttggggagagatgtgaacccgttgagagtcctgagagaactggagaaaaacttcacacagtaggggtgacacttcagaagg

SEQ ID NO: 328143 - DNA, 122 bp, Homo sapiens
gcaccgggcgtgccgggagtggagtgggcggtccgaggccggggctcagaggccagctcgcgcctgccctgcgcgctgtggttgcggacgccccgaacccggaagcgcggtcccgcgcgcgg

SEQ ID NO: 328144 - DNA, 122 bp, Homo sapiens
gtcgctcttcacgtctgacctgatggtggggctggtggtgatgccgccggccatgctgaacgcgctgtacgggcgctgggtgctggcgcgcggcctctgcctgctctggaccgccttcgacg

SEQ ID NO: 328145 - DNA, 122 bp, Homo sapiens
ggcgatggaaagaatgaatgaatagtgagaccgaagatcgcggccgtaagcctctgggcacgggtgccccggggcctggcggaacgctcagggaactacatttcccgtgaagctctgggcgc

SEQ ID NO: 328146 - DNA, 122 bp, Homo sapiens
ccgagccagcagtgacagcccgctggagtcccattccacacggcggaagctttgttctttcgctctttgcaataaatcttgctactgctcactctttgggtccacggactgcttttatgagc

SEQ ID NO: 328147 - DNA, 122 bp, Homo sapiens
gaggcactgactgtgcagggttgagtcccagagtggataggtgggtggggtgagttttcccgatggcctggcttgctgacctctgggcctcggccagggacaccctccccaactgtcgctta

SEQ ID NO: 328148 - DNA, 122 bp, Homo sapiens
ggaaggcttcctgcaggaggaggaggggctcaggcacagccacgaaggttgggggaggagcgggaatcccccctgatgagatgcactccttgcctggtgtggacacacaccccagaagggtc

SEQ ID NO: 328149 - DNA, 122 bp, Homo sapiens
actccgtctcaaaaaaaaataatcaggactagggaggccctaaatcgaccgttttcactgcgtcatgtgaaccattcaaggcctgaatgtcggattttcctattgctgcatgtgaaccaatt

SEQ ID NO: 328150 - DNA, 122 bp, Homo sapiens
ctggacagtggcaagggaaggctgactcctcaccatcctttccagggggctgggaatctgcgcggccttgtccaggagctcgctgtactccagctcctcgcagagcctctgcagcgtgttca

SEQ ID NO: 328151 - DNA, 122 bp, Homo sapiens
taccttgaagagtctccctctcaggaaaaaagagacaccaggaaggggctgtccaagtcacgctgggactccgaatggggccatggcacttaaccatagcttgctgggagcctctgccctgc

SEQ ID NO: 328152 - DNA, 122 bp, Homo sapiens
tcacgaataagccgtgtgtgaagaacgccaggtcccggcagaagatcgctgcccggcgtgcgaactcccccacggtgcaccagggccgccgccctgcatcctccaacctcagctccccggca

SEQ ID NO: 328153 - DNA, 122 bp, Homo sapiens
gcaaacagaaggcgctcagtaagtggagattgttattaaactattactacgatgacactgcgagttcattctggctggagagagtgtctatactcgtttgaaatcacctatgggtgcgtgca

SEQ ID NO: 328154 - DNA, 122 bp, Homo sapiens
tccggcgtcgcttcagcctccgaggggtctgcggaggcgacgtcccagtcaggagggatgcgcgcctgcgagccccccggggatctcggagccgctccactgcggtgcctgccgctatcttc

SEQ ID NO: 328155 - DNA, 122 bp, Homo sapiens
caccttgatccagatgctcctctctgggcagatggaaggacagggccagtgctccgcagccgccgccagggcctttatacgctcaccggcagcacctccccaccggcttctcattaaccagc

SEQ ID NO: 328156 - DNA, 122 bp, Homo sapiens
agggatggggtctcgtggccagcaagcaaagtttgaactcagctctccgactccagaagccgttctctaatccacgactctgtacttagcatttcttgtgtagatttgtccgggggcttcag

SEQ ID NO: 328157 - DNA, 122 bp, Homo sapiens
gtcgccaggtccggagccgcgcaccaggttgccaggaggaggcgggagcgcggaggcgcccggggtgagacgggggcaccctctgcatcataaaggacccagacgccagcaccctcaacgtc

SEQ ID NO: 328158 - DNA, 122 bp, Homo sapiens
agtgtgagagtgtgtgtgtgtgtgcgtgtgtgagtgtgtgtgcagaatgtctctttgtggcgctggatggcagaggtcctgatcctgggaagaaggaggcactttctcaccaagagcagaag

SEQ ID NO: 328159 - DNA, 122 bp, Homo sapiens
atggcctggcacaggcacacgcggccagggacgctcagcccggatgatgtgggttacttacggcttcgccaggctgcagggccggagctgtgggggagaaagcggagagtcaccctggagcc

SEQ ID NO: 328160 - DNA, 122 bp, Homo sapiens
ccatggtcatgctggtcacacagcaggccctcgtggctcccgtctctcccggccaatgggcgtggacagcgtgcgccatgccaagggaggctccgacctgcccaggccctgttggcggccgc

SEQ ID NO: 328161 - DNA, 122 bp, Homo sapiens
cgcgctccgtcccgttggtgaagtagcacatgcccttaaactggaacacgaaatcctctgcggggaatcaccggccggtcagtcaggccccagcccggccgcccccgcagccgccgccctga

SEQ ID NO: 328162 - DNA, 122 bp, Homo sapiens
cacgttattctcttgcatttattataccccatggtgagggaacaaatctttccctgagtccgcacaggcactgaattatgatcaatgtcagttgggagacaggaaatgtgttagtggttgta

SEQ ID NO: 328163 - DNA, 122 bp, Homo sapiens
agtgtggcggctcagaccgtgctggctcactaactgacgacctagccacaacgttgtcctcgctgccagcccaagacaggcccacctaacccacagcagggaggcattcgggaatgtgtcca

SEQ ID NO: 328164 - DNA, 122 bp, Homo sapiens
ctcagatttgcagagtgtgtccttagtcgtccgttgggaagctgacgggcaggggcaccgcggggctgggccagggctgtgcttttgtgagatgcaaactatagtaatgaagggcccagatt

SEQ ID NO: 328165 - DNA, 122 bp, Homo sapiens
tcactgccactgcccccagctcccgccgcccgacgctccttctcacggcccggggcccggcggctgctccgggtggacccactgcttttgctccctgggagtgagaacaggatggggaagga

SEQ ID NO: 328166 - DNA, 122 bp, Homo sapiens
tgttctctagtcctagtctgcacaaaggaagcactggatagacgctgtgtgcacattgaccgttctggcaacttggaaaggagaggtaccccgcgttagcaaaaacagatattgactcaggg

SEQ ID NO: 328167 - DNA, 122 bp, Homo sapiens
aaccgacaggggctccgccaacaactctgcgtcccgctctcgcggcccggacggcagcagcgcaggttaactggaaatggctggcaaggaaaacaccttttaaaataataaaaacaaaccac

SEQ ID NO: 328168 - DNA, 122 bp, Homo sapiens
acaggctcgcccacaggtaccttccgagcatgcgtggggaagtagcacgcaggcgcggcacgccccgcgcatgcctggtgcacagagtctgcaggtcgggcggtagcgacaggtcagagctg

SEQ ID NO: 328169 - DNA, 122 bp, Homo sapiens
aatccatttcgctatcatattcatcggcgtaaatctaactttcttcccacaacactttctcggcctatccggaatgccccgacgttactcggactatcccgatgcatacaccacatgaaata

SEQ ID NO: 328170 - DNA, 122 bp, Homo sapiens
cagacagtggatggcccttgttcaaagactgatgggaacacctagtgtacgaggtggcgccggggccgcccacaccaacaggccgtgtgctcccatctcactgtgcacgaggaaccggtgtg

SEQ ID NO: 328171 - DNA, 122 bp, Homo sapiens
ggggccgtgcagcagccgtgggagggtcggacgtgggctgatggcagagcaagggaatgtcggccttgagccgcatctcacggtgcactgaacacagtgactgtgatgcgtctgttgtgtcc

SEQ ID NO: 328172 - DNA, 122 bp, Homo sapiens
acatgtgaaggaagccctgtttccttagaatcctgaaggtggtttggtaaaccacttctgcgaagggttttttccattacctggaattagcaggttactgaagggcagataaactaatcgct

SEQ ID NO: 328173 - DNA, 122 bp, Homo sapiens
tgtaaatatgtattgcatccctagaaacaaaatccaaggattttccctcctgtgtgttttcgtcttgcttcttcatggtccatgataccagctaaggctgtcaatatgacgaagtcaaatgg

SEQ ID NO: 328174 - DNA, 122 bp, Homo sapiens
ggcggctaagaattcagccacaaaatagttcccggggaagaagccgcgtttgctttgaaacgcggtaagaaatgcccccgaacacctgggcttaaattacacccaaactcaatcatcgactc

SEQ ID NO: 328175 - DNA, 122 bp, Homo sapiens
tttggcctccccctcaaaacccccgcaacggtcccaaaccccttccagggactgggactacggaccctggtccgaccttctcgcgggcttcccactgcgccaatcaaatcccagaaacagtg

SEQ ID NO: 328176 - DNA, 122 bp, Homo sapiens
agtgcccgcagtgcttccgcgccttcgccgtgaagagcacgctgacagcgcacatcaagacgcacaccggcatcaaggcgttcaagtgccagtactgcatgaagagcttctccacctctggc

SEQ ID NO: 328177 - DNA, 122 bp, Homo sapiens
gcaagtataaacacatgtgcacggaccatcaggggatcagggcaagctgggccaggctggcgaggttagctcagggagaaccaagccccagacgactacccgtggccaccccctgcattcat

SEQ ID NO: 328178 - DNA, 122 bp, Homo sapiens
tgacagccctatgaaatcattcatttcatatctgctgaccccgaaatcccctagagcccccgtccctgcctgataatggcacttcaaattgcttcttggaagcagctctctactgtcaggat

SEQ ID NO: 328179 - DNA, 122 bp, Homo sapiens
acccatattgggaacacaaaatcagttaatgcttccgatataaaagaggaactagctgtgcgtctcagaaattctcagcacagcctttaaggttccaaacatctgctagaagaggaatgcag

SEQ ID NO: 328180 - DNA, 122 bp, Homo sapiens
gacccccagcaggaggaccccggctgcggctgcggcgggggtgtaggtgggcggtaaaggcggagcagagtcaggggaggttgggaagcatggcgactgtggggggaagggaggcagccggg

SEQ ID NO: 328181 - DNA, 122 bp, Homo sapiens
gaagccctctccgccttttgcctttcatctctcttaaagaggaacatgagcaaccggtggcgatcggcccaggtggggttgtgggtctggataaccgtttggaggaaatcaattagggcttg

SEQ ID NO: 328182 - DNA, 122 bp, Homo sapiens
ctttttagaccatgtagggtaacttcctgacattgccatggcaattgtaaaccgtcatggcgctggtgggagtgtagcagtgaggactgctagaggtcactctcgtaaccatcttggttttg

SEQ ID NO: 328183 - DNA, 122 bp, Homo sapiens
gttgcccttggagagctccaggagtgggtgggcagtggcagggtccaacttgagaggctccggggctgggagggagatcacagagggtctgtgaggccacgtggagggcagcagacccggcc

SEQ ID NO: 328184 - DNA, 122 bp, Homo sapiens
acttgacttgtcagcccaaagcccgtttctatggggtaggctgggggaagcggtgggggccgggctgaacttctgctgtgaggctggtgactactcctctgtaagtccttgaaagtgaaagc

SEQ ID NO: 328185 - DNA, 122 bp, Homo sapiens
catgacgggatacagctgcttgcaccggccgcaggcagaggcggcgcagtgctaaggggacggggagcctcctgctggctggcaccgagaagtccactccccggcagcctgctggacgaggg

SEQ ID NO: 328186 - DNA, 122 bp, Homo sapiens
gattcactgcttcccactcatgggctgggcctgtgcctggctgtgccatgtgggacaccacgatgcgtgagcaagaatcgcgccccacagggtccaagcaagcaggaagtcaagcggcggcg

SEQ ID NO: 328187 - DNA, 122 bp, Homo sapiens
accccagacgggcacgtcccactttctgtccctctgattcgaggactctagggacctcatcggagtggaatcacagtgttggtccttcggtggctcattttcctgagcatagcgtcctcaag

SEQ ID NO: 328188 - DNA, 122 bp, Homo sapiens
tatttcccgcacacacagccctgcagccctcccttcttccttcctggcttgtgattagaacgcagccgcaggcggaagtgcagtgacgccatcagccgtcgcctgagccgtggcgcgcgggt

SEQ ID NO: 328189 - DNA, 122 bp, Homo sapiens
cccccgcgcgccccggccccgcccccgcgcgctctcttgcttttctcaggtcctcggctccgccccgctctagaccccgccccacgccgccatccccgtgcccctcggccccgcccccgcgc

SEQ ID NO: 328190 - DNA, 122 bp, Homo sapiens
tccagtcctcgatgctccgccccagctcggtcaccgcctggaactccccaacgtcgctgtcgaagcgcccgtactcctcgcggttatagatgtatctggccacaccgcgcacgcgctctgtc

SEQ ID NO: 328191 - DNA, 122 bp, Homo sapiens
aatcctggctccatgggccacagtgccagctgtgtgggctggagacagaacaaagcccagcgaggggcctctggccacgcccagacttccgtggtagacagcaaatgtgtatgaagtcgaaa

SEQ ID NO: 328192 - DNA, 122 bp, Homo sapiens
cggcagcgctgacatgagggctatgcttggcatgactcctatgccgccgcttcctcttcccgcaggaggccgagcatgctcactgcgccgcgctgccgaggcagggagggcttctgcacagg

SEQ ID NO: 328193 - DNA, 122 bp, Homo sapiens
aggttgctctggccactgaaattaaaagaggcctccttctgttcattttactagtggcatcgccatgcagttttccgtgtattacagtcagtttccttgcgtgcgtgtttggcttttcactt

SEQ ID NO: 328194 - DNA, 122 bp, Homo sapiens
ccgccaggtccaggttcttgcggcggcccttgaaggcgatggtgaggcagcgcgctggcgcgaaggcacccccgaagcgccgcaggccctcggactggtggccctcgcggaccgcctcgatg

SEQ ID NO: 328195 - DNA, 122 bp, Homo sapiens
ctctcccccctctccctctccctctccctcgctctcctctctcattcccagagtgcatatcgggaatagacacacaaagacatgcgcactcaacttaatcagccatttttttaaacagggct

SEQ ID NO: 328196 - DNA, 122 bp, Homo sapiens
tgctccattcccagctggactgggttgcagggagcggtgggactgatcagactcaggaagcgttagaaatccagcaccagctgtctcctggaggctgaaaatcccctgggactggccacctc

SEQ ID NO: 328197 - DNA, 122 bp, Homo sapiens
ctcttctagttttccttactaatacctactctagtaaacctggcctccaataattcctgccgtcgtgggtccaggctatgcaattcttccatcatttctggctggcagagcgtctcccgaga

SEQ ID NO: 328198 - DNA, 122 bp, Homo sapiens
cggacgggacgctcgggattcagggactgcctcggcacacgggaagttgccctacaggcgcgggagaaagcgcaggcggcggcttggcagggagaggcaggctgcagtgcacattgggtcag

SEQ ID NO: 328199 - DNA, 122 bp, Homo sapiens
gcagactctggcagggggtagcccctttcatcttcatcacagccccagaggtacatagggcgttctctatcttcagaagctaagagaacttagccaggagttgggcttcaaccccctacgcc

SEQ ID NO: 328200 - DNA, 122 bp, Homo sapiens
ttgggggtagatattaatgtaatgcttgccagctgccatatcagatacaccttgaaatctcggtgatttaaatttcagaatctgtattcagaaaatcctcatcattctaacttttcagttat

SEQ ID NO: 328201 - DNA, 122 bp, Homo sapiens
ccccgcgcaccccgcgccctgcccgccgcccgccggcccacccgcgaccctacctctgggcgcagcacaccacagccaccagcaccggggccgagaagatgccgaaaagccttcctcccgca

SEQ ID NO: 328202 - DNA, 122 bp, Homo sapiens
gcccaaagagactctagggacccaagctctgagtcatggcttcccaggccttagtcagaacggcccctggtggcactcccttccaaggggtggggagcagggcctgtcgacttgctcctgac

SEQ ID NO: 328203 - DNA, 122 bp, Homo sapiens
acagagcggtgaaactaccaggggccctcccactcttcccggactccggaggagctaagccggcagggatcgctcgcccaccctgagcactttacctgcatggtggccaagacccttcgtcc

SEQ ID NO: 328204 - DNA, 122 bp, Homo sapiens
tcctctcaggcagcaaagctggggaaggaagctcaggcaggagcctccccgacgccacagcggcacaagcagcagctaaagcaccgcactttgctctgctaaccttttacttaaatgaggtt

SEQ ID NO: 328205 - DNA, 122 bp, Homo sapiens
taagatatttgcactgcctccggagtcgcaatgtcttgggccgccagaaggctagtgatacgcggatcttcttttttttgtggctgtggacacctttcaacactgccttcttggccttcaga

SEQ ID NO: 328206 - DNA, 122 bp, Homo sapiens
tgtgctgctgctggggctggatagcagccatggtactatgacagtgtcctccctcaaccccggccatcccttagccctccagtccctggctagacaattccttgcacataaactaaactact

SEQ ID NO: 328207 - DNA, 122 bp, Homo sapiens
tttctgtgtccacgtgtccacagacccgacctccctattgcagtgttgagtgtggatgcacgtctatgagcatttctgtggccacgtggccacgtgctttcacatgacccatgcatcccgga

SEQ ID NO: 328208 - DNA, 122 bp, Homo sapiens
agcccatattcctgagacgcacatgtaacgagcgcactttgtgtgttttctagaactacacgcagtacatccctctgtccatatatgacctgcagacgtggatgggcagcccgtcgatcttc

SEQ ID NO: 328209 - DNA, 122 bp, Homo sapiens
caggctttgtgttgctcagagaagcatgacaggaagtggtgctgttgcctctgcattggccgactcctggctgcacctgcttttcccagaggcacggggaggcccaggcaggggcccagggc

SEQ ID NO: 328210 - DNA, 122 bp, Homo sapiens
catccaggcctccatctcccctgattcttgtctccagcaccccatttgtattcttatcttcgtcatctctatttctaatcttctttggtccccatcgcctgatacttatctctatctcccca

SEQ ID NO: 328211 - DNA, 122 bp, Homo sapiens
tgctctgttcagggagttggagttcctgtaaggccgtcggagggaacccctgagttacaacgtggtgatggcaccttgggctagtggcgacccactgtggcctcagttttcccaattgtaaa

SEQ ID NO: 328212 - DNA, 122 bp, Homo sapiens
attattatcccactttatgcgtgagggcccagaaccctggcaagggcggcacactcagtacgctcttcaagcatctgggcacacccggtccactacagtcctacaaagtcggacgtgagcac

SEQ ID NO: 328213 - DNA, 122 bp, Homo sapiens
aatagtttaggtattagtccatgaacatggaatttgaccttggtaaggaaatacatcctccgctttcctcactaaccaattgtattcatttgttagggctgctggaataaagtgccacagat

SEQ ID NO: 328214 - DNA, 122 bp, Homo sapiens
taaaaagtacaggaagtcctgcttctctctgacaggtggggaatttaaaaggagcgcgtgcgcagaagaggcaaaattcgggccttaacgagagggtgcccccttcagcgcatgcgcaagga

SEQ ID NO: 328215 - DNA, 122 bp, Homo sapiens
gacgacacctgcctggcacactgctgggtggtagtgcggctggacggccggaatttccatcggtgagcgagctcgactcggggcgtcgcgatgcgccagcgcttccggggaatccagcttct

SEQ ID NO: 328216 - DNA, 122 bp, Homo sapiens
ccgacgtcttcttcttccgagtccacatgttagtcctggactcctccagctgcaataaaccgtgtccagagtttaaacctggtattgaaactgagctgaatgacgctgcatatgtactttat

SEQ ID NO: 328217 - DNA, 122 bp, Homo sapiens
gagtttcaggtagggggtagggttgactgataacagatactttggcaacagaatttagaacgtaggtaggagagtatagacttggttaaatgatgcaagaccacagacattttggcaaatgt

SEQ ID NO: 328218 - DNA, 122 bp, Homo sapiens
ctgtgctcagatgtgagagccgctttattcgtcattgccaaaacttggaagcaaccaagacgtccttgtgtaggtgactgaataaaccgtggaacatccagatgatggaatgtcattcaccg

SEQ ID NO: 328219 - DNA, 122 bp, Homo sapiens
cggctttctatgtgcgtgcttcagtgtatgtccatcttcccccaatctcctagccaggtgcggaacagggccaagaggacaataggctcgagcgcccaggtggccttttcctccactccctc

SEQ ID NO: 328220 - DNA, 122 bp, Homo sapiens
gatctttgcagctcagtcagagggcagaccctgtgaatataactccagaatctaccaaaacggggaaagtttccagcccaactgtaaacatcagtgcacatgtattgatggcgccgtgggct

SEQ ID NO: 328221 - DNA, 122 bp, Homo sapiens
aagaaagggcaaagaaaagtgtcagtggctcacgcatgtaatcccagcactttgggaggccgatgtgggcagatcacgaggtcaggagttcgcaatcatcctggccaacatagtgaaaccct

SEQ ID NO: 328222 - DNA, 122 bp, Homo sapiens
ctgagggacaacctggaacactccaggagcactgcaaaggtctagcagaaccaacactggcgcgggcagggaagggcagcctgatgggctcgtggggcagctcccaccaccttgaagaaggg

SEQ ID NO: 328223 - DNA, 122 bp, Homo sapiens
cagctctttggtgccagctgtttcatcaccagactttggctcccgctttggggagcgcctcgcttcacggacaggaagcacagcaggtttatccagatgaactgagaaggtcagattagggc

SEQ ID NO: 328224 - DNA, 122 bp, Homo sapiens
acaagctctttgtcagagaacagctaaaaccaaagctccactgagagcacactcaacagccgattctgtgtagagagacaggaaaatacaaggatcaagaacaagtacagagttcagtgggc

SEQ ID NO: 328225 - DNA, 122 bp, Homo sapiens
tcctccctccggctccgccctcgccccgccccggctcctccccccaccccggggcggccgcggccaggccccgcctcaccagcagttgagcttgcgcacgctgtgcagctccgaggccttgg

SEQ ID NO: 328226 - DNA, 122 bp, Homo sapiens
tctcggaactgaggaatgccccggtccattttcccttgttcacttctgtgtgaagtcacccggctgttggccgactctgttggcctccctctccccacaatagcctgctatccatacttcgg

SEQ ID NO: 328227 - DNA, 122 bp, Homo sapiens
ctaatgctttgttcctgcctcggcctcccggaggcgcagaggcgcccggccggattgtcccggcgcatttgcatgtgagcggccccagatccccgtccccaccctcggccctcccccacccc

SEQ ID NO: 328228 - DNA, 122 bp, Homo sapiens
aaaagatttctgtgaccttagctttccagctacttgcttagctgtatggaactttaccaacgacagttcagggcttcacagtgacacctactgaacccatttgctgtcaagatgctttcccc

SEQ ID NO: 328229 - DNA, 122 bp, Homo sapiens
tttcaaacctgtttgcatttcaaacaaagttagcgtttttgtaaatcaaatttgataacccgactaaaaatattttccagctttattatttaaggagctgcacagcctttaaagtggggacc

SEQ ID NO: 328230 - DNA, 122 bp, Homo sapiens
aaacggaaactgcttgccccctccctgcctcagagttccggaaaggtggagcggatgaatcggactatcaaaaatagtactactgtcttcccctctggatatttaaaacaacaccacaaggg

SEQ ID NO: 328231 - DNA, 122 bp, Homo sapiens
cccacaggggcttccaacggaagagcagcaaagggatcccagccatcatccagaccacgacgtgatagccgatgaccctccatggactgccacagtagccgctgagcctctgcgaacgcagc

SEQ ID NO: 328232 - DNA, 122 bp, Homo sapiens
aggcggaggctgtggtcccgacgtagaagatgctgcagggggcggcggctgaagcagcgacggaggcggaaaatcctcggaagatgtggcattactaccgacgccggtacctgctgcattga

SEQ ID NO: 328233 - DNA, 122 bp, Homo sapiens
tcagaagccacacccaggctgggcactgtgcccaggtctcctattggctccctgcagccacgaggggctgtgtggtcagagccagcaagtcagcccctgcctcggtactcccaatcctgggg

SEQ ID NO: 328234 - DNA, 122 bp, Homo sapiens
cgcttattggccagcagggtcccagaccttgaccaatcgcctggggccgggtcgtcatggcgacgcgccacgctaacgcatggtgtcggagggaggcccacttgctgaacagcagggagcga

SEQ ID NO: 328235 - DNA, 122 bp, Homo sapiens
gcggggcatgcgctgggttttggaagccgggatcctgggccctcttgggcacagcctggccgcctacaggaccctggtcagccttcccctcctcatccatcatcgacagtccattccaccgt

SEQ ID NO: 328236 - DNA, 122 bp, Homo sapiens
gtcccctggcactagcaaggtcacccatgccagggaaggcagccagtgggagagcagcagcgagtgtgggaaaggggcagaaaggcggatgtacaacccaggacctggagtttgaggttgtg

SEQ ID NO: 328237 - DNA, 122 bp, Homo sapiens
gatgggaagaaaagtcccagaagatggtatttcccttgtgcactagtaaaacgagcaacacgatgaatgtgtaaatttgaacagctggaagtttgtggtcacattaatgttaacctgatctc

SEQ ID NO: 328238 - DNA, 122 bp, Homo sapiens
gagagcaccgccccctggcggttggagcagcgcaggcctctggctcccacgcagcgcccacgtggctgtacagcctgacagcctggaccctctcacatcccagaccaaaaatcgcgtgagac

SEQ ID NO: 328239 - DNA, 122 bp, Homo sapiens
agggcgagtgcgcgcctggcaagccgacgctggtgtgttctagcgcggtggggagttggtcgtactcgcagcagaggaggcagagggtgtgctctggcgagggtaagcagaagaccgacctc

SEQ ID NO: 328240 - DNA, 122 bp, Homo sapiens
tgacagcaactaaaactctcgagtctcaagtttctatagagggtgatgaattgatctgagcgcttggacaccagttgcatacaagcctggatgccaggtaccacatgaaaggtaaaagtgaa

SEQ ID NO: 328241 - DNA, 122 bp, Homo sapiens
gggcctcctggcgttctggccggctagccaagcgctggactacatttcccagaggcacggcgtccggagcgctggactacatttcccagaggcaccgctcccggagcgtagcttcatttccg

SEQ ID NO: 328242 - DNA, 122 bp, Homo sapiens
cgagcaatcaaagcgttatctgtcaaagcaattcgcttcttattgattttgccataaccacgcttgtagattagttcatttactgacttcagattggggtacctgaagtgaaaaagcaaaca

SEQ ID NO: 328243 - DNA, 122 bp, Homo sapiens
aaggaccccagggtttgggtgaccggaagcagagaccccaaacacgagaccagaagggggcgcaggagacaccccgtaggagagaatgaatggggaaggcggtccggggggcggggcaaagg

SEQ ID NO: 328244 - DNA, 122 bp, Homo sapiens
ctggggagcgagcgcggagcgaggtgtctctttaaatacgctctgcagtgtgacggcggccgcccggctggaagagccatccccaccctgcggcaggagcccgcccgccgccatcgcccgcc

SEQ ID NO: 328245 - DNA, 122 bp, Homo sapiens
gggccgagtcggagaccgtgccggagttcgggagcggcaacagagtgggcatagacactccgagcagcctcgccgtcgtctctgcgttcctgttgactgcctggctgccccctcccctactc

SEQ ID NO: 328246 - DNA, 122 bp, Homo sapiens
tagagaggaaggcagcctggcagagcgaggcacacgggtcagtcggagctctgcggtggccgccagaggggagggggccacggggaggagcggagggaagagcccggggaaaggtgtagccg

SEQ ID NO: 328247 - DNA, 122 bp, Homo sapiens
gaggccgtctctgggtgtccccatcctcagctctccccttcccccgtagctcctcacagacggggcctcgccttggtctccgatgctctccagccggtctccatctcaagctgcttgcacat

SEQ ID NO: 328248 - DNA, 122 bp, Homo sapiens
cctgaccagccacctcccacgtccccgccccacattctgcctgagacccgcactctcagccgcataaacgccgcaccacctcaccagtgggcagtccacagcgacctcagactccgctcact

SEQ ID NO: 328249 - DNA, 122 bp, Homo sapiens
atcactccatactgcctcttgacatgtctgggagaagccaactgtacatacccatgtccccgctaccctttctgtctgcccgttacactttctctaatttcaggctctgccagaacccctgt

SEQ ID NO: 328250 - DNA, 122 bp, Homo sapiens
agaaacaaaagaataatcacagaatctcagtgggactttgaaaatatccaggattttatacgtgaagaatggatgtatcgcattacggtagtcaccctatgtgtaaattagtggcacatact

SEQ ID NO: 328251 - DNA, 122 bp, Homo sapiens
tcacgtatctgtatcggatcgtgaaacaatcactcttacggttggcaaaggttctgggatcgcaatttccccacctataaaatggagataacgacgccgggagtttggtgcagagagagaga

SEQ ID NO: 328252 - DNA, 122 bp, Homo sapiens
ttcatctcactagggagtgccagactgtgggcacaggtcagtgggtgcgcgcaccctgcgcgagccgaagcggggcgaggcgttgcctcacttgggaagcgcaaggggtcagggagttccct

SEQ ID NO: 328253 - DNA, 122 bp, Homo sapiens
gagagtcctttgatcccatttatctgctttggggtttccgaaaattctgtgtatcagttccggagaggcagcaggagtcaaactctgatttaactctgtagttaaactccaaactgatttaa

SEQ ID NO: 328254 - DNA, 122 bp, Homo sapiens
aagggctgataatcagcagaaggacagggtgcttcgttagtcagaagagccagggcttcccggctgccaggctacagaactcgcctcgccactcctgagacatggacaacgccggtgggtaa

SEQ ID NO: 328255 - DNA, 122 bp, Homo sapiens
gggcggcaggcttctcgagctccgggcccgcggcaacctcgggcgctgttctgcaggccgcgaccggcatgtacgagcaactcaagggcgagtggaaccgtaaaagccccaatcttagcaag

SEQ ID NO: 328256 - DNA, 122 bp, Homo sapiens
agtgaggggagataaaagttgaggggtggggtcctctggtcaccaatgacgggcccacggcgatcactgttgagacggccgtcattgtgggcagcctggtccgacaggcctctgagcttctg

SEQ ID NO: 328257 - DNA, 122 bp, Homo sapiens
atgaaaggattctagagtaaaggaaacctggggccaggagggtgcatggggagggggctccgtaccccaatgcctgaggagtggcgcatccaggccccagtgctccacctggcagtcataga

SEQ ID NO: 328258 - DNA, 122 bp, Homo sapiens
gctgctgtgcttccagaggtggcgtgatgcctcccggggccatggtggggtgaaggatggcgagccggacataccattgttggatgtattttttttaaaacagcaataattagccattttaa

SEQ ID NO: 328259 - DNA, 122 bp, Homo sapiens
atctgccaggctaggcgtgggcagtgacaatcccgacctcgcaggtactgccctgagtgccggaatgatgccagcgaggtggtactggcgggagagcggctgagagagagcaagaagaaggc

SEQ ID NO: 328260 - DNA, 122 bp, Homo sapiens
caccagctagaagagcgccgcctacccacccctgccaaggtctaacgaccccaaggggggcgctgggccctgccatctccctgcagaacagagagaatttaggcagggttaggggcaggcag

SEQ ID NO: 328261 - DNA, 122 bp, Homo sapiens
tgtgcgtcaaagcacttcctcctcctgtgtgtgcatactgcgccttctaagggggaggggcggcagcacaaattagatgttggcagaagaggcaaaatgacagaactgagaggagcaagtga

SEQ ID NO: 328262 - DNA, 122 bp, Homo sapiens
ggtgttgaagggctcagtgacaattaaagatggctgcgcccatgtaacatcactagcgaccggtgacctctttttcccccttgcctggctcctgtggtggcaggctgggcacgaggaccatg

SEQ ID NO: 328263 - DNA, 122 bp, Homo sapiens
ccaccattgctaaggcacagacgtaattacacacatcttgttcgaagtgaccctttactccgatggccttaggcttaggcaagctggggagaatcctgggaaaggactgggcagagtgaggt

SEQ ID NO: 328264 - DNA, 122 bp, Homo sapiens
tttgagattcaaaggaaagatgtagagatgaatgcaaatttgccactgcctatttctaatcgtaatagattctgtcatttcaggatttattttaatgtagttggggactggcaggtagtttt

SEQ ID NO: 328265 - DNA, 122 bp, Homo sapiens
ttagcaaccgggccagcggctgcggagggtgtactgggtcccccagcagtgccggcccaccggtgctgcgctcgatttctcacagagccttagctgccttcccgcggggcagggctcaggac

SEQ ID NO: 328266 - DNA, 122 bp, Homo sapiens
cctgcgcccggcgtccctccttaaatgtccggcggggaggggcctgtgacctgaggccaccggactctcgccgcgggtgcacctggctgggcgtgggccagcgaggggcccggcacccccag

SEQ ID NO: 328267 - DNA, 122 bp, Homo sapiens
tcatcttcagttctttgtctgaaccacaaaatttatgtgccaattcaggacagtttatggcgctaggtttgtaacatcagagtgacttgttccaccatgacctcaagatggtagctgtagac

SEQ ID NO: 328268 - DNA, 122 bp, Homo sapiens
tgggggtccagcctgcctatctcacacccagagttgcactgccagtctgggctgggatagcgatgtggttaactgcaaccaactgctgtggttataaaccaggtaaggggcccagtgacagc

SEQ ID NO: 328269 - DNA, 122 bp, Homo sapiens
ttctagtagagagcgcagctactcatatacccttgacggaagaccggaagaccggaagaccggaagaccagaagaccggaagaccggccctcctctatcagggatggtcgtcctcttccaca

SEQ ID NO: 328270 - DNA, 122 bp, Homo sapiens
tacactcaaatcgattgccaaacctttttaaaaaattcataaattacacatgcataaatgcgagcctagccctgtctgattaaatctgagttcataattaatgtgagacaaataattgaatt

SEQ ID NO: 328271 - DNA, 122 bp, Homo sapiens
ggcggctccaaacccgccgcgagggctgaggtgttcacacctgcccacggcagcctgcctcgccctcaagcgcctcaaagcttcctaagcgcttacattggtcttgggacagccgactttgg

SEQ ID NO: 328272 - DNA, 122 bp, Homo sapiens
caatcgccgtatactccccgcatttaacttggatgacattttgatttcatcattagcatccggcgccggattgacgcagcctcgagccggggactgctcttgctgcctcctccgcgggagcc

SEQ ID NO: 328273 - DNA, 122 bp, Homo sapiens
ccagtcccttcccagacagcctttggttggtttccctgccacaccactcaacagtatgtacgggtctcctctcaggcaggctctgtaccaggcactgggggtaggtctttgttctcaggggc

SEQ ID NO: 328274 - DNA, 122 bp, Homo sapiens
ttttaatgatgggtatggttatatgtataatcatggaaacaaaatgaaccaaaataaacacgtatgatagtacatgggtcttctgaatgatttctatcagactgaagagtggtatatcttgt

SEQ ID NO: 328275 - DNA, 122 bp, Homo sapiens
ctcgggggtggaagccctgggcgacagcacagcttcgctgcggcggggaaggaggaccgtcgggcccagagttcccgccgccacatatggtctgtggatttaggtgtcaaaaaccggagaat

SEQ ID NO: 328276 - DNA, 122 bp, Homo sapiens
ggcgattccgtaatttccgcttccggtagtgagaacccttccggtgggctaggtactgagcgcgcgaggtgaggagttgtgcagggtttggggaaaggaaggctggcttggcgagagggcag

SEQ ID NO: 328277 - DNA, 122 bp, Homo sapiens
gccgcccctttgctgactatactggtatgaaaacttgccctggctttcctgcctgagctccgcgtcacagcggaggattagatttcttaaaaacctgttgatggcctctcattttaaagctt

SEQ ID NO: 328278 - DNA, 122 bp, Homo sapiens
gattggctgcgacctggggtccgacggacgcctcctccgcgggtatgaacagtatgcctacgatggcaaggattacctcgccctgaacgaggacctgcgctcctggaccgcagcggacactg

SEQ ID NO: 328279 - DNA, 122 bp, Homo sapiens
ttcctacagcaggggtgtctgagctggttctgttagatgaatgagagtttcctaggcatgcgaaagtggaaaggcattccagacagggttaaggacacacacagaggtgttagaaagcatgc

SEQ ID NO: 328280 - DNA, 122 bp, Homo sapiens
agtgggctgagaagctggcctgtgggtcactggaggcaagtcagaacagctgctgacacgcgcgttcatcttggggggttaagggatgcagaaaaagagctaagaggatgtgttgggagtaa

SEQ ID NO: 328281 - DNA, 122 bp, Homo sapiens
gtggggacagttggatgcagcccagagaaccttgtatcaggaggtgatgctggagacctgcggacttctcatgtctctgggtaaggccccttctggtcctgtgctcccttaggattgagttc

SEQ ID NO: 328282 - DNA, 122 bp, Homo sapiens
actctttgtcaaataaaatggcaggagcatctccctgttcctgagcccagtcagcaaattcgggcaggcgaggcacccgagtgttctgggaaaagtcgaagaagaaaagctggtcctcgtcg

SEQ ID NO: 328283 - DNA, 122 bp, Homo sapiens
ccacccgcgccggcctcttggacacagcactagggtcggattcacagttgggagctccctcggctgcgggtcagaccctcccctccactccctctcgaggaccctgactccgcggccccgga

SEQ ID NO: 328284 - DNA, 122 bp, Homo sapiens
ggccacttctctccctgttcccttctctgccctccacaggtgagaacaagtgtccggggccgccccgtggggccccaggctgcccgccctgaaactgcctcgctgtgtgcccttgggcaacc

SEQ ID NO: 328285 - DNA, 122 bp, Homo sapiens
cgaccagacacgaaggctgaagccgcgacgccgaagacaggtgagatgttgtacgtcacccgccggacccccgccgcactcacctcgcggctcctttactccacaggccagtacctcgctcc

SEQ ID NO: 328286 - DNA, 122 bp, Homo sapiens
acaggaatgcatgagtgtgcccctatactaaggattgctgatggcttagggcggcgggatcgtcttacaaattggctagatgcgcatgacctcgatcatgtatggccctcccgcccctttcc

SEQ ID NO: 328287 - DNA, 122 bp, Homo sapiens
agattactgtagaggttgggtgactcgttcaaggtcacacagctagttaatggtacaggtcggtcctctgactccaaaaatagtgctcagtagcatccatggaacagtgtctgtgaaccaaa

SEQ ID NO: 328288 - DNA, 122 bp, Homo sapiens
ctgcttcggatgtgactcacccctttgtccagcgtatttgcacggtagatactacctgctcgagcagccactgtgttttcaggctggctgtcacggtattgcagtgctcatgttcgagtaac

SEQ ID NO: 328289 - DNA, 122 bp, Homo sapiens
caggagtgcaatccccggttcacttcctgcagtggctcagggctggatttacactgccctcgttgggtggctgtccatggacttccaggcctgaaagaaggaaattcacatcctcactgagt

SEQ ID NO: 328290 - DNA, 122 bp, Homo sapiens
ggtgccagtcagtctatgtaagttgctctgatgacttgagttattaccccatctgttgaacgggctggcaccatcccaggcacaatcggggtgaaagctaactgcagctttgagtaatctcc

SEQ ID NO: 328291 - DNA, 122 bp, Homo sapiens
agccgcggatggggaccagaaaccagcctggaaagcgtggctgaggcagtgagaggcttgcgggaggtggctgaggcgtgatttggccgcgactgggaactaagaccaagtccagaaggcgg

SEQ ID NO: 328292 - DNA, 122 bp, Homo sapiens
ccatgttgactcctggctaacagcagcttcaaaggtggttttgcgcacgcgcggaacctccgcttccctcattcatgtgaagtcccaaaccccgaaaaagggcggtgctaggggtagtgacc

SEQ ID NO: 328293 - DNA, 122 bp, Homo sapiens
tcgttcggagcggctgcgcccctcattcggcctccgcccggcgcccgcccgcctgggtcccgctcaccgatgatgatggtgcaggcgctcagcagcccgatctccttcttgagcgccacccg

SEQ ID NO: 328294 - DNA, 122 bp, Homo sapiens
agcagattgtcacagcatgatctctcattaggatatttccttgaagcttaagattgttagcgtaaacaaggcagaaatatccagatgatagtggctagacacaggtattcttcttcaaactt

SEQ ID NO: 328295 - DNA, 122 bp, Homo sapiens
aaggtttttctgtgctcctcggtgtgtgtttctttttttaaacatgatcaataccctgtccggctgggctccctcacacactccctattgttctcctgtttgcattgtgcctgagtcctggt

SEQ ID NO: 328296 - DNA, 122 bp, Homo sapiens
ttcttccacccagtttgaatggagaatcacaaaatcatatgtgccttaacccccatctatcgcaaaacacataggctatagtttcttgatttaatgctggtgatttaatggcaccaattgag

SEQ ID NO: 328297 - DNA, 122 bp, Homo sapiens
ccagccccgagcggtctgatggtgcccagggaatggtttccaaggcaatagcaaacggggcggggcttggaacggaggacaaggctcgagcctaggcaggaacttcccgggagaggaggcgg

SEQ ID NO: 328298 - DNA, 122 bp, Homo sapiens
gggaagggcgtcccagtgcgccccgcctcggtcttccccgggggagcagtgggcgagcggcgctgaaatctgcacccctctgggccaccggctgactgcccctggaggagggggaaagctgc

SEQ ID NO: 328299 - DNA, 122 bp, Homo sapiens
gctagggccgaggaggcaagcactcaagctgccacagaggcgaagcttcctagagcggcccggaagtgcccggctgaagcggccgggcgccgattggtgtctttgagtctagtctttgttcg

SEQ ID NO: 328300 - DNA, 122 bp, Homo sapiens
cagtctctatgcaaatcagggatcagaagatcggaatttccaccaatcagcgggaagcctcggccctgtaactgctaatgggagacagcagcgccacgccacaggcttttcccctggtttcg

SEQ ID NO: 328301 - DNA, 122 bp, Homo sapiens
ctgcattttgccccgcaggggaacctctataccccgcgattgaactcgaaagactcctcccggcggatgaaagccgctactccctggctggctgagctacagctcccgcagcgcgcccagga

SEQ ID NO: 328302 - DNA, 122 bp, Homo sapiens
ccgccgcggcgcccgcgccccccacccgcgccccgccggccagcccaagcccgggtccgacggcaccaaaggcaggacagccgcgagcgaccccgccgccccgacaccaacggcgcaggccg

SEQ ID NO: 328303 - DNA, 122 bp, Homo sapiens
tgggcagggtttgtccagggaaggtccctgtggtttcacttccctgcccttggggagaggcgggagccatcctggaaacaggtgtcctgggaaggaagacaagccttgctcaggatgcaagc

SEQ ID NO: 328304 - DNA, 122 bp, Homo sapiens
tcctctctttaagggtcacgtgggtgccctctggcagcaggccatggtggccaacctgaacgcggagaaggatgtcaggatagccagtccttgagacccctaccgaccccatcccactctct

SEQ ID NO: 328305 - DNA, 122 bp, Homo sapiens
gtctcaaaggaacttttgctgtctgctccacctccaccgtgccgggttatagcgggttaccgtcactcagcacccggtgagtttaagagtggagaatgcctgctaacctctgctcataacct

SEQ ID NO: 328306 - DNA, 122 bp, Homo sapiens
tacaattggcagtaaacaatttccttcagctcttcatggatgtccaggaaaatgacaacccgcacacaatcagacgtgaatgatttctgctccagtgtcttcaggctctgtgcaacaagaag

SEQ ID NO: 328307 - DNA, 122 bp, Homo sapiens
cctcctcctgtaattcactggcaaatcccaatcattttcttcagcctacatgctacattacgaaatcttccctagtagacatcccttattacatcaaaaagtatttattgagtacttgtttt

SEQ ID NO: 328308 - DNA, 122 bp, Homo sapiens
actaagtcagggaggccagggcgggcagcccattcatcgtcctcaccgcgctgttccttccgggcccttggctggaacgctcaggatgccccaccgctcactcccggtgcacatgtgcccca

SEQ ID NO: 328309 - DNA, 122 bp, Homo sapiens
ggtcacggagatgctgcttgagaacgagctgtggggcagcccggccgaggaggacgcgttcggcctggggggactgggtggcctcacccccaacccggtcatcctccaggactgcatgtgga

SEQ ID NO: 328310 - DNA, 122 bp, Homo sapiens
aggtccatttatatgcagattttcttgtgcctttgcaacccctgatacagcaagaccaaccgctgagcttcctcctcctcaatgtgaagacaaggaggatgaagacatttatggtgatctat

SEQ ID NO: 328311 - DNA, 122 bp, Homo sapiens
tcccgccccactcactcaccactgtggctggcgagagcagggactggcagtgcagcaggacgcccgtggccgccacctgctccagccacttgcggctggcgtcgcggctgctctcctcgtac

SEQ ID NO: 328312 - DNA, 122 bp, Homo sapiens
tctcaccctggaagtctcctgcccccgaggcgggcaacctgtgtcccccagccccaccagcgccccgcctagggacagcctctccctggactttgccttccaccaagaggaagaacaggtta

SEQ ID NO: 328313 - DNA, 122 bp, Homo sapiens
tgtcttccaaagaaagtaagctccgatcctcccccatctttagaaaggctggaatgcgagcgggcggtgggagggcgggagactgggagctgccacgggaagaattcgggaggcaggggagg

SEQ ID NO: 328314 - DNA, 122 bp, Homo sapiens
caagaaacttcccagccctcagcccccttccttcctgttttcgcagcactggtgtcacctcgtcctgcccaactatgtagcgtgcaggcctccatcttccacatgactgcagaaccagagag

SEQ ID NO: 328315 - DNA, 122 bp, Homo sapiens
gcgcatgagcggcccgcgttgccaagacagctgggaaggcgtctcccggaagacgacctccgcagagctgatggcattgagatccattcccggaggggtcagctcctgacgggttcctgagc

SEQ ID NO: 328316 - DNA, 122 bp, Homo sapiens
acacacgttttacaatcaatttgtacagttaacacaatcatcacagtggacctgaggtgacgtacatcctcagcttacgaagataacgggattaagagattaaagtaagacaggcgttaaga

SEQ ID NO: 328317 - DNA, 122 bp, Homo sapiens
tgtcctcgccgggcttcggagcctccacgcctttgtgtcccgcgcgccactcgcgtctcccgtcctgtctgtgtgcgtctgttcgcgtgtctctcactcagcccctcttagcttccctccag

SEQ ID NO: 328318 - DNA, 122 bp, Homo sapiens
ctatatctggtataactattcttgttttatattttattatactggaacagctcgtgtcctcggtctcttgcctcagcgcctgggtggcttgccgcccacaccagccaccagaagctccccag

SEQ ID NO: 328319 - DNA, 122 bp, Homo sapiens
cttcacaccaccactctgataattccctgaatacttgtctggcaatcaagtacactcacacgagtcttaattaacaagtgttatgccattagcaatgtaaagtcagtcatcaaaagttaaga

SEQ ID NO: 328320 - DNA, 122 bp, Homo sapiens
aacgacgtgagaggcatctcccagcccctctgctgccggacagcgcactccagggcaggacgccgcccccgtggctcccggtctcctgtgggcctgctgtgtgccaaacctgagctacctgc

SEQ ID NO: 328321 - DNA, 122 bp, Homo sapiens
gcctggctagggagctattttatgctgcttcacagattgagcagtgtgaaataccactgtcgaggaagcagactccagggtgtgtgtgtttgtgagtttttgtgtgtgcacagatgtgtacc

SEQ ID NO: 328322 - DNA, 122 bp, Homo sapiens
aaaggccaacgtggcacagatccagaaggggcctgggggtagggggcacagtcagggtcccgggccctgcactcccaggacaagcagacatgtatcctgactgagctgtgctgagaccccag

SEQ ID NO: 328323 - DNA, 122 bp, Homo sapiens
ggaagaggaaagcaagaggagtggaagggcacagccttggtgtgggctggggactgactgcgagatgcctcctggagaagctcctgagcctctggggagagctggcccctgccaggccggcc

SEQ ID NO: 328324 - DNA, 122 bp, Homo sapiens
tgggggggggggtccccgcggcgacgggaaggggcggagggtaggcgcgcggccccagctcgtccctttcaggggggactcatgcatcaaacttcaattttccggacgattgaattagtgat

SEQ ID NO: 328325 - DNA, 122 bp, Homo sapiens
ttgccatgctatgcaatgtaggcagatgggaaacagcatctcccctttgccctctgtcctcgacaccctactgagcacattttcatttgattttatccaagtgcatgttcagaagcaattat

SEQ ID NO: 328326 - DNA, 122 bp, Homo sapiens
gtaacgccctgtacaatttactgatttatgttgctgcttattggctgcctcccttccgtgcgtctccccaactcctcccatagaagccaccaagggcagagtttttttttattttttgtttt

SEQ ID NO: 328327 - DNA, 122 bp, Homo sapiens
ccaattccagccgccacacttcaatcactcatagactgctaagtgttcaaataaggccaacgccaacctgtaaccaatccagctgtttctgtacttcactgccaatttctgtacctcatttc

SEQ ID NO: 328328 - DNA, 122 bp, Homo sapiens
gtgccggcagggttggggtccgaggagggcccccttctggttcacagacggcccctcctccgtgtgtcctcacacggcagagagagaggaggctctggtgtctcttctcatacgagccctaa

SEQ ID NO: 328329 - DNA, 122 bp, Homo sapiens
ggagaagggggaaggctcgggctccggccggctcccctgagggaacccgtccttctcacccgccccccactggcccctgtaactgcagactggttgggaggcgaggagcccagacagcctca

SEQ ID NO: 328330 - DNA, 122 bp, Homo sapiens
cgaaagccacagatcgaaggggagggaacaagactcttttccacatccccctgccttttccgagaaaaggacagttagtgcctggaccaggaccatcacactggggaccggcttctctgctc

SEQ ID NO: 328331 - DNA, 122 bp, Homo sapiens
tcaatacagcaaagtaatctggcccttatctctgcccagtcattctataatgaagaggcacggggtggagcccggggacaccctcggtggcattgtcgggccacatacctttcccctcacat

SEQ ID NO: 328332 - DNA, 122 bp, Homo sapiens
gctggctgcgatcacctccaccttcatctggtggagtgatctggatggagtgggccctggcgcggtagcactgggtgacagcgcctgcggtggtcaggtaccggtattgccggtacatgttg

SEQ ID NO: 328333 - DNA, 122 bp, Homo sapiens
ttccatccgacttggctcggcgctgcatggcgtttttgtggcaggagcaggcaacacagccgcgagctgattgcagaaattcgagtcgtaattatggaattcaaattccctcaactctcacc

SEQ ID NO: 328334 - DNA, 122 bp, Homo sapiens
cttgtctccctcccagcatgggactctagtttggcacagccctgggagttttcttggagacggcattttgtgactcctttcaccaagcatggtccccaaatcctatccctcacccttggggc

SEQ ID NO: 328335 - DNA, 122 bp, Homo sapiens
gagtgagactgtctctaaaagaacaaaaaatgttagtgcctgtactgaagcacttctctccgtaaaaaggacatagagagcaatcaaagtaaactggtatgacattattttaaaaaggtatt

SEQ ID NO: 328336 - DNA, 122 bp, Homo sapiens
tcgggaggcaaagcggctgggtcaccagagcctgaccatactgacgctccagggggaagacgcagaggccgggaagagacaccccctcccaaacacataaaacttgccccttcctagcctcg

SEQ ID NO: 328337 - DNA, 122 bp, Homo sapiens
cgacgcactttcttctgattcctttctggaggcctttcctgggggttagcttgggccaggcgctgtccctgggtaaaattgaaaagcccagtccctgccatgtggcagtctcagagtcaagg

SEQ ID NO: 328338 - DNA, 122 bp, Homo sapiens
agcggttctgggtagcgggggaccggcacgtgggttctgcccgtgggggaggatggaaatcgggaacatgtgctatattcgttaaagaaaaaaaatcttagcttaggtagtgtaccctccct

SEQ ID NO: 328339 - DNA, 122 bp, Homo sapiens
aaccctcctccgccttctcctgacttggagagtggggctgactgctccgggggtctaatccgccccaacccaaggtggcggcctagcagccgagttggttaacccgtacgtgtgtgttttaa

SEQ ID NO: 328340 - DNA, 122 bp, Homo sapiens
acctacctcccatgtggaccacttgtgccacccaagagggcctccctctctccccaacctcggttcagtaaacccagggaccccatgcgtacctccagaagtgcagctgtgttctccaagcc

SEQ ID NO: 328341 - DNA, 122 bp, Homo sapiens
tacctggtggccggctgtcagcgaagcggcggtgcctcagccccttctcagctgctacagcgctcccagcgccatgttcccggtctccccgggcgcacgctggggaactactactggctggg

SEQ ID NO: 328342 - DNA, 122 bp, Homo sapiens
tagatacaaatagaaaattatagtagctaaccagttagcgagcatttaccataggacagacgctctgccaaaccctttatactctatcttatcttcataactatccaatgaggtgagtaagt

SEQ ID NO: 328343 - DNA, 122 bp, Homo sapiens
aagtgaggagcacctcttcccggccgtcatcctgtctaggaagtgaggagcgtctctgcccggccacccattgtctaggatgtggggagcgcctctgccccaccgtcccgtctgagatgtga

SEQ ID NO: 328344 - DNA, 122 bp, Homo sapiens
cacaaagaagttactgaaaattcttctgtctagcattatctgaagaaatcccttttccaacgaaggcctcaaagagatccaaataaccacttgtagactttacagacagagtgtttccaaac

SEQ ID NO: 328345 - DNA, 122 bp, Homo sapiens
gtgtgtgtataaaacaaaggtatccattcaagtaagtaaaggagttcttattctgtgcaacgtattttctggtgacaaaatttacaatagaggaatatgagttgctttgtgactgaaattgt

SEQ ID NO: 328346 - DNA, 122 bp, Homo sapiens
agtgtttatgatagccagttccattgtgctgtccttgagcctaagtgtaactcttaaggccggaaaagtctgtgtaaagctcatagaagagaagaaattgagcagagttgtcttagagcatt

SEQ ID NO: 328347 - DNA, 122 bp, Homo sapiens
gagtctcacgagatccgacgaggtggttccgactgttcctgtggtagtgaatgagtctcacgagatccgacgaggcagttccgactgttcctgtgatagtgaacgggtctcacgagatccga

SEQ ID NO: 328348 - DNA, 122 bp, Homo sapiens
cttggggagcaggctgggcccaaggagtggcaccgagaaggcttttttgggcagccctgccgccaagcgccccgcagctcctgcctgagggctcgggtcccctcggccacaggtgagcttgg

SEQ ID NO: 328349 - DNA, 122 bp, Homo sapiens
ggccggccacgccctccctaaccctggcggagctgatgggtggctgtagcctgattagaccgcgtcagtccggagggtgggtcttgggagggggcgcagggcagtccacgtttccactgcag

SEQ ID NO: 328350 - DNA, 122 bp, Homo sapiens
caggctgcggtgtggccatccgcaaatggcgactcacttcacgtcggtcctggctcctcacgctgcctgctcaaacctttttatcaagcgcaggccagcgaggccccacctcttccccacgt

SEQ ID NO: 328351 - DNA, 122 bp, Homo sapiens
ttccaggcctatggacatgttgagaaagtgcccccgagacaatttcttacccaaaggtgacgcaagcaggtccagatgtcgaggcacagagctaggcactagggtcagggagattatccctg

SEQ ID NO: 328352 - DNA, 122 bp, Homo sapiens
agaaaatacacgaagccgctactgtcagatactgaacaggaggtccaggcccgtaatcctcgagaggggacacaaacgacccgacagagtgagcgaacaacgtcaaagggcctcaagtttgg

SEQ ID NO: 328353 - DNA, 122 bp, Homo sapiens
cagaggtttagagaaatctctcttctcagagttttgatgaatttctatctcaagtaccaacgaacataaagatattactgttactcatttggttgcatacataaattaacacaacttataaa

SEQ ID NO: 328354 - DNA, 122 bp, Homo sapiens
tgaaaaccaaggtccagacccataccgagcgcccaaagaccgcatttgaattctcctcgccggccattgagggagagaaaggaacgcttagttccattcacattcacagaaagaagcgccga

SEQ ID NO: 328355 - DNA, 122 bp, Homo sapiens
cactcccagtcccggcaataaaacatgcctctgaatcccttccataaaccgtaccccaggcgccccaggaaatcgagagcaaatctttggacacaggggtgcggggggcagaaagaaaatta

SEQ ID NO: 328356 - DNA, 122 bp, Homo sapiens
ggcaaaagagacacccacaggtctcccccccccttcttgccccacattcacgcccaaagccgttgagataagaggccccaggcttttaatggcccttcaaaagtgagggcgacactatggga

SEQ ID NO: 328357 - DNA, 122 bp, Homo sapiens
ggactccagagaagcgccgagggcgcgagtacactaagatatacgaccttccctggggaccgggaagggcacaaccacctcttgcaactccgccactaagacgccttgggtcaccaggcccg

SEQ ID NO: 328358 - DNA, 122 bp, Homo sapiens
cgagctccggacccaggtcctgccctgtggagaccccggagtgggtgcgccgctgccggccgatacccccgggcctccgggtccacagcgtccggaaaaaaacggcctttcgaagacctggg

SEQ ID NO: 328359 - DNA, 122 bp, Homo sapiens
agctcctggactactaagccttagctgtatgttggagcctctggatttgggtgggggtgacgaggatgagaatgaggcagtgggacagccaggaggtcccagaggggacactgtttcagcct

SEQ ID NO: 328360 - DNA, 122 bp, Homo sapiens
gtgtctctttcagtcctgattctgcccaggagaaaggctcctccggtgcgggcaagggcacgtctcaccaccacaaatcgtgcctttcagctgcggggcaaaagcctgtccacttatcagaa

SEQ ID NO: 328361 - DNA, 122 bp, Homo sapiens
ggacactcgcgatgcggcggcggcggcggcggcggcggctccgggcggggacccgcgccacgcctcctggcggccaagctgagcaccacgcacccggcgccccccgccccacgctgcccccc

SEQ ID NO: 328362 - DNA, 122 bp, Homo sapiens
atgattttctgtagttgtatagtcaaagtttcatttattatatagctagatctgtgttttcgagtgatttattgattcaaagcttattgtgcttctagatatttgataaactgactttagac

SEQ ID NO: 328363 - DNA, 122 bp, Homo sapiens
caccggattggctgtccttccataacgacatgcggccccgccccggcgcgcgccccgccgcgtgcccagcccgggtagctgctgcagcctacgctgcctcggccactgcctgccgcgtgcgg

SEQ ID NO: 328364 - DNA, 122 bp, Homo sapiens
atgtcctaatgaagaagttctttgcactgctggatctgtttcgacacgcagggcagatttcgcagggttgggtggcatctgcagctctcctccggaatattcctgaacagaaaaaggaagag

SEQ ID NO: 328365 - DNA, 122 bp, Homo sapiens
cccttggccccgggcccgcttggctgcctcctgcaattagcccctatcactgttccggatcgcagccctgggccctacagagacaaagtcccctgggcccctcgtggcagggggtggagtgt

SEQ ID NO: 328366 - DNA, 122 bp, Homo sapiens
cgcgccaggctctcggcgcgtcagatcccggccctgcgttcttcatctcctgccccgccacgcccccaactgcagatccaactcgggtctctccgaaagcagcaaggagcctcggggtgggc

SEQ ID NO: 328367 - DNA, 122 bp, Homo sapiens
taaatcggtgattacgtttaaatgaggtcagtggggtgagccctaatccaatctgactgacgcccttaaaagaggagattaggacccgcagagagtcaccggggatgtgcgcacacagggag

SEQ ID NO: 328368 - DNA, 122 bp, Homo sapiens
cacaaacccaccagaaggaacaaacaactccagacatgctgctttgctgcgtttaagagccgtaagactcaccgcgaaggtctgcggcttcgctcctgaagtcagcaagagcacgaacccac

SEQ ID NO: 328369 - DNA, 122 bp, Homo sapiens
ctccctcggggtgggagctggggccgcttcccggggaaccccgagtgggggccaggagcccggcttgggaggagcagagtccagccgggggtggagggctttggcagaaatgcggataaagg

SEQ ID NO: 328370 - DNA, 122 bp, Homo sapiens
ggagaagccggatcgtttccccctggaactttctctctcatgattgtgtggatcagcaggcgctcagaagcctgtgcgtgcttatcccggcgggaatgggggacacgctgcgtgtgtccctc

SEQ ID NO: 328371 - DNA, 122 bp, Homo sapiens
tgtggcctggcgctgcacccgggttactccactccggttcccagttgcgtccttcaggcccggggactgcctgggtccccttgtctagatccttcctgaacattctgtagggaatagggcgg

SEQ ID NO: 328372 - DNA, 122 bp, Homo sapiens
ttcagaggactctgaaggggactgtcgccaggagaaagctctctctgagctcagtggaagcgccgcgggcgtccttcgcctggccggttccggcgctcttatctggcgggaaagccagctcc

SEQ ID NO: 328373 - DNA, 122 bp, Homo sapiens
tgcagttggcggagcgcctgcaggagtccggtcgttcattaggcacccaagagcaggcgacgctgcgcttctgcaccggagccccaccaaggcagctcgcttcagtttggccttggattgtt

SEQ ID NO: 328374 - DNA, 122 bp, Homo sapiens
gacctcgggtttcctggaggtacctgcagtggaactccctgcctcagctcccaatggactcggacgtggtgagcccttggtttccccattatgatttcgaacagggctgttgggcccgtgtc

SEQ ID NO: 328375 - DNA, 122 bp, Homo sapiens
gggcgttgcctgctccgtgcgctgggaggcggtccagccggctgggttggggccaccctgcgcctcctggaaggccttatttaggagtagccgcacgtgatctctagcattttaagcttctc

SEQ ID NO: 328376 - DNA, 122 bp, Homo sapiens
tggcgaccacaacaaaccggcccccccacgccctggactccgcccccatccctccctctccgctcccctcacgtgacccacactgacactccgcctgcgcgagatggccgcttacctgcacg

SEQ ID NO: 328377 - DNA, 122 bp, Homo sapiens
acagtgaggaagcctgtacctacaggccatattgctcaggctcaggacaaggcctcaggtcgtgggcccagctctgacaggatgtggagtggccaggaccaagacagcaagctacgcaattg

SEQ ID NO: 328378 - DNA, 122 bp, Homo sapiens
tccgtgtcgagcaaagctcataaatattcaagtcgcgtcctaatctccccaacacacacacgcgcacgccgagccccgctcaggctccggccgccacgccgccgctcgccagcagcgatcgc

SEQ ID NO: 328379 - DNA, 122 bp, Homo sapiens
agtttaagcgttattggctgtattccttagttgctcactccagaactgcccacttatgggcgggggtcactccttcaggcttaacagtcattggctgaattgggccagagaggtctcattgg

SEQ ID NO: 328380 - DNA, 122 bp, Homo sapiens
gaagcgccctgagccccccgcccagctccagggccgggcggccctcaccgcccctaccttcggcctccggcagccgagtggcagacacaactcccacaattccaggcggccgcggcggcgac

SEQ ID NO: 328381 - DNA, 122 bp, Homo sapiens
gctgctgcgcccactcttccgactgcagaggctcaagggttgttccaagctcaaggttcccgcggggtctctgtcttgctgcagtgtggggacaccgagcgtgctgcgcccgggacctccaa

SEQ ID NO: 328382 - DNA, 122 bp, Homo sapiens
attcaggaactaatctactgtaggaaactgtaatgcaatgtggcaaattcagtgtattatcgaaacatagagcacctcagctgacgaagtcatgaatttagctgtggggatgggcggggagc

SEQ ID NO: 328383 - DNA, 122 bp, Homo sapiens
ttctgggaggacactggctccagtctggacaggatctcggccagtatcagccctcgctcccgcacagtggtggactgctccagcaggaagtatttggggattggaacctccaggtcagcctt

SEQ ID NO: 328384 - DNA, 122 bp, Homo sapiens
gagaggaagttgtgccagcaagccagaaagctaaacttatataggctgcaagatgggtgtcgcagttgaaaagttcactttctccactcaaaattggatcctccccccaggtttttggccag

SEQ ID NO: 328385 - DNA, 122 bp, Homo sapiens
gcccttatccgttctcttattggtcaggttagacgtccatttctgacgccacagcctatccggcgctgcgggaggcggagggcgggctggatgaaggactgggcgagcaccgagggcgtgaa

SEQ ID NO: 328386 - DNA, 122 bp, Homo sapiens
gtacacgctggccacgtggtatccaggcagttgaaagtatgttcccagctcgtgtgtacacgctggtcacatggtatccaggcaggtgcaaatagttcccagctcgtgtgtacacgctggcc

SEQ ID NO: 328387 - DNA, 122 bp, Homo sapiens
tgcccaccgcagggctggcacactgccgccacctgtccacggtgcggacccacctgtcggcgctggtgcaccatagcgttatcccacctgaccggcccccgggggcctccgcgggcctcacc

SEQ ID NO: 328388 - DNA, 122 bp, Homo sapiens
ctccaacggaggtggaagactgcggagcattgggggcgcggaggggggcggggtggggggcgggcactggaggccaacagcgcctttctcactgtagatggatgttgggtgtgggattcgca

SEQ ID NO: 328389 - DNA, 122 bp, Homo sapiens
accttgaggacattcacctaacctttccaggacttaatattgaacctgccttctgtgaggcggtttgaagactaacatggtaacatgaaactgacacatttagaagaatgcctggcataagg

SEQ ID NO: 328390 - DNA, 122 bp, Homo sapiens
ccggccgggcctgggtccagtctctgtgggcagtgcagtgccgagccccacccctcaagccgtgccctgtccatagctccagactttgaccctgcactccagtccgggctggcggacagagg

SEQ ID NO: 328391 - DNA, 122 bp, Homo sapiens
tgcctggagcgtggggacagcaggagctaaaggagcaggactggctgaggccactcctgccggctcagtctggtgctgcaggactgacatacaacacatatgtttggaacctccctgctcac

SEQ ID NO: 328392 - DNA, 122 bp, Homo sapiens
caatggttccggaggtatcgcatggcctgctggatgctctgaggcaacggttgtcctgtgcgctgcacgttgaccgtcagtgggaccccaaacacactccggtccttgtagtctggaacctt

SEQ ID NO: 328393 - DNA, 122 bp, Homo sapiens
ctcccaagtagttgggattacaggtgcctgccatgacacacagctaatttttgtatgtttcgtagagaaagggtttcatcatgttctccaggctggtctcaaactcctggccgaagttatca

SEQ ID NO: 328394 - DNA, 122 bp, Homo sapiens
tcctgatttagggacgacttaggcaagtggccaggttgtttttgttttttttttttataccgatacttagtatttggtgaagtaagaaaaatagggcctggcctaggaggtaaagtttactt

SEQ ID NO: 328395 - DNA, 122 bp, Homo sapiens
gggcagcgagggcgccggcgagaagcgcggctgcagctgagcgctccgcatccctcctgccgttgctcctgcttccgctaccagggacaaggtcgcctctcggtccgtcggcgtgttttctg

SEQ ID NO: 328396 - DNA, 122 bp, Homo sapiens
cacaacaaaataatggttataactggagtattccccaggctgctgccttcaggaattcctcgtacgtcgccaaaggagctgaatttccagcctctccccctctgtgccccacccagcctctc

SEQ ID NO: 328397 - DNA, 122 bp, Homo sapiens
gcaggtagtctcggaggctgcccaggggcacgtactccatgaccagctgcagcgacttctcgcctgccgcggagaggggcggccccggtgggggacgatagagggcgggccggggaccgcct

SEQ ID NO: 328398 - DNA, 122 bp, Homo sapiens
aacctgccttagtttatccatgaacaaagccacgcatgctagtggacacacacacacatgcgcgtgcgcgcgcacacacacacacacacacatacacacagagactttgtatgtgagtaatg

SEQ ID NO: 328399 - DNA, 122 bp, Homo sapiens
agcgtgcagcggggaggcccctgaggtctctgtaaacatgctgtgggcaccgagggcctccgcacccggcgctaggcagtaatttacatactttgaatgaaaagtcatttgtgcctgcaaaa

SEQ ID NO: 328400 - DNA, 122 bp, Homo sapiens
ttttttccctgtctcctccttccagcaacgggcaattatgagcttttgccttcagtcaatcgtcctgtaggaactcgcttcagaggaaaattcatttccgcagtggtgccagccagtcccgg

SEQ ID NO: 328401 - DNA, 122 bp, Homo sapiens
cgttactcccaatatagcactgggtgcgcatccacccggtgatgttcctcctcatattcacggaaaaagagaatgctattactcccggtatcacaggaaatgtacaccctttctgtgacatt

SEQ ID NO: 328402 - DNA, 122 bp, Homo sapiens
tacatcccaccttttcccctttgatcttagaagcttcttgtttattggtcactgattggccgacatgtgcgatcaacccgcctctgacttttagaagggcgggagaaacttaaggctgaact

SEQ ID NO: 328403 - DNA, 122 bp, Homo sapiens
ggtacatgagtggaatacaaggtcacagagtcatacatttaggctcctcatgtctgtactcgtactcaaaagttctgtgccggagaaggggaggatgaaagaagcataaaaaccctcctctc

SEQ ID NO: 328404 - DNA, 122 bp, Homo sapiens
tgcgggtgcaggagaacacaccaggagctcggggcctggcattcccctgggcatgggtgtcgagggcggagacttccgggactcccacctccttgcgcgggtgagattcgagagatggggga

SEQ ID NO: 328405 - DNA, 122 bp, Homo sapiens
gtctcctctccctctctgcctcggctgccaggcagggaagggccccctgtccagtggacacgtgacccacgtgaccttacctatcattgcaggtgactcacattctttaccctgccccttct

SEQ ID NO: 328406 - DNA, 122 bp, Homo sapiens
attcggtgttgcaagtgccatggtgaggaatgcgcttggactttcgtcctctgttttctccgatctgctcacacacagcctgctttcctgttgcccaacacccaggcctattacttaccaga

SEQ ID NO: 328407 - DNA, 122 bp, Homo sapiens
cccaagccaagactaggcaagaatgaggcgagtcacagtcagtctggtccacggacgccacgcgcgttttatttgtggatatacacacaaataggaagaaggaaaggagccccccagggtgg

SEQ ID NO: 328408 - DNA, 122 bp, Homo sapiens
cacagttctaggtgtgacatgaatacctgctgggatccagggaggacttttcacacccaccgccccaggtaggacatgaattcttccatccagccatccctattgagcacctcccagaggcc

SEQ ID NO: 328409 - DNA, 122 bp, Homo sapiens
ctcatcccagccctctgacgaggtcctgagcgagttcgagttgcggctgctcagcatgttcggcctgaaacagagacccacccccagcagggacgccgtggtgcccccctacatgctagacc

SEQ ID NO: 328410 - DNA, 122 bp, Homo sapiens
aggggacatctgaagccagatttaatatatgacaaggcaaggagtcattctgtccagacacgagcagccagacagacttccacactggccacagagccttcctttctggggggccctggcga

SEQ ID NO: 328411 - DNA, 122 bp, Homo sapiens
cttctccaattctccgggctgagcgccacctgccgtctgactcaggaacagcgggcccgccgcagcttaggggagaaacgtccaaaaacctcgctggccctcagaggtcagggtggcagggc

SEQ ID NO: 328412 - DNA, 122 bp, Homo sapiens
agcaaaaccatcattagtagtcacattcaggcaacatggtaagtgcccttcctaatcctgcgcctgtggtttttaatagccagacatgtccaccagatgtgcttcatgttcttttatttaca

SEQ ID NO: 328413 - DNA, 122 bp, Homo sapiens
tggaagcccggagcctcagcgctcgcccctgctcgtgagtccgtctccccttagtccgggcgagcctctgatcttggccgcaagggtgactagagcccccatgctgcggggctgggggtggg

SEQ ID NO: 328414 - DNA, 122 bp, Homo sapiens
gctgatcaccagaacctgcgcgaatctctccacggtcagccccacccagggctcaggctccgcccccgggcctccatagccccgcccaccgcccacccatccagcaccgcccttgttgtcat

SEQ ID NO: 328415 - DNA, 122 bp, Homo sapiens
cgatatcgcgtgtcgcatcctcctctcccacgttgcaatgagaaacaatatcagtggggccgtgtccaccttctgtcatattgaaagtgatatcattttcttccctccaggatcgtgggaac

SEQ ID NO: 328416 - DNA, 122 bp, Homo sapiens
gattaagaaatggccgtaagaacttactgcaacaacagagctctcttcggttccaacgtgcgcgtaaatcctgcagacaggagcccaataagacattaggtcaactcagggcatttcgaaaa

SEQ ID NO: 328417 - DNA, 122 bp, Homo sapiens
aagcccctgctctgctgcgtcgtgccagagcggactgtggggacacagcagggagtttgccgactttgaggaggaggaaaggaccttatgccctgttcgggaggcggagaggccctcaggga

SEQ ID NO: 328418 - DNA, 122 bp, Homo sapiens
tggtggccatgcaccgtgattgaaatatactttgtgtcaccaaagtggtgacattccttccgcattgggtggacactgccactgctctgtcttacaggtgcattttcaaaattaaccactgg

SEQ ID NO: 328419 - DNA, 122 bp, Homo sapiens
ggggctccttaggtcacaggcggcagggccagagaaactcccccgcccctacgtttaactcgcggaaacaagggcccagagagcccagacgccagcccaaggtcacacagcgaagccccggc

SEQ ID NO: 328420 - DNA, 122 bp, Homo sapiens
tcgccaaatggttggccaatccgccgcgaaggggctgaagcaggaagcggcgatagtcgtcggtaattggctgcgctggaagcctgtctggactgtaccacctcagtaggagaggggttgct

SEQ ID NO: 328421 - DNA, 122 bp, Homo sapiens
ggtgatgaatattcaaagcacaactgtaagcgactttagttacagcgaaactctaaggcacgctgcccttcggaaggaaacacggcattccccaacctgatagccctccgcgacgcattacg

SEQ ID NO: 328422 - DNA, 122 bp, Homo sapiens
gcccctggggtcctctcttctcagaggctttccctgggtttctgtgtttccgcgaagttccggtgccttctgcactttccctgggagctgaaattcgctaggatttgcatttccaggccggc

SEQ ID NO: 328423 - DNA, 122 bp, Homo sapiens
acggttttgtggtgtggacccaagacacaattgcagtcccttgcttgcacgaatgcaatccgaattcccaaaaaaaggaaaccggcgaggaatcggccgcaccttcctgcgcttctgcttgc

SEQ ID NO: 328424 - DNA, 122 bp, Homo sapiens
gttgcagagaaaatggccctgagtgagggcgttatgactgccccacctgcctcctgtaaccgcgtggctgtgggattcggggctgggaattcgggttcctgtggggccagcacacggccctg

SEQ ID NO: 328425 - DNA, 122 bp, Homo sapiens
accttgtgatctgcccgcctcggcctcccaaagtgctgggattacaggcgtgagccaccgcgcccggccattcataagttctttacacatttatcagaatgaatttggacagtattttatgt

SEQ ID NO: 328426 - DNA, 122 bp, Homo sapiens
aaaaaacgcttcaggggctgcagaaacagctaaagcacatttggagggcctgatgatccacggagcagcccctgggatggaagcggttggtgcaacgtgaagtaaggtaaaccgaatccatg

SEQ ID NO: 328427 - DNA, 122 bp, Homo sapiens
gcattcccgcacccgcctgcgcctcgcgagcagaaagacggcggactctgcaccgctccacgacactggggacccgccccggccagacccgtcccctaccgagaccttgtccccgccccgcc

SEQ ID NO: 328428 - DNA, 122 bp, Homo sapiens
tgttgagtcaccgggtacagcggtcttgcgacataaatattatttgatgacgaaggtactcggggcccaggtgccaaggtaaaccactggcaaagatgaccgtggttaaggcagtagaaagc

SEQ ID NO: 328429 - DNA, 122 bp, Homo sapiens
cttgcagcatttactaagcggactgctttgtgaatttgaatgactcattttttcccccgccgacctccagatcttcctcccgtccatcaggcatttttataagaaaatcccagagtcagcgt

SEQ ID NO: 328430 - DNA, 122 bp, Homo sapiens
aagtgtgagttttccaactttgttctttttccagattgttttggctattcaaagtcatcccgtgagattctgtatgaatttggggatgggtttttcaatgtttgcaaaattgctgttcagat

SEQ ID NO: 328431 - DNA, 122 bp, Homo sapiens
cccgtccacgccctgcgccccgcccctatatcccgggccctgagccccgcccacgcgccgcgccccaccccggtaccccggcctttaagccccgcctacactcccagccccgtcccgccgtc

SEQ ID NO: 328432 - DNA, 122 bp, Homo sapiens
aacaagaagtgaaggagtggccctgagcagcctgaccagctggcaccaagccagggccatcgatggcccatctcagccccacagcctcactgggtgacagggcgggatctcgctctgcagat

SEQ ID NO: 328433 - DNA, 122 bp, Homo sapiens
cgcggctgcctgtgctcgggtttacaccccacgttcacacccccaccggatccctccgcacggggcaccagctctcggccaactgcaactaccccaggaagcgtcaccgcgattccggggcg

SEQ ID NO: 328434 - DNA, 122 bp, Homo sapiens
ttcctggtgtcattaattagtagttatcaataagcagtttggtgtaccgatactgctctgcgtcatttaatcacttctctaaatctataggttcaattaattttctttgtatttacttaatc

SEQ ID NO: 328435 - DNA, 122 bp, Homo sapiens
gtgccacagtctagaagtaaaatttccggtgagctgcccgcagcgccgtcccattctccccgctgcccattgtgaaaagctgggccagcgcttccttgtcgtaatttttaactacctgttat

SEQ ID NO: 328436 - DNA, 122 bp, Homo sapiens
ttcccccaggacctgcaagcgcaggaccgagcccaccgcatcgggcagcagaacgaggtgcgtgtgctccgcctctgcaccgtcaacagcgtggaggagaagatcctagctgcagccaagta

SEQ ID NO: 328437 - DNA, 122 bp, Homo sapiens
ggagatgataagaagagcaaggaagccccggtggccgcgaggggcggggcttggtgggcccggtgtggggcagtggctgacccgagccgggtgctgccccggcacccgctcaggtttttcca

SEQ ID NO: 328438 - DNA, 122 bp, Homo sapiens
tgttctgacagatggcatcgatgtggcagtcatctgtgccctctgagcactcatccacgtcgactgaccctgtgggtaggggtgtggggggaataagaggtaaggtgtggccccagggcagg

SEQ ID NO: 328439 - DNA, 122 bp, Homo sapiens
cgagcggcccgagcccaccaccagccgcctcccatgattcgcactacggccgccgcgcgccgtaccgccccaccggcctccggtaggttgcaacccatgtcactcaggatgaatggcttacc

SEQ ID NO: 328440 - DNA, 122 bp, Homo sapiens
gtcgcttcgcgcgtcggcccggcccgtggggccctcctgccctttggacctgcccctgcccgccccagccctgctgtccccgccgccgcccccatccccgacccgttgggatctcggtgtct

SEQ ID NO: 328441 - DNA, 122 bp, Homo sapiens
tggcacgcgtcgcttcttcttctgcttcctccagctggcgtttaagctgcttcatccgagcgttggccttctccatcttggggagggtacatgaaccaaaacaaaccaaactggtgaatcca

SEQ ID NO: 328442 - DNA, 122 bp, Homo sapiens
acagagagaaaatgagctgaaaagtgcaggctgccggctggacgagttgttgttgtcacacggtgcagaggggaggagctccggaaacttgaaataccctttgaagccgcaaaaacctcact

SEQ ID NO: 328443 - DNA, 122 bp, Homo sapiens
atcccagtggctacacagtccggccctgtgcagtacaggaggatcagcagaagttgaggtcgctgggcaggaccaaggtccagagaggaagcacaggggtatgactcccaggagcagggatt

SEQ ID NO: 328444 - DNA, 122 bp, Homo sapiens
tctcgggtgacagcggattcgagaggttacagtggattccagaggttacagtgcgaagagcgcgagtattgcaaccgtgcaagtgtggtattgctggttacaaccgtggatttcatcgtcga

SEQ ID NO: 328445 - DNA, 122 bp, Homo sapiens
ttgagaccagcctggccaacatggtcaaacaccgtctctgttaaaaatatgaaatttagccgggagtagtgtcgggtgactgtaatcctaagctacttgggaggctgaggcaggagaatcgt

SEQ ID NO: 328446 - DNA, 122 bp, Homo sapiens
agcagagcactcgtcatacagcaggtgctgcagggcctgcatgtgtgggaacctgagtggcgactgggtcgagggaagtgagtcgcaggcagctgtgatcactgtctagaggttcaggccct

SEQ ID NO: 328447 - DNA, 122 bp, Homo sapiens
cactgcttaggttttcagtcttggtgaggtaacaggaggcagtctgtcacctgaggtcttcgagcttttagttgtgtttctgagagcaaggggaaattggaatacagccacgggttgcctaa

SEQ ID NO: 328448 - DNA, 122 bp, Homo sapiens
accctgaaccccagggcggtccctcgcggctcagccccagcccgcagtcccctcccacaccgtgcccaggccctccccaccagcccggccccccgaggcccacacctggagcatttcctggc

SEQ ID NO: 328449 - DNA, 122 bp, Homo sapiens
attcaccctcatatatcccctgacccccatatggcctacttagatgcatgcacatgccctcgccagtgtacacacacacacacgcgcgcacacacacacacacacacacacacacactcatt

SEQ ID NO: 328450 - DNA, 122 bp, Homo sapiens
cagctggtggggagagggaagccagcagggctaagcaatgggctgcttccagactcgccccgccgcgtcttccctgggtcttgggaacccaccatgtggaactgtgcattgcttctccagca

SEQ ID NO: 328451 - DNA, 122 bp, Homo sapiens
cagacacctcccagccagggttggagctgcggtgtgcccacacacagggcctctgctgagcgtccaccaagggctgctgtggactttagggtggggggagccgagttggccttgttaataag

SEQ ID NO: 328452 - DNA, 122 bp, Homo sapiens
ccccagcgcgggcggcggcggctgggcgggagccccagaggtactggcgggagcaggggacgggaggcactactgtcgggcccgacaggggagaggtggcctagccgtgggcccgggtgatg

SEQ ID NO: 328453 - DNA, 122 bp, Homo sapiens
cggggaccctcggagctggagagctccaggaggtgcaggcagcgcgccacctcctccagacggtacacgacggggcgtcgcgcctccagggctaggccgggcggatggagggggtccccgga

SEQ ID NO: 328454 - DNA, 122 bp, Homo sapiens
aagcggcaagatgagctgctaacacactgctgtctgcagacagcagaactaagagaataccgtaacactcactctggggcttcagagtcccaggcaccctcacctgggcgctgcgagagctt

SEQ ID NO: 328455 - DNA, 122 bp, Homo sapiens
tggataggctgagctggcatttctgacctttgtgtagagaggacgtccttaaagggacagcgagctcttttctttcctggtggctgactgccagttcagatgccaggggtttgaagaggcca

SEQ ID NO: 328456 - DNA, 122 bp, Homo sapiens
gagggcgaggagagggcggggcctcctcctttcacaggagcagagcggttcccccgcccccgacagcgctttctgttgctaggcgacctccgtgcaatcccgcctgattatccctcgcctgg

SEQ ID NO: 328457 - DNA, 122 bp, Homo sapiens
tttctttcttcatcacctgccatattccaggcactaggaataaatcatcaagtaaataaacggccttaccctccctggcaattataatggggaaagttagctaaaaacaaacaaaaattact

SEQ ID NO: 328458 - DNA, 122 bp, Homo sapiens
agggcgaagagaatgtcaatccagaatgatgcaaatcccttcattattactctcggtatacgtcgttactttaagatgttaaaaaagagtaaaccaaaaagcttcacgttcattttacagaa

SEQ ID NO: 328459 - DNA, 122 bp, Homo sapiens
ctgctcaagcctgaaagggacacgagatgcattttcttcagaatattgtctcccatcccacgtcctgacttcccaacaccaagaacaacaacaaaaaaaaaagcaaaggaggaggatattgt

SEQ ID NO: 328460 - DNA, 122 bp, Homo sapiens
ccctggcggcgccttcactggtaggtggaggtcccctctctcctgtgctgtcttcagctccgggtatccatccctccacagacaggactacacctttcagcgcccggtccctctgtgcctcc

SEQ ID NO: 328461 - DNA, 122 bp, Homo sapiens
cggcagctttggggctcccaattctttttttttcgttttggagacagggtcttgctctgtcgtccaggctggagtgcagtggtgtgatctcggctcgctgcaaactccacctcctgggttca

SEQ ID NO: 328462 - DNA, 122 bp, Homo sapiens
cacagatgcttgccatttacttttagggacgtcgcatacgacgtccgtaaattactggctcgggttttgagctttacctggctctcgtcccctgtagtacaatcctctttattctttcaggg

SEQ ID NO: 328463 - DNA, 122 bp, Homo sapiens
cagtcgcgtccccacttctgcaagctaactggttgtgcttctcgaaaaggctaccatccccgggagacactgcagcttcccctgtgaaaaggaacctcactatcccaaaatggcaccaaatg

SEQ ID NO: 328464 - DNA, 122 bp, Homo sapiens
ctcagggttccggaggagccaggctctgtgatgcgaggcagcctgttccacactgcggctcgaggcccctcagccctcagtgcggggtggagggctcgccgctccttttcaggagcagagga

SEQ ID NO: 328465 - DNA, 122 bp, Homo sapiens
cgcccaggcggggctcggagctcctgcaggccttctctgggccagactcagtctttgagtcgccttgtgcataaaatgggatgaactgtgaggcctaagtgcgagtatgtgactggtacctt

SEQ ID NO: 328466 - DNA, 122 bp, Homo sapiens
tgtgtggtcctcggtcgcccgcatccgctttttatgccaggatcaggtcccagcctcctgcgtaaccaaagggctgtgctgtagtagctgtttttattttggggtgatgggtgatgcagaat

SEQ ID NO: 328467 - DNA, 122 bp, Homo sapiens
tcttggagctgcactgttgacttcgaccacaagggggcagggctgctgaaattggaagtgcgaacgcctacatgagtcttgatcctcggcaggcaccgtacccagtttcctccgttgggagg

SEQ ID NO: 328468 - DNA, 122 bp, Homo sapiens
aagaccgcggtgagaaacacagccgacgcctcactcagcggccgtttccccaaacccctgcggagctgacacatcaacaaagatggcggcgacactgaagccggcccggttacagctgaggg

SEQ ID NO: 328469 - DNA, 122 bp, Homo sapiens
gctcccaactggcccgggccctgcaggggcggggttggcagggacggcgctggcgggtggcggagacccggggggcgcagggatcggcttcccccgaggcctcggcccccgcccccgccccg

SEQ ID NO: 328470 - DNA, 122 bp, Homo sapiens
cgccgggctcccactgctgcgtttctgcacgctgacttgaagtgcagtaccgtgagattacgtgcggacggagctcgagacccgggggaccagggtttcccttcgcctatggccgatcagtc

SEQ ID NO: 328471 - DNA, 122 bp, Homo sapiens
tcagggctgcagagaaccaggggcaggcaatggtaacagtggggcagcacagagtccagacgccctggatgatgcaggcgtctgcccatcccagggagcccaggctgtcctgagcgcatggg

SEQ ID NO: 328472 - DNA, 122 bp, Homo sapiens
accagcgtatgaatcacttcggccctcgcatgccagctagtgattgagtgtgctcggccccgtccggtcccgtcccgccccgggatccaggggagcctacgcctgcccacgtttggagggat

SEQ ID NO: 328473 - DNA, 122 bp, Homo sapiens
tccgcagtccagacttaagcacctggagcggctgactgggccccaggaagctgcggggtccgtgcccaggtagcctctgtgatgtcgccagggccaggaggggcacgcctcaggtggcaatt

SEQ ID NO: 328474 - DNA, 122 bp, Homo sapiens
gtctgcacggatctccatgggcccacactggcagatggaggaggccgggaagttcaagtccgcaagaactaaacagccgggaggacagcccgtgtcggcacctatccctgccctcggggtcg

SEQ ID NO: 328475 - DNA, 122 bp, Homo sapiens
ttcagactgcttcattgggaagtatgatttgttcctttctggaattgggctccgtggtggcggcggcacttcaagcaaagacagtttcttgcaagctccagtagctccgcgtgtctcatttg

SEQ ID NO: 328476 - DNA, 122 bp, Homo sapiens
agaggagttgacagctgtgatgcgctttctgacccagcggctggggccagggctggtggacgcagcccaggctcagccctcggacaactgcatcttctcagtggagctgcagctgcccccca

SEQ ID NO: 328477 - DNA, 122 bp, Homo sapiens
tgttcctgagggtaatacccaacataggtttctgctctgagtttctcaaggcagcctaatcgttaatcctcagaactcttcatttctgactttcccattttaatgagagtactgatcacaga

SEQ ID NO: 328478 - DNA, 122 bp, Homo sapiens
ctgcggtttctgggagtcaccagctcgaacgacgcaggacaagtacactttggggtggcacgtcctggtgctgttattttggggtggggtgtccttccgtggtacggctggaccacgttgcc

SEQ ID NO: 328479 - DNA, 122 bp, Homo sapiens
cccttctgtgtcatcctgccggaaattcagaagccagagaggaaggtaagtaccccaaatcgccaacaaagaaggtttcaggaaactgtctggactctggaagtttacagtatgattaaaaa

SEQ ID NO: 328480 - DNA, 122 bp, Homo sapiens
aaatacagccaaactaagacccgtggaaaggtcccagcggaagagggaatcgtctctgttcgtccgcccccaggaggccagacttgggacctgtcacttggaaaattctcttgatctccatt

SEQ ID NO: 328481 - DNA, 122 bp, Homo sapiens
tcaagttcgcttaagtgttcactcagcccaacacgcgggttgggcttgaggttcggcacccgggcagcctcaccccccgcgtcaggcgcgcgcacacagtaggtccgcgacccttagccctc

SEQ ID NO: 328482 - DNA, 122 bp, Homo sapiens
ccgcagctcctccggcgctgcacgcattcttcccggccaagaaggaacgcggcgagctaacgggatccagatgtaggagtcctctgggcttggaccccaaataccctaaataccagccaggc

SEQ ID NO: 328483 - DNA, 122 bp, Homo sapiens
ggcctctgcacctggggacactggacacatatgtgcccatgatgatgaggacggtgcccacgaggaagcccaccaggccgatggccaggcccagggcacagaccagggtctccatggcatct

SEQ ID NO: 328484 - DNA, 122 bp, Homo sapiens
cagaggagtaagaacctgcgatattgaaagctacccacatggggcttccttgaaggaggacgtggaaggcagaaagtgacctgctctgagcggcgcatgtaaccgaggaccttaagctggac

SEQ ID NO: 328485 - DNA, 122 bp, Homo sapiens
tgctcttcttgtctgtgatatacggtagaagggttggtcctggtttggtccacctgccagcggagtttaaagtttccgaggctcagaggaacacaatgacttggatcaaacagcctaaatgg

SEQ ID NO: 328486 - DNA, 122 bp, Homo sapiens
tttgcagttagtgttacagctcttaaaggaaacgtgtctggagctgatcatttctcccagcgggttcgtggtctcactggcttctagagtgaagctgcagaccctcgcagtgagtgttacag

SEQ ID NO: 328487 - DNA, 122 bp, Homo sapiens
tgagctggctgggctggacccggtccctaggctgtgaccgccgaactccactgcaacagacgggcgccaccaaagccaggccctgaggcctgggagtcctggactgagaaagggggttcctg

SEQ ID NO: 328488 - DNA, 122 bp, Homo sapiens
gtgtgttgtgggtgcgtgtgcgtgcgttcgcagcaggggcgggcgtaggaccaatgggggcggggcgcgtgcgcgtgcgtgacgtcaggccacggggaggtggcgccgccgtgccgagccgg

SEQ ID NO: 328489 - DNA, 122 bp, Homo sapiens
ctgtaaggttttctgcttccatgtagctgttgtgtctgctggggaaggaggaaaaagcaacgtttaatgaacagcaagtggcagctcagcttgtcatcactttacaatatcaccttttgatg

SEQ ID NO: 328490 - DNA, 122 bp, Homo sapiens
aaggccccagacagcactgaggtgaggtccacagtggcggcaggacacccaggaggtctccggctgccacctgccaggaggaaagcctgtgcccgtggacacactgaggagggcagagtcag

SEQ ID NO: 328491 - DNA, 122 bp, Homo sapiens
acagaaaaacagggagagtctggccttcaacacgaaccctcttcagaagtcagaaggcctcgggctccctgctcacaggaacagtgcggctcaattctaactctcactacaacgcggctgac

SEQ ID NO: 328492 - DNA, 122 bp, Homo sapiens
tgccccacctttcttttctgaaacaggtctggctctcttgcccaggctggagagcagtggcgtgatcttggctcactgcaacctctgcctcctgggcttaagccatcctcccacctcagcct

SEQ ID NO: 328493 - DNA, 122 bp, Homo sapiens
gcttgggactccgggcgcgcggagccagccctctggggcgaaatccccgggcggcgtgcgcggtccctctccgcgctgtgctctcccagcaactccctgccacctcgacgagcctaccggcc

SEQ ID NO: 328494 - DNA, 122 bp, Homo sapiens
tcttcgccgcctgctggggccccatccagctgttcctggtgctgcaggcgctgggccccgcgggctcctggcacccacgcagctacgccgcctacgcgcttaagacctgggctcactgcatg

SEQ ID NO: 328495 - DNA, 122 bp, Homo sapiens
ggccgggccccgaaagccacgtagggcttcgccgacgtcgccgactgcggagagacctagcgttgctttacctggtcagttctagtagccagggatttatcggccagaatactctccttcaa

SEQ ID NO: 328496 - DNA, 122 bp, Homo sapiens
ggaatggtaaagcaatctttcttggaacatagcaagtagtaaccgatcaaattgctataacgtgtgtactgaccttatgtggaaaatgctgcaaccctgtttactgcctatgtaagtgaaat

SEQ ID NO: 328497 - DNA, 122 bp, Homo sapiens
ccccaccccagaccccgagccaccccaggaaaagcacaaggactgccgccttctcgctcccgccagcagcatagactggactggaccagacaatgttgtgtttggatttgtaactgtttttt

SEQ ID NO: 328498 - DNA, 122 bp, Homo sapiens
acggtggccgagaccgggcgggggcgggggcgctttgggagttaggatacgctttgtgcccgcttgctgcttttttcctgcaagctgcgcatcaattaaagtactcgggtttttgtttggtt

SEQ ID NO: 328499 - DNA, 122 bp, Homo sapiens
aagaaggaatttccacgagcagaaacggggaacctaggatgggcatcacacccggcagagcggtgggcgggcagtggcctgccgggtggcctgcggagatcacaggggctccagcccacgct

SEQ ID NO: 328500 - DNA, 122 bp, Homo sapiens
ccatacacccgaaacacttgcaccgggcaggggaatttccagaatcctggagggggtgggcgccagggccctccccagcacccccagttagagcacacgggtggttggaaccaaaagcccgg

SEQ ID NO: 328501 - DNA, 122 bp, Homo sapiens
ttgggttcaacccgagacgctgaacgcaagcaaataaataaataaacggtactttccgagcgtcgcgagcggagcctgcagctgcctggagtccgagccctcggtggcggcggcggcagctc

SEQ ID NO: 328502 - DNA, 122 bp, Homo sapiens
gagggagaggcgtctttagtatgggactggttaatttctcttgataatgcttttttccctcgggtgtcccatcctctgtggccgtcgcaaccccaccctccgacggtgcgagcgccggagcc

SEQ ID NO: 328503 - DNA, 122 bp, Homo sapiens
tctgtgctcactaaaactttattggtagcgccgacaaacgaacagacagatcctgtactgcgcatgtgctgtggtaaaactggcctaaagaaaggggcggggtttaccctggagagcagagg

SEQ ID NO: 328504 - DNA, 122 bp, Homo sapiens
cggaagcttccgggccggaacgggtgtgcacagcgcgccggttacgggggggcaacttaacgggccggaccgcggcgactaccgagggaggtgaggggcgggccgggcgggtgtccgaggcg

SEQ ID NO: 328505 - DNA, 122 bp, Homo sapiens
ccccctcacggggctccccctgaactgacccctgcccctcactaggctccgcgttcactgcgcactccgcgcgaactgaccacaaactacacggaccccgcccctccgccctaagccccgcc

SEQ ID NO: 328506 - DNA, 122 bp, Homo sapiens
aggtggaggacgccatgctggacacctacgacctggtatatgagcaggcgatgaaaggtacgtcccacgtccggcggcaggagctggcggccatccaggacgtggtgagcgtggggacggct

SEQ ID NO: 328507 - DNA, 122 bp, Homo sapiens
aaagaaagagacggaaaaggaagaattctacctgagttcgccgtaaagcgcccgccctctcgcctctacgcttccagttgcggcttattacgtcacagtaattgctgtaccaaggtcagaat

SEQ ID NO: 328508 - DNA, 122 bp, Homo sapiens
tctcagatgggtaatgtttcccatcggaaagaagaaagcagccagcaggagagggagaaacgagccagtccagccatggcgccattccagggacgtctttttgcttttgtggtgttaaaaca

SEQ ID NO: 328509 - DNA, 122 bp, Homo sapiens
tgtccttaggccagtgttaagtatattgactgtggcttttagaagatcagaagcccataacgtgtttctgtttttgtttgtttcctggcaggttggcatgctaaaaagaagttcaaattagg

SEQ ID NO: 328510 - DNA, 122 bp, Homo sapiens
tcgtaatcgaaccaggctccggtctgctcatcccacaggactgtgttcagggcggccaagcgctgcgaccgcaggattctgtacttcgtggcctgggagtcgttccctggggcagtgctgcc

SEQ ID NO: 328511 - DNA, 122 bp, Homo sapiens
gcccttgctgcccagccccgcagcagtgcgggcatcagatgaagcagcggcattgccctgcgtgtggtcagcggccaagctatgctcattgtgagccccatgcccggacggcgctgccccca

SEQ ID NO: 328512 - DNA, 122 bp, Homo sapiens
aagcctgggaaagtgggaagggaggggaagaaactgggacagacacctgggtcagcggctcgcccagggccccgaaccctgtgtcccagagctgagaagtcctgccccccttacctcaataa

SEQ ID NO: 328513 - DNA, 122 bp, Homo sapiens
agctcccaggcctgctcccggctccactcacactgacgatggtcaaacccacaatgagaacgtctccaggagtcaaataagaaaggtgggaaatgttgtaaagaaatgcatttttaaaattc

SEQ ID NO: 328514 - DNA, 122 bp, Homo sapiens
taattgaatcatgagggcaagtctttcccatgctgttcttgtgatattgaataagtctcacgagatataatggttttaaaaaggggaattcccctgcacaagctgtcttttctcttgtctgc

SEQ ID NO: 328515 - DNA, 122 bp, Homo sapiens
acacacactctttttggaaaagaaaagggctttaacctgcaggagtctaacccgtcaagacgtcgaggacctttacagaatgtgctggcaagaaaggagagcacaggcaagtcacacacaca

SEQ ID NO: 328516 - DNA, 122 bp, Homo sapiens
caacaagcacccccatgattccaatgcaggcaggaccccgggatccgcgggcaacaagcacgctcatgattccaatgcaggcaggaccccgggatccacgggcaacaagcacccccgtgatt

SEQ ID NO: 328517 - DNA, 122 bp, Homo sapiens
ccttgggccgggccaggcgcacactgagtgggcggcctttccagagggcaccatgcaaaacgcgcagggccttgtccctctctgcagcgctgcggaatgtcacaaaggcgcagggtggttgc

SEQ ID NO: 328518 - DNA, 122 bp, Homo sapiens
tggcagcggcggcgcagggggcggggggcagcgcagaggggccgggcgaggccgggagcgcgcgcccccgcccccgcccgcccgcctcctgcccgccctccggccgcggagctggaaaccgg

SEQ ID NO: 328519 - DNA, 122 bp, Homo sapiens
cacccccactttcataacatggcctgacccttttctgccgcggacaattgatccgaaggacgccggctgcccagccctggcgggccactactgacctagtccgaagttaggaacagccttgc

SEQ ID NO: 328520 - DNA, 122 bp, Homo sapiens
caggaagttggcgttggtgcggtctatgaggcgccgggagatctcgaacacctcggtgcgcgtcttgcactcggcgatcatggccggctcagcaatggtcagggaacctgggaggagacgaa

SEQ ID NO: 328521 - DNA, 122 bp, Homo sapiens
tcccggctggagccgccgccctggccgggcagagtccggagccagtgccagccgccgccccgcccgccggacctggcccttcgcagctccaccagcgcccccgctgcgcccgcggccggagg

SEQ ID NO: 328522 - DNA, 122 bp, Homo sapiens
ttgccccacgccttctctgtggaccattcaggacctccagtgggggtggcgtgccaggcgcgtaccccaccaggtgggcaaagcagaaacctgcggggagcggagacgccttttatctctgg

SEQ ID NO: 328523 - DNA, 122 bp, Homo sapiens
cgtgactgtaagtgactccccagacccttggcctctgccacctgtcaccgagcccactgacgcacctccactgtcacgttggcagtgctccatgcagtctcttgtcccacatttcttaagag

SEQ ID NO: 328524 - DNA, 122 bp, Homo sapiens
gttaagtgacaacctttagcaggtaggagacaggtactggggaaacagccacttatctctcgaatatgttccacacgtacgcaccaatcaaacttgcccacttggtcttcgtagaccgcggc

SEQ ID NO: 328525 - DNA, 122 bp, Homo sapiens
ggcgccccgacggacggacggacggacggactgactcaccgacggcgcgcgctaacggctcggctccatacgctctcgccgcggctgcgcctgcacctgcctgtggctttgtgggcgggcgg

SEQ ID NO: 328526 - DNA, 122 bp, Homo sapiens
gtgcacagacgctgatacgtgtccgcagtatctcctagtcatttaaaagggtaattagtacgcggcatcttcctagggtcctcggagggtgagtgtccatcctgtttctcactgcttctctc

SEQ ID NO: 328527 - DNA, 122 bp, Homo sapiens
cctttcatggagcaggttgaaaacaccctttttgtgcaatctggaagtggacatttggatcgcattggggcctatggtgaaaaagggaatatcctcgaataaaaactagacagaagcattct

SEQ ID NO: 328528 - DNA, 122 bp, Homo sapiens
tcgcgaggggcggcgacggtcccctggtggcaggaggggctccccctgttgcgggtgaggcggctgctctcatattttcagatgttgctgtagaaataaagacggtttaaatctgagctggg

SEQ ID NO: 328529 - DNA, 122 bp, Homo sapiens
tccctcttgtcaggtcatccatgactttagagaacagacacaagtgtatccagctgtccacgggtggagctacccgttgggcttatgagtgacctggagtgacagctgagtcaccctgggta

SEQ ID NO: 328530 - DNA, 122 bp, Homo sapiens
cattattaacaagtgagacaaacttcaatggaactggatcatgacctcaacagtcaactacgatagtcatcatacgcctaatgagaatagaattcattacctaggaaataaactaaaaacgt

SEQ ID NO: 328531 - DNA, 122 bp, Homo sapiens
ctgccgcttgttaggttagggttagatggggagagacagggcacagaggacctgtctccccggctactcttgccttatggctctagtgtgtgacctacagagcatgctccacaagcccctgc

SEQ ID NO: 328532 - DNA, 122 bp, Homo sapiens
taccagctgcatcattaggagctgggagcagattagggcctgggaaattagagcagaccacgtggtctaggagttcaggcctcaaagccaagcgttcctcttaaacagttgagtggaccagg

SEQ ID NO: 328533 - DNA, 122 bp, Homo sapiens
gcttccaggccccaccgcagaaggccggtgcgcaggccttgcccgccccgcctgcccctccgggctcccagccgttcctgcagaagaagaggcatggccgaccaggtaaggagcgctgcctg

SEQ ID NO: 328534 - DNA, 122 bp, Homo sapiens
tccccggttctcctcctcttttcctccttggggataggcgggaacagagttcagggctggcgcggtggccaaaggccagtctgggtggccccaacccgggacggggagggagcgggccctgg

SEQ ID NO: 328535 - DNA, 122 bp, Homo sapiens
cattttcaacccaaggattggttactctgttctttgtctctggctcatgattggttctttcgttccgcccctctcttccagcttttgcaggcgggattaccacgcagcttcctgctcctgcc

SEQ ID NO: 328536 - DNA, 122 bp, Homo sapiens
aggtcatgagctggcagccgggtcaacaggcagtcacatctcagtgtggaggtgctgggacggaggaagtgctggggctgtggaaacactcaggagggaatcaggaaagacttcctgaggtg

SEQ ID NO: 328537 - DNA, 122 bp, Homo sapiens
gcagttgttggcgggatatgcgtgcccagcccccttacacagcctgtgcaggcgggtgggcgggcagcaggctcccttcctcgggcctcccgcctgctccctgccagcgcagcgccgcgggc

SEQ ID NO: 328538 - DNA, 122 bp, Homo sapiens
gtttgctcccgctttcagttgctttgctgttagcctgttggaccttcgagcctagctgctcgcacaggactcggccacctgcccttcctgcaccgactggccaggtaggtggctgtaggggc

SEQ ID NO: 328539 - DNA, 122 bp, Homo sapiens
atgactagaaagtgactgcactagaagctttgaatgttgggtaactgggaaggattaactcggttctgatgtgccctttgttaatgaaaatcaaatctttgctatttgtccaaccaccctta

SEQ ID NO: 328540 - DNA, 122 bp, Homo sapiens
tggtggcgacgctgtagcctctgcaccatgcgctaatagaaggcggaggagggggttgcacgacctgccatccacggccacccattgggtggggcgtgtgtgtgtttgagtgtgtgtgtgtg

SEQ ID NO: 328541 - DNA, 122 bp, Homo sapiens
aatctgagccaaagccttggaatgtacaatgagcagtgaagttgtctccctcttaacaagcggcctcactccttcagcaaagcccatctaccaacttccttctctttattctaacactgagc

SEQ ID NO: 328542 - DNA, 122 bp, Homo sapiens
acggggacggtagccttggtggggaggttccagctggctgcacttgaacccctgctcacccgacaccactaaacagcaaccaggcttcaggcctcctccactccaggcagcagagcacccag

SEQ ID NO: 328543 - DNA, 122 bp, Homo sapiens
cacttttcagctagacttttaatagatttcatagccactgaatttaacacaaggcctttccggaacatatctagttcatccagttgtatagtgtcatgcagattgtgtgtctagatatctga

SEQ ID NO: 328544 - DNA, 122 bp, Homo sapiens
ccttcctggggtgacggagcagcaggaagcgttttcggatcctggaatacgtgggcggcccgtgggaggggctgaggcgcagtttcctactcacccggatccgaatcctccgcggtgctgtt

SEQ ID NO: 328545 - DNA, 122 bp, Homo sapiens
cttaccgcaaacgaaggcgtcggtgcgatgtgctggtctcgggcacgctggcgcttccaacgcactccttgggtgccctgtcacttacatggaggcttatttgcccggaagacgtcagaaat

SEQ ID NO: 328546 - DNA, 122 bp, Homo sapiens
ctcaccctctgcagtgcctggactcaaagccggccctgactcgggggccgccatgttcgccgaggactcaggcagcggaggagtgtctctacggaatccctcacaggacaagcttctctatc

SEQ ID NO: 328547 - DNA, 122 bp, Homo sapiens
aaaataaagaattttcaagaggagataatagcaacaaaattttggaagttggaaaatacacggatgaatagttactgattagtaggcccaagaaagctgaattttaaatgggaggaatggag

SEQ ID NO: 328548 - DNA, 122 bp, Homo sapiens
cccaaacccaaactctttcctcgatcgaaccgctggcctcaacctacaagcctcctccaccgccaaaagtcgggaagggttggtccttttgttttacaaatgaattaaaattagatccacag

SEQ ID NO: 328549 - DNA, 122 bp, Homo sapiens
ggtgtttgatagctttccgcggagtccctgggtgtagtgggaactgtggtctcgatctggcgcggtgggtgatgggacattctctccccgcgcctgagcgcgctaagggagcacggcattct

SEQ ID NO: 328550 - DNA, 122 bp, Homo sapiens
tttggaaatccgttcgctgttctgtctcctctaatcatagtggagctttggctccagggtcgggctcttgcgaaatccagacctggttttcgctccagccaaagccaggcgccttcgttccg

SEQ ID NO: 328551 - DNA, 122 bp, Homo sapiens
ggagagtctcaggctcacacggggcagatcaaagcggaagtaaggcttgaaaggggaagtcgagtcacctgtgtggtatggaaggaataaaaacggtgcagcagaggtccccccatgggcga

SEQ ID NO: 328552 - DNA, 122 bp, Homo sapiens
aaacaacacaggacaagctgtggggaaaagtgagtgattcgtgttgtttccagtcagccccgctccgagtctcagggggactgccccgcacacagactgttcaccagggcctgcagcctctc

SEQ ID NO: 328553 - DNA, 122 bp, Homo sapiens
gcagcctgagaagatgcagacctccatggcggttcaggccagctcagggaggctgagggacgggcattgggcctgggggggcaggggggaaggatgcctgggagatgaggcccacttttgga

SEQ ID NO: 328554 - DNA, 122 bp, Homo sapiens
ttactgcaaagcactacccaaatcccttgtcaatgaaggatgtgttgctccgggctggaacgctgttgtcagagcattgatgttttagcccctttagagattgccttggctgcagggagcta

SEQ ID NO: 328555 - DNA, 122 bp, Homo sapiens
cgcagtggtcctgccggccagcaaagaaccagaagagccggcaggaggtcatgtgtggggcgaggtatgggtggcaggggccctgcaggggcccagggctctggcctctgtccctttgtgtg

SEQ ID NO: 328556 - DNA, 122 bp, Homo sapiens
gctgcaggtctgagccggggctgtggcttggccgacaggcacccacaaggcacccgcagccgctccgaggccctgctctgaatgctctgcctttagattccgtccttagcatcaggaaagaa

SEQ ID NO: 328557 - DNA, 122 bp, Homo sapiens
cacactccagtggtttccatcgtgctccagtggtttccatcgtgctccagtggtttccatcgggctccagtggtttccatcacgctccagtggtttccatcacgctccagtggtttccatcg

SEQ ID NO: 328558 - DNA, 122 bp, Homo sapiens
cacaggctccaggaggttccccacagactcccttgactcattaggaaaccggctttctctcgggttctttgaggctcttctgagttagaaatgggcaatggctcatcaaacacttctgcagc

SEQ ID NO: 328559 - DNA, 122 bp, Homo sapiens
aaactgtgctcacagaaaagcttaattatcctgatattatagttaaaagccagtggcactcgcatcctggggagacattcttcacttggcaggaggcaacctgggccaagctgtgggcagct

SEQ ID NO: 328560 - DNA, 122 bp, Homo sapiens
tggtacattctttcactgaccctctgccgtttcctggcctggaattattttgcacaccttcgtttggaggttttacagctgacccgccaccctgagaactggaccctgcaagcccggtggcg

SEQ ID NO: 328561 - DNA, 122 bp, Homo sapiens
gccagcgcgtccaaaacctcttccctcctaccgcagtcgccgcctcggtgggaccaagcccggaatcccgaccgagaccagcacttctgccccggctttcagccgccgggggctgccggaag

SEQ ID NO: 328562 - DNA, 122 bp, Homo sapiens
tgaacgaatggaacagcagccgctgtgtcactgagtattacatcacacccagcctacacacgcacggggcccggcgctcacacacacgcggaggacagccagcacgcaccgacgcagcaccg

SEQ ID NO: 328563 - DNA, 122 bp, Homo sapiens
tctctgtggtgagtatcgttgtggtcaacatttggaataactcgtgttgagcacactgttcgtgttcctgcccctagttctctgggtgtgtggctgcgcggaactgctgggtaattctaccc

SEQ ID NO: 328564 - DNA, 122 bp, Homo sapiens
ggggttagggtagaaattagtctgcttttttgtgtgtgcacaactatgtaagtgtgtacacgtgcatatatgcatgcatgcaagtacgtgcacatgtgtgcatgtttgtgtgttaatgtgac

SEQ ID NO: 328565 - DNA, 122 bp, Homo sapiens
tattatttggtgaagtttagctcagacaccctgcaaggacaccctaacccatctcgggcccgccttccctgtcgcgccattgggcttcgccggtccaaaacacagacccattggtcatcccg

SEQ ID NO: 328566 - DNA, 122 bp, Homo sapiens
tccttcagggactccatagtattttttttcacgcgtcgtcgctactacagcagacgcctgcgttctcattatttgctgtacagatctccggtgccttgactgtaaacaaaacactttagatc

SEQ ID NO: 328567 - DNA, 122 bp, Homo sapiens
cccacttcccgaaggtcccgcttccgggtggctcgcttcgccacctgcggtcccctgcctcggcttgggaacgccaaggacatcccccacggaagcctgggcccacatccccatgcccttgc

SEQ ID NO: 328568 - DNA, 122 bp, Homo sapiens
tatcaaaatttaaaatgcttccctcaggttgtgactttactaggcaaaatggaacgtcttcggagttctcttcttcatgccagtatctctactgctcttgatagacacttggagtctattca

SEQ ID NO: 328569 - DNA, 122 bp, Homo sapiens
cagttgactgtgctctggcagggagggaagccaagagctgtgcaagtcttctgaatcagccgcaacagcgcctctgctttttatgaagttaagagcatgacagatcttcctgaggaaaccat

SEQ ID NO: 328570 - DNA, 122 bp, Homo sapiens
tgccaaatgtatttgctgtgtgacctagatggctgaattttttaaaaagttcttcagcatcgagaaaaatccagttagaccgatagcttagagagctgtagcttatttctaaatttgacttt

SEQ ID NO: 328571 - DNA, 122 bp, Homo sapiens
ctgagccgacactgggcagtgacaggggtcagtgtttacagccgccagtggtcatccccacgatgatggtggagtaggacccagcacgggaaggtccctgcgctacctccagatggagcctc

SEQ ID NO: 328572 - DNA, 122 bp, Homo sapiens
ccaaagccaagggggtgggccttgcttcgcagatcagccaatagagatgagggctggttccggaagtatcttcccgggggcgggcacagcgcctcccccgcgcgggtccccgggcgctggtt

SEQ ID NO: 328573 - DNA, 122 bp, Homo sapiens
ttctcccaaatagaaaggattggtcacggaaatgccctgtaggagaaagacactggtatccgtttcttaaaggacattcacacttatgaagtgtttagggcaaagcaaaaaggaggaaggtg

SEQ ID NO: 328574 - DNA, 122 bp, Homo sapiens
ggtcgttcaggttgaaagactggtcgaaattacgcgggcatgagtcagcgcatccctacgcgccctccgccccttgagggtgggtcgcttatagggaggggagtagagtagggcaggagaaa

SEQ ID NO: 328575 - DNA, 122 bp, Homo sapiens
aaaatgaggaaatgacatgcctcagccaaaccacagctctggcttgtgctcgtggatttgcggaggaggcattgcagaggggatcgaagaataactagacttagtagaaatactaccagaat

SEQ ID NO: 328576 - DNA, 122 bp, Homo sapiens
tggccaacttgaagaaatgaggtgggaagtcatttgagatcctgacgaaatcaaacagcacggtttctaaaggttcataggggtgaaagaattgattacaatatcaatggaaatggattctg

SEQ ID NO: 328577 - DNA, 122 bp, Homo sapiens
tcttcttcctaacactttgcttttggtttacctcctcagcatgggcctgcatttccactgcgtaatagaactaagctgtgggagccagtgtgggcggcaaggggacttggtggcatttgaga

SEQ ID NO: 328578 - DNA, 122 bp, Homo sapiens
agtgccccaagcctggcgagcaccgcctgtagccgccagcaacaccccccacctccgttacgcaggaatagtcccagccaccatttattgtaaacatttggtctgcacatataacagagaaa

SEQ ID NO: 328579 - DNA, 122 bp, Homo sapiens
tccctattgacctttcagggactctgaaatcaactttcctcacacactctgaattgtttgcgtttgttttcatcctgccagagccacccgcccaggccacccatctcttccctcctccctgc

SEQ ID NO: 328580 - DNA, 122 bp, Homo sapiens
gtccggctcttggtgcggaacttcttcaggtcttctttaaagtcctcgtggtgcatgggccggtagctagggggctcacagtaagactgaggggacaggagagaataaggttagggtacacc

SEQ ID NO: 328581 - DNA, 122 bp, Homo sapiens
tcatccttccctcacttaagacaaatgcatgtttgactgcgttatctactgtttattttacgtaaaaatgtagattaaccacacaccagatgaatgcataattgactcttcctctacccgct

SEQ ID NO: 328582 - DNA, 122 bp, Homo sapiens
ggacggcggggtcactggctgaaggggcactgagtcaccagggagaacgtggccagcggccgactctgggaggccaccacacaatggtgacgccacggacacctctaggggattcccgccag

SEQ ID NO: 328583 - DNA, 122 bp, Homo sapiens
cgtgagggcagcctggggaactttggtgagcctcttcccaccccgccatggccacggccacggccacgcctccctgtaaacaacacacgtttcctggttatgacgacaaagctgtcctcacc

SEQ ID NO: 328584 - DNA, 122 bp, Homo sapiens
cacattgtcttttcataggctcatgtttgtgaacatttctccactggaagagaacgtctccgagtccctcaactctctacgctttgcctccaaggtgcgattaccacccgtcagccttgtca

SEQ ID NO: 328585 - DNA, 122 bp, Homo sapiens
gcttgaggacaacagaagttcactaaggatgcacgattgatctgagaagtttttaagcctcgtcctcgccctcctcctcctcgaactccccttgttcgtcggccgtggcgtcctggtactgc

SEQ ID NO: 328586 - DNA, 122 bp, Homo sapiens
gagtttggaaaggaggtctgcagagggttcacttgtagtagcagccctaacatggaatcccggtgtccccagctccacgcaacatacctacagccgcactggccagtccctttttccaacca

SEQ ID NO: 328587 - DNA, 122 bp, Homo sapiens
cttctgagggagctgcagtgatttcccgatttcctgcgcgcctgtgtggaaagttagaagcggaatctaccggcagctttgagactaagcatgacggtggaaacagctaattttattagctt

SEQ ID NO: 328588 - DNA, 122 bp, Homo sapiens
ggctacaattagggaggtgagggacctcacgcgcctcttccttagaggaggcgggcgaggcgaacggcggaggaggagaagcgggggcgctgtgcgctctctggggcgtgggccgcgctcgg

SEQ ID NO: 328589 - DNA, 122 bp, Homo sapiens
accactcagcgcgcgagtctctgaaaggcctaacgtccattttcaatcctgcgggtcttgcgaaggaaaacctgaggtaagaggccccgccccacagccatctcctcagcaaattcccgccc

SEQ ID NO: 328590 - DNA, 122 bp, Homo sapiens
tctgtatctagctaatctagtggggacgtgaacttttgcgtctagctcagggattgtaaacgcaccaatcagcaccctgtcaaaacggaccaatcagctctctgtaaaacagaccaattggc

SEQ ID NO: 328591 - DNA, 122 bp, Homo sapiens
taacgggccgcggcacccgcctccgcccgccagccctcacctcgcccggacggcggccttcggaagtcggcgcctgccagctacccgccgcctcctcagcaatcttagccgaccgggagggc

SEQ ID NO: 328592 - DNA, 122 bp, Homo sapiens
gcaagactcactcatcatggtgaggccgtccgggtcccaacttggcccaggaaatgacagcgttcttggggtgttacttccccctccatccagtagggacgcgcctactctgccctagagag

SEQ ID NO: 328593 - DNA, 122 bp, Homo sapiens
atttgtcaggcagctggaggcaaacgtcactgacaagattcagttatgttctcctctgcccgaagtccctgtcagctacataaagatgggaggttttctttacactgtcaggtgattgcaga

SEQ ID NO: 328594 - DNA, 122 bp, Homo sapiens
cctcgaagcggccggtgaggaagcgcgacacgatggccgtcttgcccaccttggacgagccgaggatgaccatgcgatagcagttcttggccgggatactcagctccgagtcgctcgggcac

SEQ ID NO: 328595 - DNA, 122 bp, Homo sapiens
ggtcccgcagggagctgctgagggcgctgcgcttgaggccctcaccgctggcatagctgtcgtccaggcaggcccggctcagtgttccgttgcccgactcctttttgaggctagagcactgg

SEQ ID NO: 328596 - DNA, 122 bp, Homo sapiens
aataattcctgtcaccgtggtgccttgctaaggaatatgagatcatcgctgtaaagtacacgcagctagacctttagagaaactactttcagcatagtctgctttctggctcaattcctgcc

SEQ ID NO: 328597 - DNA, 122 bp, Homo sapiens
gacctaaggtccactgccaaggcaccatcggacacacctgcccatgagtagacacagcagcgagcaaataggtctgataaataccccccttcccttccctccccaggagggaatgactacag

SEQ ID NO: 328598 - DNA, 122 bp, Homo sapiens
gaatctggtcccaggaggcggcgtccgcccggggtccggtctaggcgtgcgtgggggccacggtcacggtcatcccagccaggcccggctccagcagccccacggccgccgccagagttctg

SEQ ID NO: 328599 - DNA, 122 bp, Homo sapiens
ctcccagcaccaccctggcccgggtccccctctggaagtcacggcccccaggcccagccacgccggctctgcacacctggctgtggcatcgtccccgcccggcccccctggagtgtgaggcg

SEQ ID NO: 328600 - DNA, 122 bp, Homo sapiens
ttactgaatagacctttcacaggactggaaaagtgttttgggctccacctgctggacccacggagcttttgtgttcagtatgtgactgtactttagaaaacaaattaaatcagtggaattgg

SEQ ID NO: 328601 - DNA, 122 bp, Homo sapiens
cccgactactttttgtaatttttgtagggatggggtctatccatgctgcccaggctggtccgaactgctgggctcaagagctccgcccgcctccgcctcccaaagggcagggatcacaggtg

SEQ ID NO: 328602 - DNA, 122 bp, Homo sapiens
aagttcctccagactcagtccccattttcagcacttcgctgtctaccatgtaccatgtatcgatccacatctcattttctctgctttgaccctaattccatccatctgccatacacttactc

SEQ ID NO: 328603 - DNA, 122 bp, Homo sapiens
gggagtggctggaacacttccggcgccgctagcgctgcgagatattcagggcagaagttacgataactcggggcggaaatagcttctgcccagcgactgggaagaggggatgtgacgctata

SEQ ID NO: 328604 - DNA, 122 bp, Homo sapiens
ggacacagggctgcagtgttcactccagggcctcttatcattgggatctgaggaattttccgagaggaagtgcgaattaacaatgatgaaaggtttgtgagtgagtgacaggcacgttctat

SEQ ID NO: 328605 - DNA, 122 bp, Homo sapiens
tgttgctgggtgtgtaaggctagcctctgcagttaggggagcccctgcccccgcccctgccgctgcaccgagagccccttgagcccccagccctgcctccacgcctggggattatggatgaa

SEQ ID NO: 328606 - DNA, 122 bp, Homo sapiens
ccaccccaccccaccccacctctctaccccaccaaaagcacacagtgtccaaatctccatcgtgcctgcaactcaggaacagctatctggccgcacagctctagggaaactcaaagcaggaa

SEQ ID NO: 328607 - DNA, 122 bp, Homo sapiens
cagcttcagatacataaaccaaggtcactgagccagcactgaccctgccaaggaactccacggctaacccctctaacataagatttactacaaaactgcaccatgatgcttaacttttgcct

SEQ ID NO: 328608 - DNA, 122 bp, Homo sapiens
ctgacgccccgccactgcactggcaactgctccttcaagccaccgctgttgccctagggccggcctggccgcacccctgcgccctcaagccatgctgctccttgtaaatacccgctgctgcg

SEQ ID NO: 328609 - DNA, 122 bp, Homo sapiens
cacgatctcgggggccagccgggcctggctcttcttctgctgcaggtttggggtgccgcccggcttctgcttggccttcaaaaagttgctgatgatgagccggggcagctgcttctcccggg

SEQ ID NO: 328610 - DNA, 122 bp, Homo sapiens
gcaggtgctggtggaacagcgtcccggcctcttcccgcccgtccagagccgggtagcacccgagtccctcaccagcccgacccgttcttctgccagcgcccggcctcgccccgcgcccggag

SEQ ID NO: 328611 - DNA, 122 bp, Homo sapiens
ctgagaaatttgttgagagaccattacaatggcccacatgaatgtcaataaagccctgctcgggggaatgcacagtgaagaataaacaggaaaaattacttcaaaagaagaaacaataagac

SEQ ID NO: 328612 - DNA, 122 bp, Homo sapiens
ctcccagggggaattagtggttgctacagtagtttaagagggtcgtggtttttcgcaacccgggcggcgagatggcgctttggtgtaagcgaggtaaggtgggtgcactgggatctccgctc

SEQ ID NO: 328613 - DNA, 122 bp, Homo sapiens
tagctcagctgttgtctcatctgccagcagatggccagactatttttaagtcaggattctcgagagcaggaatggatcaggctaagctagggcagcctagactccctctctctgcagagagc

SEQ ID NO: 328614 - DNA, 122 bp, Homo sapiens
ttcacataatttttcagctgatcaacaatatctataagttgacgcattctaatcatgtggcgatcttgaccttgggagcttgatttgtggaccagtgtccccaagaagatgaccatcagaca

SEQ ID NO: 328615 - DNA, 122 bp, Homo sapiens
aggagagctcggctactcctgcgcaggataacctctcccccaccacccgagtcccgtgctcgcgggcaggacttttccgaactggggctgtgtgcctagaaatacgtacatgggagcgctca

SEQ ID NO: 328616 - DNA, 122 bp, Homo sapiens
gcaagcaaagagagaatccaccatgacatgccatgaggtccaggtggttagagttcaaggcgagccagatacttaccacaggaaaccataaatgtgaagaaactctgctttcaggggcatat

SEQ ID NO: 328617 - DNA, 122 bp, Homo sapiens
aggtaaatctgatactttcaggacaaggaaaaattgctctagcagtgtccttgaatagcccggagtggatgggatctagttgacaaacggtatgagtggcctttcagatactccattattgt

SEQ ID NO: 328618 - DNA, 122 bp, Homo sapiens
ttgattgtttgtttgttagagacaggctctcactctgttgcccaggttggagtagaggtacgataatggctcactgcagcctagagctcacaggctcaggtgactctcctgcctcagtctcc

SEQ ID NO: 328619 - DNA, 122 bp, Homo sapiens
agggaggggctcctgttctggcttctagccagtttggtccttccagctctggccagggtgcggggccacattcagcgagtgccactggccgcagctggcttcccagtgaggggttcccttct

SEQ ID NO: 328620 - DNA, 122 bp, Homo sapiens
gaactgcagacattcctctcacagctagaactgaaacaaaccctcttgctaggggtggtccgtgtgaggtgtcatcctgtccccctcataattactaatagctggaactggcagcagcctct

SEQ ID NO: 328621 - DNA, 122 bp, Homo sapiens
agaacctgctggccctcctagcccggcagggcgtggtgatgacgccccctcgaaaccggacgctgcccgacctctcggaggtgggacccttccatggtcagccgttgggccctggcctgcgg

SEQ ID NO: 328622 - DNA, 122 bp, Homo sapiens
ggacgagaggtcaaatctcgcgaggcgtgctccgtctcgcgagatctgggttgagcctgccgctgccttggctaccaggctcctcaggtggcagcgcttgcagtcgggctacggaggccggg

SEQ ID NO: 328623 - DNA, 122 bp, Homo sapiens
gagctcttgccatacatgagggaaacccagccttggccccagagaccggacggggcagaccgagggctccaacaccctgccaaggccactccgggaggagcaagcaccgcgttttcccagag

SEQ ID NO: 328624 - DNA, 122 bp, Homo sapiens
aagacacagccatgatattatatccctgatcaaaatattctcaaatctcttaaaatattgcggggtcaatgcctctggaagggtgagaaatagaaaacatgagtagtgagatagttctaaat

SEQ ID NO: 328625 - DNA, 122 bp, Homo sapiens
tcgatcccggccacccaggtgaagcgcttgcttccctaaaagaatatatggttttcttggcgggggcgggggtgggggggaatggggaaggcgtcttctattttgtcagcgatgacatcctc

SEQ ID NO: 328626 - DNA, 122 bp, Homo sapiens
ggcttccagcagcctggggcctcgtgggtactgagctgcgtgtgggggtccaggacccgacgtcgcctgccattcggccagggcatcggcagatgtattggtccagcccccgagagacccag

SEQ ID NO: 328627 - DNA, 122 bp, Homo sapiens
caaactgtgaaggattctgtcttgctaagtgggttgtagtgggcgcctacagtgtatgagcgctgtgcatgtgtgatatcatccaatcccctaaacaatctttgaggtggctgtgactcaag

SEQ ID NO: 328628 - DNA, 122 bp, Homo sapiens
gggcccccgccccactgcctcactgttctgcacacccacccagatgttctcacgccccatcgccccagacacagccccagacagctgcacagctggcctcctggccggtgggacagtaggcc

SEQ ID NO: 328629 - DNA, 122 bp, Homo sapiens
gatgaatctgtgcaccaatcccactcctacagcagttctcacagcaacgccagccacgcccgtctcatctctgaccgtgagtttcctcttaatgctggccctgtggctaccaggccttgggc

SEQ ID NO: 328630 - DNA, 122 bp, Homo sapiens
aatgagagggaaagtccatgctgggattgttcatatccaggcagctgttctgcctttgcccgtttgacccttcatttaacaaacattgtcagaggactggcagtgcataggctctggaaagg

SEQ ID NO: 328631 - DNA, 122 bp, Homo sapiens
aagacaggaggaacctttgagcccaggattttcagtccagcctgggaaacatactgaaaccgtttctacaaaaaaaataaaataaaataaaaaataaataaataactagccgggcttggtgt

SEQ ID NO: 328632 - DNA, 122 bp, Homo sapiens
acacgggcaaatgagcctttgggctggcaccccaaacctggtccctgactccgggggccacgccctgctgcctgcgcgcacaccttgctatagacacagccaccacgctgcaccatgtaacg

SEQ ID NO: 328633 - DNA, 122 bp, Homo sapiens
gacgtcagccctccagcccgcgcctgtatctcggggtggtataaacaggatgtcagacagcgcgctccgggcttgtttatgaaaacttgccgtgcgcgctgggggagggggcggcctggctt

SEQ ID NO: 328634 - DNA, 122 bp, Homo sapiens
ggtctagcacgtcatttaacagatgaggaaatggaagcttgggcagtggaagtatcttgccgaggtcacacagcaagtcagcagcacagcgtgtgtgactccgagcctgctccgctagccca

SEQ ID NO: 328635 - DNA, 122 bp, Homo sapiens
gctcatcacagcactctgtccttgtgatctggcttctcagaatggaaaacaacattctaacgtcaataaaagcatgaagaacatgtcaggtacttgagaacccatgccactttcaaagccta

SEQ ID NO: 328636 - DNA, 122 bp, Homo sapiens
agacactctctgctcctctcatcccacacgctttaccggtaccttcaacagcacccaccgcgttcaccctgtgaacacttccttagtgatgaccttgtgccaggcctgcgctgcctctagga

SEQ ID NO: 328637 - DNA, 122 bp, Homo sapiens
ctcatgatttgaatgccaccctcttgaaagaaattgtgttgagtgagtggttttaataatcgtattgctagccttagccatgggatatgcatgccaaagaatagatgctgattattcaaggg

SEQ ID NO: 328638 - DNA, 122 bp, Homo sapiens
agtccatccggtggtctgtgccggttagcgtagccgcccgccggcccggctgctcagcagcgggcaggcctgagcacccgctacactgcagcccatctggcccaggcaaagaccctcgcacc

SEQ ID NO: 328639 - DNA, 122 bp, Homo sapiens
tttttctggcctgactcccccttggtgcagcccagcgctgccacctgggtggatggtccccggggccctattcccagttgctccagagccactatttaggatccaggttgtgccaccaagtt

SEQ ID NO: 328640 - DNA, 122 bp, Homo sapiens
tgagacggagtttcactcttgttgcccaggctggagtgcaatggcatgatcttggctcaccgcaacctccgccaccctggttcaagcaagtcctgcaagtgatccgcccgcctcggcctccc

SEQ ID NO: 328641 - DNA, 122 bp, Homo sapiens
caggaccctgagtccatgccccgccgccctggctgcggtccagcaggttgccaactcttccgcttcccgcgacttcgggagagcctcacccgggcccagctgtctccaagttaactagggtt

SEQ ID NO: 328642 - DNA, 122 bp, Homo sapiens
ttttttaagtagagcgttaatgcaacctcataagtgcctcctcactattgcctagtggaccgtggggtgggcggtgagtgaattgaacagacaaagattctttgggcaaaggttatctgcgc

SEQ ID NO: 328643 - DNA, 122 bp, Homo sapiens
cagggagccaagaggtgctagcaccctcctcagcccttcactttgatgaccgtccttcctcgtgatcatcaaagaggttagggttctctgccagcgtggctctcactttcttcttctccttg

SEQ ID NO: 328644 - DNA, 122 bp, Homo sapiens
cagtcatctgagggaggccaaattaaaggtgcatctgcaagaggagctctggcctgacatcgctaactgagagcagccctggcggaaaggtgctgatcccgggagtagagcgactgctgcgg

SEQ ID NO: 328645 - DNA, 122 bp, Homo sapiens
tctctcggcttgtgcttgctccgcggtgggctggatgggcaggtagggggcgggctccggcgctgggaccccactagggtggcgccttggccccgccccgccccgccctccctccgcctcat

SEQ ID NO: 328646 - DNA, 122 bp, Homo sapiens
ctcagctattaacccctgaaagattgtttgaaacataattgtaaaaagaaacgaatgcctcgtagaacacagtttctaataaatacagcatttttggtgtgcgtccatatcatcatccctcc

SEQ ID NO: 328647 - DNA, 122 bp, Homo sapiens
agaagccgccctttgcagtcgcaggcgctagctctccgtgggaggtctcgaggttgggcccggagccgggcggagggcggcgcggatatggcctcggcgcggtgtccgccgagcggagcccg

SEQ ID NO: 328648 - DNA, 122 bp, Homo sapiens
ggcacctgggaggctctggcaaatttgatgacgaataagcaacacctgacaagaggagtccgaactgtccccctgggtatgatgatgtgccaacgtgcccagaagaatcttgggttcatggg

SEQ ID NO: 328649 - DNA, 122 bp, Homo sapiens
ccgcaagggtgactagagcccccatgctgcggggctgggggtgggagccggcaccggggacgagggccatcctctggcacagacaccctctccttcccgggggccctgactcgaggctgacg

SEQ ID NO: 328650 - DNA, 122 bp, Homo sapiens
tagtaacgcgctctgcatcatggtgtgtgtgggccggctgcccgagagctgtcctggccacgcagcagtggtgtttgtatcgagtgctcttgctttgctcatcgtggttcacagggtgggtc

SEQ ID NO: 328651 - DNA, 122 bp, Homo sapiens
cctttaggttgagaaagcagggtcactatcactcacttggggcagacaccataagcagctcggaaaggtccgggtacatgcggtcctcttgcaactgacggtcgatgagccgtccagcattt

SEQ ID NO: 328652 - DNA, 122 bp, Homo sapiens
ctcaggcaatccacctgcctcggcctcccaaagtgctgggattacaggcatgagccacctcgcccggccagcaacattgtttttgagataacaaaccttcggactttaatcaaaccaatgtg

SEQ ID NO: 328653 - DNA, 122 bp, Homo sapiens
gcgctgccctaagagctgtaacactcaccgcgaaggtctgcagcttcactcctgagccagcgagaccaggaacccaccacaaggaagaaactctgaacatatctgaacgtcagaaggaacaa

SEQ ID NO: 328654 - DNA, 122 bp, Homo sapiens
ttaattatattaaaaaatagtttgacagaaagtatttaaaaagagaaagggagaacatcacgtctttattttggtgaattagcaacaaagaaaaagattagcatggacgggtacttttcaaa

SEQ ID NO: 328655 - DNA, 122 bp, Homo sapiens
tctcagcaggttgaaatggctgatgacatcactggttcccgggagcggtagagctggagccggagccaagggagtccaggctgccgggggctgcagacatggagggccagagcagcaggggc

SEQ ID NO: 328656 - DNA, 122 bp, Homo sapiens
agtaaacatttgagaagaaaatgccaaaaatgttggaaaatacataatatttattttgcacgtgccaaatgtgtattaatttatgaacatttattgtgtttaccttgtgtgtgcatggtaag

SEQ ID NO: 328657 - DNA, 122 bp, Homo sapiens
ttcctgcattttagattaaagagcctggttttcacttgaagtttctctgccttagctgcacgttgcaattttctgagatattttaaaaattagtgatgccgggaccctgaccctagggattt

SEQ ID NO: 328658 - DNA, 122 bp, Homo sapiens
ctgtaaacaggaaggccacagtggaggccaagccttccccatgggcaccttctcagattgcgattgtggatgaaatgagggattttcttgaaacaaccctcacgcaggtaccccttgggcag

SEQ ID NO: 328659 - DNA, 122 bp, Homo sapiens
aaggtaaaatgggttgcctccagctccatgatcagtgttctactatagcctggataaccacgagttaaggatgatgcatcatccctaactcgtgcatcaagttgctgattaaactaggtgac

SEQ ID NO: 328660 - DNA, 122 bp, Homo sapiens
ctggggactgagatgtgtgtcaaccacggtgtcttcagaggagaagggcggccgggtccccggaggacacgggtaatgcagaggcatctccccagctcgcccagaaactggtccagcaccat

SEQ ID NO: 328661 - DNA, 122 bp, Homo sapiens
atttatccaaccaaatcacactttacaatgcaaatctgccaatcagaccttggatattaacgaggaactgctttaaggggattttggtgtttgtgctgtgaagagcctgcttacctccaacg

SEQ ID NO: 328662 - DNA, 122 bp, Homo sapiens
cgcagacccgcagctcaggaactcccagaccctgctctaagttcagtctcctactttgagcgcctcaagcctcctctctctcccagcatacagcgaatacctctaaaatcccccacttctct

SEQ ID NO: 328663 - DNA, 122 bp, Homo sapiens
agccgcgtaggattttgttgcggggggagctgggatcagtcggtttgggcaccaaccccacgcaggcctttcttcctgcctgtggcagccggtgtcctcggcgtccgaaccctgaggcgccc

SEQ ID NO: 328664 - DNA, 122 bp, Homo sapiens
acacaaatactaagacactttgcatttttaaaaattaagaatcatttgtgaagtccactacgaggtacttcaaaagcccagtaatggtggtcagataccatgtagatggatacagattgttg

SEQ ID NO: 328665 - DNA, 122 bp, Homo sapiens
acccacgctggacccccacccctccagacagcctccttgtcactggccagatccttcccccgacccagtgctgttcccctgggtgcagcgtgtccctgtgctcacgctctcagtccctcttt

SEQ ID NO: 328666 - DNA, 122 bp, Homo sapiens
caaagtacttgtaagagctccaagttccacgtactcagccactaacctcaggcatctgcacgggagacttggtacacaggctcacatgcatgcacgcacacaggcacacgtacaagcgcccg

SEQ ID NO: 328667 - DNA, 122 bp, Homo sapiens
cgcctcagctgccttcgggtgtcactctgcaggtcatgcattcccaccccgtcctgtcctcgggctggagattgttctcttcgggttccagcaattcaaccaggatgctctgaggtactgaa

SEQ ID NO: 328668 - DNA, 122 bp, Homo sapiens
aggcgagactgcaggctgcatctgtgattaggtccatgcagctcgaagatcagttcggcacgcgggagggtcccgaaagctgggtctgtccagtgtcttgcagcagcggttgcagggggtct

SEQ ID NO: 328669 - DNA, 122 bp, Homo sapiens
gagagttcctctaagggagcacgagaaagacccagtcttctgtttcttcacgtgtagcctcgtccaagagcctgtccagtacaggcaccaacggatgacaggagcgctccagctgcaatcag

SEQ ID NO: 328670 - DNA, 122 bp, Homo sapiens
tcattgttacttcctgccctgctctggtttggtgagttttgtccttcctttttccaaagccgtggattcctgtctcctctacactttccatccttactgggtctcacccaatcgcaatcgcc

SEQ ID NO: 328671 - DNA, 122 bp, Homo sapiens
ggttgcaggaccaggacaaatcacacagggccaacctccccaataatactttcatgcaggcgaaatcaggtgaaaatgcacaccaaatgtagcttggagggggaaaaaaaagatgaaagaaa

SEQ ID NO: 328672 - DNA, 122 bp, Homo sapiens
cgaagtggcctggacccgggcccggcccggcgagatcactggctatatggccaccgtacccgggctgctgaaggtgctggagaccttcgttgcctgcatcatcttcgcgttcatcagcgacc

SEQ ID NO: 328673 - DNA, 122 bp, Homo sapiens
gtgatccgcccgccttggcctccaaaagtgcaaggcattacaggcatgagccactgtgaccggcaatgtttttaaattttttaaatttaaattttattttttagagaccaggtctcactcta

SEQ ID NO: 328674 - DNA, 122 bp, Homo sapiens
caaattagacgggaaagcaggaaagctgtgcagaaattctgacctgaaacgcttcgcatccggtctctgcttgttgaaggaccttcaccgctatttctgagaagagcaaaagtgatgcagat

SEQ ID NO: 328675 - DNA, 122 bp, Homo sapiens
ccaggcctgtgggtggaaggggatgctgtggcccttgggggccagggtgggggacccagacggggctctgcaaagtggccagcactgctgagtctcccccagggaatgggctggtcccagtt

SEQ ID NO: 328676 - DNA, 122 bp, Homo sapiens
tcagtgctctcgggggtgggtctgtgtgtccctccactgggcctctggaccagaaccttccggggactccagcttccctctgagacgtctcggccgacccagcccctcctatgcggcggcca

SEQ ID NO: 328677 - DNA, 122 bp, Homo sapiens
gctgccggtgatcaacaacagcttcaactgtagactctgtctaggccagggccaactctccgtaccagcatcaacatctctctgccctggccccattccagggttcattaagtaaagcctgc

SEQ ID NO: 328678 - DNA, 122 bp, Homo sapiens
tcgcccgccggccgcacatgcgccgcctcgcctccagcagcgccgcctcgcctccagcagcgccgcctcgcctccagcagcgccgcctcgcctccagcagctctgcctgccttggtgaggtc

SEQ ID NO: 328679 - DNA, 122 bp, Homo sapiens
ttcatccactacctgactactgtcattcacaggcattctgttccacagcaggccagctaacgtggtatttacaaagctcactcctcttatacaacaatccaagtgtttcttttgtcagttgt

SEQ ID NO: 328680 - DNA, 122 bp, Homo sapiens
tctggccggccctggcgacggggctgcaaacgcttcgtagacctcagaacagcgcaacggcggaccggcggaccggcacgaaacatagcagccccaccacaaacatttcccttcttaattcc

SEQ ID NO: 328681 - DNA, 122 bp, Homo sapiens
tggcgcaagaaggtggaccccagtgctgtgcaaggccagggtcccgggcaccgccagcgccgggcaggcaggcacacagcctcggtgcaccacctggtctaccaccaccatcaccaccacca

SEQ ID NO: 328682 - DNA, 122 bp, Homo sapiens
ttcctctcccccatcccttatctcaacataaatcctccccagttgcccaggttgtccaggcgattcctggcacacgtcctggggcctgccctccacctttagccctgctctggcttctgcag

SEQ ID NO: 328683 - DNA, 122 bp, Homo sapiens
tggataagtgccccaccttagaccagtacaccataagagcgtttgccgacgctctggagtcgccccatggccctttctgaaaacagtggcatgaatcccatccagactacgacaaaagtccg

SEQ ID NO: 328684 - DNA, 122 bp, Homo sapiens
gtgcgtgccaccgggtacctggacctggatgcccagtgtgtatgcatgcctgtggcgctgcgtgagttatcggggctctgatagcgtccggagcgggttcgagggtctcctccaggaactcg

SEQ ID NO: 328685 - DNA, 122 bp, Homo sapiens
cctcattgcttagcaaagaggtactcatgcagctaccatttagggcctttgggtgtaattcgttatggcctctatatgccatataacatcttcgatacctatctgtggtacaaagattgaag

SEQ ID NO: 328686 - DNA, 122 bp, Homo sapiens
gcggcggggaggcgggaacacccggcgccgggagactggaaattggggtcagggctgggacgctccgagggcaggggagcggtcagaggagaccttaattacggggagaggatgctgtacgt

SEQ ID NO: 328687 - DNA, 122 bp, Homo sapiens
tttcagttccttttgcactcacattgccatatgatactcctatcaaggctgtgatttcttcggtgaattaagcaacagagcatggatagcaaacaataaaacagctacttttcatgcaacac

SEQ ID NO: 328688 - DNA, 122 bp, Homo sapiens
agagcgcggcggcgggaaggcggcggcggcggcggcagcagcagcagctgcaagagccctcgcagcctcggggcaggacccacgtccacacccgagagcccctccctggggtgagtcagggc

SEQ ID NO: 328689 - DNA, 122 bp, Homo sapiens
gaggaggccaccgagctgctgggtagctgaagatgagctgagcatgctgagacacagggccgccaggggtccctcccccaagcgcctccccaggaacttcagcagcggtgacgggaggggag

SEQ ID NO: 328690 - DNA, 122 bp, Homo sapiens
ataactggtgctcaataaatatttaccgactatatgaatgaatgaaaagttcaatgtaaacgcaggactagcattaaggctggaaccaagggcaggaccaaggtcagggctaggaccacgga

SEQ ID NO: 328691 - DNA, 122 bp, Homo sapiens
agaccaggcaggtggatgctaattcaccatgttaacccctttcatgccagtccccttacccgagccttggcaaagagccatatcccaccaccccaccctgccacagtggagtggagcactgt

SEQ ID NO: 328692 - DNA, 122 bp, Homo sapiens
attacactgtcccaatttcagttgaggtgggcttttaaaagaaatcccaattcacacattcgatcaggttagttacaagaaaggctgggaggaggtggggctggaaacaccagagggcccag

SEQ ID NO: 328693 - DNA, 122 bp, Homo sapiens
tcggggccgggggcgggggcggggccgggggtggcctcgaggctcccgtctgaccgtccccgcccaggcctgagcaacatcatcggcgtgatcgtgtacatctccgccaacgcgggcgagcc

SEQ ID NO: 328694 - DNA, 122 bp, Homo sapiens
aaggacctggcctttctggtaatattgtcatcaaccatttaatgatgtagacttggtccccggctcatgctctgtgtattttcttctccatctacatgcattgccttgatggtctcactcaa

SEQ ID NO: 328695 - DNA, 122 bp, Homo sapiens
agaaggctgaggcaggaggatcgccgaggctaggagtttgaggccacagtgtgctacgatcgcacctgtgaatagccactgcactccagcctgggcaacacagcaagaccccatctctaaaa

SEQ ID NO: 328696 - DNA, 122 bp, Homo sapiens
tgctcactctctgcatagcatggtctgcacctgggagatgggcggggggaggggggcgggcggggtgggaagtgcctgctgtttataatgttgaatttctgtaaaataaactgtatttgcaa

SEQ ID NO: 328697 - DNA, 122 bp, Homo sapiens
gcgaatcccaggaaaaagactggctcatcaatcacatgttgactgcgctcgcgcgaattgcgcatgcgcatgctgagccccactctccccaaccccggtcccgcctctccacccctcaccaa

SEQ ID NO: 328698 - DNA, 122 bp, Homo sapiens
agtcacaatcacccacaactccctctgccaaaaaatgtcatgcaaaaacggaaaatactccgattcccctttcctcccagacactctctctctctctgtctctgctattcattttctccccc

SEQ ID NO: 328699 - DNA, 122 bp, Homo sapiens
gaaaggtgacacctcccaggctgcgaaagcctgaggctaatgggacatccgcccattttccgctgggtctgtaattatcaacctcaaaagtgaccagccctgggcacggggaaaaaaaccaa

SEQ ID NO: 328700 - DNA, 122 bp, Homo sapiens
aggagttcaggctggaccagagagggtcctggaggcacctgcaaggaggggccgcccaggcgctgccctcgcagaggcaggtaaaattacctcgtgtagtatagacaccgatggtaagctct

SEQ ID NO: 328701 - DNA, 122 bp, Homo sapiens
ggtagggatattagcaagatccttcacttgtctgggctttctgtctttgagtcacctttgcgcagtttttcactggacttcacaagcctctgaggcggcagggcagacaggacatccttatt

SEQ ID NO: 328702 - DNA, 122 bp, Homo sapiens
ggaggctaaggcaggggaatcacttgaatccgggaggcggagcttgcagtgagccgagaccgcgccactgcactccaactttggcgacagagggaggcgccgtctaaaaaaaaaaaaaaaaa

SEQ ID NO: 328703 - DNA, 122 bp, Homo sapiens
gataagaaataatccaccgcccgcatttgagttcttcaggttcagttccagcggcagcagcgttgctgcaaaaatcgcttgctattcgagatagccagcagagggaatcggaactttgcttg

SEQ ID NO: 328704 - DNA, 122 bp, Homo sapiens
ccccgcatctgcgcccccctcccgctaacccgcggcctccgcaagggcagcgcgctcagccgggtgaacctggaactgtgttcctggcccagcgctttcataaaagggcgcggaatagtaag

SEQ ID NO: 328705 - DNA, 122 bp, Homo sapiens
tacttcaacccaaagagaagcgactccgaacccacaccgcgagtcagctggggtggagggcgcggtgcggggatcttaaggtctgtagctgccgggcgcagtggctcacgcttgtaacccca

SEQ ID NO: 328706 - DNA, 122 bp, Homo sapiens
ccattgcaggtcttaccgttgctgcttatggtgaagctgtcgatgggcatagaatcgggtcgtgtatagtatcgggttgggtggtttctgcgcaggcccattccagggtttcggcttcaggg

SEQ ID NO: 328707 - DNA, 122 bp, Homo sapiens
ggggtcctagtccggttgcgccgcggcgtgaggtgaggtgtgagttgccctggagggtggcgggttttccaggcgcatgcatttgccgcggacgggacgagaggatgaagccgttctgggcg

SEQ ID NO: 328708 - DNA, 122 bp, Homo sapiens
tgaactctgacagagggcagtggggtcagggatgaatgtgtttttcctttgagatgcaaacgtctcaggactgtgtgagtgattggatttggagggtgatgagaaagacagaacaatctaga

SEQ ID NO: 328709 - DNA, 122 bp, Homo sapiens
gagaggagcttcaggatccactcaccctcatttcccgtgggctgtacatctggcctcccccgaggttatccccatagccccctggccccatcgagtgtcggagtgattccacctgcaggcag

SEQ ID NO: 328710 - DNA, 122 bp, Homo sapiens
tcaaatattgccaaaaggtggacgtgagactggaacggcttcctactctttgggccacagcggcggcctgccaagggactttctaacgaaaccggcgctgcccaagcgtctgcactcacgcc

SEQ ID NO: 328711 - DNA, 122 bp, Homo sapiens
gcacgctggaaacgcctcccaggcttataggagaggccgggcccagggcaacgctggaaacgcctcccagtcttacaggagagggcggggcctagggcaacgctggaaacgcctcccaggct

SEQ ID NO: 328712 - DNA, 122 bp, Homo sapiens
ttatccggggatggggtcgatgcctctagaaagagctccctagccctcttaagccacactcgtgttacactgttatttgctgcgatccgggtcgctagtaaattacagaaatcagactcgag

SEQ ID NO: 328713 - DNA, 122 bp, Homo sapiens
actcaggaagagggccccagggtcctcatggaaagagagggatttatgctctggaggaatcgcagagattctggggcaggcaaagaagaaagccacttcctgtctatggggatttgcaaaat

SEQ ID NO: 328714 - DNA, 122 bp, Homo sapiens
cggtggcaacaccatcgtcggcacctccccttaggtgtctgctgtcctgcgactccttcgcgagaatcgctccgcaggggaccagagaaagatagaaaaagcctcttctctctcagccttct

SEQ ID NO: 328715 - DNA, 122 bp, Homo sapiens
gaagggggcagaagtggtttgagggcctgtgtccggccatgggtggaatggcacccgcagcggctctggtaggaactgatggccctcgaggcttcagaacagccaccggccccctcaagccc

SEQ ID NO: 328716 - DNA, 122 bp, Homo sapiens
ccggcccagccttgccggccacgtaccgatgacggtgaggtgggtgctggcagtgatgctcgtgaccacgttggtggcgacacattcccactccccgtggtcctccttactcagggcacgga

SEQ ID NO: 328717 - DNA, 122 bp, Homo sapiens
cggggtggcgggaggcaggtctgaagccaccgcaccctggtccaccccgctgctgggccacgccagccgaattcacacggtccttggggacatttcagttgactgtcacctgcctccgtacg

SEQ ID NO: 328718 - DNA, 122 bp, Homo sapiens
tgaaacccaccctctaccctccctgatggccgggcacgcagaacgtggctgaggctggcccgagacctgtccaaggtctgaggctcgaatcctggcagcaggtccttcatggcaaggcggga

SEQ ID NO: 328719 - DNA, 122 bp, Homo sapiens
agctgggattacaggcgcacctgaaaagttaagcaggccaaagcatttgtgtaaatggcccgagcacacattttaagtgagaaccatttgaagactccgagtttgcctgcgaggattcccaa

SEQ ID NO: 328720 - DNA, 122 bp, Homo sapiens
atatgtttgatctcattcatttcatgctttttctttatttcttcctacactttcttttgccgatggaagaagtgctgctttcaacgtccattttctctgcttacccttttccctgctctctg

SEQ ID NO: 328721 - DNA, 122 bp, Homo sapiens
ctgtccgggggctcagacccgggtagaggtaacttcgatgagggtcgctccactctcctgcgccgcccccaccacgggggagcagggcccatacccgctggacgggagggggcagctgccac

SEQ ID NO: 328722 - DNA, 122 bp, Homo sapiens
cacgcctgtaatcccagcactttgggaggccgaggcgggcagatcaccaggtcaggagttcgagagcagtctggccagcatggtgaaatacaaaatttagccgggcgtctctactaaataca

SEQ ID NO: 328723 - DNA, 122 bp, Homo sapiens
cacgcaaggtcaggaagtgccaaagccaccaagagtacatgtgacttcgggggttgggggcgggtgcgcctgcccacccaccacaaatcttagccatctgggctgtggagaaaaaaagggag

SEQ ID NO: 328724 - DNA, 122 bp, Homo sapiens
cggctccactcacactccagttctttcatttccccagtataaaggctgagcttctggttccgccccgggccctggggatataaacatttgccagattcttcctcggcccctgggggaaactg

SEQ ID NO: 328725 - DNA, 122 bp, Homo sapiens
gcagccagcacacctatgctgattggtgatggctcaagtgtgttaatgtgtgtgtgccggcgcccggcctcgcctccaccgctcctcactggcccattagcgaagcctgacctctgtcatca

SEQ ID NO: 328726 - DNA, 122 bp, Homo sapiens
gtacaaggtgggacctgcttgttctcgggtagaaatgggaatggctttggggtcttctcccgccaccacgctcacccattgcggtccaggccagccccatgaccacgccgggcggtgtcacg

SEQ ID NO: 328727 - DNA, 122 bp, Homo sapiens
gcagcatggggttggtgagagtcagccttcaggccactagggttttctcagggagccaaccgattactcaccgggagggatggttcctccaggagggtcacttcttgggaatctgaccctag

SEQ ID NO: 328728 - DNA, 122 bp, Homo sapiens
gaggagcgcgccgctgcctctggcgggctttcggcttgaggggcaaggtgaagagcgcaccggccgtggggtttaccgagctggatttgtatgttgcaccatgccttcttggatcggggctg

SEQ ID NO: 328729 - DNA, 122 bp, Homo sapiens
ttcccggatctagtgcaagacgccgcggcggcgacgaaggttgatgttgcggctggcggacgccgccgccgcgctctccatatcggacgcggggcccagactgcgccctggctctccgcccc

SEQ ID NO: 328730 - DNA, 122 bp, Homo sapiens
cccacggagcccctccgcatctgtgtccgaggccgccgcgagcgccctctgcacccggcgcgcccagaacagggaggagtgcacggcgctggctccgacatttcccgcctggatctgcaccg

SEQ ID NO: 328731 - DNA, 122 bp, Homo sapiens
tccatcgctctctccatcctcggcgcgccctccgcgatcctccgcgatcagccgccccaccggcggcctccgcgcccagagccctacatctcgcctgggcccgtccagcaggcggagacgcg

SEQ ID NO: 328732 - DNA, 122 bp, Homo sapiens
tttgtcctcgcccagacagccccccagcacaatatctagtcacctctccctctccagagtcgaaaggacaaagaacgccttaagcagaagcacaagaagcggcctgagtcgccccccagcat

SEQ ID NO: 328733 - DNA, 122 bp, Homo sapiens
acactggtagttcctgaacctcttgtgaaatgaaagatgttcctcattccaagctgaggacggagaaaagccgtaaagctgacactggtatcgcactgtgatatttgttgttttctaggttt

SEQ ID NO: 328734 - DNA, 122 bp, Homo sapiens
ccggctctgggtactagggcgccgggcagcgcgggaactaacgggcagagtctgtggggtcgggatgactgaaaacaggccctgtcttcggtttaggctcaggcggaaaccccccgggggcc

SEQ ID NO: 328735 - DNA, 122 bp, Homo sapiens
gactgttgctgtcctttctgtttaagttattcatagcagcctgggccaggacctgtttgccgctcctggctttaaaagtcccagctcctcccctgctcacccattaaagggctagcatcctc

SEQ ID NO: 328736 - DNA, 122 bp, Homo sapiens
actctcccaccccgcgcgcgccgcactcacctgagccgcgcctctgtccagcccgtccggcgccctaaataggctcctaggctgggccatgggcagcactgccgagcacccgcggcgggtag

SEQ ID NO: 328737 - DNA, 122 bp, Homo sapiens
tgtgttgcccttattgttagaagcgttaatggaggccccgtgctggaaagagaaaccacacgatcaaaaggaacgctacgaaacgtcagcatggaatctggctgtgggtatacaggtattcg

SEQ ID NO: 328738 - DNA, 122 bp, Homo sapiens
cccggcctaaatcttttcttctgttagaaattaagtggttctgcctgtctcagtggctcacgcctgtaatcgcagcgctttgggaggccgaggcgggaggatcacctgaggtcgggagttcg

SEQ ID NO: 328739 - DNA, 122 bp, Homo sapiens
agggaagaacggagtttgcttcaagtccagatgaagcagaaaaataagcttatggagacccgggacaaaagactcaggactcaaaaaatttagggaacactgtgcactcagcaaaagtttta

SEQ ID NO: 328740 - DNA, 122 bp, Homo sapiens
tgcagctggttggctgtgactctgtactggcccttgatgaacccccgggaagcacaggagcggcacctccagtaagcctggatgatgcgaacagcattgagcacctggcaatagcgtctgcg

SEQ ID NO: 328741 - DNA, 122 bp, Homo sapiens
tgaaccctctttaacaggaagtagaggttgaagcaattctgtggctgctattagggaatccgtagactgttcatggaagagtggaaggtgggctttatagcccggtagttatgtacttagac

SEQ ID NO: 328742 - DNA, 122 bp, Homo sapiens
ccagagtggacactgtccgtgggcgctctgcggggctggctgggacagccggctgagaagcgccaccccctcccgcctagggctgtacactttgggtttataatccacatggcagggtccag

SEQ ID NO: 328743 - DNA, 122 bp, Homo sapiens
agacctaggcccagttccacctcacagctgaaataagacatccagtgcactgcacgagcccgggcagggatgcttgctggagttgacatctgttccagtcaacccccaccttcctgaacggc

SEQ ID NO: 328744 - DNA, 122 bp, Homo sapiens
ccctcggaggaagcacagtcctcactgaaaggggagagcagtcagtctagggcacgcaaccgcccgtaaattatgattccccttgaggagcgaggaaactaataccccacgtagctactctc

SEQ ID NO: 328745 - DNA, 122 bp, Homo sapiens
ccaggctgcatgaggcctaggcactgggatgggacacgaccccacactcagtggccaggccgggggaaagggtggagccccccgggggctgctgtgtctcctgcccccagcggcgcacaggg

SEQ ID NO: 328746 - DNA, 122 bp, Homo sapiens
cagggcttgcgcttccagagcttcggaggcctcagcctgccccgcctccacgcgagcgtgcgtgaaatgctccaggaagaagctaatggtgggcgcacccagggtgaagtgcagcttgtgca

SEQ ID NO: 328747 - DNA, 122 bp, Homo sapiens
atatatagcagtatgtagcttttaagatgaagtctcttgtctgtcttgcttgcttgctttcgtgtaatcacaattccatcatcacacctaaaacgcttgatgacaatgccttagcatcacgg

SEQ ID NO: 328748 - DNA, 122 bp, Homo sapiens
aaggaacaacaggagacagacagcaggtggcggggtgtgccacaggtattgtgcttcttacgcttaagttttctgatgaagtctcattcataggatgaagccgctgtatttgaattctgggg

SEQ ID NO: 328749 - DNA, 122 bp, Homo sapiens
tcctccgctggagtcacccgggcctgaggctgcaggagaggcccaggacaggtctggctccgccccttccaagaggaacctggacccggccatttgatgcccagctcaggtgacagaagagt

SEQ ID NO: 328750 - DNA, 122 bp, Homo sapiens
gtgacccacggaacttagcccctctgttctgtttgcatacctgcaaattgtgggcattcacgccgggactgccaactcaccaggttatttatagtgacaagagagtgagacagtgggcttga

SEQ ID NO: 328751 - DNA, 122 bp, Homo sapiens
tgctatcaactaaacctacaaatagtgtttgcctaagatctgcaaatcttccttggctcccggtccaaggcagaggtattgttactctaattcaggccagttgcatcctttccactttgaag

SEQ ID NO: 328752 - DNA, 122 bp, Homo sapiens
gtccctactccttcatttcatgttttaccctgggtgatttcatgcccacatgcatgcttgcgcaccctactcaaaagagttgatgatcacatgcaggttttctctccttctggccttcttgg

SEQ ID NO: 328753 - DNA, 122 bp, Homo sapiens
gtggtgctgtcgatgcttccgatccttgggccggccccgctcctggtcccgctccttcgacggcaggtccccggattgggtggtcatgctcaggtctgtccccaagcctgggccgggtgagg

SEQ ID NO: 328754 - DNA, 122 bp, Homo sapiens
ctgccaaacccgccagccctgggttccgaagccgcccctggctctccattccctcgcgggcgcgccccgggcccccagtggcggccagctcccaccggtcgctcctgcactgccctgccctg

SEQ ID NO: 328755 - DNA, 122 bp, Homo sapiens
gtcctttcacagcgcaagtgcggaactgcgtttgtttccggcgtgggtccgggcaagaaccgcttgtagtttggtttaaattctgcacgggaggaccttctgagtttacctgttgggctcct

SEQ ID NO: 328756 - DNA, 122 bp, Homo sapiens
cagcggcctaagtgggtaaggacagttgggctgtacgatctatcggaacctccttcccaccgtccctcccttcctttgccttccctcgcctctccccaccgcgacgcagagggagcaacaca

SEQ ID NO: 328757 - DNA, 122 bp, Homo sapiens
aactgatgtcattacttaactgtccccgcggggacggggaactgaatgtattttcacaaacgtcagttcaagacagatttgtgggagaaaccacctggggataaacctctccccaccaagaa

SEQ ID NO: 328758 - DNA, 122 bp, Homo sapiens
aaagggcaggaaggctctgcgtctccacactgcagccagaaagccaacattcagtgctagcgctcagagaacccgggacacagagatgccgtggaaagtgaaagaaagagtagtagaaagat

SEQ ID NO: 328759 - DNA, 122 bp, Homo sapiens
cccagctccttcacactgaagatctcgccaagcaatttaacatatggaacatgtgaagaacgcatcaaattcccgcagccgctaagtacaagttatgactactctggctttctcatagtaaa

SEQ ID NO: 328760 - DNA, 122 bp, Homo sapiens
gccaatacagcagccacttgccaaatatgactactgagctcttagaaaatgaccactggccgggcttggctgctcacgcctgtaatcccagcactttgggaggacaaggtgggcagatcatg

SEQ ID NO: 328761 - DNA, 122 bp, Homo sapiens
cgctgagacttggccagacgacgggagccacacgccacgcgcgccaccatcttcgcgaggcgccccgccctgccaaacaggtcgccgggaaggcgagttccaggccatccgattcaggccca

SEQ ID NO: 328762 - DNA, 122 bp, Homo sapiens
taaaataatatctgattgtgttacttccttgctgaaaacccttcagtgggtttcagggcccggggcccccagaacaagattctgagtcctgcaagcttgcaagtcctccatgctctgcctcc

SEQ ID NO: 328763 - DNA, 122 bp, Homo sapiens
cggggcctgcccttccacaccagtccgcattgcctctccctgcagcgagcggggaaaggacgcagtgctgctgagtgtcttcatttttgttcgtttttgtcgtcattcctcaaagaggaaaa

SEQ ID NO: 328764 - DNA, 122 bp, Homo sapiens
cattaataacagcgtctaacatagcaaggcttcagccggggcctggcaaatttaagggttcgagaggtaatagtggttaccattttattgctattatttaaggaccaccaggacatggattt

SEQ ID NO: 328765 - DNA, 122 bp, Homo sapiens
cttctcttctccttcagtccactctggcacataagtttaacttaaatctgtatgttaactcgtagtgacagtctacactttcactcctgttaacaatctacacccccatgcgtaccatcttc

SEQ ID NO: 328766 - DNA, 122 bp, Homo sapiens
tagctcatgcttacaatcccagcaatttgggaggccaagacaggaggatcacttgagccccgaagtttgtgaccagctttgacaacagagggagaccccatgtccacaaaaaaaaaaaatac

SEQ ID NO: 328767 - DNA, 122 bp, Homo sapiens
agcagccaggcttgggtgaaatcactttctttcagcctcagcttcctcaccagttaaatgcggatgacaaagatttgtcccacgatttttgtaaagaacaaaaagatatgttcgcagaaaaa

SEQ ID NO: 328768 - DNA, 122 bp, Homo sapiens
atactatttcttggtactataaatggtactatttcttgttttatcgagtctagaagtaggcgtgtaacaaatgagtaaacgttcccaaaatatttgggagaggacatgagacatggaaagaa

SEQ ID NO: 328769 - DNA, 122 bp, Homo sapiens
tctacgtacaatatgcagaattaagcgagataacgtggtgccagcataaaccggcgaggacgtgaaattcgtcataaaatccaacaggagggcagtgaagcccttttttctcatgtctggga

SEQ ID NO: 328770 - DNA, 122 bp, Homo sapiens
tctcaccactgcactccaattctgagactggggagtattgatttgccactgacctgagcccggctgataggggcagcaggacagacactgttaccttaatcaaagacattcacgaagcattc

SEQ ID NO: 328771 - DNA, 122 bp, Homo sapiens
ccccgaggcgggggagggtgacggcttcgcactgcgcctgggaggtggggaccgaggctccggctggtagagacgcgcagctggagggagtggcggcggcgaacccggtggtccgggggaat

SEQ ID NO: 328772 - DNA, 122 bp, Homo sapiens
taggccactaattcagttccaggtggactgcacgcgtcccatcagagttagtttactcaccgctggtctttgtccctgcagcacccagggcttcgggaagggagaagcagacttcctagtgc

SEQ ID NO: 328773 - DNA, 122 bp, Homo sapiens
aggactcccagggaattcaagtgcttagggagaggaggtaaacacagcctcctggacagccgtgagaccacagcagaagtcacatatggatgggtcatttcctggcagaaggtacaaagcaa

SEQ ID NO: 328774 - DNA, 122 bp, Homo sapiens
taacactatagtttctttgtttaggtagcttttcctttttaagctcacattccttgtaatcggattatgaaattagaaagctaaaatcaaagagccaagacattaatacttatgacaacctt

SEQ ID NO: 328775 - DNA, 122 bp, Homo sapiens
ccttagggttttagtcaatgcagaattctgcacagaaaatcaatggcttcttgatttccacgggttcacaaggtcctccctgccataacgcctcttcccactcaagatttctgaagggcctg

SEQ ID NO: 328776 - DNA, 122 bp, Homo sapiens
acagcaagaccccgtgtcttaaaaaaaaaaaggtaaataagagttggggacacttttctgcgagttggagaaaccaaaccccctcgacgagtcttaagtagtattctcaggttgtctggcct

SEQ ID NO: 328777 - DNA, 122 bp, Homo sapiens
cccccaccccgcagcgcccacgcacctgcctagaggatccagctagctccggacgctccccgattccgcgctccttgctcgcggtacttccgtaatctaggctctccctgcccccggggctg

SEQ ID NO: 328778 - DNA, 122 bp, Homo sapiens
gcatgaaaaacatggggtcactgggaagttgtgtgcaggaggctgtaaggcatcgactgtcgtcttacgtttcttcccagtcgagtcttcctcaagagtaagaactcccggacttaccatag

SEQ ID NO: 328779 - DNA, 122 bp, Homo sapiens
agtatcatactcagtcagatcccctcgacctggtgaacatgtcttcgactgctccacagccggcattagaaacaactcaggtggccgctgatggtcatggtggacacagggctgccatgccc

SEQ ID NO: 328780 - DNA, 122 bp, Homo sapiens
ggctggagggaggggcagcgccgagggggcgggacggggagggctcgcggagtaggccaacggttggccccaaccgccactgactacagcctgcgcccgcctcttttcgttgccgttacctg

SEQ ID NO: 328781 - DNA, 122 bp, Homo sapiens
agcctccttcttcgaccccgggtgttgtgccgatgtaacccctcaaatccccgtctttgccgggccagggagaatattaaaccctggaaagctcgtcccacctcacctcctttcccattaca

SEQ ID NO: 328782 - DNA, 122 bp, Homo sapiens
agacattgacatgaagagttgaagaaaaggttaacatattttctttatgatttttgagtacggatgttccaatgatcctggaattctcattgtttcaaataaaatgatgaggtcattgtaaa

SEQ ID NO: 328783 - DNA, 122 bp, Homo sapiens
actcaaaagtttctgagctgacgtcaagtgtcaaagcctttctcataaagaggtttctgccgtgggtgggcggaaaacatagaaaagtaattatatgtatatttttgctcaatctggtcccc

SEQ ID NO: 328784 - DNA, 122 bp, Homo sapiens
cacctgcccgacggcagcgcaacccccaggagacgttctccgacggcttcccggcgcacccgggtaccatctagtggcagcagaagcaggaggcaggctattttttacagaatgacctccac

SEQ ID NO: 328785 - DNA, 122 bp, Homo sapiens
tttgccttcattacacaaatgctgctgctctgaaaggagcttcactctggggcttgacggcgctggggacacgggagaaggagccacagcttcactctggggcttgacggcgctggggacac

SEQ ID NO: 328786 - DNA, 122 bp, Homo sapiens
ctaggcctcacctatcagcgcttccttcctgggcagggctgaggattcactcactgcccacggccggctgagcagggacaggagaatgagaggcctccgctggcgttacactcggctggtaa

SEQ ID NO: 328787 - DNA, 122 bp, Homo sapiens
tgatcagtttccctgaatcctccacagcacttagtggtgtccacatgtttttacttcagccgttctgacaggtgtgtcgtgatgcctcacggtggtttttcatttgcatttcccagtggtgg

SEQ ID NO: 328788 - DNA, 122 bp, Homo sapiens
caatatccaactcttaataaattcatggctcccggtgagcattcatcaattctcattccacgcctttagcccttcccgttcccgcccaactctcgctccctcccctggccaaatctctaacc

SEQ ID NO: 328789 - DNA, 122 bp, Homo sapiens
ggtggcagcatccggtgccagggcggagccgtctgcccctttcgcccctggttccccccacggcagcccctgatgtgtctctgctccaccaggtgaccatggccgaccgggcggcagctgag

SEQ ID NO: 328790 - DNA, 122 bp, Homo sapiens
atgagttgaggaacgcagcactctgggatcatggttccagctccgggcagagggttacatcgtgtcaagtgtgtgaaggcagaatagcctgcagagaccactgtggcgttgaaaagaggtgt

SEQ ID NO: 328791 - DNA, 122 bp, Homo sapiens
aacaggcatatttctccatggcctttggtcttgcagatacctgatctgatgtgagatggacggctcagcacctctagaccctacactaaagttcataaatcaaagaggccccaaagcctggc

SEQ ID NO: 328792 - DNA, 122 bp, Homo sapiens
tcctgcacgtgctggtccacgtacagctgtgcctccgtggccttcaggaaggccatgaagcgtgctgtgaaggaggccacgaagatggacagcatcccgaaatctagcaggttccacaagtg

SEQ ID NO: 328793 - DNA, 122 bp, Homo sapiens
ctgtcttctcaccagctcctcttcctgaaagacacgtcagccggaagcaagacacgggcacgctaggaaatgtagtttactttttccgagcggcggcgaagtaagccaatgggaagctccac

SEQ ID NO: 328794 - DNA, 122 bp, Homo sapiens
gacaaaacaagcttacctcgaacagatgagcaaaggtcttgagatcaggtacaatccattcggcattgtaggaaaaaatagaagatagagctggaaaggagagctaatgttaactccatgag

SEQ ID NO: 328795 - DNA, 122 bp, Homo sapiens
cctccttgcccttcccccaccctcgtccccgtttctacaccctctcctcccttcccctagcggtggtcgcaatgatcaggtcatactcctggccgcttcttcccatgctccccgcctcgaat

SEQ ID NO: 328796 - DNA, 122 bp, Homo sapiens
agagatccttaccaccagttggggagccagaacattcaaatgtaacctcaggaacatatccgtgagtgcaaaataacagagtaatgtatgaaattaaatgcttaagtggtgaggggctacat

SEQ ID NO: 328797 - DNA, 122 bp, Homo sapiens
aatccaaaggtaggtctctagtgagggacagtagggctctagtcattccatcgatgtgatcgctgggcaaagggagggtggaggaccttgggctgacctcagggatggtgccagagagaacg

SEQ ID NO: 328798 - DNA, 122 bp, Homo sapiens
cggaaatggccgacgaccgccctcggcagggctgtgggagggggcgtggccggctcagcacgcggagcagcttcgggtatttccggaaactgccgaaagcccccttgaagtgggcggggaaa

SEQ ID NO: 328799 - DNA, 122 bp, Homo sapiens
cacgttgcaggacaagcaaatctagcctgagtcctgtggattccagggctgctcaggagacgcctccatcctggcgtggatgacctcaggatcagccccgtctgccccactcagcccgcagc

SEQ ID NO: 328800 - DNA, 122 bp, Homo sapiens
tcgtcacctggctccatgctgaacttcctcttgctggggctgattgggggagggccggtgcggtgactgctgagggcagaggccaccggcagggtctgtattctgggttctcccctgagagc

SEQ ID NO: 328801 - DNA, 122 bp, Homo sapiens
cccttctccccaactccctgtcctgggccgccccggaggttcgcgtggctgggccgaagccgctttctaggtgaccgtgtaggtcacgtccttcacaatccggcccaacctgcatgacatct

SEQ ID NO: 328802 - DNA, 122 bp, Homo sapiens
cggacgtctgtggtgcagctgcggcagaagacgtggccacagtcaatggtcacagggtcccgcaggtaatcaagacagatggagcaggtcacctcctcttccaggctccgtagtggggctga

SEQ ID NO: 328803 - DNA, 122 bp, Homo sapiens
cgtcacagaggccaagaggaagagggggagatgccagttcatggttccttccaccaaggacgacctggaaaagtaagttaaaaaatatttaaattatacttaaatgggtactttactacttt

SEQ ID NO: 328804 - DNA, 122 bp, Homo sapiens
aaataagaaagctaagtgtgaaaatattaccagtttactccctggaaactgtttccaggccgtgaagcagagaatggcaacccgcaacatggcccaccagtctggtagcatttggaagccag

SEQ ID NO: 328805 - DNA, 122 bp, Homo sapiens
ttcattcacgcgttcgttctttcagctcacgcgttcgttctttcagctcagcctgcattgcgcgcgttccctgctggctctgcagtgaacgactgaggtggggctcatcgtcttgctccttc

SEQ ID NO: 328806 - DNA, 122 bp, Homo sapiens
gagcaggacctcgtgttgctgttgccggagagcaggcgtcagggcctgggggtgctggcccggcccctccccaggggcctcgcggacacaggctgggctgggttggggacatgcggtcacct

SEQ ID NO: 328807 - DNA, 122 bp, Homo sapiens
gtggcgcgggccaccgggtgcactcaccgcacgagaggccgcggctggactgggaccgagcgcatccctgtgtctcagggggtttgctttgtgcaggatgggaccttattatttttagacag

SEQ ID NO: 328808 - DNA, 122 bp, Homo sapiens
aaccttcctttctgaatagactattgattcaactaaactgctttttaaaaattcaatatgcgcatctggggagtctgctacctctgtgctttacaggaaggttgtgaggattaatacattta

SEQ ID NO: 328809 - DNA, 122 bp, Homo sapiens
ctaatatgtaggctcactagaacattttctctttcaaactgcccagacggttggacaggacgtagacacacagaagaaaagaagacaaagaacgggtaggaaaattaaaaaggtaggaggct

SEQ ID NO: 328810 - DNA, 122 bp, Homo sapiens
tcaggcaccgcccactccgggctctgggccctcctctccctcgcggctccgccccctgcccgcctctgactgtaccccgcccccaggcgccagccccgcctatctgggcttctggtcccgcc

SEQ ID NO: 328811 - DNA, 122 bp, Homo sapiens
aaaaggtcactgtctacccaacacatgagaaactgtttctcgtgcctcacgtccccactccgtccccacccatgttgtctgagtccctcggtgtcagaaacactgctaagaaatttaagaaa

SEQ ID NO: 328812 - DNA, 122 bp, Homo sapiens
atctaaatttcagatgcgtgcgttacagaaggctaccaggcgcgccagcagtgtctgtgccgtttggattccgcctgccaacccctctccacccggggcggcgcgtggagtccggacgttct

SEQ ID NO: 328813 - DNA, 122 bp, Homo sapiens
gatgtcgcgtgtcccctcccttgtactgagtcatatgaaaaatcacgcctgtagcaaaggcggacgttcccacacatgtgagaggcttccaaggcctggctgttcgtttccggactcactgc

SEQ ID NO: 328814 - DNA, 122 bp, Homo sapiens
gccacaggtgaccttcctgtttcctgagctgcagccttgtttttattctcagatggggagcgcccctggtctgagtgtgtgccccgaactgcaattccttcctctcaaataaaacacacgaa

SEQ ID NO: 328815 - DNA, 122 bp, Homo sapiens
tggccgtgccaccccccccacctgtctcgttgagctcataggtctgaatgagctgctgggcgcgggccagtgtggcgccctcctcgccctggtcctccaggaactccagcagctcaggggca

SEQ ID NO: 328816 - DNA, 122 bp, Homo sapiens
ccaacacgtttttaacatttgcatcgactaatctgtgaacagtcgttggggtgataatttcgtctgagagattaaccattcaagtctcaaagttcccaaggattgtgaaatcctgcttgtaa

SEQ ID NO: 328817 - DNA, 122 bp, Homo sapiens
cttccctaaccacagggctaagcaacctaatggatcgaacatatgtgtgctttggtcatccgcaacccagaccactagactaattttgctttagaactggactatatcaagtgtgaacgatc

SEQ ID NO: 328818 - DNA, 122 bp, Homo sapiens
aatgcccaggtgtcactaggcaaatcttcagagagtaccaaagagtatgtatcaggaccgcgaacccccacaccctccgcaaatcaatcagctacagctgtcagcacagaggacttccttat

SEQ ID NO: 328819 - DNA, 122 bp, Homo sapiens
tctgtttccccatgacccggaggacgcgcctacggaagagacgtctggtcgagggggtgccggggagcggaagggggaggggaaggtctcatccctgggacgctgacacccccctccccgcg

SEQ ID NO: 328820 - DNA, 122 bp, Homo sapiens
tactgtgatttttagcaaaactaaaaatattccagtgaaagagactaatctcaagaagctcggccctttgaaagtttgcctgcctgcctttaggcaactaagggactcttggccacaggaat

SEQ ID NO: 328821 - DNA, 122 bp, Homo sapiens
cggtggccagtgtggagtacggctccctccaaagcaggctcttcctgcaggtattttatccgggaggtggactcaggaagcacaggtaagggagtagggaagtacacgtgttggggagcagg

SEQ ID NO: 328822 - DNA, 122 bp, Homo sapiens
gagcactgctctgtctgactcaaccttgctgtttaaaaaaaaaaaaattatgtaaatgaacgcgccccacgctatctgaataaacagctgtgtgagaataacttctctgagacgtggtcaac

SEQ ID NO: 328823 - DNA, 122 bp, Homo sapiens
aacatacccgccaattcagggttagtattggactcctctactaaagccgcatttgtgtcccgttatactggatgtatatcacacaggagatcacactccaggctgaagatcttccaggactt

SEQ ID NO: 328824 - DNA, 122 bp, Homo sapiens
ccccttttcggggcacctgcggctcctgttggctaaccctgaacttccttcctctgtgaccgcccttgccgctctcagcttctgttcctcaaccacggccgccgcgtggatgccgctgcatt

SEQ ID NO: 328825 - DNA, 122 bp, Homo sapiens
ccaaagttgcctgttggtaaattgcgtcttttttctttttcttcaacatctttatagtaccgcgagtgtacccagtgttattaaattatgccaaaacaaagagcaaagtccctgcccttagg

SEQ ID NO: 328826 - DNA, 122 bp, Homo sapiens
cgcagtgccttctggaaaatgtagtccgggggcactacctgcagactcggggtgggaggtcgccgagcttctgccggttttgctgtcacgggtcggtcggcaagttatgaggaaaaagatca

SEQ ID NO: 328827 - DNA, 122 bp, Homo sapiens
gaactcctagcctcatgggatcctccccggctcgatctcccaaagtattgggattacaggcgtgagccacggcgccatgatccccaaatttccaagattctcagattccatactgacattct

SEQ ID NO: 328828 - DNA, 122 bp, Homo sapiens
gaggaagataacagagatgaattgccagtctcatcacatcatatcaaggatacaaactaacgacatgataaaactgatgacgcttaccttgatcaggtggttgaggtctttgtggagtttcg

SEQ ID NO: 328829 - DNA, 122 bp, Homo sapiens
cctacacattgtgacgtgtttctttctttccaatctgcatgccttctgtttctttttattcgcttattgtgctagctaggacctccaatgtcatgttaatttggagcggcttgattagcgtc

SEQ ID NO: 328830 - DNA, 122 bp, Homo sapiens
cccagagccctcagcgccccggaagggtacggggcagcctccaggaaagctgtcaggagacgcttcctcccgaggtggtcccggcggccaagtggggctcggttgacgggcaggcttgccct

SEQ ID NO: 328831 - DNA, 122 bp, Homo sapiens
cgggccctcgcccgggcgcccgccttcccctcgccttcgggatcacctgtggccgccggtcgcttttctgcacgcagcgccccgcggaacgcgcctctgaccactttctgcccccactcggt

SEQ ID NO: 328832 - DNA, 122 bp, Homo sapiens
ttcaggccccgagggcggtgcctgggatgggccggctcagctttggggtttcccgagctccgctctctctcttccacctttcccaacctgtgtcaggtccttttacctggatactcatgatg

SEQ ID NO: 328833 - DNA, 122 bp, Homo sapiens
agctatgaacgcttccgccttgagcacagccacaggcctgctctggtcacaatgtggggtcgccccgcggacactggtgaccagtgggagcatgaccaggaggtgattaccttctgatcacc

SEQ ID NO: 328834 - DNA, 122 bp, Homo sapiens
acatgcactttaaggacaggccgctgagatggagctgggcctttcctgcaagtaagtgaacgtgatggtagggtatacctgacagcatagtttgacaggggatatagactttcaaggagaaa

SEQ ID NO: 328835 - DNA, 122 bp, Homo sapiens
accagaaggcaaatcagcagccttggcgagggttcggggacccaaggagggcgacactctcgggctggagttggccccaggcctttgctggcgccctctaacccgctgcatgctcgactctc

SEQ ID NO: 328836 - DNA, 122 bp, Homo sapiens
ccagcgaggcagggttactcaccatggtggcggatggcggtggattctcccaggtagaaccgaaagaagcgagtcgcgccgaggatggcggcgacgacggcggaagagaacgctgacgtcaa

SEQ ID NO: 328837 - DNA, 122 bp, Homo sapiens
gctgtggagatgctacagctagaagaggctgtgggagaggctgggctggtaccccagctgcgtgtgctagaggaatactctgtcccctgtgcacatgctgcccatgtgacaggcctcaagat

SEQ ID NO: 328838 - DNA, 122 bp, Homo sapiens
tatcaaaggcggagatgcggacacggggcagccacagggaacaccgcgtgaagacggagacggcacccacaagccgaggagagagatctgggacagattcttctccgagggcctcagaagaa

SEQ ID NO: 328839 - DNA, 122 bp, Homo sapiens
gggccgagtccgggtaggagccgggtagcactggcttgaagccgtccatgaggtgctgcccggcggggctgagcaggtgcgaggaggcgccgctgctgaaggccgagtgactcaggcccgag

SEQ ID NO: 328840 - DNA, 122 bp, Homo sapiens
ggcctactgagcccaggatggaaggtcttaggcacacagttctcggagctgggacggagacgggaatgggccgtgctggccggtcaggctggggagaagcaggaggagcctggggaggtgtg

SEQ ID NO: 328841 - DNA, 122 bp, Homo sapiens
tagacataaaacacctggcccggctccggcgcacagatgctgaagtcagttttctgaggtcgtggtgggggcgggggtgagggtggcaatggaaatagtgacaacagtagttggcgttgtca

SEQ ID NO: 328842 - DNA, 122 bp, Homo sapiens
tgaactcctgacctcaggtgattcacccgcctcagtctcccaaagtgctggggttacaggcgggagccaccgcgcccggcccatccctcattattttttgcgactcagagccatcctattac

SEQ ID NO: 328843 - DNA, 122 bp, Homo sapiens
aagaggcaaaagggcgacactcgatactgctggagcgccaagctagtgtcagggcgcctgcggcaagcgagtgcagcgggcacttcattcagctttgggcacgcttagccctggcttgaaac

SEQ ID NO: 328844 - DNA, 122 bp, Homo sapiens
cggacttcaaatatgtgatgacttctttgaccattctcattcttttctttcccaaataagcgctttcagatatggctcatggtagaatttatcctcttcatgtttggtccgctgctgttaag

SEQ ID NO: 328845 - DNA, 122 bp, Homo sapiens
tcccagaactggagcaacaatggccggctctgtgtggccgcgtcctggggccaaagcagtcgggacgtgtcacgccgagggagggctccgaatgaatacgctgacaataagaaggaagggag

SEQ ID NO: 328846 - DNA, 122 bp, Homo sapiens
ctgccctgccatctcagatggccatgctgtctcatttcagcctgtgtgccagcaccctgacggtgtcctcggggagcagccgcgggtccctagcctccagccgtgggtctctggcctccagc

SEQ ID NO: 328847 - DNA, 122 bp, Homo sapiens
ttcatcagattctcagaaaggtttgaagtctcaagggataaaagctgtccacagtttatccgagcaagggcctcacattcccaggcgtgctgctgccactgttgcatgagccagcacaattt

SEQ ID NO: 328848 - DNA, 122 bp, Homo sapiens
aggtcgggcgccggttgcaccgcccaccgcgcgcctccccttcgtccccaggccctggtccggggctcttgctgccactcccaacccactgagccctgcctcctgggatcccaccccgggcg

SEQ ID NO: 328849 - DNA, 122 bp, Homo sapiens
tgcccaggaggcaccgatccccgcagccggcctcctcccgcgcgggctccactcccatttcggcctcgcccccacaccccatagtctttcatccgtgagtcctgcaggcaggacgggttgga

SEQ ID NO: 328850 - DNA, 122 bp, Homo sapiens
ctgccctcctctgcggtccgttggcggggtcattgatctgggcgggcccttagacacttccggggagtatcacagtgtggtaagagcttggacacctagggtgggaccctggctcggtcacc

SEQ ID NO: 328851 - DNA, 122 bp, Homo sapiens
ggagttgctgcaaaagtgaccaccccctgcagccgtaaccttcaatactgtgcctagtctcgagctcagtcaaacctggatgccttttctgcaggcctctgtgtgatatgtttgatatatta

SEQ ID NO: 328852 - DNA, 122 bp, Homo sapiens
ggaaggaggcagccgctgctggcagctgggcggggagctggtggtggagctggctgggaccgaggagacggttcttcctttccatctgacatttgatcccctccctgaggcctatgttattt

SEQ ID NO: 328853 - DNA, 122 bp, Homo sapiens
agaggctgagagcctggcagcgccccgcccggaggaggcacgtcgaccttcatccagccccgcctccgcggcccccgggaggtggggagacctttgtagtcctcaccatcctcccctaaccc

SEQ ID NO: 328854 - DNA, 122 bp, Homo sapiens
acgtccggaggctggcggggcttacagggtaggagctgggggtagagtgcgcctcggcctcgggccctcccggctccggcccctcggcatcctccggccgccctggcgccagctgccgactc

SEQ ID NO: 328855 - DNA, 122 bp, Homo sapiens
caatttcaagggtggatggtgcgagcgccgctggggcagctggcgttctggttcttactccgtgggaaaatggccctgagcccgactggcttgaggcttagacaggtgaccccgcgaagcgg

SEQ ID NO: 328856 - DNA, 122 bp, Homo sapiens
aaagagacatttcctggttcatactggagagaagccgtttcggtgcacttttgaagggtgcggaaagcgcttctctctggactttaatttgcgtacgcacgtgcgcatccacacgggggaga

SEQ ID NO: 328857 - DNA, 122 bp, Homo sapiens
gttctcctccctcttcaaggctccctaacaggttagcagcctctgatccctgccggtacacgccctaatcctcccaggcccactcttcccatcccccagccgggtccccccaccctcctcac

SEQ ID NO: 328858 - DNA, 122 bp, Homo sapiens
ctcttagggaggagtgactcaggtcctgcagccaggacctgcttggctgtgcagctcagccgctgctgaccaaggggaggcaatttagcattttacacttcgggtgcgttgcttaaaataag

SEQ ID NO: 328859 - DNA, 122 bp, Homo sapiens
gcgaatcttgaacccgggtgagtaccgcgtgacagcccacgcggagggctacaccccgagcgccaagacctgcaatgttgactatgacatcggggccactcagtgcaacttcatcctggctc

SEQ ID NO: 328860 - DNA, 122 bp, Homo sapiens
ttctgccccttgacaggctggctggcttccatctcaggtcaaacagctgtgtgcttggcacgctcaagacaaagttgagcaagatgccaagggagccacacgcattatcctgggcctggtga

SEQ ID NO: 328861 - DNA, 122 bp, Homo sapiens
tttttttttttttttttgaaaggagcaaacatccccagctttaatgcggcccaattatctcgtttgcacgacttaaaatgtttctctttaactcatttcaatctagtaaatatgcttcagca

SEQ ID NO: 328862 - DNA, 122 bp, Homo sapiens
accgtgactgttggaatatttcagccttagcctttgaatactgacggagtgccaggctttcgtctgtcaagatgcccctctgtgacctcagctggttaatgtctcaagcgcttctttaggag

SEQ ID NO: 328863 - DNA, 122 bp, Homo sapiens
gcagggccttgctgcattgttatctgctgttccgacttggtttgtcttgtccaagggtgacgaaagagccaggcaccagggtctcatgggatgaggtacagggtgggagatgggggaggggc

SEQ ID NO: 328864 - DNA, 122 bp, Homo sapiens
atccggtgcctctgcagacagcaggcactaggacagatgggctggagctggcatatcgtgcggataaactgtttatcactccattgacgccgctccatctccccgcagctgaccccacgctc

SEQ ID NO: 328865 - DNA, 122 bp, Homo sapiens
ggagggacaggatcaaccgctgcttgaacgagctgggcaagacagtgcccatggccttggcgaagcaggtaacgttggcgacccggagccgggtgccaggcgttgggaggcctctgcggcca

SEQ ID NO: 328866 - DNA, 122 bp, Homo sapiens
gcggtcagcttggcacaagacaagcaggggccattcaaaagatcagggcattatttgagacgagtcagtcaaaattggactccagttagcagggcaagcccaagaatggaaagaaagtggca

SEQ ID NO: 328867 - DNA, 122 bp, Homo sapiens
tctcaaaaaataaaataaaattccaagagaaaaacagtatacaatttcaacccaagaatccgaaaatctagatttgatctgaaaatctaggtcagcagtactcagtggcaccgttcctcccc

SEQ ID NO: 328868 - DNA, 122 bp, Homo sapiens
gttagatttaactggggatgtactaggtgtaaagtctgagaggaaagatgacaaatgcagcgactgttagcatctgtggtgcgttcatatgaacctgaggaggtaagaatgcaagaggggaa

SEQ ID NO: 328869 - DNA, 122 bp, Homo sapiens
tgtgggggtgagttgtgttctgggagcaaagagcaataacatcccgcttctccctgcaagcgcacaggagaggtctgccttcccaagggacagctggggcaggtggccacatcccggatggt

SEQ ID NO: 328870 - DNA, 122 bp, Homo sapiens
tcttggctcccctggttaagtcagggacccagtagccgaccacaaacaatcccagctgcacggtgccttcatggtctgtggcgccccctggtgttgacactgggcctgtggccaaatgaggc

SEQ ID NO: 328871 - DNA, 122 bp, Homo sapiens
tgaagtagactcctttgagaagtcttgctgtgaagaacagagaattgaatgatcattgaacggaggaaatgtaatcaaggaaggacttaagtattcccccagagttttctgaatttgcaatt

SEQ ID NO: 328872 - DNA, 122 bp, Homo sapiens
atgtacaaaagagcaaaactgcccctctcggcgggacggccgcatgttacagaaaggcttcgtctctgctgctgatgccaccacgagccctgcccagcgctcaccaggagggcgggctgcgg

SEQ ID NO: 328873 - DNA, 122 bp, Homo sapiens
ccagtctttaaagagctaagagagttctcgttctgtctgctgcacgggccaggagagtcacgtgaggcgaggtgagaacacgttgtgtaaatgatgaagtgtttgctctgcacacgtgaggt

SEQ ID NO: 328874 - DNA, 122 bp, Homo sapiens
tcaaccgccgcgccagtgcccgcctcctcttccttaacgcctagggctgcgcccaccagccggcaacgtccaggaaagggccacaggagaaatgacacccgtgcaatgcggagtgtcccggc

SEQ ID NO: 328875 - DNA, 122 bp, Homo sapiens
cccggccttcacatttcttgttcagatttgcagctcttcacttagtgcatgtttggtgtacgcaaactgagggtggtgactcgatattttgcacagtacctacttactgctcctgtaataaa

SEQ ID NO: 328876 - DNA, 122 bp, Homo sapiens
tcttattatattccagcctgaagcaagaatttaagttattaacagtaatggaattaataacgtgtgtgtgatcaactaagcaagtctttgctctgtttaagtagttttccagatgtcatcaa

SEQ ID NO: 328877 - DNA, 122 bp, Homo sapiens
gcaacaaatcagactgatggccggttgagtcttcatttgcatagaagtgtaactttgtaacgtcgtaacttcaccctagcctttgattggttgctttttgcaaccaatcagatgtttgcaca

SEQ ID NO: 328878 - DNA, 122 bp, Homo sapiens
gtcccccgtgggagccagctatcccctcttcagccaagaacaaagcactgagcatcaccacgcactagacgctggggtgtaagggatgcagaccgtgcctccccatccgcgggggcatcgtg

SEQ ID NO: 328879 - DNA, 122 bp, Homo sapiens
atctgtcatcaactgggttccctgacacccagagctgctctgaaatggccagcggcttcacgcataacaaagaccttgccccttggcattgtttattccttgacctgtgcagagagtccttc

SEQ ID NO: 328880 - DNA, 122 bp, Homo sapiens
tgctttattctcacgtggaatttcttttaaaattggacatttcattgcccactcaccttccgaacaagctattcctacggaatgagtcacagcgacatgcctagtgggaggtggggtcactg

SEQ ID NO: 328881 - DNA, 122 bp, Homo sapiens
tggcccccccatgccgcctgctgtgagcagcattcatctaaccaagtgcccgcttacctacgctttctctgcaggagggatttctagtgatatttctgccatctgaagctcacatgtgccag

SEQ ID NO: 328882 - DNA, 122 bp, Homo sapiens
aactgcgtgaaaatcattgctaaagctgattcaatagctaatgtcaacaatgttgacatacgctgttaactagtatgagaagctgatgcataaaaatgagtttacaagtttactttggcaat

SEQ ID NO: 328883 - DNA, 122 bp, Homo sapiens
tattattcccagctccccattctcattatacactttcctctgagcgtacctgacaatggtcgactttcattgctgagagggggtggcgggaggaggaagcgaatggggtgatgtgatgtaag

SEQ ID NO: 328884 - DNA, 122 bp, Homo sapiens
tgtttgaggtgatgagttgatgccgttgattcttctttcagattgccattccagagaggccgtagtatcttgatttgattcttggattgtaatctctgctttgctatctaccagctctgaga

SEQ ID NO: 328885 - DNA, 122 bp, Homo sapiens
ccccgtcaggctgttcgagatgaacttgggtcccccaaagaccctggaggagctggaccccgagagccgggagtactggcggcggctgcggaaacagaacatctggcgccacaaccggctga

SEQ ID NO: 328886 - DNA, 122 bp, Homo sapiens
tggtttctgctgccactactcaagcttgccattgtagtgtcaaagtagccgtagacaatacgtaaatgaatgtgactgtgtcccaataaaactttatttacaaaaggaagcagtgggctgga

SEQ ID NO: 328887 - DNA, 122 bp, Homo sapiens
aaaggactcatcaaaagaaagagggggtggggcgttggcttatccttaggaggccagaagcgaggttcatcagaggctgcagaagtaatgacagacccgagacaggccgagctcacttcagt

SEQ ID NO: 328888 - DNA, 122 bp, Homo sapiens
caccgacggcagaagcagggctgaaagggcacctggatggccaggtgggcaggcggctgtcgggatgggggaccccggaaccccactggccttgggcagccatcttgggggtttcaggagat

SEQ ID NO: 328889 - DNA, 122 bp, Homo sapiens
gctcacctgtatctcacatgcagcctgcaggtggaagatcttgtaaaatgcctcctctaccgtgtcacccagagcaaccactccatggtttcttagcaccaggatctgtagagaaataaata

SEQ ID NO: 328890 - DNA, 122 bp, Homo sapiens
ctagtagcatcttcaaaagctgactttggagaacagaatcagaaagtgaacggataaatgcgaggcacgcttttacatctggacttaacggtatcctgagcaagatgactaagatgtttatg

SEQ ID NO: 328891 - DNA, 122 bp, Homo sapiens
atagtccttctagaggtaacttggatagcctaggcaggcaacttatcatgtggtgaaggccgcctcaggggttgttaaaaatgcacagaaacaattgagtgcgattattggcttctgagcgc

SEQ ID NO: 328892 - DNA, 122 bp, Homo sapiens
ctcgaagaccgggctgtggtcgttggtgtctttgaccaagacagtgatgtaggtggtggccgagcgcggcggcgtactgtagtccacggctttcaccctgaggacgtgcgtctccttggtct

SEQ ID NO: 328893 - DNA, 122 bp, Homo sapiens
atcgggtcactcccacccgaatactgcgcttttccgacgggcttaaaaaacggcgcaccacgaaattataaccaacacctggctcggaaggtcctacgcccacggagtctcgctgattgcta

SEQ ID NO: 328894 - DNA, 122 bp, Homo sapiens
gccacctcagagcggagggtcagacatggaagcgcagaccgtgccgctccacctgtaagacgtgcaggggccaccaaaggtaattgatgatgatttaagtccaatagtgatgatcaccattt

SEQ ID NO: 328895 - DNA, 122 bp, Homo sapiens
gattcctgctctcgccaaattggccgctctgggccaggcactgaggacacaccgcgaagccggatagccaggtcctgtcctcagggccctgtccggaagaggactgggcagcctcgagtccg

SEQ ID NO: 328896 - DNA, 122 bp, Homo sapiens
gcctgaacttccttacaaaagccttccaacttgtaacagactttggaccaccctcaacttcgttggtgtgtcttcctacatcagtcctgacatttgccttccaatagaactttatgaaatta

SEQ ID NO: 328897 - DNA, 122 bp, Homo sapiens
gaggccgagctgcgcgcccgcgtcagcggcgcctcgttcctggccgggagctgggacccgcggagctagggaccagcacccccacaggcgcccgtctgacccctgtccctccccgcccgccg

SEQ ID NO: 328898 - DNA, 122 bp, Homo sapiens
ggaaacgccaagttttctgattgctttcgagtggttcttagttctttcttactccccctccgcccctcctccgtccctatctctctctcctttcccggagcctgcggtcccgccttccccgg

SEQ ID NO: 328899 - DNA, 122 bp, Homo sapiens
taatttcattaaccaccagtaagttcttcttatgcatgtggccaaaataatgatatatcccgcttgtggccaaggtgagaaccatagataggcttgttattttacttttctttcttacctgc

SEQ ID NO: 328900 - DNA, 122 bp, Homo sapiens
agatgaggaaacacacctattgaggacaacaggattgctccctgtcacccagcctgtaagcggcaaaacaagaactagaacccaatcttccagcccgggtgcctagcagtgtctccaatccg

SEQ ID NO: 328901 - DNA, 122 bp, Homo sapiens
gccgagttgcgtgaagtgtgtcacttcgaaaggggctacggggttgcacggaaacggtgccgcagcgtctcggccgcgctcggggccgggcggcctgacacgccctctggggaggcttcagg

SEQ ID NO: 328902 - DNA, 122 bp, Homo sapiens
ttgcctgacagtcatgtgtgtggcttaggaattgcccagatcacacgtacttgcagtcctcgctctccagaaggttccggtatgtggcaatctcgttctccaaccgggccttcacgtccagc

SEQ ID NO: 328903 - DNA, 122 bp, Homo sapiens
aatctattaaatgccctagtaagccatatagtaataatattgagaatttctgatcaagctcgagtctgctcagtatccctatgaacttgactgaggtagttgttgaatatattttcatacat

SEQ ID NO: 328904 - DNA, 122 bp, Homo sapiens
aaggagctgtcagggattggaggcggctgggtcctccggcagaacactaagacgggcccccggggcggcccggctctgcccggggccgaggcagcgacagcagatgcccgaccccgaggagc

SEQ ID NO: 328905 - DNA, 122 bp, Homo sapiens
attatagaagcaaattttcctgcagaaaaaaagaatcaacgtgttgttttgaaacttggccgcaccatcataaaaccagcagcagccaagcctacagatagaaaaacctgtaaagaggagaa

SEQ ID NO: 328906 - DNA, 122 bp, Homo sapiens
aaggccataccagaagctgataaaatgttcacgtccttcctcctgctgcaggctcaaacccgcagacagctcctcccctactcggtatgaaggttcagtctggaatttctgcagcgtgaggt

SEQ ID NO: 328907 - DNA, 122 bp, Homo sapiens
gataggtcccctctccaattgtgacaaccaaaatgtctctagacattgccaaatatccctcggaactaaattgtccccagttgggaaccacgaattattaatccctaaaagacaaagcagca

SEQ ID NO: 328908 - DNA, 122 bp, Homo sapiens
gcagcacaagctgactaaacaagtgccaaaaccaaaccagtaactcccactttctagtctcggacccagtattaaggaattctggtcacatagtttattcatccatttaacaaatatttagt

SEQ ID NO: 328909 - DNA, 122 bp, Homo sapiens
aaaatattttctaaccagttctaggacgctttggctttccccctctggtagttgtggttccggatgaatttcttgcccctgagtagataagaatccctggagggatctgtgtgtttcacttc

SEQ ID NO: 328910 - DNA, 122 bp, Homo sapiens
cactgagctcagtaactttggatcccacgtacacaagcttaaagcacacacactttcccccgcgcaggttctcgggtccgccgcagaccctaacgcaaactctcgggttctccgcaaaccct

SEQ ID NO: 328911 - DNA, 122 bp, Homo sapiens
atggggaagaacagcagcttagactcatggcgtttcaggtttcccagctctggcctctcccgtttctctgttcactttgataacatttggcctgcgctcactactcctgatttctgtcattc

SEQ ID NO: 328912 - DNA, 122 bp, Homo sapiens
ggctaggagagggcagagtgtgaagaggggtggtgagggacacaattgttcccctgcctgcgcccaggcttcctgacctcctgatcctggctgggaagttagggcaggcagagcgagcaatt

SEQ ID NO: 328913 - DNA, 122 bp, Homo sapiens
agggcagaacaccccagtccagactctcaggttcggggtgtgaccctccatccttgggtgcggggccccgaccacctccgcctccctgccgccgccagtccactccgcaggctgcactccca

SEQ ID NO: 328914 - DNA, 122 bp, Homo sapiens
gtgtcccttgcagactttcgcagctccatcattcgatgacaagattctggaggtggtcgccgtgttcggcagcatgcagatggccgtctctcgagtcatcaggctacagcatcatcggatcg

SEQ ID NO: 328915 - DNA, 122 bp, Homo sapiens
gcaaacaggagggatctggctggcagggaggacgcagcgaacttgaccccctcctgagcccgcccgggggcctggccccgttttgaacccgggcccggcggctgcgttgggtcgccccaaac

SEQ ID NO: 328916 - DNA, 122 bp, Homo sapiens
ggagcgcatggaaggcaccactgcaatgttgacacgctgcctccggcctcctccattccacgtacactgaaggcaccgccacgatgctgacacgctgcctccggcctcctccattccacgaa

SEQ ID NO: 328917 - DNA, 122 bp, Homo sapiens
tggcaaacaaactcactcagcactgattggattccaggctccatggtccccttctcgatgcgcatcttgcacgcggagcttcagcagtacctggggaacccacaggagtcgctggatagact

SEQ ID NO: 328918 - DNA, 122 bp, Homo sapiens
aggtcctggccagtggagaccctggggtgcgacaaaggggttagggggctcccccctccccgcccctcgcccccacctttccccctcgcgctgtctctccaaccccatccaagccccaggct

SEQ ID NO: 328919 - DNA, 122 bp, Homo sapiens
agcatatgctgagatttctcccaatcagttcaaagagatctcagctatgtcattttagtccggctcagtctttccagctgcaagaaaaagaaagactttatatcctctcaaaggctcttaaa

SEQ ID NO: 328920 - DNA, 122 bp, Homo sapiens
ggcagcagccaccgcggattgttggcctctttgccgttctgccttaagctgacgttttggcgatgttggtgctggaacttcaaacctcggtgtggaaggaagggacgccgaggcccctggcc

SEQ ID NO: 328921 - DNA, 122 bp, Homo sapiens
ccgtttagccaacaagctcacttatgctacagagaatgcgagagaggacaacggagatgtcgccaggcagaggatcgactgatgggtcagaacacaaatcagccaattcagcatcacgaggc

SEQ ID NO: 328922 - DNA, 122 bp, Homo sapiens
gctttccccggctcttcgggctgtggaggctgcgggctcgcgcttgttccgggacaggggcgtggcgcctgctgctggctcggctgcccgcgctgcactggctgccccattaccgctggcgg

SEQ ID NO: 328923 - DNA, 122 bp, Homo sapiens
gctcgggatgcagcgcgtgtttgggcgggggcgacccgggaggcttcggatggaacgaggcggagcgagccctggcatcctcccgcccaccaggctaaggactggccgaacgtccacacggg

SEQ ID NO: 328924 - DNA, 122 bp, Homo sapiens
gaacagtttggtgagaaagatttttgcttttctgccataatattcccctggactttgcttcgggtccaaagtaacaccgggaagtttaagaccacagaaatgtgactaaatgaatgctgatc

SEQ ID NO: 328925 - DNA, 122 bp, Homo sapiens
ttttcttcttttgcacttcttagctttttatggtgtccttataaaaagaggaaaactgggcgcatacacaggaacaccatgtgaagataaaaggcagagatctgagtgatgtttcttctaca

SEQ ID NO: 328926 - DNA, 122 bp, Homo sapiens
cgggcaatcctttgcaggctgtacttaccaaggcgataccagtgcaggcaaagagcacctcgaagccgctgtagataaagaaaggcacgaggtggcgcaggcggtagtcacgcacgtgcttg

SEQ ID NO: 328927 - DNA, 122 bp, Homo sapiens
tggaagggacagccgggcgcaacagggcagggggcgtctgactgttggaaacatggctgacgtctggaggctgcagccagtggtccgtaagtcaggtcaaggacccacagaagaccccagca

SEQ ID NO: 328928 - DNA, 122 bp, Homo sapiens
aaagcgagactctgtctcaaaaaaaaaaaatgtccctagtttttaggttgggggaactaacggatcaagttaagattgcctcagctcatattgccagggtagaatataaattctgagtggat

SEQ ID NO: 328929 - DNA, 122 bp, Homo sapiens
aatcctctggagagatggaagtggactaagtcttaattttaccttcacattaattcaaaccgtgcaagtaaccacggggtccatcttttacatctggtacacacaacagacgctcagttgtt

SEQ ID NO: 328930 - DNA, 122 bp, Homo sapiens
cccccggaggcctgccctggaccccggcagcgcgcgctccctccagggagaaaaggccagcgccagggccaacccgcagcgtctgagcagcccctcgctggcttgctcctgcccggactcga

SEQ ID NO: 328931 - DNA, 122 bp, Homo sapiens
cctccacccaatctgatctctgcagagcagtgtgttcttgggaaaacacaaattggatgacgcagatccctcgtttgaatcattcggccgttttgcattactcttaggctaaaatccaagat

SEQ ID NO: 328932 - DNA, 122 bp, Homo sapiens
caggacagtgggtgcagcgcactgtgcatgagcggaagcagggtgaggcattgcctcactcgggaagctcaaggactcagggagttccctttcctggtcaaagaaaggggtgacagacggca

SEQ ID NO: 328933 - DNA, 122 bp, Homo sapiens
gcggcgcagcgcctgcaccaccagcgacacggtgctgtcctcgcggaggctctcggcgcgcgggctgcgctcgtcgtagacgatgaccgccgagtagaggccggagcgcaagcgggcgcgta

SEQ ID NO: 328934 - DNA, 122 bp, Homo sapiens
agagctggcgtggaggggaactccgctggcctggggccggggccacacacagactgggtgcgggactgccccagctaccttctggcctttccctcagggagggtcccggggcccaccccatc

SEQ ID NO: 328935 - DNA, 122 bp, Homo sapiens
ggggagctccaatctccccctgctcccaccacccacactgtgcagtgttgtctccttgcccgtaataagggatcaccgcaaacagaacatggagacacacaagcgccagattcacccgtcca

SEQ ID NO: 328936 - DNA, 122 bp, Homo sapiens
tcttatccaataggattaaaaaatttgtccttacccggccgaccgcggaagtagagtaggcgggcggccaatggggacatgatggggggcggagccgaggcctccgaagcggaagtgggttg

SEQ ID NO: 328937 - DNA, 122 bp, Homo sapiens
ctggaattctatttctgctgttactctgctacatgtctgtcctgtcccttctctgggcctcggtttcttcatctgtaaggcaaggaggttagactctaagattcctgggttctcagccttgt

SEQ ID NO: 328938 - DNA, 122 bp, Homo sapiens
aagtctgacaacaggcttaagactgttttatacacagctgtgagtctatcattacatttccgtgcatgttgattttcgtcatgatgctgggcagcatccgagcaaggccatgcaagatggga

SEQ ID NO: 328939 - DNA, 122 bp, Homo sapiens
aagtggaaatgggggacaaggggatggggctgcatctctgtatattggcgtttcaagcctcgatgtggtgtgtggcaggattcatttataagaaagcaagccatgttttattatgtctagca

SEQ ID NO: 328940 - DNA, 122 bp, Homo sapiens
tattaaagttgccaaggagttttccaagggatcggtatcattttgcattcccatcagtcacgtatgagttccagtggttccacatcctgtcctacttgacaacttgatgttgtcagtctttc

SEQ ID NO: 328941 - DNA, 122 bp, Homo sapiens
ccattcggagtcagtgggcaggaagatggggctgtcaggcccgggggtctggctgagctgcgtccgaaaggaacgagggatgatggggctccgggctggcggttagcacctgagcccccatc

SEQ ID NO: 328942 - DNA, 122 bp, Homo sapiens
tgagtggtagaaccaagagtcctcttcctagaaaagcctgatcctaccacagtgtcaccacgaggggaaaagcaattggtttttagaagggttctgccctcttcagctataaggaagcctag

SEQ ID NO: 328943 - DNA, 122 bp, Homo sapiens
tcccccgccccgcctcccgccctccgccccgagccccaccccccgaaggccgcgccccaccgcacctccgcgcacggccaatggcgtgagcccctgacagagtcccgccccctccaaacgca

SEQ ID NO: 328944 - DNA, 122 bp, Homo sapiens
caacagaatggattgtaccgctgtgagaagtgcgacaccgaatttcccaatttcaagtaccgcatgatcctgtcagtaagtagcctcggtagatgagaaccacggttgtgttcacggaggcc

SEQ ID NO: 328945 - DNA, 122 bp, Homo sapiens
ttgtcctcttcgggctggcgggcactgagctggggccatcacgcctttctagagcgcctgcggaggtggcgaaggcttggagagcatacgaggcggaatccggatcgagtgagttccttgag

SEQ ID NO: 328946 - DNA, 122 bp, Homo sapiens
gattggcaaagggggcaagaccgtgaatgaactgcagaatttaatcagtgcagaagtcatcgtgcctcgtgaccaaacgccagatgaaaatgaggaaatgatcgtcagaattatcgggcact

SEQ ID NO: 328947 - DNA, 122 bp, Homo sapiens
cctgggaaccaagccctgcaataggcccctttcccaacatgctctttgaggtctcttgaccgcattcatggatgatatggcagagcccagaactgagcaaagtcactctaccttcacaccga

SEQ ID NO: 328948 - DNA, 122 bp, Homo sapiens
acaggcacctgggctccagctgcggctccttcatcaagactgagccgtccagcccgtcctcgggcatcgatgccctcagccaccacagccccagtggctcgtccgacgccagcggcggcttt

SEQ ID NO: 328949 - DNA, 122 bp, Homo sapiens
ccgctgccattgtagaccaggagcgcccgggacacaaggcgcagtcgatgtggagaccagcgtatgaatcacttcggccctcgcatgccagctagtgattgagtgtgctcggccccgtccgg

SEQ ID NO: 328950 - DNA, 122 bp, Homo sapiens
cgtggtattcattccacagccccagagcaagttcccctgggggccgtcctgtgactcccccggccacaccgcacctcacccggagtccccagcccgccccacccagcctcaggtcacgcctt

SEQ ID NO: 328951 - DNA, 122 bp, Homo sapiens
cccgatagcggcagcgggccagccgagccttcagagcctggggacggctcgggatgggcgcgcggggcgctgaggacggggagacgggctgggagcagacaggagggaaattccgagcgctg

SEQ ID NO: 328952 - DNA, 122 bp, Homo sapiens
cacgtaaaggagcgggcggctcaacagaggcggctcttgcctgggtggggtttgtgaagtcgtggcccgttagcaggaagcctaacagtcgccccgacgctagtgagggacccaatctgagt

SEQ ID NO: 328953 - DNA, 122 bp, Homo sapiens
taaaccccaggacacaggcagtgaccctagacgagcagggcaggtccaggtgacgggaggcgtgccacgtttctccatcccgaagttcttcttggtttttatcctaagtactgatgtcagga

SEQ ID NO: 328954 - DNA, 122 bp, Homo sapiens
ctgtgacatgtggaagctaagagccttaaagacttcaagctttgctggtcacactaggggcgtcaagtgcttctctgtagatagaatctatccagtctgtttattgtctgccttttaaaagt

SEQ ID NO: 328955 - DNA, 122 bp, Homo sapiens
agcgaacagcagagcatcatcccgactccgcggactaccgcggcccaacagcaagggtcgcggctccccggcgctctctgccgccctctaccggaaccgagggagccagacagctgcgatat

SEQ ID NO: 328956 - DNA, 122 bp, Homo sapiens
aagctgggaccttcgcctccgactcagtgtagacgtcgccatcccggttccagatttccgcgctccaacgcctccgcagcagccatcttgccagagggccgacgccttttgactctggcgcc

SEQ ID NO: 328957 - DNA, 122 bp, Homo sapiens
gcgcgagtctcagtgagcgcgtaaacgctgtgcgtgccagagtgtgcgcatgcgtaagcacggtggccaatcctctagcgttccctagcggtcctgagtagccattacgtctgtagccgcct

SEQ ID NO: 328958 - DNA, 122 bp, Homo sapiens
ccagaggcgcctataccgggcttcgccggggcctctggaccactgggctcgctctgcccacgcggccaagcaggcaacgcttggctgctgctactgggcctggatcccaagcctgccgccgc

SEQ ID NO: 328959 - DNA, 122 bp, Homo sapiens
gcctgggcctcaggcttttgaaactggacgccagagccttgtggggccacgggcaagcctcgggtctatgactgccgcctgagctccgcttccttcctctctaaaatgggaagattagacca

SEQ ID NO: 328960 - DNA, 122 bp, Homo sapiens
gcgttctgtcccgtccctgcctggcgactgcggcccggaagccttctctgagcagctccgcgcccgcaacctcacagtcttcccagattgtgcgggggccacacatgacataaggagagtcc

SEQ ID NO: 328961 - DNA, 122 bp, Homo sapiens
aatgtatgtagggaaggaaaaaattttccttctacccctttggttcttggctggggccaccgaaacaaaagtcagattaacaagagaaaaatagaagtttagtaacatgtgcatctcatgca

SEQ ID NO: 328962 - DNA, 122 bp, Homo sapiens
gccctccgagtgtctgccggtgcagtgggggtggactggccggctgtggccgtgtgtgcgcgtgtggattggggcccggtccgagccagaagcttaagcggcagatgtcgggcattgccacc

SEQ ID NO: 328963 - DNA, 122 bp, Homo sapiens
cccgtggcctgtctgcccgtggcctgtctgcccgtggcctgtctgcccgtggcctgtctgcgcacagctattaaaagttcaataaacgtggtggcagcagctgaactggctaccacaggacg

SEQ ID NO: 328964 - DNA, 122 bp, Homo sapiens
tctatgtttaaaacatgacgcgccacctgcaaacacggtgccacagcctcagggagacgccgctcatccactctgcgcctgcgcggttcacacgctccttagctccaaatgcctcatttgct

SEQ ID NO: 328965 - DNA, 122 bp, Homo sapiens
cggagcatcctcctggcctccctccagcccagcctccccctcctcagcgctcccagagcccgagaggggaagcagccccagctctgcccccacacaaaccgcaatgcagccgcttgacagct

SEQ ID NO: 328966 - DNA, 122 bp, Homo sapiens
ccaggtgactccaacatgcaagacaaagtgtccaacctctgttctaaaagagacggaatccgctccctgagcaaatcttcaggatgcaatattgactaagacagtagaccttaggtgctctt

SEQ ID NO: 328967 - DNA, 122 bp, Homo sapiens
ctcggccctactcctggggctcctgtcactgcagccaagatgagcagtttcgggaagtgccgggggcagcgctgcagcccctgttctgcacagtggggcccctgtccagccccaccttaccc

SEQ ID NO: 328968 - DNA, 122 bp, Homo sapiens
cgcgaagagggaatggcgtccacgcatgggacccagcctctgatcaagcccagcaggtgccggctggccacacagagtgcggggcccaccgagccagcgcccaccctgaacccgcaccggcc

SEQ ID NO: 328969 - DNA, 122 bp, Homo sapiens
agagaggccggccctggcctggctcaggtcgccctcgccccgctttcatcttgccccagtcgccctttacaattcccacaccgaaggcaaagcaagcaaggaaagaagccggcgcctcccca

SEQ ID NO: 328970 - DNA, 122 bp, Homo sapiens
atagttactccagtcctaactttgatggatcctaaaagtgcacttctaaggacgcggcttcggtgtttcccatgccgctgcttgcccctgggaagcgttggctctgcctcggaagaagttag

SEQ ID NO: 328971 - DNA, 122 bp, Homo sapiens
tttcagcttcggccaccagagggcagcagggaaccagctgattgctgcgagaggctggaacgctggagaattctgagctggcaagtttgttggggtggggcaggcagacccagtttgaagca

SEQ ID NO: 328972 - DNA, 122 bp, Homo sapiens
tccttgggtccaaagataccctgagccttcaagaagttatctcaaagcttgcccgggtaccggcaaatcacagacctaggaatgatccattggccacaggcccaggcagctggcagctcctg

SEQ ID NO: 328973 - DNA, 122 bp, Homo sapiens
actttgttgcttgtgtgttggacacctaatagtcttgacagctaaataggcttttgtaagcgagagtggtaaagtccaacatgttgctgaacctatgtgtattctctactgctaccaccaat

SEQ ID NO: 328974 - DNA, 122 bp, Homo sapiens
cgcccctcctcgcggcttctgttgtgactcgggcagcctatcccgagggtgcggagctgccgaggagcctgagccgagcggtactccgcagcatcacgtgccagggtggggggctataaaat

SEQ ID NO: 328975 - DNA, 122 bp, Homo sapiens
agtttcagtttgctcatctgtcaaatgagacagggtggtgcatgagtcataggcagtgcccgggaaagcggtgagggttgctctcatcccctctcctcctccgtcttcacccggaggcttag

SEQ ID NO: 328976 - DNA, 122 bp, Homo sapiens
cgccccgagggtggctgggcccggaggaggggcgccccgccccgtccgtgcatccggctccgccccttgctggaaaggctacgtattcagccctggaggtgccatcccgggccgcgactccg

SEQ ID NO: 328977 - DNA, 122 bp, Homo sapiens
tgccggtgtcatctgagaagtggtgcaggggacaaggggggcgtgacaggactggtcctgcggtagagaccctctggggtggtgttcctggaactctcccgaagcctctcttgttgacatgc

SEQ ID NO: 328978 - DNA, 122 bp, Homo sapiens
taggggacggggactctttgtctgcagttggaatgcgcggaggggcatggtggaatgtgtcgcgtcccgggaccggacgacaggaggcatgttctgcgctagcaccgtgactttgttcccag

SEQ ID NO: 328979 - DNA, 122 bp, Homo sapiens
gaactcagcatttctcgagaacctactgtgtgcatatcccgggcttagtgaagtcctaggcgggctctggcaccaccaggtgcccaagacacagctccttcccgcacctaacagggacttcc

SEQ ID NO: 328980 - DNA, 122 bp, Homo sapiens
aactccaaggacgatgtgaccaaggacaacagccagcaggaaccacctgtgctgggcccccgcagcgaggggcaaacacctctctcccggttcagagaagcaagatctgtgcccaacaaaaa

SEQ ID NO: 328981 - DNA, 122 bp, Homo sapiens
gccactgataacctccatgagaaatgaattcccaataggtgtggagttcttggcagtctacgcagcactttcaaaccataaattcactcattattattataatcatgtaattaagtagggct

SEQ ID NO: 328982 - DNA, 122 bp, Homo sapiens
ggactgagccctgattggagcgcactctcgttttctggcttgatggagccgatccagtgacgtcaggaatgcgggtggacattttggaagcgggtaggacccttcactgcagttcgagggag

SEQ ID NO: 328983 - DNA, 122 bp, Homo sapiens
actgactgccactgatgggggcaaaccggagctgcaaggtacagttgagctgctgatcaccgtcctcgacgttaatgataacgccccactgtttgaccaggccgtatacagagtccacttgt

SEQ ID NO: 328984 - DNA, 122 bp, Homo sapiens
cggccacggttcccacgatgattgtggacatgcagtcgcatagcagagtcatccctcatgcgggctgcctgacgcagatgtatttcttggtcttttttgcatgtatagaaggcatgctcctg

SEQ ID NO: 328985 - DNA, 122 bp, Homo sapiens
ttgtggcgctagcgctggttcctgtgcaggactttccgcactgcctcccactgggtgtcgcgagagactttgctgctcatggcttctgccgccgcgctaaccggaaaagagtctgccttttc

SEQ ID NO: 328986 - DNA, 122 bp, Homo sapiens
gcctgcctagagggacgggccagtggcgggcagcagcgaccggctttcagaaagccccgccggctctggggtatattcccagggcaggcggataagaacctgggcctagagcggggcacgga

SEQ ID NO: 328987 - DNA, 122 bp, Homo sapiens
tgcacatacgggccaagtggcgattcataggacacaggtgtgagcgtgcctacagctgaccggatcccagctgtaaatgcctctgtggccagcccaggagttggggatgtgagtgcgggcct

SEQ ID NO: 328988 - DNA, 122 bp, Homo sapiens
tcaagcccgaggtgtgtctgcagagcattggaaatgcagccctgagtccgtccccaaggtcgcctgatagagcaggcctggggaccggcaggggaagcggatgcctaccgtgactctcggga

SEQ ID NO: 328989 - DNA, 122 bp, Homo sapiens
aattccagggccagccagtggtgttaaatagcaccttttattgaaatagcagtgtgcagccgcagcagaggtactgctccttgcagggtagggctactccataggcagtgtgcccagagtag

SEQ ID NO: 328990 - DNA, 122 bp, Homo sapiens
aagggcctgtctgatcagaggcctcagaatccaccatcagaaattctggtttgacctgagcgactttcaggaggcttcccagacttctgagcagacgagtaacttgataaaaagcaacatct

SEQ ID NO: 328991 - DNA, 122 bp, Homo sapiens
acaagactaagactttggaacattcaccactgaatacttttttgacagcctgttcccttacgaagtgaaaaagtagcaaacacaaggaatcctagtctttgttttcatttgtttattggtga

SEQ ID NO: 328992 - DNA, 122 bp, Homo sapiens
ggagaagggcagatgggtgggagatgcatgatctcagaacacagagctccagaatcagttcgggctcctccaaggatcagggaagagagttattcccagaacattgacctcatgaatgtcct

SEQ ID NO: 328993 - DNA, 122 bp, Homo sapiens
tctggaggagagggggagccagaccaaggtggccttgaaggccccggaagcttgcagccccgcgccgtccctcaacccacccccgacctgcagtccaggttggaccgggccggctcaccggt

SEQ ID NO: 328994 - DNA, 122 bp, Homo sapiens
cgcagcgtacctgcagccgctggcgctcccctgcgcctcgggctcgcagacagtagtggccgaggggctgtgtgccctgagtcctgaggaaagttcctctagtccaggttccgctcgtacag

SEQ ID NO: 328995 - DNA, 122 bp, Homo sapiens
cttccctggcctcaagggtcggttccttctgcaccagaaaacggggtgtcactgtcaccccgggacccagcctcctggcccgacttggctggagctcccctgcacctgccccgccccaagca

SEQ ID NO: 328996 - DNA, 122 bp, Homo sapiens
gggaagagagacttgcaatactgcggcgaccaggtaaactgcacagaccaaggtagaaaacgtcgcaggggcaacaaattacttctttagtggttttgcgggggtcggggcattctggaggt

SEQ ID NO: 328997 - DNA, 122 bp, Homo sapiens
agtcaagcacccctcttagggctgcaggctataggaacagtttctgccatgagcgtgcatcgatgaggttatccacccgccccctccactttgtgtgtctgggtctccagatttcattataa

SEQ ID NO: 328998 - DNA, 122 bp, Homo sapiens
gagagagagagagagataaaaaccctgcctttccagagaggaaaagagagaaagagaccacgagaaagtgagtcagtgaggctggtaaggggtatctgtaatacacagattaaggtggacaa

SEQ ID NO: 328999 - DNA, 122 bp, Homo sapiens
gcggggaaaggccggtgggcgtggctggatggccgtggacgggggcggggggtaggcacccggggtcgcttcgtggatttccgtaaacagagccgaagcttcgtcttcggaatcgaggagga

SEQ ID NO: 329000 - DNA, 122 bp, Homo sapiens
acctttgccgcaggatcccggagccggcgtccttcaaggagcacagagggccccgtagcacgccccttgcccagcgccaccgacccttaagcagcgtcaaggaaggagtcccgatcaaggac

SEQ ID NO: 329001 - DNA, 122 bp, Homo sapiens
agccaggattgaaatctggaggagaacggtctatgagcagatgtctgggctgctgcctgccggtgccttgggttctaggcgacgtgtaggagcctcgagtctggactctgtgtaacagtaag

SEQ ID NO: 329002 - DNA, 122 bp, Homo sapiens
cccccaaccagcctgtaagtttctttagagcttcctcgtttcactatatccatcaaacgccgctattaaatccacccacgtaggaagagtttaaaccataaagaaaaggagtcacttgcttc

SEQ ID NO: 329003 - DNA, 122 bp, Homo sapiens
agtcacagagcaccaagccaaaaaaagtacggccctcagccagtcgctatgcagcactttcggaccagggactagacatcaaagcagcgttccaacctgaggccaacccatctcacctgaca

SEQ ID NO: 329004 - DNA, 122 bp, Homo sapiens
tggaggagcactgcggtgggcggtgccaagggtgtgcatgtgcgtgtgagagtctgtgtgcgcgcgcgtctgtgcgtgtgtaagtgtgcttgtgagtgtgcgcaggaacaagcgggcgcgca

SEQ ID NO: 329005 - DNA, 122 bp, Homo sapiens
gttatctttgaattcccaggaggtggcccagtgcctggtgcataggaggagctgaagaaacggaagacttcttaaagggatactcgccattcactttgaagcacttctttgtacaacaaatt

SEQ ID NO: 329006 - DNA, 122 bp, Homo sapiens
cccgccctcgcgctcgccactgattggccgccgtccgccggcccggcgcatcataaccgccgccgccctcgccacaccgcctccccattggctgcggcgccgcccccaacccagagcgctgc

SEQ ID NO: 329007 - DNA, 122 bp, Homo sapiens
ccacatcacggtgggggccagggctgtggctccactccctatctgagctggctgatccctcgcagctctacatacttccttctatttactgctgtcttctctggccttcccagaactctgcg

SEQ ID NO: 329008 - DNA, 122 bp, Homo sapiens
cctgtccgcgccgcccgcgcggtctccggccccctgcgcgaggtcctccctcctgcctcgcgctccacggctcctccgcgctctgcctcccgcggcgcctgccgcctcccctgcgcggatca

SEQ ID NO: 329009 - DNA, 122 bp, Homo sapiens
ttggggttggacgtggtgttcccctcctgccctgtcgggggccaggccttctgcacctgccggccaggcctggtcagcatcaacagcaacgcttctgcgggctgcttcgccttctgctcccc

SEQ ID NO: 329010 - DNA, 122 bp, Homo sapiens
ggcagcggctgcgagcgcccgcccccgccccaccctcccagccccggacagcgcaggctgcggcttttcgtcctccactgagtcctgccggtggcccgagcccggtggcctcccggcgaccc

SEQ ID NO: 329011 - DNA, 122 bp, Homo sapiens
aacccttctttctttggtcaggaagacgctgccctttaccgacacctggggacccttctccggcactgtgtgatgatcgctactgctggagaccgcacagaggagttccacgggtgagaatg

SEQ ID NO: 329012 - DNA, 122 bp, Homo sapiens
tcttaagaagcctcaggtaactaataacttagttccacaaatctcatttactaagcactgcgtaaactgcagtatctggggtagtctgttattgctcatggactgcagcttggacccatcta

SEQ ID NO: 329013 - DNA, 122 bp, Homo sapiens
aggagcttcattgacagaacggctgcagaggaccggaagtggacagctcctttccgcaggcgggttgtcccaatgagtgtccacctcagcagagaggagacccgtagtgggtggttccgctc

SEQ ID NO: 329014 - DNA, 122 bp, Homo sapiens
ctgccctgggcgcctggcgcatggggggcggggcggggctcgcggggtgacgtcacagcccgacgcgccacccagctgtttttgtgctcccagctctagcgaaaagccgccggtatttctcc

SEQ ID NO: 329015 - DNA, 122 bp, Homo sapiens
gcgcccggcctcagctctgtttctaagcagtttccctctaaaaatgctatattcttttaacgcttttcttcacagaggctcaaagtgccttaaatatgtttaagtctctgaaacttgggata

SEQ ID NO: 329016 - DNA, 122 bp, Homo sapiens
gcattctcgcctcggctgcctcacagggcacagctgaggaggcgctgggagtgggagcgccgtcagtccagagctcgccccgcatgtactgggcagcctcgcacagaggccggctgagcctt

SEQ ID NO: 329017 - DNA, 122 bp, Homo sapiens
acatctctgtggttcagtttcctcgtcttgtaaaataggaataagagcaattctgcctcacggggtggttgtgaggattcaatgagaaacccttagaacaggacctgcccagtgggatgcgt

SEQ ID NO: 329018 - DNA, 122 bp, Homo sapiens
aatatatcagcagagtaagagttggatcaacttattgtaccatgttcattaggtctgcaccgatgtagcaagttaactcatccttgcctttcttctgccatttataggacaaaaagaggtga

SEQ ID NO: 329019 - DNA, 122 bp, Homo sapiens
agggagggaaactgacggggtgagatgcacgttacagcagcgagggctggaagagtgcagcgcaggcgcctggtccctgggcttctccaaaacagtgtagtgtcagcctctcccaggagctc

SEQ ID NO: 329020 - DNA, 122 bp, Homo sapiens
ccctctgttttctgatagtgaggatttctttcccatgcactgagtcggggcctccagagccgcagtgcagggcagtcgagggtccgctgcagggcggaggtcacagccgcgcaagtcgtcag

SEQ ID NO: 329021 - DNA, 122 bp, Homo sapiens
accaacggcaccatgaatagatacatccccgtcgggaaggcacagctcaaattcttccaccggcctctgtccagcttggtgcaaagaggaagggcagaaagaaaaacaaaagaacaggaaca

SEQ ID NO: 329022 - DNA, 122 bp, Homo sapiens
ggagaaaaagaatttgcgtgggttaagagccagtgaggatggtcagccaaactgacctcacgatgttagtttcacttcccttttaagtattccaagacactgcccggctctgcagaccatgt

SEQ ID NO: 329023 - DNA, 122 bp, Homo sapiens
cgtcacatccgcctgctgctgcttctcaaccaagctgcccccactctcggcctctgtccccgatggccctctcgggctgtgcaggtcccacggacccaccgctgccttcacttcatcctcgc

SEQ ID NO: 329024 - DNA, 122 bp, Homo sapiens
gtgggtgggacagaggccaggacggactgagctaagagaccgagagaactccggctagggcgaggggcggggctggtggaggcggggctggtgggggcggagtcggccggaagggccgaaag

SEQ ID NO: 329025 - DNA, 122 bp, Homo sapiens
cgggacttctcaggaccttggttccccatctaacctaccacaagatggttttggggaggacgatatgggcttagcattgctctctaggatataaaatgttttgcaaatgtcagggttttttt

SEQ ID NO: 329026 - DNA, 122 bp, Homo sapiens
cgctaccactcagacccgggatgggaggaaaggggaatgtccagatgccagggccactcccgactcacccacagtgaggtccatggtgtgccgctcgcccagcgcccgcaggcggtagaggc

SEQ ID NO: 329027 - DNA, 122 bp, Homo sapiens
ccaagtccgcccccatcgtcctcgaccccgccccctcaccccgccccctgttacctctcacggtcccgccctctcagcccggtcctccaggccccgcccccagccccgctccctctcatagt

SEQ ID NO: 329028 - DNA, 122 bp, Homo sapiens
aatgcttggactttctgagttttcctaaacatctttctttttaaacaaccagtcattttacgttaggacaagaatttatcgtacaagatcttttctcctacaaagccaccatctctacaatc

SEQ ID NO: 329029 - DNA, 122 bp, Homo sapiens
tcctccagactcttcctgtctaggacgccaaaaacatggccttcctaaacccagccttggcgcctcctgcacagcccagagacccagggcggcggacaacagaaaacctggggcggcggacc

SEQ ID NO: 329030 - DNA, 122 bp, Homo sapiens
cagagggtccatactggagagagaccttataattgtaaggaatgtgggaagagctttagccgggcttcaagtattttgaatcataagaaactccactgccggaaaaaacccttcaaatgtga

SEQ ID NO: 329031 - DNA, 122 bp, Homo sapiens
cttggtttgctgtgagctctttggtgtccgtggcccctacccaaggatccagataccacccggggtcatgcaggggagctagcatgggcaatggaggtgctcaaggggcctgcagtagggca

SEQ ID NO: 329032 - DNA, 122 bp, Homo sapiens
ggcttctggaatccttctctatcattgtgaactgatgacttgccacatggtgaagattaacgaagccagtgctttgaaccaccaccctgacattttgggggtaggtcaggggggtagctaca

SEQ ID NO: 329033 - DNA, 122 bp, Homo sapiens
tcagggagctccagggaggtagcaaatcaagaaagctggtgtaataggtcccgcccacaacgcgaggtgggccaataggaaggcggaaggatctgggacccgcctcataacgagccaggccc

SEQ ID NO: 329034 - DNA, 122 bp, Homo sapiens
acagaggagggggcggaggcagaggcggaggcggcacccaggggccggggcaggggaggccgggaccatcgcagtgacaatttattttcctgcagcagcggcagcagggacggttgctgcag

SEQ ID NO: 329035 - DNA, 122 bp, Homo sapiens
cccatcctcagcctgttaaaatcttccccattcccttcccacagcaggactggcctgggtcggggcaagaagcccccctcaagcccggcggccagcctggccagcctcgggagggcattcgc

SEQ ID NO: 329036 - DNA, 122 bp, Homo sapiens
cttgccacctgaggccgccccggttgtaactcctgtgctgggactgctcacttttcattccgtggtttcgaaccgtcagtgccaacctcctgtatggcaaccgatgattccgccttttactg

SEQ ID NO: 329037 - DNA, 122 bp, Homo sapiens
ccggagagcccgcctcctcgctcggcattctgggattggtagttttagtccagattgtgacgtcaatttcggggtggcgcgcggtggtgcaaggatgcagttagagcactgaaatcttagaa

SEQ ID NO: 329038 - DNA, 122 bp, Homo sapiens
gctcccaagtccctttgtgggacctctgtcctgcagtcaccttgaccctgacagatgtgtcgccattcctggagccacttgaggcattgaggagcagcacatttccaatcttcctgcgaaaa

SEQ ID NO: 329039 - DNA, 122 bp, Homo sapiens
cgccgctgccgccactgccgcccctgatgttgtggctgttggtctgagagctgcagcctccgccattactgtttatcccacacagaaaaggccccggaacttccgggatcacatagttccgg

SEQ ID NO: 329040 - DNA, 122 bp, Homo sapiens
tgctcctggcactggagaattctattttcatctccacttacacataattatcttctaaagcgatgctccccagaggggtcacaatgacatcggcctcccagataacctccccaagcaggctg

SEQ ID NO: 329041 - DNA, 122 bp, Homo sapiens
gtgtagacatcctagaaaaataagaaggctcgaagagacagtaacaaataattatacagccgttctgctttaacagatacagagcatgcatttcctttgtatagttgagtactaagttgaac

SEQ ID NO: 329042 - DNA, 122 bp, Homo sapiens
cccaaagtgctgagattacagtcatgaaccaatgcacccagccctgaaaaggaaatatttcgaatggaaattcaaagggagaacatctaatgttcaagttgatgtctatagagcagttaacg

SEQ ID NO: 329043 - DNA, 122 bp, Homo sapiens
caccaagtggcggtacccagacccttgggtgagcgcagaggtttccgggccctgggcacgcggctggcccagcgtgaccctgacgctgtggagcacacgccgctgtggctctggctccaagc

SEQ ID NO: 329044 - DNA, 122 bp, Homo sapiens
tggtaccaaggtgatgggggacaggtcaaggccaagagatcagagccacaaagacaaacccggtcagagggaaaaagacagagtcaaaacagaatccgggagaaaccgagaacaagaaatag

SEQ ID NO: 329045 - DNA, 122 bp, Homo sapiens
gggcggctggcctagcggtgggtgacctccacctccttcctggacggggtggctgccgggcggtgacgctcctcacttctcagacggggcggcttcgggggggaggggctcctcacttctca

SEQ ID NO: 329046 - DNA, 122 bp, Homo sapiens
ttaagtcagtagttctgttgctaaataatagtttgccttagatcatttcctggaaaagttcgaagcctttttgtggaattgcttcaacagtcatccttagctcgaccctgtccgtgtgtttt

SEQ ID NO: 329047 - DNA, 122 bp, Homo sapiens
tcagggagtctccttccctgccaggacacggcgaggtgctcctgtggcaaggcccagaagcggggtggctcccccagcctcagtggttactgcctcttgggcaacggcggggaggacctgac

SEQ ID NO: 329048 - DNA, 122 bp, Homo sapiens
ttgtgctccaggagagggctgactctgattctcccaggctccagcaggtcggctcggctccgagcagtttgttttttgaaagtctcataaatttccaagaaacttctccagacaactgtcac

SEQ ID NO: 329049 - DNA, 122 bp, Homo sapiens
agtccgcagagatacacgcgccaggagcgctaccgggcgcggccgccgcgcgtcctggagcgctcgggcttccacaacgagaactcgctcgccatctaccagggcctggtctactacctgct

SEQ ID NO: 329050 - DNA, 122 bp, Homo sapiens
ttactactgtcttgaactcctgggctcaagagatctccctgcctcagccttctcagtagccgggactacaggtgtgcactaccatgcctggctaatttttacttttggtagagatgggggtc

SEQ ID NO: 329051 - DNA, 122 bp, Homo sapiens
gcgcgaattttgagaggcgctgggactacgtaatcccgcgatcttatgactaaacgaacgcgatttagggagaagtaacggtagcgataaagggattgggtggtggtggtggaggggtggag

SEQ ID NO: 329052 - DNA, 122 bp, Homo sapiens
ctccctgcctttgcggtctggactgcaccagaaaaacacagctattgtcgcacttcctttcgggggaaacttcagcaccgggagactggcgcccagcagcattctccttctcccactggccc

SEQ ID NO: 329053 - DNA, 122 bp, Homo sapiens
attgcaccagggctgggtgcgtgggcagttgtgtcagaggccgcgtgtgaatagtgactccgaagcctgccgcttcctgggaccatgtttatcccagtgtttatccctgttcacacacgtgg

SEQ ID NO: 329054 - DNA, 122 bp, Homo sapiens
cgctggacgggaggtgccgggatcggctgcatggcgataagctggatcttactggggacccgccggctagcctccggggggcgggagatcctgtccacgtgctcgaagatggaggctgatga

SEQ ID NO: 329055 - DNA, 122 bp, Homo sapiens
tgaaccaaggctattcacaattagacaatatcctaactaaattaacagcatattcaatatcggagtgaacagggcgcttcacgctttccaccccgccccgccccgccccttttgttggtcct

SEQ ID NO: 329056 - DNA, 122 bp, Homo sapiens
tctcgaatttggagctgggtgggggtggaaaggccacgaggagccgcggcgtctcaggagcgggtggtgggcatctgagaagtcgccaccatgaggaagctcctcagttttgggagacgcct

SEQ ID NO: 329057 - DNA, 122 bp, Homo sapiens
tatttataacttggtaagtgccagcgaactcgcctcctttacacccccgagtgccagccccgcgctctgcactgcgctttattcgctcgagcctattcagggactgtcactccggggccgcg

SEQ ID NO: 329058 - DNA, 122 bp, Homo sapiens
gctccgcgtcgccgccgccgctgcccggcttcggcaccccctggtcggtgcagaccgcgtcgccgccaccccagccccagcagccgccgccgacccagccgcagcagcagccgccgccaccc

SEQ ID NO: 329059 - DNA, 122 bp, Homo sapiens
ttaaagagggtttttggtctaagtggtctggattggaggcctgtatgcaaggtctttagacgtgaaaggttagctgtagaataatagtccatttcctggggctttttctttttttctagcag

SEQ ID NO: 329060 - DNA, 122 bp, Homo sapiens
atcccggctccagacggcctgaattctaatcccggctccagacggcctgaattctaatcccggctccagacggcctgaattctaatcccggcccagacggcctgaattctaatcccgactcc

SEQ ID NO: 329061 - DNA, 122 bp, Homo sapiens
gcgcggttccgcggcccaggggcgccgggtttggtggcacagcgagccccctttctctagcggtatggctgcgttagagccctaatgagcgcgtgcgaaggctccccttattcatccatcct

SEQ ID NO: 329062 - DNA, 122 bp, Homo sapiens
ccgttaatgttcttcgtctattgctagagaaaatgtctttccttggaggaggcattggcacgagttactataaactccctctgaatctcaagacttctgggacgccgattccgctcctggcc

SEQ ID NO: 329063 - DNA, 122 bp, Homo sapiens
agccccacgtatccccacgatggttgccgtccctgcgtgggttttattttctccactcagcgtcctgtgaccacagagatggcgtgaggtaggaagctgtacagccccagcacggggcccac

SEQ ID NO: 329064 - DNA, 122 bp, Homo sapiens
caaaacctttgtattgggtgccaccgactgtcatctcttgtttaggtttgactggggaaacgtttccacagacatgaactagtttgtcaaggctggcaagggattttcaagggtttaggggt

SEQ ID NO: 329065 - DNA, 122 bp, Homo sapiens
ctttgcttatgatgctgctttacttgaatgcacttgtggttaatgggttgccatggtcttcgctggggagcagagaagcttttgaggttcaagcagttaagtagctgatggtagtaggagtg

SEQ ID NO: 329066 - DNA, 122 bp, Homo sapiens
agaggaagccaagttggctgagtgtgaagggaatggcgtcagtgtgacttcacgccacatcgtcccgaatgccagctccacactgcggtggcacgaacgcaggattgagagatgcagctgga

SEQ ID NO: 329067 - DNA, 122 bp, Homo sapiens
ggaaggtgaaaaggagaggtgtttattctctcagtgcgcaggcgcggagccgcggcctctcgttcttaaagagataggaaagaactgacctactttctatggagattcttgtaataggtggg

SEQ ID NO: 329068 - DNA, 122 bp, Homo sapiens
cgccgtgagacggaacctaagaagaactgcctgcgccggggcgggcgggttggccgtggccgcgcggctcatctgctggcggccgaggcgccgggtttgaggacgctgggcagcttgtcaga

SEQ ID NO: 329069 - DNA, 122 bp, Homo sapiens
ttgtgccttttatcctcgtaacctcatttctctttttattcccctctgtcacttcaatggcgtgccaacctccatgcactgagcagctgataaggctggaagcctggcaatggtaactacca

SEQ ID NO: 329070 - DNA, 122 bp, Homo sapiens
gctctctcacctttctcttcattaggaatctctccaggatcacctcttatgaggtcacgccggcatcccctggcccctgttctcaagcttcttccttatttttctatcatttactattccct

SEQ ID NO: 329071 - DNA, 122 bp, Homo sapiens
aagtgaggccacaagagctacaccactcgggggcgggggcaggaaggggccagcagcgggcgggggttcccaggtctacagctcctgtgagggccccaagaacctcctcctgcggcggccgc

SEQ ID NO: 329072 - DNA, 122 bp, Homo sapiens
aggcggtgatcaaaaacctggaggttagaagattccaagtcattcattaaagtcccgatgcggccggcccccaagatctcaaaaggaaatattgccgagttccgtttcccagagcatctatt

SEQ ID NO: 329073 - DNA, 122 bp, Homo sapiens
agagaggaagaaaggagctgcgcttcaggatgccacagaccttgggcctgagtccctggacgaactcttagtagctctaagactttgatcaaactatttaagctctctgaaggccagttttc

SEQ ID NO: 329074 - DNA, 122 bp, Homo sapiens
tacattagcgtctacgaccaccaaggtgaggcccggtgcggtggtggggggtggccgaggcgtcttggaccgctagaccgctggtctggcgggtggtgcccatggcacgagttgccgcggcc

SEQ ID NO: 329075 - DNA, 122 bp, Homo sapiens
aggtgcagggccagagggaaccagcagtaaccctgatagcggtctgtcatctgttcctctcgactctacagcagcggacaacagaactttgattgctgatttccatcagtaagcaggctttg

SEQ ID NO: 329076 - DNA, 122 bp, Homo sapiens
cttaagccaattatgacgtccccctgggcctagggtaggactccactcccctgcaacacacgatcctctgaacaaaactgaggttcttctagcaaggagaagacagggagaatgactatcag

SEQ ID NO: 329077 - DNA, 122 bp, Homo sapiens
cacaatgatatccaatcacaattagcagtgggttagactaagcaggcgaatttccacatgcgtgagagaaactagtttataactggttagttttcctgtcatttattgcctggagaatgctt

SEQ ID NO: 329078 - DNA, 122 bp, Homo sapiens
ttctttataaaaatctcttatttggatataattgacatgcaataaattgcacatattcaacgtgtacaatttgataaattttaatgtttccctcgtgagaccatcaccgagatcaacattat

SEQ ID NO: 329079 - DNA, 122 bp, Homo sapiens
acgcagacatccaacacaacactcccacagaaacacacagcccggaaaattccgaggctgcgcagttctgcaggaagcccctcctgggagagagcagccccaaggaacacaggcgggcttta

SEQ ID NO: 329080 - DNA, 122 bp, Homo sapiens
cccggtgccacgggcccagcctcacatcaagctcgaaggtctgcagcacagtgcggtagccgccggaaatgggcgtgaacaggcgcatgacctccttgatgacgcagtccaggtagcgcagc

SEQ ID NO: 329081 - DNA, 122 bp, Homo sapiens
ggaggagcaacacggatggagttggagagagtacaggccttactggctgtgggtaggagtcgacattgtcttctatgcagtgggaagacatcagagttgaagctgggaagtgaacttttctg

SEQ ID NO: 329082 - DNA, 122 bp, Homo sapiens
tgagcatattccataatcagtgggaaagggagctgagcacatctgcacagcctcctgtttcggtgagtttctcccaataaatatggtgccagatggcccagtgtgtttgctcttaggaattt

SEQ ID NO: 329083 - DNA, 122 bp, Homo sapiens
tctctcctccctccttgccaacactttctgggtaccttttactgaagcacatcttggcatcgtttcagcctggtgtttgaaaagtattagttgaaacaacctagtgtaaccctttgctgatt

SEQ ID NO: 329084 - DNA, 122 bp, Homo sapiens
ccctgagctgcccagactggtgtctcagtaggtcctgtgccccccgcagtctactgtctccgggcccagctcagcactaggacttgcagtccttgtggcctacacttgggattgggcatagg

SEQ ID NO: 329085 - DNA, 122 bp, Homo sapiens
gcgagagcaggtggagatgcgcacggaggttgcatgttcacctccgggtctcgggcgccacggctgcccgtacctgttccagcaagcgtcagccaggaactgccgcgctactgattttccct

SEQ ID NO: 329086 - DNA, 122 bp, Homo sapiens
gaacttttatttacaaagaccatcttgttttcatcctaaagaggtgctttgtaaggggcccggaacaaggcttgcagtgtatgagcctgtcaagtatactgcctacagccccggcctcttcc

SEQ ID NO: 329087 - DNA, 122 bp, Homo sapiens
agatgagttgcctgcagttttggaggccttcagagcatttcactagacctctgtctgtgtcggtccagtgtctttagccaaggtgagcttgctcgtggtgtgaagtgtgccacgaaaatggg

SEQ ID NO: 329088 - DNA, 122 bp, Homo sapiens
caaaggactgggggctctggctttgctctcaccgagctcagggtggctctgccgggctgacggagctgcagcccctccccgagcctggggcttccccaccctaccctccactcccagccttg

SEQ ID NO: 329089 - DNA, 122 bp, Homo sapiens
cccccagccaggacccctcgcgctgttggacacgccagcctcccgaccctgcggctcctacgggaggtgacaaggaccctgccaacctggcctgaatggcccagtttgatacagatcaggtt

SEQ ID NO: 329090 - DNA, 122 bp, Homo sapiens
agcacctgaaaagaaaaccaaacaatgctaatagcagggttcttatttagactcctttctcgtcctttcccattcttctgagacccaggcccctagtcctgaaagtccccagttttgctttc

SEQ ID NO: 329091 - DNA, 122 bp, Homo sapiens
cgaaaaatgagactggaaaagcccaggcactggcattttgtgttgtgctaagtgttccctcgtcaccttgcagtccgctggcagaagtgtggagcggacacaggagaaggctgggatggtgc

SEQ ID NO: 329092 - DNA, 122 bp, Homo sapiens
cggccctataaataggcccagcccaggctgtggctcagctctcagagggaattgagcacccggcagcggtctcaggccaagccccctgccagcatggccagcgagttcaagaagaagctctt

SEQ ID NO: 329093 - DNA, 122 bp, Homo sapiens
agccctgagcacgggcgcagcccccaccccggaaaccgggaggctcctgtgcagagaaagcgcccttgcctcccgcccgctcccggggctgccccacccagccagctcccctacctggtgcc

SEQ ID NO: 329094 - DNA, 122 bp, Homo sapiens
gtcactgggagaggcagacccaccctcaatctgggtgggcacaatctaatcagctgccagcgagtccagaataaaagcagacagaacatggaaagactagactggctaagtcttccggcctc

SEQ ID NO: 329095 - DNA, 122 bp, Homo sapiens
agctgggcttccaccctggactccatgccgcgcctcctcgccagatagacgccagatagacgccagatagacgtggccagtcgtgctgtttcaaggtcttattccagtcaggtttttgtttt

SEQ ID NO: 329096 - DNA, 122 bp, Homo sapiens
tacagacacctgtgtccctacctcaatcaagaagtccccggtccttagtccggcttgccacgccaccccaccttcatccacggactccaggtactgtagggctgggaaagccggtgttggtg

SEQ ID NO: 329097 - DNA, 122 bp, Homo sapiens
agcggctcatcggccgcaggtggcacgacccgtctgtgcagcaggacatcgagttcctgccgttcaaggtggttgaaaagaacactaaatcatacattcaaattgatgttggaggtgggcaa

SEQ ID NO: 329098 - DNA, 122 bp, Homo sapiens
ggttgtttctctgtcaggcgtgatagccgcagggcgtggagcccgggagatttgcgaggacgtatggaaatgtgtgagaacagactacaaaggaaaaaaagccataactttaaaagaaatgt

SEQ ID NO: 329099 - DNA, 122 bp, Homo sapiens
taccgcgagaagggcaacgcatttaaactctcaggagcagagttttccacctccaagggacgccttccaaggcgtgcggcgtgcttctgccagagacagtgttcagttttaaacaaatgcag

SEQ ID NO: 329100 - DNA, 122 bp, Homo sapiens
gggtgggaagaagtctcacctgtttgtttgcaaagacaaggagtacagcatcccggagctcgtcctccgccagcattctcatcagctcttcccgggcctcatttactcgctcccgatcattg

SEQ ID NO: 329101 - DNA, 122 bp, Homo sapiens
cctgcttggatggagggtcttggctgactcccaaggagtgctttcagctgcacttggggccgcttctctcccttctgttgcaggctttctttcagagagctaggcgaggctgggctggtgtg

SEQ ID NO: 329102 - DNA, 122 bp, Homo sapiens
tagctcaagtttgggcatcaagctggggaaactgggtgaatctccaggaacttggtgctccggggtgggcaggattcgcctgacgctctccccttgtccctgcggctcccagctaggcggcg

SEQ ID NO: 329103 - DNA, 122 bp, Homo sapiens
gagtaggggcttggggaggacgcagtgtcctgggctgggacccaagagaccctgtggcttcgccgctaacccctcccagtccggcccagaataggagaccagctcaggcccgctgaatcgca

SEQ ID NO: 329104 - DNA, 122 bp, Homo sapiens
catcaaaacaaggaaagtctgagaaattgtcacaaacgataggaacctaaaaagacataacgactcaatgtagtgtggtacccttgatagaatactggaacaggaaaaggaaattttgcaaa

SEQ ID NO: 329105 - DNA, 122 bp, Homo sapiens
ggacataacagcaagtgcctcgtggaatcattgaatggatgcactaatcgctggaaagtgcgctgcttggcctaagtgatgagttagctgtcattatagttaggaacgaccatgtacacatt

SEQ ID NO: 329106 - DNA, 122 bp, Homo sapiens
cctgagtgggggcccttgtaaagcctccagctggcccgggggcctttgaaagggggaatacggtccaaacacactcagccgctgctttgccccacccccagcctggaagtcattgtgctcct

SEQ ID NO: 329107 - DNA, 122 bp, Homo sapiens
aatcactctaagtggtgttcctgtcaccctttaaggtagcctggtcagaattcctgcttccgggccctagcacctactctggcctgaccatttcagccaagggggaagggatgatgttgagg

SEQ ID NO: 329108 - DNA, 122 bp, Homo sapiens
cctgtgagtgtgctggggcgtctgcagtgaaggcctcctgagaccactccacggaaacaccgggaatccctgcagctgagcctgtctctcacgggaccgggaagctggagagagccccaacc

SEQ ID NO: 329109 - DNA, 122 bp, Homo sapiens
gggaggaatgacatttgggcacagacctcagcaaggaaatggaacaagccacaggcacgccgcgggaggccacctgaggcccaagagcccgtgtggaggctgactgcgaaagtctgagtaga

SEQ ID NO: 329110 - DNA, 122 bp, Homo sapiens
ccagtccccgcgcctgccccagagcggcttagaaactcagggcacagtgagagcgcagggcgcctcccgaggcttcacaccgccggccgggccagcggaggctgtgaccggagcgccccctc

SEQ ID NO: 329111 - DNA, 122 bp, Homo sapiens
ctacccccatggacctaggtgaggacaggcaattcaggcatttcctgcatttcccaagaccgccctggcctgccacgcccctataatgtgcctttaaaagcccaagaccgtcgctaggcaca

SEQ ID NO: 329112 - DNA, 122 bp, Homo sapiens
caaagttgggtctctgtgttcaccgggaggtgggcattggccaggtgggacggtctccagcgcctggtgcaaatctccaccaaagtgcaggaaacagcatcaactattactgcaaagttttg

SEQ ID NO: 329113 - DNA, 122 bp, Homo sapiens
gtgggcaggaagaggttacagcagccctggagcctgctgggctgagttagcacttccctccgcatccagaatatctcccaggaactgccccctttgcatcgccgcaccggggtggcggcgcg

SEQ ID NO: 329114 - DNA, 122 bp, Homo sapiens
atgctgaggcaggatgattgcttgagcctaggaggcagaggttgcagtgacctgtgatggcgccactgcagtccaacctgggcgacgaaaagaacctctgtctcaaaattaaaaaaaaaaaa

SEQ ID NO: 329115 - DNA, 122 bp, Homo sapiens
cctgggaccccagtgaccccggaaccccgagcatgcgcggcacggggcggccatgggccccgacccctgctctgactcacacctgcatcctggggcccaggcccgtgtgcctgagacccctg

SEQ ID NO: 329116 - DNA, 122 bp, Homo sapiens
gggctgaaatcctagttggccctaggatggtaagagaaagcatccactcttgtgatgggacggaattatgcaaagtagaaaaggtttgtcaggacctgtctccagaaaggatcaagcagaat

SEQ ID NO: 329117 - DNA, 122 bp, Homo sapiens
acgggccggctggaacaggttgtgttgatgaattgttaatgagtttgtcattcacaaaaacggaaaggaatttccgctccggataagccccagtgcaaacaagctgcaacagcgggctcggc

SEQ ID NO: 329118 - DNA, 122 bp, Homo sapiens
gtccagcatgagatcctttgctctatgaccaatagctatgaagtcttggagttcctaggccgggggacatttggacaggtggctaagtgctggaagaggagcaccaaggaaattgtggctat

SEQ ID NO: 329119 - DNA, 122 bp, Homo sapiens
acgagacctgccgagtcctcaggacaacggacaaaggccttaacgggcttgggaggtgagcgaagtcccgaacgatgacgggtggaacagttagcggccttcgggcggttggtctcgttcta

SEQ ID NO: 329120 - DNA, 122 bp, Homo sapiens
cgtgatccgcccgccttggcctcccaaagtgctgggattacaggcgtgagtcactgcgcccggcccgcagaaggatattaaagagcacctgcaggaattttttaaggggatgccgggggaag

SEQ ID NO: 329121 - DNA, 122 bp, Homo sapiens
tcttcaggcccctatctgggtgcacttcctggtatcccagcatctgacatgtgcctggcgcgcagcaggaactcacggctggctgtagcctggatgcatcagagacgatggcaaacccttct

SEQ ID NO: 329122 - DNA, 122 bp, Homo sapiens
tctgcaccgagccggtctcggccgggcgctgccttcacacgcgcccaggagtgtcacgtgcgccgctcacccccgggaaggaagcccctcgcccacccactccgctctactccactctttct

SEQ ID NO: 329123 - DNA, 122 bp, Homo sapiens
aggcgggtcagggggcggtgccgttaaacggatgctggaaggcgtgtggattcccacgcccgccttggccaacgtcactgtactccttcgtgatgtcacgttccgagttggcgtccccaccc

SEQ ID NO: 329124 - DNA, 122 bp, Homo sapiens
ggacgcccgggaaggggagggacaccgtcagggcagccaatcatatttctagccgcgtgacgctatgacccgcttgacgctatgacagcgggaaacggggggcgcgcccgtacatagggagg

SEQ ID NO: 329125 - DNA, 122 bp, Homo sapiens
attctcatgacaaattctataacataggaacttcttaatttccaattgagaaaactgtgacgcagacagaatatgtaatggctcacaaattatacatgtagtcattggtggagtagagatta

SEQ ID NO: 329126 - DNA, 122 bp, Homo sapiens
aaacaccgcctggacgccttggtcaaaaaaagaaaaagaaaagaaaaaaaaccagattcccgcttccctgggacagggagctcccttttgtagaagtagctaaagaaagcgaggcgccccac

SEQ ID NO: 329127 - DNA, 122 bp, Homo sapiens
tacgtgtgtgcgaggcaccccttgtttctggattttgcctgggtcttctcagcgggacggcgcgtgccggcttgcgtgtgggggcctcctgaagctgcctgtgccgcgacagggcctgccta

SEQ ID NO: 329128 - DNA, 122 bp, Homo sapiens
gcatagcgttcctgtccggaagtcctgagagggaaacgcccgcaaaggctggtttttaagcgggagcatctcttcactcgcagcaagtgcgcgtgcgctgcctctcagcccaaattggaaac

SEQ ID NO: 329129 - DNA, 122 bp, Homo sapiens
gattttctgatctagcaaagaccttcccacaccccgggaaaggacaagggaagggcttctcgcccgtgtgcacgcggatgtgatttacaagtttgtatttggctttgaagggctttccctgg

SEQ ID NO: 329130 - DNA, 122 bp, Homo sapiens
tctgccatgttctttacatggttgcaaacagtgtggagaaagagaaacacaatgttgatacggatgcataaacgagcttgttcaggcaaaggccttgcgggtgaaaaatgaggtaattaatt

SEQ ID NO: 329131 - DNA, 122 bp, Homo sapiens
aaagatagaatcaactagcctgcttcttttctggtggcacacagagttcatcagcaaccccggactgtgtagttaatgcctcacccagggaacaagggagaattaagatgtctggaatgaga

SEQ ID NO: 329132 - DNA, 122 bp, Homo sapiens
tgtagtactcagagtcaccactagagagagtgtgaacatcactgcaggaccatccaggctcgtgtgtgtgtgtgtgtgtgtgtgtgtgtgtgtgtgtgtgtgtcttcgatactgtacctggg

SEQ ID NO: 329133 - DNA, 122 bp, Homo sapiens
gttggatcagtcagaagtctgacaagtctcaataaattaaaatcaaggtgtcaatagggccgtatttcttctggaggctctacaggagaattcatttcttttccttttccaggttctagagg

SEQ ID NO: 329134 - DNA, 122 bp, Homo sapiens
tgtttacaaaagagaaatggaaaatgttctcccctttagcacggcgcaaatgtgaagggccgcatgcctctggagtgagtaagggctttgccggctgactcttactcaggggagctcacgta

SEQ ID NO: 329135 - DNA, 122 bp, Homo sapiens
cgcagcttcgaaaactcgggcgggctgttcttaagggcccagcccctgcttctccagtatcgagaagagccaagcaaacgccctcccctcccgggctgccgggcgcggagcggggagcagcc

SEQ ID NO: 329136 - DNA, 122 bp, Homo sapiens
acttcttcttgagattccccaccagcagggacgagcgtcccacctagaggacaggtaacacggaggccgtgagggtcaggtgggagcggcttccttgctatccatcctcatcacaattacac

SEQ ID NO: 329137 - DNA, 122 bp, Homo sapiens
aaagttcagcaaccacatgcaaaacaaaccctccgtgagggcagcaagtctccgtgaggacggctgggattggctgcacagcaaagccaggagaggctccatgaggagaacagcattcagag

SEQ ID NO: 329138 - DNA, 122 bp, Homo sapiens
ttgagtctcagatgggacacagtcctgtaagcctacagcggcatgttggtttatttatggcgccgggcttcttaatggaatggattatttccttggcgtgattatgatcagaggcctctggc

SEQ ID NO: 329139 - DNA, 122 bp, Homo sapiens
tgaactcgtgacctcaggtgatccacctgcctcggcctcccaaagtgctgggattacaggcgtgagccacagcgcccagctcctttagcgactctttaccccaagtagggaacttggacttt

SEQ ID NO: 329140 - DNA, 122 bp, Homo sapiens
tctttagagacacaaatgctgaggatctctcacctgagcatccctcgatgagggctgttgcgtcttgatttcatctgggtagttacaggcatcatccaccacgaagtttccaacccagagtc

SEQ ID NO: 329141 - DNA, 122 bp, Homo sapiens
tgagccacttttcaaaacacacttgcacagctgtgcagagcggctggatccactggcagccggcagagccataactcacactgtcaccactcccctcaaaccctttcagtaagcactttatt

SEQ ID NO: 329142 - DNA, 122 bp, Homo sapiens
aggagggctcgctgattaggcagaactaggatgggtgtggctctgccaccagcttcacctcgctgcaccctgcagtctgcctggccgtgtggcggaaccaccacatgaggacagtcaccaac

SEQ ID NO: 329143 - DNA, 122 bp, Homo sapiens
ggatgaactggtgtgcttgtgtgttgagtatgatacacatagagatctgtcccataagagcgtgtgtatttatatgtgactgaaaaaggaatatcagtggaccagataaaagagtccaaaaa

SEQ ID NO: 329144 - DNA, 122 bp, Homo sapiens
cttcagcgttttccgacttacaaagcaccaccaagcatttggcatctcttggagaccccacgcaggtctgtgcggttgccaagtaaggtggctggcaggctgaagtgggtggcctgcaaggt

SEQ ID NO: 329145 - DNA, 122 bp, Homo sapiens
atttttaagtcttttttacgcaggacctctgctcctggggagccctgggaagggcgattccgcgttgcctctaagaacttctttcctaccccacttcccagcccccaccactttcagattcc

SEQ ID NO: 329146 - DNA, 122 bp, Homo sapiens
aggccagctccctcagcgctgttgttgctgccagctgagctggtgctgcgcgtgcggtagcgattccttcgtttgtctgagcgggagtagcgctttgcggagcccggcctcccgcgggctgg

SEQ ID NO: 329147 - DNA, 122 bp, Homo sapiens
tctcttcttgaaacggtttgagcgtacactccccaaacagagagtccagaagtatccctccggcgctgcagggatgaccaagttaattttgtctgtaaccgtgagaggcttttcaatgaggg

SEQ ID NO: 329148 - DNA, 122 bp, Homo sapiens
ccaaaagccggagatacaagggaggtccccgtttacataggtgaagattccacaattgcccgcgagtcgtaccgggatcgccgagacaaggtggcagcaggtgcttcggaaagcacacggtc

SEQ ID NO: 329149 - DNA, 122 bp, Homo sapiens
gactttcctaatacatttccattttaactaggttatttctctatcaaaggaaaaagaatgcgtgcaagatgtcagtgtcttgggtgcacacacccacccatcctggggtattataactttgt

SEQ ID NO: 329150 - DNA, 122 bp, Homo sapiens
caaacctttgaaattgggtgtgtgcttttatgtttagagcacatttaaatttgcactagccgcatttcaagcactcagcaggcacagctggctaccacattggacagcacagttccagaagg

SEQ ID NO: 329151 - DNA, 122 bp, Homo sapiens
cctcctcctaaagctcggctgggaaaccgtccgcttccccaagacttgggggcttgtggccgagttgttttagttttcctgtaggattcacgggtggctgaggcaaacacgcttgaaggcct

SEQ ID NO: 329152 - DNA, 122 bp, Homo sapiens
ccacaaaggcagggccaaagcccatccttcaagggctggagtcagttaggtaacaggccacgggccccgggctcaggccactgcacggacccagggaacgggctgacagtccagcagaggcc

SEQ ID NO: 329153 - DNA, 122 bp, Homo sapiens
gtgtgcaactggctgcggaagccgcagccgctcgagccacgcaccagtttcccctcggcgcgccgctccgagttccgtccacccaggaggctgccatgggccggccctgcctccgcccagtc

SEQ ID NO: 329154 - DNA, 122 bp, Homo sapiens
attaacccaatcaattaaggatggacggaaagacccggcccagggcactgggaaaagcagcgcgctcccaggagttgctaggcacgcggagccggcctccaaagtgtcccctcggcgctgga

SEQ ID NO: 329155 - DNA, 122 bp, Homo sapiens
ttcctccccaagcccacctgggtgccctctttctccctgaggctccacttggtctctccgcgcagcctgccctgtggcccaccctggccgctctggctctgctgagcagcgtcgcagaggcc

SEQ ID NO: 329156 - DNA, 122 bp, Homo sapiens
gagcgtgcgctcaactgcactcaccctccggttccaaggccctcacggcccgggcgcccccgcccacagccctctgacaggtggctccgcttgtcttcgctgctgcaccagggggcggggac

SEQ ID NO: 329157 - DNA, 122 bp, Homo sapiens
aggaactcattgtacattagaatgtaaaatgctttacataacacatgtactcttttcagacggttcattattcacatggagtgtgtctaatgagcgttttagcttcttacttagaaaatata

SEQ ID NO: 329158 - DNA, 122 bp, Homo sapiens
gttcagagacccatctttgctttgcagggatttaagtaacgcggttgtgggacgtctgctcgttgccgcccccatcctcagccctttgaggggtctacccttgttttcctcctcaccgcccc

SEQ ID NO: 329159 - DNA, 122 bp, Homo sapiens
gcaagtgacttcacctctcatgtctcagattgctcatctggaaactagggatggtaatagcgcctcctagggttgattcaaggagcaaaggagttagatgaggtttctcagttaatcctctt

SEQ ID NO: 329160 - DNA, 122 bp, Homo sapiens
tggcgttggaggtcggcgatatggaagatgggcagctttccgactcggattccgacatgacggtcgcacccagcgacaggccgctgcaattgccagtgagtgtgaaaggagggtgggtgatc

SEQ ID NO: 329161 - DNA, 122 bp, Homo sapiens
caatactgtcgctgacattctcgtctatgctccagcagccgtacctcactccggtggaggcgggacttcctacagcacttccggccagagcctcaagcttcgctgctgggcagttggctgga

SEQ ID NO: 329162 - DNA, 122 bp, Homo sapiens
ccccaccctgcttgtgaagcaataatccaagatctcctggggcagacagtctggccacagcgtgtttctctgtggccccgtgcggggcgaccttgctacccaggcccacagtaggctgtatg

SEQ ID NO: 329163 - DNA, 122 bp, Homo sapiens
aaggcttggaaggaagcagaggctcaatgctggaccacaggcaagaggttcataaaggaacgaaaagtctaacaagggatccccaggcagcctccaaaacacatctggctagttcctgatgt

SEQ ID NO: 329164 - DNA, 122 bp, Homo sapiens
tccctcatggctgtatttctcccgctctacttaacaaaagtcagtgttcgcaactaaaggcggtcggtcttggcaccggattccgatgccgcccccatctcagcggaaaatgggaggaagga

SEQ ID NO: 329165 - DNA, 122 bp, Homo sapiens
ggtggccgacggtggtgtgatgttgggatggctgatacacggggtctcctccacaccgggcgatccctctatccatctgatgcctgagttcccttccttggtcaacaagcagccaacatgac

SEQ ID NO: 329166 - DNA, 122 bp, Homo sapiens
gcgccactctactccagcctgggcgacagagcgcctaaaataaatatgagaccgccaacacgcctgggatggtctgtctccacccgcgctcccaccaagcgctcttgcaacgcgcccagagg

SEQ ID NO: 329167 - DNA, 122 bp, Homo sapiens
tggtttaacccttccacaccttcatttgttgatgtcttgtgggtgggcccagcagttcaacgtaccacattcataattcttcatctttcacaagatttccaatttcactttccagttgaatg

SEQ ID NO: 329168 - DNA, 122 bp, Homo sapiens
gcttttcaattactcctggagactaagtgtgagacgcagtagtgcaggatgattggattacgcaaaacgagacagatgccatctgtgagccacgcgtaagctgctaagtgccaaaatgaaca

SEQ ID NO: 329169 - DNA, 122 bp, Homo sapiens
aaggcgatttcatattcccctgatgttctcaagtcccgatgcgtgtgagtgacagtcgatcggaatgatgaactgacactcggagctgcgtaattttctaaaggcaacgtagtaaaagattg

SEQ ID NO: 329170 - DNA, 122 bp, Homo sapiens
acacgcgaagcacacctccagcccaccctgtgtccacttcccgcgccgccttatcttccacgcaacaggctttctcccgcaacctagtcccgggaatcagctccgagggggcggggctcctt

SEQ ID NO: 329171 - DNA, 122 bp, Homo sapiens
tctgtgaagatctccccttttacatcctgagtacctttggaatatttcctctttgtggggcgcaaactttaaaaaatgccagatttcctacacagaaagacaagaagctttattacattgtg

SEQ ID NO: 329172 - DNA, 122 bp, Homo sapiens
tggaggtgcggcgtagagtgggggtctggggcagcggagggcagagaaagcaaaagggcccgcatgacacgctagagggctaggagccacagctgcggtaattagctcagttttgtcttgta

SEQ ID NO: 329173 - DNA, 122 bp, Homo sapiens
gggcgggcgacggtggcaccggcgggcgcgggccgctgctgttgatgatgtagtgggagacgcgcgagttctctgagacgctgagcacatagtccccggggctggtgctcgagtcccgcacc

SEQ ID NO: 329174 - DNA, 122 bp, Homo sapiens
ctcagttgacctaagccaatagaatgattggaaggggcacaaagaaagcctgctgggcttcgagcctgatgccgccttcaacttgctgtgtgatatagtataagtcacaaaccaatctgaac

SEQ ID NO: 329175 - DNA, 122 bp, Homo sapiens
cgcctaaactttgctccttaaacattactgctattacactatttttagcttgaacatgaacgccattgacccatcaaatgctttctcttttcttcattgatgtattcctgaaatacacaata

SEQ ID NO: 329176 - DNA, 122 bp, Homo sapiens
cgccagtcttcgccccccaggggcctcgtcccggggccgcggaggccacgtgcagttccccgcccaccctgaggtaccggccccgccccacgcccagctcggacctccaggattgcgggacc

SEQ ID NO: 329177 - DNA, 122 bp, Homo sapiens
tttggaggcctgaacccggcgcttgggcctaactgcccgcttgtgctcggccacggaagacgtcaatctgcggatggaagcagagccgcggtcccagtctgtgacaccaccacccctggatg

SEQ ID NO: 329178 - DNA, 122 bp, Homo sapiens
ctcttccacgtcttctccatttgactggcgtgtgaactcgttgctctcgctaaatgaggccgctgagatggaaacatagatgtgtttacggcagggtggcagtgcaggtaacagggaagtcc

SEQ ID NO: 329179 - DNA, 122 bp, Homo sapiens
ggattgctggcaaagttgacaaaccactgctctaagatatctggtttctgctaacactaacgtcctgagcctttgttctgatacaacatttttaatataaccttagatcttccaagtttact

SEQ ID NO: 329180 - DNA, 122 bp, Homo sapiens
taattgagacaattggacataatggttctttcagaatcccctcatcagctgggcagtgttcgtgccccggggagctgggagaaggcggcacatggcactaattactgctaatccttcctcat

SEQ ID NO: 329181 - DNA, 122 bp, Homo sapiens
ctgcacccggaaggaggaagctgcacagggtgtctgtggctggccccgggatcccccactcggggacttcctcttcctctcagggcaggtgcagctgccacagtgagacgggcaccccgacc

SEQ ID NO: 329182 - DNA, 122 bp, Homo sapiens
gatctgggaaatgtcttgagggtttgggggaatcaactttccactgaagttcctggaaaccggtcagtacaatttgtatttaataaagagcagccaacagtgctgccacagcatcttgtgag

SEQ ID NO: 329183 - DNA, 122 bp, Homo sapiens
ataaacttgttgaatttgttcaacgtaagcagctgaaattctgcgtggggtggtgatgaacggctctagcactcggtaaaaggtatttaaagcgcatgtagtttacaacactaacagcccgc

SEQ ID NO: 329184 - DNA, 122 bp, Homo sapiens
gaaaaggcggagcgggttttatgggagctgctgcacaagtctgaacgcggaggctgcacacggggagggcaaagccgccctggcaggagcccgagctgcaggcctcggctgggaagcctgtc

SEQ ID NO: 329185 - DNA, 122 bp, Homo sapiens
ccatgttccctttgcaggtgccaaatatgcaaatgacttctttccctcctgtgtctgacgcgtgggccaggaggctggacaacagctggacctgcctggtatcactgtctgtgtagcatttc

SEQ ID NO: 329186 - DNA, 122 bp, Homo sapiens
ttactgctacactgagaggaccattgcgaagcggctcgtcttgcggcggtgagacagccacggggcgggcggcgggcgggacgcgggaggaacgcgagagggagcgcgggcgccagaccact

SEQ ID NO: 329187 - DNA, 122 bp, Homo sapiens
aggaagtgctcataggctctaagtacttttgtttccttattaatgttcaccacgatctttcgcaatacagatgaaaagactgatgctgaaccaacaggtggtagacagactctaaagcctgt

SEQ ID NO: 329188 - DNA, 122 bp, Homo sapiens
gggatagcccagacaccttcctagggcagcagcggaagaaagaaggggacaaaataccaacgaccagaaagaagaaagaacttagcctcagtcaccagccactgggagctgatagtaactga

SEQ ID NO: 329189 - DNA, 122 bp, Homo sapiens
gttggcgtaggaggtgagtgaggctccggctcggcagcgtcgcagctgccccaggatctgcgccccggtcaagttgcggacttggagccggcaaacgcggagggctggtcccgcgcgtctgc

SEQ ID NO: 329190 - DNA, 122 bp, Homo sapiens
atgttgcctaggctggagcgcagtggctattcacaggcacaatcacactcactgcagtctcgaacccctgggctcagtcagtcctcctgcctcagcctcctgagtagctgggaatacaggtg

SEQ ID NO: 329191 - DNA, 122 bp, Homo sapiens
aaccctggagccccctgcccgggacgacctggtttctccaccctggggcacgaacatccccgtttgcaatccctcccgaccgcggcggcgaacttcatctagccccggctcaaccgagaccc

SEQ ID NO: 329192 - DNA, 122 bp, Homo sapiens
gttccttctgggaattgtggtctcagacgttccattcccagggtggcgccgctcggactccgcgtcccagcattccccgcacgagcccgggagcacttccgccctgttgtgaagtgggtgtc

SEQ ID NO: 329193 - DNA, 122 bp, Homo sapiens
gccccaaggaaagggggaagctgccgcgcggtgggcagagccaggagcaccgggctgaggcggccgggagcgcagcggcttctaggggtgagtgggacccacgcggccccacctgctcctcc

SEQ ID NO: 329194 - DNA, 122 bp, Homo sapiens
aatttcactttgttcctcagtggagccaggttctctgacaccaaggcagccccacctggacgggtgggatgttacagggaccacctaaggaacagggtgtaattgagatttgcacgagggtg

SEQ ID NO: 329195 - DNA, 122 bp, Homo sapiens
tctggggatgcaaactcagcctgttgaatagtccttgaaaatggcattttaaaagaacatcgagcagttggaagacctatggggaaattgacagaatccagaactagacagtcatgttggag

SEQ ID NO: 329196 - DNA, 122 bp, Homo sapiens
tttaagctgccagttaagatgcagctccttcatcatcacaggtgaagcaccaatgcctctcgcacgtgaaatccgtacgctcctagagtcttactacctaatgcatttctgcaatctgggac

SEQ ID NO: 329197 - DNA, 122 bp, Homo sapiens
agcccatttgcttgaggatccaaaaggcttaaaatatgctgacttaatgcctatgctgagcgactgtgggtgtaattgcgacatttctccagatctttggcattttgtccatttatatatca

SEQ ID NO: 329198 - DNA, 122 bp, Homo sapiens
atctgccttctcacaagccacgtgttgtcttggatgcctttcagactaatcactgaaggtcgaggcaaaaagcacttgagtttcacaatgtctttgaccttctgatcagatttccaacatct

SEQ ID NO: 329199 - DNA, 122 bp, Homo sapiens
gcgtcaaaaagcaacacaaatgcatgtgttcatcaaaagaatggtccagacggtgagggccgtgggcttcagcaaaggagaaacaggcactagtgtcatcagtgggaacttatcgcaggctc

SEQ ID NO: 329200 - DNA, 122 bp, Homo sapiens
taagtttaaaaaagatgacttcctgaagcggaagcttgtgagacatttaagatgactttgcgcatgttagagttaaaaacatcccaaggttgtaaactgatttcctgcaaagatcttaacaa

SEQ ID NO: 329201 - DNA, 122 bp, Homo sapiens
gtggcccggggtgtagtggggtgaactgcagaggaacagaccaagagtgagcttgtgggccgggatcctccccgcattagcagcagccccacaagttccagaaaggagcagccagggagcag

SEQ ID NO: 329202 - DNA, 122 bp, Homo sapiens
tgcagcagtgcggtgaggcgagggtgcgaggcggctaagcaagggatgggcccgccgtggcgagccgctgggccgtgttccgcctcctttcgggctttccgcgggtgtctggggagggaacc

SEQ ID NO: 329203 - DNA, 122 bp, Homo sapiens
cccgatgcgtaggccgggcaacatggcggcctccatgcgggcgtcaacgtccgatccaagcgccaaattcaaatttgcggccatcttgagcgggcggaattcagtcgcgcgcggtgcagtcg

SEQ ID NO: 329204 - DNA, 122 bp, Homo sapiens
acggagatgggaagggaaaactaggttactgggaggctgctggggtcagctgttctcacccgcttttcccattcagttctcttctcatcttaaaggttgggatcattctcgttttctaggta

SEQ ID NO: 329205 - DNA, 122 bp, Homo sapiens
gctctccccctgttccccgcacctggacgggactctgcacagaagagagtctcccggtctcgtgtcaggctctgagttcatccagcttcccaaaatccatgttgatatgaacgttttctccc

SEQ ID NO: 329206 - DNA, 122 bp, Homo sapiens
ggaacggttgggtcctgctactgcctccgtggggcagggagcctcgcgagaccagcactgcgccctactcggtccaccctgtccccgctccgcgctaggggctcaccctgggaacaggggtc

SEQ ID NO: 329207 - DNA, 122 bp, Homo sapiens
acagacctcaaatgacttttccagtgtgaagttaatggtacaaaagcaaggtgtcacatccggagataaacatttattacagggactggaaggctctgttccggtataatcaatctgcaaga

SEQ ID NO: 329208 - DNA, 122 bp, Homo sapiens
gagctgtgccacacactcccgaggctgggacgggagagtccctggtaccccacatgattccgtatcaacccagtgaagcccacatttcaaagtcttggccttgtaggtgcctgactcccaaa

SEQ ID NO: 329209 - DNA, 122 bp, Homo sapiens
atgtaataagagtatcagaagcttgaaccaatttatatgttaattgtttggcttgcttgccggggtggtgaggagttagattcccatagttaaattttcagggagactttttcccacacaga

SEQ ID NO: 329210 - DNA, 122 bp, Homo sapiens
gtactgtatattaaacatttaaagtgatgttgctactgcttccttatctggaccattaatcgggaagcttcccaagaacatggttttataagtgaataagaagaaaggagaatgaggaagag

SEQ ID NO: 329211 - DNA, 122 bp, Homo sapiens
atgataattgtaaacattgctttcctggatattctgccattatgttggcccttcctcacacgttaccactagaatctttaggagcatcttcttgccaacataaactgtgtgaaaactttaca

SEQ ID NO: 329212 - DNA, 122 bp, Homo sapiens
ggcgcgcggttggaccgggcgggaggagcaggctcttccatctcctgattgggtctggaccgcaagggggcggggtcttgaggggttctgcgggccggcattgggagccgcagaaggagggc

SEQ ID NO: 329213 - DNA, 122 bp, Homo sapiens
ccctcccgcttcctctgaatcccaaagcacagacctttaaaaaatggtgatataagcttacgtcttgccacccttattatttcagttatttagtaggaaagtccatgaataaaaatcagatt

SEQ ID NO: 329214 - DNA, 122 bp, Homo sapiens
ttttctttttttcctttacgcatgtaaccacggtcctgcatcgtgaaacggtacgcgcgtcggtggcaaaagaaaaacagcagtggctgcaaagctaagggccctcgctttcagaggagaga

SEQ ID NO: 329215 - DNA, 122 bp, Homo sapiens
cagggaaggcgacctcttcacttcctactaatcctgctgcaaccacagccgccacctgcccggcctctgcacgcgccagctgggggcacagctcaggcttctagtggccttcctgcctcccc

SEQ ID NO: 329216 - DNA, 122 bp, Homo sapiens
cagggaacatgcattcattcacctgaagtttgcaggcaccattcaactgttaaagtgtttcgcatccgtttttctattacttccatcctataccgactagctccacttaacatgtggagaaa

SEQ ID NO: 329217 - DNA, 122 bp, Homo sapiens
ggttctgaggcgggagccattggttctttctgttgccctcatagaccgtatgtagcagttcgcgtgggcacagaacccacggtttcccgctagttcttcaaaggtgagggcaggtgccccga

SEQ ID NO: 329218 - DNA, 122 bp, Homo sapiens
caaggctaggtaggagttagtgctgtcccacttgtcagatcccagcaggacacaccaggccgcccactggctggctctaatcctcctctacaggcttctgtccctctgggaccttaccttcc

SEQ ID NO: 329219 - DNA, 122 bp, Homo sapiens
tttaataactcagttaatgctgtctaatgagaataaaagggtcaagaaacatgaagctaacgtcaaagtatcatgttgaatgttcactagttatatgagtaattgggaataagatttatgtg

SEQ ID NO: 329220 - DNA, 122 bp, Homo sapiens
aatttaaagcctgggtttaaggtctgtagaagctgcacaggtacactaattttagtaagacgggcgccaggaaaaagaacaaaatagtaggggagaaatattcaggcatcctaaaaaatatt

SEQ ID NO: 329221 - DNA, 122 bp, Homo sapiens
gagagactggaagggtttcacttccgcctggctgcaggaaccacaagttccagactaggtcgtaattggaataatcacagtcaaaatacacccagatgctctcacacacccagacgcgcgcg

SEQ ID NO: 329222 - DNA, 122 bp, Homo sapiens
cccgctcccgccccgtgtttctcctgggcctccagctccgtggagagagctgagagttctcggcccgcgggcttcctcaccaaatccccaaaaaccgacgcaggcacagagggctgactgtg

SEQ ID NO: 329223 - DNA, 122 bp, Homo sapiens
ctgggcttggtgctttccacaactgaggccacctggtattcccaaagagaacagaaatttcgttcaagctttacgggaagcagataaaaattaaaagatgtgagggatcagtgctccaggaa

SEQ ID NO: 329224 - DNA, 122 bp, Homo sapiens
gcacagggatctgagtagtcattttcattgtcagccatagatttttattgaattcctatacggaaaccttcatctgcttagccacacgagaggagcattgcctctcatatgctcttctcagt

SEQ ID NO: 329225 - DNA, 122 bp, Homo sapiens
ctcccacagcccttcagacaaggggtacgaggaacggacacagctcctctgcctcattcccgtctgagcactctggtcaactggcactgggggataaaacctgagagatgtgcccccagtca

SEQ ID NO: 329226 - DNA, 122 bp, Homo sapiens
atacttccttctatttcctacccactaacaactcattgtttgagatactttgatcacatccggtattcatacctttgctcatgcaccgtaccatgtgcccagaataggctaccctgctccca

SEQ ID NO: 329227 - DNA, 122 bp, Homo sapiens
tggattcatcttactctaccctagggggcctaggaaacttcaggctttccagtgcctagacggagcatccctgcttcctagtatcagcttccttcactgtgtagctgccttagaaccaagct

SEQ ID NO: 329228 - DNA, 122 bp, Homo sapiens
gggggcaggtggagatggcctgggcctccaggggagaactggctgtctccaccttggggccgagagcggcaggggagggttggtgatggggtggatcctccagcgggtcccagttcccggag

SEQ ID NO: 329229 - DNA, 122 bp, Homo sapiens
tagagttctacaatttacagttagtagacaagaatggttctcaaagatgtagtctctggacgagcagcaccagcagcacctgagaactttttataagtgcaaattctcaggcctcaccctga

SEQ ID NO: 329230 - DNA, 122 bp, Homo sapiens
cggcgtcgacgcggggccgccttgcccgatggaggcgctggtgggcagagcgcgggcaggcgtgggccaggaggcgggggcggccggaaggggggggccggggccggccgggcctcacgcag

SEQ ID NO: 329231 - DNA, 122 bp, Homo sapiens
cctcggatagaaaccagatgagcctgctggggctgaagggggaggttggtggggggtgcacgtggccccttgctcacccccagctcctgttcgccatgaggtgacagcgaggacagccgcct

SEQ ID NO: 329232 - DNA, 122 bp, Homo sapiens
tcccacgctgccccctgctggcttctctacccaactacctctagcgctcccccgctccggcggggtaagctcactaagctaatcgcccctgagggcccactaccgttcttgcccccccagcc

SEQ ID NO: 329233 - DNA, 122 bp, Homo sapiens
attgagaacgtcaagcggggccaacacaagaagacgctggagcggctcttccccggcttccggccagcggtggaggcctgctacttcaactgggaagaggcctacccacttcctggtgtcac

SEQ ID NO: 329234 - DNA, 122 bp, Homo sapiens
ttgaaaagcctaaattaaagaacagatttggtcacacacaaaatccagtttttacagctgcgcattttttgtcacatttaaaatcaatcaaggatataaaaataaggatagttgctataatt

SEQ ID NO: 329235 - DNA, 122 bp, Homo sapiens
agtcccgggctctggtgacgccgtggccgcaggtcagatttgggagggcttttcccggcccgcgggcctgggcgctccgggggagggagctccaagggcagggtggcgggggagccgcagct

SEQ ID NO: 329236 - DNA, 122 bp, Homo sapiens
tcctggctgtctctcctggggaccagggacaacaccccaatacatgcagaaatgtgcacgcgagcacacacacacacttaggggtaggaaattattattaaaactatttcactgtttttttt

SEQ ID NO: 329237 - DNA, 122 bp, Homo sapiens
ctgtgttctaaaacgcaaaggcccttaagtccctctcctcaccattccctgccctgtcaacgtgtaacccatgaaaaaattatctcacatagaaatgtggaagacagccagacacagtggca

SEQ ID NO: 329238 - DNA, 122 bp, Homo sapiens
gcggcggcacgaggaagctgtgcaaagccgaaggggcagcctcagaccaggaaccttacccgtctggcgggtcttatggccgagtcaccgtggcggcgcggcagctcgggcccggttcttcc

SEQ ID NO: 329239 - DNA, 122 bp, Homo sapiens
taaataaaataacccctctgttgtgctcttgcagcattctgaagtccatggagtttgcaccgtccgagggcgctgggacacaggtacgtgtctcacctcaatggtcagcactagcatcagcc

SEQ ID NO: 329240 - DNA, 122 bp, Homo sapiens
gagggacgcgggccaggggtgcggtggggggcacggggtggaactccgggtcccgtagggcggggtgggggagtgggtggggggatggcccacctgccgtgggagcgggtccggaggaagct

SEQ ID NO: 329241 - DNA, 122 bp, Homo sapiens
gcattaaagtttttctgtaatgtatgtcaatacactgctcatatgttgtgagcatgaaatcggttaatccacagaagcacttatatggctcagtgcttagaagtatctattactaatgagta

SEQ ID NO: 329242 - DNA, 122 bp, Homo sapiens
gcccttcccgcggtcgccgccagggggcggcaggagcggctccagatgacagcgggaggccgcaagaggggagggaggaaggaccgagggagcgcggatcccgctctcggatcgcaaactct

SEQ ID NO: 329243 - DNA, 122 bp, Homo sapiens
gtccagggcctggacctggcctggggcaggataggggcctaggcctgagagccaggctcccgctcccctcctatgtgccctcaccaccctctgagccctcacctccctggggtcccggacaa

SEQ ID NO: 329244 - DNA, 122 bp, Homo sapiens
agaagggaagcaagggcttctttggcctctgagcccctcgaagcagtcagccacctcctacggactccttgaactacctgccaagctgcttgagcccaggactgaccctcaagtccagaggc

SEQ ID NO: 329245 - DNA, 122 bp, Homo sapiens
cgaagcctactccttccgtcctctccccgcccacctccctctcattcctcccggcacgcgcggagagggactgtgattgttcactttacacgtcactctttgtgacgtccccggcgggggcg

SEQ ID NO: 329246 - DNA, 122 bp, Homo sapiens
ggtacctgtgggtgggacagcatgagagattgtacacacttggtgcaggggtcctcaggacgataaggacaattcagtaactgccctccctcatgaccttgatgactgccccctgctcggct

SEQ ID NO: 329247 - DNA, 122 bp, Homo sapiens
gcgagcgctgtgcggtcagggcggggctcctgtgccctgtcggtggcgcagggagctggacgcggcccgttaccgccacacttcagccctgcttccccgtcacttttcagtcctcctcggga

SEQ ID NO: 329248 - DNA, 122 bp, Homo sapiens
tggagagcgcctgaacagaagctctggccaagggagcccctgaggctacttacctgaccccggggcttcctctgatctctggaacagagatcagaagtgatatctaaaccaggttgtgggaa

SEQ ID NO: 329249 - DNA, 122 bp, Homo sapiens
tttacatttcaaaaacttcactctggcccataatccattttacagatggggaaatggaaacgtgaagaggcttcataatttatctaaggctacccagtgggtcaagtggtagagacaagact

SEQ ID NO: 329250 - DNA, 122 bp, Homo sapiens
gcacccagtggtgagagtaagcatctttgactgatgacaggtcttgaggtggatagggggcgctttcagtattttgccattaagcatagtatttgatgcaggttttttttgattgatgcagg

SEQ ID NO: 329251 - DNA, 122 bp, Homo sapiens
gacgcagcttgctgtccggtttaggatctgtcctcctttgctgggggcctctgagccaggcgcccctacccagcgaggggacacaagtgagtggctcccagaattacccggagcctccgtgt

SEQ ID NO: 329252 - DNA, 122 bp, Homo sapiens
cagacacagcctgcaatctcacctccgtcaacacagcaaatgtctgtgtctcaaagacctcgagatagagcttcctatgctttaacccttccaggggcacacctttatttctgggcaactca

SEQ ID NO: 329253 - DNA, 122 bp, Homo sapiens
gggctgattcagagagactcagaatgagcacaggagagactgccgggctccccctggccccggggcccctgaacacaggccaagggctgtggaccttctgttgtcacagctgcccatccagg

SEQ ID NO: 329254 - DNA, 122 bp, Homo sapiens
ctcgtgctgtgccgttttttaagcccaatggaaaagcgcagtatttgggtgggagtgacccgattttccaggtgccgtcagtcacccctttctttgactaggaaagggaactccctgacccc

SEQ ID NO: 329255 - DNA, 122 bp, Homo sapiens
caacgccaagacggctgggaagccccaggccagcagcggaagtccactcggcccgccctgcgactttgaaaccggtgccccggaccactccttggagacggtggcgcctcttgcgtcatcac

SEQ ID NO: 329256 - DNA, 122 bp, Homo sapiens
ctgccacgtcaagaggaggggacggggcgtgagggcaggaagggggcaggaaggggcgggcgcagagttaccagggcaggccaccggacccctgagcttgcttaataaccggaggatttgag

SEQ ID NO: 329257 - DNA, 122 bp, Homo sapiens
tcttgatagggcttcaactcacatttgagatcaatagttttgcacagtgattgtcaaccccggctgtacattagaatcacctgggcagttttttaaaactacaagtacctgggcttcacgcc

SEQ ID NO: 329258 - DNA, 122 bp, Homo sapiens
ctcggcgccttcaaagcacttggtgaaacctagcctaaagcgttgtcccaccatgctctgcggcgataacggcctttggcgggaaagagtctcggaggcggggccaaagggggacggcccgg

SEQ ID NO: 329259 - DNA, 122 bp, Homo sapiens
ctctacaattcttcaataaaagggaacaaggctctttggagaaatggttgattccaggggcggagcaaagaaaaaaaaagtgatcccagaacatcttaagtgccagaaagtaaggaagtgat

SEQ ID NO: 329260 - DNA, 122 bp, Homo sapiens
gtccctagctcctcagggactcctctgcgcgctccgggatccatacctggcaagcaatagcgcggcgaaagccgcacgccatgtccacctctacggaagtgcgccgcagtccgccagttccg

SEQ ID NO: 329261 - DNA, 122 bp, Homo sapiens
aaacatttcaacatgtattgactaattcctgtaaaatacagaaagtgcaacatcaccaaacgtgcatttcccaggattcattttagaattctcatgaaaatttaataatagtatttcagtta

SEQ ID NO: 329262 - DNA, 122 bp, Homo sapiens
ttagcccttcaactgaaggatgtgctatcaccaaaggatagtgccaatctagtgggaagccgctgtgggtctgagtcacaggacttagtcttcactcctcaccctagctccttgcaagatat

SEQ ID NO: 329263 - DNA, 122 bp, Homo sapiens
ctctgtgtctggcctgaggggcagggacgttcctagaggcaggcgctggccacctctggccgaggacgccctaagtggggacgggagtgaacccttcatcaaatcccagctggcgggtctcc

SEQ ID NO: 329264 - DNA, 122 bp, Homo sapiens
agcgggctgtgcggaggcagccgggagaacagtcggctccgaggacaagagtgatgggagcgccccggccccgcggaatccatcattccggagggaaccttcggcaggcttcattaggctcg

SEQ ID NO: 329265 - DNA, 122 bp, Homo sapiens
cccgcccccgccctcacctgtccccgccctcacctgccccgccctcacctgtccccgccccgcagggagctcgaggagcagcacggcatccactgcaacatgacgttactcttctccttcgc

SEQ ID NO: 329266 - DNA, 122 bp, Homo sapiens
ggcagctacaaatcaaaggctggtgccgtggggcgctaaccagagtctgcgtccagagggcgctagtgtagccccgagcagtttcaagactgactgtaaaagtctgtctctttaggacagga

SEQ ID NO: 329267 - DNA, 122 bp, Homo sapiens
gaagacaggcagcagcccagaccaagcttctctgtgttccgtgtcctggtctagaaccagcgatgttctttctgaccagtgctttttggaaggtggctgaggtctgggctcaggtctgggcc

SEQ ID NO: 329268 - DNA, 122 bp, Homo sapiens
agccaccacacccggccgaaatggaatcattttcagacctttgaaaagcagccagttcgccgggcgcggtggctcacgcctgtaatcccagcactttgggaggccgaggcgggcagatcacg

SEQ ID NO: 329269 - DNA, 122 bp, Homo sapiens
cgaggctctgcgccctgcctgcccgcccgactacaccctggccctgcgccgggcaccggacgatgtgcctctcttggcccccggggccctgaccctgctgcccagtggcctggggccaccgc

SEQ ID NO: 329270 - DNA, 122 bp, Homo sapiens
gggttccgcagcccccgccgcgaccaccagcaggggccggaggcgccactgctgcagcagcgccgaggccgagactcagacctgctacaccagcgtgaaggtaaatgccccgcgctggcaca

SEQ ID NO: 329271 - DNA, 122 bp, Homo sapiens
aattaaaacaattgttgagtcgaaaacctatgttcaagtcttggttccgctatatattagcgctagaaacttgcaataattactgaccctctctgagcttcctaacaggatttgttgagaat

SEQ ID NO: 329272 - DNA, 122 bp, Homo sapiens
ccagcgtaactcgcaccctcatcccctttcccgaggaatccaaactccggtttaatgagtcgtgaagtgtgagaacttccggagcccgcagcgcccctgatgccaattccagatgtgtgagt

SEQ ID NO: 329273 - DNA, 122 bp, Homo sapiens
agtgttgggattacaggtgtgagccaccgcacccggcctctgagaaatatttagattgtacgcctcaaatgggcagggactgtgtcttacacttttgtatttatgctacagcttacctaata

SEQ ID NO: 329274 - DNA, 122 bp, Homo sapiens
atttgcttcctagctgattctccagtcctcaggacattcacaaatggcaaattataagcccgtgttgcctctgctgactgcaacttgggcctgtcagcccagaataatatttgcatgatgat

SEQ ID NO: 329275 - DNA, 122 bp, Homo sapiens
gtgcgtgagtgcgtgcgtgcgtgcgttcggcgcgcggggcgtgggcgcggcacctgggcccgggcaccgccacctaggccctagctccgaccagtggtgttctataaacgcttattacatca

SEQ ID NO: 329276 - DNA, 122 bp, Homo sapiens
ctttacccctgaggccagcaagaccaggaccccaccggaaggaacaaacaactcctgaggcgctgccttctaagagctgtaacactcactgccacactcactgcgaaggtctgcagcttcac

SEQ ID NO: 329277 - DNA, 122 bp, Homo sapiens
ttactttttagcttccgctaagtacttggcggctcgccaggcccggagaattgtgggaagcgaaaacctccccagtataaactgccagctttaagcagccctgacagttctgctccttccaa

SEQ ID NO: 329278 - DNA, 122 bp, Homo sapiens
gaaacacctgcggcaccgggaagagacctcacacagtcaccctggggggaaaccacactgcgtccccactctgaccccagagtctcttcccagatcccctatactgcctctctgacacccac

SEQ ID NO: 329279 - DNA, 122 bp, Homo sapiens
atcccggccacttggcgctgaatgtttcaagaccatcttttaaaaataactgctctaggccgggcacggtagctcacgcgtgtaatcccagcactttgggaggccggggcgggcggatcacg

SEQ ID NO: 329280 - DNA, 122 bp, Homo sapiens
ggttgccccatgtgggtagtgtgagtctctctctgccctggctgtgcatgtgcgtgtttgcgtgcgtgtgtgtgtgcacacacgtgtgtgtgcgtgtacgtgtgtgtggaaacagcctcacc

SEQ ID NO: 329281 - DNA, 122 bp, Homo sapiens
ctggggcctggcggagagcaaagtccccaaaatgtgggcagagaggacgccatgggagcccggggcagcccagagcccacctgtagcggccctgggaggagtgatgggcggctttgctgtgt

SEQ ID NO: 329282 - DNA, 122 bp, Homo sapiens
gagaggtcccagcgagctctggccagatgaagggctaccttgattgacttcggtagctgccgcatggggtcctgggctgcgagaggggaccctgaatagtgccttggtcttttgtggctatt

SEQ ID NO: 329283 - DNA, 122 bp, Homo sapiens
ctggtcagctgggcacagaaaatgcacacagacacacatgcagagacacccaggcactcacgggtctcttggcctccagctaatcagcaggtctgttaggattcaggcactgccctcctccg

SEQ ID NO: 329284 - DNA, 122 bp, Homo sapiens
aaaatctgcttgtggacctgcgctccggagagctcaagctcatcgacttcggttcgggtgcgctgctcaaggacacggtctacaccgacttcgacggtgagcgcgggcgcggggcagggaac

SEQ ID NO: 329285 - DNA, 122 bp, Homo sapiens
caacccttaatcttttgtcaatatttgcggactgaaaacacgacaaaccaccccctgtgccgctcagagtgtagacactgactgatgggaccaggtacaaaatcccctgggacaaaacagaa

SEQ ID NO: 329286 - DNA, 122 bp, Homo sapiens
atttaaatgcataagcctcactaggctggtatttactctaattaatgttgaacatgcttccgcagaaggcctctgtaggatttcttttgtgatttagatgtactcatctctctttttgagag

SEQ ID NO: 329287 - DNA, 122 bp, Homo sapiens
ccccgcgcggcctgggggcgctgcggcgggggcaggcgaagactcgggccttgggggttccgggggtacgcggccacgatcgcagggcgggagtgctcctccggcttttctccccccgcgtt

SEQ ID NO: 329288 - DNA, 122 bp, Homo sapiens
agctataaagataaacttttcagaaaactgaagatgttttgcccttttaacttcttccctcgatcccccaatatgcacaaaccaacctccctggttgtttgttacccaggacagcagtcact

SEQ ID NO: 329289 - DNA, 122 bp, Homo sapiens
agccgcagagaaagcggggccggcaggaggaggcacgggccaggacttacctggcggcagcggccccacacctcctccaacccggactcagttgtaacaagaacctgaggccgctggagaaa

SEQ ID NO: 329290 - DNA, 122 bp, Homo sapiens
ggaacatttcaggtgattccagttcctccaaatggggaaaatcaaacattagaaagacttcggcgctgtgcactttgctatggtaagaccaatgaagagaattgactgtgctgaagagctta

SEQ ID NO: 329291 - DNA, 122 bp, Homo sapiens
gagcagcagaagccttttgctggagctttctctgatcctccctgtaccacctctgcccagcggctctccacaccacagcttagtcctgcagacacctggggagaacagacatttctgtagct

SEQ ID NO: 329292 - DNA, 122 bp, Homo sapiens
ttcaaaatacaccctagattgcttatggacacacacttgtgtaataaccatctgcacatgcgatgctgtacattctgcagtgggggagggaatgggagttagtgtgcatcctgcctgtcata

SEQ ID NO: 329293 - DNA, 122 bp, Homo sapiens
gtctgtacttgatcttagtggcaaaactttcaacttttcaccattatgtgtgatgtcagccgggtatggtggctcacacctgtaatcctagcactttgggaggccgaagcgggtggataact

SEQ ID NO: 329294 - DNA, 122 bp, Homo sapiens
cctggagtaccacaagcagccacaaccaggtcagctgtaataagtacaataataaatatacgctgggtcttttagggtggggaccaataaaaaaattcacctctgcagagaagctccgctgc

SEQ ID NO: 329295 - DNA, 122 bp, Homo sapiens
agctgatcatccacatcacatcacatgggaagctaaaaattaaataaagacagatgtcaccgtccgcacctccatggagaatctggagtgggggctcaggactcagatggtcctgctgatga

SEQ ID NO: 329296 - DNA, 122 bp, Homo sapiens
agtgtgagagtcagagtggttaaaggacttacctaacgtgccatagctagaaagtggtgtcgagctggggccagagatcctgagaatcttatgatcaatccagttcattaggtacccaatag

SEQ ID NO: 329297 - DNA, 122 bp, Homo sapiens
ccccctggtatcaaaggtagaatgctgcgtcaaatttaccatagatcagatgcgctacgacgcccccgccccccttaatccctttccatgtcgcagcaaaataatgggcgattgggggtagg

SEQ ID NO: 329298 - DNA, 122 bp, Homo sapiens
taccgcggctcctcctcggggccctcctctccggccagagtcagcacaacacccagatgacgccactacacggcctgcgggagctccggcttctcgtcctccggtctccaccctgagggagc

SEQ ID NO: 329299 - DNA, 122 bp, Homo sapiens
gggctaactgggagctcgggcccacccggtgtggcccacggagaactcgtgtcaccccctcgaggggccctgatgccgcctgacattctgaccccaagcattttttttggtctccctcaccc

SEQ ID NO: 329300 - DNA, 122 bp, Homo sapiens
gtcgccattgagcaaagctaatattctcccagcatatggtctaaaatctttgctagagatcgggaaaaagaaacaaacaaacaaacaaacaacaacaaaatccttaagcttcctctcccaag

SEQ ID NO: 329301 - DNA, 122 bp, Homo sapiens
aggtgagaaaaatccaactgggcccagaaaccagctcctcctcccagtcccaccgagggccgagaaagagctcaagaaaggacaaggaaggtgagaagagccccgccctccgcaaataccaa

SEQ ID NO: 329302 - DNA, 122 bp, Homo sapiens
ggctgtacttcatgaacatttactgaacacctactatgtgccagactttttgctaggcaccgcaagagctatagaagcaagcgagataacatctacgttaatatgtcaaacttttagtgcat

SEQ ID NO: 329303 - DNA, 122 bp, Homo sapiens
cattcttcctctcttcaggttcggtatccccataagtaggtcttccacaacttcccatatcgaaccttactgctctgattccccaggataaaaagatatgactaattgtttcagatattaaa

SEQ ID NO: 329304 - DNA, 122 bp, Homo sapiens
gtctttgctctctggttggggggtactgttcactcactagggcagaccttcttgactattcgtctaccttactgtggccccaacattattgacagctacttctgtgatgtgcctcttgttat

SEQ ID NO: 329305 - DNA, 122 bp, Homo sapiens
cttcatcatacataccaacccatgactattatgcatggtagcaaacagcatcagaacatccgagaaaatcatgtggttcagaaacacggaccaatgaagtggaatttcatcactactgtaaa

SEQ ID NO: 329306 - DNA, 122 bp, Homo sapiens
cgaaaggttgacttctgtgcatcactgttcagcttacaaagtgcataatagagaacatttcgaaatacagaaaaatacaattcaaaattcacatatcccatctcacagagaaatgaactagc

SEQ ID NO: 329307 - DNA, 122 bp, Homo sapiens
agccggtcacagctgcagactgtggcttgcctgggctgacctgggggccagattcccctgcggttccgacgcctccctgcctgtttacctcgccttacaccaagagtggtggtggggacaga

SEQ ID NO: 329308 - DNA, 122 bp, Homo sapiens
ccagagagggtggccaggtgggcccagccccgcttccccaggtgactcccagcgcttaggcgcaccagcttcaccccgatgcccagtgggaaatcggaaccctcctaaattctttcccacct

SEQ ID NO: 329309 - DNA, 122 bp, Homo sapiens
ggccacgacctgccaggcccgctaagcccctcccgcctgtttctcatttagagcaagccccggctgcagcccagacattccagaggggacagtcagacgccaagcccgcccatggcttggga

SEQ ID NO: 329310 - DNA, 122 bp, Homo sapiens
ctaacaactgagctagattggattttcaagccacccagtcttgtgtaaacgacctcataccggtcttttttaccccctcagaatagaccatgtatagattcgttgatgcatgacgaccattc

SEQ ID NO: 329311 - DNA, 122 bp, Homo sapiens
actagtctctaggcaaacactccactcaaatagagcacaacacacaaattagcctttatccgtcttatttcccactacctggtagcttttctgtcttctcctcaaaccactcaactcattca

SEQ ID NO: 329312 - DNA, 122 bp, Homo sapiens
aggcgacacctcgcccactgccgtgactatgcccagccccagccaaagcccgcccactgccgcagcatgccacgccccctcccggcccgcctcgcagggtcatgttcaaggtcctgcccacc

SEQ ID NO: 329313 - DNA, 122 bp, Homo sapiens
ctgccaattgaattgcccaaatgaaatacacaatcgactgaatgctgctggtgctgctgtcgtcgtggctgtcattgttttacatagcttttttttttttctttttggggacggagtcttgc

SEQ ID NO: 329314 - DNA, 122 bp, Homo sapiens
gcgttcctgaggcacccagttgaagtccagacttcacctaatcttaggaaaaacaggatgcgtgctatgcagattcggcttccatacaaatcccataatcccacccgtttgtgggccctaaa

SEQ ID NO: 329315 - DNA, 122 bp, Homo sapiens
cccgcacccccaagctgccactgcagcagtcagagtggcagctgaaggctcggttcatgccgtgcccccgggcagttctggtgaggctaagcaagaggcctctgcatcttgacacctaggag

SEQ ID NO: 329316 - DNA, 122 bp, Homo sapiens
gacgtccaggagggcagaggctgggctggtgcggcgcggggggcgcgggcgcgggctctgcgcctttaaggcccgcgtcggcagagcgagcgcaggggccgggcggcggggcggggcctcgg

SEQ ID NO: 329317 - DNA, 122 bp, Homo sapiens
ttgactctcaaatgaggtagcagaattggatgtacccggccaaaggccaggcccaagtcgcgtgccttgtcagcccgggtggaggtggagggtccctgatagacagcaccggggctgcgggc

SEQ ID NO: 329318 - DNA, 122 bp, Homo sapiens
ccgatgtgagatttcccctgggttcgcgctcgggtccgcttcttaaatacactgcctcagcggtgtggatggcacagagctgtggcagccctactgaaaccttaaacaggcttcctggggtc

SEQ ID NO: 329319 - DNA, 122 bp, Homo sapiens
gacaggaagcgtggaggggtttgagggtcctgggggtgatcggggcacttctgtgcagggcgtccccccttgtctccctggacctctagcgcgccccagccggtgttcaggcaagtctatcc

SEQ ID NO: 329320 - DNA, 122 bp, Homo sapiens
acacgcccctgggccctccccgaccctccccacctcgttggaccggatctgggaagtggccgcggcgccgccctccacccaccgtgctgccaccttgcaccccccgtgccgccctccacccg

SEQ ID NO: 329321 - DNA, 122 bp, Homo sapiens
ctcccggtcccagtccctcccggtgtgctggccccgtgcttctcctggctctttccttagcggggcactggccagttacctcaccaacagcatgcccaccctggagcgcttccccatcagct

SEQ ID NO: 329322 - DNA, 122 bp, Homo sapiens
tgttggttcacagacgtgcggtggcggcggcgggtggtggcagcagtgtgcggttgttggcgccacgtgctcacgctgggtccctcctggggagcttctgctccggcgggccacgccttgct

SEQ ID NO: 329323 - DNA, 122 bp, Homo sapiens
ttgtatttgcgtgcctagctcaacctggccccagctaacatcgttacgcgccatccccgacgtgctccccaacccggtggcaccaccatccgtcgctggtccaggccagaaaataatcccct

SEQ ID NO: 329324 - DNA, 122 bp, Homo sapiens
gtaaaaatatggtattatcatcttatgggaccaccatcatatatgtggtgtgtcattgaccgaaatgtcataatgcacattactataaatgtttttaaagtgaataaaaattattgaagtat

SEQ ID NO: 329325 - DNA, 122 bp, Homo sapiens
ttagatttcaactagtggtatcatttgactaagacatgtgtcttacttacactggtgaagcgatccatttattaaatactaaccaagggcctattgtgagtttggaagaataatggtaaatg

SEQ ID NO: 329326 - DNA, 122 bp, Homo sapiens
ggggcctgtacacggagcatggctctcgagagaaggggaggggggaggaggggagggatgcgcagatagaggagggggcgtccagctcctccagcctgccgttccacagcccccaggatctg

SEQ ID NO: 329327 - DNA, 122 bp, Homo sapiens
agcagccggctctcaaagctcccacgcagctctcccgccactggccactcgctggcgacccgatggaaggttttcaggctcctcacaaaggagagagggaagaaaagatcttttgccctgga

SEQ ID NO: 329328 - DNA, 122 bp, Homo sapiens
aggagagctgcttcctgaatatcaatgaggggaggaatcgggtggatcgtagaaatgtttcgtgttggttgtgtaaaccactgcctcggagctgtcagaacccaactaggaaaggaaggggc

SEQ ID NO: 329329 - DNA, 122 bp, Homo sapiens
agactggcgggggatggatcctttcaaatgtacctgagctgggatgcccagcttgtggaacgcacagcaggaggtgagcagtggccagtgagtgaagcttcatgtgtatttacagtccctcc

SEQ ID NO: 329330 - DNA, 122 bp, Homo sapiens
tgtggggctcccatcgttaacactggaccaccgggagggagccctccttttcatctttcccgttagaaggtaaacatcacaggagtgggaaattctgtgctcattctgtgtctggaacgcgg

SEQ ID NO: 329331 - DNA, 122 bp, Homo sapiens
tgagccctcatcctgcaggcagagcccctcagtgctctgagaaacctgccctgaactcaccgcctcccctgcctgggcactccctcctccctgcgcccacagcccccatgccaatctccgtc

SEQ ID NO: 329332 - DNA, 122 bp, Homo sapiens
ataaaaccctggtcaaaagctctgtcacatcgcgctggcaagacgcttaatcaaagtgagcggccccgcgcgccgcgcggcccggctcctccacgtaatttccagccagctgataaagccag

SEQ ID NO: 329333 - DNA, 122 bp, Homo sapiens
aggcctatcctaactgatacagtttattatgctgtaagtacacacacatatgcattcacccgtgccgccctacccccgtcatctgccaccatataacgttagttctcagagcagggaattgg

SEQ ID NO: 329334 - DNA, 122 bp, Homo sapiens
agacactgggcaccttaggtgggacttaaatcctaaggtcaacaagacttgtaggtcgggcgcgatggctcatgcctataatcccagcactttgagaggccaagatgggcggatcactggag

SEQ ID NO: 329335 - DNA, 122 bp, Homo sapiens
agagccccagagtagcatattagcctaagttgttttatacgactctgtttgtgtaaggaccgggtggtgttactacatgaggctgatgtcatcttgccatgagttagtttcccccaagactg

SEQ ID NO: 329336 - DNA, 122 bp, Homo sapiens
cttggatcgccactgcctgccatacagcagccacgggccagggagcaccgcggagccagccggaccttggatcgccactgcctgccatacagcagccacggggccagggagcaccgtgcagc

SEQ ID NO: 329337 - DNA, 122 bp, Homo sapiens
atttatttttaggtttccctactatctggggcaatgaggagggtttttcagtgaggatgccgaaatcaagtctccttgttacatgagtaaattcaagatgcagaagtgatgaatgctaagga

SEQ ID NO: 329338 - DNA, 122 bp, Homo sapiens
agcgctggtcggaggtttggaagttctgaggccagggccagagggccgtcgcccgtcctgcgaacgctgccgccagcagcagcgaaaaccaaagcctggagcttgtcatggcccgctggtct

SEQ ID NO: 329339 - DNA, 122 bp, Homo sapiens
gtcacagttaacggcaaagcctagggcaagagttctacgcccaagatggccagccggaagcgggcttctcgcgaccatgtggcgaagccccattcgtcagctggccgcccgcggccctggta

SEQ ID NO: 329340 - DNA, 122 bp, Homo sapiens
ttagcatttaaccccctccctcttcccatcccctccccgcacatggctgacgtcagaccccgccaggagttgggggaaaagctaagtgggccagggacgccctattcccctccccgcggctg

SEQ ID NO: 329341 - DNA, 122 bp, Homo sapiens
ctcaaacagaactgcgtctattcccagagaaatttctaaacgaagaagcaaatatgaccacgggttcccggcctcgtgtgggatgagactcgtgctgtctaggagagaaaatctgtaggttt

SEQ ID NO: 329342 - DNA, 122 bp, Homo sapiens
gattacaggggtgagctactgtgcctgtctgagttgattattttgagaaagaaaaagacacggtcatgagaaagactgctccaggggccaccaagctcatctcttacagtccatcctcttta

SEQ ID NO: 329343 - DNA, 122 bp, Homo sapiens
gcctggctggacaggtgagccctgagacctgagctctgctcccttctctgggctaactcccgcagctgggctgggccgagcctgtgggaacctgcttcttcctctgtgccctggggctgctc

SEQ ID NO: 329344 - DNA, 122 bp, Homo sapiens
gaatggagtgaggtcatctttaaaggcagaaggcccctcaaattagagccagctgtgctccgcctctacacctggctccacacgcgggctcgtccgcgtgagagatgagccgggaatgggat

SEQ ID NO: 329345 - DNA, 122 bp, Homo sapiens
aaacaaggtttgtgaacaaatcaacttggatgcgaatagcgctattcaatgaagacgacccgtaactgtagatccaatcagtaactaaggtacagatatttagatcattcctaatcaataca

SEQ ID NO: 329346 - DNA, 122 bp, Homo sapiens
ccttgcaagcttatcggggtcactgtgggcagctgggtgagctaagttcatctgtgctgccgtgacctctgtgcagatgcatcaagaacacagagtgctccggggttaggatgagggcagcg

SEQ ID NO: 329347 - DNA, 122 bp, Homo sapiens
tggctggggttcccagacgcctggggcctccccaccccgcagcaggcccggggcaaggctcgcgggaatgagtatcagccgagcaacatcaaacgcaagaacaagcacggctgggtccggcg

SEQ ID NO: 329348 - DNA, 122 bp, Homo sapiens
atgccgcccgctcccgagcttctgtcaggggagccgggcgtgcggaggcggctgaggaggcgggaaggcggcagtggttgaaggggtgattgctgactagcggggagggagtgggcagcgat

SEQ ID NO: 329349 - DNA, 122 bp, Homo sapiens
ccttcgcctaagagccgcagggacccacgctgtctgcgctggctccacccgggaacccgccgcacgctgtgttctaggcccgcccaccccaaccttctggtggggagaaataaacggtttag

SEQ ID NO: 329350 - DNA, 122 bp, Homo sapiens
gaggcaactggagtgggtagtggaggtgctcaaggtgcctgcagtagggcatagccagggcgtcttgcctgagcccagtgacctacctgccctgtccttccagggttcagtggtgcagaggg

SEQ ID NO: 329351 - DNA, 122 bp, Homo sapiens
tgtccttactaactttatatacaaaattttatctgttaaagccggaatggttcttttcagcgaggccctgtccctgctccagtatctgtaatgaattctcgtgttcctcccacagtgggacc

SEQ ID NO: 329352 - DNA, 122 bp, Homo sapiens
ttttctccccttctctgcatctcatccccttgagagccccctggagcagaggataacgcacgaggggactggctgtgtatattttgataacaatatcaaaatactgtcaaatactaaacgga

SEQ ID NO: 329353 - DNA, 122 bp, Homo sapiens
gagaccccgggccagccctcccgccctcacgcggcccgtgcgcaaagcggaccgggccggcgacgcgaatctccgccccgccccatctgacagcaaattttcccattggtcgagagacccgg

SEQ ID NO: 329354 - DNA, 122 bp, Homo sapiens
ctcgcagcaccccccacccccgccccggacaactgaggaagagcagggaaaatggccttccgcttggggcctggtcgccactcggcctctgcagttctctccattgtctctccggctcgcag

SEQ ID NO: 329355 - DNA, 122 bp, Homo sapiens
gaggcggtgggcgggaggcgagcgggcgcaggcggaacaccgttttccaagctaagccgccgcaaataaaaaggcgtaaagggagagaagttggtgctcaacgtgagccaggagcagcgtcc

SEQ ID NO: 329356 - DNA, 122 bp, Homo sapiens
gaacctgtagacgaaactaggtagagatacatgtatttttcactacccaaacagaattgccgtcttttaaagaaactgcaccaacagtttaaaataaactttcaacagcaagagttgaaatt

SEQ ID NO: 329357 - DNA, 122 bp, Homo sapiens
acagagggccgacttttgtatgtgcaggactgattgcaggacttgagtatgcgtacatttcggtgtatgataggggccctggaaccaatccccctaagtataccaagggacaactgtacttt

SEQ ID NO: 329358 - DNA, 122 bp, Homo sapiens
agttccctcgactctcccgcccacatactggaaggtgcagagcccaaggcgcacagctctcggatggaaatgggactcatgcacaaggcaatccccgctactaagcggtggcgcttctggaa

SEQ ID NO: 329359 - DNA, 122 bp, Homo sapiens
tccagactgtgcgtcctcggctggagcgggaggagagggtgcagtggtcccttgctgctccgggtgcagggccttgtctctgataaattgtttttttggagatggctttttggtttgggcct

SEQ ID NO: 329360 - DNA, 122 bp, Homo sapiens
accttttgtccccaataactgacataaagctggacacatcaaggatgctaaacaattatccgctggatgatgaagactatttcacagcatagataaaggccatcgtgcagatgtggcctcca

SEQ ID NO: 329361 - DNA, 122 bp, Homo sapiens
actccaatgacatgaagaagtgttcaccatctttaaggagagaaggaggatgaatgcagtcgcttgtctaaagctaaccaaacggaccaaagcctccgttcatgggtgtcccgcttggtgcc

SEQ ID NO: 329362 - DNA, 122 bp, Homo sapiens
tcagctttcaggatttcacttcaccctcagtcagtgctgaacagttgtcgcggaggcctgcgtgagtgaggcctggcgtgccctggaaacattcccctgagttgaagaaagactcacagttt

SEQ ID NO: 329363 - DNA, 122 bp, Homo sapiens
agaaaggacccagtgcggtcgcttacagaacccagggcggggttgggctgggcgcccgcgcgcgttttcaagcctgcggcccggagttcactgcgaggactgagatcacccgttaccccgcc

SEQ ID NO: 329364 - DNA, 122 bp, Homo sapiens
gacagcctcatgatcagtcagagaaagggggaccaaagctactccgtgtactctcacattcgtcataagtgtgtgcatgagtgtgcttacatatgaacatattttgtcttctaccttctccc

SEQ ID NO: 329365 - DNA, 122 bp, Homo sapiens
cctggcggggaatgagcaggtgacccgggaccgggcggtgaggaagctccggaaatacatcgtcgccaggactcagcgggccgcaggttggcgggggtgtgggcggctggcgtctcgggggc

SEQ ID NO: 329366 - DNA, 122 bp, Homo sapiens
accgggccgctggggaactgacggggtcgggtcggggccaggcggggggcggcggcggggcgctcctgcccggggggcggcctgagcccaggccgcggggcggaggtggcggggccgcgagg

SEQ ID NO: 329367 - DNA, 122 bp, Homo sapiens
acttgccccggtttccccacaccctgcctccggtacaatcgatagcctgctgtgcaggggcggccgcaccccccgggcagatagccctgcccaccctcctaaagggaccgtcctggtttctt

SEQ ID NO: 329368 - DNA, 122 bp, Homo sapiens
tgagtcctccaaaaaaaacattccttggaaaagctgaacaaaatgagtgaaaactcataccgtcattctcatcggaactgaggtccagcacattgcttcctctggggcctttactagtgagg

SEQ ID NO: 329369 - DNA, 122 bp, Homo sapiens
ttttaaaagagcagttatcaaaataatgtacctcctggcacgacgggctgagaaaagcaccgcttcactgccgcaggcgtcttgccacacaaacccaaactgagagacattgtacaacataa

SEQ ID NO: 329370 - DNA, 122 bp, Homo sapiens
gcctggcgcgcccggcgcctgcagccccccagcccctccgctggccgccgcccccacagccgcgccagggcttgacgtcgtcccgccgttgcttcttctattaaagcctcagacccggctcc

SEQ ID NO: 329371 - DNA, 122 bp, Homo sapiens
ccgtgtgcagatttccaagttgatcgtgatgttgatccgggactcggtgtggtgacggcccgccctgagcacgaaagtgcacgctcttgacaacttccttatgtttggagctttctccacca

SEQ ID NO: 329372 - DNA, 122 bp, Homo sapiens
cggggccgcagctcgggaccgcccatggggcgtggcggggctggatgcggacaggctgggcggacgcgggaggccggggaaggagaggcgaaaaacacgcccttgatggatgagagggacag

SEQ ID NO: 329373 - DNA, 122 bp, Homo sapiens
ctgttaaagtcaatattgtgtttaacacagcagtagcagagtgagttgtcttgagcttgccgtgacctgctagcatgctaagctagcatgcttaatgctatttaagaggagagttcctttca

SEQ ID NO: 329374 - DNA, 122 bp, Homo sapiens
cctcagctgaaacaagatttgaaagcctctgttccttttgccatcctgcggactccgagacgcctcttactccggtgacgccgtatccaggagtactgagcaggctgctgaggttccgtcag

SEQ ID NO: 329375 - DNA, 122 bp, Homo sapiens
taacacagaaagtaaggcataatccagggcttggactgtctttcaagaaaaccccaaacccgctgccaggaagtcacagccactaagtcccatcccaggcccagttgctgccaggaaacaca

SEQ ID NO: 329376 - DNA, 122 bp, Homo sapiens
gaggggaggtgagacgccgtgccggggcatcaatgggaggtaacgcatgtgcagaggccacgctgggcttcaccagcagctggtcagaagaggctgcccttctttggggcttgttagcaccc

SEQ ID NO: 329377 - DNA, 122 bp, Homo sapiens
gcgacttttctttggggaaactgaagcccagagagaggtcacgccgtcccgtggccacaccgcagctgtggacctgggggtgcccgagcgtcccctgcattcagctctgtggcgggacgggg

SEQ ID NO: 329378 - DNA, 122 bp, Homo sapiens
acctaagaaccatcctggccgccagcccagttgtagcaccgcccagacgactggccagggcgcctgtgggatctgcatgcctggagcagccccaccagagtgccgccttctccactgctcag

SEQ ID NO: 329379 - DNA, 122 bp, Homo sapiens
atgcagagcctgggctcagccacacaactgcagaagccaaaccacgagaagctccacagacggaaccggcttccggcaccactgggacacgccacgaggctcccccagctaggtgcacacac

SEQ ID NO: 329380 - DNA, 122 bp, Homo sapiens
cgcgaggcggcgcgggcacggccgccccgagggcctggctttgcgcccgcttcagggaaacggcgccggcttttttaaatctgtggacagacaagcgtgtcctgagagctgagatttagaaa

SEQ ID NO: 329381 - DNA, 122 bp, Homo sapiens
tgaattcgggaatcgatcgaaaatttcaaggccaattaaatgccctctgatgtagagctccgattaggcccgaaaggcttcaaacagcccctctagaccctcgagggtcttcgccgcggtaa

SEQ ID NO: 329382 - DNA, 122 bp, Homo sapiens
tgacgttgccccagctgaggggccttggtttcagaggcctactcaatgcattatttcatccgagcctgcccagtgctcacactctcatagaggcggggaataaactgacaacaaatcgcaac

SEQ ID NO: 329383 - DNA, 122 bp, Homo sapiens
gctccctccttcttccctcatattgtcatggccttaagatacccctccctggagagggagcgtccagaagttacggcctcccctgcctggtggcaactataaatgccacagctatggtcaag

SEQ ID NO: 329384 - DNA, 122 bp, Homo sapiens
gaggtcaaacttggtgcatgcattgtgcatgcctgtgtgtgcgtggtgtgtgtgcatgagcgagtgtgtgactgggtttgccacgaagcagtcaccatctaaccttgagccaaagacctgga

SEQ ID NO: 329385 - DNA, 122 bp, Homo sapiens
gaaaagaaaaagcatatgtttttaatgagagtaagtaaagagagtgtttgcagaccaagtcggtaatacgtttggatgccaatgtagcgaagattgaatgagtatagccatgttgggaaact

SEQ ID NO: 329386 - DNA, 122 bp, Homo sapiens
ccggggccacctctgaggcatgaacccagagacgcgcgccctggtctgggaaagcaggaccgctgcgcccagcgcctcaggggtagaggcgggaacaggcccgcggtcgctttgctggcggg

SEQ ID NO: 329387 - DNA, 122 bp, Homo sapiens
gaaagccttgggcctcacaaacttggcaagcagtctcaggcacaaaactggatgggcgggcgcttgtcagaataaaagtcctccctgaaaggagggttgcgaggtaaggggcctgcttgccc

SEQ ID NO: 329388 - DNA, 122 bp, Homo sapiens
agagccatgagccggaggaggagcatggcactgaggagagcactggggacgccgacggcgcggaagaggacgcgtcgagcaaccagagcctggacctggacttcgccaccaagctcatggac

SEQ ID NO: 329389 - DNA, 122 bp, Homo sapiens
tttcagctttgaaggtggagagagagagagagacagagagagagagagagagggcgagcgcgagccagtcagagggagcttgtgcacagaatcccatctgaaccgctgtgttcttcaatcag

SEQ ID NO: 329390 - DNA, 122 bp, Homo sapiens
caccgcagctcaggaggcggcagaacccaggggtggagagtggggggcgggcttcccgggcgccgccgggtcgagtcacttccggtgccctgacctttataggagtaaacagacccccgcca

SEQ ID NO: 329391 - DNA, 122 bp, Homo sapiens
tctatggccgccgtcaacaaatgacacagccttggtggctgaaacaacacaagtgattttcgtacagtcctggaggtcagaagtcccacatggtctctgcaggctaacagggtgcctggagg

SEQ ID NO: 329392 - DNA, 122 bp, Homo sapiens
tgaaagtgaaggagggaggaggaagccaggttactaaaaaggaagtgcagttttgcagagcgctggcaggatgtggctggttagcaacacatgatggagttatcagatggatctgttctccc

SEQ ID NO: 329393 - DNA, 122 bp, Homo sapiens
ggcattcgcgtccccgagagggcgcagcagtggggcctgcgagctggggccgggtggccgcgccgggtcggagtgtggctggagaggggccgccccggaagcggtgctgcgcccaacgtccc

SEQ ID NO: 329394 - DNA, 122 bp, Homo sapiens
gctaccgccccaggcccgggctcagagaggctgacagaggagggaaaaaggagtctgcggcgcatgtggggtttcgccccggcccgtcgcttattgcttggcctaatgtacagcgtcatcac

SEQ ID NO: 329395 - DNA, 122 bp, Homo sapiens
atgacgacactacatatgcccagattgtgttcacacaggcgcatgccaagaatccatcagcgttctcagtctgggggggaggtagacatggggtgttttgggaaaacaaggaagagattcct

SEQ ID NO: 329396 - DNA, 122 bp, Homo sapiens
ttcaagttaagtaggaggccagagcttggcctgatcagcaactgtacctgtccatgcccacgccatcccacagccccccacccaagagccttccttgaagaggttctatagagcatagcttg

SEQ ID NO: 329397 - DNA, 122 bp, Homo sapiens
aacatccttttccagaacaaagattgttgatgttcagggagacaggttgggggtgggacacgtagggactaggttacagacaacatttcccagcctgttcatatttcctcgcatgagggatg

SEQ ID NO: 329398 - DNA, 122 bp, Homo sapiens
ccgccctgctccaccacctgcggggccggggggcggcgaggaacccgaccggccctgctacgcttgcgcccaccttccagatgtggaggcgcgtgctcccagatgttgccggggtggcttcg

SEQ ID NO: 329399 - DNA, 122 bp, Homo sapiens
cgcgctcatcgaacgcggtccagcagtgtgatgtcttattaccaacggggggcggggggccgggctgttcactactcagtggtttgtagtcataagaactggctcaagacgtggtggttatt

SEQ ID NO: 329400 - DNA, 122 bp, Homo sapiens
tgcaggggcctctccagctcactgggggtggggtgggggtcacacttggggtcctcaggtcgtgccgaccacgcgcattctctgcgctctgcgcaggagctcgcccaccctctccccgtgca

SEQ ID NO: 329401 - DNA, 122 bp, Homo sapiens
attatgctttcacatagtaaccatgcactgatgatttctggattagcaggacattagagccgtttggggaaagaaaggctttattcagggccactcatatactgagaactaacctcagcaaa

SEQ ID NO: 329402 - DNA, 122 bp, Homo sapiens
gcagagaagtgtgcacgcagcaggcactcagtacacatatgctgaacacctgagtgtcaccgacagctgcggaggcactggggcaatctgtgtgtttctcagcctggcgtcgggggttaagg

SEQ ID NO: 329403 - DNA, 122 bp, Homo sapiens
ccctcctggcctccttgagccggcgcatgtccaggctgcagcagaccacattattggatccgggtcccagacacctggcctgggctgcgatgaggtggctgccaggagggagggagggtggc

SEQ ID NO: 329404 - DNA, 122 bp, Homo sapiens
caccaacgcgccactttttggcattcagataccgccgctcatcaaactggtcccacaggtcgtcccagtcagcgtccgaaggctgcgtgacacgaatgggaagtctgtgagaacggctccct

SEQ ID NO: 329405 - DNA, 122 bp, Homo sapiens
actggtatcagatgttagtacgagactttttttattgttacatgatattttataaatttacggggtatatgtgctatttcattataagcatagaatgtcagaatatttaggatatccattac

SEQ ID NO: 329406 - DNA, 122 bp, Homo sapiens
taagtcccgagccccctgtggggacaggcgctgggaggggtgtggcctgctgggggctctcggatgtgttgccccagggagcccggccgggtgatgcctcggggtgactggggacggcagga

SEQ ID NO: 329407 - DNA, 122 bp, Homo sapiens
agtctagaagccttagctagatcaggccataaacaaagggctttggagacaggcagtccgcggcagataatgatcggaattccggctcctcccttccagggtggaacctgaatgcagccctc

SEQ ID NO: 329408 - DNA, 122 bp, Homo sapiens
cggttgcaccttcacctctgaggggctgtgggggcagtcagaacccgcagggcccaaagacgggctgttcaacgtcacgcccgcttttttcaaacacacaatattgttttgaaacttcaagt

SEQ ID NO: 329409 - DNA, 122 bp, Homo sapiens
cctgctcctgggcctggccccctttgccttccccttgccctgctactaagaaccccccaccggccagagggcagatgctgtccctgcaggttcccaacccctgccctccatgggtgactgtg

SEQ ID NO: 329410 - DNA, 122 bp, Homo sapiens
tctccaacactggggattatatttgaccatgatatatggaggggacaaacatacaaactacgtcaaaggcaaagcatggctactgtgaaagaagggtaaaaacacagagatggcatcacctc

SEQ ID NO: 329411 - DNA, 122 bp, Homo sapiens
ccttgactgcattcaacaacactgtgactgtcacagcaccgtgacggcgttcaacgacaccgtgactgcattcaacaacactgtgactgtcacagcaccgtgacggcgttcaacagcacctt

SEQ ID NO: 329412 - DNA, 122 bp, Homo sapiens
cccctcacttctcaccatgtctattttgttctggccacaccagtctcttcattcttattccggcacattaagcatgctcccacttcagagtccccgggctggacttaacccattgtctgcac

SEQ ID NO: 329413 - DNA, 122 bp, Homo sapiens
cgcaggaggccttgcggggatccgagcatcccgctccgagatggaagtggtaggacagtccgggagaagccgacgggaaactgtcctgggcgcgcaccgcccccgtgccctgcgccctcctc

SEQ ID NO: 329414 - DNA, 122 bp, Homo sapiens
gtcatgtgcaaatgatcactgaagcctgcattttgtaagttgctttatagagaaaccaaacgaacattgatagccaggtcaattctgtgaaagacggctgtcacaccatcaacccttgagga

SEQ ID NO: 329415 - DNA, 122 bp, Homo sapiens
ttccctaactttttaggaactccctgttttgcctgtgatgaaccactcagcattttcccccgcattaaattacaatgacttcatttgaaacagaaatgcctcaaattttgggatctacttat

SEQ ID NO: 329416 - DNA, 122 bp, Homo sapiens
tgacgtaggctgccacactgcaccgttcctcaggggtgtcctggttgcaagcctgcagctcgatgcgatagcccgtgaagtgtcgcaagccggagatgaccagcgactccttgttcaccacc

SEQ ID NO: 329417 - DNA, 122 bp, Homo sapiens
acctccacaacaaccaaattaataatgctggatttcctgcagaactgcacaatgtacagtcggtgcacacggtctacctgtatggcaaccaactggacgaattccccatgaaccttcccaag

SEQ ID NO: 329418 - DNA, 122 bp, Homo sapiens
ttccaggccttatggggagaccttttgtatctggacccaaacagtaagaaagtgccacaacgcagatgatttctgcgtgctcggtgatgagaaatgttttctcagtggcatctgtgaaaggt

SEQ ID NO: 329419 - DNA, 122 bp, Homo sapiens
gaagcaggaggatgagaccatgggggcaggcaggttggagtatcctgtgccccggcccctcgcatccctatgtcccaccctggcctcagcctcggaacctctcggggccgctctgcacacac

SEQ ID NO: 329420 - DNA, 122 bp, Homo sapiens
agacagcttccgggtaacagagaaggttgaccaggtcaatagtaaaggatttcctcaaaccgaagggaggacctctagtgaaatgagaaaggaatacacaattgacccagtttgcaggtggg

SEQ ID NO: 329421 - DNA, 122 bp, Homo sapiens
ctgcaccttctgagtccctgctgtagctgccggcctgcaccagcgcttgctcggaggaagcgcggtggtcccggggcgggtgccctatcacctgcacgaaggaaggcaggcccggccggcag

SEQ ID NO: 329422 - DNA, 122 bp, Homo sapiens
tgaaggagtagctcttgttcctgcggtagttctcataggggtcatccagagccacgcccacgcctttatactggtcccacttatcccggacgtccccgcccttgatggggtcctggatccct

SEQ ID NO: 329423 - DNA, 122 bp, Homo sapiens
ttttcccttcagagtaagccaagtgacggaaaggcctgcccgccccgctggggacaacagcgccagcacccgcgccgtcgggtcgggtaggctggggaggtagcgcaggcggcctggccccc

SEQ ID NO: 329424 - DNA, 122 bp, Homo sapiens
aggatgcgattaatcctgcagatgtgagccacggcgtcctcaaacagcacctgcagaaaccggagagatcccacaacatcttgtagcacctggaatcacctctgtcaccagcacggactctg

SEQ ID NO: 329425 - DNA, 122 bp, Homo sapiens
catcgcgccaccaacctggctcccgagatgcgtgagaccagcgctcagccccgcagcagtcgccaattccaagaggaaagcgcctgaaagccactgaggcagcggcgtagccggcggaggac

SEQ ID NO: 329426 - DNA, 122 bp, Homo sapiens
ctggatctccctccgggcgggcaccgcagtgccactggtccctgtgagatccaggcggagcgtgccacacttcttcaccccgggatcagtgatgaagctgacgttgtcgtgctcagagctgt

SEQ ID NO: 329427 - DNA, 122 bp, Homo sapiens
actaaccttttacataaaccagatgtttcttaaaatagcccagttaaatccacccttcctcgtggcatctgcttaccaccaaatgttcctccacttctgtattctcttgcttttgattactt

SEQ ID NO: 329428 - DNA, 122 bp, Homo sapiens
gtctcatgcactggcacttggatggaggcaatcctcccagcccttcacaaaacctccaatcgacagcagagaagaggctgcatgcttggaagccaggcccctaaaatgcctacaccctactc

SEQ ID NO: 329429 - DNA, 122 bp, Homo sapiens
agctgaccaaggccagggccactgcgggagcaccgcgcgtccacgtgcacccagcatgcccggtcaccctttattacgtaagagtcccaggatggagttgtacctgctgccggcccctcttc

SEQ ID NO: 329430 - DNA, 122 bp, Homo sapiens
tctaaacaaattctttttttctgtgtcttcaaatctgctgcacctatacctattttagcccggtcagccaatgcatttgacttaatacgttgataaatgaaagtgatcagacaaatactatc

SEQ ID NO: 329431 - DNA, 122 bp, Homo sapiens
cgccgcatggatggtagaggggtgcggccgctgctttgcctcgtgggggccgtggaggggcgcccttcggacctcctggagagggtagaggggtgcggccactaatttgcctcgtgggggcc

SEQ ID NO: 329432 - DNA, 122 bp, Homo sapiens
ccacaggcaaagccaaggatccttcttgcaaaatactactggtgtcctggtgccacctcccgaaagagctgcccacaatgctcgcatgcctgggaggtagggtgagcaggatcaagcactgg

SEQ ID NO: 329433 - DNA, 122 bp, Homo sapiens
gttgattcgcttaacctggaaactccccgggggcgggtcttgtgctactgaattcccttgcgcgcagcctggggtataataggcgctcaatacacactttccaactatcaaatgaccagata

SEQ ID NO: 329434 - DNA, 122 bp, Homo sapiens
ggaacagcacagagactttggtagagagaggctgtcccctcaccactggcagaatatggacgttcagacccttcaccttcctgacgtcagagctgacacattcaatacaacagctattggcc

SEQ ID NO: 329435 - DNA, 122 bp, Homo sapiens
ctgttgctgcctcccgcaggaatataaggagctcaagggcgatgggcctttcaccatcttcgtgccgcacgcagatctaatgagcaacctgtcgcaggtatgcagcccccagagcgaggctg

SEQ ID NO: 329436 - DNA, 122 bp, Homo sapiens
aataggcttaatgtttcaccaacctcagggagtttgtgttttcagagggcacaaagaccccgttcatcttaaactcaacatctgagattttttattattattattttagagatacaatcact

SEQ ID NO: 329437 - DNA, 122 bp, Homo sapiens
atgtatagctcaaactgcagtctcttaaaaggcacattaccagtcgggtgcagtggctcacgcctgtaatcccagcacactgggaggccgaggtggctggatcatttgaggccagaagtttg

SEQ ID NO: 329438 - DNA, 122 bp, Homo sapiens
cgatagctctgccccacgccattagagaacacaggatggccgaatgcccgaagtagggggcggggctccccttgaagcgaagggcgtgtgtgatttgtatctctaataaaaaggcaggggcc

SEQ ID NO: 329439 - DNA, 122 bp, Homo sapiens
cctacctgccactgcggctgctggagcggctcatggtgctggtgaacgccgtggagatggcgagggtcactggcgtgcccctcagctacctgctcagtcgtggccagcaggtcaaggtcgta

SEQ ID NO: 329440 - DNA, 122 bp, Homo sapiens
gcactgctccatcagtattagttagtaatgagggcgacggggatggcagggttgacctgtcgttggggctgccacgtgcctttggaagtcccatagaacatgtctgactttaggtctcatca

SEQ ID NO: 329441 - DNA, 122 bp, Homo sapiens
agggaggaggctcctaggggtgtagtcctgtgcccggagacccagcactgggctttgacccgccagctctggcccaggctcccaggcccatgtccctgtgtcccccgctcatgctgccagct

SEQ ID NO: 329442 - DNA, 122 bp, Homo sapiens
gatgaatcactgatgctgttcaaggggccattagctatgaagcagtacctcccgacaaaacgagtacgatttggtctgaagctatatgtactttgtgaaagtcagtctggttatgtgtggaa

SEQ ID NO: 329443 - DNA, 122 bp, Homo sapiens
ctggtagtctagatgcatcttcaaggaaggcctctgaggaagggacaaaggagctgggaccggactggctctctctgagctttgagaccaagtctcctgcacagaaggcccagcaaaggcaa

SEQ ID NO: 329444 - DNA, 122 bp, Homo sapiens
gatcggcgtggtacccagcgccgtacccttgggccgggtccccgagggggctgagcgccgcgaagtttttctgtagctcttggcggctgcacagagcctgtttcctggcttcccccgtccct

SEQ ID NO: 329445 - DNA, 122 bp, Homo sapiens
ctccaggaaggacaaagctgatacaggaaataatggtaactgagaaatggaggttgcatccgagaatactactggaagagccctctgatggaggaggtcagcatggtcccttccacccaagc

SEQ ID NO: 329446 - DNA, 122 bp, Homo sapiens
tataaatagtataaaatctgctgacttaacttggtgtggaatggcatgagctggccatatcgcaggaattcacagttgggaaatcctagtgaaatggcacaaagttgggattcaggaggaag

SEQ ID NO: 329447 - DNA, 122 bp, Homo sapiens
gaacccaggaggcggaggttgcagtgagctgagattgcaccatttgcactctagcctgggcgacaagagcgaaacttcatctaaaaaataaaaagagagagagataaaggagactagagata

SEQ ID NO: 329448 - DNA, 122 bp, Homo sapiens
tgtgatgcctgtgttcgccatgtgaacagcagaaagcagcaaatataaggatcgagagcacggggtagagagagggctggcgatggacaccatctttagggtaattgcgaaattaggggaag

SEQ ID NO: 329449 - DNA, 122 bp, Homo sapiens
ttcaggcacattgcactaggaaaggtgtggccgtgggaaaaacacaaggctagccagatacgtgcgccctgtgggcctggccatgtgatagccctgggacacccttcccagtgtggggacac

SEQ ID NO: 329450 - DNA, 122 bp, Homo sapiens
agaaggataaacaaggcaacaggcacacacccttgggactttgtttctgtgatacaatgccgactctgaccatgcttagctttattttttacccaaggcaagcacttaatcaatgttccctg

SEQ ID NO: 329451 - DNA, 122 bp, Homo sapiens
agcggagcgaagaagctgaagtacaggaaggttgtggcatctacacagctgcggagaaggcgggtcagcgcggggcctcctagccccatgctgactccacacctccccatgcccccagcggg

SEQ ID NO: 329452 - DNA, 122 bp, Homo sapiens
agcgccgctgcaggcggatgctctgattcaccaaaagcttcctgaagagcccgggggagccgcgcggggatccccgaggggagccgggcccggggaccggggcgggcgcgggggggccctgc

SEQ ID NO: 329453 - DNA, 122 bp, Homo sapiens
atttctttccaaaccctgcagctctatcgcctgacactcccgatgccctccccacccctgcgctttatgttctagacacacggaaatgctgggcactcttcaacatcctgacagtattcata

SEQ ID NO: 329454 - DNA, 122 bp, Homo sapiens
agcagctgccctgcactagcaggagtcgctgtggacgcccttcggcactcaaggaaaaaacgcttccagcgatgcaagcagctgcctttgctgcggctctgattcccagaggatcccaaagc

SEQ ID NO: 329455 - DNA, 122 bp, Homo sapiens
taaataccaaagagataaaaatagctaatgggatactaagtgtttatgggggccaaagggcgggggctattactgagttaggataaacagtgtataaaagcagggatagttatgaaattcag

SEQ ID NO: 329456 - DNA, 122 bp, Homo sapiens
gatcaccaggtccagtgtgcaatctttaaaattctagaatcgatctcctccattccatttcgttcctaatgccctggatcaggccatccaacttgtaggaatatcccaataggtagaaactg

SEQ ID NO: 329457 - DNA, 122 bp, Homo sapiens
ctgctcctgggtggtgcgggtggtttgctctctaggcgtgagcaaaggccacaaggggcccgaaaaaatcacccaaggatgcaagcccgccattgcgctgagcaggggcctccccgccgcca

SEQ ID NO: 329458 - DNA, 122 bp, Homo sapiens
cacgtggacgctgacctgccgacccaagctctgcccgctgccccctgcctgccccctgcccggcttcgtgcctgtgcctgcagccccacaggccggccagtgctgcccccagtacagctgcg

SEQ ID NO: 329459 - DNA, 122 bp, Homo sapiens
tgcttcaatttagaaagccagacaaggccctagggctctcccaagagagctttgccctaccggcgggcctgctacggggtggtggtggggtgaggggtgacgtttttcggcgaatctgcctg

SEQ ID NO: 329460 - DNA, 122 bp, Homo sapiens
gcaccttggcggaggacccggcggccgagtcactgctcatggctgcggtggaatcctctgcggtcataatgtcaaaggcatccacagctggcggaaacctggggaagcagaaagaagcgtga

SEQ ID NO: 329461 - DNA, 122 bp, Homo sapiens
gattccttcattcatcacttttctgttatgtttagccctaagggaagtcttttttagatacgtaagatgcaccttcagggttaaagcatctagtccagtctgaataaaacatcaaaagcacc

SEQ ID NO: 329462 - DNA, 122 bp, Homo sapiens
atctgggtctgtttcctcactctccagagtgtccgagggtttccccttccctcggggaggcgtctgtgttctcatcaggggagaaatcagttccaggccccagctccaagttcgccacaacc

SEQ ID NO: 329463 - DNA, 122 bp, Homo sapiens
gacaccgcaggagcctgtgaaagtccctaggactccaagtgaggaagtgacactcccaggcgagccggcccgcggctgccagtctgcacggcctcggcacggcggccccggagcggcgcggg

SEQ ID NO: 329464 - DNA, 122 bp, Homo sapiens
gattcacatcacaaatacgtcttgggcattgtgtgatgttcaagaagcttattctggcagcgcttctacaggatgaacagcaggaggaggctggcagccctggccagatgcagttaggggaa

SEQ ID NO: 329465 - DNA, 122 bp, Homo sapiens
cgaaccgtgctgtagccgcgcgcaggcgcagaataagagtgcacagcgagaacgcggcgacggtagccgaaggagttcaaaagacctctagtgcgcccaccgcaggtgacagccgaagttca

SEQ ID NO: 329466 - DNA, 122 bp, Homo sapiens
gtcagctatgaaattctgtggaatctgccgggaggtgtagctgaagcagcaggcggtcggcgtgtcagcagcaactgcggagaaaggagagaataagcccaactctgtatgtgtgcatatgt

SEQ ID NO: 329467 - DNA, 122 bp, Homo sapiens
cggggccggctggggctgggggcgggggctcccccgagaggggctgggcgccgaaccctgcgctcgcagaaacccgagttcagcctggcgtgtgtgctccgcggggacggaactcggggagg

SEQ ID NO: 329468 - DNA, 122 bp, Homo sapiens
taaaattactcgggatagaaaaagttggtgctttttctttaaaataaagaggaaatggtgcgccacaggccccagattgtttccctgaagtgagaggatattatttgttgaatctgtttccc

SEQ ID NO: 329469 - DNA, 122 bp, Homo sapiens
cacacacacacacacacacacgctcctaagtcaactccagctctgagcaactacgccgcacgcctctcccactgggagtcccccggcccgtgaggctcgcctcaccccagcttcttcacccc

SEQ ID NO: 329470 - DNA, 122 bp, Homo sapiens
tccagcttcagtccactcccgaggcgttgggtcccctcccctctggagacggcgcccgcgcggctgcccaggctgcagggcctggggacactcggggaccctcctgccctgaggaccctggg

SEQ ID NO: 329471 - DNA, 122 bp, Homo sapiens
cattaatcagcacgaggcaacggaccagtttcaacaccacaggcttcttgggtgactcagcgggaatgctccgattcaaggcgatggaccgcccgagcgtccccatttgtgaaatgtttccc

SEQ ID NO: 329472 - DNA, 122 bp, Homo sapiens
gagccaaaagcaggagggaaagggcactttgcggggatatgaggggcacacttcagtcaccgtttggtcttaggctattccagatagtgcagttccaggaggccctgagctgcttcccaggg

SEQ ID NO: 329473 - DNA, 122 bp, Homo sapiens
tagattcttggagttccgcagagcttactatacgcggtctgtcctaatctttgtggtgttcgctatctcttgtgtcaaatctggtgaacgctacgcttacatatattgtctttgtgctgctg

SEQ ID NO: 329474 - DNA, 122 bp, Homo sapiens
ctgcaagggtggggaggatgttttgcagcaaatgagaaacatgcccacagaccttagacacgtaacacttggcaagggcagagcagccaccaggggccgcccaccacaagcaaagggaatgg

SEQ ID NO: 329475 - DNA, 122 bp, Homo sapiens
agccacaacgtaacaggaggtggcaggctacctgctttacgcacggtctctccaaaccggcggaaattacagagtaaaataactttctcaaaaccgcatagtacttagctaaaactcacagt

SEQ ID NO: 329476 - DNA, 122 bp, Homo sapiens
gcgcgtgcgcttcccgcccgggaccgcccagaggtcccggactaggggcggactaggggccgctctgcctcccgccccctagtggttgtggccgctctgtcaccacggctcccggggcctct

SEQ ID NO: 329477 - DNA, 122 bp, Homo sapiens
tgccacgaatggagagacaggatgatttgcctctctgggcttggggactgatgtgtgatccggttttatttgggtcttagagtacactccaggcatgctccaagaccctgtcccgacttcgg

SEQ ID NO: 329478 - DNA, 122 bp, Homo sapiens
cagaaggggccggccaatgccctgtggatgcagatctgggagacctcgcagggcgtgggccgcggcggctcgggcttcgcgtcctatttctgcctcaactcgccggcgctggacacggcggc

SEQ ID NO: 329479 - DNA, 122 bp, Homo sapiens
cagaaaagaaaatttggctccaggacgggaccagcgagggaccaattgaaagacaagaggcggggcccgcaggcaaaccttaaccccagagacctccgtggctgttgaaggcagagggtaat

SEQ ID NO: 329480 - DNA, 122 bp, Homo sapiens
aatacacacagtgcctctattaaaagggaggagggggtgggaagacagacataccagggacgggaaaagaaaaaactgacacaccaggaggaggacaggaagagactgcgagagacaagatg

SEQ ID NO: 329481 - DNA, 122 bp, Homo sapiens
gtgctattctgatgatagtaaataagtcgcatgagatctgatgggttcatcggggctttccgcctttgcttcttcctcattttctctttctgccgccgtgtaagaagtgccttccgcctccc

SEQ ID NO: 329482 - DNA, 122 bp, Homo sapiens
acctcgtgatccacccgcctcggcctcccaaagtgctgggattacaggtgtgagccaccgcgcccggccaatcctggctctcttaaactgaacatctccaggattttgcatctatcaggaag

SEQ ID NO: 329483 - DNA, 122 bp, Homo sapiens
ctgccccagtgccggctgcccagggcagtcaaggcacacgcaggtctcctcccgagggcacggccctcgcaaccccaccgtgctctcagacaacacaagacagaggccacaaagggaaataa

SEQ ID NO: 329484 - DNA, 122 bp, Homo sapiens
tttttccaagtgatgataacattattgtgtgttgaattattccttgaaatcatggccgggcgtggtggctcacgcctgtaatcccagcactttgggagaccgaggcgggaggatcacctgag

SEQ ID NO: 329485 - DNA, 122 bp, Homo sapiens
ccatgtcattcccccggtcaatggcctgccggcgtgccggcctctgcctgtgcctatgggcgtgctcttcaacccatgtgctcctgtcaacgtccagccgcccgtgtgttcctctgctgacg

SEQ ID NO: 329486 - DNA, 122 bp, Homo sapiens
tgacgttaaatgcttggttactcaaggccgcagttacaggatgttaggtaaacagccctccgtccctgcccccgcccttttactttcaataccgagaaaatggaacagaacgttagggaagg

SEQ ID NO: 329487 - DNA, 122 bp, Homo sapiens
ggcccgagctcgccctctccgcgctcaggacaagcggtaacaagtgtagtgagcagcgggcgctgagctctggagtctctctcctccacgtgctgagaggcgccctctgattggctctcgcc

SEQ ID NO: 329488 - DNA, 122 bp, Homo sapiens
gcccctgacggtggccgggtgtggagacaaacccagggaaagggtccacttctcccataccgcgaaccccctgaaatgcctgtgtgggctgccccctggtcctgggagggctctcgggaggc

SEQ ID NO: 329489 - DNA, 122 bp, Homo sapiens
gcccattctcacagcgccccctctgactgcaaccgcgagggcagctcctcatgccacagtcgtcaccagtgtagcctgggtcacacacgcagcgcccaccctcacagcgtcccctctggctg

SEQ ID NO: 329490 - DNA, 122 bp, Homo sapiens
tgggactgctgtgcaaggcagagtcactagggacggactctggcagcagagctgcgctctcgtgccccagccagccaggctctcctgggtgagtagcagggagacccctggaacttacgggg

SEQ ID NO: 329491 - DNA, 122 bp, Homo sapiens
tccgcgtcggagcgggcccgcagcggcggagactcggacgcaggcctggggaagacggctcgcaaggtagaggctgtttattttgagggtccttgcctgcgccacacgcgggtctgcacacg

SEQ ID NO: 329492 - DNA, 122 bp, Homo sapiens
agcaggcaggcagctgccaggagctcttccctgctcgctcacgcctgctctcagaagctccgatccagacacacgcgaggcgctgtcctttcagcaccacaagctcgggctgaggagggagg

SEQ ID NO: 329493 - DNA, 122 bp, Homo sapiens
cccacagccttacccggtcaccctggcactggcggaagctggcattgatgcggtccaggtcgcggcgagcattcagccacatctgcatgatggcatccttggcgcgggtggtgaagttgagc

SEQ ID NO: 329494 - DNA, 122 bp, Homo sapiens
agaatttgaggggacaaaatccagcccataacattgccattgcctgtttcactccttagccgagtcttttgcttgtggcctagtggttgacctagtggcagggaggcgcagccttctaactc

SEQ ID NO: 329495 - DNA, 122 bp, Homo sapiens
atcagaccttcgtagatagacacccagagaccttggtctgagtgagctggcggcatggagcgactgagcatgtgcagctcccacatcgctatataaagatggggatgaactctgtggctgtg

SEQ ID NO: 329496 - DNA, 122 bp, Homo sapiens
ggtaagacccctggcctacgggtagaggccagtgactgagactctcattgcgggagggggcgattagtcgcaaagccgcccattccaggatttggagatgcagctccagcacacccttcttt

SEQ ID NO: 329497 - DNA, 122 bp, Homo sapiens
agctcccgagcgccacccggaccagactccaggaccgccctgtcccgccaccctttttcccgcccagactccacgtcttctgaaagagggcgtggcccgcaggaagttctcgcgttacggaa

SEQ ID NO: 329498 - DNA, 122 bp, Homo sapiens
tctcactagtagcagaagcccggatgtgtagcacgcgagcgaagggtcaaaggggagcaccgcccacgaggaatgccgggagctgagagttcgtttttcgatttcccgccccactttcctct

SEQ ID NO: 329499 - DNA, 122 bp, Homo sapiens
aggaaagggacctccaggtggcatctgctgtcccctcgcaggtggcgtggtggaggtgggcgcgcactggatccatgggccctcccggggtaaccccgtcttccagctggctgctgagtacg

SEQ ID NO: 329500 - DNA, 122 bp, Homo sapiens
ttggacagaagcctcttgcagacagccggtgtctcacagaggaggcactgtggaggtgcccgggttccccaagactgtggagaaggtggtaggggtgcagatgttctggccaaaagccctgt

SEQ ID NO: 329501 - DNA, 122 bp, Homo sapiens
agtccagtggcctcctcatacaatgtcagacttgacgtttccttgacccactcaccctggcggacatgtagattgtttgcatagcgtggctgttgtgggtgaaatgaacgtgggagtgcagg

SEQ ID NO: 329502 - DNA, 122 bp, Homo sapiens
gtgaccgaggttcagagtgagctctgtcggtgtgtcagtttgcctcttcaggtgattgcacgtctgtgtgcgagtctctccgtgtatgggtggctatgattagggtgagcctcagactggaa

SEQ ID NO: 329503 - DNA, 122 bp, Homo sapiens
gggtctctccagcaaggatggaggcggccaggggcttgggcggtgtggggcgccacctggcgtccagaagaggtaagacaggcggagcgggaccctccgaagtgggaggaggacgctggtca

SEQ ID NO: 329504 - DNA, 122 bp, Homo sapiens
gcccctcaccattgagcgcggcgacaacaagacctcccacaagcccctgcacctgaagcacgtgtgccagccgggccgcaacaccatccagatcaccgtcacggcctgctgctgcgtgagtg

SEQ ID NO: 329505 - DNA, 122 bp, Homo sapiens
aggagcaagggagctagggctgctctactggggcagcggcccgctttgtgagcagcaaggcgaaggctgctgtaggggtccccttacttgagctgggggtgcggaggtccccctgcagcggc

SEQ ID NO: 329506 - DNA, 122 bp, Homo sapiens
tgcctgcccaaagcctggggaaatctggcctccttgtgtgcgagaagattgtgaggggtgcggggggccccctgccactgtgtgcctccttggggaaaggctttggtgggagctgctcctgc

SEQ ID NO: 329507 - DNA, 122 bp, Homo sapiens
ctcatccggggcccgagccagccatgcggactcgcccaaatcccgcccccgcaccgcgcgcgcgcactccaagggaaggctcttcctgattctgacctcccgccctctgctagccccagcct

SEQ ID NO: 329508 - DNA, 122 bp, Homo sapiens
cgggtctccagagacgtgattttggcgtcacaactgctagaaggcgcctcagttctctcccggcgacgtgtccggttgtcccacgtcaaggcgctaacttcggccacaggatcactgaggct

SEQ ID NO: 329509 - DNA, 122 bp, Homo sapiens
ctccaaaagggagagacacagccaaagcatcccactggggcgttctctttcgcacacggacgctcccgcactccctggccctttctggagcgacgctccccgactgccatctccgcgatgaa

SEQ ID NO: 329510 - DNA, 122 bp, Homo sapiens
ctgttgcttcttccggcgctcagggtcacttttccttccagtgtcacagtgtctccgtttcgttcacgggcgtgccctggccatagctgcctctccaggatggagtcttctaggcaggaccc

SEQ ID NO: 329511 - DNA, 122 bp, Homo sapiens
tcggcaacttcgccgcgctctgatttatgatgggaagaaaatggtcccctgaaccgccaccggctctggtttgggattctgtgtgactctctgtgtggccggcccaccgtttattcacacca

SEQ ID NO: 329512 - DNA, 122 bp, Homo sapiens
agcagcatgcagaggctcccactgtgaattttagctccagatccactgcaagaacaaacccgcaatcctgagagggcccacagaccctccgaaggaagcagactgctcctgcaggacccggg

SEQ ID NO: 329513 - DNA, 122 bp, Homo sapiens
ccgtccctgtagctcgctgggctcttgagcccctacccactaagccaaaaattcgggaaccgggagccaaaccccttggcctctgagaatttaggaagcttcgttttcagccaagaggtcaa

SEQ ID NO: 329514 - DNA, 122 bp, Homo sapiens
gcacactggggcccccccgccgccgccgccgccaccgccgccgccgcctccgccgccgcccgcccggaggctgcttttccagagctccgagtaactgagcagtgtctttgacggcacctcgt

SEQ ID NO: 329515 - DNA, 122 bp, Homo sapiens
ggtggtgactgcgccgaccacggtcccgcccttccccacgcgctgggcagctgcccagcccggtccaggttaggtgccccagcatctggacgtccaccctccccgggacacccagcccagtg

SEQ ID NO: 329516 - DNA, 122 bp, Homo sapiens
gagaaagaacacacccatggtatgcacatttttgcagaaattgggctactctgggaaggtcgccatgcaatcctgactcaacttgaccctgcatagtttataaagtcagtcaagttccaaga

SEQ ID NO: 329517 - DNA, 122 bp, Homo sapiens
gacaaggtttcgtggcctgggggcctgagctgtttcctcttggaaaggccgaggaggctccgccactctcctttggactggtcgcgctgaagctctatcctagggcactggtcgcaagagca

SEQ ID NO: 329518 - DNA, 122 bp, Homo sapiens
ttagttgaatcattatcagaatttgagtatatttattgctaggaacagtattgctgttttcgtcaggtcagtgttaaaatgatcaaaccttggagtcaggagagtttttatatttaatcaaa

SEQ ID NO: 329519 - DNA, 122 bp, Homo sapiens
caagtgttgtccaaaatagtacttttccaaaacaggttattagtgaaagtgacatttgctcgtgtagtttgcctcttggctccagtgatctgccaggagaaaagcatgccccaggtagctgc

SEQ ID NO: 329520 - DNA, 122 bp, Homo sapiens
gccccaaaatcccacatgggtgggggtgccatccccagctttcagatggggaaacaggctcgggcggggggtgcggggtgccagccaacgcgggcgctgacagcctggtgctgcagagagca

SEQ ID NO: 329521 - DNA, 122 bp, Homo sapiens
gccccaccggaaagggctgagtgcttgcctgctgagcactgaccgccgggctttgtcgtgcgtgaaccccacgacatgggggaatttccatggcatgaaaattctcaggcttttccatgagt

SEQ ID NO: 329522 - DNA, 122 bp, Homo sapiens
cctctgctggacacataataggaattctaacacattctctgaattcacttttcataaaaacgtaaaatcagactgctctgtacaaccaggctcaactgttgcatggtagcagatttgcaaac

SEQ ID NO: 329523 - DNA, 122 bp, Homo sapiens
agacgctgagaggcaggaggcactagggatcgtccgcaggattgggactgatacagaggccgccacggagcccgccggagccaccgttcctgctgctgccgccgctgcccgaatcggaaccg

SEQ ID NO: 329524 - DNA, 122 bp, Homo sapiens
gtttcctctttgctctctctgccacgcttgaacaacttgccaaggatgccatctctcttacgtccgccgtggtgctccggattctgactcattcggacgaacgggtcggggtcgcggaacct

SEQ ID NO: 329525 - DNA, 122 bp, Homo sapiens
tctttggtttcaccatagctctgtccagcctatggacagacaggttccttgagaaacttccggctgggtgtggtggctcatgcctgtaaacccagcactttgggaggctgaggcaggtggat

SEQ ID NO: 329526 - DNA, 122 bp, Homo sapiens
gcctcctagagagaggtatcctcaccttcacaagtccttttgcaaaagctgccagttccacgatcaatcaggcgctggcaggaggccaagtttagagccacagcgcgttctctctctctctt

SEQ ID NO: 329527 - DNA, 122 bp, Homo sapiens
cccaggcagtcgaggtccctccctacctctgccccgcgctctgggaggctccttgttccgcgaccacaaagcccctttgatcctctgctcggctctgagccatgtgacccggtgggcgggcc

SEQ ID NO: 329528 - DNA, 122 bp, Homo sapiens
tctgggtctttacattttagcatctgaccagtacttttctccagatccagaaaggggaatcggagaagggggacatcatgacattttgcaacgcctctagcactgcaaacagagatgagctg

SEQ ID NO: 329529 - DNA, 122 bp, Homo sapiens
agggggcggggagagcgacgtcaccgtcgattcgcggtgctgattggcggaggtgaggtgcgcggagcccgcaagcttctccgcccggcccggctgctccacctcctcacccagccgctccg

SEQ ID NO: 329530 - DNA, 122 bp, Homo sapiens
aggctagctcatccgctgaactgcctcctgggtgcaatgagccacaaggagggcccaagccgcagatttacctgaatcctcaggtcaaactgccactctgctactctaaccccagcacacgt

SEQ ID NO: 329531 - DNA, 122 bp, Homo sapiens
tccctcccggcccctcgactacacctggggtctctccttccttcctcctcgggaggagcccgactgggagacgccgcggggactacccatttccagcccgctcacctttcccatgcagcagc

SEQ ID NO: 329532 - DNA, 122 bp, Homo sapiens
tctaaaggaaggcaacaaaacccaaacactaggcaatgtccagcatccaaacaaaactaccggatgtgcaagaaagcagtaaaatgtgacccacagccagaagaaaaataattcaacagaaa

SEQ ID NO: 329533 - DNA, 122 bp, Homo sapiens
ccctggtcactttagagagagatgccgggggaggatcgcagcagccaccttcctctgccccgccgagaaggctgaggctgccgccatctgcactgctcctgcattttctcatctcccgctct

SEQ ID NO: 329534 - DNA, 122 bp, Homo sapiens
ccttttgggaatgagatcaggactagggattcggcactggtgaccagcactcaggtggaccgctcagctgactgaggtggagaaggaaggaggagcgtggtgggaccctcgccctgccctcc

SEQ ID NO: 329535 - DNA, 122 bp, Homo sapiens
tgaagcccgcggatttgtgataagcagttgccacgactcagaaggtggtccgcgtctccacgctggagcaatggccatgctagaaagtgcagtttctgtcactagtgcttgctcggaccact

SEQ ID NO: 329536 - DNA, 122 bp, Homo sapiens
ctaggacgggagcctactgcgccctcaaaccccgcggcggctccctccccggagggggcgcgtgaggccaccacccagagcctcttcctagaggagccggaagcatcgggagccgcggtacc

SEQ ID NO: 329537 - DNA, 122 bp, Homo sapiens
cacctgggctacccctggctcttcctggcgcgctacgtggaaggcgtggggtcgcagcagcgcttcaacatcatgtgcaaccacctgaggttcaacctgcctcaggtaccgcgggcctgctg

SEQ ID NO: 329538 - DNA, 122 bp, Homo sapiens
accagggaagcgacctcaaagatggtctggtccactcttctccttttggaattgagaaaacgggagcctaagggtgtgacaagactttcctaatggcacatgacttggagagagagcaatac

SEQ ID NO: 329539 - DNA, 122 bp, Homo sapiens
tcactgggaccacgtcatggtgccgcactgggaccccaagatctcggccagctacccccgcggccgccacagccccccagacgacttgggctccagcttctacccggagctggggccctaca

SEQ ID NO: 329540 - DNA, 122 bp, Homo sapiens
tcttggcccgtcctccgtgccactcttttgagggtagactacatttcccagaaggttcagcggtttgagtcagcttttcgcgcgaacttttcctccgccagagcttgtgggactgtctccct

SEQ ID NO: 329541 - DNA, 122 bp, Homo sapiens
gcaagtcccttctcccgcttggccaggtttcttttccatacctctttttcctgacagggacgcttattcctaccagctctttcctcccagggcaatggtgaaaatcatgggaaattacaggt

SEQ ID NO: 329542 - DNA, 122 bp, Homo sapiens
tagtaagtggatggtctcaacatcttagctggaaccaaacagggaaaacaagaagatactcgaggttgctcagggcattttaagatatgaaaagccgccatccagccttggccctcccaccc

SEQ ID NO: 329543 - DNA, 122 bp, Homo sapiens
ctccatcacccattccgactacccgccctacgctccacctcttgacccgtcatcaccgaccggggggcgggactgcccgacttttcaatcgctgcctaccattggtagaactctccatccgt

SEQ ID NO: 329544 - DNA, 122 bp, Homo sapiens
ggccacagataacacggaacttgctggagattgaggacatctttcataaaaatctgcacacgctgcgagccgttcgcgggggtatcctggatgtcaagaacacctgttggcatgaagactac

SEQ ID NO: 329545 - DNA, 122 bp, Homo sapiens
cttcctcccctcctcccttcctccgccccctcctcttacagggaaggatgccctcggtttcgctgcgctctcccaggagcgaactcccgcagccgctcaggccagcgccagagaccttgtcc

SEQ ID NO: 329546 - DNA, 122 bp, Homo sapiens
gtagatgactggggcttttgccagactctcctgaactgacacagccttccagaccataagcgcatcgccaaagcccactatggctatctgattccctggatctcactgctaaacttccagca

SEQ ID NO: 329547 - DNA, 122 bp, Homo sapiens
attccaaagagatgtaccaaatttagggtataatgggtaacacaatcaaataaagaggagcgagtcaaaacctgttaggagatttttctgagaacacaccactcaaggcaagcacctactct

SEQ ID NO: 329548 - DNA, 122 bp, Homo sapiens
gtccctcctctttatgctcttttgaatttccacagtagtcatgcttattttttcaaaaaacgaaaagaaagaagagaaagccaaaaaagaaacaaaattgggatgttcgggttggagagtta

SEQ ID NO: 329549 - DNA, 122 bp, Homo sapiens
ggagcctgtcgggaggcggcccgggggcccccagtccctcacacccctgcccgcgtaccccgccacccagaaggtcctccaggatccgcagtccggggagtactttgtcttcgacttgccac

SEQ ID NO: 329550 - DNA, 122 bp, Homo sapiens
aaaaccctttccgggaggaatgcagcctaagagtcatctgtacttccccaggccagggcacggcagccagcagtgaggatgagccacacttttactcatttgtgggggagaaaaaagaaata

SEQ ID NO: 329551 - DNA, 122 bp, Homo sapiens
tttacattcttgaagattttccttaagattttctctgtacttaggtcccagggattgaagcgcagattcacatctctggccttggacctgactgtgtggatagagctctcagcctcctgtct

SEQ ID NO: 329552 - DNA, 122 bp, Homo sapiens
cccatgtaaatgagtcaattcatccaaacaaaggaagagtttaattctaaaggaacacatcgaccctactgggacttcagatataatgtgatgggtgttggttcatgcctcggccataggct

SEQ ID NO: 329553 - DNA, 122 bp, Homo sapiens
aattcaagcagtctggcttcagccatcacggtcctaaccgctctgcaaactgcctctaaacgaatgaatgaatgactcaatcattctaactggcccaagtcaaaatattaactctgccactc

SEQ ID NO: 329554 - DNA, 122 bp, Homo sapiens
ttaggtattaagttctggtgtagaagccacactgacacagcatgtttctctccagataaccgacagcacactcatccagctctccattcactgtcctaaactgcaagccctggtgagtctga

SEQ ID NO: 329555 - DNA, 122 bp, Homo sapiens
ctacccaggggtgcgttcaggaggccttcctgtccctcctcctctgaaggctgagacgtgcggccttgcctcggctttgcctgcttgtaagacacagtccgcactctctacctccaaggaac

SEQ ID NO: 329556 - DNA, 122 bp, Homo sapiens
ggtgacccgcttcctgtccacgtgcgagggcgttaataccgaggtgcgcactcggctgctcggccacctggccaactgcatgacccagatcaatgccatgacctaccccgggcagccgcacc

SEQ ID NO: 329557 - DNA, 122 bp, Homo sapiens
gctctcaccttcttggtctggagaagcccgcctcgctccgccctcggtcttcgagaaccgcgcgaagaggaccctgtcgctgctccccggccgcctccgatccagcctggcgagctccacca

SEQ ID NO: 329558 - DNA, 122 bp, Homo sapiens
tggagacaaggttttgccatgttggccaggctggtctcgaactcctgacctcaagtgatccgcctgcctcagctgccccctgatatttgttaagcgcctaccacataccagccctgggaggt

SEQ ID NO: 329559 - DNA, 122 bp, Homo sapiens
tagcgtcggaccatgtggaagtttctgaggctggggagccggataatggggggtggggcccgttggggggtaaaggggcaatagcgtcctttcacaggctaacctcggctcttcccagtcct

SEQ ID NO: 329560 - DNA, 122 bp, Homo sapiens
atctgtagtataagaagccagccaggcaaggttggggcttgggagggcactccaggtagacgacatggcaagtgcaaaggtcctggggtgagaaagagcttggtgtgatctgggagctgaca

SEQ ID NO: 329561 - DNA, 122 bp, Homo sapiens
tcagcgggaagcgggaagatcctgcaggacctgaccggggagtttgcgggaaggagggggcgggccaagccccgcagcccctcagtcccgcatcctgcaccgcgcgctccccggccccggcc

SEQ ID NO: 329562 - DNA, 122 bp, Homo sapiens
ccccgagggttcgcagcccgccctgccctcgagcgtgcctagcggccctgggcactggcgcggctctacccagctatgcagtgctttcccacacactggccgcggccactggctgcagaccc

SEQ ID NO: 329563 - DNA, 122 bp, Homo sapiens
gatgaagaaactgccctcaacattaatcccttctttcttgcttcagttagtgttttgattcggtctttaatgagtctaggtctgacattggcagagtcagcacatattgcttactccaccca

SEQ ID NO: 329564 - DNA, 122 bp, Homo sapiens
aaggctgggagacaagaggaaaagacagaacctgtgtgctgatgggccagctggcaggcgcggtgtgtccagcggccagcagaggtcaggctgtagatggtgtcattctggtgaaaggcatt

SEQ ID NO: 329565 - DNA, 122 bp, Homo sapiens
tgctctcaaaatcactgactgtcaccgaggccggccagagacccttatgtatctgattcacgatgacaccagctaactctgagtacagtagaaaacgtaccgtcgggcaaccagaaaatgcg

SEQ ID NO: 329566 - DNA, 122 bp, Homo sapiens
cctttcctttcactgctatgtcatttgtttgtaacacgctcatcatagtctgcttttcatcgtagggtcctccaacatccgggttaattttttaaatttgcatacagtaaaatccactcttt

SEQ ID NO: 329567 - DNA, 122 bp, Homo sapiens
tttttctgcctcagagcaccccacagggttgctggtccctctctggacaaggccttgggccggaagtcataacagtcagtgctgaggctgcgggaaatgttctggggtgagtcaggttgttt

SEQ ID NO: 329568 - DNA, 122 bp, Homo sapiens
aatcaggaaatcattgtttatgtaatatttttgcttgaagactcaagagaaaggtaaggacgacactcagtgcaggagtccatattaccacataggcgtttcggatgggggattcccttctc

SEQ ID NO: 329569 - DNA, 122 bp, Homo sapiens
atttcaggaaaagcgtactcattttgagtttgaaatctattaatgtactgaaattgagaacgttgtttaggaaaattgtttagggaaactacatagaatgaatataatctgagtattggatc

SEQ ID NO: 329570 - DNA, 122 bp, Homo sapiens
gggtggggtggggagcgcagctttgggaccctctagccggagacttccggcagctgcctccgacttgttctaagtacaggaaaaatctgtgcgcccagttgcctcactccaacagcgcgcag

SEQ ID NO: 329571 - DNA, 122 bp, Homo sapiens
ctcttctacaaacgccgaggctgcaatgagagcgcatgcgcctttcccaggactcattcacgtgactggaagtggctgggttctgatttgctcggtatttgattaaaaggtcttaacgtggg

SEQ ID NO: 329572 - DNA, 122 bp, Homo sapiens
cccctggagatgcttactcttggcaatttccccgtggtcctgcagcagctgaacgttcaccgagaagggagacccttgggccacttccatcacctccggacccaagatcacgatcctcgtag

SEQ ID NO: 329573 - DNA, 122 bp, Homo sapiens
ccggacacccgctgcatcttcacgctcagccatccctggcgactgtcccaatcgcgccaccgtctctcagcagcctcgggattgatcaacttcctggtcttcaaatgggccgagacaagcct

SEQ ID NO: 329574 - DNA, 122 bp, Homo sapiens
actcccacagaggaagctccaggggcagagccaggatatagaacattggttctgtcttctcggctccgtgtcttcactgtcctggaggtttgaagggcatgctatagctaaaaggcttaccc

SEQ ID NO: 329575 - DNA, 122 bp, Homo sapiens
attttcctcctcctgcagccgcaggctgccaatgcagttgccgcacgtgcctgaggagggcgccctcccctgctctgctagatgccgcccttgtccttggacagtcggctgggagcggagaa

SEQ ID NO: 329576 - DNA, 122 bp, Homo sapiens
ggacacagctaagggctgtgaaaattcaagaataaagaaaagtcctgccttcacgcagctcgcactgtgaggaggtttaatcagggatggtaattcaaaataactcgtgtttaatcaccagt

SEQ ID NO: 329577 - DNA, 122 bp, Homo sapiens
tgtgggtgggggaggaactcggggtggctttgaaagcaacttaaaaggagcacagaacagcgcagcggggctccgggggccctctgcagaggtttttttattacgtattttggctttgaaat

SEQ ID NO: 329578 - DNA, 122 bp, Homo sapiens
taggccaaaaatccccccgggttggtcggggctgggcggggctcgggggactgggctgaccgcggggtcggggccaggttctcacaccatccagataatgtatggctgcgacgtggggtcgg

SEQ ID NO: 329579 - DNA, 122 bp, Homo sapiens
ggcggacgaggagcttgaggcgctgaggagacagaggctggccgagctgcaggccaaacacggggtgagcgcatcagcccccgccaggcttggccctcgcggggcgccgccctcgcccggag

SEQ ID NO: 329580 - DNA, 122 bp, Homo sapiens
ccttccttctcatgcgtgtaattgctactttagtgagcgagcctaccagttgactaaatacgaaattttgctcagagttgtccgagcattactgtggacagattatttgagttctgtcattt

SEQ ID NO: 329581 - DNA, 122 bp, Homo sapiens
gtgagcgcctgaagacaggaactgtgtgcaattttcattttcgcaagcccagttcctgtgcgatctccagcacaatttaggtgctcaacaatgctgaatgagtagtccttgggaaataaagg

SEQ ID NO: 329582 - DNA, 122 bp, Homo sapiens
cagggccccctgcatggccatgctgactgcagctgggagcccaccacacctctggttccccgctcttcccagggctggggtctaggccaggcccctcttggcctgcgaattgtgccctggga

SEQ ID NO: 329583 - DNA, 122 bp, Homo sapiens
cccgggcgacagagtgagaccctgtctcaaaaaaaaaaaaaacaccaaaccttagaggggcgaaaaaaaattttatagtggaaatacagtaacgagttggcctagcctcgcctccgttacaa

SEQ ID NO: 329584 - DNA, 122 bp, Homo sapiens
cggggcattggtggggcttggggaatcgggaaggagctctccctcagtgacaggggtatacggttgactcaagagcactgccatccactgaacggatggcacccccaggccacaactcccgt

SEQ ID NO: 329585 - DNA, 122 bp, Homo sapiens
ccccaccaggattaaagatcaggcgcccgctgagccctaggaagcagtgacagacacctgcgcctaggcggagcgagaagagcctggaatggctccgggctttgcgtcacgcagctccgccc

SEQ ID NO: 329586 - DNA, 122 bp, Homo sapiens
cagagattgtctaaagaaggggctgtttattgaggtgtggaagggttaagggaaccaacgcgtgattttgaggcacacaggaactagcagtatttggaaacttttctggttcacaggcttga

SEQ ID NO: 329587 - DNA, 122 bp, Homo sapiens
ctccagtcgttggcctcttaccaccttcaaatgccaccttttccggaagatgtagccctgcgcccttgaaactggcaaaccctattagtgtctgcaagctgagatgcagggtgtgggcatag

SEQ ID NO: 329588 - DNA, 122 bp, Homo sapiens
cgccccgcgctcctctcttgactttgagcgtccggcggtcgcagagccaggaggcggaggcgcgcgggccagcctgggccccagcccacaccttcaccaggtagggacgctcccctgctcag

SEQ ID NO: 329589 - DNA, 122 bp, Homo sapiens
ctcccgggagcgcctgctccgctgcccgcagacaggcgtcgttcaaacctcagctctgctcggtctgcattcatggaccccagatcttcaccctaggatttccatctcagcatttcacgttc

SEQ ID NO: 329590 - DNA, 122 bp, Homo sapiens
cctggtggtaccaacaagattttccaaagaccactggcatgaatttcctcattgtttccacgtgaaagctctataagaccggtggaatgcttggggtcgaggcactactatcctaactcaca

SEQ ID NO: 329591 - DNA, 122 bp, Homo sapiens
atgggatatagaagggtgctcctagatattctgtttggatgtaagtgcagctgaaaggctcgaggttacatttattgtggagattgagagcatcctctcagtagcatagttactcattttta

SEQ ID NO: 329592 - DNA, 122 bp, Homo sapiens
ctccgccgggagtcgaagcaaaagacactgacggaagaggactgcgagagcccgagcgcccgtctctcttgtgccctagcagattccgtcgcttcttccggagccgtacgtggcaccgcccc

SEQ ID NO: 329593 - DNA, 122 bp, Homo sapiens
agggtcttcgcggcagaacctggccgtcccaacagcctgcggaggtttcgggttggatctcgcgttcgctccactgcttggcctgcgcttcagcctctagcgaccaaagacacccatgccac

SEQ ID NO: 329594 - DNA, 122 bp, Homo sapiens
agatcagggccactatttgagcgcatgcgcaagacatgctagtctcttttccggttagcgcggcgtgagaagccatgaggtgagttggtcctgaaagccctatccgcgttcatccgcgcctt

SEQ ID NO: 329595 - DNA, 122 bp, Homo sapiens
ttctctgccgccccggagggacgctctggggctctcgaacactattattatcctgggtggcggcggcggtgagggctgcgagcaagggtgctgcgtttgcattcgggggggcgggtatgttt

SEQ ID NO: 329596 - DNA, 122 bp, Homo sapiens
tgcaggggcctccatttagagcccccaaggagtcagaatccacacctccgcaaatgggcccgctttcccaggggccccctgcccagactttccctgggctctgtgggttttgacacctctct

SEQ ID NO: 329597 - DNA, 122 bp, Homo sapiens
tggcgcggagggcaagcacttgtgcctggctgtgcgggtttttcttattttttgcattaacgaacattacccccaaacactcacctaccgattacctttcgtccttcctctccgctcagggt

SEQ ID NO: 329598 - DNA, 122 bp, Homo sapiens
agctggtcctgggtggaggcccgggtttggtcacagctcagtttcccgcaatgtggacaacgacttggttgtccaagcctcgttcccagggctgagacaatcacgacagcagcctcgagggt

SEQ ID NO: 329599 - DNA, 122 bp, Homo sapiens
taataaacatggaatacagtatatcgctaatgaagccttcatctgtaatgacaagagaatcggagagaagcaaaaggagcctggagagaaatgttaggaaggcattttgaaagagtccggga

SEQ ID NO: 329600 - DNA, 122 bp, Homo sapiens
gccccgcctcgcggcgcttctcccctcccctcgcctcccctccccaccggcgaggccgcccggggctcccattggctcctcgaccttttgaatcatccccggcgctgtcgattggtcgcgcg

SEQ ID NO: 329601 - DNA, 122 bp, Homo sapiens
tttgctgggatgggctgtttttctgactggaccttagtcaatgcattcgatgccgttggtcgttgactggtatggttagtggccctctgggtgtcctgatggcattgtggtttgtgtcctgt

SEQ ID NO: 329602 - DNA, 122 bp, Homo sapiens
gggttttggaatgtgtgttcccggctgtgtgatcctgggcaagaacttgacctccctggacgcagcggcacccctcggttattaaggagggaggagtaggggatagaagtatttcaaaatag

SEQ ID NO: 329603 - DNA, 122 bp, Homo sapiens
cggagcgcgcggctctgcagcctgcttgccccggagttggcacccacggaggatggggaccgcaccctcagcttcgcagggagccaccgtggaggccagggcggtgcagagacacgacgtgt

SEQ ID NO: 329604 - DNA, 122 bp, Homo sapiens
aaaattattttattcacatttcaaatgtaaatttcattacacacggtctattcaattattcgggcccatgaagaaagtgtgactatgaaaccaaaaacagcagttaattagaaaatcatgtt

SEQ ID NO: 329605 - DNA, 122 bp, Homo sapiens
ggttttgccagcctccccgattgggactggtggcggggaggaggaagatcgagcgtgagccgtcagttgctctggcctggtgcagcgtctttgttggtgcactccacccggccgctgttcct

SEQ ID NO: 329606 - DNA, 122 bp, Homo sapiens
tccgagcagcgcaggggcgatgggcgagctcctgcagccacccgcttggtgcggttcccgcgagtccctgccctgccctgcccagcggtccgcgtcgcccgcccccaccccgggactgacca

SEQ ID NO: 329607 - DNA, 122 bp, Homo sapiens
ggtcctcaggccaccctgccagctccttgatgtgtctccctgagatcagccagggcatcccggctgtgggtgggctgtgacctgagcccgtcaggccctgctggggtagactggggagaagt

SEQ ID NO: 329608 - DNA, 122 bp, Homo sapiens
ggggccgccctaacctcaatgaggctcacgggtgagtcactgggaacattcctcgccgctcgcacgtccccgcgcccctgcccccgccattggccggccggctcggcggcccgagcccggat

SEQ ID NO: 329609 - DNA, 122 bp, Homo sapiens
gccccacgccttccaggtcattctctccgaccggccctgcctggagctaagtgccgagagcgaggccgagatggccgagtggatgcagcatctctgccaggctgtgtccaaaggggtgagct

SEQ ID NO: 329610 - DNA, 122 bp, Homo sapiens
acagtcctggtgtttagtaaacggtctgacacacacacccatcaggggctgcggagagtccgcctgggtaagctccgcaaggtgagtccccagagccgggaactcgcagcctgagcagacgc

SEQ ID NO: 329611 - DNA, 122 bp, Homo sapiens
cttttctcactaaccacacactcttgcagagctttcaggtgttactcagctgcatagttacgcagatgtaatgcacattattggcgtatctttaagttggattcaaatggccatttttctcc

SEQ ID NO: 329612 - DNA, 122 bp, Homo sapiens
acggctgactcaaccccgcaggcctgggcgctgcctcatcattttctccccttttgtctccggatccaggtgagggaatccagtgatgccatccagctgtccatgctgagaacccaacgagg

SEQ ID NO: 329613 - DNA, 122 bp, Homo sapiens
ttttccctgattgtattcacaaagaggccccttactctcaccacaaaactatcttcaaatcgcaacacagcatgaaaaatttctgggagagccttctagaagaaacgtgttctccataaact

SEQ ID NO: 329614 - DNA, 122 bp, Homo sapiens
cggcgggctcaggcgaggctggaaggcgagccgagaggccgagcggcccggggccggcagcgccgccaccacctcaatgcagttgccgccgcctcagcagcagcagctcctcgaacagccct

SEQ ID NO: 329615 - DNA, 122 bp, Homo sapiens
gagccccgcatggccccttaccccagggcagggcgtccagaaccacgcaggaaattccggcgtccagatcccaggcctcagtcgctcaggtctctagggctgtctggacgggatgaatcagg

SEQ ID NO: 329616 - DNA, 122 bp, Homo sapiens
ttcttgaagccagcgagaccacgaaccctctggaaggaaccaactctggacacagcaggacgtgagacttctacctgctcactcagaatcatttccgcaccaaccatggccacgtttgtgga

SEQ ID NO: 329617 - DNA, 122 bp, Homo sapiens
gccggcccagcagagggcgcccaccaatctgcacgcgggcccagcgagttatcttgatttcggccaagctttctgactgctccaaaaaacgaagaaaaagattcagggagagtaagaggatg

SEQ ID NO: 329618 - DNA, 122 bp, Homo sapiens
cccttgaggagcgaggaaactaataccccacgtagctactctcccacctcgctcctggcgcgggggtctcgagcctccaggaggccaggagcagagtcgctcagcataactcaccgttccgc

SEQ ID NO: 329619 - DNA, 122 bp, Homo sapiens
ccagaggccggctttccccgcttacgagcagccgctgttgccgacatgctgcccaccaggcgtgtagcagcggccgcagaactcacgtggcagctgaaccctcccagctccccagccgcctg

SEQ ID NO: 329620 - DNA, 122 bp, Homo sapiens
gtccatccagggccctgtcctcctgcagtcacggcctgtagttgtgcttccactgtggtccgtgattcccatggcatgccccactccatagggtggctttggtctcatcgtggtggcaccat

SEQ ID NO: 329621 - DNA, 122 bp, Homo sapiens
cagattgggccgcgcttggttcctggctgggtttatggagcctgcggctgaggcaggctccgcagaccccgagccagagtgggatttaacggcggccggtgcgctgtgcttggtcaaccccg

SEQ ID NO: 329622 - DNA, 122 bp, Homo sapiens
gctgcatgtgcacagcccgacggctgctccctggcgatgccatgtcctctcggttcagcgcggccacactcgctctctctgtcaatttcagagcagcgccagctctcacattctgctttagg

SEQ ID NO: 329623 - DNA, 122 bp, Homo sapiens
tgtgtcttctgagctgagtcacagtgtaggcacttaatgactacattcctaaatagggtacgtagaggagactgaatttcactcacatttattgactgtcacaataatgtgcttctgccaaa

SEQ ID NO: 329624 - DNA, 122 bp, Homo sapiens
cccacggccgtctcccagccccggcgccggcctctccccacccggtcaccgccggggtcacgcggcccctcgtgctgcggccctacccctggggccgccccctgaccccgaccgcccctcgg

SEQ ID NO: 329625 - DNA, 122 bp, Homo sapiens
gtgtcccagggggcgtggcccgtgcgaggggcggggcctgggggcgggaccagagcctgacgtgtgcccgccccggcttctaggcggatcgtggaccgcatggaccgcgcgggggacggcga

SEQ ID NO: 329626 - DNA, 122 bp, Homo sapiens
tcacgaactctctcaaacctgggcaggggcagccgcagcccccagtcagccctgagaccacgagggtgagcaacctgccctctgcagtgggctgcgctgcccagcgatgttgccagctgtgg

SEQ ID NO: 329627 - DNA, 122 bp, Homo sapiens
cgcaaagcaagcccaggcagtgtgagaagccgagtgaatcatggccgggcgggtggaggccggagaggctccaacccggtcaaacgctacgcaccaggcctcccgtgtgacgtgtacacata

SEQ ID NO: 329628 - DNA, 122 bp, Homo sapiens
catttagctgtgatcagggtctgcacatgcctgtctccagaagcctaacaggagcgtgaccgtctgcgtgtacgagagactgtgtgtgcgcatgtgtgtgtgtgtaacagagtgtgaggaac

SEQ ID NO: 329629 - DNA, 122 bp, Homo sapiens
caagggccttgggaggccaggaggatctagccccacagctgccatcttcagtctcccattcgttttccccttccctccgacagtcgccctggccccctcagtggcagggggagcccaagctc

SEQ ID NO: 329630 - DNA, 122 bp, Homo sapiens
catcttccctttggagcttacacttttcctgatgagatgtgggaattctttacgcattcccgacatgaatccttttcggcaggaagtatcatctcccagagcctggtccaccctttaccgtg

SEQ ID NO: 329631 - DNA, 122 bp, Homo sapiens
ctcctgtggactacatctcccagaatgcctcgtatttgccttccagttggacttagccaacgggaggcacccagaagaggttagcagttgggaggaaagatagctcacggtatttcttctca

SEQ ID NO: 329632 - DNA, 122 bp, Homo sapiens
ccccgagactgctcctccaggcggctacccggctgcctcccggccactcagcgcccgtcccgctcggatgggcagtgccggtcgcagcacccgtccccaacacccccgccacctccggagac

SEQ ID NO: 329633 - DNA, 122 bp, Homo sapiens
aaaagcgtatgcaaattttcgagcggccgacgcgcggtcttctgggtaaaaccgagccgccgcttttgcgacccttcgggagcctcagaaaacaaagaattggggtgtcgtcgaaagctgtg

SEQ ID NO: 329634 - DNA, 122 bp, Homo sapiens
cagctccagcctgcagtgccagaattcctcggtgaggtggccagggcaggggctgggggccgtgagccggaatgggccggttatcctcacggccctgggtcctggcgtgtgcttgttcataa

SEQ ID NO: 329635 - DNA, 122 bp, Homo sapiens
cgcgcgcggctcagagggttggcgaaccggtcgcgcgcgcggcgccgtgggttggtggcgcgttttgggaaagtccagttttaggggacccaagggactccgtttaccccacaggaggagtg

SEQ ID NO: 329636 - DNA, 122 bp, Homo sapiens
cagatggggaaactgaggctcaaagaggcgagtcagtgtggaagggcctgcagcgagtcccggcagagctgggggagccccgtgtcctctgactccccatctggtactcgttctgccccacc

SEQ ID NO: 329637 - DNA, 122 bp, Homo sapiens
ggtggttaacacgctggatccctctctagtgaaggcccgaccgtcccgatctttggggtccgcaccaatgatcccatgaaaaacaaaggtcagtccccaaactcctaggaatccacactgtt

SEQ ID NO: 329638 - DNA, 122 bp, Homo sapiens
gcagaggtaaaccaaggagactgaggcttagacaaatccagggaaagtctgcattctatgcgtggagttggcaaattccatcaggagagagtcagcagaggttgggggaagggtagggatgt

SEQ ID NO: 329639 - DNA, 122 bp, Homo sapiens
tttatacatcatcagacaaactcctgcttcggggtctttgccttgaagggttcaatctgccgagaataatatcttacagatgcttacataacttcatctctcacatccttcaggtccttact

SEQ ID NO: 329640 - DNA, 122 bp, Homo sapiens
gccacctctgggctgtgagtctgtggctctggtgagctcacagggcctgggcagaactcacggctacggggctcagggctggccagagacagagggaaaccctaggactggatgtgccaaga

SEQ ID NO: 329641 - DNA, 122 bp, Homo sapiens
gccagtcacacatttctcggatggctggcaaaagttttgttgtcaaagcaacgcccccatcgagcttgctttgcttacgcaaggcctcagcctttgcctcttccccaaacccaagctacctg

SEQ ID NO: 329642 - DNA, 122 bp, Homo sapiens
atttcaggagagagtacaggacacgtgtgccagcgggctgcagatcaggtcgaagagaaacgtgaggtccagatacagcaaaagtttaatactgcttgagaggttagcatacactttgtctc

SEQ ID NO: 329643 - DNA, 122 bp, Homo sapiens
atttcctgtgggtgggatcgctcatcctccttctcaggaggccacagtcaccactgtatccgctgctaagtggtcacctccctccggggcctgccttcttccagagaaagtctgaggccatt

SEQ ID NO: 329644 - DNA, 122 bp, Homo sapiens
ctttctttaaaacaaagattacacgtgatctttaaatcccaatgaagttaatgcaatgaacgtatacttatttggttgtgcaaggagattaagttaatgtctagtttgcatagtcaatgaat

SEQ ID NO: 329645 - DNA, 122 bp, Homo sapiens
ttttggctctgagaatggaatcccagagctggagacgagctggatggttcctgtgaatgacggctttctccaggaggagaattagagctaaaattccaggcaaatctgaaggaaagacatgt

SEQ ID NO: 329646 - DNA, 122 bp, Homo sapiens
gccagaggccgcggggacaccgggccatgcacgcccccaactgaagctgcatctcaaagccgaagattccagcagcccaggggatttcaaagagctcagactcagaggaacatctgcggaga

SEQ ID NO: 329647 - DNA, 122 bp, Homo sapiens
ctgttcttgcctttttagagaagacaggcttatgtgactgcacagcgggatgtcctgctccgtggcgcagtgtggaaaatactggacaagcgaaggatatccggaagcttctacagccgtct

SEQ ID NO: 329648 - DNA, 122 bp, Homo sapiens
tcactggttgtgcaaacacctacggtaccagtaattctggggaggcaagtactctggaaacgacggagaattaactccggaattacctagttatctggcatcacggtgaaaagagttccaca

SEQ ID NO: 329649 - DNA, 122 bp, Homo sapiens
caaaagcttcagctctttctgtgccctgggagctgagatgcacgtcagtggccttgccagcgtggccaattctctgctgactgccagaaaaaagaggccaggaagaaagaggaaagagaaga

SEQ ID NO: 329650 - DNA, 122 bp, Homo sapiens
gcatctaaggaattatatttcaaaaaacaaaagccaactcatagctctattaagctaacgcgtgtgcgagttttggctaggaaaaagccacaaagtaaagcaagaagtagggtattcaggat

SEQ ID NO: 329651 - DNA, 122 bp, Homo sapiens
tgactgatttaaaaggaaatggctgcagtttgcacaccgacactaagctcaaaagcaagacggagaataagccaactagacttggcctggctggctacttaaaaaaaaaattcctccccgag

SEQ ID NO: 329652 - DNA, 122 bp, Homo sapiens
gcaaaacttgtcgggagggtttcgtcatcaacctccttcccgcaaacctaaacctcctgccggggccatccctagacagaggaaagttcctgcagagccgaccagccctagtggatctgggg

SEQ ID NO: 329653 - DNA, 122 bp, Homo sapiens
agccccatctactgccacgcctgttcctgctgcagcctctgccccatctacctccacgcccggctcttgctgcagcctctgccgcatctacctccatgcctggttcctgctgcagcctctgc

SEQ ID NO: 329654 - DNA, 122 bp, Homo sapiens
catgagataatcaattttaacccaaagtcattggattatttatatgaagtccataatgttcgagtacctcagggacatttaagagttggaggtgcaaatatattccaaaagggtgcaacaga

SEQ ID NO: 329655 - DNA, 122 bp, Homo sapiens
ggaggagcagccggggcgtacgcgccctggcctccagcaggccggggagggcgcgcatggcgccagagggtccgcctgggtcctcgtggagactgctccctcagctcgccgccgcgggtgtc

SEQ ID NO: 329656 - DNA, 122 bp, Homo sapiens
gaaggacccaggccggttctccatcctcggctgggctcaggcgccgccgggctccttttccgagggggctacgttgcctccgcccccagcagctccgccaccatcgccctccagctctacgc

SEQ ID NO: 329657 - DNA, 122 bp, Homo sapiens
ggttctcagtttcgttttccccttggactccgccttccctgcagccgcccggccccctctcgcacaagccctcgtctgctacgggattggggtaaattggcgctggatccagagtgcgcgcg

SEQ ID NO: 329658 - DNA, 122 bp, Homo sapiens
gaccatttcccggcataggctccggtgcccctgcccggctcccgccgggaagttctaggccgccgcacagaaagccctgccctccacgccgggtctctggagcgccctgggttgcccggccg

SEQ ID NO: 329659 - DNA, 122 bp, Homo sapiens
agagttgtaagctcttaaaagggctaggaatttctttttcggggagctcggctcttaagacgcgagtctgccgacgctcccggccgaataaaaacctcttccttctttaatccggtgtctga

SEQ ID NO: 329660 - DNA, 122 bp, Homo sapiens
aggccccggccaccgctgcctttcccctgtgtgtctgagctgaagcggctacgcttataccgggaggtgaaacggaagctcagagagggccataatttggccactgtcacacagccaacctc

SEQ ID NO: 329661 - DNA, 122 bp, Homo sapiens
gcaagggctcacactgacctctctcagcgtgggaggggctggtgtgagacaaggggctcacgctgacctctgtccacgtgggaggggccggggtgaggcaagggctcacactgacctctctc

SEQ ID NO: 329662 - DNA, 122 bp, Homo sapiens
ctcttcagcttcgtcccaactgcgacttctgctccattcttctaacagccctttcaactccgctcggctgtaaccgcagactcgtcactaaaacacccacctaagcgcgggccttggtttct

SEQ ID NO: 329663 - DNA, 122 bp, Homo sapiens
tgaaacggaccttcttatggagcctcctgtgggacacgcgtgaggggcttaggccagcggcgtctcaagctcattttgaagaaccgagatgtgactccatttcccaactgcagcccttgatc

SEQ ID NO: 329664 - DNA, 122 bp, Homo sapiens
ctctgctcagcacccctttctctccagccccgactgcccatcttcgcccctaccctcgcgcgtcggggccgtgtctacacccaccccaggacctggtccgtccaggctccttcccatcctca

SEQ ID NO: 329665 - DNA, 122 bp, Homo sapiens
gctgagcctgagagcagccagttgctcatggatcattcccgggtcagcggctgccctggccggattccctggctgcgtctcatggagcagcctcttgggccgtgcccaccagtctctgtaga

SEQ ID NO: 329666 - DNA, 122 bp, Homo sapiens
attttcaatgaaaagagtcttaaaatgttcaggcgagtggagaaaatggtgatccgctggcgttagaagtggacagagaggctctcagtacaaactgtatctgaacgtgttcctcacaaatt

SEQ ID NO: 329667 - DNA, 122 bp, Homo sapiens
tttgctaactgagaatgctgctgtgtgctgtggcctggtgagaatgccatggacttctctcgctcagtccaacaccttaggagaggtgggtcaggaactgctttgtgcgtggggagagcgga

SEQ ID NO: 329668 - DNA, 122 bp, Homo sapiens
cacgccctcgtgtgggagggcggctctgaccccctacttgagctgtcggcagaagacctccggaccctctctccaagaggttcattgctggatgtggccaccagcccagcaggcacctctgg

SEQ ID NO: 329669 - DNA, 122 bp, Homo sapiens
ggctttctccaagatgttggccgtgccgtggagaggactggacgctgggccaagggtggccgcatccatggggcctggagcctgcggactgcaggaagccacagagtgggtggcagcagggg

SEQ ID NO: 329670 - DNA, 122 bp, Homo sapiens
ctgacctctgtcaccctcaggaaagtcagtaggagtggtgaccaccacacgggtgcagcacgcctcgccagccggcacctacgcacacacagtgaaccgcaactggtactcagatgctgaca

SEQ ID NO: 329671 - DNA, 122 bp, Homo sapiens
taatggtttaccttagtcttacacactctaaagtcagagtacccggatttgaagtgctggcgccctgtactttctaactggtgactttgaacacttaatctctttgtgttccaatttcttca

SEQ ID NO: 329672 - DNA, 122 bp, Homo sapiens
ctagaagatgtgaacccaacatgagttttctgtctcatggctctagaagcagagacataccgctgcttcaggagatgcctaaaataagaaaatgctaaaagcagggcagtctgccaagaagt

SEQ ID NO: 329673 - DNA, 122 bp, Homo sapiens
acctctgtctcctgggttcaagcgattatcctgcttcagcctccctactgggacaacaggcgtgtgccaccatgcccaactaattcttgtgtatttttagtagagacggggtttcaccatat

SEQ ID NO: 329674 - DNA, 122 bp, Homo sapiens
gctttgcaggagggtgcgtgggggctggagggtccctggaagccgcagggagcgcgggcccgggtgggtcctggtaccgggtggggagagcggaaccctcccaaaacttggggcgcggggcg

SEQ ID NO: 329675 - DNA, 122 bp, Homo sapiens
cctgtgttggaatcatgactgcacccccagaagagatgcagtggttctgccccaagtgtgcgaacaagaagaaggacaaaaagcacaagaagaggaagcatcgagcccactgacgactcccg

SEQ ID NO: 329676 - DNA, 122 bp, Homo sapiens
aaaggagatggagggaacatggttgtaaattggagacctttaatctggtccttattgcaccgtatcttaatgttgtagatttgggaaaattatttcatgtctcacagttgaaatgaaggcac

SEQ ID NO: 329677 - DNA, 122 bp, Homo sapiens
tgggagggggtcgggggaggggcgggcgcccagacttcctaacttcgccgtttggggcttcgcagctccgaggttttgcgctcagagctcaggagtttggacccccaccccctaccccctca

SEQ ID NO: 329678 - DNA, 122 bp, Homo sapiens
tgggcacgtgatcccagctggtccaatcacagggagctcgggggcttgaaaaggtgcttccgggcggaggctttcttcgtgccttccctgaactgggagggctgggcatgaggttcttcttc

SEQ ID NO: 329679 - DNA, 122 bp, Homo sapiens
ctcagccggcgcgcagggaggcctttccggaaacaccggctggctgcgcgctagcaggaccgctctagatcccctgacaggccggaaaataacccccactcactatttgggcacgcgctcgt

SEQ ID NO: 329680 - DNA, 122 bp, Homo sapiens
gtgccatacagcaggaatgggagctgcccccctgggcacagcttctgcactgtctcggtccgcctggagaaaggatcaggaatcaggactggaaatgggggtcaggaagaaccagaaagggg

SEQ ID NO: 329681 - DNA, 122 bp, Homo sapiens
gacctgaaacgccggctgcagctagagacaaaggccgcgccaaaagcggaaagccgtcctcgtcgctccagctgcgtgcctgattggacggtttccagcccagcgtctctgattggataatg

SEQ ID NO: 329682 - DNA, 122 bp, Homo sapiens
aatgaacagtgtggccctaggctcaaaggagagggtgctaaccttggcaatggctgaaatcggtgtcacctcctggccatctgttagaagcagcagatctgtgccattaagggctggcagcc

SEQ ID NO: 329683 - DNA, 122 bp, Homo sapiens
acctcagatgatccacccgcctcgggctcccaaagtgctgagattacagtcgtgagccaccgcgccagcccgttgctgtatttgaacagaaaaaagcaatagtacataaaacaaaaggacag

SEQ ID NO: 329684 - DNA, 122 bp, Homo sapiens
caggcctgtggtcacccgtgttgtcatcaaggcccaggggctggtgctggaggcgtccaacggctccgtcctcatcaatgggcagcggtgagccggccaccctggggaggggcgagggccgg

SEQ ID NO: 329685 - DNA, 122 bp, Homo sapiens
ctgcgcttagcctgtggctggtcccggtgtgcagtgacaggcttcctccttgggcactggcgtctggacaaggcgggatgtggcagtgcccaaaaacttggagatgccagcaaccgcagagc

SEQ ID NO: 329686 - DNA, 122 bp, Homo sapiens
cagcgcggtgattgggtacaggtctcgggagcgcggtgattgggtacaggtctcggccagcgcggtgattgggcgcaggtcccagccggcgcggtgattgggcgctggacccggcccgtgcc

SEQ ID NO: 329687 - DNA, 122 bp, Homo sapiens
tcttgtgtaaactccccattgattcttccaacgtatctttattgagctgaccagagcctccgtttagcctcatgttctctacagaatttagtttctcagtagtagacacgaaatgattgagt

SEQ ID NO: 329688 - DNA, 122 bp, Homo sapiens
gaagagtcttccctcagggcgaccctccgcgtctcttcatctctcccggccccactgcagcgtccatcacaacatccccaaggtcccagaggccccctgccgctgcggagcccccgggtccc

SEQ ID NO: 329689 - DNA, 122 bp, Homo sapiens
ccctggatttaaggcatatcattactgaggctgggcaaaggatatttagtgcctctctgacgtgactgtgtatttctgtactatttaagcacttgaacttgatgttgtggggctggcaccca

SEQ ID NO: 329690 - DNA, 122 bp, Homo sapiens
gaagtgcgcctgcgctggttggggtgggagtttaaggtgacacgtggagagcgcggcggacgtccttacctccagaggaagtggggattttgatagttcgggctgacctacgcgggtaggac

SEQ ID NO: 329691 - DNA, 122 bp, Homo sapiens
aggataattttagaaatttatttgtatgtcccatttgacagaaagactggcgctttaaagcgaaaacaattagcataatgagaaataagtcactgagtgagatgcggtgttttagacaaggt

SEQ ID NO: 329692 - DNA, 122 bp, Homo sapiens
gggtaggtttccactttaacattctgaccaaaattctcaactcgatgcagtcagagtctgcgcaacctgggacctcgagccaagaaatcctcaagtgaccttacttggcaaaaccaacaaaa

SEQ ID NO: 329693 - DNA, 122 bp, Homo sapiens
ggtgaccttggtgagccactaaacccaacctgagtcaccctcttcctgcctttctgttaccgagacaatgggtgtccaggctgttgaagcccttttgagtttagttctgcttcttgcaccca

SEQ ID NO: 329694 - DNA, 122 bp, Homo sapiens
tacgcctgataggtaaacaaatcatactccccagtcaagacttccctgacagtcccactacgagaaagctgtggtgggacagccaagtactcgtttccacaccaagactcagactttttgag

SEQ ID NO: 329695 - DNA, 122 bp, Homo sapiens
ccaacaaacccggcgcggggcacgccgggagagaacccggatgagggggctagtgtagtgcgcgaggcacgacgggaacggcgagacccggataaagggatcgcggcaccggttcgagaacc

SEQ ID NO: 329696 - DNA, 122 bp, Homo sapiens
gaagcatctgcccaaccctcccccaccgcgcgccctggatcctctgcctgccccctcccccgtgacgtcaccctagtcctgtcccggggagcctgcaaagcctctcagattcaaactgctag

SEQ ID NO: 329697 - DNA, 122 bp, Homo sapiens
accaccagcagcagctgggacaaccagcaccctgtggaactgcacagcatgcatagaatacgtcctcccttcagttggcttgggtcagcttaggtcatgggccacttggactgatagcagtt

SEQ ID NO: 329698 - DNA, 122 bp, Homo sapiens
gtctggggaggggacagaccgaaggcagagaccaccgcgacagacacctatcgaacttcacgctaaggactgctcgttttactgatccggactcagcccttagcgctgggcggtaccacgcg

SEQ ID NO: 329699 - DNA, 122 bp, Homo sapiens
caccgctcccccccaccccgcaccccgcaccccggcatggctttccccgtgggcgcttttcggcgcatgctcagagcgccagcagggctgttctgcccctacagaggcctcctagtcctggc

SEQ ID NO: 329700 - DNA, 122 bp, Homo sapiens
tcagacatttgactttcaaacagattttttcagaaactcattatataaaaaagtgggagacgctctggtataaaacttttaaaaatagtaaatattactgtataagtaggctagtggtcctc

SEQ ID NO: 329701 - DNA, 122 bp, Homo sapiens
gatctcttcctatccccatttcaactttgacctctattcccttcttccccatcacccgtccggaatatctagtggggagcctatctgtctcatgtgtatgtcagggcagggcctgaaacagc

SEQ ID NO: 329702 - DNA, 122 bp, Homo sapiens
tacctgtcacagggtaaatgttcaataaagaaaaccttctaattccctaggtagcagctgcgctaccacacccccaacacacacaaaaccatcatatccctctaaggatgcctcaaacctgg

SEQ ID NO: 329703 - DNA, 122 bp, Homo sapiens
ttccgggggaggtgggtggggccctccggcagcctaagtgagattgcagagatctggggccgctggaggaggtccttccgccccgggcttggggctttgggttagcttctcccccgcttctc

SEQ ID NO: 329704 - DNA, 122 bp, Homo sapiens
tcacggtcaggattgagttgtccagctgtaactggcgttcaggggtggtaaggtgccccacggccaccggctggagattggtaaactgagtcgcggccgcagtggtgatgggggtcacggtg

SEQ ID NO: 329705 - DNA, 122 bp, Homo sapiens
ccgaggtcaaaccatttaggaagaatgcctaattcccacagttaaggctcggtgggtgggcgcatgcgcacaggatcctcgccgtcaggcacctgcggaacacacttggaaatcgctttttc

SEQ ID NO: 329706 - DNA, 122 bp, Homo sapiens
cgtgatccacctgcctcggcctcccaaagtgctgggatgacaggcgtgagccaccgcgcccggcccacaataggtaatcttagcagcctgcttcatgagatgactgggaagggaagatgaat

SEQ ID NO: 329707 - DNA, 122 bp, Homo sapiens
tttaatagatgcagaaactgaggcacagagaggttaagcaagtgatcaaggtcacacagccggtaagggccggtgaaggaattgaaaataggccagtgaccactgtaaccagtaaactatct

SEQ ID NO: 329708 - DNA, 122 bp, Homo sapiens
cgcctccgctgtgccaggggcgccgggaagcccgacgacgacggtgtcgtaaaagcgtcgcgaaggcgtccgcccttggcggcttcctgccacctgtataagtggagtgtgctggggtgtgt

SEQ ID NO: 329709 - DNA, 122 bp, Homo sapiens
ttcgggatgccaggaaaggttctgaagtgaccaacatcaggaactccacacctgggcttgcgcatcacctccagagtgtcggagtccagcttccccgtcacctccaatccaaggaacttctg

SEQ ID NO: 329710 - DNA, 122 bp, Homo sapiens
ttttcctcttgacgttttcccccagaggagtgtgcttcagttgctgcactccacgagcgacgtggtgcggcagtacatggccaggctcatcaatgcttttgcgtcactggcagaaggtgaga

SEQ ID NO: 329711 - DNA, 122 bp, Homo sapiens
caatcttccattgtgaggtggggtccacgtccccacaacccacgaacttgggtggccgtgcggcatgtggcaaacctgaggggtgactccaagatgcttcactctgtgtgctggaccgggag

SEQ ID NO: 329712 - DNA, 122 bp, Homo sapiens
agaatatcctgactgtgattggttgaattggctgccattcccaaaacgagctttggcgcccggtctcattcgttcccagcaggccctgcgcgcggcaacatggcggggtccaggtggaggtc

SEQ ID NO: 329713 - DNA, 122 bp, Homo sapiens
caggtgaggccgcattggggagtgggtgggagggccctggctgagcagctgcttcatcttcgtcatcatcatccagcacgatgatgctgttagcggtggccataggggatcaaatcccccgg

SEQ ID NO: 329714 - DNA, 122 bp, Homo sapiens
cgcagctcctccctgccagggatggtcttgatgatgagtgtggggggcttggggctggcccggggcggcaccggcgccaactccagtgtgcgcgcacccatggcggggccgtccagcccgtc

SEQ ID NO: 329715 - DNA, 122 bp, Homo sapiens
catggactaacattggaacggtacagggaagatcagcagggcccctgtgccaggacggcacgcgaattcctgaagtgttccaaataaataaatgagtaagaacaggaagtggtactgggcgt

SEQ ID NO: 329716 - DNA, 122 bp, Homo sapiens
tcaggtacctgagacgatccgcgccatctttgctgagggcgagtgccaggcctagaggggcgggatgggcctggcgctgcccagtggggcctgtggctggaaccccgggctaggcctttggg

SEQ ID NO: 329717 - DNA, 122 bp, Homo sapiens
aaacaagaaaacagatggatagcaatttcagatagtgataagtgacgtgaaaatatgatacgaaaataatggattcagcatttctggtggcttgataaatttattaaaaaaaaaaagaagat

SEQ ID NO: 329718 - DNA, 122 bp, Homo sapiens
gtgagtgttatagctgttcaaggtggtgcgtccagagttgtttgttcctcccagtgggttcgtggtctcgctgacttcaggagtgaagccgcagaccttcgtagtgagtgttacagctcaca

SEQ ID NO: 329719 - DNA, 122 bp, Homo sapiens
ctggagcctagtcgccgccagacacagggccctttgtacccggaggagcgggagcgggagcgggggcgtcagggcaacccttgcaccccagaggcctgcctaggaccaccctgggaacaaat

SEQ ID NO: 329720 - DNA, 122 bp, Homo sapiens
gggcagacacagaagagaggcgcctgccttgggaacaccgggcagctggccaggagtcaacggcccacagaggaacaagggaaaatggcaggcagcgaggtgcggggtcctcaacagccagg

SEQ ID NO: 329721 - DNA, 122 bp, Homo sapiens
aagtgcgccgcccgcccgctctgatccagaaccagagaatccgccatgcgaaggcgctcccggagaccccgcccagccagtgcctggaattccaccatcagcgctttattccgagtttcagt

SEQ ID NO: 329722 - DNA, 122 bp, Homo sapiens
gggagcttgcggtgcgttctgggaaagttgctgggccagctcctttgtttccagtctgagcgttgcgttcggtttcccgagggtcttctgaggcaccgcggctgcgggcttctgagttcccg

SEQ ID NO: 329723 - DNA, 122 bp, Homo sapiens
ggccttgccgcatcctgccggggagagaacacaaacagcgtcggggaagccacctggctgcgcccgggagaggcgacagccctcatccgtttatttcctctcttgaccatttgttcagcgac

SEQ ID NO: 329724 - DNA, 122 bp, Homo sapiens
gtttgtcgtggaaactaggctccactgacccagcccacagctcccctggctgcagtgcttcgtaaatacttcagcaaaaatcaaagaggaatgaggctgctggtcctgctcctgatgtgtcc

SEQ ID NO: 329725 - DNA, 122 bp, Homo sapiens
gaaatacatggagtttgaccttaatggaaatggcgatattggtgagaaacgggtgatttgcgggggcagggtggtgtgcaggcctaagaagacagaggtctctcctacatgctccattcctc

SEQ ID NO: 329726 - DNA, 122 bp, Homo sapiens
ccctcgcggctccgggtggtctacgaactgtgatggcggcggccgcggtgatgggcccggcgcaggtgggtgctgcctttcccagactttcgcccgccccaaatcctgaagttccaaatgag

SEQ ID NO: 329727 - DNA, 122 bp, Homo sapiens
aagtttgagcccagactggcaacatagcaagaccatgtctctaaaaaaataaaaataaatcgaaaagtaaataaaagagggaaaggaataacatactcaacttcataaagatgtggggaagt

SEQ ID NO: 329728 - DNA, 122 bp, Homo sapiens
gggagtcttgggggagtgcaggatgtccagatagcaccagccctttgttaactggagagacgacagacaataaccccggcgtggtgaaacccggcccacacgtcccgcccgccccagagcca

SEQ ID NO: 329729 - DNA, 122 bp, Homo sapiens
tccatgccacaaatggcctcgctttaccaatgcaaaagggcaaatcaaggggttctggcccgtcttgtgtcattcaaactgcagttttgaaaagttcgattagaatgttttgcccgtgataa

SEQ ID NO: 329730 - DNA, 122 bp, Homo sapiens
ttctcccagactggattccgaacctcagtttccctgtgtgcaggagtggtgcctccatcacgggagtgctggacgaccaagtgacctaatacatgctaagggctggacatgctaagcactgt

SEQ ID NO: 329731 - DNA, 122 bp, Homo sapiens
ggccgcgcggcgcctacaagcggccggggcacgggatagggtggccaggggtcccgcccgcgccccaggcccccgcccgcggctcccgcggcatcccctgcccgcccgcacctggctacccg

SEQ ID NO: 329732 - DNA, 122 bp, Homo sapiens
gaagtgcgtcacacccgccttccggagctgcgctccgcttcggggtcctctctaggatcgcgggaggactttgcatccctgtgtagggctctaatctcgggtttggggatcttgctcctcag

SEQ ID NO: 329733 - DNA, 122 bp, Homo sapiens
gttcctccagacactgagggggtcgcattccttacctcacctttgtccctgcgcgggctgcggctgggatccggtctttccagccccgagagggacctggttcctctgcccaggcttctgtc

SEQ ID NO: 329734 - DNA, 122 bp, Homo sapiens
tgtgcaggaatgagtacctggtgcatgagtgtccccagctttcaggcgtgctggaaaaaccgcaggccggctcgaattttggaaaccagtgttaaccaggacttcaaggacctgccttcgtt

SEQ ID NO: 329735 - DNA, 122 bp, Homo sapiens
gatgatgaccaatccaagtcacacagcccttaaatgagccaccaggttacctttgcatcacgtgtcccaaatgtgtttccactccctcagttgtcgctgttccttcagggagtggtgatgtg

SEQ ID NO: 329736 - DNA, 122 bp, Homo sapiens
aagggtcagagagaagactgctgttgcatgtaatgagtgaaccaggggcaggcatgggatcggtagtgcaattaattcttaaaagttagacatagaccttgagaaatggctctgaaaactaa

SEQ ID NO: 329737 - DNA, 122 bp, Homo sapiens
gcacaggcttcccttagggcggggacgagggggtcagcccaggcccatgggtcgggacgccggccattcagaggcccagtggccaccactccgctgtggctgtccctggctcggggtcctga

SEQ ID NO: 329738 - DNA, 122 bp, Homo sapiens
agggcacacgggtcccggatctctccttcctcctgggtcctgctttgaccttccccacgacgggtgttaagggactagaaagagaaagttcttacctgtcatgtttttaaacctatcaaatt

SEQ ID NO: 329739 - DNA, 122 bp, Homo sapiens
tggccttctcctggcccatcatgtgtaattcctgctcgcccatccaggcctccgcctcggcggcatcgcggtagaactgctgggctcgcagggcatcctccagtcgcttccctcgaagttcc

SEQ ID NO: 329740 - DNA, 122 bp, Homo sapiens
gtttgtatcctggggtacagatcacagctccatgaaggtttgagctaggcaggtgagccacgctgggagcaaagatggtggtggctaggtacttgcttatccctataccaatcagcaggatg

SEQ ID NO: 329741 - DNA, 122 bp, Homo sapiens
aggtgactgtccctttatcacagcaggagaggaacagtacatgcaaatgtgtgaatcactcgggctatgttcagagaactataaacagttcagagttgatgaagggcaaagtacaggatgag

SEQ ID NO: 329742 - DNA, 122 bp, Homo sapiens
gccattccttgtgaggtaggaggcaggactcgacactgaatgagatttaagactggctgacgtgcctaccagtgccatgacagtttacccattccctagcaacaacctggaagttaccacct

SEQ ID NO: 329743 - DNA, 122 bp, Homo sapiens
ggatgggaatcaccgccggcgcgggggtcacaggcacacgcggctgggcgggaggggccgcggtgggcaccctcccccgctggctcgacagggcatccccgatctgctgcagcagcccacgc

SEQ ID NO: 329744 - DNA, 122 bp, Homo sapiens
aatattaagattccatgcaggcgaagcaacaggagaacctggcaagaacagatgccaccccgccaggcagcccacaaggcctgccccctgtgtgctggccgctgaggcctgaggcatgggga

SEQ ID NO: 329745 - DNA, 122 bp, Homo sapiens
gtggaaaaaatccctctgctgaacctagtctatacaccaatattatgtcattcaaggtaccgacaacctgtttcaggagagagacgttcatttttccctaatgaaatgcaagcattctgtta

SEQ ID NO: 329746 - DNA, 122 bp, Homo sapiens
gccctgaacgaggacctgcgctcctggaccgcagcggacactgcggctcagatctccaagcgcaagtgtgaggcggccaatgtggctgaacaaaggagagcctacctggagggcacgtgcgt

SEQ ID NO: 329747 - DNA, 122 bp, Homo sapiens
agtggggagagcagaccacccgctgattccaattccctaggcggccgcggcgagctgcggcgtctctgtgccccggcctgcccctatcccgcctgcgccccgcccccgcccggctcgcgcca

SEQ ID NO: 329748 - DNA, 122 bp, Homo sapiens
cgagccctggagaggcggacaggagggcggcggagagcgctgggccggttgtctccagcgcgcactatcgcgggcgcgtagtagatgtcgctgttgtccgtgcttacccggccggccggcca

SEQ ID NO: 329749 - DNA, 122 bp, Homo sapiens
agcgcgctcgctgcctctttatcgctcccaataacgtgatgaagtgtaaatcaaatgccacgccgggaggggccccggaacggcgcgagtcgtgcattttcgctcaccagcctatcttgcct

SEQ ID NO: 329750 - DNA, 122 bp, Homo sapiens
tgccacgcctggtgtctcgcggggctgcgtccctgagcacggtcaccctgggccctgtggcgcccccagccacgccgccgccttggggctgccccctgggccgactagtgtccccagcgccg

SEQ ID NO: 329751 - DNA, 122 bp, Homo sapiens
tcgggaatcttccaaagatcgcccaccagagggagctttgtatctctcaggaagtggctgcgttaatatccttgctgaactcagttgttcgctgggagcaacccttagcagtatggacttcc

SEQ ID NO: 329752 - DNA, 122 bp, Homo sapiens
catcggagcgggcgctgccgagggcaatttggtgattggctggtctcaccacgtgaccggcgctgagccttccgtgcgaccggattggctgtcgcggacgctgacggacaaggccggggcgg

SEQ ID NO: 329753 - DNA, 122 bp, Homo sapiens
atgaagtcttaggttccattcggttccataaacagctcagagggtgatgtccctgggtaacgtcctacagcccatcctaccagccctctcctactgctgctggccaaatcggcagagaaatt

SEQ ID NO: 329754 - DNA, 122 bp, Homo sapiens
ctgaggaatgttgcctcagtgccttgtatgcacagctagcacagttatctcaagtacttacgggttatgttatcttctccccagctaggacatgggctgctggatggcagagacaaattcta

SEQ ID NO: 329755 - DNA, 122 bp, Homo sapiens
gaggcagggaagaaactccttagcactagttagagtgatcagaaaccaagaggacctgatcgctgtacctgccaggtctcagtttctgtctccttccaactgaccacctcttcctctgagac

SEQ ID NO: 329756 - DNA, 122 bp, Homo sapiens
gagcgggtggacgggccggcgggcgagcagcccggccggcggggtccgcagcgcgccccgcgtcccatggatatagcaacaggtcccgagtcgctggagaggtgcttccctcgcgggcagac

SEQ ID NO: 329757 - DNA, 122 bp, Homo sapiens
ggtgtggcagggctcaggttctgtcactggggcccaaagccccgaggcagggacagctagcggtctgtggagacaagactgtccccttcccgcctccccgcattcagcccctcacctgttgg

SEQ ID NO: 329758 - DNA, 122 bp, Homo sapiens
gtggtaaggaaaaagatgagaagcttttaaaatggaaatctatgaagagagaactgatttcgtaattgcatcatcagtgggaaagtaagctctctgaggaccaggtctgactgagagatccc

SEQ ID NO: 329759 - DNA, 122 bp, Homo sapiens
ggccaatcgcaggcggcgacacacagcggccccgcctggcgtgaccgagactctccatcacggcccgcaccattggctcaattcgaactctgctcgttctgattggaaagtggcctcgcagg

SEQ ID NO: 329760 - DNA, 122 bp, Homo sapiens
gctgccacgcgcagtatgctggtcacagcgaaggtggtggtgccctggctgggctcctgccgggatgcccaagtcaggtacttctcgcggggcagctcctgtgacccctgcagccagcgaac

SEQ ID NO: 329761 - DNA, 122 bp, Homo sapiens
gagacagctgtgaagtgtgaggttctttgtctgctggcagctaggggcgacgaggcgggacgtcatggaagtgtaagtcttctcgggcgcgtcccttttcgcccgaggagcccaacggtttg

SEQ ID NO: 329762 - DNA, 122 bp, Homo sapiens
gcgagctcctctcgggggtctttcgtactcaacagcacggcggcggtgtgcacgggagtccgccgggcacacgcggggtacacttaagtgcactgccaggaggccgggagcccagcgtgcga

SEQ ID NO: 329763 - DNA, 122 bp, Homo sapiens
agctgtgtgaccttgggtgacacagcttcacctctctagatacagcgtcctcatctgggacgtggggataacagggctatgggcgtcctcactgagatgatacgtgcaaagcagttagctgg

SEQ ID NO: 329764 - DNA, 122 bp, Homo sapiens
agggggcggggcggggctggcccgggacaccgcgcgtgactgggtctcattccagggggacgcacggcccgctggtgcagtggaagagcccggcggccgccgccgcagccttctcggcccgc

SEQ ID NO: 329765 - DNA, 122 bp, Homo sapiens
ctcagcggctgtgaaagagtgctttcttgcgggtcagccccgacaggacagacttaagggcgggagggagcccatcccgcttgccccaacgaacgcgggcgcggggctttcctcgcaggtta

SEQ ID NO: 329766 - DNA, 122 bp, Homo sapiens
gggcccacacacccagagctgatgcagcctctctaatcaccccacagaaacacaggtccacgtcatgggtgcccggctccacaccctgtcctgaaagcttagtgggtttcttgggccctgac

SEQ ID NO: 329767 - DNA, 122 bp, Homo sapiens
cgcagcgcctcccctacagctcgaagggctgagtggctgccagatccagcggggtgggggcgggggcggacagggtgtcccgccccggcccctcctcaccgggctgagagggggagggagac

SEQ ID NO: 329768 - DNA, 122 bp, Homo sapiens
gggtggaggctcttgctgctttaccctatgttctcggttctcctcctttgcaaaacggatcgctatgtctccttgcttggcactttgcaaattggggaacgctaagcccacattccggccac

SEQ ID NO: 329769 - DNA, 122 bp, Homo sapiens
ttgtccctttcttggcaatacttcccctaaatagcattattttgtcatgttagattgactcgtgaaattaaattccttcatttatttccttccattttactgtctgatcatcaaagcaatgt

SEQ ID NO: 329770 - DNA, 122 bp, Homo sapiens
tgcatttttgcaggtatgggactgttccatggccctaatcttgtgtgtcatctggagtcacgcagagaacaggagactaattgttctgtgtccagactccctaagcatctccagggtgagac

SEQ ID NO: 329771 - DNA, 122 bp, Homo sapiens
cttgtccttctgatgccctgcttggggtggtgcctacctcctcacagtctctggagagttcggggggatagcccgctcttgcacaagcccttggactgtcagaggtccaggcttccagcctt

SEQ ID NO: 329772 - DNA, 122 bp, Homo sapiens
gtctttgttacaaatgcgtgtgtatatactggaagtacttgtggaacctaagctttaaagcggcaagaatatgcagaagagaccaaatgtggcctgcacagcctaaaatatatactaaatat

SEQ ID NO: 329773 - DNA, 122 bp, Homo sapiens
agtgggattcttccgagaagagcccagccgggtcaccatcttaattttggtctgcgaaaccgtaagcagagaatccactcaagcccacctggatctacagaactgtgagctaagctgatgtg

SEQ ID NO: 329774 - DNA, 122 bp, Homo sapiens
tgttctgggcagagggttatgtggctcttgaagagccaaagtgcgcagacaaagtgacaccgggacaaatagcccagggggaccagccccaagcagggcccctgcatgcttagccttctctt

SEQ ID NO: 329775 - DNA, 122 bp, Homo sapiens
tctatactactccggttccaccgtgcaacctgccacggctccctgagaggcaaaatgtggcgacggcagtgtaagctcgtgctggaactctccaggaggtaagcaatctcccagagcccagg

SEQ ID NO: 329776 - DNA, 122 bp, Homo sapiens
gttgcatcgatttcatttttttttttttccacatagagttcagctttgtttgcttcgtgacgttggggggcacatttctgctttgaaggaaaacgaaagctaccaagttttgggagatggga

SEQ ID NO: 329777 - DNA, 122 bp, Homo sapiens
aggggccaggagtcacgtgggcccgggcattcagccgcgatccaggtcctagtgggctgacgaggggcccacgctgcgcttacctgctatttgcagggctcagcaacggcgctcggcgagtc

SEQ ID NO: 329778 - DNA, 122 bp, Homo sapiens
cagggagcacgggcagggagctcatggtggcacagggaggatgcgaaaatgtgagcaggacggggagcggcaggaggagagcagtctccccaccttgaacaattcctcccatccaccctcta

SEQ ID NO: 329779 - DNA, 122 bp, Homo sapiens
atcaccatgcaagctttgtcggaagaggaccggaggctctggatggaagccatggatggccgggaacctgtaagtaacaattcagggaagtagagcaagaatgaaggccctgagttgtttgt

SEQ ID NO: 329780 - DNA, 122 bp, Homo sapiens
acccgacgcagggcgcggggcggggcttgccgtgacagctaccactcctattggtcaacgcgaacagcgacgtcctctgcgataggctgtaggtgaaaagggtaggcctccactgctctggg

SEQ ID NO: 329781 - DNA, 122 bp, Homo sapiens
tgaaggcatacagggaagacagccatatgacaatggaggcagagatgggagtgacactgccgcaagacaaggaatgcctgggctaccggaagctgggaaaagcaagggaagatgctcctacc

SEQ ID NO: 329782 - DNA, 122 bp, Homo sapiens
atgcaaggacggccatggggctccagcacagggaccgggccccgcgggctttgagtgacgcggtaggccaggacgagccccatccacacttggacaatgagcaaccgcagccggccgcgcag

SEQ ID NO: 329783 - DNA, 122 bp, Homo sapiens
actggagggctggactccactgcgggaaccggcttcgagtcagacctgggggcgtgtcaccgctgttacctccgaaccctgggtgctgcgcgcgatccaccgcacgacggctgcgaccgaca

SEQ ID NO: 329784 - DNA, 122 bp, Homo sapiens
tctcacctgggaggctaccactgcttcttttcttcctcccttcttccttgtttcaactcacgtgctgtggagcacagtctgtcctttacaatttcctgggaattagtatgacataattcttt

SEQ ID NO: 329785 - DNA, 122 bp, Homo sapiens
tttgccaagatatatctggatggactgcagaagactacgctgttgcttctaagtttcaagcgtaagtgttaaaaaggctagtgaacactaaattgaggtttaaagtcattgtaaccattgca

SEQ ID NO: 329786 - DNA, 122 bp, Homo sapiens
ggtagggcaagtcaggatattcaccttctttttctcagcactgcactccagcctaggtgacggagaccacgtctcaagaaaaaaagtctgcagagaaactgctgataaataaccttacattt

SEQ ID NO: 329787 - DNA, 122 bp, Homo sapiens
ccttgtcatcaccccaaacccaacaaaccctttgggatcatctgtgtaggggatgacaaccgtgacctagaccccgcttaccctgggctcctcagttgaggaaggcagccaaccgaatgtaa

SEQ ID NO: 329788 - DNA, 122 bp, Homo sapiens
ggaccaggcgccgcagagcagggggcggcgctccttggggaggcgctccttggggaggctcgggccacacaggagcccacagcgggggaaggctcaggcatggcgggctgcaggtcctgagc

SEQ ID NO: 329789 - DNA, 122 bp, Homo sapiens
gggaaggggcggggtcggcatttttgtccaattagatagccgatgggaagggcgcgaaagcggagaacggaagtcggatgttggaccgctgggaagaggttgaaccttcgcctcaaacgatg

SEQ ID NO: 329790 - DNA, 122 bp, Homo sapiens
atccacctgcctctgcctcccaatgtgctgggattacaggcgtgagccactgagcctggccggtctttacagactctttatagggtcttaagttaagatgaggacattacggtgggctctaa

SEQ ID NO: 329791 - DNA, 122 bp, Homo sapiens
tttaggaaaatctggtagcctaggcaagtggagttgtcctgagaccagggtttatagagacgggagcaacgagaagtagatggtctcaggatatgttttatagattttgaaatttggcttaa

SEQ ID NO: 329792 - DNA, 122 bp, Homo sapiens
accttgagggcgtaggtggagaaaggccctagcctcccagaacaacacagctggaaccggcggggggagggttatggatcaaaatacacaatagccctgactgcaggccggatactctgcca

SEQ ID NO: 329793 - DNA, 122 bp, Homo sapiens
ccctgccccttcttgccctgaactgatgctaaatgagcatatgatctgtactgaccctgccggttgcaaaaataaagctgttttcaaaacaataaaaccaattctagataggactttgcatt

SEQ ID NO: 329794 - DNA, 122 bp, Homo sapiens
atccaaggatgctggcatcaaagcccttacacggaactatccctaaaggttccgtatttccgtaatataccaccaatcactctaaatttataataccctgtctttaacttggtatataccat

SEQ ID NO: 329795 - DNA, 122 bp, Homo sapiens
agtacagttttctgaaaaagagtctccttaaaaaaataaattatagcttgagacagtgaccgtctcaatgggtacctaaatgaatgaatgattgaaacaggttaaatagtgctggtgggggg

SEQ ID NO: 329796 - DNA, 122 bp, Homo sapiens
ccgcgggcagcgggccggaccgggaagacagcagggtgctgcgagcaggtctggggaaaccgaagcgcgagcccgcgcgtggggcgaggcgggaccgcgcaggcgcagcgggaagcgacgca

SEQ ID NO: 329797 - DNA, 122 bp, Homo sapiens
ttcacgcccatatcacaccgacaagggtgaagctgtggaacttatacctcggctgggccccgccgccaactcctagggcacgggaactgcgcacaggccggggttccgcgaggggcggagct

SEQ ID NO: 329798 - DNA, 122 bp, Homo sapiens
atttattatctgtaggaatatttaaggggctgtactgggccgttcacctttgacaggggccgtcacctcacactccagtgtaatggaccacactgcggctgcatttaatttattggggtgag

SEQ ID NO: 329799 - DNA, 122 bp, Homo sapiens
ccctgtgtctcgctccggtctccgcagccatgtaccccaccgcggccatcacgcccatcgcgcacagcgtcccccagccgccgcccctcctgcagcagcagcagcgagaaggtgaggcggcc

SEQ ID NO: 329800 - DNA, 122 bp, Homo sapiens
cactagaccagacttccccaaataaacaactacttctgcatgctggggatgggctgtgtgcggcagcatttacgtaggcggtacagacagcagcctttcacttaatgttgcaataacaccag

SEQ ID NO: 329801 - DNA, 122 bp, Homo sapiens
accaggagaggcttcccaccacaagctcctctatgggattctggttaattaccagtgaaacgtccacctttccagcccgcctgtaagctaggccataataggggccgtagccctccttacag

SEQ ID NO: 329802 - DNA, 122 bp, Homo sapiens
tgcgaggacttgggggtcgtgcttcgttcgcctggtatcctcgttcgtgcgtgtaggaggcgcctggcttgccgggcggtgccaggcggcaagagggagggcgcacggagcgtgtccgccca

SEQ ID NO: 329803 - DNA, 122 bp, Homo sapiens
cagccccggtttgcgagagagccgggctggaggcgaaggcttctaataccacctgggtgtcgagtctctaatttctctcatccagggagctacgaaacgttagatcagtcctgaggcccaga

SEQ ID NO: 329804 - DNA, 122 bp, Homo sapiens
ccccgtctaagtgggtcgcggagcgatgctcgctctaagccgccagggggcgcgcggagccgggtctcagtgcgcatgctccgcaagtccctgcccgcccacgccgactccgggaaacgaag

SEQ ID NO: 329805 - DNA, 122 bp, Homo sapiens
cctttcataaagcaggtttgaaacactctttctgtagtatctggaagtggacattttgagcgctttctggcctatgttgaaaaaggaaatatctttccataaaaagtagacagaagcattct

SEQ ID NO: 329806 - DNA, 122 bp, Homo sapiens
acctgccctgcaggagcccacacaatgcttttccccaggccatccctaagcgaccctgagcggcctccagagctcagcagccagctcttgttcactggatcccacacacaggggcactgcag

SEQ ID NO: 329807 - DNA, 122 bp, Homo sapiens
atagtttgtaatggtttgtaattcttacttacatgatggccacatgatgtcgctctttaccgcaaattctttcgtaatcagcaaaaggaagtcattccttttcgcactggaaagacgctcca

SEQ ID NO: 329808 - DNA, 122 bp, Homo sapiens
tgatagtattttctactgtcctatacacatcaggcaagacttcatggagagcactgaacacgtactcactatgtgcctagcattgttgttaatcactttacatgaattagttcatttaattc

SEQ ID NO: 329809 - DNA, 122 bp, Homo sapiens
gggaaagcagagtaacaagtgagacccatcaaggcattttctctggagggaagcttgtggcgaccttcaggtgcggtacaacaccacacagcctctgggttccacccagagctagctgagaa

SEQ ID NO: 329810 - DNA, 122 bp, Homo sapiens
ggcggcggggggttggggcggcgatgtctgcctcctcccgcccgcttgatcctacaatgccggctgcggatcaatacccgctcactgtaatcccagtaattgtagggctcgcagcttttatt

SEQ ID NO: 329811 - DNA, 122 bp, Homo sapiens
ctcgatctcctgacctcatgatacgcccgcctcggcctcccaaagtgctgggattacaggcgtgagccaccgcgcccggccaatctgtgcactattttaattcttgtgcctttttaaaatat

SEQ ID NO: 329812 - DNA, 122 bp, Homo sapiens
caatactatcagcttttaaaacattgtgaagttagttgcccttattgtctgatttagtttcgttactataatttgatcaatatgttagtaaaaatgaggttggggggatagggggtccctta

SEQ ID NO: 329813 - DNA, 122 bp, Homo sapiens
gctcacgtctgcgttgaagcctctggggaaggagagagaaaccaagagaaccggttcccccgccttgacagcggaggccctcacaccgaggcccttggactaaaccgggcagggacagcccg

SEQ ID NO: 329814 - DNA, 122 bp, Homo sapiens
ctagggcaaggtgcccatctgatgggtagggtgtaggagtaggcctcagaccactcctgacgtgaacctgcttaaagtgagggcccaattctaaagtgggaactatgtaaatacctttctag

SEQ ID NO: 329815 - DNA, 122 bp, Homo sapiens
ttgcgcccgggtcagacattatttagctcttcggttgagcttcgattggtcaaacggcgccgcccccccccccccgccccccgccccccgctccccgctcgcccgcgctaccgatacccgtt

SEQ ID NO: 329816 - DNA, 122 bp, Homo sapiens
ctagcaaacagcggccccacccgcagcccatgcgggcggtgacccgatccagatgctgcccgtgccctggggcactctccaggacccccaacctcattgttctcctcggaccgcagacccca

SEQ ID NO: 329817 - DNA, 122 bp, Homo sapiens
gagggtggtgggagggcctgtccccaccccagccctcctgcctgacccccgcccgggccgcgcccctcaccagtcgtagtctaccacggcgatgctgagccccacgttctccacgctctcgg

SEQ ID NO: 329818 - DNA, 122 bp, Homo sapiens
cacttgtgtgccagggcagtggccatgctgtgcaagtcagaggtcaccgcttccacattccgacatctgtctgtattttcttgccctgaaacaatagaaggggaactaggctcatttgctcc

SEQ ID NO: 329819 - DNA, 122 bp, Homo sapiens
aggacccagaagtgggcaaggagggctgatgtccaccatggaggaccagcccattaaccacgttgggtaccagcctctgaagacacacctggttataattactgcacccccagtgggcacag

SEQ ID NO: 329820 - DNA, 122 bp, Homo sapiens
tgcttgagtctgcaggctttcatgggaccctggaatctcacttttgggggcccaggtaaccgcttcatgttcgtgaaccctcctcctcagtcgtgttgagagcggcctatctgtgttggtga

SEQ ID NO: 329821 - DNA, 122 bp, Homo sapiens
aaattaagcaagcccttttaataattactcctttcgcaggtgttcttggtaaagttttaacgtcacataatgtaagtattgtgtatcatcgtttttaagctctacaaatacgtgtgattcac

SEQ ID NO: 329822 - DNA, 122 bp, Homo sapiens
ctgccgtgagatttgcgtggatctcgcatggtggttgtgcttgccaggctcttctgtggacgatctgggggcttcttcattgagccgcgtaggtctgggaggcagctgcgtcctttcctctg

SEQ ID NO: 329823 - DNA, 122 bp, Homo sapiens
gttcttgggccgcccgcggctggcggaaggacggccacggtggcgcctgcgcgtccggctcgccgagttgccgcccgccatttttggagcttcttggagatctaggcaggaacccgccccgg

SEQ ID NO: 329824 - DNA, 122 bp, Homo sapiens
gaaagaatgtgctggttcctgaaaccctgccggctgctgtataacctcccggacctgaggcgtgtcagagaggatgcgttcttcagtgctgaggtcacccaacccaacggcagcgccggcat

SEQ ID NO: 329825 - DNA, 122 bp, Homo sapiens
ggcgtcctggcggaggagtcactgtggacttccccggagcgttgtcactgccatccctcccgcggtgaatcacaggtcggcctcaggtgcgcgcagcacacacccggagcagccgcgggttt

SEQ ID NO: 329826 - DNA, 122 bp, Homo sapiens
aagcaaagagcattgggaagtcttcagactaggtgatatttaggccaggtgcctgtaatccgagcactttgggaggctgaggcaggagaattgcttgaggccaggagttcgagaccagcctg

SEQ ID NO: 329827 - DNA, 122 bp, Homo sapiens
agcatatactatggaccaagctctgtgttaaaggaagattattttaaaatggagagaactcgcaatctagcaagagaaagagacatgtgggtaaatgtcatttcactacagtgatgtgacaa

SEQ ID NO: 329828 - DNA, 122 bp, Homo sapiens
accagccgagcctgttagctgcaccaaaggcgtatcctagctttattaaagggcccgcgccgcagagtcaatataaaaacacaaaaagtcccatcagtttaataacaataaaaaaccccaaa

SEQ ID NO: 329829 - DNA, 122 bp, Homo sapiens
caaatgaggactccaaaaactcatgctccatgcacgacttctccaagagccactggaagacgtgcatgaccaagatggcgaggccgcagaaaggaggccacggagcccgggagaggaggcgg

SEQ ID NO: 329830 - DNA, 122 bp, Homo sapiens
tgtgtctgcttctcgcagcttatctctgtctccctctgtcatctctctgccccgtcttcccgaacaccagccccgcgatcccgaagcgccttggttaggggagcaagccctggcgcatctaa

SEQ ID NO: 329831 - DNA, 122 bp, Homo sapiens
taacagtcaaaagtggcgatgagcaccactactgctgcattgtgcagcacgcggggctggcgcagcccctcagggtggagctgggtgaggtcccgccaggtggtgatgctcctggtttcccg

SEQ ID NO: 329832 - DNA, 122 bp, Homo sapiens
ctagtaatagaatgtttccaccttcctgttttcttagttttggaaactgcaatttttactcgtatgtagggacactgacataggcacctggcagttgactattgctttttttttaattaagg

SEQ ID NO: 329833 - DNA, 122 bp, Homo sapiens
acatggacataagtaagcaaggtcaataaaaatgtgtcacacttacattctaggggaagacgggaacaataaacataaacaaatgaataaagagaattagtgagtgtctggaagtaataagt

SEQ ID NO: 329834 - DNA, 122 bp, Homo sapiens
tcccgaacgttattttgatgtattttcagtgtagatttctcatattgattttcttttttccgctcttcagtcacccggagaaggcatgtgatcaaaacctcttggtgacattttttctaggc

SEQ ID NO: 329835 - DNA, 122 bp, Homo sapiens
ccgcctaccagattcacgccattctcctgcctcagaccccggagtagccgggactacaggcgcctgtgcaatctctatggtaaccacatttcccagttgactactaccggtaataaaatcaa

SEQ ID NO: 329836 - DNA, 122 bp, Homo sapiens
ctctccagcatcctgagggccaatggcttgaagcaggggggcccagtacctggctgaccccggtagcagggtggccagtggagtctgagaaactggaggaggggcacccgggccggaagggg

SEQ ID NO: 329837 - DNA, 122 bp, Homo sapiens
ccatgctgggttgcatgcctggacccctcatgggaatgtaaacttcaggagggcaggggccgtggctcacagttgtatccccagcacttagaacagtgcctagcagatggtaggtccccagt

SEQ ID NO: 329838 - DNA, 122 bp, Homo sapiens
gtttgggaaattatatatattaatatacatctttcccctgtcacttttgcagatattcttcggtttgaataattaaaatgaaccagatatcagggtggttaattaaaatgaaccagatatca

SEQ ID NO: 329839 - DNA, 122 bp, Homo sapiens
gccccgccgccttccactttgcgctcgcgggccccagaactcgtccgccggacagccaatcgcgcctcgctccttgcccacagccattgccgtccaccccggaagtagcccttctccagacg

SEQ ID NO: 329840 - DNA, 122 bp, Homo sapiens
agcccggagcttgaacttgaacgcggccggccgctcgcgcaggaccacaccgccacctcccggcgcggccccagaacccagataatccgtttaaagcactgagaaaatctaagaagttttta

SEQ ID NO: 329841 - DNA, 122 bp, Homo sapiens
aattgtcctctggccctgggtggccagggaaggttcccgggggtgcagccaaatacacatcgccggcaaactgattaaccctgaaagtggcgccgaggcccggtctgtggctcttggtgttc

SEQ ID NO: 329842 - DNA, 122 bp, Homo sapiens
gctgatatgcttagcggtacagagctaggaaatcagggacagaacccaggctggaagtcacgctggctctagagccccgtcctttcgacctgttcccgtcgctggggaggggcacgtcagtg

SEQ ID NO: 329843 - DNA, 122 bp, Homo sapiens
caaaggcttgccgacgttttcacagaatggaactcagctgattgagaacgccacggcagccggaagcttaacttacattcttctttcagccggggtgtctgatcaactgaggtgcgtgatgg

SEQ ID NO: 329844 - DNA, 122 bp, Homo sapiens
ccctcccctcatccatcttctcccgccctcttgtccccgccctacccgctctgacaagaccgtcctaatgaccccctgaccggcttgtcctaccctaggacacctcccaccaggcctcacct

SEQ ID NO: 329845 - DNA, 122 bp, Homo sapiens
caaaaaaccacaaagtgtgttcacgtttgctatgactcccagacaacaattgtaaacactcgcgccgggcgtggtggctcacgcctgtaatcccagcactttgggaggccgaggcgggcgga

SEQ ID NO: 329846 - DNA, 122 bp, Homo sapiens
ggaggaggaggagaggagcagcagcagcacctaccacgtgatggaggagcgtagcccgggcggattcagccccacaaaatgggcgcagtttgcaaacagccccccggcctgggcgccgaggg

SEQ ID NO: 329847 - DNA, 122 bp, Homo sapiens
actcccccccacctttttttttttgtgcagcccgacaagagacaacctaaataaaaataccgtattaccttttctagttcagggaaggtgtatgattaaaagtcagatttgggccagtcgtg

SEQ ID NO: 329848 - DNA, 122 bp, Homo sapiens
ccacggccacaccctcccgtgcctgctcatccgtcctccctctctcttcgcagtttactgcgccaccctcggcgtcaacctcattgcctgcctggcctggtggatcggcggaggctcgggga

SEQ ID NO: 329849 - DNA, 122 bp, Homo sapiens
cggcctcgttaggttgatttatttcaacagtttgatccccatcctggtgcagctccgagacgctcctgggctgcgcgcgcttttgggctgcgccaccgacagagacatctggaagccggagc

SEQ ID NO: 329850 - DNA, 122 bp, Homo sapiens
ggcagcctgtgattatgaccttagctcttcctcttctctgttttctgatctcctaatacacgtctgtaaatatcacaagaccctgcaagtccctcacttattatctcttcaaatctgacgac

SEQ ID NO: 329851 - DNA, 122 bp, Homo sapiens
tcaattttccaggtactaatacacatctaatactcaatacagaaaagaaagaagagccaacgctaggaagatgtgagaacatatagaataaagaacacaggaaaatggattaaccttagtca

SEQ ID NO: 329852 - DNA, 122 bp, Homo sapiens
ggatatcgctgaggcccatccccaattcagcaaagaagacaggtatacaccccgaccacccgtccccgcacctcccagccccagacacgctgtcctgcctcaggccgggcaggcacatgggc

SEQ ID NO: 329853 - DNA, 122 bp, Homo sapiens
agagagcatttttaacacaagctgagatacccgcaaatgcagacagaagaaaaactgggtcgttgaatcagctgttccagagcagacataagacgataaccctctcatcttccctcctttca

SEQ ID NO: 329854 - DNA, 122 bp, Homo sapiens
ccttaggaaagaggacacgtccggggacaggcaggacactgggcgtcgtgtgtgtgcgcgcgcgctagcagcatcggaggtacagatgtggttctgttcctcacaccaacccgcgttagacc

SEQ ID NO: 329855 - DNA, 122 bp, Homo sapiens
gtttgccacagtaaaaagtttagggtagactatatcgacttactgttagaaaaataacaacgcagacctacttagaaccttggtttttgtctttgttttgtggcccaaggtcacacagttag

SEQ ID NO: 329856 - DNA, 122 bp, Homo sapiens
ggctgtttttttgccatggaataggtgcacctgagctggaccggcctacccagagagaggcgtttgctcctggttgctttctctaagcctctggtagccatcaggaagagggactttgagga

SEQ ID NO: 329857 - DNA, 122 bp, Homo sapiens
tgaggacaccgccccaaaccccatgactctacccagaatgcaagcaagatggtgccagggcgcactaaatccccagcatgcactgcgaccgcccttagtagcaagcgtaaactacaatcccc

SEQ ID NO: 329858 - DNA, 122 bp, Homo sapiens
ctcaggtaatccgcctgcctcgctctcccaatttgctgggattataggcatgagccacggcgcctggccacagcatgttctaaggaagaatttggaatgatgggccctcagcggatgtgggc

SEQ ID NO: 329859 - DNA, 122 bp, Homo sapiens
gtaacttattcacctcgaggtgaataagttacccacagagatttaggcagagaaaactaccgtttgagccaataggttaaagaaaacgcaccagtgcctggattttgcctttaaatccaggg

SEQ ID NO: 329860 - DNA, 122 bp, Homo sapiens
tgtctgtggcaaaatgcggaggccccagcgatgtgggggagagcattgtctggcggccaccgaagcaggatttgcattcgggggtctgcctaacacacgttacatcacgtagggcacttatc

SEQ ID NO: 329861 - DNA, 122 bp, Homo sapiens
tgtctctccctctttttaaaatcagaagtttatatttaaattgttttttagagatagtctcgatctgtctctcaggttggagggctcactgcagcctcaaactcctgggatcaagggatctt

SEQ ID NO: 329862 - DNA, 122 bp, Homo sapiens
cttctcttgtctgtaaacaacttcactctcaaggaggcagctctggcctctcagcaggtgcggcctacagtgatgtccgtccgggttttacatccttccccgacctcgacatgagtcccagc

SEQ ID NO: 329863 - DNA, 122 bp, Homo sapiens
ataagccacaaagcagcgcctgctgctccctcctccctctgccgcctgagtcagagaagccgggatgtgttcaaaatcaagcaatgtaattagcaggttgcatcatgcctctcgattataaa

SEQ ID NO: 329864 - DNA, 122 bp, Homo sapiens
gaggagagaggcaggactcccccctccccaaccctcggagatgagagggcgaccgcgcgacgctctgggctgctaggtctcgactcggtatccggaagtcctccagcgttcgcctgcaggaa

SEQ ID NO: 329865 - DNA, 122 bp, Homo sapiens
gcctggaaaaagaaccattagtgctcactccaggccacagactccgaccggaactgacagcgcggcctccaggattgaagccatccctggcttgaaggtggggcttcactgggacccgtccc

SEQ ID NO: 329866 - DNA, 122 bp, Homo sapiens
agaagctgtggggacccggcctaacagggcccagccctcagccgggatctggatgggagtcgttggcagattccagagcaaacaccctgtatctgtcgccgggcgacacagtgacaccaccg

SEQ ID NO: 329867 - DNA, 122 bp, Homo sapiens
gccggttgttcagtggcgcggctctggcttccctagggtgccaaagttctttaacgtcatcggcttgcccactgtctggcctgtgggtgtcaaatgtcccacctcttcaaatgtgcttggat

SEQ ID NO: 329868 - DNA, 122 bp, Homo sapiens
tgggcgcccggggggcgcgggaacagagggcccgcggggcttgcggaggagtcctgctgccgagcgtcctgctccttcgcccggcttcgccttctctcataagggtggccgggggcccacga

SEQ ID NO: 329869 - DNA, 122 bp, Homo sapiens
tggtaattttccgtcattatggctgaaatgcgatctgtcacaacaactggaacatgtctccgcgctagcgaaaataatgttcgtgattaggaatcattacgcacgtcaagccgagtccatta

SEQ ID NO: 329870 - DNA, 122 bp, Homo sapiens
cagggcactcacctcccgcgtctcagggcactcacctcccgcgtccctgcactcacctcccgcgtctcagggcactcacctcccgcgtctctacacactcactgcccatgttttgctccacc

SEQ ID NO: 329871 - DNA, 122 bp, Homo sapiens
tgatgaataattatgaaacagttacaatataagagaactccatttttaaagagcagagtccgatgagctacaagtcttctaaaatatgattgtatcttggtagcaaagctaacattagagaa

SEQ ID NO: 329872 - DNA, 122 bp, Homo sapiens
gcaaatacagacagaccggaatggggctcccaggtccagaggagatattgggaaagggtccgaggagcagagcaagatgtctgcttagccggcagtagccagcactcccggcctgggcagcc

SEQ ID NO: 329873 - DNA, 122 bp, Homo sapiens
gtccccgctaaaacacctcctctggcgccttgagaccgaatttgagaatccaccaatcagcggcggccggcggggcggccccggccaatcgtgcggcggcacggcccgggctcaccgcccct

SEQ ID NO: 329874 - DNA, 122 bp, Homo sapiens
tctccgttaaaatgatatcgatacaagctgtagccatcagcgctattgatgctgctttgccggagaagatacgttgcctcacattcagaagaagcccgggaccgtgcctggatcaggtcaga

SEQ ID NO: 329875 - DNA, 122 bp, Homo sapiens
gttccctgatggggatgtagggtttcctgctacgaatatggggctgcctgacaggctccccggccggggctatgggtgtgctgacggtggggccacccggtctcagtccggcctccttacag

SEQ ID NO: 329876 - DNA, 122 bp, Homo sapiens
gtgcctgaagaatgctaagttctgtacatcagaaacttgagccaggaagtcttgacaagacgctagtaacttcatgaaagttaaatgaagtttatccatcaatagatccatctgtcgataga

SEQ ID NO: 329877 - DNA, 122 bp, Homo sapiens
tcggacccggtctcccaactcctcgcccggcctcgttcccatcctccaggtgcctcgaggcggcatctcaggcttcacacgagccacaccctggcatgaggaacaggatgggccgcgggtga

SEQ ID NO: 329878 - DNA, 122 bp, Homo sapiens
aagggaaagagtggacaaattgttatctaacagggctccctccccaggaaaggactccttcgtcagtaagagatgtgcacgtggtataaccaacaatgctacttctgggtatgtccacactg

SEQ ID NO: 329879 - DNA, 122 bp, Homo sapiens
ttgggaaaccacaggctagcgagtaaagcaggtgggtttgtaacccaggtataaagagcccgctgattgtgtaaaacctcagagctgtgggcaaactgtgttcccgacacaacacactacac

SEQ ID NO: 329880 - DNA, 122 bp, Homo sapiens
taggacctggccagctgggcgtggttcggagagccgggcgggaaaacgaaaccagaaatccgaaggccgcgccagagccctgcttccccttgcacctgcgccgggcggccatggacttgtac

SEQ ID NO: 329881 - DNA, 122 bp, Homo sapiens
tgcctcgagcttctgaatcgcctgggcaacctggaagccgcccatctaagggggtgaggtcgaatcccagccttgacgccttagcaaccgagcgagcctttctcgcgtcccagcaacgcgcc

SEQ ID NO: 329882 - DNA, 122 bp, Homo sapiens
ttatagacttgttttcaagaccagactgctaggccctaagtgtcttcaaaccctttatttcgggaagttaattttaatttagttgaatggttttgtggaagctagttgtgcatatgaaggaa

SEQ ID NO: 329883 - DNA, 122 bp, Homo sapiens
atgtgttacggcagggatctgaaagctgatgatttcatcactagctggaagcatcaggatcgaaacgatgacagttgcaaaatgttcatcaagtgagagctgcgtcctcgcgagaccgaaac

SEQ ID NO: 329884 - DNA, 122 bp, Homo sapiens
cagagtttaacctttcttttgatagagcagttatgaaacactcttttcgtagaatttgcacgggtgtaattagagggctttggggcctatgctagaaaaggaaatatcttaccataaaaact

SEQ ID NO: 329885 - DNA, 122 bp, Homo sapiens
cggcaacgacgcgggcccgggacacttggggacgcttcaggcagagggcaggtgtactcccggcagaccttctccgaccgcccggagtcatggcttccttttccagagaagctatataaaca

SEQ ID NO: 329886 - DNA, 122 bp, Homo sapiens
ctattctgggatctttctgcctttttcgcctttcccaacaataacattaacaatctaggtcggacggcgtccgacgggagcgtcccacgggagcctacgcggcaccaggctgcacggcaggg

SEQ ID NO: 329887 - DNA, 122 bp, Homo sapiens
acaggcacggatgtttctgtacttttattatgtgccagctggaggcaagcgtcgacgtgacgttgctgtgacgcctgtgtgtggtttatgtctttacacatgtcatcgcctgtgaccaacat

SEQ ID NO: 329888 - DNA, 122 bp, Homo sapiens
tagcactccacctaaggcgaagaagccgggcgtttgtctgttgtgagtgagtgacaagggcggaggaggcgtgccaggctggctgcagtaccattccctgagtctggcactgcctgaaggga

SEQ ID NO: 329889 - DNA, 122 bp, Homo sapiens
ctcgccccgcccgaggctgcgaggacccctgggctcgggggtggtgagggagcttcgtcccggctgggcccgggctggggactcggcctccctgggcgggggccgcacggctgcaggccgag

SEQ ID NO: 329890 - DNA, 122 bp, Homo sapiens
acagcctatgctgcagccttttcaggcaaggcttcctccctgagctgagccaggcccacccgagagggtgtttgcctttaatcttgtgtataaggtcatatgcccttataaataatatgcta

SEQ ID NO: 329891 - DNA, 122 bp, Homo sapiens
gctagcgccttctcctctccgggtggatcaaaaatcgagaggaatgtgcggcgctctgcgcgggccagccgaaaggggcaatccgaacttgaccgcggcgcccgcgccgggctttgcccccg

SEQ ID NO: 329892 - DNA, 122 bp, Homo sapiens
gtggggatgaactgaatttcataggcatccacggggccaggagccggggtccactctgtccgaactgttgtctcctccaagagatgcatcctcatgccctcaatggttggcacctctgccca

SEQ ID NO: 329893 - DNA, 122 bp, Homo sapiens
gaaagtgtgagcaagcaaactcccaccgggaaataatgctattcctagtcttgtggcccccggaagacttggagccaagggaggcaggtcagggggctgaaatcccggtgaggggtcgcaag

SEQ ID NO: 329894 - DNA, 122 bp, Homo sapiens
cccctacagtttcttctcaacacagcaaccaaagtgatcctttgaagttgaatctcaacgcgaaatctagctgtggcttcacggttcacttaataaaagccaaagccctccaaccaggcatg

SEQ ID NO: 329895 - DNA, 122 bp, Homo sapiens
taagacaaaaactcttggttttacccatacaagtccagccagtttccaagcttagacgttcggtccccagacccttgctggagccctctgggtccttttgtgtcttgcatgtttagtgaagc

SEQ ID NO: 329896 - DNA, 122 bp, Homo sapiens
aagggtaggtgtccctggtcatttaccgttagtgaccttagatctgatgtttgagtagcacggacttggggctagggctgaagctgggcccacattacagccagaggaaatagcagagataa

SEQ ID NO: 329897 - DNA, 122 bp, Homo sapiens
ctttattttcatacatcttaactaaaaactggggctttaaattggtcattcaaggccaggcgcggttgctcatgcctgaaatcccagcactttgggaggccgaggtgggcagatcacgaggt

SEQ ID NO: 329898 - DNA, 122 bp, Homo sapiens
gcgaagcctcagacgctcgcgacctgccaccgtgaggggccggggagagcgaagcgcatgcgcctcggctccgaagccagtgccccggcatacgccctctcgcgtcccattcccctcgcttc

SEQ ID NO: 329899 - DNA, 122 bp, Homo sapiens
gtctggggtggggcttgggcatagattttttttaaagttccaaggagattttaaggtgcacgcaaggtggaaaaccactgctgaagcagatgtggagaactataaattaaggatcccagcta

SEQ ID NO: 329900 - DNA, 122 bp, Homo sapiens
atggatattaaacaaataatcacaaaatggcaccacttacaattaattaagtgctatagacgaaaatagtaatgctgtaagaaagtgtaacaaggagacctatatttggggctgcttgaaat

SEQ ID NO: 329901 - DNA, 122 bp, Homo sapiens
cggggcggacggggcggtgccattggccggtgcggagtgaggggcgtgctcggggcgggacggagagaccggggcggcacctttggccgtgccgggcgagaggcggggagcggggcggggcg

SEQ ID NO: 329902 - DNA, 122 bp, Homo sapiens
aattgtaggagatactgagaaggaacatttctcaagtatactgccatcactggcaactgtcgactgctgggtggatcacattccaggaataaaatattttctcttgtaaacacttatggcat

SEQ ID NO: 329903 - DNA, 122 bp, Homo sapiens
tttctcccccacccattgcaggtgccagcctggctggcagggtcccctttgtgaccagtgcgtgacctctcccggctgccttcacggactctgtggagaacccgggcagtgcatttgcaccg

SEQ ID NO: 329904 - DNA, 122 bp, Homo sapiens
agggctgtgcttcttctgcaggctccaggggagaatctgctcctggccttctctagcttccggaggctgccatgtcccctggctcctggtcccttctctcctcaacaccagcacctgcatgg

SEQ ID NO: 329905 - DNA, 122 bp, Homo sapiens
ggccttcagggccttcccagcaccacccccagcctcccccaacctgagttcctgaacacacgggatgcttacactgccaggctcggtctatgttggtcccacttcttataatgtctcctctt

SEQ ID NO: 329906 - DNA, 122 bp, Homo sapiens
ggaagtgacatttgcttgatgttgggtggagcaaagccctgagctaaaatttggcacccacgagacccactaagataaagcaaatggaagaagtaatggtaccttgatttggtggggaggac

SEQ ID NO: 329907 - DNA, 122 bp, Homo sapiens
gaacctcagtataccacattcttttttctttctttagcaccagaaggatacctctcttctcgattcagtagtcccccttacccttaggggatacatttcaagaccctcagtgggtgcctgaa

SEQ ID NO: 329908 - DNA, 122 bp, Homo sapiens
gtatttgtagaaatatgcacaacatttacacaacaaattatgatgattttataagataggcgagaaagggaatgttatgacgtcatcagtctgtgcagtcaagaaggaagtaggcagaaaca

SEQ ID NO: 329909 - DNA, 122 bp, Homo sapiens
cctcttggcaggattgttgcaggattaaacgagcttaatggaggtaaagcactcagcccccgttgccagcgtgtgaaaaagaaccagccgcggtcattaaaagctcctttatttcatgggtg

SEQ ID NO: 329910 - DNA, 122 bp, Homo sapiens
gatgggaggacgtggcagctttgtggctggcaggctgacttcccacgttcttggagcccacgttgaggggctagcattgctctaatgtctgggtaattttgaagaaagctgctgcgggtgca

SEQ ID NO: 329911 - DNA, 122 bp, Homo sapiens
gccaagagtacgggcagaagacaacactccaggattggccagttaagactggggcccagccgcttaggcaaaaacaggacccggtccccagagaagctcttcaaggtatccaggtccatctt

SEQ ID NO: 329912 - DNA, 122 bp, Homo sapiens
ccaggggccgagtgatctggctgtggggaccgtgtgagccgctctgcggttccgcgtcctcgtgccgccgctccggacggccgggccctgggcattcgggaggatggtgagcgccgagagga

SEQ ID NO: 329913 - DNA, 122 bp, Homo sapiens
gctctgctcgcgtgcctttctgttgtgagcttttttccacgtggctacgttggggacctccgtgatgcttcctgagtgcttactatgcgccaagcgctgctttcaccattttacaggttttc

SEQ ID NO: 329914 - DNA, 122 bp, Homo sapiens
agcagattccgtcgcttcttccggagccgtacgtggcaccgccccgctcgcgggcggccgcggggcttgctgggaagagaggcgaagccaggtcacctttcaaggacccagaagtagggttt

SEQ ID NO: 329915 - DNA, 122 bp, Homo sapiens
acttggctccggatgctccaatccctcccctgtcactcaccccggagttacaccccacgtcgagccccagaatcggcccgttctcgggactctcaggaaagagctgtcgaagcagctccggg

SEQ ID NO: 329916 - DNA, 122 bp, Homo sapiens
ctactcagacctgttctgcctctcaaaggacgatctcatggaggccctcaccgagtaccccgaagccaagaaggccctggaggagaaaggacggcagatcctgatgaaagacaacctgatcg

SEQ ID NO: 329917 - DNA, 122 bp, Homo sapiens
ggcctttacacctgagagccatgttacgtgtaacacgtggccccgccgtttggggagacccgttctgcattagaggattttatttcctcccgttgaaggggtgggcaggaggcgtgttagaa

SEQ ID NO: 329918 - DNA, 122 bp, Homo sapiens
ttgcccgcaccacctacacgcccgtccccgccctccctcaggcccacgtgctccgagggccgccttcgcaggttgtttctggcgatgcctgtctgaaggcctcagactgaggccccgcccac

SEQ ID NO: 329919 - DNA, 122 bp, Homo sapiens
tctttattaaaccgttttcttgtcctgctattaagtttcactgcctggcggaactcgagccggccccagaagtttaccttgggatgtcgccggacccagccgaggggaggagtcattctttt

SEQ ID NO: 329920 - DNA, 122 bp, Homo sapiens
tcaacaaagtttcttattgattagatgtagggaatgtgagaaagagaaggggggggaacacgtagattttgggtcaaagcaataaatattccattgacagaattgaaacagcaagttggtgg

SEQ ID NO: 329921 - DNA, 122 bp, Homo sapiens
accaggcgatcgacaccagggtccgcctgtgccctgcctgggtggggtcagccacgcccccggaccactgctccaaccagcgttcgtcgtcagccccttacacgggacagggcactgcagac

SEQ ID NO: 329922 - DNA, 122 bp, Homo sapiens
ccttgccgtgctggaacacccccacacaggagtaggtggtgcccaggtcgatgcctatggcgattcccttggcagtagccatggttctctgaggcctatggagaaagaataagatactgttt

SEQ ID NO: 329923 - DNA, 122 bp, Homo sapiens
ctggagcgggtggagtcagggaagagctgagctggggagtcaccctgggcctggggtcaccgtaggccccatgtagcaccctggttcccctgcctgtaggtgacaggagccagcccagccag

SEQ ID NO: 329924 - DNA, 122 bp, Homo sapiens
tcgcccctgtccggcccttccaccctagttctcttcaccgtccgcccatcctatcgcgcgcggcctcaggtcccgattcggcatgtggcttgtcttccatcgtccccaccctcgcccctctt

SEQ ID NO: 329925 - DNA, 122 bp, Homo sapiens
tagtggagcctttcaacaccaacaggttatgttccgagggagacaacaagctgtgatccccggcctcaggcccagctggtgccctctcccctctgtgcctggctgccagtacagagctcccc

SEQ ID NO: 329926 - DNA, 122 bp, Homo sapiens
cccactccctgcatctaggatatgtatgcaaattaatatatgcaaattaagtatcctaaacgacccacccaaagattgggacgcctgggacccttcccccaggaggtgaaatatctttaatc

SEQ ID NO: 329927 - DNA, 122 bp, Homo sapiens
aagggaccgcccctttaagcgcgggcactgcggtggaagcgcgcgctggtctggacatgacgtaaaccaatgggcaggcccggaagacagaggcgtttgcttccgtggccaaaggcgcttca

SEQ ID NO: 329928 - DNA, 122 bp, Homo sapiens
taaactgctagggctactgagatctatgacaccagatgtacccacaactatgacagtattcgtaagactaggttctcagccatcattattctaggaaaaggaccacaattacgagatttctt

SEQ ID NO: 329929 - DNA, 122 bp, Homo sapiens
acctgtagccatctgattgtaatggactaccgagtcgctgctgccggagaagaggttgagcgcgctggggatctcctcggggtacagattgtcaggcagttggtttagcaaactgctcatgg

SEQ ID NO: 329930 - DNA, 122 bp, Homo sapiens
atgtcagacaagcaaacaagcaaacaaaactcccaaatacagaacaacatcccagccttacgcatcacatgcatcactgcgcctgtgagggctggatttgtggtcaaagcaaactgggttca

SEQ ID NO: 329931 - DNA, 122 bp, Homo sapiens
ttgcctggccctgccccgtggactcctgtccccgtggctcctgtccccccaccagccacacggccatcccgatgccgtttcccgcatctccgtcacggcagcacgcgtctgtgccctgcgcc

SEQ ID NO: 329932 - DNA, 122 bp, Homo sapiens
ggccggccgccgccaccggccccggagacgcggggggtggggagcgaagcccggggagcccgcgcgccgacactcacctgtctccgcgaggaaagacagcaaagtccaaggccgccgccgct

SEQ ID NO: 329933 - DNA, 122 bp, Homo sapiens
cgccctcttctttttctctggttaaataggactctaacagctatttactagtgttaaagtcgtatcttctaattcaaacatcagggtcatcttggagtctgtctcctgtgacagctttgttt

SEQ ID NO: 329934 - DNA, 122 bp, Homo sapiens
cccccgacagatgatagtacatcccacactgctgctggaaaagatagtgcaaaagttgagcgcgccgagggctctcttttctcccggaaacaatttttccctagacccggaagcagttgttg

SEQ ID NO: 329935 - DNA, 122 bp, Homo sapiens
gcactcaacttagctttaaaaagaggaggagttgtgcagagggggaggggagaaggcggccggcgcctgcagcctctgcccaggaaaacggagggcaggaaacgtctccagcccccctcccc

SEQ ID NO: 329936 - DNA, 122 bp, Homo sapiens
aaagtaggtctagatgcaaagtctaatggagcctgtctcttggtttcctttctccagcagcggggaagtaagtttgataaggagggttggggggtgagagagagaagatgaaatggtgggtg

SEQ ID NO: 329937 - DNA, 122 bp, Homo sapiens
cggagacttgctccctgggctgcggctccgtagttgcttcgagcttgtaaatacaagctccgtggacaaagtcccaaatgacatcactggcagctgcttattgttgagtctttattaactga

SEQ ID NO: 329938 - DNA, 122 bp, Homo sapiens
aggcccaggccacctggagggagagcagacctgcggctgaggatgcagggctcccgggcacggtgctagccctgccttgagacaccccgagagctgtgggaagagctgtgggatcccctatt

SEQ ID NO: 329939 - DNA, 122 bp, Homo sapiens
aggggagagggaggggggcgggtggggggcgggagggggccaggggtgggagtgagggtgcgcgatgggagtcgactccagacccaggtgatttagagagagtaaagaccacctttggccgt

SEQ ID NO: 329940 - DNA, 122 bp, Homo sapiens
gagcattagatgaggctatgcagttgactcactggtgtctctttcctcacttataaaatacgaataataaatacatgtgtttctcggactatggagaacaatgtttgcattgttctttggga

SEQ ID NO: 329941 - DNA, 122 bp, Homo sapiens
gagggacgggaatgcgaggagggcgggacgtaccatgcccaccccgggggagaggagggacgcagcaaggggaagagaaagtccagcctagaaagccaaggaacgccccctcgctccaccta

SEQ ID NO: 329942 - DNA, 122 bp, Homo sapiens
tggattacaggagggtgagccttgtcatcgtgaatcttctgctgaacaatccaagtagcccgtgtttattgcgcacttttgatgtgccatgagctgtgctgggagtaccctgctaaataatg

SEQ ID NO: 329943 - DNA, 122 bp, Homo sapiens
agcctacaatggaaacatatggtgtacctcactgctgctcgttagtttctcatttgtgtccgataatatgtgtacattttaaaaacgagtacatggaaagctgtgtgggaatcttttctctg

SEQ ID NO: 329944 - DNA, 122 bp, Homo sapiens
gatgcttccacgtgcagcttgatgctgttacctgcagaacagacacgcttgaaaacgcgacgtagtgtccgtacttccgaagctaggaggctgcttcacagccgctgagaaaatggaggtga

SEQ ID NO: 329945 - DNA, 122 bp, Homo sapiens
atttatttctaccccggctcgttagagacaggatcagagctataggcaggctgtgggtcccgtgcatgcagggccttcctcgtccctgcatgacccagcgtcggggcctggcaccctcagtg

SEQ ID NO: 329946 - DNA, 122 bp, Homo sapiens
taattgtgaccttctcgtcactggaacttaagggctacagatcctctcatccctgatccccgcaccactctgcagccccgacccccacctccagcctgctcttactgtccagataatgttcc

SEQ ID NO: 329947 - DNA, 122 bp, Homo sapiens
tgcgcaggcgcccggaggctaagccgctcggaacctagctgcgccacgcagggtaggcgacgcagacgctcccgcgtgacgcacttccggtgcttgccctgcccatccccgtggcgggggcg

SEQ ID NO: 329948 - DNA, 122 bp, Homo sapiens
gccacccgccggctgttatctggggctgaaggctgcggtaatcgatgggttatttttacgcggtaatagggccctgtgattgctctattaacctttagacctgtctgagggactctccggct

SEQ ID NO: 329949 - DNA, 122 bp, Homo sapiens
caaaaaatgtgtcccgacaatgccatacatccctggggagcagtgtcgcctgacggagagcggtggcactgaggctgctgtgagatccagcgaacgggagggttgggttttctgaggccacg

SEQ ID NO: 329950 - DNA, 122 bp, Homo sapiens
cagaaccgcccagaggcggacgctgccttcctggggtgacggagcagcaggaagcgttttcggatcctggaatacgtgggcggcccgtgggaggggctgaggcgcagtttcctactcacccg

SEQ ID NO: 329951 - DNA, 122 bp, Homo sapiens
tccatctgccttctgccaggctctgtcccgggctctgttaataccacagtgaattcgtcccgaagccagccccggggagtggggagtggacgtaaacaggtcttcacactgctgccctgcac

SEQ ID NO: 329952 - DNA, 122 bp, Homo sapiens
atcatcttccccaagcatgccaggagcactttccggaccaccctgcactgcagcctgggccggcccagccgctggttcaccgccagcgtgcagctgcagctttgccaggaccctgcccccag

SEQ ID NO: 329953 - DNA, 122 bp, Homo sapiens
ttgaacttgcagctctctgactacattttccgccagtatcagtaggtatccttcctcacccgtgcttctaacagattggaaacacctcaacccgcattgcacgtggaccccgccctgttcct

SEQ ID NO: 329954 - DNA, 122 bp, Homo sapiens
tgtgtgcacgtgtgtgtgcgtaacacacaaaccagggggcatcgctaataaatcaaatatcgtgataaattcaggagggccatcgatcaggtccacttggctggaaacgacgtgaatctgcc

SEQ ID NO: 329955 - DNA, 122 bp, Homo sapiens
gtctcgctgacttcaagaatgaaggcgcggacctgagtgttacagttcttaaaggcggcacgttgggagttgttcgtttctcccggtgggctcgtggtctcgccggcttcagaagtgaagct

SEQ ID NO: 329956 - DNA, 122 bp, Homo sapiens
agtgcctgggggacatgagtttaagcagaaatggtgcacccgaggccccagccggccggccggtcccagcagcgcccccatttctcacgaaggctggcagctacaattcgggcgaagtccac

SEQ ID NO: 329957 - DNA, 122 bp, Homo sapiens
agtgaggcccggaggagcaagggatcggggttcgtaggcacttggtggctgcaccaaaaacggtgccagacatgtccacagacttgtctgggtaccgattttgctccccagcagattgcaaa

SEQ ID NO: 329958 - DNA, 122 bp, Homo sapiens
cacctgccttttcggatgtcatgagaatttaatgggctctcccagaaaggtgcctggtagcggcaggcatgtcggtacatggtagttattaattatcattactgtacaaattcccagactgg

SEQ ID NO: 329959 - DNA, 122 bp, Homo sapiens
atttcttaattcgtaaggttccctgaacaccctgggaccattcggcttcaggaaatacctcgaggcacccagtggggatgttaaatgaaggattacttctaattacttgcatttctttttgt

SEQ ID NO: 329960 - DNA, 122 bp, Homo sapiens
aaagtattccctgcctggcctttgtcacagagccatgggtgtgaaaggctgagaacctgccgggcattcttacgtcagaggtgaccctgccatcctggcacctggcacagtggctccccgta

SEQ ID NO: 329961 - DNA, 122 bp, Homo sapiens
caaacgctcgctctcccgccgacatgcgcgctaaggtatgtcaagatggtgactcccggccgccggccttatgggacttgtagttttgacgttgcacaaactcagaagagaagacggggacg

SEQ ID NO: 329962 - DNA, 122 bp, Homo sapiens
gtggagactggaaccggcaatttcaaaggacgccacgttcaatcgcagcgctggcgcgggcggaggctaaaacacgggggtcctgagactgaggaaaacgcgccaagttcccctcggtggcg

SEQ ID NO: 329963 - DNA, 122 bp, Homo sapiens
tgcccccaactgtctcccaaatgtctttttgcagttggtttgtttaaatcaggaaccagacgagatccataaattgcatttcttcatgttttttacgtctcttgatgctgaatagttccttt

SEQ ID NO: 329964 - DNA, 122 bp, Homo sapiens
ctagagccagaactagccaaagatcagacaaagcaatatgaatgaactgaaaacccaggccggtgcctggttggttttgagtaagattcattggttgggtgagtgggaagcaagctgacctt

SEQ ID NO: 329965 - DNA, 122 bp, Homo sapiens
tcctcagccccctagcgggtccctcatggggaacccactcctggtggtcctcagcgttcccgcgcaagtaatgtgatttgagaataactgccaatggtgcctcatttctgaaaagtggttgg

SEQ ID NO: 329966 - DNA, 122 bp, Homo sapiens
ggggacctttgtggacacgtgtcggcgttggactcttgctcctcttctctgggggatccacgggatagtcccacgatcccaggagaaggcagggataagccagccttaggaatcgtcaacag

SEQ ID NO: 329967 - DNA, 122 bp, Homo sapiens
gggcaagtcggttgggccggggcaggcccgcaatcccccgttccgtgcccagatgcgcttcggaatacagaacagctgggacttggaaagataatatggggcacacacctgcagtaggttat

SEQ ID NO: 329968 - DNA, 122 bp, Homo sapiens
aggcggggccaattttgctgagctttctcgcgggcttgcagctgcggcaagtgctggcggcggctgctcgcgcaagtcagctggcgtgggaactaccctttgtagctgagaacggcttgttt

SEQ ID NO: 329969 - DNA, 122 bp, Homo sapiens
ttccagggattctgttattcacaaatgccttcctgctcggtagaagaactcctattcatccgtcaaagcccagctctaggagcacttatgaggagcctctccacctcccctcaacactccgt

SEQ ID NO: 329970 - DNA, 122 bp, Homo sapiens
ggcgtcctcgtcacttgataaaacgcctgcgagtctccagagaacaacgggctcattcagcggtcgcgagctgcccgcgagggggagcggccggacggagagcgcgacccgtcccgggggtg

SEQ ID NO: 329971 - DNA, 122 bp, Homo sapiens
aaaccttccagactacagtcttccaacagtctccgcttcgcccagcagccggggctagtccgagccgagcgaaccctaagctacgggaaccagcttcttggtgctgtcccaagagtggagag

SEQ ID NO: 329972 - DNA, 122 bp, Homo sapiens
ttgctatgacaatttgcaaacagtagagtggatgaaactccgcaggaggtggctcccttccgactggagtctgcactagttcgggcctgcacagtaggtccagccaggagccagagatactc

SEQ ID NO: 329973 - DNA, 122 bp, Homo sapiens
caggtagaattgctgggtacttcttgtggatttaattgatattagaagcaacctctgtgtcgaaatgatatgcaaaatacatagcatctttataaaagcttgggttctatttctcacattgt

SEQ ID NO: 329974 - DNA, 122 bp, Homo sapiens
taccgggaggaccagggcgggccggcgaggtcgagggggacccgcgggtctgagggaggacggagtgggggagtgctgagggaggacccggggtggggagctgagggaggatccgcagggct

SEQ ID NO: 329975 - DNA, 122 bp, Homo sapiens
ctggctgctgccgagacacagtgctggaaggaggcggagcccgacctgctggccgtgttgcggggcctcagtgaggatttccagaaagctgaggatgccagcaagtttgagctctgccagct

SEQ ID NO: 329976 - DNA, 122 bp, Homo sapiens
gaagttgctagggcggggctcgagggaccggctataaaaggctggcgctgggttaggtttcgagcttcctggccgtaagcgataaggctttaactgagaaccaccttgtgctgtaggctttg

SEQ ID NO: 329977 - DNA, 122 bp, Homo sapiens
agaggctatccttggcagcccccaggagctgggtgaggtggaggcatcaggaaaccctggcgacccacatggcacagcagcccaggtccctgcagttctaggccaggtccccaccgccaggg

SEQ ID NO: 329978 - DNA, 122 bp, Homo sapiens
aacttgagagaaaatttagaaatgttacaattcttaaattctgttatttaattagaaaagcggaatgctcctggtgaaacacaatgatttgtaaaacaactgtggcggggttctcagagatt

SEQ ID NO: 329979 - DNA, 122 bp, Homo sapiens
tgcggtccttgaccagcgtgaagtgcaggtgccggttgaaactcttcttcagctctgccacgttctccacgcccacgatgccgcggatgctgatctgccgccgcttctcctggtccgtcagg

SEQ ID NO: 329980 - DNA, 122 bp, Homo sapiens
tttaatactcttcccctctttctttcagtttcccttctgaaaaaagatgcttttgtctttcgttctccccaccctgcattcagctaagggtttcttataaatcacccagattctcagaaaca

SEQ ID NO: 329981 - DNA, 122 bp, Homo sapiens
ccttcctcacccacgcgccctcgtcccggaaggcccgccctctacccggctccaagctcgcgcaggcaactattacggggagcagtagagaaacggaagcttggcagctagagcggagccct

SEQ ID NO: 329982 - DNA, 122 bp, Homo sapiens
gccgtggtgtgcgggctcacggttgaggatggtttgtgtgtagctgcaaggacctgtttgcgagtctggctggctgtgtgtccacgggcaggtctgtgctccgggaccgtgtatgtgtaacc

SEQ ID NO: 329983 - DNA, 122 bp, Homo sapiens
cgtccacggcgccggccccaccctgcaggatcggccggatcctcgcaggcccgcgacccccgaggcccccggagcagacacatccttctcgcagaggccactcacctgctccgccgccgccg

SEQ ID NO: 329984 - DNA, 122 bp, Homo sapiens
gaacaccaggcgcgccgtctggacaaaagacttgtacttggtgccctcttcccggagcctcgtccttataacttcgtgtggataagcaatgcaggaggcacagcccttagaaagagcagcag

SEQ ID NO: 329985 - DNA, 122 bp, Homo sapiens
tgtgtagggtgtgtgtgtgtgtgtgtgtgtgtgtgtgtgtttccatctctgcgtccccagcgcctggcccagtgcctgacgcatagtaggtgcacagtgactgttggttgactgcatcgaca

SEQ ID NO: 329986 - DNA, 122 bp, Homo sapiens
ccacccctccctgctcctcagctggcaggatatgcaaggtgctggcgagggtggcggggccggccatctccagggacaagacacagtgcacttcctggggcttgaagcccaccccaacctca

SEQ ID NO: 329987 - DNA, 122 bp, Homo sapiens
gccaattcactttcccaaggccagggattaagagccgcacggtcagctccagatagcgctcgccgccgtgcgccccgccccgccgtgcgccccgccccgccgtgcgccccgccccgccgtgc

SEQ ID NO: 329988 - DNA, 122 bp, Homo sapiens
agacgccaaggaggctgaccgcagtccggtcgacgatgggcatggtctctacttactttccgcccaggctaacctctagcgcattttgctaatttgggtctgaatcgccatcaccgcgggca

SEQ ID NO: 329989 - DNA, 122 bp, Homo sapiens
atgtccgaatctcggccttatcttgttgtcagatattgggcagaataaaatacaatgtaacgcagagaagcgagtctgaccccctgtcccaaatatttcaattcactgcccagggagtgtct

SEQ ID NO: 329990 - DNA, 122 bp, Homo sapiens
agaaatttgaatgttaagcaaccagttaaaccaacgtcagtattaattttttcaagctgtcgaggggagcccttagaggggacaacttcttggagtggcggccaagctgggccttaccaggt

SEQ ID NO: 329991 - DNA, 122 bp, Homo sapiens
tgtatagaaaaccagaactgccaaattgacaaaacacagagaaagcgttgtccttactgtcgttttcaaaaatgtctaagtgttggaatgaagctagaaggtaagattcttctaaagactac

SEQ ID NO: 329992 - DNA, 122 bp, Homo sapiens
caggaacgaggggaccctgggaacaaggtgctgagtggcatcagggtctctgcctgcaggcgggggatgtgtctgggtcgtggttgatgggaagaacctgaccatagattccccatgcagag

SEQ ID NO: 329993 - DNA, 122 bp, Homo sapiens
gcccgccatgccggagccccctctccccctccccccatgcccccgcagtgggctcctgcgcgacccaagcctcccccacgagcgctgcccgctgctccatggcacccagtcccatcgactgc

SEQ ID NO: 329994 - DNA, 122 bp, Homo sapiens
ttcttacttaggtgggtgacctcagacaattttcttagtgacattaaacctttctacactcgtctgaaaaaaggagagactgacagttccctgcaggcttcccgtagagctaaatggcatca

SEQ ID NO: 329995 - DNA, 122 bp, Homo sapiens
cgcggacgccggcgaagcgcaccccgggacgtccgcatattctttcccccaaaactagtgcgctccagccggcgcctttcctcggaacctaaggaaggggtatatttcgttgctttctttaa

SEQ ID NO: 329996 - DNA, 122 bp, Homo sapiens
gcctgactgaggcgctgccccatctccaatgtccccaccacaatacctggctgcaggaagcgcagtgcagctgtgtgcagagcccaggtggtttctgtctaccctggtgggggtggagccag

SEQ ID NO: 329997 - DNA, 122 bp, Homo sapiens
cgtcgtctttgagccttcttggtaggagtggaaacggggctgccagacgccagtgttctccggtccctccagctgggggccctcaggtggagagagctgcgatccatccaggccaagaccac

SEQ ID NO: 329998 - DNA, 122 bp, Homo sapiens
ggacgagaccaagtcggagctcgtactctgtactctggcgggggcggggcagggcctctgcggggcggggccgcggtatgctgctagctgttactcccgccttccccgcagccctgtgaatg

SEQ ID NO: 329999 - DNA, 122 bp, Homo sapiens
ggctcctgcagagctctgggggctctgagttgcagcttttcatttgcaaagaaagagagtcgcctgtctccctcattggactaggggctttccaaggacagagctgtgtctctcgcatcaga

SEQ ID NO: 330000 - DNA, 122 bp, Homo sapiens
cttaacaaaccccatgttcttatcacccagcttaagtgattactgactcatgggcaatctcgtttcatttaattcccacccactcctcctatcctctggagcactaaaagcaaaacagcttt

SEQ ID NO: 330001 - DNA, 122 bp, Homo sapiens
cgcagggggcgggctgagcgcgtgcgaggcgattggtttggggccagagtgggcgaggcgcggaggtctggcctataaagtagtcgcggagacggggtgctggtttgcgtcgtagtctcctg

SEQ ID NO: 330002 - DNA, 122 bp, Homo sapiens
agaggtcagaatgtgcccacctcctggcagctgaggatgaatggcttaagtgacaaattccgatccgtcagcttcccagatcattgaacagccaaaggagactaatacaataaacaacagtt

SEQ ID NO: 330003 - DNA, 122 bp, Homo sapiens
tttttgggtcatgtgtaatctgacagtttaaaattatacaaaaatgtgctgaagtccttgcgttcattgcttagggagtatctgtgtgcaagaggaacattatatgaatgaatagaaatata

SEQ ID NO: 330004 - DNA, 122 bp, Homo sapiens
ggcgcaggggccgaggaggcccgagggcagcggcggggtccttcacagtgactcttgggccgcagcagcttctcattccctctccctcccctattctggaggaagaacgggcaacagcagcg

SEQ ID NO: 330005 - DNA, 122 bp, Homo sapiens
gagctctctgccttctcccgaggcttctctggtggggaatcttctcccgctttcgctgggcgtgttttggactccctcggagtgaacggagcaatccgattccatacttgtgagctaaagct

SEQ ID NO: 330006 - DNA, 122 bp, Homo sapiens
ttgtgatgtggccctccaccgcctcagtcatctcatccactgtgcagttgatagaagggtcgtagatcttgaaccaattgtcagcataccacccaatgaggaaccagacgtacttcttccca

SEQ ID NO: 330007 - DNA, 122 bp, Homo sapiens
gatttgggtgtgctgactctgcttcattccagctccttcaggcagtgagagccttcctcccgccagcggtgcttccagcaactccagcaacgccaccaccagcagcagcgaggagatgcgtc

SEQ ID NO: 330008 - DNA, 122 bp, Homo sapiens
cccaacagaatgcctctcctgctattttcatttagccccaaggttttagagagatcaatacggatactttccagggaaggaaataagacaggaacatgtgccctagtggaactgcttagaat

SEQ ID NO: 330009 - DNA, 122 bp, Homo sapiens
tacaccctttctagggcagacagcatctagcataaggggctggctattttagcctgacaacgatactcttgatgggcaatacttactctaaagctccctcccaggatggctgaggatttgct

SEQ ID NO: 330010 - DNA, 122 bp, Homo sapiens
cagaagcagacgttcaatggctgtgagagcaaaagaaccaaggggctgtgggggtgtcagcgctgcactgatttcagtgcaagacaagggtttaggtcccgcataacatcttaacagaagac

SEQ ID NO: 330011 - DNA, 122 bp, Homo sapiens
ggtctctggcccgagggaagccggtccttcccggctgagctcgcggccagcgctggccggcggattcccattcattcacccttctcctcctccgcccagtactcgtggccagggtcgtatca

SEQ ID NO: 330012 - DNA, 122 bp, Homo sapiens
gggaacctgccaagtcagaatatgcttgccagctgttcaggagccccctcttctggacaccggtggaaacacactttccttccaatgttcccccaaatcctagctcactcgtggtcatgaca

SEQ ID NO: 330013 - DNA, 122 bp, Homo sapiens
cttcagcggctgtcttccctgatgcaaataatgttaggcaaaatgaaatctccatgcatccgagctcagtggaggaatgtttattgagtccatagaaatttgagcagggcatatctctaggg

SEQ ID NO: 330014 - DNA, 122 bp, Homo sapiens
atgataaattctgtgcatgtgaagtttcgtagaactcactgtagcgcatttagaaacacacgaccagaaattgtgtgaaacattgctttgggatggatggtgcccgtctgaccttaagctat

SEQ ID NO: 330015 - DNA, 122 bp, Homo sapiens
ggcggcggcgcggggaggtgtgcgcggacgccctgcccgctgccgctgccacccccggcccggccccgcccgccccccgagccccggcctcattttcacacggtccctcccgggccggggcg

SEQ ID NO: 330016 - DNA, 122 bp, Homo sapiens
aagattctccctctcctggtaatccgaaacctgaatagaatgtttagatggtcttgaaatcgtcaacagcactcaaaagaaactgtctctaagtttctgattgagatgccccaagctgctat

SEQ ID NO: 330017 - DNA, 122 bp, Homo sapiens
ccaaaagtgccatttgtctatgtacagtcagtgttcttactttcacaacactgtgctttgcgcaaaatccaattgtgtgacaaatgaataaaataatcacatgtgggtcaactgcaattgaa

SEQ ID NO: 330018 - DNA, 122 bp, Homo sapiens
ggtaatcaagtttttaaaatgaaaataaaggattgctgaataaatgaacaaccagagaggcggccaccagccaaggacaaacaaagctgaatctggaacactggcttcctgctgtcctctca

SEQ ID NO: 330019 - DNA, 122 bp, Homo sapiens
tgaaatctctgatcacctgtggcccactgagaaaactacagtaggtgacatctggggtaacgtagtttttagcattctgagattttaccccatcctggaacctgaatctggataccatttat

SEQ ID NO: 330020 - DNA, 122 bp, Homo sapiens
aagggagccagggcccttcctggaggcgggaacccaagtgggaggcagagcgcctgggcccgctcctcgatctgctgagtgacgaccctgtacaagtcatttctcttccgagagcttcagtt

SEQ ID NO: 330021 - DNA, 122 bp, Homo sapiens
ggtgtggagggagaggggcaggcaggagctggggctgcgcacagcgcttgcgggccagcgcgagttcccggtgggcgtgggctcggcgggcccctcactcagagccgcgggacctgccagcc

SEQ ID NO: 330022 - DNA, 122 bp, Homo sapiens
ccctgcgcctccttcggcttcttagtttgggtgttgaaactcacctcctttggtcctgttcgtctctgattcaagacagttgggtttggtacctgacagggctgggtgcagaaagctgaccc

SEQ ID NO: 330023 - DNA, 122 bp, Homo sapiens
gccagcagacacaggcggcacctcggggtctgggggacgcagctgcggctggcttctccccgaccctgtgggcggcacccaactccccaccctgccgggtcctcccggggccatctcggagc

SEQ ID NO: 330024 - DNA, 122 bp, Homo sapiens
tcaagagaaaacgtagagaaatagttcgggggctacctcgcgggatctagtcccaggagccgtcaactgccagtttcaccaccgctctagaggtcacttccgggagggcgtcatctcaccgc

SEQ ID NO: 330025 - DNA, 122 bp, Homo sapiens
gcagccgccttcccggaaaaggggttccaaggacccgcatgctttgctgagcacgctgggcggccagagaccgccgcagctggtctcctattaggaggggactattttctttaaaaataaga

SEQ ID NO: 330026 - DNA, 122 bp, Homo sapiens
aaaaaatgagtgtactgcagaagaggagcggctgacactgcagggaaagagcctcccagccgtagcggtgttcatttaaagggacagtacactctgaaagacgaggtagagcgggctgctga

SEQ ID NO: 330027 - DNA, 122 bp, Homo sapiens
ggtacagcagctatcatgagaccatgaggaagtaagcataaaggcaaaagtcaacatctacgtatcgcagatagaaataaaagaaagtgcttgggtccccgatcacatcagtgacctgacac

SEQ ID NO: 330028 - DNA, 122 bp, Homo sapiens
agcgcggcgctcagggggcgtgcctgcctgggccaatcggcgcgagcccacagtgcggagcgagcgcctcaaatgctcgggtttctcagctgattgtctccagccgagagttgttttttgca

SEQ ID NO: 330029 - DNA, 122 bp, Homo sapiens
gtccccactgcggtccacggccaggtgaacaatggtaagacatgctggtcggtggctccccgtggctgtgggtactgggagcagagccccttctcactcgtggtttcggttctgactgtaac

SEQ ID NO: 330030 - DNA, 122 bp, Homo sapiens
gaggggagagggacccccacgggagtggaagtggcagagcagctgcagaagtgcagggagcggaaaggtaccagggcagctgctttccgctgcctccggtccgggcagctgcagaaacagca

SEQ ID NO: 330031 - DNA, 122 bp, Homo sapiens
ggtgagaggggcgcgcaaggcccgtcacttaaggggagatgcacaaaccaactttgggggcgtgcaagacccagccctggagaggaggctcccagaccccaccctggcggcacagcgccttt

SEQ ID NO: 330032 - DNA, 122 bp, Homo sapiens
agtagttgggaatcacaggcgcacgctaccatgcctatttttttaaattatgtgtagagacgaggtcttgctatgttgcccaggctggtctcgaactcctggtctcaagtcatcctcccacc

SEQ ID NO: 330033 - DNA, 122 bp, Homo sapiens
caatgtggataaaaaacacttatattttagattatcattttggtgattgagaaacaaaatcgaaggcttctcttgactagcaaggcaacaagtaagttgctgtgccatttttattatatttt

SEQ ID NO: 330034 - DNA, 122 bp, Homo sapiens
tggtgttgagtattgtggtatgtagagatgatgctgttttactcactgcattcatgattccgtagagtgatgtgccttcagttcctgaaaatgacttcatctatgacaaaagccagttatac

SEQ ID NO: 330035 - DNA, 122 bp, Homo sapiens
gctgcagaagtgcagggagcggaaaggtaccagggcagctgctttccgctgcctccggtccgggcagctgcagaaacagcagggggaggagcaacagctgccaaattcgccaactagaggag

SEQ ID NO: 330036 - DNA, 122 bp, Homo sapiens
cctcctcatgcccacagtcagcccaatgctgtctccgttccatgggccagcacaggcaggcgccactctgctgacatgaggacctggggtagctcagacatttgactacccaagcccagaaa

SEQ ID NO: 330037 - DNA, 122 bp, Homo sapiens
gatgtttgcccatcgtcatcagggggcactaaggaccccgaggagcacggggatgtctgccgggtccttctcatggtgcggtgggaagctgccgaagacagattgctttggaggctggtctg

SEQ ID NO: 330038 - DNA, 122 bp, Homo sapiens
ccgatcgttccagctgccgagcagctcttaaagctttggattcggctgtcgtggagataacgggcaccagaaaaacttgtaggagtagcaacagctatttggtcggatggaggccagaagcc

SEQ ID NO: 330039 - DNA, 122 bp, Homo sapiens
tgggaggtgacttcaggctggccctcattctgacccaaatcctgaattctagcttttggccgggatttggtccatgacaggctggagaccacacagcagctgcccaggggcatcagagaaag

SEQ ID NO: 330040 - DNA, 122 bp, Homo sapiens
acagaaagacaaatatagcacattttcactcatattgtgggagctaaaaaaatttgagcacgtataagtagagagataattgtggttaataaaggcaggaaggataatcgggaggcaggtat

SEQ ID NO: 330041 - DNA, 122 bp, Homo sapiens
ccagccctcccaaggcagtgagagcaactatgggcagcacctacggcagggacagattggcgtctcgctcacactgtgcacgtgaagcaggtgcggccagcagctcacactgcacacatgaa

SEQ ID NO: 330042 - DNA, 122 bp, Homo sapiens
agtgaaactgaagaggaagaagagacaaaaaaccccaaacagaaaattgcccagacgaggcgccccgaccctccgaccgcagcgttgaatgagccccagacctttgattgcgcgctgtgagg

SEQ ID NO: 330043 - DNA, 122 bp, Homo sapiens
cccagcaaactgctacccatccaagacccaggcccacctgtcacttccactctggcacctcgttcgccatcacctcactcaggagggttccactggtgcttgccggcgaacgccaccatttt

SEQ ID NO: 330044 - DNA, 122 bp, Homo sapiens
ggacagatggccaatctctccccttccaaagcaggccctgctccccgggcagcctcccgccgaggggcccagcccccaacccacaggcacggaggggcatccctccctgccggcctcaggga

SEQ ID NO: 330045 - DNA, 122 bp, Homo sapiens
cctaccacgcaccaggggctgaaggaatgtttatcaagcacctaccacgcactgaaggaacgtttctcaagcacctactacgcactgggcgctgaaggaacgtttatcaagcacctaccacg

SEQ ID NO: 330046 - DNA, 122 bp, Homo sapiens
ggctaaggctgagttgaacgcagcccctcccgcggctcgtcccctctccagtgtctctcccgtaaggtgccgctcccaacagcaatgggtcgagatgtagaggaaacactctgtacgttatt

SEQ ID NO: 330047 - DNA, 122 bp, Homo sapiens
atttgcagcccaggactaggacgcagggttctcatccaggcttcacccacagcaaatgtgcgactctccctggccctctgggtggggattataataactaccttgcttaccccagttgctgg

SEQ ID NO: 330048 - DNA, 122 bp, Homo sapiens
gcgtggccgccagagggcactgcttcgccaggctggaggccgagccagctcgccgggaggcgctggtgggaggcgcgggagcccccgggaggagcgcgtccacgccgcgcggtgcggagccg

SEQ ID NO: 330049 - DNA, 122 bp, Homo sapiens
gtcatcatcacaataacctgacatgctcattaaatcactattgatttctagactcaaccccggacctaccaaagctgaagggccctgaaatctgcattttaactagcatttggactgattct

SEQ ID NO: 330050 - DNA, 122 bp, Homo sapiens
cccacctggctaaattcacagtcgcgctcgctccttccgcccgccagaggtcgcaggctgcgagagcaggttcctggtttggcaagcactcgccccctcaggcccgttcattctcgcgagag

SEQ ID NO: 330051 - DNA, 122 bp, Homo sapiens
ctgcaaagccaggttttccttcacggcccctcctaatgatgtttcttttcctatcattgtcgagcccttagaaccccaggatcgagggagggaaaacaagcgctcaagcactccctcgttgg

SEQ ID NO: 330052 - DNA, 122 bp, Homo sapiens
ttggggtggcgaacaggtgggaaaaagggatggataaagtaagcatagcagaggcctttacgccgctgctatcgctactgccaatcgcaaggctttcgtatcccggaagtggctgatctgtt

SEQ ID NO: 330053 - DNA, 122 bp, Homo sapiens
tcagccatttgggaataagagtttcttccctgcagcagatgtgtggctcaaagttcaccacgagtgcactcacagagagagcacagcatgtgttgttctgtgagggaccagtgctggcctgt

SEQ ID NO: 330054 - DNA, 122 bp, Homo sapiens
aaggtagtccaaaggaaatttcttttctggtatttaaatctgtgggaagttgcacaaagacgaacaatccatggaagttccttcattgcagagctcaagctttgaaatgttatcaaagcatt

SEQ ID NO: 330055 - DNA, 122 bp, Homo sapiens
ctgtcagggcagccatcttgccgaagtcacatgaccgtggcacccagggaagcgaggtcacgtggctgtcgctgttgtcgcggggcctgccgggggctgtagtccttcagagtgggggaagg

SEQ ID NO: 330056 - DNA, 122 bp, Homo sapiens
cctgcaggtggattttgaagacgtgatcgcagagcctgtgggcacctacagctttgacggcgtgtggaaggtgagctacaccaccttcactgtctccaagtactggtgctaccgtctgttgt

SEQ ID NO: 330057 - DNA, 122 bp, Homo sapiens
gcaggctcttccgacgcgcacccgggggtcctcactggcccactccgggagtcctctgcccgcttccccgacctcgagggtctcctctgacgcagcgtcgattccccttccctcctcggtcc

SEQ ID NO: 330058 - DNA, 122 bp, Homo sapiens
ggccaactggtgcggggttgactggaagcgaccggggttgactggaagcgaccggcatagcgcttggcaagtatatagcaggtagtaaaatggctgtaattttgaaagttagctttgtgaag

SEQ ID NO: 330059 - DNA, 122 bp, Homo sapiens
gcttcctcctcccccgtcctccatcctccttgggcgccttgcccgctttgtcccgccagccgcctcagccccgactcgccggggtcagaaagccgccaggatgccctccagcagcccgcgcg

SEQ ID NO: 330060 - DNA, 122 bp, Homo sapiens
gggcggagtcgggccgtgggggcggggccgcgaggaaggcttggcctagcccaggccctccgcccatccgactcttccggcccttggaggcctggctcctgtaccttcacctggcgtcttgg

SEQ ID NO: 330061 - DNA, 122 bp, Homo sapiens
ggcgggtgcgctgctcagttagctccactctctcgcggctggaagtggggagtgtgtgttcgctcccgagtgtcactgctgaagcccggagtctcttcccctcccagccctaacccctcccg

SEQ ID NO: 330062 - DNA, 122 bp, Homo sapiens
tcattgttatggcctcaaatgaaggccttgtcaccaggcgggggcgggaaggcactggagcgcagcagcattgagagcatccgaattccctcctctgtccctgattggttgaagaactgggg

SEQ ID NO: 330063 - DNA, 122 bp, Homo sapiens
catgtataaaatgggggaaatgtatgcatttcagccctcctgttaggattaaataacatacgtgaagccttagggcagcttattgatatacaataaatcctcaacaattgtcagttgccttc

SEQ ID NO: 330064 - DNA, 122 bp, Homo sapiens
agctgctgtcctggtagtcctctggtttgtgcttcctagtggcaggctgcaacatgttgacgattgatctttcagatgggcattgatgatgcccatctgtgccctgaggctttgctttactc

SEQ ID NO: 330065 - DNA, 122 bp, Homo sapiens
agggccctgaggtgggaggggccgggcggcctcaggctcagcgaggggctgaggggccaacgtggccggagtggagtgggcgaggggagggagcgctggccaggagagacaaccacgagcca

SEQ ID NO: 330066 - DNA, 122 bp, Homo sapiens
aggtcagcaggacaaggtgcgggggccgcaaggatagcaagaccacagcgctgatcctcacgctcgtggttgccttcctggtctgctgggccccttaccacttctttgccttcctggaattc

SEQ ID NO: 330067 - DNA, 122 bp, Homo sapiens
ttagtaaaatgtgttttggtataaaaatccagataattgaaccattgccattagatgtttcgaggtttctattgacaatgtggaggtcttatcatttagatttcaacacttttatttttagt

SEQ ID NO: 330068 - DNA, 122 bp, Homo sapiens
cagagtttaagatttcagaaatctagccatccaaaaggatcataagagccattcctgtggcggctttggggagtggatgcaaaggtcatcagagctgagaaagacgtgggatgatgagtcag

SEQ ID NO: 330069 - DNA, 122 bp, Homo sapiens
cagaatctagtcttcctctccccttcctcgctccctccttccaccgccgcagtcattccccgcggagtttcgttgtgttgttacacaagccagcttttggtttgttagttgttcgcattccc

SEQ ID NO: 330070 - DNA, 122 bp, Homo sapiens
tacactccagcctgggtgacagagcgagactctgtctccacggaaatctttagtaaaaggcgaaagatttatacaatttgaagagaaaccagagaatgactctgtctaaaaaaaaaaaaaat

SEQ ID NO: 330071 - DNA, 122 bp, Homo sapiens
gctggttcctctggtgactttaagtctgcttccttcacctttccggcttctggaggtgaccgcctgcccgtctgcctgggctcgagacccatccttgaatccctgcagtctccgcatccttc

SEQ ID NO: 330072 - DNA, 122 bp, Homo sapiens
tctaggccctctgggattggctgtgcctgagcacatcttccctcagcgtttctgattggtcgctggacgcgcgggatgcgagtccccattggctaggccagggcgcctgcgcggcggggttc

SEQ ID NO: 330073 - DNA, 122 bp, Homo sapiens
ttccttattccctcaccaacagtaatcctcatttttatagaaggtaagagagaagaagtacgcagaggttacagacttgggtccaaagaaaattacagagtccaaactgaggccaagcctgc

SEQ ID NO: 330074 - DNA, 122 bp, Homo sapiens
taactttctaagactataggctttcagaggcattgtggctagcagaatagctaatagacacgaaatgaacaaatacaggaaagctagaatgacactatcttatgcaaatatggtctggcccc

SEQ ID NO: 330075 - DNA, 122 bp, Homo sapiens
gaacccatctgcgaactgaagggtatggtgaaagggaagcagagaagcacattttccccccgtttttccagttctgtccaagagtggagatctgaggtacaatatactacccactttccagt

SEQ ID NO: 330076 - DNA, 122 bp, Homo sapiens
ctgacaccagcccctcagcggggccgtattgctgtggtaatctgggtgagccggacagagcgtcctgcttacaagttcaatataatggaacagcagggggcgaagggctggcagaaaagctt

SEQ ID NO: 330077 - DNA, 122 bp, Homo sapiens
gagctccggcaggcggggaggccgggccagttagatttggaggttcaacttcaacatggccgaagcaagtagcgccaatctaggcagcggctgtgaggaaaaaaggcatgaggggtcgtctt

SEQ ID NO: 330078 - DNA, 122 bp, Homo sapiens
gcctttatttgggccaagacgatagggaaatctggggaagcgaacagtcactgtcaacaccgccagtaattattctctcttccaattaatggtgacatagattaattatcagatgaggcaaa

SEQ ID NO: 330079 - DNA, 122 bp, Homo sapiens
catcattctctagtcctttagtccataaagtttcaaaaggctccctcaaagttcaggtcacggtcaacctcttgactttccatagccctgacagcagagctaagaaggctacacagggtccc

SEQ ID NO: 330080 - DNA, 122 bp, Homo sapiens
ccccatcaaagactggagcgacgttcactgaaatgatacaagaccagcaggggcgcagggcgctgcggccctcagaatgcggtgacagcgccgcctcgcgtcccttccccgacctgccccag

SEQ ID NO: 330081 - DNA, 122 bp, Homo sapiens
tgcgggattcggcgttgccgccagcccagtggggagtgaattagcgccctccttcgtcctcggcccttccgacggcacgaggaactcctgtcctgccccacagaccttcggcctccgccgag

SEQ ID NO: 330082 - DNA, 122 bp, Homo sapiens
cagtccctggggtcgatgctgacgaccgcctcctcttggcctggcccctggaggggctggcggggaacctctggctgcaggacctgtatccagtggaggctgctaggctgcgagccctggac

SEQ ID NO: 330083 - DNA, 122 bp, Homo sapiens
cccgcccacatctggcagaagccacgccccgtccgtgtgggtggggacggcccgccggaccgaaattcccagactgctgcctcaggcaacgggctttccgactccttggcttcttatgtgag

SEQ ID NO: 330084 - DNA, 122 bp, Homo sapiens
ccctgcgccccgcccctatatcccgggccctgagccccgcccacgcgccgcgccccaccccggtaccccggcctttaagccccgcctacactcccagccccgtcccgccgtcccaggccctg

SEQ ID NO: 330085 - DNA, 122 bp, Homo sapiens
gatccggggccttcccattggtcacctctcgtggcgaactcggattgggccatatcaggccggggcgggtcccatcaaccaatagcggcgcggggctggcgggtggggcggggcctcgccgg

SEQ ID NO: 330086 - DNA, 122 bp, Homo sapiens
caggggcgggtcaggctcccgggaaagcgaaacctaaacagtggcgcttcgcaccctcctcgatcccaccccgtccggttctcagctccgcggaaccccgcctccgcctccgcctccctccc

SEQ ID NO: 330087 - DNA, 122 bp, Homo sapiens
ggggaggaaagaagaggggaatccatccattcccggcgtgttcgcggggggttaatgttgcgtgttcgctgggggttaatgtttgccttatgaccaagtctctgtgtccgtgcctctctcca

SEQ ID NO: 330088 - DNA, 122 bp, Homo sapiens
caaaccacatgaccacatgactgaaatctgacagggcataggtgtcttattacacagtgacgcattagttgagccattgctaggtttcttctgagctcagagtggcccattttctgagggaa

SEQ ID NO: 330089 - DNA, 122 bp, Homo sapiens
acacacagccttttgcttaagcaaggcgctctgaagccgaattacgtctgcctggcatcccgaaacactgacggccctgctatggctgtgggcaaattcaggggtgggggtgtgaggggggg

SEQ ID NO: 330090 - DNA, 122 bp, Homo sapiens
gtcacgaacacagccagggcagcctctcccatccctgtggattagaaagctgtgtgccaccgtcagcgatttcctcggctcagccggggccgggcacaggaggacgaagggtttaacagtct

SEQ ID NO: 330091 - DNA, 122 bp, Homo sapiens
ggaagcggcagccctggggaaccaggattcctggtcgtgggtggacccagtggaaaaggacgtgcgaagcctgtacagaatggagcaggccggccaacagggccggggggcggcgggtcccg

SEQ ID NO: 330092 - DNA, 122 bp, Homo sapiens
agcttgaagtgagcggagatcacgccactgcactccagcctgggcgacagagcgggactccgtctcgaagaaaaaagaaaggtattcaaagaaacacataataatggctagagacagtgaca

SEQ ID NO: 330093 - DNA, 122 bp, Homo sapiens
cctgctggagagcctggggggccgtgctcgggacccccggatggcacgagctgcctccagcgaggcagcgccccaccaccagcccccactcgagaaccggggcctgcaaaagagcagcagct

SEQ ID NO: 330094 - DNA, 122 bp, Homo sapiens
ctcagactccgcaggaaaggttccggacaagtcctgctaatgcaagaaaccagggaaggtcgtcccctagtgctcgggtgtgtagcgccgctgacctcaccaaggcgcgtacttaccctgta

SEQ ID NO: 330095 - DNA, 122 bp, Homo sapiens
aaattgtctgaatacacacacccaaatgggtacaactactgaaatctggtggaggccacacggtggcgctgcaggctaaagagacggtttgggaattgctctgaggatgctatgcaagtcac

SEQ ID NO: 330096 - DNA, 122 bp, Homo sapiens
gtcactaccacctggggctaaagggagctgggcacgctgtttcaagggataagacggtcccgcttattatgtacagactacatggtctgtaaatgtgattggagttgaattctttagagtgt

SEQ ID NO: 330097 - DNA, 122 bp, Homo sapiens
cacccagggctggtgatggttccattcagcttggtaatgaaaccgccacaggccactgcacgggggaaacagaaacaggattcatttggctttggctccaggtgactgtgatttcccaccag

SEQ ID NO: 330098 - DNA, 122 bp, Homo sapiens
cgcccgagagaaggcgccgggggaggaagccgcgcggggagaccctggcgtggcccgcgccgcccaggatgactttcctggcaagttctgcagacggtgcccctttcttgggacgatcaacg

SEQ ID NO: 330099 - DNA, 122 bp, Homo sapiens
gaaggagggtggctgggcggcaccccgatggctccctgtgctccctgagaccctacaggccgccctctgcagccacacctggaccggcaggcatgcacgctgcaggcaggctgcctccgctg

SEQ ID NO: 330100 - DNA, 122 bp, Homo sapiens
cgcccccgccccgctccagagctggataggagtcaggcaggtgcagacctagaagcactgcggctcagtgggcagggaaggaatggagagaaggcgctacccgaccaggagcaggccgcagg

SEQ ID NO: 330101 - DNA, 122 bp, Homo sapiens
ggggcgccccgggctcggcgccgaggggtcgcgctcctctctcctgacgcctccgactcccggtctccaaagccagaagagaaggtttgattcagcaactgtttgctcccttttcctggtcg

SEQ ID NO: 330102 - DNA, 122 bp, Homo sapiens
cctgacatcagtgatgtcagtctcaggggtcgaatacaaattctctaccctggagagggacgcacaatccaggcacgagccacgccctctttctatctccatcctccctgactcccttcccg

SEQ ID NO: 330103 - DNA, 122 bp, Homo sapiens
cgtaggtgcgtgagcgtaggtgcgtgagcgtaggtgagcgtaggtgcgtaagcgtaagtgcgtgagagaacctgcttgaaggaacctgcttgagggaacctgcttgagggaacgtgtgtgaa

SEQ ID NO: 330104 - DNA, 122 bp, Homo sapiens
ggtgaggtccaggaactgtgcaagaggcctctggctcggaggggctgaaacaggtgtctccgcgcgctgggggaagagcgactctcccggcaacaggtagcacccgccaaatcccgcgggaa

SEQ ID NO: 330105 - DNA, 122 bp, Homo sapiens
actttctacatctggcccttggtctgggccagggaggtcggcgcggccggcggagggagacgctgggagggggccagtggcggccgggtcggagccctgggggaagggtacgggtcccgccg

SEQ ID NO: 330106 - DNA, 122 bp, Homo sapiens
cacggggagggcttccttggtgagggcagacgcaggaaggcacacctgtcccactgcttgcgcatcccaaacctgcagaaggtggtccagccacagcggactggctgctgtggcatctcccc

SEQ ID NO: 330107 - DNA, 122 bp, Homo sapiens
ctctcctcactcacctcaacccccaggcggcccctccacagggcccctctcctgcctggacggctctgctggtctccccgtcccctggagaagaacaaggccatgggtcggcccctgctgct

SEQ ID NO: 330108 - DNA, 122 bp, Homo sapiens
gcgtgtttattttcagaaggcggcaggagactttgccaacaccagtgccccttgttttgacggcattttcccaagtaactgattatgttcctcttctaccatacacacctaatcacagcaga

SEQ ID NO: 330109 - DNA, 122 bp, Homo sapiens
catcagtctttcagcccctgcaatggtgagcagagggacaggcaatgggaaaaagactcacgcatgtatctagttgctatgatttttccgaagaaggcttttatgtggaatcaccactacgc

SEQ ID NO: 330110 - DNA, 122 bp, Homo sapiens
gggcttcgagcgtccccgggcgctacaggtgggtgaagttaagtggctgctggagcgtctcgggggacagccagtgtctgcggcgccgagagggccgttcgtggactcaaatgggtatcacc

SEQ ID NO: 330111 - DNA, 122 bp, Homo sapiens
tgagatcgatctggaagccgacacggtgctggccactctgtacgctgctaagaagtacatcgtcccagcattggcaaaagcctgtgtcaactttctggagacaagtttggaagccaagaacg

SEQ ID NO: 330112 - DNA, 122 bp, Homo sapiens
gagcgcttcgccttgattctccgagaagcctccgagaagtgctttaagtgtgtttgcatgcgccaggcggtgggcagcgggggcctgtccagccctctcccgccatccttccccaagtgacg

SEQ ID NO: 330113 - DNA, 122 bp, Homo sapiens
gcggggccctggggagtgttgtgaaagcagagagcccgcgagctctctagggcggagctccgcgggggaagcgccggcgatctcgcggctggcgggggcgggaccgcagtgcgggggatgtc

SEQ ID NO: 330114 - DNA, 122 bp, Homo sapiens
ttactcctccaggcctctggcgaacacagggctcagaggaactaccttcttcaagaatcacggacgtggctggttttctcaggaaggggtctcggctgagcattaaaataaaacggtgcttg

SEQ ID NO: 330115 - DNA, 122 bp, Homo sapiens
ggcaccacagggagaagtctgcactgcgcttgtcaggacggccagtggggggctgctgagcgcagggagtcagtcctcgcaatgaagatatagtctcggggagataatgctggaaatcgatg

SEQ ID NO: 330116 - DNA, 122 bp, Homo sapiens
gcatgatagtgtctttgtgtgtgggtatgtgagtgtgaggggagggcgtctctgcctctgcgggaggaagtgtggctggagaggattagtcattctgtaggattctgcccaactcagccaga

SEQ ID NO: 330117 - DNA, 122 bp, Homo sapiens
tcgtaacaagaaaaagtgatatcaagcccgggcagaagggcgcattctcggcgcggagggcggagcctttcctggagtggcggcggatgacccgggctcccgctcctcacctcggcgtgggg

SEQ ID NO: 330118 - DNA, 122 bp, Homo sapiens
agcagagtatcatgcaaggcagggggacttgagcctggcgaggctggtctggaggcctggcgggctgcacagtaagaaccccaggagccctgggccagcctggccccaccagtgcttgtgtc

SEQ ID NO: 330119 - DNA, 122 bp, Homo sapiens
ggagtcccaggtcttgccactacagaggcgcgtatgaaccacggtttaacactacgtctacgccgaagttcgggttagtcagaggccacgcccaccgcaggcccgaaaacaccagcctgcac

SEQ ID NO: 330120 - DNA, 122 bp, Homo sapiens
ctgaggctttcatcatttcctgcttggatcgttgtatttttcttccctgggggtctgtctcgctgcctctgatctcgtccctttgtcatccaccctccgcatggttcccaaagtgatcattc

SEQ ID NO: 330121 - DNA, 122 bp, Homo sapiens
ataggctgggtcctggaaaatgtgtgtggattctgctcctttttggacctggtggagcctcgtagagatgggaaaacaaacccaaggctcagaggcatgcgacaaagtcagggcagagggtg

SEQ ID NO: 330122 - DNA, 122 bp, Homo sapiens
cctggtgggaacacgtgtgcaggggcggagcggagcagccaagccgaggtctggccccgccgcctttctgagccgtgagaggtgccactgcagagactctacagcgcccaggtgctgagatg

SEQ ID NO: 330123 - DNA, 122 bp, Homo sapiens
atagtaagaagtaatcctttcttatggttgtcatgtgttagcagggacctcttcttatcacggtcactcagggacccagtctcatggagtaactactattctgaattgctggcaccatgcag

SEQ ID NO: 330124 - DNA, 122 bp, Homo sapiens
gcccgacaggtagcgaatggaggtcgctgggggcagagggtccgagccctgtgggctctgcggatgcacgccctcctcccgggcctccgcctcagtctgcagaatttctgccgagtggcacc

SEQ ID NO: 330125 - DNA, 122 bp, Homo sapiens
tactttttattaagagctgccaagttagtatggctgtctgggatgtcctctggagacagccgactccgggtttggaaacctcaacgtcctaggctttcaggacctagtgtttggctaaacct

SEQ ID NO: 330126 - DNA, 122 bp, Homo sapiens
ctttccctcgaggttgccccaggaatccctttgacctctgccattggacgtcacagaaggcgcgactaatcgtggctggctcccggagcttcactcttccctctcttcctgcgaaacttgac

SEQ ID NO: 330127 - DNA, 122 bp, Homo sapiens
tataatcaaggtgtcctttatcccaactaaggatgtctcctctcttggagcaatattgtacgtgacagtttgtttattgtactcaaaagcattaagaaggaacagagacttgccaaaaggta

SEQ ID NO: 330128 - DNA, 122 bp, Homo sapiens
accagccccggactcctcaccatcgaacgcagtctgtgtgcccccggtaatgtctctggccgccacctccaggaccccctgggcctcctccaggccggtacagcaccaccacacaggcgata

SEQ ID NO: 330129 - DNA, 122 bp, Homo sapiens
cagcacccacacctgcggggagccccgcagagcaaaaccaaggaagatgtcttctctgctcgtctcgtcaccccaaaggtggtcatggaagccacctccaaaccctactccacgctgagtgc

SEQ ID NO: 330130 - DNA, 122 bp, Homo sapiens
cagctaggaagggcctgacctggcctagtgcagacaattgcaggtgttttgctgctccctcgtcacctctgcccacagagagtataggagaagggataggataaggagagtttctgacttaa

SEQ ID NO: 330131 - DNA, 122 bp, Homo sapiens
ttggcgaagctaagaaagcactggcttcttattctcaccagacatctcaacacccacgtgcgctgggtcccgcagtctctcgcccgccccacgcgggtcccagccctggtccttactccccg

SEQ ID NO: 330132 - DNA, 122 bp, Homo sapiens
cgcgcaccgcgggctgcagactgctctccttggccagcaggtgtggcaggtgatggaagacggtgggcaggtgcagcacgtgccggtgtgagccgttccacggcttcaatcgggggtcctct

SEQ ID NO: 330133 - DNA, 122 bp, Homo sapiens
attaacaggagaaattattctgaagttgagaagtagttgggatcatggaggccaacccaccggctccttggcattacttcatttggtgtttttcacctgttgttttcatttaggagcctgtg

SEQ ID NO: 330134 - DNA, 122 bp, Homo sapiens
ctggagcgctgcaaggcctccattcggcgcctggagcaggaggtgaaccaggagcgcttccgcatgatctacctgcagacgttgctggccaaggaaaagaagagctatgaccggcagcgatg

SEQ ID NO: 330135 - DNA, 122 bp, Homo sapiens
tggaccctccatttccccagagtgggagctggaggggaaactgagtcccggtgagctgggcgtcagcgtttctgcagccggtcctgcgcacacacccactcacgggcttcaccatccggacc

SEQ ID NO: 330136 - DNA, 122 bp, Homo sapiens
agccacgcacgcgcaccccgcatgccccgtggcctgtgaggttattcaagaagccaaggtcgggagtggggaaggtcagcctctagcccggcactgtctggaaaagatcgaaccaattaatt

SEQ ID NO: 330137 - DNA, 122 bp, Homo sapiens
tttgctcttggctgagtttggggctggccttgaatctgtctgttgcaggaatgaccctgacgatttgccagcatgggatcactggaaaatatgttatgcatttgtccttagcaactgttaac

SEQ ID NO: 330138 - DNA, 122 bp, Homo sapiens
gcctcatcacctcacccacttcctccaaaatcactgacctgctaagcttccagcagcaggcgggcaaagcagggaggctgtaatgcaaaagtccgcagtccctacacaaacactatctgctc

SEQ ID NO: 330139 - DNA, 122 bp, Homo sapiens
gcatgtccccttcaagctggtgtccacctacaagaactactactcattagtgctggacagcgccctggaccgcgagagcgtatcagcctatgaactggtggtgaccgcgcgggacgggggct

SEQ ID NO: 330140 - DNA, 122 bp, Homo sapiens
aacaggacgcggcccacctccgccaaccactcattggtggtggtgccaggagaggcggggcgctggcagaaggccgcgggctctcattgggcggtagcgcaagtcgggtggcctgactggca

SEQ ID NO: 330141 - DNA, 122 bp, Homo sapiens
tgcttgcagaatgtgaagtgggaagtatctgaacgaacattttgtatttatagaaaatgacgaagatgaggatgaagatgttcaagttgaggaggatgagaaagtgcagaaatcatctgccc

SEQ ID NO: 330142 - DNA, 122 bp, Homo sapiens
cacgcccgcgcggcgcacaatctttggatcagcgccacgtggagaccttacccgcccgtacgatcaatcccttctgtggaacccagctcaaggaccctccagcccagacactagaaagcgaa

SEQ ID NO: 330143 - DNA, 122 bp, Homo sapiens
catttgtattccgtgggagtacctacgacgttaatgaaggcaaccaggttctctccaatgcgaacgtactcctgtgatctctggcggcattcccattgtgttcaggccgtgttgatgttaac

SEQ ID NO: 330144 - DNA, 122 bp, Homo sapiens
ctggactgattgttgcagatgtaattaggaatgttccccaacatgccgttattcttctcacgattctgggagaaactgtacccctcccccatagacttatataggtggcattcaaattcttg

SEQ ID NO: 330145 - DNA, 122 bp, Homo sapiens
attgttgtttttcccaaatactttcagtttgtgtttggttgagtcagtggacgtggcgcccgtggctgtgggggcggctgtgcttgtcgttttgactgagtacgtttgtttattcagcgcct

SEQ ID NO: 330146 - DNA, 122 bp, Homo sapiens
tcaggtaaaaagaacgtatttaacttttaattaaatccatgtttcttcaggtaaaaagaacgtattctcatggtacttacagagctggcccaatgagacaaataagcttggtgggagcagtt

SEQ ID NO: 330147 - DNA, 122 bp, Homo sapiens
gccgaactctagcaaccgcgaggagaaatgtctgccgtagggggcggagcgcagcgggggcggagcgcggacgaaggggcggagcgaggacgaaggggcggagtagaaacgacgggcggggg

SEQ ID NO: 330148 - DNA, 122 bp, Homo sapiens
taaagcaaccccttcccctcctccctagtgctgtcaagctgttcagagcagtttgcaactcgacaatggtaccattgtgaatgctctctgggcttccttcccacagagagttaaatgggcag

SEQ ID NO: 330149 - DNA, 122 bp, Homo sapiens
gcggaacctacccgcctcgctgcggcgggggcggagctggcgctgaagaaacagcgcatgcgtatagcacatagtggccttgtcactgaggagctgccacttcacgtcccaccccacactcc

SEQ ID NO: 330150 - DNA, 122 bp, Homo sapiens
gcctcttaaatcactttttatcaaaggagtttcactcttgttgcccaggctggagtgcaacgacgtgatctcggacatttaaaatcacatatgtgcatgattttaaagtatcaaagtatcaa

SEQ ID NO: 330151 - DNA, 122 bp, Homo sapiens
agaccaagcccagggcaacattctcacttccccctctccatgagcgtgaccagtgggtctcggtcttgcctccgcgtgggccgtacaggacaagggccagagccttgcaacccgacccacct

SEQ ID NO: 330152 - DNA, 122 bp, Homo sapiens
agtgggaggtcatctgaaggagccctggccgagtcacgcggaggggcccggcgtctgtggcgggcacaggggcttcagagtgactccctggtggacgcgctgcctcaacacttgtccagaca

SEQ ID NO: 330153 - DNA, 122 bp, Homo sapiens
atagagccactcgagccatgcacacttgcacatcctggcagctctaaactgttcctaggccgacggatggagggctgacactcgcactgtaagtctcttcagccaagaagaaaactttatat

SEQ ID NO: 330154 - DNA, 122 bp, Homo sapiens
acaaattaacttcattccccatcaaagcctagtgaagtacatgcaattattcccattttacggaggagaacatgaggaaagctaggagactcatccaggatcacttagccaataagcagcag

SEQ ID NO: 330155 - DNA, 122 bp, Homo sapiens
ggacccctggagccagagggttttctaaatgagataactgggggcaaaggttgggataggcgcagcagctataagacaagctcctacgctcactgttccctgatcattccaaaggctgctgg

SEQ ID NO: 330156 - DNA, 122 bp, Homo sapiens
aattatgtcccctgtccctgactaagaggagtgcacataattcagcattatgacccagagcgaggtgagggggcctcagctctgagccaacgtgtgcttccctcttttaggaaaggcacatt

SEQ ID NO: 330157 - DNA, 122 bp, Homo sapiens
caggcggtcggtgctcatgaggatcctggctgaggaaatcacattttagtcccaactcctcgaagtgttgaggccgcctggagtccacgcggaccagggttcaaatccccactcggccactt

SEQ ID NO: 330158 - DNA, 122 bp, Homo sapiens
cggcatgccaggcaggccagggtcgctcgggggcgggcaggttgggtttttgctcaagcacgtggggtgagccgccctcccgggcctctcccctcccacttcggggagctgctgagggttgc

SEQ ID NO: 330159 - DNA, 122 bp, Homo sapiens
caatgaacgctttactgaaattgctcaagtgtctgatttcctgctgggttctaagtttcacgcgagcaaggacctggcctgtcttgttaatggactgctgtatgcccagcactgggcagggt

SEQ ID NO: 330160 - DNA, 122 bp, Homo sapiens
atggcaaacatgtatttcagtgtctactgaaaatacaaaaattagctggatgtggtggtgcgtgccagtaatcccagctactcagtaggctaagccaggggaatcgcttgaacccgggaggc

SEQ ID NO: 330161 - DNA, 122 bp, Homo sapiens
gctgggtttgaggggggctctcctctggccaaatgtcgcctattggtacataaaactgtacgcgacacaggcattggggaggggcttcacagacctaggacccacagggatagtccccagtg

SEQ ID NO: 330162 - DNA, 122 bp, Homo sapiens
aaagcaggaagggggcctcttggtgctgtgagctgaccagtgcacagtgttggtccttctcgacagggatgacttctactttttggaagggagagttcagactttattagataccttaaggc

SEQ ID NO: 330163 - DNA, 122 bp, Homo sapiens
gagccccgggggtcgccaaccctgagtccgcgccgcagcgcagagccaggccggcgggagcgctgagcagctccctggagcccttttccagggaacccagtccccacccgagatcgagctcc

SEQ ID NO: 330164 - DNA, 122 bp, Homo sapiens
gggagcgcctcgtcccactcaggccgaaaccccaggaaggaaatcactctgggctggggacgcggcctttctgctcgcggctgttgggtgatgtgcccgaggtttctctgcccttctccggg

SEQ ID NO: 330165 - DNA, 122 bp, Homo sapiens
tccaggccaagagggatccttcacccgtgtctggtgagtgaggagcgctgttggccggcgcgggggtggccgcggggagcagcaacagtggaggatggatgagtgaccctgagagttacggc

SEQ ID NO: 330166 - DNA, 122 bp, Homo sapiens
acagcgagtggaatccgctcagctcagtgaacctgaagttgttcattgcggagccggtgccgggtggaagaattcaaggaatgcagcctgatgccaccggcagccccagagaccggtcaggt

SEQ ID NO: 330167 - DNA, 122 bp, Homo sapiens
gaagagtacgatgctgcagtacaatctggctggagacctagcctccagcaaagacccggccggcacttcccacccttaaccgaaaacggagacagagagggtcagttttcaaaatctgtggc

SEQ ID NO: 330168 - DNA, 122 bp, Homo sapiens
gccgctttaaaagtttctttcccgggcccccactccccgcatctccgtattttgggggagcgtatttaattgaggcaacgcagctttcctccagtgtttgcagaaaaatcaaagccaggggg

SEQ ID NO: 330169 - DNA, 122 bp, Homo sapiens
ctccttgtccttggtcttgcctccacgagctctgcagctggccccggccccgtccatggccgcgacacgagttccccatcccagggccggctgagaccccagttccccatcccagagccccc

SEQ ID NO: 330170 - DNA, 122 bp, Homo sapiens
ctaaacaaatgcgagttaggggctacccagagttgtgatagaaataaactaaatttccagcggattggcaggccacttcctggatgatggccagttttgccgtttttgaacactggaacgag

SEQ ID NO: 330171 - DNA, 122 bp, Homo sapiens
ctcttgggcgctaagcttgggagggagcgcaggaggccgctgtccttcctttccggttcacgtcacccttctctccctctgttgctccacctgcagccacttggacggctccgggactgatt

SEQ ID NO: 330172 - DNA, 122 bp, Homo sapiens
tcctgtcttatatgtgacatcctcagcaacaagctaaaatgatctgaattataccaatagcggggctcaagcagcagtgatcaaaacataatatgtatgtggtaaaaaggaacacttgttct

SEQ ID NO: 330173 - DNA, 122 bp, Homo sapiens
cattgcgcgaacaaggatggtcacgcgccacaaaaggacttgcagggcggggcgactcgacggccttcccttttgctcccattggctgcggtcgtcaggttcgcctcctccactacctaccg

SEQ ID NO: 330174 - DNA, 122 bp, Homo sapiens
aggtgggtgctgaacccgtctttagtgttatctgttttgtgttaaagcacacgtgtgacacgggcagagtgtgtgggcctgggcctggatcgcacgcagccgtggccctctgtctacaaagg

SEQ ID NO: 330175 - DNA, 122 bp, Homo sapiens
aggcacaccagtggttcctcaagcacgaggcccggcccctagcagagctgcgcaaccagtcggtgcgtgagttcctggacggcacccgcaagaccaacaacatcttctgctccaaccccaac

SEQ ID NO: 330176 - DNA, 122 bp, Homo sapiens
cggctggtggagagggaggccggcctcatgccagggtgaagggacagtggccagggacttcggtgcagattaagagcctgggcagccagcttgctactgaggccaggctgataggagctcag

SEQ ID NO: 330177 - DNA, 122 bp, Homo sapiens
ccgtcccgcccgcccaggggcccagtcggagtctgcaggcctcaggttgctcagcgccagcgtctagcccgcgtctgtgttcggtcgttgcctggaaaccgccgcctggcgacccggagctg

SEQ ID NO: 330178 - DNA, 122 bp, Homo sapiens
gcttgtcggtaagaacacaggtaggcggcgggaagagaggtggcaagcagccccaacgctcgccgagatccccagggttttacaaacggatcgtcctgaagtctccaaaactgtaactacta

SEQ ID NO: 330179 - DNA, 122 bp, Homo sapiens
actatgggaggacacagcaagaagatgccctctagaaccagagagcaagctggcatcagacgcggaatctgctggcaccttgattttggacttcccagcctccagaactgtgagaaataaat

SEQ ID NO: 330180 - DNA, 122 bp, Homo sapiens
cattttctctcttaccctcaactcataaagttattatgactctgctttaaaaatgaacaacgttctatgttccaaacgccagatgttcccagttcctgagaaaaccaacaaaaataggcaag

SEQ ID NO: 330181 - DNA, 122 bp, Homo sapiens
tgtattcacttggtaagaattaatgctgactgtggtccatttcaggtcttgatggtgatgcgtatgtctcaggaatgttaactccagttcattctctctggctctcactgctgaaacatctg

SEQ ID NO: 330182 - DNA, 122 bp, Homo sapiens
ttccaggacaccaggccctacggtgctgttcccggctgtgggtggttggggacagctcagcgggtcccccacttacccccacgcggggacccgggttagcccctcaccgtgagcatctggtg

SEQ ID NO: 330183 - DNA, 122 bp, Homo sapiens
ggctggccacaggccacggaggtcacgtttatctgctcgcagagcaaggccacggctaatcggagcggccggagctgagccttttcctagcggccgcgggaagcaatcacggattagcagcg

SEQ ID NO: 330184 - DNA, 122 bp, Homo sapiens
atctgcagcaagccccgcggggcgggcagaggagccgagtccctgctcctgaagggcacccgccccgcccccagctcccaatgctggcagctcgagtgtgcgggtgtctgcgcgtgtttggg

SEQ ID NO: 330185 - DNA, 122 bp, Homo sapiens
cggggaggcgccacctctgcagcacctgggccagcactctgcgctcctgccgctgcccagcggggctcctcttcagggcggtgtttaatttttcacaaaaccatctattctccagcccgagc

SEQ ID NO: 330186 - DNA, 122 bp, Homo sapiens
ggcctcttgtacacacacacaagggcctttaaacgacatcaacactgtatcttcattattcgcatcagatttattcaacaacctctttccaaatgatcccagcccctccgttcccataaaca

SEQ ID NO: 330187 - DNA, 122 bp, Homo sapiens
ccactgcacccagccccactatttaacttccatgctacagaagctaaaaaatttgtttgccgaaaatccttcttgcatgttaattacatagtcgttcagttctatcttttgtagcactggga

SEQ ID NO: 330188 - DNA, 122 bp, Homo sapiens
tgcctgtggggcaataatgccatgttaacagggagcatctggaattactcttcaaacatccgcccattttgatcactgtggaaggcaaatcttccttccacatttaccccttcagagcaact

SEQ ID NO: 330189 - DNA, 122 bp, Homo sapiens
ggaacttcacgatgtgatggtggccggcgcagacggcgttgtgcagtggggtgatcccttcgtcgttgggcttgctgggatcttccacctaggacacacggcctgtgagcgcccatcccctc

SEQ ID NO: 330190 - DNA, 122 bp, Homo sapiens
gatggacgagcagcccaggctgatgcattcccatgctggggtcgggatggccggacaccccggcctgtcccagcacttgcaggatggggccggagggaccgagggggagggcgggaggaagc

SEQ ID NO: 330191 - DNA, 122 bp, Homo sapiens
agctacagggcgggctttgcacctggccttctcagctctgaggcaggcagtgggcagcttcgcctccaccctccgtccagcgcccttcccatggggccatccgcctctccctaaggcactaa

SEQ ID NO: 330192 - DNA, 122 bp, Homo sapiens
cttctgcactatcacagtagccactttagtgggcactggtggttgtccatttattattcacgtccctcttcttgttcttaattgaaacttgattttttgtaagcattaatctctcttacaca

SEQ ID NO: 330193 - DNA, 122 bp, Homo sapiens
ctcatcagagacacctctaagttactgcgaagtcggagacaccagaaaggaagactccaacgtattccgagaggagtggaggcaaatgggatagactagccctcccgcccgggatcccgcgt

SEQ ID NO: 330194 - DNA, 122 bp, Homo sapiens
aatttcccttaataacgatcataatgccaagaggatacttaatatttttcattttaagcccgcttgtgttttattaaaccaatcaaaaactttgaagaaaaaaagaggtatcaagcaggaat

SEQ ID NO: 330195 - DNA, 122 bp, Homo sapiens
tttccctctttctctgccatcacacttgggccttcactgcagcgtggtgtggccaccgtccgtgtcctctcggccttcctccgagtccaggtggactctgtggatgtgtggatgtggcccga

SEQ ID NO: 330196 - DNA, 122 bp, Homo sapiens
cgctgggtcagtagcgctgggagtaattaatattacgaacattagcctttccttcacctccgcaccagccaacactgctgtcccctccctgattgtcttctctatcacttgttcacatctcc

SEQ ID NO: 330197 - DNA, 122 bp, Homo sapiens
tcagtggcttcccagtcctgggtcacagtcatggagatttagctctcttccctgcattcccgaatgcatattttcattgcaaagtgacaaatccagtgatctctcaaagggttaagtggggg

SEQ ID NO: 330198 - DNA, 122 bp, Homo sapiens
cgggtcgcacagccaggcggcacccgggggaagaggacccggctggccgaagaggagacccgtttcctctgactgagagacgtggctggggggctttccatctgcttcgcctccctcgggca

SEQ ID NO: 330199 - DNA, 122 bp, Homo sapiens
cgggttctaggtacaattcggtgggggtatgcggcggcctctgaggttccgaccactctgcggttctttgagtttaagtggtcacatgaatgtgcacagacctgcaggggcctgggctgcta

SEQ ID NO: 330200 - DNA, 122 bp, Homo sapiens
gccccagggcctttgcccacgacaccccctgggtggggcaggaccacccctctgtgaattcgtcctggatgcccccaggcacagtctgtactcctccctcccccagcacacgcggcctctga

SEQ ID NO: 330201 - DNA, 122 bp, Homo sapiens
cccgggaggtggcggcctctgcgacagcgggagtataagagtggacctgcaggctggtcgcgaggaggtggagcggcgcccgccgtgtgcctgggaccggcatgctggggcaggagggcagc

SEQ ID NO: 330202 - DNA, 122 bp, Homo sapiens
gctaacggttcttaaatggcaccatgaactaaaagtatagtttacaatggaaatttcaaccgcaactattattgccactagcaagagaaacttaagtctgaagcaaaaggagctgtttcgta

SEQ ID NO: 330203 - DNA, 122 bp, Homo sapiens
caggcgggggacttgggcctggggcttgggtcctaatccgggattatctttgagcgtctccgctgctgaggggagccacttgggcccaaggccccctggagagcacagcctccccagactgc

SEQ ID NO: 330204 - DNA, 122 bp, Homo sapiens
tgagtgacgacagaggcggagctccaactgacatgttcattaagggcagggctccgagggcgccacctcgagagcgacggcgggctacccggggcgggctgaggcaggttgtagccccgccc

SEQ ID NO: 330205 - DNA, 122 bp, Homo sapiens
ttagcgtggctgaggcacccccgcaaccaaggcttgggcgatggtgtgattgcagggaagcgcctttgcagaggaaccgtccgggcttcctgctattgcacggtctggacaccagagggagc

SEQ ID NO: 330206 - DNA, 122 bp, Homo sapiens
ctggccaaagctcacctatccttggtccttggaggacatgcaaacactcacacagccacacgcatgtgcacacagaaacacacacaaagggtcaggaattcagcatgtgtgaagcatgctgc

SEQ ID NO: 330207 - DNA, 122 bp, Homo sapiens
aatgggagaacgttcgagtcggtcaagatgactccggcctgcgagttgattcagactcctcggaagccagaaattgggtctagagtgggttggtccctccgtcagcagttcgggcccagccg

SEQ ID NO: 330208 - DNA, 122 bp, Homo sapiens
cataacatccccccagtgtcaaggcaggcgtctacccccacctcagtgcctgacactccgcggggttcaatacaagaacctcctgcacccagtaatcctttccagctgccgacacaaggaca

SEQ ID NO: 330209 - DNA, 122 bp, Homo sapiens
aatccctacctcactgggttttagttatgtttcagttaatctgcctcctcatttacgaggcgggtattgttagctccacttttcagatgaggatactgagattcagtaaggttattacccaa

SEQ ID NO: 330210 - DNA, 122 bp, Homo sapiens
aaagcggctttgtgagtcccgtgctgtctggagtccccacagccttgccctcactgggtgcggcgatgtgtgcttctccttgtctctgccacgtcccgccctcccggccagctccacgtgcc

SEQ ID NO: 330211 - DNA, 122 bp, Homo sapiens
ctcccaggaagggcccagcctctgccagcccccgactccgcggacttggggcactctgcccgcgcgcccgcactatgttggacacactcgccacctccctcgatagatcgaacaccattccc

SEQ ID NO: 330212 - DNA, 122 bp, Homo sapiens
cacatttcctccggtgaagagccaaaggccccggaagtgacgtttgcacggcttgcgtatcgtgcgtgcgcaggccgcgccgggggcggggctagcaggagggtgtgtgtggggcgggagcg

SEQ ID NO: 330213 - DNA, 122 bp, Homo sapiens
caaacggagggggccgcccccggcgctcgcgcggttccttctgggaattgtggtctcagacgttccattcccagggtggcgccgctcggactccgcgtcccagcattccccgcacgagcccg

SEQ ID NO: 330214 - DNA, 122 bp, Homo sapiens
catgttaatgaaagatggcgcccacgtttttcactgctgccataacacatccccacagcccggctggcttaaacaacacacacttaggatcctttcgctctgcaggtgagaagccccgcatg

SEQ ID NO: 330215 - DNA, 122 bp, Homo sapiens
ttctgcggggtgaggtgaagcggagagctggcgtggaggggaactccgctggcctggggccggggccacacacagactgggtgcgggactgccccagctaccttctggcctttccctcaggg

SEQ ID NO: 330216 - DNA, 122 bp, Homo sapiens
ggtcaccttcaaaggatccggccgtgtcgggtgggtggctgcgggagatggcccctcctccgagccttcctgtctgaggtgttcccgtccccagagcatcatcgcgctgtgtgaagagaagc

SEQ ID NO: 330217 - DNA, 122 bp, Homo sapiens
cctcccgcaggggtgtgtagcccttattgctgctggatgggtcatccgactgggagctcccggagtcccgcctggtggggggcgagccctccagccgcaggggtggcgagggggaggcggcc

SEQ ID NO: 330218 - DNA, 122 bp, Homo sapiens
cctcgcggggacccgaggcgcggtgggggctgtccagaatccctgagtgtggggtccccgcgagccgccgccgcttacgagcgtcccccgcgcggagtgagcccagggccacgggggcgcgg

SEQ ID NO: 330219 - DNA, 122 bp, Homo sapiens
cgctagaccatgtgggagatgacaagtaaccgttgaattctaaaccaattgaatcatttccgcctgcccttgctttccgccttctgccacgcctccgacaacaaatccctgtctgcgcctgc

SEQ ID NO: 330220 - DNA, 122 bp, Homo sapiens
gtgtttccgaggctgctaccacctgaaccgcgaccccatcctactgggagccctgacccccgggcctgagtgtgcctgtatttggaaataccgtggttgcagattagttaagatgaggccac

SEQ ID NO: 330221 - DNA, 122 bp, Homo sapiens
cgcctcggcctcccaaagtgctgggattacaggcctgagccactgcaccgggccatgtgtcgccttttaagaactcacctgactaggtcaggcccaccaaagccattctccttttttttttt

SEQ ID NO: 330222 - DNA, 122 bp, Homo sapiens
cgacaggcaggccacctcctgcccccaggcttctgcccccttcagaggacctgggaacaacgccgttctggacccaggtttcagaacacttccaggtggagcctggctctgagcaattcagt

SEQ ID NO: 330223 - DNA, 122 bp, Homo sapiens
agccactcactttctcttcttcacaaagtcctgggaacgcagggaggggagacggggtctcgttctcaaaggcagctttgtagccaaactgctccctcccggcaggaagagaatccccgctc

SEQ ID NO: 330224 - DNA, 122 bp, Homo sapiens
aagccagacctggagaaggtgccttctcacagggccggcacttccagaggggagtggcaccggggcgggggcacagactctgaggggcccttggggagctcaagcaaggcccacaagatccc

SEQ ID NO: 330225 - DNA, 122 bp, Homo sapiens
aggcttaagaagtaccatgccaaatagggccaggaactcctgattcatctgctagcccagcgaatgagtctgggacaagttacttgcccttctttggggtttagctccccccagctgtctgt

SEQ ID NO: 330226 - DNA, 122 bp, Homo sapiens
cacgagagtgttcttactggttcacaatggagttatgatatcatccatctccatagcaaccgtctcccctagcaacacataaaacacagtcaaatactcttttctgaggggaaaaaaagaaa

SEQ ID NO: 330227 - DNA, 122 bp, Homo sapiens
gcagagcaggctgcctgcctacttgtgcttgattgaagtggcggtgtagttgtggtggcgcgaatcagcgtccagcaacagtttgtggaaactgtgggtttgctgagtatggcgggggaatt

SEQ ID NO: 330228 - DNA, 122 bp, Homo sapiens
cgagccacactgtcccaggggcctcctccctggggagacaggaccttccaagcttctgtccggcctgtgttctagaagcagagaagcagggcctaaacagtgcaaggcctttgggaaaggac

SEQ ID NO: 330229 - DNA, 122 bp, Homo sapiens
tttgaaaaaggagtcaggtctcaaaatcatgcttttctcatagcactgttgtgaggctgacgtgagccaacacacattaagtgcttaacccagatgctgactcacagccctccaataaatcg

SEQ ID NO: 330230 - DNA, 122 bp, Homo sapiens
ctggaggtgcggaagttgtccagacaggaaaagtgcagcagccatgatggtcggtgccttcgcatcagggttttcactcgctgagccaatgggtccatagctgatgtcagctaaatgcccat

SEQ ID NO: 330231 - DNA, 122 bp, Homo sapiens
gtgcgcttggccgcgagacactctggcagttataggaacacaaaggtctgtgtactcttccgcggggggccgcggttatttctgggaaatgtagttgcctaggacccgggttctttgtttct

SEQ ID NO: 330232 - DNA, 122 bp, Homo sapiens
gacaagtccatgatccatctcttctgaaaacagtctcccagatgcctagagcacagcaatcgaggggccgttctcaggatgcctcgctagcctcagattctgacctcacagcccagcaggtg

SEQ ID NO: 330233 - DNA, 122 bp, Homo sapiens
ttggaggaggtggcggcgggcagaggtgatgtctgggagcccttccttgacagcccgggccgagaaggtgagcgtcgacgctggtcgtgggggcggaggtaaggggcccggggcggggacgt

SEQ ID NO: 330234 - DNA, 122 bp, Homo sapiens
cagttcccgcggcgcgaatcaagcaaggcaaaggcatctcagaggggccctgcgggcagccggcgttgtccctcctgcagtcagcgctccactgccccacactcagctggcttcccagggcc

SEQ ID NO: 330235 - DNA, 122 bp, Homo sapiens
ctggaaatttctggatctaaagctaacatgaagtccacctcatctggcgcccttgtctcccgatccaactcacggatccaactcatggcgggcaaaccaggcctggttccttgtgctcagcg

SEQ ID NO: 330236 - DNA, 122 bp, Homo sapiens
tccgagccatgtgcgggttataatctcctgctgcgccattttttaagcccgtcggaaaagcgcagtattagggtgggagtgacccgattttccaggtgccgtctgtcacccctttctttgac

SEQ ID NO: 330237 - DNA, 122 bp, Homo sapiens
cgagggccgggctccctcccgctccacgcgcagcgcggggcagggccgagccgggccgggcgagaagatggtccaggtgcctggacgtggggtaagaaaagcccaaaccggcatcacagggg

SEQ ID NO: 330238 - DNA, 122 bp, Homo sapiens
gttttcctggcccctcctgtgagagtccaaggtccagccagctgtgggggtcccaggcctcgatggcagtgcggggtgcagagggctggtctccttccgtcactggttcacttgggttcccg

SEQ ID NO: 330239 - DNA, 122 bp, Homo sapiens
ggccccgcccacacgccgtcagcttcgcgtctgtcctcgccccgccctgcatcatcgccccgccctgcatcatcgccccgcccacacgccgcctgccaggcgtgagtcttcctcccgctctg

SEQ ID NO: 330240 - DNA, 122 bp, Homo sapiens
tgtcattctccgtgtaattttatttttaaaatccacacaatcaaaatgttaaaacttgcacgcaaacagtgcctctgaggaaacttaaagcttagattcgtgcagcaggcacaagactcagt

SEQ ID NO: 330241 - DNA, 122 bp, Homo sapiens
tcgccctcgcgtagcacctcgtcgggggatttcatgtcgtgccgagcgcgggactgggagcggcaatgcgggcggtgacggcgccggctctgctcctcgtggccccggcgcggcctttatag

SEQ ID NO: 330242 - DNA, 122 bp, Homo sapiens
ccgggggcggggcaggagcctgggccggcagatcaggaatcttgggatctggaatccgttcggaatcggagaatctcccacgggatctagggatccggaatacggcctgacgtcccgttcca

SEQ ID NO: 330243 - DNA, 122 bp, Homo sapiens
gctggttgttcctccccatgagcaatacctgtggcactgtttacttgctcggagtgtgtgcggctctactccagcccagaaagggcccatcgcagcaagaaatctcacctccccaggggtgt

SEQ ID NO: 330244 - DNA, 122 bp, Homo sapiens
agcagcagcgagctgtggcaagctatgcgaggcgtgtgggaaggtgagtgggtaaatgtgcgtgcattggtttcaagtcagccgtcaccacacagcgacactgctgtgtggggctctgggga

SEQ ID NO: 330245 - DNA, 122 bp, Homo sapiens
cacctccaccatgtacaacgctgtggggctggagactgaaaccatgaactgacaagtaaacgtgttcctctgctgtgcaagacttctcctggtgtttctggtgggttttgatttgttttgtt

SEQ ID NO: 330246 - DNA, 122 bp, Homo sapiens
tccatcgactactacaatatgttcaccagcatcttcacgctcaccatgatgagtgttgaccgctacatcgctgtctgccaccctgtcaaggccctggacttccgcacgcctgccaaggccaa

SEQ ID NO: 330247 - DNA, 122 bp, Homo sapiens
tcaaggaacataggccccagtgcctcaattctagagtcctttcttttgctcacatctgaccgtgcacacatttctgaaccactccccacacctgccctgtgcttagctccagctggtctgag

SEQ ID NO: 330248 - DNA, 122 bp, Homo sapiens
tgtacatgacttacagacatacagacacagttggcacttcatatccgtgggttccacatccgtagatttaaccaactgccgatcgaaaatattaaaaacaaaaaacaaaaaaaccaaaccca

SEQ ID NO: 330249 - DNA, 122 bp, Homo sapiens
gctgccaggacagggcagaggattgcagtaattatcactctctgctaatgaggaccaggccgtggttcactcgagccccgccccagtagcaatctaattccaaccgcggccctctcagaagt

SEQ ID NO: 330250 - DNA, 122 bp, Homo sapiens
attcccatccaacgtgctggggctcagggagggtgagcgcgccggctgagccgctctgggcgaggccctggcctccctgagcctcagtttcctcgcctgtaaaggggcaggaggatagtacc

SEQ ID NO: 330251 - DNA, 122 bp, Homo sapiens
gcaatgcggctgaaactctcgaccaagttctccgcagcttcttcatcttgcggatcttctcgcccggctgcagctcaaagaggtggcacctctgggcaacgcagggccccggcaacgtcccc

SEQ ID NO: 330252 - DNA, 122 bp, Homo sapiens
gccgtgcgccccgccccgccgtgcgccccgccccgccgtgcgccccgccccgccctgtgacggtcccagcccgcacatgcgcagtcgtgagtcctcttgtccttgagcgtcaaccttctttc

SEQ ID NO: 330253 - DNA, 122 bp, Homo sapiens
tgttcctaaaatagactggaagctggcacagaacgcttcagatgggcctgtccccttgagcgtcgtttatggctgagactaaaataaagcaaagcccaggcctctccagaaggtgttcaatt

SEQ ID NO: 330254 - DNA, 122 bp, Homo sapiens
ggaataacatcatttgtttgttgcgcctcagttccaccgtcatttaaataggaggcgtgtcgtgatggtgggcaaccttgttcccacctgaccttgtgagatgcgctaggtggattatggtc

SEQ ID NO: 330255 - DNA, 122 bp, Homo sapiens
aaggggcagagatccagactccaatctcagaagcttcactccccccggaggcggaggtgacgcgccacagaagcgcctgccactcggggactttatttcaggtggggctattgaaagttccc

SEQ ID NO: 330256 - DNA, 122 bp, Homo sapiens
tactcggccgtgtgcgccgtggggctgctgggcaacgtgcttgtcatgttcggcatcgtccggtgagtccgctgcgggccggcgccgcagggctggagcccggggtgagggtggggatcacg

SEQ ID NO: 330257 - DNA, 122 bp, Homo sapiens
tatagccaaaccctggccaaggccacaaatttcaaatcgcctgaaaaccaaactgtctggcgcttaacggttacctcggctgagcgaaacccttggctgctgctgatttaactacaggtccg

SEQ ID NO: 330258 - DNA, 122 bp, Homo sapiens
ttatcaattgttccttcagttgctttaggacgattggagaggagcctcggtccacaagaccggaagcctgaggagtgcagctttgtccccaaggtcacagtgactggctttctgctgccggc

SEQ ID NO: 330259 - DNA, 122 bp, Homo sapiens
tggtgaaagcaataaaactcagatcgcttccttggcgagatagcggcggctataatgcgccggggggatcaggggtttatttgcagatcctggataaaagatgatatatcgacacggtttag

SEQ ID NO: 330260 - DNA, 122 bp, Homo sapiens
tgaggtcttgcattcggaagtacagcgagatgatggacctcaccatggccataagttctgcggttgagtgctcggtctggttttgctcttgaggagtctcctcccttcccgattccttcagg

SEQ ID NO: 330261 - DNA, 122 bp, Homo sapiens
ggggcaccagcaggggctctgatggggcatcctggagggcggagctggcgtcggggctgacgtgcgcccagtcacgccttgtcttagggctccctggggaggtgccagtgcttggcaggaca

SEQ ID NO: 330262 - DNA, 122 bp, Homo sapiens
gttcacgttcagcacgctcggctgagagctttcatttttagggcaaacgagccgagttaccggggaagcgagaggtggggcgctgcaagggagccggatgaggtgatacacgctggcgacac

SEQ ID NO: 330263 - DNA, 122 bp, Homo sapiens
agggatggggagtcaggaaagtccaaggctggtgggctctgccaaggaagccagaggaagcgctttcagctaccttctcatcaaaggaggcatcaccagcccctgagtttcttgagaatggg

SEQ ID NO: 330264 - DNA, 122 bp, Homo sapiens
gacgcgaagagatcagggagctaagctgataaatagtcagggaaggaaatactcggctggcgaggggggcaggcccacaggcgcctggacctcctctaagcgaataagtggccgtaatttct

SEQ ID NO: 330265 - DNA, 122 bp, Homo sapiens
atgtggctcaatattggcagggtaaagtttaaagctttttattctcaagttgattgtaatcgttgagagaacaaaggaacacactggtgagtttaaagcttgggcctctacctggcatgagt

SEQ ID NO: 330266 - DNA, 122 bp, Homo sapiens
aattctcaagagtcaacctggagcacatgaggttaaacaaagggccctgaagtttgagtgcgccctccatttgccctgtgctgaacttgctgttcatctgttgatctggaggcaggacagct

SEQ ID NO: 330267 - DNA, 122 bp, Homo sapiens
tccctttatcgactgaactgctcttaggagggagctgtgccgggaagtcaagcttaccagcgtcaaagctctagcagctaaaacagtgcaccccctgctcgtcgaaaatgactcctgatctt

SEQ ID NO: 330268 - DNA, 122 bp, Homo sapiens
tcctcacatcccagacggggcggcggggcagagacgctccttacttcctagatgggatggcggcggggaagaggcgctcctcacttcccagactggacagccaggcagaggggctcctcaca

SEQ ID NO: 330269 - DNA, 122 bp, Homo sapiens
cgtggatctggtgaacgatattaaaacgccaattcaaaactgagattgtcatttttctcccgccttcccagaaatacaaactgcccccagaattaagcccgaccagctaaagatttctaaac

SEQ ID NO: 330270 - DNA, 122 bp, Homo sapiens
ctttggattttgggggaaggtgatggggggaggttcagacttcgggaatcagggcgcggacgctgggcgtggaccccgtcattgttcccggctagctcttatctcccaggagcaagtatcct

SEQ ID NO: 330271 - DNA, 122 bp, Homo sapiens
gcagaggaactgcagccgtggaaataagcatgtgaatactgatttgagcaaaagtgtaaacgatgtcagtacaccagggtgatgcaaactgcaactaaataaagcagtgataataatactac

SEQ ID NO: 330272 - DNA, 122 bp, Homo sapiens
tgattttgtcttttcatttcagtagttgaaacttatattgtttttatggacctggtatatcgagtatgaagtcgtaatcccatagctgtgagttcaagtctggaattcttgacagcagatgt

SEQ ID NO: 330273 - DNA, 122 bp, Homo sapiens
gcttttcaccctcttgctggcttcacttttcattgccaacaatgctagctggttattaaacgagatgaaaagtcgtccatgggcttcatcaaagtggaagagacatctgaagtcctgacttt

SEQ ID NO: 330274 - DNA, 122 bp, Homo sapiens
ctggggaccccagctccctctcccaggccgcgccgcccttcctccccctccgctcccatccgctggccctccccaggatccccgccaccccctaggtgtggtgtttccgtaccaacccagcc

SEQ ID NO: 330275 - DNA, 122 bp, Homo sapiens
accttcacttatcaccaagtggtgagacaattgccgagcggtgagactatcgcctatcgccgaacggtgagaccttcgcctagcgttgagtggtgagaccatcggaccccttttgcttgtta

SEQ ID NO: 330276 - DNA, 122 bp, Homo sapiens
cacctggaagaaagggtcactcccacccgaatactgcgcttttccgaagggcttaaaaaacggtgcaccaggagattgtgtctcgcacctggctcggatggtcctccgcccacggagtctcc

SEQ ID NO: 330277 - DNA, 122 bp, Homo sapiens
aggctgccgcttccagacatgctgttgcttctcttccgtcacaggcagagcgggccttgccgctccccgtgctccgtgagatcctccttcggcttctctggtttctggcccaggccagggtc

SEQ ID NO: 330278 - DNA, 122 bp, Homo sapiens
aggctcggagaaatcttttatcccgaaatccagggtgtcccccggtcaggatcgactcggcgccgcgttggcttcctcgctcaaccctgacatcccggtccccaccagtcaccgcagccggg

SEQ ID NO: 330279 - DNA, 122 bp, Homo sapiens
attattaaaaactaccgacgttcatcaaccaggagacccgcaaggcctgcgcactgaatacggcccaaatcctgttcagtggtctttgaaagttaaaagaaagaaacctatcgcccacgtct

SEQ ID NO: 330280 - DNA, 122 bp, Homo sapiens
cccgtgggccgccggctcccctccgtgctaatgccaccctccaaagccatggcttcctctcgagccttgggtgtccagcagcctgaccagacagaggcctcctcagccccgcaccgaaggag

SEQ ID NO: 330281 - DNA, 122 bp, Homo sapiens
ctcccccaaagacagcaccgccgcctacctgtcaccctgctgtctccggcttcctaccgccgccgcctcccgcagcagcctgccaactgcagcgcaacaaccaaccctctcattgggtgaga

SEQ ID NO: 330282 - DNA, 122 bp, Homo sapiens
gcgccggtctcccggagtgtctgggttcgactcctgcctccacaacttactgggtctcctcgaacaagttgcatcaccaatggccgtgcctcagtttccctcctccgtagattaggaataac

SEQ ID NO: 330283 - DNA, 122 bp, Homo sapiens
aaagtttggctcagctccgcttccactcgccggcatctgtgccccagcgaaacttgccaacgtctggactgtaaataagggactttgacctaaaagtttttacaagctttaaagtttcagta

SEQ ID NO: 330284 - DNA, 122 bp, Homo sapiens
ggagggcgcccggcggagcgttgaatggggcgcagcaaggctcggccgggctttgtgcagcgagcccgcgggcacccctcccgctccagcctcgccccgccccgcagcccacgacccctgct

SEQ ID NO: 330285 - DNA, 122 bp, Homo sapiens
gcacaggctgattttgttgactgtttaattataacttcaagtggtaccaggcaagcttaacgaacaggaacctagtggttatcaaactggtttgtctgcaggaaccttggaaagtccctaaa

SEQ ID NO: 330286 - DNA, 122 bp, Homo sapiens
gtgtgtgtgtgtgttttaacttgtcagccaggcaggtccgtgggaggagggagcagcgcgcgaatgagagtgtaaacaggtaacgaacacttttctggaaagcagtagtgccatttctatcg

SEQ ID NO: 330287 - DNA, 122 bp, Homo sapiens
gaccagcgggctcttttctgctggtctcccgggtgtgctccttggaaactgtttcctgtgcgtccttgcagaaacattccgtgtgcatatccaagcacaggaagtaagtggatggaaaaact

SEQ ID NO: 330288 - DNA, 122 bp, Homo sapiens
cctctaaggatgaggatgggggcggggtggggatgggggtggcaggaagaagccgggggccgtcccaaagggaaattattttaaaagagcggttgtaaaccgcaggcaagacgttgtagacc

SEQ ID NO: 330289 - DNA, 122 bp, Homo sapiens
aatttgtgcacttttctgtatgtatgctatactttaaaaaaaagtatccattaaaaatgtcgagagcttctattaaatggaaaataatggatctgctttatgtttatgtagttggggacgaa

SEQ ID NO: 330290 - DNA, 122 bp, Homo sapiens
cactcttctgtcctaatacctgaagcttatagcttgtcaggtggcttttccatggaaaaacgaggacataagagagagggcggaccttaagagttctacggaggagccggtaacggcagcag

SEQ ID NO: 330291 - DNA, 122 bp, Homo sapiens
agagtgccagactgagaccacgaccattgcgcatgcgcactatgtttcgctagaaaggggcgtgttgagaagggccagcactgagaagagccagctgctgaatgcgcatgtgcacggtggac

SEQ ID NO: 330292 - DNA, 122 bp, Homo sapiens
gcagtacacttaccgttgagtgtgtgtggtgcacgtcctgtgcaagggcagtacacttaccgtcgaatgtggtgcatgttgtgtgtaagggcagtacacttactgtcgagtgtgggtggctg

SEQ ID NO: 330293 - DNA, 122 bp, Homo sapiens
catttgtcagagaaagtttctcaagcagtccctgtgatcttcagaacccagcttgttcttcgcccagaatgctttagttgtaggcaaatttgggggctgaattaacttcccagccgctagga

SEQ ID NO: 330294 - DNA, 122 bp, Homo sapiens
tcgaacagcaccatgatcgacgatactttgggggcggcgtgatcagaggattccccttcccgggaacttgcgtctagtcctctgacgcatcctagttcggagtgggtggaagggcatgtgga

SEQ ID NO: 330295 - DNA, 122 bp, Homo sapiens
gctccgactcggcggcgcggaaaaggggaaggggaggaaggggcgggagcctcggcggggcgatccccctccgaccccagccggcccgcggtagccgccttgggaacttctgcgctatgatt

SEQ ID NO: 330296 - DNA, 122 bp, Homo sapiens
gagtctgtctcaaaaacaaaacaaaaaaacctcattgccaggttcttctccttctgggatcgaggtttccattaatctatttcttgaatatttattgagtgcctcctgtgggcctggcagtg

SEQ ID NO: 330297 - DNA, 122 bp, Homo sapiens
agactgatgctgcactcctagcacctctggatcaactaacacccacggccccatgcaccacgagtggtctgcagcagctccagggccctggacagtcagcagagcagagagctgatagtcag

SEQ ID NO: 330298 - DNA, 122 bp, Homo sapiens
ctgtgccgcctcctcacacctgcgggaacctgagacctcctccctgagctctggcgcccacggccctcctatagctcaggcctgggtgggccagagtgccccgttttcttggcttccccgtg

SEQ ID NO: 330299 - DNA, 122 bp, Homo sapiens
ggtgcgttcccacgctgtctggcggcttcgctgtcactgcctggcagaggtgagtggctgcggcagggcagggaccgtgtggctcgcaaagcggaaaatgtttattattgccccttgacaga

SEQ ID NO: 330300 - DNA, 122 bp, Homo sapiens
gtcctcggtggcgcatgaagctgtctcgccacatgaacttcttggcgcagactccgcactcgtagggcttgagacctgtgtgcgtcttcatgtgctcagtcagatggtgcttcatcttgaac

SEQ ID NO: 330301 - DNA, 122 bp, Homo sapiens
ccggccctggcgcgctaattcccgctgaccccgccgccccgccgcctctctccgctcgcgcggctgtgaccaggataagggcttcccgcctctgagtgcaggtgtgatctggagctcaggca

SEQ ID NO: 330302 - DNA, 122 bp, Homo sapiens
gctcacatgccctgccggccgccactaggataatccatgccaaccccacagaatgggaggcgagcgatactgagaacaatgaaggggtctgacatggaaatttcagtaggaaacaagcaatt

SEQ ID NO: 330303 - DNA, 122 bp, Homo sapiens
atttgtcacatactgtgcagcctgggtgacttaacctctctgagcctcagcttccttatccgcaaaacatggaaatgttaataacagagcctgctttgtagagttactgtgggaaggaaaag

SEQ ID NO: 330304 - DNA, 122 bp, Homo sapiens
accgttatcagcaagcattgtagtgctgggaaagatgcattcacatttctggcccctaaacggtgaattctctggtgcttattttatttgactgtcttctgaatgactttgtgttactgtgg

SEQ ID NO: 330305 - DNA, 122 bp, Homo sapiens
aattcttgtgaaaacatttaaactatacagagttcagggcaaatagttcccttctcacctcgtaatccccttgccctgtaagaggcaaacttggttaccagttttgtgcacaacattttagt

SEQ ID NO: 330306 - DNA, 122 bp, Homo sapiens
tttcgcacccccaccggcccacactgccctgcggcatgccgctgagggaggaagggcgggcgagcggcccaagacatgatccctggctgagagtagggataccgaagaggtcccagggattc

SEQ ID NO: 330307 - DNA, 122 bp, Homo sapiens
cactcgcacacaggaagcttggaatttggaggctccaagtcactctccagagtcggtgtgcggtaggcctgcaattccaaaccaaggtctgaagccaccggaagccactgtgctttccaaaa

SEQ ID NO: 330308 - DNA, 122 bp, Homo sapiens
tgctggtcataatagacaggtcccctcgtctccctgagacgcatttgcaggactcaggtgcggccagacctgagatggcctgcctgactttctgggctttccactctaacttcctgcagctc

SEQ ID NO: 330309 - DNA, 122 bp, Homo sapiens
tgtgttgtgccttttcattttagccccgcttcctacgtagagccctaacctcctttgtagcgagggcacttgagaatttctgaacctcgagttgtaatggagctgtatggaaaggtaagcag

SEQ ID NO: 330310 - DNA, 122 bp, Homo sapiens
gttcattcacactaggtagcgggtgcggtacctttcccccgccccaaggagggaacttcgcgccgtaacaaggtccgaactctagcaaacaacccttcgcaacgcccgcctaaggcctctac

SEQ ID NO: 330311 - DNA, 122 bp, Homo sapiens
tctatacaatggacacaatggtacctgtgttgcaagtgtggactgtagacacaaaccacgcgtttcccatattccatttaataattctgtgctgccctcgtctttcccgcgttgtaaatttc

SEQ ID NO: 330312 - DNA, 122 bp, Homo sapiens
tcctgctttccccgagcatcgcggcctctgagctcatgcggaacataaaagctcgcaaggcgtagaactttttcacgttttcatttgtttcccgtaggggccccgagaacgtgcatgacacc

SEQ ID NO: 330313 - DNA, 122 bp, Homo sapiens
ttggtacaaagatattgctgtgatgaagttctgatggttgcaccagggtctgaggatacacgctgctgggtcttggcaggtgctggttttggattttgtttctgctccactctatacgagct

SEQ ID NO: 330314 - DNA, 122 bp, Homo sapiens
gctcgggcccggccctggggacagggcgggctaggggcgccccagagtccatggggagtccgggcccagggtgccagcaggcgtggtggtggggctgcgagggagggcacccttcccccacg

SEQ ID NO: 330315 - DNA, 122 bp, Homo sapiens
acatcagccaaaagcaaaacaatgaaacataggcacacagctgtcccgcacccagaaaggcgtgggtacaccacacggcgatctcctctcaggtgagaggtggcagcgagcagtgacctctc

SEQ ID NO: 330316 - DNA, 122 bp, Homo sapiens
tcccccgctaagccagcacttttacgggatcgctgtggggccggatggcttctagacttccgggtgattccgggagatgggggacgccttgcagtaagcgtctttgcttctggaaacatctc

SEQ ID NO: 330317 - DNA, 122 bp, Homo sapiens
aaccacaaagtgctatgaagtttgaggctaccaggatggggcgccaagccaaggttcctccggacgcgcgaggctggtgctccaggcgggctggcgggaagagggggcaggaagggggccgg

SEQ ID NO: 330318 - DNA, 122 bp, Homo sapiens
attcaatctataggtgccatgggttaaaaaaggaaggttttccgatgcctcttccccaaccgttcttcagcccaccatccacccaggggctgtagccttctgtgtgttcaggtgaggttggc

SEQ ID NO: 330319 - DNA, 122 bp, Homo sapiens
agtggggcaggtgaactgaccagcgtcttcccagctttagtcactgcagtggcaatgaggcgctctccacacccccagttatgtgacaggctagagccctggtgttctctcttcagaacccc

SEQ ID NO: 330320 - DNA, 122 bp, Homo sapiens
ccgcccacgtcgggctctgctcctccaggtcggggcacaggaagggcggcaggctgggcacggacacgcacgcggggtccaggcgcgtgaagcccacgcggaggccgccgcaccagccgctc

SEQ ID NO: 330321 - DNA, 122 bp, Homo sapiens
gattgctttctaatgtctgtggggacttgtctgccttgtccttgttctgttcccagcagccggcacacagtcggagctccatgaatgtgtgctgagttaaatggctgaagtctgggacacag

SEQ ID NO: 330322 - DNA, 122 bp, Homo sapiens
agtcagctactgtactccatgtttacattttgtatcactgtcagttgtcattttcttcttcgtcatcatcatcatcagactgctgtggcagtaatgttttatatataattgattaatgggct

SEQ ID NO: 330323 - DNA, 122 bp, Homo sapiens
aaacattctcccaaaaggaggctgcagcatgccctggaggaccagatctatagaatcttccggaagagtcgtgtcttgactaatcagagcatcaactgcctctttactgtgcctgccaacca

SEQ ID NO: 330324 - DNA, 122 bp, Homo sapiens
ggagcccggccttccccaccctcacacaggccaggactggctggtgctgcaccaccgcatcgcggtcgggactccgggctctgccctctgacaggccgtcaacctctgcaccatctcctcac

SEQ ID NO: 330325 - DNA, 122 bp, Homo sapiens
cagccagccaccccttccctctaaagcaggttgttctgaatctgggccactggcccgctgcgccctgaagcctgtgtcgtccatcaacttccagaggccgccgcttcatgaattacacacca

SEQ ID NO: 330326 - DNA, 122 bp, Homo sapiens
attaggtgacctgccaaatctttccacatccaatatctatgataatggatacacaaattacgcgggacagaaggaatggccttgcactgtgaaaaaccgaaggggaatcaatacagcctgtg

SEQ ID NO: 330327 - DNA, 122 bp, Homo sapiens
taagataatttaggaacagaagccttgacttttgacggtcatttagttttattctcctcccgtgactcccctctgtacactcacaggggaggccgccggcatctgggctgaaagaacccttg

SEQ ID NO: 330328 - DNA, 122 bp, Homo sapiens
taatgccaccgctgatctgataggaggcggagctcaggcagtaatgctagcaatggggtgcggctgtaatactgatgaagctgctcacctccggctgtgcagcccagttcctaacagaccac

SEQ ID NO: 330329 - DNA, 122 bp, Homo sapiens
gctgctaggctgcgcccgaggcaatttaaacccaccctggctggcctatactcagatcttcgcggagcggatcagcggccggagcgtttggcggactctgcgtggacttggagctcacggcg

SEQ ID NO: 330330 - DNA, 122 bp, Homo sapiens
agttcttctttgaggtatttctcccttaagactcagggagacgctgggcgcagtggctcacgcctgtcatcccagcactttgggagactgaggcgggcgattacttgaggtcaggagtttga

SEQ ID NO: 330331 - DNA, 122 bp, Homo sapiens
attctggccttgtgccatcagaagtgaagtcaatgtggggaacagctgcctctgggaggacgttgtctgtgcgctgtgccgcggggcctctgctccatggccggccacacagccctgtcctg

SEQ ID NO: 330332 - DNA, 122 bp, Homo sapiens
ctgagcaccttccagggcccagacaatgacctagggtcagaaatgtgagccagggccgggcgcggttgctcacgcttgtagtcccagcactttgagaggctgaggtgggcgaatcaagaggt

SEQ ID NO: 330333 - DNA, 122 bp, Homo sapiens
agaagatatctggaagagggtgggaaaagtgcaaacttcaactgtttgtggggaaagtgccggcctgctacagagaaaaaggcaacatctgtaacaattcccagcctttgccaggaagagtc

SEQ ID NO: 330334 - DNA, 122 bp, Homo sapiens
ttgagatggagtcttgttctgtcgcccagcctggagtgcagtggtgcgatcttggctcaccgaaacctctgcctccggggttcaagcgattctcctgcctcagcctcccgagtagctgggat

SEQ ID NO: 330335 - DNA, 122 bp, Homo sapiens
agcgcacgccgcgcccccgaagcctggctccctcgccacgcccacttcctgcccccatcccgcgcctttccaggtcttctcccggtgaaccggatgctctgtcagtctcctcctctgcgtcc

SEQ ID NO: 330336 - DNA, 122 bp, Homo sapiens
ttcttgggaacagttgaatcctggggaggcctgggaggcggcgagccaaccttcccatcccggtctcccttattttctacggccttttgaggggagcccttgtgtgaccactatcacaaccc

SEQ ID NO: 330337 - DNA, 122 bp, Homo sapiens
cacctaacagccctctgggttccggggctggccgtccagagctcctcagcttgctctggccggccgaactcccctccagctcggtctggaaccatcctgctgggcagcgtccagcacatccc

SEQ ID NO: 330338 - DNA, 122 bp, Homo sapiens
aatcctgcttttaaagtcttcaaggactctgatcatcagtagggcacacaagactattcacgactgacctaggcgtatctgaccacactcgagtctaccattccacgactcacaccagtcct

SEQ ID NO: 330339 - DNA, 122 bp, Homo sapiens
ccagagggggagatgatattactcacaatatcgtaaacaggctgtgggtccaccgtggatcgtaaaaaccaggggcggcgagggcgtggctcttactccccacatcgcgggggggcctcatc

SEQ ID NO: 330340 - DNA, 122 bp, Homo sapiens
gttagaggaagcaaggcagtgtgcatccctgaaatagcaaagccaagggtgtggcatgcacgatggagaggtagcggctgactctgcccaaatctctttctacaggtcctcagggatcgcac

SEQ ID NO: 330341 - DNA, 122 bp, Homo sapiens
ctcctcctggggtctgtcggcaggaaacatgatgctgggagcatagcaggaacagcaggccgccgggtcacactgctgtggggcccctggactcacctacgatgcagaaggtggcagcaaac

SEQ ID NO: 330342 - DNA, 122 bp, Homo sapiens
attacacagtaacacagacaagctgaaggataatctgaaagacacacattgagtagatgacgctctttccttttacataaaactagtgtttcctctactaacaattccattgtgaccagata

SEQ ID NO: 330343 - DNA, 122 bp, Homo sapiens
tccgcttgcctgcccactcctccgctcgcctgcccgctccgctcgcctgcccgctccgctcgcctgcccactctgctcacctgtacaaatctggctccgcaggtttcgcatttgtagggctt

SEQ ID NO: 330344 - DNA, 122 bp, Homo sapiens
aaaggctgtccaagggcacggatgcctccccactcccacccgggtgctcaccgacgcgcccgctcagaaatacaatatttgtagggtctttttcataaaggtctttatgggtttggaaattt

SEQ ID NO: 330345 - DNA, 122 bp, Homo sapiens
ccgcggcgatccacctgaggtcctcgcgagcggcgacgtcacttccgctggttcaagcaccgcgagactatacctagctgcccacccgttactgtttccatggaaacagcctgaattcgccg

SEQ ID NO: 330346 - DNA, 122 bp, Homo sapiens
ggctgcgtcttagcttttggccctcatctcccactgagactgctcgagtgggattgacagcggagtcttaccccaaggtccctgcacaggttggttctcagcaaaggttggtggaaccggat

SEQ ID NO: 330347 - DNA, 122 bp, Homo sapiens
atgtaccaggcaaatctgcttgttcattgaacaaatatttattcagtactcacaatgtgccggacattgtgttaggtgcttgggatatagtggtgaagaaagaggctggatccattctttga

SEQ ID NO: 330348 - DNA, 122 bp, Homo sapiens
ctgcctcggtggccaggagggcgaactgggcggagtcttggggggctcgacacgatggggcggggcttggcggggaaagaagcggaggagggagtttcacactgaaaaacccgggatggagg

SEQ ID NO: 330349 - DNA, 122 bp, Homo sapiens
tgcgagccgaacccgggagctggcgccatggtgaggagtggttgcggggcgcgggcgacgcgacggtgggggtttcggcctgcgttcgggccgcagacagggcctgggcctgggcctgggcc

SEQ ID NO: 330350 - DNA, 122 bp, Homo sapiens
ggcagtaacggcagcatggccgaggtcactcgtgaggaggcaaggatgtccagtcacgaccgcctccccatagtccataacaagcagcctgactctagagaggccagaatgttgggaatgcc

SEQ ID NO: 330351 - DNA, 122 bp, Homo sapiens
cacaggcgcttctcttcctcctgcagtgcagccctagactaaagcgtgaaagccgagtatcgcgtgagagtccggaggcgctgaagggagggtcgcagcgccgtgactttcgctttactagg

SEQ ID NO: 330352 - DNA, 122 bp, Homo sapiens
ccgaggctgtggaggcacaaggggagcgtccggtcaggcttcagacggcagagcggaggccgccgggctgcggctgcgagcgtggcgtgttcgcggactgcggggcacccagcgcttgtaga

SEQ ID NO: 330353 - DNA, 122 bp, Homo sapiens
tcgcattcacattggctgctaggaggcctcggcgaccacttccggatccggggcgggggtcgcaactcccagcccttgctcagagggctgaactagaattcccagaagcctctgcggccgcc

SEQ ID NO: 330354 - DNA, 122 bp, Homo sapiens
acgtgagcgcagagcaggaggtggtgcgcggcttcagctgcccgcggccggggggcgaggcggccgctgtcttctgctgcggcttccgcgaccacaagtactgctgcgacgacccgcacagc

SEQ ID NO: 330355 - DNA, 122 bp, Homo sapiens
gcttcttacctctggcagaggagccgctcgcccgccaccgtccgcagttcccgccgcagccgagataaacaacttagcttgtgaacgcagaaggagcaggagggaaatatattttttttttc

SEQ ID NO: 330356 - DNA, 122 bp, Homo sapiens
acagctgcaggccacaaggctttcacattgagtcatctccttagcagtgtgggctgaagccgagtctcatgtctaactcagatgatgccctttcccagctaccccgtatttagtacctgaaa

SEQ ID NO: 330357 - DNA, 122 bp, Homo sapiens
attaattgaccacccactgtgtagccagctatgtgctaaatgctgaaaaaaataagaatacgttgcaaccctgtcattgaggaggcatattagttagatttctgctgtgacaatattgcata

SEQ ID NO: 330358 - DNA, 122 bp, Homo sapiens
gccctctgatctctgcctgttcctctgtcccacagggggcaaaggctacgggtcagagagcggggaggaggactttgctgcctttcgagcctggctgcgctgctatggcatgccaggcatga

SEQ ID NO: 330359 - DNA, 122 bp, Homo sapiens
cagggctgggtggcgtctgatgcttcgcagggagggcgctaggcttcgagtcacacggcacgggcttacacagagggatggtttcgcatcgttctaagcggcacacagctaagcgtatttgg

SEQ ID NO: 330360 - DNA, 122 bp, Homo sapiens
gtcacggtgtctctctgagttccccgcacttcactgccatcctggggcagcccctgggcgcgagccctgctccgtgcgtgccgagtgctgtgcaaagcgcccctggcacagcgtcccgctgc

SEQ ID NO: 330361 - DNA, 122 bp, Homo sapiens
cagcaagaaggcatggaggtggagagagggccccagggaggcccagatctggcccagcgacgtcaaagtcacacacacagagcgacaacacaccgtattgccctgggctcaagcaaaagcca

SEQ ID NO: 330362 - DNA, 122 bp, Homo sapiens
gaaaataatttgccggtgcccagaggcagggctcctctaaacagccaccaggtcgggcgacgtgaggctcagggaattgtggaattaagctaattaagtggaagccgtcctcctggggctgt

SEQ ID NO: 330363 - DNA, 122 bp, Homo sapiens
acttcccgacagtccccgcgcatctctgtggcagctgccccggtgcttcccgccgcgccgcgcccgcccacccaacggcgctgtgtcccggtagctcagcgcggacttcctttatgtggtac

SEQ ID NO: 330364 - DNA, 122 bp, Homo sapiens
tgggaccacctttgagttttgttgcttctatcagatgggacggggggcagccatgtgcgtcggtgccttcgggagctgacattggaactgggcaggaagccaccacctcctctgagaaggag

SEQ ID NO: 330365 - DNA, 122 bp, Homo sapiens
ggagatggtacaagaagccttgctttaccttgcaggtgtgcagaacgccgacccaagaaacggaaaacacagattcaccatccagggagtgtctctgaaactgaccacagagcagggcatga

SEQ ID NO: 330366 - DNA, 122 bp, Homo sapiens
agctaaggacgctactaagggggcgggatcgccacgtggaggtgtgcaagcacgtgcctgcgtccgggagacagccagactcaacggagaagctgagttcaagtcccacatctccactaacc

SEQ ID NO: 330367 - DNA, 122 bp, Homo sapiens
ctttgaaccggaggttccagcaaactcagtacctagctctgccggagagggcggagctcgcggcctctttgggactcacacagactcaggtacctcgccgctgccgctccgttctgccacgc

SEQ ID NO: 330368 - DNA, 122 bp, Homo sapiens
tctctccatcaaggccgggccgacccgcagggaccatcccggaaagtgaggggttgttgccgtttcccgcagctgttggtggccatctttaatcctcctcctcctcctgctttctccacctc

SEQ ID NO: 330369 - DNA, 122 bp, Homo sapiens
ggccgtccttgggctctcagtgggcctggccctcacccaaagctgcagaaacactttctgcgggagctggggagggaggggcagccggctacactgagagccggcagttgggggtagggcag

SEQ ID NO: 330370 - DNA, 122 bp, Homo sapiens
tgttgggaattgccttcagaattccagtctcttaaccaactatccacaacccagcaacaacgtggactctcagagtttgaggcaccaggactttctaattcctagttcctttctctatagga

SEQ ID NO: 330371 - DNA, 122 bp, Homo sapiens
agaaacttctgtcatcctttctcccagttcaggttgatttgtacggtgctgctcagcccacgtattgtgcatctgtatgtgtgtatgtgcgagcgcctgtgtacgcacgtggtcgtcacccg

SEQ ID NO: 330372 - DNA, 122 bp, Homo sapiens
gaattcagggaggcttggatttgctgaagctctagatgagcttgggcttggatatggaaacggcatggagccagggcccttctgcacactggggtctgagtagttgcactctggtgcatcca

SEQ ID NO: 330373 - DNA, 122 bp, Homo sapiens
cccggcgctggttgccactcaggcactgccgcggacagcctgggggtggggcttgaggcgcgcggggcgggactcgccactccagcctgcagcgtcaggttttgtctctgggaacatcagac

SEQ ID NO: 330374 - DNA, 122 bp, Homo sapiens
aaccccgcagccctccccacactctgggcgcggagcacaatgattggtcactcctattttcgctgagcttttcctcttatttcagttttcttcgagatcaaatctggtttgtagatgtgctt

SEQ ID NO: 330375 - DNA, 122 bp, Homo sapiens
ccattcagcaaatattttttacatgcccgtgtgtgccaggaactatactgtttgctgggacgacagtgatgaacaaaaccaatttggttcctctccatgtggagttgaaagtccagcaagaa

SEQ ID NO: 330376 - DNA, 122 bp, Homo sapiens
ccagtcgccgcggcctgagggcgccacaaagttggggacacgccggaagctttggtcccgcgagggcggtggcacggcccctggtggcggccgggattccccgggctcccgaaggggttacc

SEQ ID NO: 330377 - DNA, 122 bp, Homo sapiens
gcatggctgtcgggctgtgatgagtccggaggaagccacgcccctcacaccagcacaggtcggccttgaagggcgccaaggcctcccaccacgtgatgtctggaaacttttcacaagtgggg

SEQ ID NO: 330378 - DNA, 122 bp, Homo sapiens
aagcccggcgccctgcttcctggaaccctgcagggaccctgcattcccacccaggccgaccgcttagcctctgacttcctctcggagcgattgcacgtgaccgactgcaggcgagggccgcg

SEQ ID NO: 330379 - DNA, 122 bp, Homo sapiens
agtaagttcaggtaacagtacgtcaccattggcttctggctcattgagtgatggtgggatcgcggtttcatctctgtaaacttgcccttgactggggagataccatctccttaaaaatactc

SEQ ID NO: 330380 - DNA, 122 bp, Homo sapiens
atcactttgcaattattgaaatgggcatactgagctcagaaagcaaatctgatgctttcacgggagacagagccacatttgtgttctgggtgggatcactagtgcaggagaacactacatct

SEQ ID NO: 330381 - DNA, 122 bp, Homo sapiens
actttcaaatgccgcaattcatcaccctggccccggctggaagcagagcgtgtgtgcgagcgcgtgtatgcgtgcccgcgtgtcacactcctgctcgccgtgcacctggagagcctttgtag

SEQ ID NO: 330382 - DNA, 122 bp, Homo sapiens
acatctcccaacaaatttaatgtgcgagaaggatcctgccctagcaatgtctaacatcaccgtagctttccactttttctcatacccagtctctactagtgtttctgagtagtaaggagcat

SEQ ID NO: 330383 - DNA, 122 bp, Homo sapiens
cccagcagtcgaactcccactcagcccaaccctggaagtcctatgcgggcggtgccatcccggcaagactgaggggcgggaataggccaaaaagcccacaacaggattcgcatctggcgccg

SEQ ID NO: 330384 - DNA, 122 bp, Homo sapiens
cagccagacccagaaaaattagattaactcggagaagctcgccaagacgatccgtcaggccgcctgaaggacagcgtattgatttccacgttgcgaaaaaattaaatgatatccctttttgt

SEQ ID NO: 330385 - DNA, 122 bp, Homo sapiens
tgaaaagtgagggctttgcaaacagtgtgcttttccctgtttaactttcttcttatgcatcgttctgctttatgtattctggtaagatattccgcacactgcagctcgttctctgtcctttt

SEQ ID NO: 330386 - DNA, 122 bp, Homo sapiens
ttttttccgtcctgcgcctgcgcgctggaggagcggccggctggctgcaggctggaggggcgcgagggtccgcactggcacatgagggccgtcttccaccgcgttgcgctggaacgtgggcc

SEQ ID NO: 330387 - DNA, 122 bp, Homo sapiens
cccggcgctgtctcctctgctactctgtttcggtgttttagcagaggcagatagtgagggcggcacagtgcccacggcatgccgctggactaagcgctaagcgggcttgggatgatgcgcac

SEQ ID NO: 330388 - DNA, 122 bp, Homo sapiens
ctgttgtgtttttgcagcatggtttgcttgcatcagccacaaactggatttccaacctgccgaacaacagccttgccttcattctggcagatgctggttatgatgtgtggctgggcaacagc

SEQ ID NO: 330389 - DNA, 122 bp, Homo sapiens
gtagcgacaacaagagaaacaaaactacctatttgtaacggacgtgctgccattgccctccgcattgagcgcctacctattgaaatctttacgtcgggacaatgggagagcggctaaaatta

SEQ ID NO: 330390 - DNA, 122 bp, Homo sapiens
ggggctggcaacagaaaaaaatgccaagcaagctgagcagcatggagcagtgacagacaacgagaggaagcaagggagtaaggccaactctgaggagtatatgcagcagatgaaatctgagg

SEQ ID NO: 330391 - DNA, 122 bp, Homo sapiens
tcctgcggggcgaggctcagaaagacactggtggcagagtccgacatggacttataagcacggcctccccggccacaggcaagcgggcgtgagcggagtgcagcgcccctccctccatgctt

SEQ ID NO: 330392 - DNA, 122 bp, Homo sapiens
ggcagggagggaccagagaagcagagggcctcagcagggtgacaggtctgttcacagtctcggtcttgattgtggtgaaggcttcacaggctcacacaggcatacctcagagatattacggg

SEQ ID NO: 330393 - DNA, 122 bp, Homo sapiens
gagaagactccctgtcttcgttgacttttgtctcttttggtaattggtggcttttcctgccgtattagggagcaaagcgtgcagcggggaggcccctgaggtctctgtaaacatgctgtggg

SEQ ID NO: 330394 - DNA, 122 bp, Homo sapiens
tcatgttctgctgcggattcctctcctgcgggttggtctcactgagcttcctggccaggtcgaagcactgattcctcaaacactccagactgctcagacacacctcctcatcgctctcctcc

SEQ ID NO: 330395 - DNA, 122 bp, Homo sapiens
ggaggaggcgactgcagccctcgctacgtgagctcgatcacaccagcgccccggcgactgcgcaggcgccaagcccgtgcctccctgctgcccccacccgtggccggcccgtggagtctgag

SEQ ID NO: 330396 - DNA, 122 bp, Homo sapiens
tgacctcagatgatccatgtgcctcggcctcccaaggtggggattacaggcgtgagccaccgtgcccagccctcagtttagcttctgctgctaaacagtccacccttgggagagagactgaa

SEQ ID NO: 330397 - DNA, 122 bp, Homo sapiens
caacggtcccatcggagagcagacccctcggcctgggcacgcaacgggcccatcggagaacgagacccctcggcctgggcatgcaacgggcccatcggagagcagacccctcggagctgcag

SEQ ID NO: 330398 - DNA, 122 bp, Homo sapiens
tctggcgccctctgctggccgctcacgcgcacctccgccacgccgggcccgggcctgcgccgctctcacctgtcctggcccgggggtcgctgtcccttgcccgtggccaggcccgctctggc

SEQ ID NO: 330399 - DNA, 122 bp, Homo sapiens
ggaggctctgtgtgtgggtgagtttagccccatcccctaggtgttctccagcttgaggatcgcaggcagagaggaccagcccagcagccacaggcctgaccaaagcccaggctgggaaggag

SEQ ID NO: 330400 - DNA, 122 bp, Homo sapiens
aaggaagcattctgtagtccaataactttcagagcctctggataaagcacagcttccaagcgcgaatagtcttaatatatgaatgcactctgtgatcttcttgaaggagctatagcgtgcag

SEQ ID NO: 330401 - DNA, 122 bp, Homo sapiens
attgtgttctggcctcggggcggccctgctgccagcggccgggactctcagcacagagctcgggaggactccacctgctctccagataaggcgccatgagcagagaagggaacagacggcca

SEQ ID NO: 330402 - DNA, 122 bp, Homo sapiens
tatagtgaacctctctggctctccttgcacaaggctccatgagtcagtctgggcagtgcacgctacccttgcataactcactccccacactcaggcttaggggtactaacatgcaatcctag

SEQ ID NO: 330403 - DNA, 122 bp, Homo sapiens
ccggctaatttttgtatttttagtagtgacggggtttcaccatgtcagccaggctggtctcgaactcctgaccgcaggtgatccacccacagcctcccaaagtgctaggattacaggcatga

SEQ ID NO: 330404 - DNA, 122 bp, Homo sapiens
ggccgctggctaaataaacggactcttaattcgtctccaagtgtggcgttttctctaactcgctcaggtacaacaatacatacacatttgggtgttggccgctatacttactcttttttgtg

SEQ ID NO: 330405 - DNA, 122 bp, Homo sapiens
tagggctctgccctaaccaccttgcaaacgagaaactggcgcgttgaacttagcaagcgccggcacctagcggatagcgctggtattgccaaacaaatatccgttttggcgccgtaaagggt

SEQ ID NO: 330406 - DNA, 122 bp, Homo sapiens
attttgtttaaagtgcctatcgacagtacatagtgaaatgctcggttccagctaattaagcgctcagctgtacggtgtggaaactaagagatcatgtatatggaactgtgaaatggagtttc

SEQ ID NO: 330407 - DNA, 122 bp, Homo sapiens
tatgtcgaagagatatctatattcccatatttattgcagcatatcacagtaaccaagatacggaatcaacctaaatatctatcaacagatgaatggataaagaaaatatgatatatatacag

SEQ ID NO: 330408 - DNA, 122 bp, Homo sapiens
gctgggcctatgttccctgggaactcttttcagtccttaacctcctcgccctcttgggagcgcgtggccctcttgtccaccctctctggaatttttttccttggcttccaagacggtgggca

SEQ ID NO: 330409 - DNA, 122 bp, Homo sapiens
ggaccttctgcactgagtctaagggtatgtgcctatgcctctgaggctctgattatcccccgtgttcttttggtaaatgtgggcccacgcatccatgtatgcatctctgcacagaacaggat

SEQ ID NO: 330410 - DNA, 122 bp, Homo sapiens
tgaccccctggcactggccagcacattttgcttgatttctcagctaaacccaacctccttcggctacagggatttctgtaggtgtatcagaggccaccagaaaggtgtgagaattctagaaa

SEQ ID NO: 330411 - DNA, 122 bp, Homo sapiens
cctccttccccggcaagccctttggcaccagcagctggtcctcattccaggctaagggctcgccgtagtggctccctccgaggctgtcccaccagacgcttaaaggtggctccatagtggaa

SEQ ID NO: 330412 - DNA, 122 bp, Homo sapiens
gccacccgtcccaaagcccacacagtctttctcaaaaatgtggatattcaggttaacctgcgattttgttcgaaagtggctaaactgcattatccgaataatttacttttccactccttggg

SEQ ID NO: 330413 - DNA, 122 bp, Homo sapiens
cacacgtgagaccagggcacgccgggaaatgtagttctagttgccgctaatcacgtgtggcgtcgaagcatgccggaaactgtagtctctgggtttaaagccgctttcgttctatcgcgcga

SEQ ID NO: 330414 - DNA, 122 bp, Homo sapiens
gatcccgctgctctgtctcgctcaccggccgggctatgttgattgtcccctcgcggcgcccggaagcgaccctcagtaaacaaagccgtgtgtgggcgcagccccagaagcctggggcgcgc

SEQ ID NO: 330415 - DNA, 122 bp, Homo sapiens
aaaagccagggttctcaggaccacgaaaggcaaaaccagctctaagagagcacgcaaagtcgctgtggcggagtctgtaggaaatatgaagttccctctttcccccattcagatttgggcag

SEQ ID NO: 330416 - DNA, 122 bp, Homo sapiens
cagcctctctccagaagtagagaccatggagtctggctgggtgccgcgtcaggggtctctcggggcggctagaggccctgggaacctggaagcccgcggggcgcggcggggcggggcagagc

SEQ ID NO: 330417 - DNA, 122 bp, Homo sapiens
gacatcgtgatggggaaagggctccccagatggctggtgagcagtgtgtgtctgtgaccccgtctgccccaccccctgaacacacctctgccggctgagggtgacacaaccctgttccctgt

SEQ ID NO: 330418 - DNA, 122 bp, Homo sapiens
gagcgccgggcccagcccgccggccggagacgccgcctcttttcataaactttatcgccgcggtgcacagccgctgataaagcaccataaataaacgagcgggcgggagtgcgcggctgtct

SEQ ID NO: 330419 - DNA, 122 bp, Homo sapiens
cctgctgggccacagacaggagggtaggagagcggagcagggcaagagagaggagtgagacgcaggatgagttccctggagagggagaagtgagcctcaccaacctgcaaagggagtgtttg

SEQ ID NO: 330420 - DNA, 122 bp, Homo sapiens
tcaattggcagctttttctccttccagggaaccgatgaccctaggttggctgacatcagtcgctagacccgcagcccgcaggccccgttagtccctgaactggctttcatggcccaaggtgt

SEQ ID NO: 330421 - DNA, 122 bp, Homo sapiens
gaagcaaagaaggatcccaggaacagccactgttttcaattctgggcgagtccttccaggcgatttttccacgctcttatagacgaacaaataaataaaagcagaactatatttcataggct

SEQ ID NO: 330422 - DNA, 122 bp, Homo sapiens
tcataacagtcttttctgctctctcagtcaaatgggttggtgttggcaagtcaagagagtcgatgatccagctgttttagtcacagactgagctgatcccaacaggccctggcagcgtctgg

SEQ ID NO: 330423 - DNA, 122 bp, Homo sapiens
taataactgcaggttttgccctccaagtcaaacttggagctccaactactggcagctcaccgtaagaatatattaattatttccaatttccttttaagaagtcgaatacaaagtagagagaa

SEQ ID NO: 330424 - DNA, 122 bp, Homo sapiens
ctctgtgggaaattatgtgaaaacgtagaaaagagcgcgagccagtaatttaaaaatcgacgtccaaatactcactgggtcacctatcagctatgtaatttgggcaggtaaataagcttttg

SEQ ID NO: 330425 - DNA, 122 bp, Homo sapiens
tctccccacccccaccatggccctgtcactcttaggtggcagttgtagtgcctactgaggcgaccactgtgaccaagaatcttaataatagggaatctcaatttgattctgcagagagagag

SEQ ID NO: 330426 - DNA, 122 bp, Homo sapiens
gcctccgggatgaaagggggtaacctagacctgaatgggcttgaccatctcacaactgctcgcgtgacgaccgcattcgtggcaggtgagggcccaaaaccggaggagaaccggagatgcgg

SEQ ID NO: 330427 - DNA, 122 bp, Homo sapiens
gagaaatttggtgctttcgcagaatctgctggtaggggagatgtgaagtgggcacggaatcggggacttgaaaccgccattttccatcagaaacgctggtgagaatcaatccctggaatggc

SEQ ID NO: 330428 - DNA, 122 bp, Homo sapiens
ctgcagcaagccagggaccaccacgaggggcagcggccgcaggcgcatggtgccggctggcgcggcttttcacgagctgcgcgccctcgcctgcctctcgcgcatctccacttcgcggggca

SEQ ID NO: 330429 - DNA, 122 bp, Homo sapiens
aaacaaaacatagtcctttaaaaaggtcttatgcactgtcccccacctcctgaactcagccgtaggacggtaaacaagtcaggatctggatgggaagcagagcaggagagacatgcttggaa

SEQ ID NO: 330430 - DNA, 122 bp, Homo sapiens
cgccattcttctattctttccttcaataatttgggaaatatttactgagaccctgctgtgcgtcctactctgagatggcatctggactctctggagtttgtggaatggtcagaagaaggcta

SEQ ID NO: 330431 - DNA, 122 bp, Homo sapiens
tcagtaagaaaagaggaagaaaacctgtgagtgggcaagtcagtctttacatgctacagccgtcaagtgccagctatttggtcaggaaaggcaaaataatggctgtaggaactcctgaataa

SEQ ID NO: 330432 - DNA, 122 bp, Homo sapiens
gggaggctgaggcaggagaatcacttgaactcggaaggcacaggttcagtgagctgagatcgcgccactgcactccaggctgggcaatgagcgaaactgcgtcccaaaaaaaaaaattattc

SEQ ID NO: 330433 - DNA, 122 bp, Homo sapiens
ctgaggtgtgcctgatgcagagcttgagtccctgagagctgctgggggaacccagaagcccggcaggtgcctggctccacacccagctccctggcactcacttccccacaccccatgccctg

SEQ ID NO: 330434 - DNA, 122 bp, Homo sapiens
ctcggagcccgctgcattgcggtgcatgctccttagctctggggcagagccagagctgggcgttggggagaaaggggtgcctctggccatccggctcctggagtactggcgcccgtctgctc

SEQ ID NO: 330435 - DNA, 122 bp, Homo sapiens
gttgtctcctgggaggaaatttgatgctaggaagaaggtagaggcagatggatcaggagccgcagaggaaatgcagcagagggggagagaaaaaccttgttcctgaaaatggtggagtaacc

SEQ ID NO: 330436 - DNA, 122 bp, Homo sapiens
actcctcagttcccagtggattctgggaaaagggaggaagacagaaagtcctggatgctgcgtctcccctatttgtgacctttgaccttagagcagaggtatgttggtgggttaagtggagt

SEQ ID NO: 330437 - DNA, 122 bp, Homo sapiens
ccgggcggggattgcggggcccggggcccggggcagcccctcccccacccccttcccggccgccgccccccgtccaggccgcagaccctctgttggagggacgccctcctcccgccccctcg

SEQ ID NO: 330438 - DNA, 122 bp, Homo sapiens
agcggctttcccgtcagtggcctgtctctcttggaggcagctgtcaatcacgggccagcccgcgctcccgggggagttcattgtgcccgcagacagttgtggaataactgctcctaggcgtc

SEQ ID NO: 330439 - DNA, 122 bp, Homo sapiens
gtttccttcctacaaaccccttaatgctcaccccttgggtgcaaatgatgcatatgttagcgaccaaagcctgatctttgctgattagtcataattaactgactgcacccctatccttgaca

SEQ ID NO: 330440 - DNA, 122 bp, Homo sapiens
caagggtgagggggtccaagggtggcgaagatcccaaaggtctgggactcctccctgccccgtcgtcccccatccctcggcctcgcccgccccggagctgtcccaggtctctgtctcctcca

SEQ ID NO: 330441 - DNA, 122 bp, Homo sapiens
tctcgtcgcctacactgcctgtgaactccgtctctttctctgagtattcgctgaaggtggcgtcctcgggcaccggagcacccgcctcctcttctggcttctgctttctcttgtgacttcgc

SEQ ID NO: 330442 - DNA, 122 bp, Homo sapiens
ccagcagcatgtagttcagggcccggggcacgttaagtcctcggtacatatttccagttccggattccttggtgagcctggacaagcccctcccgctctctgcgcctcagtctcccaagcct

SEQ ID NO: 330443 - DNA, 122 bp, Homo sapiens
atagcgaccgcggccgagcgaaccgggaaacggcaccggaagcccggaggttgggacgcccgcctaagccttccctgctgaaaccggacgccgcacggctcctgttccggtgtcagagggcc

SEQ ID NO: 330444 - DNA, 122 bp, Homo sapiens
aacagaatcaaggccgtcagcactacggaggtgctggagcctgagcttccctccaggggccggcacccagacgtcaaaagtagtaggggacaggaagaatgcactagaagggggtgctgcca

SEQ ID NO: 330445 - DNA, 122 bp, Homo sapiens
cgccactgacactggccttgcgtgtgggcgaccacatgatgttcgtgcagctgcagctcgcggcccagcacgctccactgcaacaccgccatgtgctggccgctgcggccgccgccgctgct

SEQ ID NO: 330446 - DNA, 122 bp, Homo sapiens
gagctctccaagagaaataaacagctgcggatgtgccgctgtaagagctgtgacattcgccgggaaagtctgcagcttcagtcgtgaagccagcgagatcatgaagctaccagaaggaagaa

SEQ ID NO: 330447 - DNA, 122 bp, Homo sapiens
gccctcactttcggaagagatctcggtccaagaggccaccactactggactcttggaccacgcggtgcatctcgctcatgcagtctcggagccgaggatctgatgtctgcagtccagtggcc

SEQ ID NO: 330448 - DNA, 122 bp, Homo sapiens
actttcaacaagcctgcgggccatagaggaccacaagtgagtcgggattgagagggacaccgacctcagactaaatcagagtcagcctcagaactcctaagcaccagccccaccctgaccta

SEQ ID NO: 330449 - DNA, 122 bp, Homo sapiens
agtcagccagtcctgagtctgaatcccatggctcagagcccagaaaccttgagcgaataacgcatgccagtctctgtcctcatgtttctgcataacagtgaaaagaactatcttgtggattt

SEQ ID NO: 330450 - DNA, 122 bp, Homo sapiens
agaaactgaaaccagccactctggtgccctgcccattccaagtttaggttcaagccacagcggcttgacagctattagaataagaatgcatctaggggagagggcattttcagtcttatcag

SEQ ID NO: 330451 - DNA, 122 bp, Homo sapiens
cctttgctctccagcacttcaaaaatggtaattttccggtctactccatcgtatatcatacgatccctttgcaccagtgtgtatagcctaagttcagccatgatgacctcttcatggtgagg

SEQ ID NO: 330452 - DNA, 122 bp, Homo sapiens
acacaaacgtgctaggccctgttctagacgctggagacacagcagtggacaaaatcagcccgtatggaaattacatccttcctaatgaaatacatttcataccaaatttcattttcacaacc

SEQ ID NO: 330453 - DNA, 122 bp, Homo sapiens
ggagctctggatgtaattcgaaatttcacattagatatgatttaaccataagcagcagcacgatccagagatccattgccatcagtgatctcactaaaaatatacagctacttcccagctaa

SEQ ID NO: 330454 - DNA, 122 bp, Homo sapiens
gaaactagcttctcactctctcagttgtcagtcaaaactttaatggtctttggccgggtgcggtggctcacgcctgtaatcccagcactttgggaggccgaggcgggtggatcacaaggtta

SEQ ID NO: 330455 - DNA, 122 bp, Homo sapiens
gtaactaattgattttgggagcgtatatccttcttaccgagagtcttttatggtcctgatcggaatgtggactcctctttggtgagtaaaatttaggtaagtacaagcttttgctctcgact

SEQ ID NO: 330456 - DNA, 122 bp, Homo sapiens
tttgatgatctcatttctacctccaccagatgtgacacacacccagccacaatgcctgggcgactgcccgccctcccatccttaccagcaggacccattcttgcttttgcccattcatgggc

SEQ ID NO: 330457 - DNA, 122 bp, Homo sapiens
tgatcgtggtgagtctcctgttttctgagggtgacctggattctccccctaaaggttatacgagggacaagtcgttcctggccatggtggtggacattgtgcaggagctgaagcagcagaac

SEQ ID NO: 330458 - DNA, 122 bp, Homo sapiens
cccggacacctccttcgggggccccagttcactcctggccgagttgcatctttgagcccacgtcacccccttggaggcttcccctccctcctgcactcgctgatgcggcagccagaggaccc

SEQ ID NO: 330459 - DNA, 122 bp, Homo sapiens
accctgaatcccgcctttcctctcgtgaagctctgccgggacaaggctgacgtgggacgacgtgggacgccgtgggccgcgagcacgccccggcactactgcggctaagtttggcctttcct

SEQ ID NO: 330460 - DNA, 122 bp, Homo sapiens
gaatgcagaaatatcttgggtgaggttctcatttgaggtgtgaaactattcacagcatcacgcctttatagaaacatggtaataagaagtaatcagcccatcattgaaaatgaagagcatta

SEQ ID NO: 330461 - DNA, 122 bp, Homo sapiens
tgcccccaaacttgagtatttgccctctcgactgcatttgtattaaaagttggtaactgtcgttaaagccactattcttaagtatctcataccagtcttggtgaaagaaaaaaaaaagttag

SEQ ID NO: 330462 - DNA, 122 bp, Homo sapiens
cctagtaataatcttgtagttcacattactcatttttcaccaaattcttttggtgaaggacgcttcagaaacggccatcactgaagagcagacccgtttgggttctccacgcattctagact

SEQ ID NO: 330463 - DNA, 122 bp, Homo sapiens
gaggagaagggaggggaggggaggggatagggggagggggaggaggaggagggagtggagcggcgggaaagatccctctgactgcccctgaggccctggaggaaggacactggtgagccccg

SEQ ID NO: 330464 - DNA, 122 bp, Homo sapiens
gggaggcttctgggtcccagggccgcaggggcagggaagtctggtgagtgtgtctgcatgcgtgtatgtctgtgtgtgcctgggtttgcatgagtgtgaaggcatgtgtctgcatctgggtg

SEQ ID NO: 330465 - DNA, 122 bp, Homo sapiens
gcatgtgcaaagaggcacagaggcatgaaacagctttgtatgtgtgtacagggaactccacggagttgggtattagtagagcagaaagaacgtctgtccagaaattcctccctcctttcaac

SEQ ID NO: 330466 - DNA, 122 bp, Homo sapiens
aattgcgcgtttggaaacacactaagaccacaccctaagactgagaatctggactttaaacgctgatcattaattaaaaggacaacgcagtatctaagttggaagatctggccgcgcaggtg

SEQ ID NO: 330467 - DNA, 122 bp, Homo sapiens
ccccgttgcacagattagcagcctaaggcacaggatggtgaagtaattcgtttaaggccacgtgctgggtgagccgtaggacggggattttatcgtggttgttgagatgtttgtaaaaagat

SEQ ID NO: 330468 - DNA, 122 bp, Homo sapiens
ggagtttactgtatctgcagggtcccttggaagccaatgtctagccccatgcaaaggacacggtgagcaaaagcctatctaggattgtgtctcaggctcatcttggcagaagtgctgggagc

SEQ ID NO: 330469 - DNA, 122 bp, Homo sapiens
cttgacgggaaagtcaggtacaagctgatgctgttatcaccacaggaaccaggggctgagcggtgaaatccagctcctcccagctggaagacgctagggtgaacggagataaaagcagttct

SEQ ID NO: 330470 - DNA, 122 bp, Homo sapiens
ttcttactgagtaagatttcaggacccgagcaggaaatggcacttcgtccagaatgttggcgctgtcagacatggagccctacgaagaaacagaactgtcaccccgggtgcacgggcacagg

SEQ ID NO: 330471 - DNA, 122 bp, Homo sapiens
aatttcaggcactgaaactgacattgaggaaagcttgcaggaaagctatgagcagctgtccgccctgcctacccagtaacttggaattttactgatgaaaatccagttccttaaccaaagca

SEQ ID NO: 330472 - DNA, 122 bp, Homo sapiens
ttgacaatttccaaaagcgaaacttgggctctagactagatctacactgagtctgcggggcgcggagtccctgcccaggtcagtagcgccggcccggcgggcgggcggggacaggggcggag

SEQ ID NO: 330473 - DNA, 122 bp, Homo sapiens
gacggcagtcgctggagacggagatggcctggtgggaccactcatctatagcgcctgcctcggtggtctcctgcccgacaccgcgcacctgccttttcctccttccgtttttttacagcttt

SEQ ID NO: 330474 - DNA, 122 bp, Homo sapiens
ccagtgagccaagatcgcgccactacactccggcctgcggcatgcctcaaacctggggtccggcaccctgcggccttttcgcggccgcacccatggcaacagttaactagcaacctcgcgca

SEQ ID NO: 330475 - DNA, 122 bp, Homo sapiens
tggtgacaaagggaattcctgccggtgtggccaaccctgcaacctcagtggcttctgtcacggaaggcaagccccacatcccagaggcatccagactcggggctctccatgtgcaggagctt

SEQ ID NO: 330476 - DNA, 122 bp, Homo sapiens
gagccccaggacagcggcgcccagacggtacctgacagcgcctgaggacaaccgggtacacgcggcgtctatgaagcgcaacagtgacgccggagagtcactgcaacttaaaggctgattct

SEQ ID NO: 330477 - DNA, 122 bp, Homo sapiens
atcctagttaatacattaaatggcagtcatccgtcatgagcaggtggcagataggagccacgaggcagaggaaaggtaatgaaataacaagggcaaatgcaaaatcccacgtttacataaaa

SEQ ID NO: 330478 - DNA, 122 bp, Homo sapiens
tcataaatgcaataggttttttcactgtgagtgtggctaaccaccagaaagttaggatggcgacagctccagcaagaggctcacatgggatgcatccatgaagatataaccccctaaagagg

SEQ ID NO: 330479 - DNA, 122 bp, Homo sapiens
cagcggactgatgctgttgtctgcagaggacagcgtggctctccaggactccagcgactgcgcacgacggcgattgtcgctgcacctgctgctgtggctccggggcaccgcggggctcagtt

SEQ ID NO: 330480 - DNA, 122 bp, Homo sapiens
cggcgggagcctggaaccggcgctccggggcggcggcggcggcggcggcacccaggccggcgagcccaagacagcatcgcagtttatttacaagcccggtgccagccgccctcccgcccgcc

SEQ ID NO: 330481 - DNA, 122 bp, Homo sapiens
gtgccagtgcgcaccgaggaaaactaagccgacgcggggtggaaataaataacaaccaaacgtgcctcgtcgctgaaccaggcgacttcccctctagaacgacagctgccgaagaaagcatc

SEQ ID NO: 330482 - DNA, 122 bp, Homo sapiens
cctgagttcaccttctttgcaaccacaatcacgacccagaataaactgcttcctggaagccggctagttgcacctggcctgaagtcagtctcgggactgcctctcaggaccccagacagggt

SEQ ID NO: 330483 - DNA, 122 bp, Homo sapiens
cgggggcgggctgggcgctggcaccacgaccgcccgctgagcaacgtgactgcgcgggctcgggtccccaccaggacaaggcggcctctgtgccgacccagctgattcctctcgggctgcaa

SEQ ID NO: 330484 - DNA, 122 bp, Homo sapiens
aggtaggcgagaaggggcgtggcgcggcggccgcgaaacgtgcgcaggcgccggccgctgcgctgcagatggcggaaatggatccggtagccgagttcccccagcctcccggtgctgcgcgc

SEQ ID NO: 330485 - DNA, 122 bp, Homo sapiens
tgagcttacagtgcttcccttgaaaggcactgtgctgtgaacctgcggcttatttacagacgtgtccaaatccgttctctggtcctgcgtgcagtggccacgcccttcatagtctgaacgtg

SEQ ID NO: 330486 - DNA, 122 bp, Homo sapiens
ggccagagagacaaagagatgcacagagggcgccttccagtggggacccgacgacggaggcggggcctgcagaggcgcgaccgaaggggaggggtccggggcggggtttctaagggggcgtg

SEQ ID NO: 330487 - DNA, 122 bp, Homo sapiens
tcccgaacgcactgcaatttacagctccagggggcgttcctacaaccccgacaggttagccgaggggcggggcgggcgggccccggggcgggttcggcgtcctcctgcgccaatgggagcac

SEQ ID NO: 330488 - DNA, 122 bp, Homo sapiens
gccgcccaggcgtgcacgtaaatgttcaccgcgcacacaaagcccgctctgaccttgctgcggactctagatgccgctcttggatgcgcccaccaccctctagtgggcgcagggactgcgtt

SEQ ID NO: 330489 - DNA, 122 bp, Homo sapiens
caggtgcgggtgggccccgacgggagcgcgtggcaggccgggggagagccagtctaaacgcggattcccaggccccaccccccggccagctgactcaggaggtcggggctggggccccagaa

SEQ ID NO: 330490 - DNA, 122 bp, Homo sapiens
cgtacttgaccgtgtaagcaaaggctgcaaacccaactatcacaaacaagttcgccagggcgccacccaggagtccgtggtgccggttggcctgctggagccctgcgaggtttgggacggcc

SEQ ID NO: 330491 - DNA, 122 bp, Homo sapiens
gggagagcccctggggcgaggaggcgagggcagccttccccaggccaagggagcagccatcgctcttggatctgtttttcctcaagcgtctgtcctgtggggcctagtccccaagcggcagt

SEQ ID NO: 330492 - DNA, 122 bp, Homo sapiens
aggtcatctcggcagtaaaatggggtgaaatgacccgacctccccggaggatgccgcgcacgatgtgtgcctcaagttggcttccactgacctgaactgttaagaaagccctcctcagtgac

SEQ ID NO: 330493 - DNA, 122 bp, Homo sapiens
atagtcaatgagcagttaccaagagggtcctagaaagcatgtttctgaagaatgtcatctcggcaacgttgttccatctgcaccagtcagggaggaatggaggcagaatgcctccaacacac

SEQ ID NO: 330494 - DNA, 122 bp, Homo sapiens
ggcgtcctgtgcccttcagaacagctttttttttttgggaaaggagtttggagtgaaacgcggaccggccagagcggcggtttctatccccacaagccactaatgcggtgcgggctggtgtc

SEQ ID NO: 330495 - DNA, 122 bp, Homo sapiens
aggatgtcttgaagccgagaaggaagagctgttggagagacgaggagttaagagttcattcggctgtccagatgtatccaagtaccctgtgttatttggcaataaatacatctgggcaactg

SEQ ID NO: 330496 - DNA, 122 bp, Homo sapiens
aggcacggtttgagaaacggtcaaacctgggactagtggaggatagtgagctgccgactacggtggccgactgggtcagctatgggtgcccgtgagggtcaatgacaagggaactgaagggt

SEQ ID NO: 330497 - DNA, 122 bp, Homo sapiens
agttccttcctggccttcggggtcccatcaaagcaggcctgagcagactgaccccttttacgattgggggcaggggtggccagagggagaggaaatcaaaggagaactaaacgctggatctt

SEQ ID NO: 330498 - DNA, 122 bp, Homo sapiens
atctgggtgagatggctcacaacatcctgtgctagtcatggacttctttttcatgcagggcggcgtgtgtgggttcctgcactgtgtgcctcagttctatagctagcagggtctgtgtcttg

SEQ ID NO: 330499 - DNA, 122 bp, Homo sapiens
tgggaggtccgctgcctgctgtcaaggaagatggtcgatgcttctgagaaacaggccctgcgggttcctggatttggtgtggcctggcatccacggtgcaccccgtgctggcgggtggccca

SEQ ID NO: 330500 - DNA, 122 bp, Homo sapiens
ctagcacgcagcccagcagcttctgtgagtggagacgtgcacacaaacatcaggacctgtcggctactgggatattcaggtctttcagaggtgacatctttgacatttcaaagtgctgtgca

SEQ ID NO: 330501 - DNA, 122 bp, Homo sapiens
tccttgcagggtttcggtggtggggctcctcctgtggtcaggtcactgggatttcgaatacgatctgtcctgtcatcactttcactttgattagcttcattctgaagaactttcgacagcat

SEQ ID NO: 330502 - DNA, 122 bp, Homo sapiens
tttcccttttctacttgctcgctcttctttccccaggaaactttgcaagaaaggcaaaagcgaatcccaggaaaaagactggctcatcaatcacatgttgactgcgctcgcgcgaattgcgc

SEQ ID NO: 330503 - DNA, 122 bp, Homo sapiens
cctcccacagtccctgcaggcacacaggtcaggcccacagccctgtcctagctggtaaggcgcattcttctggcagtgctgctgcatcactcacagacgtctgggggcagaggctgagtgtg

SEQ ID NO: 330504 - DNA, 122 bp, Homo sapiens
cccacttaacgccgccgggagccgcgcggatgggggcgagctgggcggcgggtgtgtttgcggagttgttacctgggcttagagaccgggaagcaccacagacagatccccctcccggggca

SEQ ID NO: 330505 - DNA, 122 bp, Homo sapiens
accatggattccatcctgggggccctggcaccctacgcggtgctgtcctcctccaacgtgcgcgtcataaaggacaagcagacccaactgaaccgcggctttgccttcatccagctctccac

SEQ ID NO: 330506 - DNA, 122 bp, Homo sapiens
aaatcaggaggaaaagtaaggacggaaaacacatattgtcaggagtgggattcgaacccacgcctccaggggagactgcgacctgaacgcagcgccttagaccgctcggccatcctgacaca

SEQ ID NO: 330507 - DNA, 122 bp, Homo sapiens
ctcatccttgccccaagcatgcagtactcacggggtaccacatagagcctatctccctgccgttccccagctccaagagatctggtctagaactgagatagagaatctttcctggggccagg

SEQ ID NO: 330508 - DNA, 122 bp, Homo sapiens
ggagatggtaaccctactctattccgtaactctaaacgtgaatccgcttacaactggctgcgaagatgaataaagagaatccagaccactagccgggcactggggaccacagcactggtttg

SEQ ID NO: 330509 - DNA, 122 bp, Homo sapiens
gcccccagcctccggggacggcttcgagccgcagatggtgaagtcgcccagcttcggtggcgccagcgaggcctcggccaggacaccgccccaggtcgtgcagcccagccccagcctcagca

SEQ ID NO: 330510 - DNA, 122 bp, Homo sapiens
tgcataaacagcctgatcctgtagctccccttccccacacggatgcatggaggcaggtggcgaactctaaagcctcactgaaaggcagattgctggactgttagaaggggctcactcacctg

SEQ ID NO: 330511 - DNA, 122 bp, Homo sapiens
ctcttcttgcctccttctcctcctttctctccttggggctgggtttttttgtctggcaatcgcccacccagaatcccctcattcaagattgtaacctctggagccaggtggcctaggtttga

SEQ ID NO: 330512 - DNA, 122 bp, Homo sapiens
aacagctttatttgaaagacgggggacagccaagtccccctgaccctgcggtcctggcaacgtcggtctcaggcgtaggaggaccagtgtcctgcggagagaaaaatagggttaggggtctg

SEQ ID NO: 330513 - DNA, 122 bp, Homo sapiens
tatgctgtttgtagtgaaataatagaatgagcacccattccaaagctttattaccagtggcgttgttgcatgtttgaaatgaggtctgtttaaagtggcaatctcagatgcagtttggagag

SEQ ID NO: 330514 - DNA, 122 bp, Homo sapiens
ggcctccctcttccccaggtgtgggggtgcttctctggaattcgtcacggtttaggcttacgaaggcctgatggattctcaggcccactctctgcaagcaaaactgaagcagacttgtacat

SEQ ID NO: 330515 - DNA, 122 bp, Homo sapiens
agccgagcccgaggcgcgagcggcggagcgcaggcggcgcatgcgcgctgacaggaaacgcgaaaggaaccagctaccaggcctcgcaggaaaattaatccggcgatgtcctcgaccctctt

SEQ ID NO: 330516 - DNA, 122 bp, Homo sapiens
ccaccgcgcccagcctgaccctgtctcaaaaacaaaataccaacaatgcatttagaacagcgcctgccgcggtgaccccttgtagctgccactgcgctgtcgctgctgtccgagcccccgct

SEQ ID NO: 330517 - DNA, 122 bp, Homo sapiens
gtttaatttttggagagctcgcgatcttggaaaagcctcagacgccatctacagttaaaacgtaggtaactgccctctcccgcaccccccccttacacgccccccaccctttccaccaaaaa

SEQ ID NO: 330518 - DNA, 122 bp, Homo sapiens
tcccagaagccaagaggcaaggcctcagtttatcactataacaaccagacgacactgaagcggctggtgcgggatacagtatctcatttgcatagagcgcgctggttggctactgtcatcat

SEQ ID NO: 330519 - DNA, 122 bp, Homo sapiens
cttcctctcctctgtcaccttctccctttctggagggaatgtcaccgcctgggcacagagcgggcaggaattcttttgttaacttcccaaactggaacatagactcaggcccaccccttccc

SEQ ID NO: 330520 - DNA, 122 bp, Homo sapiens
gggggtggtggtgggggacggcggcgcctgcgcagtgaaggaatgtaggcggggcctccacgacgcctgcgcagacggccgcagccctgctgggcgcgaaggggctggccaagggcggggcc

SEQ ID NO: 330521 - DNA, 122 bp, Homo sapiens
gaactcgaacgcggcgcgggacgcacggcacgatgggagacgcaggagccacggcggccgcgcttaggcctgctcacaacctccgcccggccccgcccacagcctccgccgcgcacgcgcag

SEQ ID NO: 330522 - DNA, 122 bp, Homo sapiens
cgggtcatctgagcggcgcagccaatggagtggctgggcggccccggggatggccaggcccgccagccaatcaggcacccgtgcccgccccgcctgccccgggaatggccagggccgggagc

SEQ ID NO: 330523 - DNA, 122 bp, Homo sapiens
ctgcaaaagcgccgtgtcgattgtgtgtttgccgtgtggtgttagactcagcaggaagctcgctgtccccgcagaagcgccatgtggattgtgcgtttgccgtgcggtattagactcagcag

SEQ ID NO: 330524 - DNA, 122 bp, Homo sapiens
gctctgtcgaccatgctggagtgcagtggcacgatctcgctcactgcaacctccgcctcccggattcaagcgattctcctgcgtcagcctcccgcgtagctgagattgcaggcgcccgccac

SEQ ID NO: 330525 - DNA, 122 bp, Homo sapiens
ctacagagtaagaccctgtctcaagaaatggtgatagaaacagcactagcaggctgggcgcggtggctcatgcctataatcccagcagtttgggaggcccaggcggatggatcacctgaggt

SEQ ID NO: 330526 - DNA, 122 bp, Homo sapiens
ccaccgcgtggcgctgtgccttacgttgttgggccgttgggtggaccacgtggtctccgacgcctcaaggcctgctcagcgtgcgcgggcatccggtgggtgcgggaggcccgaggccaggc

SEQ ID NO: 330527 - DNA, 122 bp, Homo sapiens
tatcttaaaaaatccctattcagagagactatagaaattaagaggatagcttcttataaccgtgttgttcataacacagaggcagagagaccaacagagcatagggaaagcctgcagcaaaa

SEQ ID NO: 330528 - DNA, 122 bp, Homo sapiens
ggaataagtcaggaaagaaacactcttcacttctgtgagttttctaagagcagcaaacggcggctgctcacttagagaacctatggtctttcctggttttagaggtcagggaagcagctgct

SEQ ID NO: 330529 - DNA, 122 bp, Homo sapiens
aaactccagaccgggcctctcccgcagcggcgcctggggggcggggccgacgcccgcggccggccaatcagcggctgcctctcggtgctcgcagccaatccgcgtcttccgcttcgggtgga

SEQ ID NO: 330530 - DNA, 122 bp, Homo sapiens
acctggagaaaggcagtggggccagggggtaggggcaaggctgctgggcccccactttagcgtggtgatcttgggcaagtgacttaacttccttgggccttggttttcttttccgtaaaatg

SEQ ID NO: 330531 - DNA, 122 bp, Homo sapiens
ccactctattctagaaatgctaacacgcagaaactgccaggctggagccccttcaccgggcgtcctcttccctcttatccctcccagcggctctcgcaactgcaggtggctcagcagtgcca

SEQ ID NO: 330532 - DNA, 122 bp, Homo sapiens
cctccactccatcccgaagagcttcgccgagctcaggaagatgacggaaatcgggctgagcgggaaccgcctggagaaggtgccacgcctcatttgcaggtggacctcgctgcacctgctct

SEQ ID NO: 330533 - DNA, 122 bp, Homo sapiens
atgaagacaccttcaaatgaaggggctaatagggtagtggctgagaatttgtgctgcagtcgggagggcttgggttagagctacatccacagtatgaccttggacaggtgactttatctctc

SEQ ID NO: 330534 - DNA, 122 bp, Homo sapiens
tcacaaaccatgactcagagccggacagagggcggcgcctcccccatgcgtgagtggcatcgaaggcctgccagtgccagcaccttggcagcccccgagcgttccccacgaggggcctcact

SEQ ID NO: 330535 - DNA, 122 bp, Homo sapiens
aagtccctaagaaagatggtctgaaagggaatcaaatgagtatcagcattcagagtaagccgtgaaagttaatgtgatttggacaaaaggctgctgtaacctgaaactccagggatcatgtc

SEQ ID NO: 330536 - DNA, 122 bp, Homo sapiens
aacccacagcattggaagggaccacagagagtccaaaacaaaacacatctttctcttcttcgccgccaccatgggcactttgcttcagcacattcatttatagaacgttaagtcaggagcca

SEQ ID NO: 330537 - DNA, 122 bp, Homo sapiens
tgagatcgcccagagctggggcgaagaaagagggggcgtggggaagcagtgcggagcctccgggactagatactcaggaatggggcttctcacgggaggaaaagccccactgagactttagg

SEQ ID NO: 330538 - DNA, 122 bp, Homo sapiens
tctcagctgaaagaaatgactgtaggaagtgtgtcagggaagccaacggaaccgctggcccgccggtggtgcgcccggcattaggaaagtctctacgatcgctgaggtatcgggcagtcagt

SEQ ID NO: 330539 - DNA, 122 bp, Homo sapiens
tttttctggacagtgaggatattcctcatctgcctgtgctctgattaaactgcttgtactcgtactgaacttgtggatcggtgcacatatctgatctggccttccttgttctgagttggctc

SEQ ID NO: 330540 - DNA, 122 bp, Homo sapiens
tgtggcacttggagactaacaggataccagcactggtgccatgttccaccaccccttccacgcccctggggagttccaaagagggaactagaaagacagttgggtggttcagcgcaagaaac

SEQ ID NO: 330541 - DNA, 122 bp, Homo sapiens
gcagcgcgccgcaaatcccccggggcttacgggagccgctctttaggagacagcgctggacgaaccgggcggggtggggatggataatcttcaggcgccaacgcaaaacggccgcaagacgt

SEQ ID NO: 330542 - DNA, 122 bp, Homo sapiens
tgcaggccggacgcaggcgctgcaggctccttatgaggctccacatgggcgagacctgtgcgcaccgctcgtgtgtttgcgtatcctctgctctgtggtgtacagatactgttgaaaacatc

SEQ ID NO: 330543 - DNA, 122 bp, Homo sapiens
accagggacaggcccatgctccagatgtccgactgcaccgagtaatgtgtgccctgcaaccgctccggctgcagcagagccagggaggaaagagcccagaggggcgaggatggcagctggaa

SEQ ID NO: 330544 - DNA, 122 bp, Homo sapiens
tccatctgtctcctccactggtttgtgaactccttgagccaattactatgcaacacctagcgtggtgcctgcctggtgcaaatggtaagcactaaatcattcttgcttaatctgaactttag

SEQ ID NO: 330545 - DNA, 122 bp, Homo sapiens
tccccgcggcccgccttcctcagccctgggccggcggcacttggaggcggccgggcaagacggcagacgtgggggcccctttaaccggagccaaggatccccggactttctgaccaaccagg

SEQ ID NO: 330546 - DNA, 122 bp, Homo sapiens
tagcatctttgttgtgctcagtcactggctaggaatggctgatgggaagtgtggcctcaacgggatgcaatgctgaattcagagcatagcagctggggctattcatcagttatgcccactaa

SEQ ID NO: 330547 - DNA, 122 bp, Homo sapiens
gtacggagtgggcgggaggcggctggcagcggaggccggcggggcgctgggaggggcagccgggggctagggggacggaggagaagaaaggccccgagtgacagagaagggttgtttggaaa

SEQ ID NO: 330548 - DNA, 122 bp, Homo sapiens
gtcagcaacctaggcagactggggtcctgggctgggggatgcaggggtgctgctccatgccggacatggggtggccccagacaagtgttgtaacctttgaaggggacctgggaggacagagt

SEQ ID NO: 330549 - DNA, 122 bp, Homo sapiens
tggggagtaggggaaggcccagggagtggggcagggggctgcttattcactctggggattcgccatggacacgtctcaactgcgcaagctgctgcccatgtttccctgccccacttcacccc

SEQ ID NO: 330550 - DNA, 122 bp, Homo sapiens
ggtggttctttttggccttgcagcctgacaggagtcaccaaatgtggccttgagttgatccgaggatttctgttatggcaaacttttattgccaactttgcaattggtggccttggacaaat

SEQ ID NO: 330551 - DNA, 122 bp, Homo sapiens
gagctccgggacacttgaactgccgtctaccctgtctctctacaagtccggagcactggacgaggcagctgcgtaccagagtcgcgactactacaactttccactggctctggccggaccgc

SEQ ID NO: 330552 - DNA, 122 bp, Homo sapiens
gtgagaaactgccccgtggcgtgagagaaactgccccgcagcgtgagacacactgccccgcggtgtgccaaaactgctaatcctagaaaaaccagcgactcaggaatattaattttcaaaca

SEQ ID NO: 330553 - DNA, 122 bp, Homo sapiens
aagagacagaaccacgtatcctggtgcgaagcactgggcatcgggctgggctgcatatggcggagggctgggctgcgtatggtagagcgttggactccaaggcttgagtttaagaggtagac

SEQ ID NO: 330554 - DNA, 122 bp, Homo sapiens
ccaatggacttgtgaaaacgtgatcggctgcaggcccgccttggctgagggaccccctgccgcaccggccattccccccacgagcccagacttcctggaagagctggggtcctgcgtgccac

SEQ ID NO: 330555 - DNA, 122 bp, Homo sapiens
ggtgagttcaggctgggcggctgcacccctgggagcagggcagtgctgcactgagccaggcgggagctggaagaagacgcagcacactgggttgggcaaggtgcggggctagggctaacagc

SEQ ID NO: 330556 - DNA, 122 bp, Homo sapiens
gcaggttctttctggatgtcccacagctccctccttgtctggccctgagaaatgctgtcacgcctgcctcccccaggacagcaagctcttccagcaatgctggagccagtctggctcactgt

SEQ ID NO: 330557 - DNA, 122 bp, Homo sapiens
taagagtcagcaatacagcaactgagtaaatatttagcagcttgacatcttgcaccctcccggcatgctattttgtgtttcacaacaaagcaaagcaaaacaaaacaacaaaacaacttagc

SEQ ID NO: 330558 - DNA, 122 bp, Homo sapiens
ccccacgacctattctaaacacccgcaacccgctttccccacccagtcccctgcccgccccgccccctttgcatgccgcgcccccaacccgccaccgctggcccacagacaggggcgagagg

SEQ ID NO: 330559 - DNA, 122 bp, Homo sapiens
ccagtgtgattaggtagatcgccaggaacaccccaaacaggatcttctctagcactgggtcgtctgtcagtcctaagagaatgaattctgtcactatggtgtggtttggggacaacatcttc

SEQ ID NO: 330560 - DNA, 122 bp, Homo sapiens
tttcagggaccgattcaggacattatccctgtggttccctcagtgaaaggagactcgaagcgcgactagaagtcgccgggccccatagatctgcggtgcccaggccgtaggcggaggcgcgg

SEQ ID NO: 330561 - DNA, 122 bp, Homo sapiens
atgcataaactgttgcagcttcctaagaatttacatcttccaggtgtggtcttcaatagacgactgactactgtagcagtataaaagcttatttccttagcttgagtatgaaaaaaaaaaac

SEQ ID NO: 330562 - DNA, 122 bp, Homo sapiens
tcccctgatgaggtcattaatatcacattttacagctgaggaaactgaggtccaaattatcggagtgctttaattcactgtaatattgaatcaatggtaggacttttattataaaaatccta

SEQ ID NO: 330563 - DNA, 122 bp, Homo sapiens
caggttttgaggagtagctccacctccctcctgggatcctagccaagctttcgaccccggcgtctgggttagaagctagagtctccgcccgctaagggacccaggcttccggttcccgctgt

SEQ ID NO: 330564 - DNA, 122 bp, Homo sapiens
ggagagggacacatctctgtcgtaacatcgcatctctgactttggaggaatgattttatacgttgtgaggccgtgcttaagtctgtagcttttccctgggttttggcctcgttggtgccatg

SEQ ID NO: 330565 - DNA, 122 bp, Homo sapiens
ctcacgggccaggacagagtcacaggcagcaacacttacctgcaagggaagctggggacacggatatttgtcttctcctgcctcctcttgggaggtagacaagggagaagtagggggaaaat

SEQ ID NO: 330566 - DNA, 122 bp, Homo sapiens
cctggccgtgtccagctgggtcctcatccgttggtggctgccttccctcccacccttcctcgtgactcccttcggcgtagtgcctgtggcacccgtgaccactccagaacgcagttggcgta

SEQ ID NO: 330567 - DNA, 122 bp, Homo sapiens
cagcccagctcctggcgccactaactacagtaatgcttattttctacaaactcacccagacggggacaagaaaggagccagaacacaagatttaaaaagtcagccctccaaaccgatagttg

SEQ ID NO: 330568 - DNA, 122 bp, Homo sapiens
tgcctaactgctaagacttgtgctaacaggagctctgggacctcagggagaatgggctcgcgttcatcttgcacctgcctttgttttagcactgatctaactctcacattttttacccacca

SEQ ID NO: 330569 - DNA, 122 bp, Homo sapiens
taggccaccagctgcttatgaggtcagagcagcagcagcagcagccccctccctaccccacggccccacgtggtaacaggtcacaatgccccgggtgcccactcccagaatgctgaccaaag

SEQ ID NO: 330570 - DNA, 122 bp, Homo sapiens
acagctcccgcttccctcacaagtcttaccgaggcccagttggcggctttccggaggcggcgccccctcgcctaggaaaaggatttgcagggtgcccggctccagggcaggaatagcgcggg

SEQ ID NO: 330571 - DNA, 122 bp, Homo sapiens
cagtgagtaagatagagtacataaacaattgtaatctgatattgtaaatattatgtgagacgcacaatgtgctatggaagaattgcagacaaaatataggagaaaattgcaccttgattagg

SEQ ID NO: 330572 - DNA, 122 bp, Homo sapiens
ccttaccacaacctgggacatcttgagactggacccctagattggtggcaggacctgctccgagctgcccagcgagacctgggcaagccgcccccaccagcccggggctcccgacctcctct

SEQ ID NO: 330573 - DNA, 122 bp, Homo sapiens
cgctaataatagttctaagatgacacctagtggtctcggaggatattaccataggaacttcggtcctataaaaaacactttaccaatacaaacactgtgagcatcaaacattggaagaaaca

SEQ ID NO: 330574 - DNA, 122 bp, Homo sapiens
agcatgcgcacacagatgttagggttcgggcgagctatttggagcctgcgcagtcagatccgaggacatgttgacgtcgtccgagagtcttaaaatcctgctctggccggattccagactcg

SEQ ID NO: 330575 - DNA, 122 bp, Homo sapiens
acacatcttcaaacagaaacacaaaaaccttacaacgaaacagggctgcacagaaggccacgccacctccagaattgccctggctaactgtcaggacagcagcaatgttttatccacacaga

SEQ ID NO: 330576 - DNA, 122 bp, Homo sapiens
ctttaacagatttcctcttggcttgctgtgtgtccccttctcccagacctgaactcagggcgtgttccctgccctcccaggccgcttcacctccacagctaatggcaccgaagcctggagat

SEQ ID NO: 330577 - DNA, 122 bp, Homo sapiens
ttatccaagtcctcagagtacaggcttcagggccctgtggcttgcggcatgcagtgcgcccggaagtgcctatgtggacacagtgtgtgtgcatggacgcaagcgcgtgccgttttcatggc

SEQ ID NO: 330578 - DNA, 122 bp, Homo sapiens
tccaactgggtgctacagagcctcgagctccgctgcgaagcacccggctgcctcgctcgccgcccgcacctcggttccccacaggccgcccccgcctccgcctgggccttcgaggattggcc

SEQ ID NO: 330579 - DNA, 122 bp, Homo sapiens
atccagctccagggaccctaggttttctatgggattcccaatctgcagcagagatttacccgagcgtgttgcggcagcggctgggcttgcaaggcgcgatccaagagggatttaagcagccc

SEQ ID NO: 330580 - DNA, 122 bp, Homo sapiens
ccttggtgcagtaaatctaccggagacaactcagaggtgcctggactacggggcccacatcgcagagcagcccagatggcagcgggaaagggagagtacagcgcctcaccctcgagcagcac

SEQ ID NO: 330581 - DNA, 122 bp, Homo sapiens
agggagtggctgaggcctcaggtcctgagacatgaactgccttcctcactcagaagcccacgctgagattaaactttaaccaactcagtgaggcaacagcccagttgatatttcttccaaac

SEQ ID NO: 330582 - DNA, 122 bp, Homo sapiens
agtggtaccctgaaatttacattttaaaatttaatcttgttggctgggcaaagtggctcacgcctgtaatcccagcactttgggaggccgaggtgggcggatcacctcaggtcaggcgtttg

SEQ ID NO: 330583 - DNA, 122 bp, Homo sapiens
cggggcggggtggagagagagatattactccccatatcgaaggaagtgtacgcacccctgcgatattgttcataatatctatggggaaaggagatgatgttactccccatatcgccaggtgt

SEQ ID NO: 330584 - DNA, 122 bp, Homo sapiens
cgaaggttctcgctgtctccagtgccctcctccatggagtaggtcttggagtggttgcctcggcgatgggatggggctcggccctgggccaggctgagctgcctgcggagggcgcggttctc

SEQ ID NO: 330585 - DNA, 122 bp, Homo sapiens
atattttgttgatttagacttaatttacaagtaaggctgacagcccacagagtgtgatcacgacagcattgttatggaaataaatgccagctcatgcatttgggatgtacaccatggatctg

SEQ ID NO: 330586 - DNA, 122 bp, Homo sapiens
ctggtgctaaccttatatttcatagtgttggcatattccccttttcttagattcttactccgaaatataggtacacatcctttgctctgtgcagagggaattacatcctttttcctctccta

SEQ ID NO: 330587 - DNA, 122 bp, Homo sapiens
ttgacacagagcaccgggcgctgcagcctccatcagtaccgaccctgcagccctggcacccggacagcaccgcataaaccaaagtgtcgtaaggctcaatcgggaggggaaggaggaacctg

SEQ ID NO: 330588 - DNA, 122 bp, Homo sapiens
aataagaaatgtatttaaaggggaaaagatttcaagaatgatttccagttgtatttaaagcggaaactcctaatcataacacgatgccactaaggtgagaagcgcgacacccaccaccacca

SEQ ID NO: 330589 - DNA, 122 bp, Homo sapiens
aggcgcagaaccccggagcttgcagcctagcgcgcggggtcccagcggagcgcgaggacgcgagcggagccctcccggttacctgtgctgcttccgccctggctgcccctgtcccgagggaa

SEQ ID NO: 330590 - DNA, 122 bp, Homo sapiens
cttgccaatgacccgtttgttatgatcaacgttggatactcggcctactgttgctacgcacgtttccagcacctgacagagaaaacagatggagattctgtacaatgggggggaaagagctt

SEQ ID NO: 330591 - DNA, 122 bp, Homo sapiens
tctttccaaccctgactctgccccacagcctgaaggcctcacatgcacacatgtgaataccgtagcctgcacatcccagctttgtccacatgctctgcaaacagctgaatcttggccccctt

SEQ ID NO: 330592 - DNA, 122 bp, Homo sapiens
cggcagcggcgcgtcctgcctgcagagagccaggccggagaagccgagcggcgcagaggacgccagggcgcgcgccgcagccacccaccctccggaccgcggcagctgctgacccgccatcg

SEQ ID NO: 330593 - DNA, 122 bp, Homo sapiens
gtttctaaagccgtgtttgggccgaggcatcacacaagagggtgtccctaagatgcatcacgtccgtggagaaaacaaagcaggacacacgtgtgagtcgtcacacccttggtcacccggct

SEQ ID NO: 330594 - DNA, 122 bp, Homo sapiens
ccgggtgagcagcctgggcactgtcccaaggcagggaacgaggaggcaacattccctgcacgggaagggaaccttcctatatggcagtgcacgctcactgtcttgtcaacttcctcacacct

SEQ ID NO: 330595 - DNA, 122 bp, Homo sapiens
cagctcccgcgcaggtcagacggctcccgggcaggtcaggcggctcccgggcaggtcaggcggctcccgagcaggttgctcccacgcaggtcgctcccacgcaggtcaggcggctcccgcgc

SEQ ID NO: 330596 - DNA, 122 bp, Homo sapiens
tcatcttgcggtgatcagtgttccttccagacctctcagtccggactgagttgggcaccgcgtcagcgtctcccggccaggctcgccgccgatgactccgctcggcctagggaggcggccga

SEQ ID NO: 330597 - DNA, 122 bp, Homo sapiens
tgcgcagcgagctctcctccgggctgccgggagtcccaggagcgttagggggtgcgcctgcgcgccgctgctccagcgcatccgggctggagctcgcccgccccctcccccgcccggagccg

SEQ ID NO: 330598 - DNA, 122 bp, Homo sapiens
cggcgcacgaagtccggtagctgcagaggggggccccgcgcgcgctccacgcggccccagcgcagctcggtttgcaggctcccgccctccggccacggcgcccagctctcggccaccgccgc

SEQ ID NO: 330599 - DNA, 122 bp, Homo sapiens
tcacagctgcactgccatttaatctaacgccaccttctacggaccagagcaggtgctctgcggcctccgtcaccaacaactgcaacacacctttgctctgtgtaactgctggaaggaggctg

SEQ ID NO: 330600 - DNA, 122 bp, Homo sapiens
aaggacggcggcgtgagggggcggggcgcgcagcgcgagaaggcaggcacgaggggcgagcgcgaggcggggcacggcgcgtggcgtgagacggggcggggcgcgcgtatcggcgccgcggc

SEQ ID NO: 330601 - DNA, 122 bp, Homo sapiens
aaagctcggtcgcagccagtcctgggggtccctctggaggtgccacaaggttctgggccgcggggaaagtgcaggaggcccgggccctctctgggtgtcccgggggcacgcagtactcaccc

SEQ ID NO: 330602 - DNA, 122 bp, Homo sapiens
cccacccatcattctcagaaaatcagatttcagagtctcaacagcaagtcatcagccgaacgagattccatgtaagtcatcacaaacacaggcctaaaaaggcactttttcctaccctatat

SEQ ID NO: 330603 - DNA, 122 bp, Homo sapiens
aggaggcagagagggtctgtccttcaccaccggggctcgcctttcacgtccttcacggggcgtagggaggagggttgcaactcctgtggtttccagaagcccagccctgagccctgtagccc

SEQ ID NO: 330604 - DNA, 122 bp, Homo sapiens
atacttactcttttttgtgtctgtttgctaggtgtctgcagatggctctgtgctgccacccggcacatctatgaacagggaagaatgatagaaccttaccttgcattggatgaccagcacgc

SEQ ID NO: 330605 - DNA, 122 bp, Homo sapiens
cacctactggtttaagagatttaaatttattagagattcatgatcaatttctttccacctcgaaatcaaggtgtaaaaaccagctattaagtgcattccaaacttctcctatgtagcacagg

SEQ ID NO: 330606 - DNA, 122 bp, Homo sapiens
gggagcgcgggggctgtgagtccgctctggggcggagcttgggactcccgcccaggttgccggggggagggaggtgcagcggcgcggggtgggagagcagggagacagtgacattgaggagg

SEQ ID NO: 330607 - DNA, 122 bp, Homo sapiens
aactccttagttgttagaaattcctcaagagaatattccctcacaaagctcaatttgtgccgtatcttccaggtatatatttgagtgtatgcaattcttttttaaccttttcagctttctaa

SEQ ID NO: 330608 - DNA, 122 bp, Homo sapiens
aggttgtgggaagcagagaggtgtgaggatgaccctgttgacggtctaggtggactcctccgtgagaatcagctagcgcctggctgtagatgtggtttctagattaaaacaatctgtggaaa

SEQ ID NO: 330609 - DNA, 122 bp, Homo sapiens
ggctcctgtgctgcacacagcctcctcatcaccacagaaggaaagctgtggagctggggtcgaaatgagaaggcgcagctgggacatggtgacaccaagagagtagaagcccccagactcac

SEQ ID NO: 330610 - DNA, 122 bp, Homo sapiens
gtagagtagaccaagtgcaacaggcacctggctgcagccaggaaggaccgcacgccctttcgcgcaggagagtggaaggagggagctgtttgccagcaccgaggtcttgcggcacaggcaac

SEQ ID NO: 330611 - DNA, 122 bp, Homo sapiens
ggtgccccagccgtccactgaggccgcgtggttcaaggaggagacgcggttgtgggcgagcgccaagtacggcatcgaggaggagggcaccgagcgccgcctgaccgtgcgcaatgtctcgg

SEQ ID NO: 330612 - DNA, 122 bp, Homo sapiens
aaggccgggcgcagcccaggagaccgggagtcgcggcccgcgcggttccgccctcggcttcgactttagctgcctccagagggaacaggcctggtgtagcgaaacctggtatgtgagaaatg

SEQ ID NO: 330613 - DNA, 122 bp, Homo sapiens
tacttttagtagagatggggtttcaccgtcatggccaggctcatcttgaacacctgacctcgtgatccatgcaccagggcctcccaaaatgcttgtattataggggtgagccactgacccag

SEQ ID NO: 330614 - DNA, 122 bp, Homo sapiens
gtccccggatctcccaccagggccaggacctccctgtggtctctcggtgcaggtggaggacgccatgctggacacctacgacctggtatatgagcaggcgatgaaaggtacgtcccacgtcc

SEQ ID NO: 330615 - DNA, 122 bp, Homo sapiens
aaccatcacactctggcgtctgctctggcccgcgagtagtgtacgtggaggggtttactccggagacagttttgttaaagtcataaaagttttgctagtgtgtttctgtttgccatcatctg

SEQ ID NO: 330616 - DNA, 122 bp, Homo sapiens
ttttacgtgcacggaaatagcctaagtccagatgccagccagggaagccactccgggccccgctgactaagccctggactgatggtctggagtctttaggccgggtcaactatgactcttga

SEQ ID NO: 330617 - DNA, 122 bp, Homo sapiens
cagagatatttccttttgttatacacaatgttaaggcattaagtataatagtaaaaattgcggagaagaaaaaaaaagaaagcaagaattaaacaaaagaaaacaattgttatgaacagcaa

SEQ ID NO: 330618 - DNA, 122 bp, Homo sapiens
ccgaggggtgagcggggctaggggccccgggccgccggcggggcaaacgcggttcagaaacgcaggccgcgctctggcccgccccctgcagcagcacggcctgctcgccatcgcccggagag

SEQ ID NO: 330619 - DNA, 122 bp, Homo sapiens
cagatcttcacagatccgtggtgtatctccatcaacagaattaaacaaggcagtctgttccgagtgggcagcaacattgctgaccaggctggcagacaggaggatgtcaagaagatacattt

SEQ ID NO: 330620 - DNA, 122 bp, Homo sapiens
gcagtcaccgccggcgggggatggggctgcccaggaggcgcgccgagcccgcagggggagcgcggagccggcgcgcagcctgagagcccgagcagcccgcgccgggccggtccgtgcgcacc

SEQ ID NO: 330621 - DNA, 122 bp, Homo sapiens
tgaacagagcgttcacaaaccatacgtgtaccactagcttaactcgcaatgtgaacacaccggtgtcaccagcacccagaggtcccctggattcctccatcgcaccacacccctcatgtgaa

SEQ ID NO: 330622 - DNA, 122 bp, Homo sapiens
agaccagcctagggtaacagaaatcccactcatctttacccccaaaaaattagccaggtgcgatggcataagcctgtatggtagaggctgtggcaggattccctgagccctggagttcaagg

SEQ ID NO: 330623 - DNA, 122 bp, Homo sapiens
gaggcaaaaggggttttggggaaactgtttgttttaaagggggggtttctaggccgaccgcgttgcctttcacctcattgcagttttgggttttgtgcacgttttggggtgatgttgctgga

SEQ ID NO: 330624 - DNA, 122 bp, Homo sapiens
ttcagtgaatcagttactactggcaagaagcaatacgtcatggagattaagggtatgagacgtgaagttaaatttcctgggtttgtatgttaactcaactaaattatgaactgtgtgaccat

SEQ ID NO: 330625 - DNA, 122 bp, Homo sapiens
gccgctgggagggcggggtgggtggctggaggtaaggaggcgcacagcaggggtaagcgccgccgtcgcacactttgcacgccgcccagggctacaccactcaccgaaaattgggaggcagg

SEQ ID NO: 330626 - DNA, 122 bp, Homo sapiens
tcttgcaagaggtctctgtgtgtgctgaggcaaggggacgccaggcaggctgacggtatacgcccgccttgtgttagtctggggccaggtcaccggcaatgtcttcaagaaccagaaggtgg

SEQ ID NO: 330627 - DNA, 122 bp, Homo sapiens
tgttcctcctggggttttcttagagctggcaaaatgccaaagcccttaggcatttagcagcgagcaggagattttcaatcttaagattcttgagcatgcccatgtacataacctcttgtctc

SEQ ID NO: 330628 - DNA, 122 bp, Homo sapiens
ggcttggctagaccctgacagttttgtcaaagcagggaggatttcagagagaagggaagccgggctggagggtgtccatgatgactatgggctttccaatgttttctactcctaagagattt

SEQ ID NO: 330629 - DNA, 122 bp, Homo sapiens
ctgcctccccaccaagtaccaagtgagcgcgcggcagggggcaaggggcgcgacgccgcccggcaccgagccaccccttacctggttggaaggggtttcccaggaggagccgtagttgtaaa

SEQ ID NO: 330630 - DNA, 122 bp, Homo sapiens
agctaacaccgtccatcttagggagaccatgataaatattttcaaacgttggtgaaaccccgtctctacttaaaacacacacacacacacacacacacacacacacacacacacacacacac

SEQ ID NO: 330631 - DNA, 122 bp, Homo sapiens
tacacagaacaggagtcacactctgcggcctgccgaccctgcggagagaccagcggcccacgatgcccgttccctgctcctagcctgcccactcccttgggggccccccagcaggccctcag

SEQ ID NO: 330632 - DNA, 122 bp, Homo sapiens
ctcgctggtcccgcgtggtttctgtgagagcggcctccctgcagaaggactgggtgtcggcgggtttggagcatctagtgtcatttaggccgcgccaggggcgggttcaagggcgaatgggg

SEQ ID NO: 330633 - DNA, 122 bp, Homo sapiens
acaggctggaccggttcaagttcccagccagaccaggggtgggggtggcgagtgtgcgcgcgcggaggagggcgcggggggccgggaatgggcgcgctgtgggggcccgcgccacggcgggc

SEQ ID NO: 330634 - DNA, 122 bp, Homo sapiens
agggggcgtagcgcaagcagtgcctgcctgcggcgccagggtgcagagcgggcacagtcgcgggacagtttgtttgtttatttgggaagcgggagccaggtgaaactgttgcaaggctctga

SEQ ID NO: 330635 - DNA, 122 bp, Homo sapiens
ccgtggacccagatttctcaggtcttaacacgttccctgaggcctaaaggtgcccagggccgagcccaaagtgcttgggtcagggctcggtggagcgccgaggtgagtctgaactcccagcc

SEQ ID NO: 330636 - DNA, 122 bp, Homo sapiens
gtttgtgtgaaataggcggattgtctgggctccgatgtgtgggaagtgagtttccttccacgtgcaatgaggcagcccccttttctgtgaggaatgcattttctgggaactttgctgcaatg

SEQ ID NO: 330637 - DNA, 122 bp, Homo sapiens
cggcccaggcacttaagctaaggcctagacaatgtggctctgagacgtcatcctcagtgacgggggaagagtcagagaggagagtggccatggcacctgggctgcatgaccccttgggccat

SEQ ID NO: 330638 - DNA, 122 bp, Homo sapiens
cggggagaataccaagcatgcggaaggtacccggcacccttctgttcctggtgtggctggcgctacatgatgaggatgcgaaacccaagccaacccgagaaacttcccgagccccgcccggc

SEQ ID NO: 330639 - DNA, 122 bp, Homo sapiens
aagcccaggcgctccccgcgggggaaatgggtcagttggcggctcatggctcgcaagtaccggtgctggccgcgcgggaggcagaaggggcgcaaacagccgctgcgttctcggcccagctc

SEQ ID NO: 330640 - DNA, 122 bp, Homo sapiens
caggagtgtcgcgggcagcctgtaaagccccagcatttggagcagggtgactgtgtttctcgtggatggcccaacaagcgaaaacggtgccgagaggcagggtaagcgggccacaggcactc

SEQ ID NO: 330641 - DNA, 122 bp, Homo sapiens
ggtagactgcaggagaggggccagcttagggaaaatcgagtagatcagttctctgtgggccgtggtgagatgcccattaggccactcaggggagatgtcaggtgggcaatcagatatgagac

SEQ ID NO: 330642 - DNA, 122 bp, Homo sapiens
tatttgtttggcaataccagcgctatccgctaggtgccggcgcttgctgagtctcagcgccgccagattcttgctagcgaggtccagagcagtgcagagacctagcggacagttttccggtg

SEQ ID NO: 330643 - DNA, 122 bp, Homo sapiens
cgtcgcaggcctcggggccatgctcctctttgctctcggcctcggcgtcgctctcaccctcgctgggacataaatctaccacaggcgaaggaaaaaaccaaggcagaagggcgttatctcca

SEQ ID NO: 330644 - DNA, 122 bp, Homo sapiens
ccatatgggtcccaagactgtaaggataagtacatagtaatgcactttaaagctgttctacgtgtcctggggaagattgtagtgagattctttccagcgagctgccagaaatggggtttctg

SEQ ID NO: 330645 - DNA, 122 bp, Homo sapiens
atgacccgtggcgacgtgagcactggctgttggaaaagtggcatcgacagacttgctccacgaggcggccgcacccccagtgtgtgaaacacccacaggtgactgcagtgagcgaggctggc

SEQ ID NO: 330646 - DNA, 122 bp, Homo sapiens
gaccaggctgtggccgctacttcggtgggggacagcagcggcggcgggaggggcagcagccgggggaagtcccaccactaccaccacggaggaggaggaggaggaggaggacgaggacgacg

SEQ ID NO: 330647 - DNA, 122 bp, Homo sapiens
atggaaaacaacctgtctggatttcctctgctcattctgtagcaccatctgtccccacaccggcacgaggcagcaaggaatgggaaagattcaggtgctctgagttggcaaggaggggctgg

SEQ ID NO: 330648 - DNA, 122 bp, Homo sapiens
ctgggttcagggggcgcatttcttgcgggccaggagccccccacccagagcctcgagtcacggaaaccactcacagagactggcttttgttgtttgtttagtggaacactcaaatcaaaaac

SEQ ID NO: 330649 - DNA, 122 bp, Homo sapiens
tcgcccgcgtcactctgaggtaacagcctttctcttcaatcgcttcatggaactccaggacgccaagcctcttccactacgggtcgaaggatgggtcacgtcacattgcgcgaacaaggatg

SEQ ID NO: 330650 - DNA, 122 bp, Homo sapiens
cctcgggtgccgatcacacttgctatgaaagtggccacataccaaatcatagtactaccgcgccagcccggagcctcatcctatcgcaaagtgctcccgcgcccgcacgcgcctcgcgcccg

SEQ ID NO: 330651 - DNA, 122 bp, Homo sapiens
gcagcctagcccagcacctcccgccgtctcaggctcggaggagctctgtacctggctccgcgctgacccctccacctggctgaaggcagcagccctgggagactctggcactctgggccgga

SEQ ID NO: 330652 - DNA, 122 bp, Homo sapiens
caggagccccttccccaacctgaagccctggagatggcctggctggaggggacgacggcccgcagcggggacccgactcacttcttcgtccccacctgccctggggtccgaagggagccgcg

SEQ ID NO: 330653 - DNA, 122 bp, Homo sapiens
ccgcgcgtgagttcagacacccagcacacgcgacccccgcagggaaaccccgggaagctgcgcgcaatcgctggggactcgccagggctccacttcccaagctccgcgccccctgcgcccaa

SEQ ID NO: 330654 - DNA, 122 bp, Homo sapiens
cttgatagttttttcctctacaaaatgttgtcactgctgccgctcgttgttcccactaggcggcactctaagctcatcgtcaatgcgaggaccgagcacctgctaaaatctgcggcaggcat

SEQ ID NO: 330655 - DNA, 122 bp, Homo sapiens
ctgtttctctttggaacagaatctaagtttgccctttggcattgtgaaatttcacaacgacgtgccttagcatgacttttacacagtcactctgttgtgcactttctgagttcactaaatct

SEQ ID NO: 330656 - DNA, 122 bp, Homo sapiens
ctgtagcgtggcaacttctggctcatagcatagggcctagtacacagtaggtagttaaaacggccgcaatgatactggtttctcccactatcatcacaagttattccctccggccgacccat

SEQ ID NO: 330657 - DNA, 122 bp, Homo sapiens
cagtcccatagtgtcagggttctaagatgctccaatggtttaggcactggtcttaattttcgttttttcgctctctttgagaccttaacaaactctatagggctgggcacaatggctcacgt

SEQ ID NO: 330658 - DNA, 122 bp, Homo sapiens
gaagcatgcactgcaaactccacagtctcagcgcttatgacctgcttcggcccgggatcacgaaaggtttgggccgaatattatgcttgtgttcaaagtagttcccgtcctgtgaaaacaaa

SEQ ID NO: 330659 - DNA, 122 bp, Homo sapiens
ttgcaggagccacacacaggcgtgtgcacgtgtgtggggcaggggccatccccagtggcacgtaggtgtgtgcaccggcacggggcaggggccatccccagtggcacgtgtgtgtgtgcaca

SEQ ID NO: 330660 - DNA, 122 bp, Homo sapiens
ggacccttctgacatgtcctgcatggggtgtgggtcggtggcggccactgcgggtcggaacgctctgggagggtgctccctggagttcacagccggcattgcctgagggggaattgccaagg

SEQ ID NO: 330661 - DNA, 122 bp, Homo sapiens
tggcgctagctcggaagctgccgaggtgctaggagttgccgaagcaagtccggaagctaccgagcgagtccggaagttgccgaaagggagcagcggggaaggaggatggcggatatcatcgc

SEQ ID NO: 330662 - DNA, 122 bp, Homo sapiens
gggctgagcctaagtcacaggcagaaaaaagacgcagaaacattggaataacgctccacacgcactgcttgattctgcgctagaaaccctgttatctccgaactgttggtgttattctgagt

SEQ ID NO: 330663 - DNA, 122 bp, Homo sapiens
aattcagcatcaggagtgttaacgtgtgaagacgtgattccgcttggagtgtcttgaggacggccccaatcggtagttcatatttagctttacagataggagtcaataggattgtaaacttc

SEQ ID NO: 330664 - DNA, 122 bp, Homo sapiens
tccggcggacttggcctttgcggtgcgagctctgtgctgcaaaagggctcttcgagctcgcgccctggccgcggctgccgccgacccggaaggtcccgaggggggctgcagcctggcctggc

SEQ ID NO: 330665 - DNA, 122 bp, Homo sapiens
tctggcacagcggcaccaccaggctctggggctcggcttcatttcgccttaaacagggaccgtggactcctcagggcgggccgcggcaggtgatggcagagggtgaggcctaggagggctgg

SEQ ID NO: 330666 - DNA, 122 bp, Homo sapiens
gaggggagagagcgagccagcaagccagcgagcctgcagctggagtcagcagggaggtcccgcaggcaatgccgcctttggtgaagaggcatctcggtgtgttcttgcccgtgctgatgttt

SEQ ID NO: 330667 - DNA, 122 bp, Homo sapiens
atctatgagccctgtatgtcccttggatgtgtcttctgtgtccttgacttgcagagtgagcgagatctaaagatccagtgacacagcccttttgccccggtgcagaggagggacaagtggaa

SEQ ID NO: 330668 - DNA, 122 bp, Homo sapiens
ccgtcaggctctgagctgcaaacttgcagaagggcactcaggtcgtgatcaatttgttagcgatagccgccataaatacttgattccccatctggctggacagctccgagggcgctgacgtt

SEQ ID NO: 330669 - DNA, 122 bp, Homo sapiens
ggggaagcaaggatatcttactcctcatctcaaaagtaaccaaatgttctgcagttgcttcgcaaacttccatgtacttcccactgggtcctcacagcctccaaaatgagaaaaccttttga

SEQ ID NO: 330670 - DNA, 122 bp, Homo sapiens
aaacaaatgttggctcttctttttctatcataagatcctgctgtttctttattcattatgcgcaatgcaaagatgagaaaataacaactaaagaaaaccacattttatacatagagcactac

SEQ ID NO: 330671 - DNA, 122 bp, Homo sapiens
gagagagtgatagatgttcaaagacagagatacaaagtcgagcatggttgtagagataggcgtgtacaaattaccatgggcagtgtggaaacatatcagacagagtgacataggtggagtca

SEQ ID NO: 330672 - DNA, 122 bp, Homo sapiens
tcgagatcagcctggccaacatggccaaaccctgtctctactaaaaatacaaaaattagccgggcatggtgtctttgcacgcctataatcccagctatcccttgaacctaggagttggaagt

SEQ ID NO: 330673 - DNA, 122 bp, Homo sapiens
cggctcgcggcgcagggaactccccgccttataaccgcgcggacggcgcccgcctcgcctcgcctgcccccccgcccccggccaggccccggcccccaaggctggctgaccccccgcgtccg

SEQ ID NO: 330674 - DNA, 122 bp, Homo sapiens
ccgcgcccgcgccgagctggttctgcttgtgtaaatcctccagggccttgacgaagccctcggcgaactcctgctcctcgctggccgccaccttggggtagaggaactgtgagctcgtcggc

SEQ ID NO: 330675 - DNA, 122 bp, Homo sapiens
ggataagctcactggaaacgacttccagcaaccgagagggcccggggcctgcagcagcctcgtagtcctgcagtcggggagaggaacatcgcaaagacacgctcatgacagagaacagggaa

SEQ ID NO: 330676 - DNA, 122 bp, Homo sapiens
ttgttgtcatgggagcgaggatgtgatctatatgctgcacctgcggctctcctgctcatgcgcactgactgcacccgctgttcccctgcccatgcgcactgactgcacccgctgttcccctg

SEQ ID NO: 330677 - DNA, 122 bp, Homo sapiens
cgattcacgcccccttccggcgcctagagcaccgctgccgccatgttgagggggggaccgcgaccagctgggcccctggctcagggaggggccacgtcagtgctgccagagacgtcacaatg

SEQ ID NO: 330678 - DNA, 122 bp, Homo sapiens
agggcaaccccatcccactgcctgtgtctgttgagccctggcctagggcctgagaccccacggggagagggagggcaatgggatcagggctccctgccttggcagggcccagacccctagtc

SEQ ID NO: 330679 - DNA, 122 bp, Homo sapiens
ctggcaggactgtggtggcgagggcagcggcagcctttaaatactggctgtggtctcccgcgtgcccactgcgttcttggtcacccagggcaacagccaattggggtcgaaatcgtcctccc

SEQ ID NO: 330680 - DNA, 122 bp, Homo sapiens
acttggcaggccgaggtccctgcttccctctgccagttcctgccaaagctaatctccctgcggcctgttcctggcagtggttgcacgtgggtatctctgctgggcaggcctgcttccatcac

SEQ ID NO: 330681 - DNA, 122 bp, Homo sapiens
tggcgtcgcccagagggagcgactagacgaacagtccggtgagggcggcgagaggaagcccgctacgagtgccctagctccccgccgctctcgatgaaccggacggaataagccgcgcctcc

SEQ ID NO: 330682 - DNA, 122 bp, Homo sapiens
ggcaagtgtatatctcttgaccctggggacctgaagactccagtttaaaaataatctgggcgaggtggggtggctcatgcctgtaatccaagcactctgggaggccgagcaggaggacccct

SEQ ID NO: 330683 - DNA, 122 bp, Homo sapiens
acgctatcatcaccaactacttgttgaactatgtcctgggtcttgaccttgaaggatggacgcgtttgggttgaaagccgccacgcagggtggaaccgatcgcaaccgagccctgagctagc

SEQ ID NO: 330684 - DNA, 122 bp, Homo sapiens
cacatacataaacgcatgcgtgcgtaaacatgtctacgtttctgagtaaccacgcgcatgcgtataggcaaagacatgcgtgtgtgcgtaaacatgtctgcgtttctgagtaaccacgtgca

SEQ ID NO: 330685 - DNA, 122 bp, Homo sapiens
cgcgatctttgccttccggactcgcagaccggctcaaagcctcccctcagcctctggctccgtgattggcaggcagctgacagaagaaaagttaaaaggttatttctgaagaagagtttcct

SEQ ID NO: 330686 - DNA, 122 bp, Homo sapiens
cagtcccaagtgtcacagccccaccttgcgcagaagccccaggcagccctagggagggtgcgtctacatttttgcttggcctctgcgctccctattcccgccactctctccaggcctcgaag

SEQ ID NO: 330687 - DNA, 122 bp, Homo sapiens
ctatgaaatcagtgtattgtgtgcatcaatgtggtgcagtaacttagtaaggactcacagcgccgctgttcaccaaccagggaaaaatggtgcgagagatcccacagaaaccaccgagtttt

SEQ ID NO: 330688 - DNA, 122 bp, Homo sapiens
ttccatgcagccataagagctccaaatgcccagcttggcaacagctatccatccaccttccgcagacctcaggtcccttgtctgcaccttccctaggtctcaccttgattctgttatgccca

SEQ ID NO: 330689 - DNA, 122 bp, Homo sapiens
atctctgcctccaagagtggtggcaagtgaagtgttctcagcattggttttacagttgctcgctaacttccaggaaagctttggggtgtttccaacacttttgaccggcagggggcgctcat

SEQ ID NO: 330690 - DNA, 122 bp, Homo sapiens
gggcggggcacgagcccggggcaggtcgggaggagggcccagttggcacggtagggcttccgcccggggctgcttccggcctcggccccgcttcgatgggcgtggcagagcgcaaagccgca

SEQ ID NO: 330691 - DNA, 122 bp, Homo sapiens
gacatctttcattagccctactcaaaaatggcggcaacgtaagtatcctgggccggaggtcggttgtaacccggaagtgcctttgtaaaggagggggtggttagacaatccggaagtggatg

SEQ ID NO: 330692 - DNA, 122 bp, Homo sapiens
gctttagatctggctgcgctctcagatgtgacttgtacaaaatgaattctagacttttctcgcatcaagaaagtgaagtggggccttccggtaacttgaacagactttaccccgggaatccc

SEQ ID NO: 330693 - DNA, 122 bp, Homo sapiens
agcgcaacgcactggtgaccagactgtccccacgccgggaaccaagcaggagacgacaggcgagagaggagccagacagaccctgaaaagaaggacgggttggggccgggcacattgggggt

SEQ ID NO: 330694 - DNA, 122 bp, Homo sapiens
cggaagttccggtctcatgctccctcagcagcacctccatgaacactccgcacacacccgcggaccccaccctaggtagctggtaaggatggagaggtcagagtctcccccaggggtcaggg

SEQ ID NO: 330695 - DNA, 122 bp, Homo sapiens
aaatagtatatagaacactaggctgttcgagtatgagagtcacgtggctctgcagcgtgacggcgattgtcaacgtgggttcaggatcacgtaacagactacacagccagcccgttaactaa

SEQ ID NO: 330696 - DNA, 122 bp, Homo sapiens
gttccattgttctgaaaactacatatgtgtaaagtccccaataacagcacctggcacaagcgcctgacactacccagccagaagggcccccagggaccctaccagaggccggtgctccctgc

SEQ ID NO: 330697 - DNA, 122 bp, Homo sapiens
ccgtccctccgccggccggggtcccctcgctccgcgggcggccgtgggaggccctcgcgacggcctctgccccccgcagatgccctctgcagctcctgcgtgcgggccccgccctgcactgc

SEQ ID NO: 330698 - DNA, 122 bp, Homo sapiens
agatggccccaaagttcagttcctgaattgcctcgcggagccgcgggctgcaacgtgaggcggccgctgccagtcgactcaaccaccggagtggcccctgcagttggatagcaacgagaatc

SEQ ID NO: 330699 - DNA, 122 bp, Homo sapiens
cggcgggcggcggggcttgtccagcatccttcgcctccttccgcggacacttgtcttccacgctctgatgcccaggcgcgctccagaactctatcggctttggcgtattatcctacatccct

SEQ ID NO: 330700 - DNA, 122 bp, Homo sapiens
ctaggtcctgcagccagagcagcagcaaatgccccaggagacggtcctttcaacttcctgcgcccctcggctctctgacaggcccaggccaggccttattatccctcagtgtggagcccagt

SEQ ID NO: 330701 - DNA, 122 bp, Homo sapiens
gcgtttacaggaaagccttctaacgcctctgttatcagcgcatgacggcagacgaggagccgccatgctggtgtcacttggtgtggtgcgctggctcccgctccctcgttacaaatccggaa

SEQ ID NO: 330702 - DNA, 122 bp, Homo sapiens
ctggacttcggccccattccattgggtgagggtgggggcacgaaaagaggagcgggcttgcggccccaccgtgtcccgcctcctcagtccccagcgactcgcaggggctggtggggctgggg

SEQ ID NO: 330703 - DNA, 122 bp, Homo sapiens
ggtctccctggttcgcacatggcccctccctgtatccctactccaacactcacacagacacgcgccacagagacaatgaactctgctgaggacccatgaataggccccttgttgcaggaaag

SEQ ID NO: 330704 - DNA, 122 bp, Homo sapiens
gtggacaccggccccttcacccttctccagcttcttagcaggagagccaggcagccaggccgtgtgggggtctggggaactcacccctgtcatgcctgccccagggattttggacaagtcac

SEQ ID NO: 330705 - DNA, 122 bp, Homo sapiens
actgtagcctggggctctcgctcccatgggactcctcggggaatttctcagcagcaggatcgcctctgcgtccttgcagggggtggcgtctgctgggggcacatcccatcgtgcagggggaa

SEQ ID NO: 330706 - DNA, 122 bp, Homo sapiens
acttcactgctttaaaaaatattgtgcaggctttggtacaatcattttccaactcaagtgcgaaaggagacaggtgtagggaggcagaagaatgttctgaggaaatatgggtgggggagaca

SEQ ID NO: 330707 - DNA, 122 bp, Homo sapiens
taaagcttcaatgccttgaggggcttggcagggctcgggctcatcccggagaagcagccccgctttccagactagcagttcccagggatgggtgtgtgctaatcgcaggccaacaagcccag

SEQ ID NO: 330708 - DNA, 122 bp, Homo sapiens
aatctattaatgccacacatatctaaaccgctccaggtctgcaagcagcgacacagcacacgcagtgcgccctggctagaccaagccctagccaaacacagctcattcacgcagacaaatac

SEQ ID NO: 330709 - DNA, 122 bp, Homo sapiens
gtgtcatgcagcggaggcctcttgggcagtggaggtgctcttaaagcctgcagcatggcacggcctgggcatttatcccaagcccaatgaactacctgccctgtccttccagggttcggtgg

SEQ ID NO: 330710 - DNA, 122 bp, Homo sapiens
acccgtggaaaaccaattaactgtgctcctcggtttaccctggaggatggtggcggatgacgcgactaagtttgctttgagcctgcttcaagttccaacttccttggagttagtcgcattta

SEQ ID NO: 330711 - DNA, 122 bp, Homo sapiens
agggaattctgatgcccgctgaagtttgagaactagaggtaaactatacctttctgcaggcgagaacctggaccaaggagggagtggggaaatgaggaaaaaaggaaagagaaaaaaaaatg

SEQ ID NO: 330712 - DNA, 122 bp, Homo sapiens
cactggacaagagctcgtccccagaggccaggccggcctgcaggaggccacactcatcggcggtggctgagaactcggcccagtcctggtcactcagctggacgctgtactggaaattttcc

SEQ ID NO: 330713 - DNA, 122 bp, Homo sapiens
attcacaacgatcttctacacgtgacattatctcacgtgtatcctgtaggctctctgttacggttagctcactagaaagtgacctaagtgagcttagtgtttaatgcagcattactgtgaat

SEQ ID NO: 330714 - DNA, 122 bp, Homo sapiens
aggacgtgctccgcggaggaaactggctgtacgccatgagttttgtccctattcggctgccgtccgggtggggggggggtaatgtgtaagggtgggggtgtttaaagggccgctagcgccgg

SEQ ID NO: 330715 - DNA, 122 bp, Homo sapiens
gtacacagagagacacagacacacatggacacacatacacaattctagatatagagaagccgtgcctgtagcttgcagtgccatgtgtctgcacgcactgcgggtgaggactacaccagctc

SEQ ID NO: 330716 - DNA, 122 bp, Homo sapiens
ccttgtaaatttcccaattatgatgacttttagaggctttctccaggttgaagagctttacggccttagtatttgagtctggaatacaatatgttttcttgaaaattattgtgtgaaattcc

SEQ ID NO: 330717 - DNA, 122 bp, Homo sapiens
cttaagtctgatcaccatttcctcttagtttcagttttgacttttatttgccctgcagcccggtgagggcacagactggttcatgtgctgtgattctccctgagtcatccttgctccctccc

SEQ ID NO: 330718 - DNA, 122 bp, Homo sapiens
ccaagaatgccatctgctttcttgaggcattggttcaatgtttactcagcaaatgtgcatcgtgctcctgccctgcactgggctgagctgggagcaggattagacgctaagacaaagtcatg

SEQ ID NO: 330719 - DNA, 122 bp, Homo sapiens
ttaacagaaagcagcctgagaagcttttatatgtaaatgtcggcagctgtacctgaaacccgggtacattcaatatggggtctcccgccctcttttccttatgaccgcctttgctggcatta

SEQ ID NO: 330720 - DNA, 122 bp, Homo sapiens
gaggtccaaggtccaggccagcagaggagggggctgcacatctgagcattcggtggggggcgttgcacatcccagcactgggtgggaaggcagaactggagcagccgacccgccctggatgt

SEQ ID NO: 330721 - DNA, 122 bp, Homo sapiens
gggatgctgtctgcagaggagccgcagcgcccagagaagccaagtcaccatggagcagttcgcttcggtggctgaagctgctggaccgcgcccggggcagcgggcccccccggtcctgcctc

SEQ ID NO: 330722 - DNA, 122 bp, Homo sapiens
agcaattctcctgcctcagcctcctgaatagctgggattacaggcgcccgccaccacgcccggctaatttggactttcactcttgttggtcactcttgttgatcttttgtaacagacctctc

SEQ ID NO: 330723 - DNA, 122 bp, Homo sapiens
gcgccgacgcccgcggcgagctggacctggagcgcgcacccgcgctgggcggcagcttcgcgggactcgagcccatggggctgctctgggccctggaacccgagaagcctttttggcgcttc

SEQ ID NO: 330724 - DNA, 122 bp, Homo sapiens
ccccagccgctcggctcctccttccctgcacgctccgcccccgacctcccggctcctccccggcctgcccgccacacccttggtccctcctgcaagttccgcccctggcctctgcctccttt

SEQ ID NO: 330725 - DNA, 122 bp, Homo sapiens
gtctgagaagccacctccggcttacctgggacccagccatgagcagggtggctgccatctcgagcacaagggttcgcctccagggagagagagcaggaaaagcagctagcagacagcgctga

SEQ ID NO: 330726 - DNA, 122 bp, Homo sapiens
tgaagatggggaggagtgacaacgggcaagggatgggtgctacacttacagtgagttgggcgataaaaggggtgacataacaggacagggaatatgtgtcatccttgatgggagggaggaga

SEQ ID NO: 330727 - DNA, 122 bp, Homo sapiens
ctcgccgcgaggctcggggttggggggggaccagattggagccgcgggctaactgggatccgtcccatttccctgggcttgacgttctctgaatttttagctaatgtggaaagttacattta

SEQ ID NO: 330728 - DNA, 122 bp, Homo sapiens
agtgaaaaacaggagacctagattccaaatcagtgggaggtttatactacgtgggcctagcgtgtgttggggggaagatggtgcaaagagctctgaacaacagctgcagctgagaaccgtgc

SEQ ID NO: 330729 - DNA, 122 bp, Homo sapiens
cgttgaactcaggagtgagttcatgccggtttttgagccacctctttcctaagaaagctgcggattctgcagcattttgcaaacaggacgccctagtctctctgccaaacaccgagtgtgct

SEQ ID NO: 330730 - DNA, 122 bp, Homo sapiens
ccccccgggcctcagtctccaaatacgccaaacgggcgggagtgagccacaggctgtcttcgcggaagactcacaggcgcaggcgcagacgggtgcgcgcccctagggtgcgcgcgagctaa

SEQ ID NO: 330731 - DNA, 122 bp, Homo sapiens
gttggagggcgtgctaggattgcctccggtggagccccggccccgtttcctccacacgaccgggttcacacctgaacaccccccaggactgcgtcacggacatccccacgccaactcccacg

SEQ ID NO: 330732 - DNA, 122 bp, Homo sapiens
cgtctcgctgctctggtactttgtggtcagtaggagggttcagctgcggtgtctgagctgcggaaaggcaacccagagactcatgtgaaggagcaggggactcaaatgcagtcccccgcaga

SEQ ID NO: 330733 - DNA, 122 bp, Homo sapiens
tggccctacaggatcttcagcagttagcttagaaggcaaagcaacctgatggatatgtgtcgcagtttctctctctgctgcctatcctctctctcagcaggtgccatgattctctgaagtgc

SEQ ID NO: 330734 - DNA, 122 bp, Homo sapiens
agagaaaaacagcaggatttgctgatgagtcagacacgggcaggagagaaaaaaagcagtcggatgactctgaggtgtttagtccagcaacagggagatgaggttaccattcccagagaagc

SEQ ID NO: 330735 - DNA, 122 bp, Homo sapiens
tggcactagaagcctcggagagccccctacaggtgggaggacccaagagtaaagtacttccgcttccttaggtggagctggaaaggtggaggcggaagtgactgatcaattcaggggcgtgg

SEQ ID NO: 330736 - DNA, 122 bp, Homo sapiens
ggtgctaagacagcccgagtcgcggaccagtccaacaggcaggcagatcagtgggcagcccgcgtgcgcgaggaccccgatggcggcgccgggtggcgggaaggaggaagtttcaaagccag

SEQ ID NO: 330737 - DNA, 122 bp, Homo sapiens
gggtgggaggacagcccacctcctccgcacacatatccctcagccacccaccccctgatccgcccagggccgcctccgccccgctttggcccatctgccatcccctggccacctgcgtaccc

SEQ ID NO: 330738 - DNA, 122 bp, Homo sapiens
ggagagggcctggctctcttctcctgctgttcatcctgctttggctgcctggggacagcacgatacgaaaataaagtacaggaaaacccacttggaaaactgagcctggctgcctggcagct

SEQ ID NO: 330739 - DNA, 122 bp, Homo sapiens
cattctcaggggaagaggtgatgggccacaggccttcgtggggtgggaactcaggctccccgtgggccctggacggggtcctcatgtcctgtgctccgtcttggcaggagtaagagttgatg

SEQ ID NO: 330740 - DNA, 122 bp, Homo sapiens
ttcagtaaagggagaggccacctctgtcgtaatcctgctaacctggggtgcgagatcatgcgacctgtcgtggtgggggggcgggggggtgggggcaggaatggccaccaacttctagagac

SEQ ID NO: 330741 - DNA, 122 bp, Homo sapiens
ctgaatgcatgggacggagaatagaaggatggttaccagaggctgggaagagttgcaggacgggcatggttaatgggtataaaactatcgttagaataaataagatctagtatttgatagca

SEQ ID NO: 330742 - DNA, 122 bp, Homo sapiens
gaagcagttaaccgaatacccccttgacatacccctgaacacccggaggctgttcctgaacgagaacagaatcactagtttgccagcaatgcatctaggactcctcagtgaccttgtttatt

SEQ ID NO: 330743 - DNA, 122 bp, Homo sapiens
ttcatctcgcttttcagaaacacaaatgacggatgaagcacacaggccctgaaacccaaacgttaacttggacttagagctgcttgagctagttacttcacatctgtttcaacggagccagt

SEQ ID NO: 330744 - DNA, 122 bp, Homo sapiens
acatcaagtgatccacccacctcagcctcccaaagtgctgggattacagacatgagccaccgagcccggccttcttgcacaaattgatgagggctagataactggggtgcgggttggggagg

SEQ ID NO: 330745 - DNA, 122 bp, Homo sapiens
tggtctcgtcctgctttggcggctcacctcctctccgtgggccgtggcttctgcatgtgccgtggttctgcacagggccctcagtggctgctgtgacaagaatgtgtcccgaggcccttgta

SEQ ID NO: 330746 - DNA, 122 bp, Homo sapiens
cccacacaccgcacaatgttctgatggcgaaacttgctgagtggggtgggggacatatcccgttaccaggagggagacggaaaccatgttttaggctccacaaagctggagaggccctctgt

SEQ ID NO: 330747 - DNA, 122 bp, Homo sapiens
ctcgaggctgccatcaccccttaggccgcacaccctgagacccagcagggtctcaaccagcgactccccagtcagcaaccggccagcgtgcgtcacgtcacgcagacacggcctctgctcca

SEQ ID NO: 330748 - DNA, 122 bp, Homo sapiens
tccaggcacttgatgttccctatatataacacaggagagaatgcttgatctggctagctccgtggataaaacgctgaagggtgtccagtgtatccccatggataagatgctggagggtgtcc

SEQ ID NO: 330749 - DNA, 122 bp, Homo sapiens
gggcggggaggggaactgtctgtccctgatgatggcctgtcagaaccgggccggagcatccgagggcctcccttcgcgccgccctcggccctctggggtcgctcagggaccgtttccacctc

SEQ ID NO: 330750 - DNA, 122 bp, Homo sapiens
ccattacacctaccagcatctaagggtggctcttgggaaataacttattctggggccgggcgcggtgaatcacgcttgtaatcccagcactttggaaggcctaggtgggcggatgacgaggt

SEQ ID NO: 330751 - DNA, 122 bp, Homo sapiens
ggcctagggtagagctgatgggtttcttgactttgcctgtttcccctaacacgctgcactcgttcctgctaggacagtgaggagggcagctgggctcaggtaagactccctaccctgtctag

SEQ ID NO: 330752 - DNA, 122 bp, Homo sapiens
ctatttcagttttgcttttttttcaaagcatagtcctcaggcttcttgcatcaacaccagcgagcccaggaatccttgttaaacctgcagacccacagccccccaaccaggcctgctggagc

SEQ ID NO: 330753 - DNA, 122 bp, Homo sapiens
gtagccgatgaagggcttccaggtcttcttgtcctccttgtagaaccagcgtacctcctccgggcccagctccgtcactacctcatagcggtgccgggccgccgggccgccaagccgggtac

SEQ ID NO: 330754 - DNA, 122 bp, Homo sapiens
cacgccgggccgaggagggctgcgtcatgccgggggcggggcttcggggccggcgcgaggcgcggcggggtcacgcgggtcgctgcgcgggctataagtaggggccggcggggtgctccgct

SEQ ID NO: 330755 - DNA, 122 bp, Homo sapiens
cacagctgcgcgccccgcccggaaaccagctccagtccggcgccggaggcttgggtcactcgccccttacctctgcaggagttccgggctccagtggtccgggtctgtgcagggctggggcg

SEQ ID NO: 330756 - DNA, 122 bp, Homo sapiens
aaggtcctccagctccgcagagaccctcggtccctgccggcgtgacggactctgctcccccgggttggagtcacctcgtccaggccactgcatcccccaagccccagctccgcgtccttcca

SEQ ID NO: 330757 - DNA, 122 bp, Homo sapiens
ggaggggtggggctgccagctccacccggggcccttgcctgccgggggttccgttagcctcgtaagaaaaggcaccggggcccctcgtgcattcagcaaagcgtgaggcccactgcgtcccc

SEQ ID NO: 330758 - DNA, 122 bp, Homo sapiens
tcccgtttggtttttaaattaaatcccaccgtgcttggtctccatcgtggccagttcctacgtgaccgcttttctttgtcaaaaaatagccacaaatataacagggagcaagcctcagctct

SEQ ID NO: 330759 - DNA, 122 bp, Homo sapiens
ctcccacctcagccttccaaataattaagattacaggtgtgagccaccacacctggcctccgtcatctgctagtggttacccagtagtatagtttatataggaaagtcaggataacgcccaa

SEQ ID NO: 330760 - DNA, 122 bp, Homo sapiens
tatgggattccagggtgggtacatctaggaggaagcctggggtcacagtggctcacaagccgtatggggatgggcggagtagggcgtgtggggctgtggagttcaagcgtgtggggatgggc

SEQ ID NO: 330761 - DNA, 122 bp, Homo sapiens
aggttatgagtatagggaccgcccctcggccatgtggtcccctccctatcctgaggataacgacatttgagagaagccaatggtattggaaggccagaatcgaacttaagccgcttagttgg

SEQ ID NO: 330762 - DNA, 122 bp, Homo sapiens
cttacctgcctcctgtttgggtgaaacttggagcatctctattaacttagttggtagctccggtcacctgcagtcaccaggggcccagagggacgcacagagggagaccggctgcctgggtc

SEQ ID NO: 330763 - DNA, 122 bp, Homo sapiens
atactcttttgtccaaactcatacatgtgccctactcaaaaacattatgtaatatgcatacggttactgaattgtaaggctggaatggacctgatcattttatagatggaggtaaattgagg

SEQ ID NO: 330764 - DNA, 122 bp, Homo sapiens
tctactaaaaataaaaaaattagccggatgtggtggcatgtggctgtattcccagctactcgaaagtctgaagaaggagaatcgcttgaacccgggaagtgagaatgcaatgagcggagatc

SEQ ID NO: 330765 - DNA, 122 bp, Homo sapiens
ccagccggcgtggcctgtgacgcctcacgcaggatcgtggtggctgacaaggacaatcatcgcatccagatcttcacgttcgagggccagttcctcctcaagtttggtgagaaaggaaccaa

SEQ ID NO: 330766 - DNA, 122 bp, Homo sapiens
tgaggtcttcccctgtctctgttgtcctccctgtcttcccacttcccccaggctcctcaccgtcctgatgcatgctccaggctgaccctcctcagaaggatgagactccagctgggaaggct

SEQ ID NO: 330767 - DNA, 122 bp, Homo sapiens
catgcctaattatgtctcagtagaagcctaggatgacagcagatctaccctggctgccaccgaggtggaaggctgagagccccctcctgcttaaccccaagatttgtgttagggaaaggtag

SEQ ID NO: 330768 - DNA, 122 bp, Homo sapiens
cagggtcgaactcaccccatcccgcatcccaagtcccctccaggtccgggtttcactcaccgagggcactcagccccaggaacaaaaaccgcagcaagttggtcaccaggggccccgggagg

SEQ ID NO: 330769 - DNA, 122 bp, Homo sapiens
gtgagtggatcctgggaagcgctgtgaaatgggctggtgagtgtccctggaagtggtggccgccggggccaggcaggcctggggtcggtgctccggaggaagtggccctcaggagcccgttg

SEQ ID NO: 330770 - DNA, 122 bp, Homo sapiens
atatttattcaagtgaaatctcatagggaagcccataactcctggatgttttcataattccgctgaaaacctttggtctggcttatgttctttacttttacaaatgaggaaacaaatacaaa

SEQ ID NO: 330771 - DNA, 122 bp, Homo sapiens
ccaggtaaccaccgtcctctgatttgtcttcctatgaatttacatacacgtaggcacatacgcgtttgtataacttaaaaacataaatgtaatcacaaatacacattactctgcaactgtct

SEQ ID NO: 330772 - DNA, 122 bp, Homo sapiens
tggctgcctgcaactcccctgagtgcccccctcgggtacaagcacacccatagcatccaccgcccaaagccaagacagcttcctcctgggaggcgcctggcacccagctcgtcacgctcagc

SEQ ID NO: 330773 - DNA, 122 bp, Homo sapiens
ttgacagaggctatttaagtgcagtggtaagggcagaggacagagtggaaggtagagccacgtgtggaagcacatgcctatagtcccagctactagggagacagaggcaggaggatcacttg

SEQ ID NO: 330774 - DNA, 122 bp, Homo sapiens
gcgccaggcctggcctggtgtaggtaattaggtgaggtgatttctgagattttagttccacgtattcaaagtaactctcatctaactgaaagtggtttccatagaggatttttttctagcct

SEQ ID NO: 330775 - DNA, 122 bp, Homo sapiens
gctgcagggctggcgggacagcagcgtggactcagtctcctagggatttcccaactctcccgcccgcttgctgcatctggacaccctgcctcaggccctcatctccactggtcagcaggtga

SEQ ID NO: 330776 - DNA, 122 bp, Homo sapiens
aaaaccaccggcgccagggcgtttccgcagggtttcccaaaactcaaacgcagcggctcacggtttgccacgtcccccaggagaatggtagacacagagaggaaatgtggagagggcacaaa

SEQ ID NO: 330777 - DNA, 122 bp, Homo sapiens
tttgtcctttacacccaaagatctttcaaagcatctgatcatcaaggtttatattaatagcgacataaaaatcagtctgctgggagccgtacaccacacatttggtatcagcgaagcaggat

SEQ ID NO: 330778 - DNA, 122 bp, Homo sapiens
gacaccagcctaaaggcttagagttgctcccattggccatgcactcaccaaaggtgttcacgtccctcttttggctgttagattggatgggctcaatcttttggccctctgtctctagaata

SEQ ID NO: 330779 - DNA, 122 bp, Homo sapiens
tcaacttggttcagtttaaggttctagacatgtcaatatgaagggtgtatctggggggagcgagaagttcagcagcaagggtatttacagtgccacatgcagtctcattttctcgcagaaat

SEQ ID NO: 330780 - DNA, 122 bp, Homo sapiens
agaaaaggaaggaggtgtcctttcgctgctttccagtttgcagagtctcatttacacgtccggggggaggggaggcgtggtgggcggaggaagaggggacgaggagccgggccccacctcct

SEQ ID NO: 330781 - DNA, 122 bp, Homo sapiens
ccccacacaatgggctccgcggcccgcgccccgcgcccgcgcgccccggccccctccgcgcggcaggtgaaatcacgctcgggtgccaccctgcttttgtctggagagcaactccacttaat

SEQ ID NO: 330782 - DNA, 122 bp, Homo sapiens
tgggctgcttcactccacagcacgcaaccccgtccccctccaccaagctgtccagctctgcggccggcgaccgggccacccgtgccccaaattctcccatcatcacctcaaactgtacctcc

SEQ ID NO: 330783 - DNA, 122 bp, Homo sapiens
caatccccgcacctcgggaggccgaggctggcggatcacttgcagttaggggttggagaccggcctggccaacatagcgaaacccggtctccaccaaaaccagtcaggcgtggcggcgccag

SEQ ID NO: 330784 - DNA, 122 bp, Homo sapiens
tgaggtgctgaagacagctctttcttgagctcaaagcactttagatgaagtagcctttatcgtccatttaatagaggttgcctcctattaccaagcgtggcagagaaaagagtttccacaat

SEQ ID NO: 330785 - DNA, 122 bp, Homo sapiens
gaccttgtgctaagctaagtaagccggctgtgaaagggcaatagtgtaggatcccacttacgggaggtccctagagttatcacatgcatagagacggaaagtagaatggtggctgccggggc

SEQ ID NO: 330786 - DNA, 122 bp, Homo sapiens
actgccctggccaaattcccctcggtctacacatcgtgctgcttgtcggtgacctggcagcgtccgctggtgcctgtcggtgtgctcttctgctcctctgttcctctcaatgtccagccacc

SEQ ID NO: 330787 - DNA, 122 bp, Homo sapiens
gagcggatggcggtgtccctgaggatgactgtgggccgcacgctgcaccaggtctccacccggcctcccgcatcgggctccgtctgcatggctgtgtccgcccgcccccagcctgggccgcg

SEQ ID NO: 330788 - DNA, 122 bp, Homo sapiens
gagttatcctgcctcaccctcctgctgcctggggacaccccccgcgagcttgctcggccccgaagaaggagcagaggggacccgcaatccagcccctagagccccgccaggaaaggcgcgag

SEQ ID NO: 330789 - DNA, 122 bp, Homo sapiens
gtgcagggatccctctggggctagggcagctgtttattcccagagcactgctgccagccacgaggcctaccagtgggatctaggcccgagagccctccatctgacagagctggaggacctgg

SEQ ID NO: 330790 - DNA, 122 bp, Homo sapiens
cagtgaacacctatatacctccgcctaaatcagacaacctagcactttgccatttctgctcgtcactctctccccacctgtagctatgtatacacgtattgtcgttaaactatttcaaagtt

SEQ ID NO: 330791 - DNA, 122 bp, Homo sapiens
cttcctttaatatagtgtcttgtagtattctcctataggagggaagtattattactctatcggatgagtattcctactggaaggatagctgcggcattttaaaaaatcctgcctgtatgtgc

SEQ ID NO: 330792 - DNA, 122 bp, Homo sapiens
ccagaattgctgtcttcctagaaggcaggatggtttcaggccgcccaccgagccagcaggcggagggctggggctgtgtctgggacacaaacggcggggatccctgggagtccactccttct

SEQ ID NO: 330793 - DNA, 122 bp, Homo sapiens
aatcgccccactcttcatgtaacgctgtgaaagaatcctgctcatcagaacgaattctaacgggtcgctgaatgtgaagctcacgtcaccaacaaagcgcggtttcctccctcgccatcctt

SEQ ID NO: 330794 - DNA, 122 bp, Homo sapiens
aaagaggcatctgcacatgcaccatctctggttctctcctccagctcatcccccaacccacgccagtggcttctgcctctgccacctcactgaaggagcttgctccaagtgccctgtgtcac

SEQ ID NO: 330795 - DNA, 122 bp, Homo sapiens
tggaggggcccgcccaggtagggagactttgagggcctcccagtggccaaggacagtggccgcccctcctgccccctgatgtctggcagcctggggctcccggggctgactgggccctctgt

SEQ ID NO: 330796 - DNA, 122 bp, Homo sapiens
gccgcttgggagtggagcccccggcagagctgggggagtaagccccgtgtagcagggagccgctgccagtcgctgttgcgaagcctggtaggtcttggcccagccccaaaccctacaatctg

SEQ ID NO: 330797 - DNA, 122 bp, Homo sapiens
gagtggggcagtagaaggtcggaggcttgggaccgccagatggggcctctgtttcggagacgggaccgggccgctagatgggcatggggtgggcctctggtttggggcgaggcagaggacag

SEQ ID NO: 330798 - DNA, 122 bp, Homo sapiens
ctgactataagatagtttacagatgaggaaagtggtagtctcagaagttaagtaacttgccgaaggttacaaagaactaagtaggagaaccaagttgcaaaccaaggttattgtcaacaaat

SEQ ID NO: 330799 - DNA, 122 bp, Homo sapiens
gctctcaggaatgacctccaccaggccagatcggaggtggaagccaggactcggtagctccgggaggcatgtgtcccctttctgctgggaattttctctttcttgggtaccctgtcactgag

SEQ ID NO: 330800 - DNA, 122 bp, Homo sapiens
tataaattgcaagcatttaggaatagcatttgccaactcccaagacttggctgtccctctcgctctggccttacttacctaactgacctcctgtagtactgagttgtgtgctggccaagttc

SEQ ID NO: 330801 - DNA, 122 bp, Homo sapiens
tggggccctgaggagcgccgacgtaggcagccagccagtcaatcagtcagagggtcacggcggcccctcggctactcagtggcagccaggccagaaagaagcagccgccaaccctggagcag

SEQ ID NO: 330802 - DNA, 122 bp, Homo sapiens
ccaccttccgtggctcagctgagggccactttgtcaaatatctccatcttactcattcctcgccgtggccctctcccaccagggacctcccagatcactctgtcacccccaagactacacat

SEQ ID NO: 330803 - DNA, 122 bp, Homo sapiens
gagggtgtgggccgcgggggcaagatcaggagctttgggttttgaagatgttaggaaagacgtgctgctgactttgcaaacggaggtgctgaaaccgggtgtctggagctcagagaagaggt

SEQ ID NO: 330804 - DNA, 122 bp, Homo sapiens
ctgcgtgcatcaccccccaccaccaccacccagcctgtgtgcgtcccctgagcctgcgtgcgccaccgcccccccgcacccggcctgcgggcaccccccgggcttgcatgccccccacccca

SEQ ID NO: 330805 - DNA, 122 bp, Homo sapiens
agaattgagttacaatcagtgactcaacattttgacttagcagattggcattcctttttacgatgggacaaattctgtaaactgcacatcgtatagatcacacttttcagcaaaatgctcaa

SEQ ID NO: 330806 - DNA, 122 bp, Homo sapiens
tgcgctgcggtgcgagctgggccggcggggtggttcgagagcgcgcagagtccagactggcggcagggcccgaggggccgacccgcagcgtccctggtctctccagccctcactcggaaccg

SEQ ID NO: 330807 - DNA, 122 bp, Homo sapiens
gatcttagccaaaaaaagaaaacagaaaattctgaaattcagttttcattaataggattacgtcatataggtcgggcatggtaggttccacctgcaattccttgggaggccgaggtgggtgg

SEQ ID NO: 330808 - DNA, 122 bp, Homo sapiens
acaaaccaccgagtcaggatccttctctgaaggcttctctgcctactgggcacatagaaacgagtttaaaagctgcagacaattgatttcaagggaagatagctggtgctgaagtgattcca

SEQ ID NO: 330809 - DNA, 122 bp, Homo sapiens
gctgggtgcagtggctcatgcctataatctcagcactttgtgaggctaaggtgggtggatcgcctaagctcagcagtttgagaccaacctggggcaacatggcaaaacgcatctctagtaaa

SEQ ID NO: 330810 - DNA, 122 bp, Homo sapiens
agaactgcctgtccggaagggtgactgcaccagctccgctccggatatcttggcaggacgcgccctctggcggcgcctcgctcataggtgggccccagcgcgcagtcgcccgcccccgcgcg

SEQ ID NO: 330811 - DNA, 122 bp, Homo sapiens
tttgctgagcggcatccaggcctcagggaccaagtgtgtcgcgcggtgccataccgtgaccgggacctgttatttctaatgtccagatattgtaattctatgctgtaactcctatatttcct

SEQ ID NO: 330812 - DNA, 122 bp, Homo sapiens
ctttacccaaggttggtagcatgcctcagcccagtgcataatggtaataacaagaacagccgttccaattttgtgtatgcaagtctgcctaaatctataattttctaaccatccttctatct

SEQ ID NO: 330813 - DNA, 122 bp, Homo sapiens
ctggagaaggaaaaggaacattgctcgatgctcccatctggtggcggcctcaggaacccacgggaacctggaaggaggctctttgtgagacctgggcaaaggatggggcagctcgtcgatga

SEQ ID NO: 330814 - DNA, 122 bp, Homo sapiens
actgtgtggggctggggccaaggtactggggatgaagttgaatgggagagatttgagatgcgatttgggtagaaaagacaagatttactggaaaacagaatatgaggtgggtgagtgggatt

SEQ ID NO: 330815 - DNA, 122 bp, Homo sapiens
gggccgccctctgcgcccggcagtggctccggcccggccgccgcgctgcggagacagctccgggccctctccaggtcctcgtccagagcagctccgccacccgcggccagagacatccggag

SEQ ID NO: 330816 - DNA, 122 bp, Homo sapiens
cgcacagcctccagcagccacggggaggaaaaggcgaatctttcctcacagtgctctgggcgctgtagaatttctacgccacgtgcacccatttggcctcatttgagaggaggagagggaag

SEQ ID NO: 330817 - DNA, 122 bp, Homo sapiens
gggggaccaaatgtcaggaagaaggaggaagaagaggtgagaacaggagctgatgccacacgagggagtcctcagacactaggcgagggcgtttcagttttacccattagacccggaacctg

SEQ ID NO: 330818 - DNA, 122 bp, Homo sapiens
tccaaataagctgaaaataatacactggccagaactagtgctcagaaggcaaatttatatcgagtaattgaaaatgtaataaagaaagaaataattgccataggacacaggtctctctcttt

SEQ ID NO: 330819 - DNA, 122 bp, Homo sapiens
tctcaaggctggcccggggcgaaaagacaagttggcagatctcggctcactcagcgatggcgggaacggtcgaatggaggcctctccctccgagccccggagccaaagcctcgcagtgttta

SEQ ID NO: 330820 - DNA, 122 bp, Homo sapiens
ctactccttgtcctactcctgcttctagtcctatgcctgtgtcttgatcttgagcgggaacgagacctgatccgccgttttctttccctgcttctggatctcgatttcttcctctctctgct

SEQ ID NO: 330821 - DNA, 122 bp, Homo sapiens
caaggaagaccagggggcctcccttcaaaaagcataagcaaccaagcaaactatgatacacgacagaatggtgccaagggagaactgctgagcactgtttcccaatttcctgttacagaaaa

SEQ ID NO: 330822 - DNA, 122 bp, Homo sapiens
cagctcactctcaccacgccgcagctcacactcaccgcacggcagctcacactcaccacacggcagctcactctcaccacacggcagctcacactcaccacacggcagctcactctcaccac

SEQ ID NO: 330823 - DNA, 122 bp, Homo sapiens
atgtgaggcaatcgtggcatggtccagtaatactttttatggcacttcagaatcctcaaccggctcaggaatgccatgcatctgggtgaaaacctcagggaaattctagctgcaaaaacttc

SEQ ID NO: 330824 - DNA, 122 bp, Homo sapiens
ccgctgggaagccgcgggcgtcccagttttgttctgcagcctgagtcccagatgagagcgcgggggatgacggtctcctaccccaggcttccaactccactccattcacccccaggaagggt

SEQ ID NO: 330825 - DNA, 122 bp, Homo sapiens
aagtccagtcataatattgacacaggcagggcacacagcagccgggaagctgggctgttgcgaagttggcgcagggcatgtgagggcaccccaggctccggtgggaggggcctcaggaccgg

SEQ ID NO: 330826 - DNA, 122 bp, Homo sapiens
ttcacgcttgtgcgtgcccactcacataggtagacatgcacgcacatatgtgctcatgcccgcacacatatgtgatacctccccggggtctgcagtgctgctttcctcacgctgaatccctc

SEQ ID NO: 330827 - DNA, 122 bp, Homo sapiens
agtctgcagggttcgggggcaaagggaaaggattaagaaatccgatcaagtgtgaaaatgcgtggtgcatcgagttttggagatcaaataccagctttgcaaacaggatacggccaggtcag

SEQ ID NO: 330828 - DNA, 122 bp, Homo sapiens
ctcaagcaattctcctgcctcagcctcccaaagtgcttggattacaggcatgagccaccacgcccggccagacttagaatttaaatcgagctctgctagatgcaaaagccccagctttaaca

SEQ ID NO: 330829 - DNA, 122 bp, Homo sapiens
gtccacggcacggaaaggagattcgattcacaaatctgttacccggacatttttattcatcgccacgagatcattacagcgacaagcccacatctgacgtttatgatcttgttcgctttgcc

SEQ ID NO: 330830 - DNA, 122 bp, Homo sapiens
agatggaagtatattttctttcctgcttgcaaatttcagaggtcgggagggctggtgtggcgttccccggggtcttcttaccttgacccatcgtgtttagtttccaccttggccttgcctca

SEQ ID NO: 330831 - DNA, 122 bp, Homo sapiens
ggcccaggcgctgatttacaccagctacttgggctggtcgggttttcccttcgcgccgtgcgggtcaggagttaaggttctcgggtttttagacaaacaagtggtgacagcacagcgaagta

SEQ ID NO: 330832 - DNA, 122 bp, Homo sapiens
ccggagcgcgggagcgcggctccgcagggccgggcggccgcactgggcatgctcagtagccggggcaggttttttggtcgcaagtaggaagctttctgcactacaccggagaggggagccgc

SEQ ID NO: 330833 - DNA, 122 bp, Homo sapiens
aagctcattggtggcagagatcctttacatttttgtattctgagtgtctggaacacaacacgtagtcagtaaagacgtgttattgcaaatgtccacacatcttgtgtctggctcagaatatg

SEQ ID NO: 330834 - DNA, 122 bp, Homo sapiens
gcctttctctccccctacttttttttttttagccatagctatggttaccacgtttctctccgcctcccgccacctaccaagaaaacgactgaccattggctgcctttcaccaaggcggtaag

SEQ ID NO: 330835 - DNA, 122 bp, Homo sapiens
ttttgttcattttttttcctcagtgaagaatactggttattactcttaaaacgcctttgacgtcaaatagctggattcaaatcatagattcattacggcctcgttgtgtgactgttaggcaa

SEQ ID NO: 330836 - DNA, 122 bp, Homo sapiens
tcctttggaaaaaacacagtacatggatcctactgggacttgtgtttcttttttcccaaacgtatcctcaaccttgataaaataaacctctaaatcacttgagatctgtctgcctcagtcac

SEQ ID NO: 330837 - DNA, 122 bp, Homo sapiens
ccgacgacactgtgttcttcgacatcccaatcccgaccagcggcaaaggcctcttcttggcgctgcctctacctcagcaagcccagcccagcaacccactacccggcgcctgattcacttcc

SEQ ID NO: 330838 - DNA, 122 bp, Homo sapiens
agaccagcctggccaacatggtgaaaccctgtctctgctaaaaatacaaaatcacctgggcgtagttgtgcattcctgtaatcccagccacgccagaagctgaggcagaatcgttcgaatcc

SEQ ID NO: 330839 - DNA, 122 bp, Homo sapiens
aagcgtgacaacaatttttatagtgtagagattggagattctacattcacagtcctgaaacgatatcagaatttaaaacctataggctcaggagctcaaggaatagtatggtaagtgtttac

SEQ ID NO: 330840 - DNA, 122 bp, Homo sapiens
ttgttccttctgatgttcggatgtattcggagtttcttccttctggggggtttgtggtctcgctctaagctgcagaccttcctggtgaatgttacagctcttaagcgggcgcgtctggagtt

SEQ ID NO: 330841 - DNA, 122 bp, Homo sapiens
tttttcagacatcagtgttacttgccaagaccctcatttttaaactccaacgagttattacgttcctttccactcttgctttccaattcctacaccaagacaactctgtattttgagtatat

SEQ ID NO: 330842 - DNA, 122 bp, Homo sapiens
ccttcggttttgtactgggcgcgggaattgcaaaatgccagaatatcgcaaccatccccgcggcccggcgggtttgcaaagggtgccccggccaggaggcgggggctcggggcctgcgtcca

SEQ ID NO: 330843 - DNA, 122 bp, Homo sapiens
ccatgtcagggacggctctggctgaagcaggaggacggcgtttggagggtggggtgggcgcgtcctctcggcggcccgcgtggactgacagccaccactgcccccacgctgccctcgtgccc

SEQ ID NO: 330844 - DNA, 122 bp, Homo sapiens
ccacggaccagccacttgcgcgtatgggcgggactaagctagccagagtctagaagcccgcgctaagggttgctagggacgcaccaaacacccctacggcgcttcggaggagccaaaggaat

SEQ ID NO: 330845 - DNA, 122 bp, Homo sapiens
ttgtccaacttgttaggcatgcagaagtcaggagaaaaaagcctgcagataagttaaatccggtgggcatggagggacctgaagccaaagcagagtcagcttagtttggtaaaggatccatt

SEQ ID NO: 330846 - DNA, 122 bp, Homo sapiens
gctatttttcctgatgctcctcctgcccccgcaccgcccctccccgccccctctcccccgcgccataggccccagtgtgtgaaaaccggcgaaaaccggtcttatttgacctccctttgaaa

SEQ ID NO: 330847 - DNA, 122 bp, Homo sapiens
ttgccatcagccagggcgaggtcaccctggccctcaggaactccgggcctggatgaaggacgagcgtgtgcccaagaacctggtgagccggccgggctgaggcgggcagggggctcagggga

SEQ ID NO: 330848 - DNA, 122 bp, Homo sapiens
accgtggcccgaccataaaagccactttccaaaaaaagaagctttaaggcccccgagagacgcagctgagcctctcacctggcagtgcctgactcaggaggtgatgtctgggccatgagcca

SEQ ID NO: 330849 - DNA, 122 bp, Homo sapiens
gcctcgggatgggaggcaggtagagctcacagaggagcctccaccgcagccccgggtgcgcgctcgctctaagccctgggtactaccaaccgcgcacaagggaccgctacctggaagaggtc

SEQ ID NO: 330850 - DNA, 122 bp, Homo sapiens
tgaactgcattctccttgtccttgtgaagtacaaacttaagtgttggatgggttctttgtcgttgttgctatttttttttttgagatggggtctggctgtgttgcccaggctggagtgcagt

SEQ ID NO: 330851 - DNA, 122 bp, Homo sapiens
gtgtagtatttgctgttgcttcattcgcgttagtcacatattcccctgcagcgccaaacacgcttttgaactcacaatgggtggctcaatatttggagacttagatatttgttagatgaata

SEQ ID NO: 330852 - DNA, 122 bp, Homo sapiens
atcaggatgcacagccacgtctaatagcatggacagaaaggtgctgcagctccagtcggccgcatccgtgtggctccagcaccgaagaggagacgcctccagacttgtcagccaccaagacc

SEQ ID NO: 330853 - DNA, 122 bp, Homo sapiens
ttggaaattaactgcctctcgcaatagaccacatgcatcttaagagaagaaagccaccaccggagaagcagtactgggtagtggttaacagcttgtgatgtgccactctgccacttttaagc

SEQ ID NO: 330854 - DNA, 122 bp, Homo sapiens
ctgcagagtcgagtgtgttctttgttaatttcccagttgagcatccgacttttgtctctacgttcaaagagagagagggggtttgaatctggctaattataaacttcatttgctcaaatggg

SEQ ID NO: 330855 - DNA, 122 bp, Homo sapiens
aagcgaaattggccacttctttgaagctgttctttgagccataaatataatttctcttcccgcccacagaaaggggttttctttttctttctttctctcttttttctttttttttttgaagc

SEQ ID NO: 330856 - DNA, 122 bp, Homo sapiens
cacttcacattccagaaacattaatctcgacaactctaggttgctgtaagcagcttgtgacggtggcccccagactgcgtcccgctttagactgcacccagtgaatctccactctaaccacc

SEQ ID NO: 330857 - DNA, 122 bp, Homo sapiens
ccgagcccaggcaaatcctcgagaaaggccgagtgcgcgacggctctgcggggaggaccgcgcctccccgaatgcggccgctgctgccgctgcaaacagtgccttgaggagaggaaagcggg

SEQ ID NO: 330858 - DNA, 122 bp, Homo sapiens
cgggaccacggcccgcgcccgggccccgcctcccctacctgaggccctcatggccggaggcgtcgcagcctccgcccaccagcgcgcctgccctgccattggctctgcgggctgcccgtctc

SEQ ID NO: 330859 - DNA, 122 bp, Homo sapiens
acgtgcaggcaccagcgatagccctgcagcagctgagcgaacagccgcaggaagaccgcgcgcagctccttgtcctgggagaagagctgagtgcaggtgagagccagtcctgccaatcccca

SEQ ID NO: 330860 - DNA, 122 bp, Homo sapiens
ccatgggcgaggaggactactatctggagctgtgcgagcggccggtgcagttcgagaaggcgaaccctgtcaactgcgtcttcttcgatgaggccaacaagcaggtccggcgcgcccgcgct

SEQ ID NO: 330861 - DNA, 122 bp, Homo sapiens
tagatttggggttcaaaggtctttcctcttttcctcttgtaggacgctttatagtctctgcgaagcagtgataaaaatgggaagggaaagaatcagggaccatggcatcccattcctactac

SEQ ID NO: 330862 - DNA, 122 bp, Homo sapiens
tgatgtttggattttaaggtgaatttgtataaagttgaatgtactcctctattttattatcggacacattatatttctgaatgttttgcaagatgttttgtaagtaatgatctaaaacactt

SEQ ID NO: 330863 - DNA, 122 bp, Homo sapiens
cctctttccttcagcactgctgaatgagcaacagaatgaagggctggatccaggtgtgcacgggagaggccttgagaggagaggttcaacaggaaccagagccctccagctccccttctttt

SEQ ID NO: 330864 - DNA, 122 bp, Homo sapiens
ggtctcgaactcccgaccttgaacacccacctcagcctcccaaagtgctgggattagaggcgtgagccaccgcgctcagtggaactagaactcttctacattgatgttgcaaaatggtataa

SEQ ID NO: 330865 - DNA, 122 bp, Homo sapiens
gggcagggatgctgaggcaggcccgttcctgtgtgacaccggaggccctcagagctgcaccgcagtctggaccaggcctctgaggggccaggactgcactacgttcagctagcatttgctgc

SEQ ID NO: 330866 - DNA, 122 bp, Homo sapiens
aggccccagagaggccctgccgtgagggtgcctgggtcctgtctcagactctggcctggccgttgaggagggggctgcagcgtccaaggcagccacaggttcccacagcctcagaaggctgg

SEQ ID NO: 330867 - DNA, 122 bp, Homo sapiens
tttccatctttctttgtgcaggtctagcacagccctgcctccgggccttcagcttaggcacggaatcttctttggcctggaatagccattctaaagactgtcccacgattggttccttcaca

SEQ ID NO: 330868 - DNA, 122 bp, Homo sapiens
ggggcgcggcgcacgcgcgtcatctacgtgcacaacagccctggaggtgagttaggcaggcggggggatggcgcggggaaaaccaggccgctgacccaccttccaccccgcagcccacctgc

SEQ ID NO: 330869 - DNA, 122 bp, Homo sapiens
ttgcagacgcgacctctgcagtcctgggcgatggccagccagctcagctcgggtcggtttcgcggaaagctgtctagacggcattgtaaacggttcggagcctgcgggccacaaagctgtgg

SEQ ID NO: 330870 - DNA, 122 bp, Homo sapiens
ggtgacaggctggggttaaaactggctgccccaggagaagcggaggcctggaattaaatacgtttcggcgcactggatttaaataagtttcctgaatatacaaaggtgggggccacgagttt

SEQ ID NO: 330871 - DNA, 122 bp, Homo sapiens
cccgcgatgactcacgccggggagccccgggaagcacccgcgggcccggggccggcccaccgtggggagacagccgggaccagaccttcaccctccaggcgccccaagtccagccctgccgc

SEQ ID NO: 330872 - DNA, 122 bp, Homo sapiens
ccgcaggcagggaaccgcgaaggaggcctgggctgggctgcgaggcagcgacaggaaaagcggctgggtgttccagatgcttcgctgggcctgagcaggcagatggctgcacaccgcgggga

SEQ ID NO: 330873 - DNA, 122 bp, Homo sapiens
atataaatcctgtggaacaggatatactctagaagaacaggttgtcacagggctgagatacggttctcaaattagagggctagttaagaatcctatttactctaatacagagatagacaaca

SEQ ID NO: 330874 - DNA, 122 bp, Homo sapiens
tgagagaatgacaatgaagggccaggatactacacttcatgtcactttttgaagtggtagcgtagggtcttttttttttttttccatacaaatatggatgtgccagcctgccaggcccaaag

SEQ ID NO: 330875 - DNA, 122 bp, Homo sapiens
ttaggagaaggagtggaaattcagagctcccttgatccaggagccagaagattaatgtttcgggggtcagcagggggttgctgtgacgggtgtgagtggcaccacaccggacaaatgccccc

SEQ ID NO: 330876 - DNA, 122 bp, Homo sapiens
tcctacatacccccacccttatgcctgcagacctgtctaaatttgcattctttctgacctcgagtcttaaggtagaagccatccttctgtcctttctacaggtaatttttatttcttgaggg

SEQ ID NO: 330877 - DNA, 122 bp, Homo sapiens
aacgtctccttcatcatctccttgcgaatctcggggtgggtgatggcgttgagcagctgccgccggtcaggctggttaaagatcaggtcccccaggaccttgcgatttatgtcgccgttctc

SEQ ID NO: 330878 - DNA, 122 bp, Homo sapiens
gcgtactctggagatgctccccttagcagaagctcggtggactgtctgcagccagacctccgggcctggcggctggcgcgggaggcagaaggcggggctttcctacagggctccgtgccccg

SEQ ID NO: 330879 - DNA, 122 bp, Homo sapiens
tttatgcagaaatgaatgagaacagaagatcaccatcaaaggaataaaagtcagtaactccgaaaaagaagtaatatgcagatgggacatcttcactaagaaagtatgagtttaatgtagat

SEQ ID NO: 330880 - DNA, 122 bp, Homo sapiens
tgacctgcaggctcagggcatgagggccgaggactctcactcgggaacccagagggtgatcggccacggtgaccggccggtgagctgtggaaggaagcgtccagccctctgtggactgccct

SEQ ID NO: 330881 - DNA, 122 bp, Homo sapiens
ttttagggttggggtggattggaaattgttcattgcctttcagttccgggacataaagcgcgctggaaggacactgagtcaccaaccaccgccatgggccggaagccaccgccctcgcgtca

SEQ ID NO: 330882 - DNA, 122 bp, Homo sapiens
attgggagctgttaacagagggcaagtgggctgaaacctgaggcacatgaacagctacgccgggttgggttgggaaagagtcggaaataggggatgctctggtcaggagtgggaatgaaatg

SEQ ID NO: 330883 - DNA, 122 bp, Homo sapiens
tccccagaaattgtgatttaactggcctcagggtgcatcctgggcatcaagattctagagcgtggtagagtttgaagaccgctagtctaacaagtctgctcccagttgcttgctgattctct

SEQ ID NO: 330884 - DNA, 122 bp, Homo sapiens
cccagtctcccgtttccagaaccctcaagtcacattgtgatgggagtcgtgcaggtgtggcgcatccacccgggcttatttatttattatatgattagctcatgctccctgttctgtgaagt

SEQ ID NO: 330885 - DNA, 122 bp, Homo sapiens
gcattcctcagcccttgggtggtcgatgggactgggcgcagtggagcagggggtggtgctcgtcggggaggctcgggccgcacaggaaaccatggagtgggtgggaggctcaggcatggcgg

SEQ ID NO: 330886 - DNA, 122 bp, Homo sapiens
ctgtcccatctaaccctgttgtcctgggcatctttatcggctccggcctggagaagcgagcgggcggctcgggcgttgttcacggcagcagcccagtgcagcgcagttttccctaggggacg

SEQ ID NO: 330887 - DNA, 122 bp, Homo sapiens
ccgcgccgccttccctgcgccgacgggcagcgcggcgttcggcgcgcactgctgccccctcgtggcaggagcaagcatcgcagcagcgccgacaccaccgcccacctgcagcccggggagcg

SEQ ID NO: 330888 - DNA, 122 bp, Homo sapiens
aaaaagtgccccttcctctggctcctgcagttccagggtgcccaggcccccagccaagagcgtgtacaggtggccctgctgacacacagaatccttgggagaacaaagcctccccggggttc

SEQ ID NO: 330889 - DNA, 122 bp, Homo sapiens
ccaccccctccatttctcactgccccggagctttccactggcttggacaacccaagcatccgcctcaagcagacaggccgggagctccctgccagatgtcagttctcttgaaagccaaacca

SEQ ID NO: 330890 - DNA, 122 bp, Homo sapiens
gttcgggaagacgcgtggccctgcctgccacccaccggaagtgagggcaaatggcaacagcggctctggaattctatacaggcattgctgaggacacctaagatgacgcaatctccgcgcgg

SEQ ID NO: 330891 - DNA, 122 bp, Homo sapiens
agtggaaataaagttttaaaaatgagagagcagttttccaactatgtcaacaaagcctatcgtgttgatgtttttattgaccattttagcaacaggctaataaaatttcaaattgaaatttt

SEQ ID NO: 330892 - DNA, 122 bp, Homo sapiens
cggccgctccatggcggggtgcggtggcagcggcaagggcgcgagtgagccgtgtcgggccggccggcgccttaaacccgccgccccgcccggcctgtccgcgggaaccacaccccggggcg

SEQ ID NO: 330893 - DNA, 122 bp, Homo sapiens
tcacgtggggaggcagaagccaatggggaagcgtttcgtgtaggtcttctgaggtggtggcgccagcggctacctcctgcctgtgaggagctggctgagaggggactgggcgccggcgggga

SEQ ID NO: 330894 - DNA, 122 bp, Homo sapiens
gccatgcgcaagtacccgaacccgatgaacccgagcgtgctgggcgtggatgtgctacagcgccgcgtggacggccgcggccgcctgcacagcttgcgcctgctcagcaccgagtgggggct

SEQ ID NO: 330895 - DNA, 122 bp, Homo sapiens
caaatgcgcatttttttttcatgctttcagtgatcttcactaaaaagctcaatgtgtgctcgtgataaatacacccctgtggctacttgcaagagaaacaaaccccagcatgaaaataccaa

SEQ ID NO: 330896 - DNA, 122 bp, Homo sapiens
cagcctcccgccagggtactcagaggccgctcagagggcagggttgggggtggcaagcagcgggacgtggtcacagcgggtagggggtggctgccgcagcagggaaggccggcgacacagct

SEQ ID NO: 330897 - DNA, 122 bp, Homo sapiens
ccctcacttaggggttaagaaagctgcatatacacacacatgcacgtgcacacacacgcacgactgtgagctgatctattgagtgaaatgctcctattcatgcaagactttgccaaggtgaa

SEQ ID NO: 330898 - DNA, 122 bp, Homo sapiens
ccttctgctccgagtcctcactccccaaacaaccttcgcggttgtttgacacaaaactagcgcttcagcccgggtcgattttgggggatggagtaattacctacagcttaaatcgagtctgt

SEQ ID NO: 330899 - DNA, 122 bp, Homo sapiens
agccgggccccaggcaccgccactcagctctgcgacggccggccccgtgcggccccagcccgccctcgcctccgcaccctggggagccacctgtccacttcggagccgctgtcacagccccc

SEQ ID NO: 330900 - DNA, 122 bp, Homo sapiens
cagggtgggagctggtgccgaaactctagagcgcggaggcggggccatgcggggcggggccggagcggaggaggggctctcccgtgcggccagccccgcccctcacccgggtacccggcggc

SEQ ID NO: 330901 - DNA, 122 bp, Homo sapiens
ttgtaagaagtaatgacaccgctagccgtccacaccaggagaccgcctagccgtggggcacggtgggctcctgggagctctgagctctgggctttctccagttcgcactctgcttgtctcgg

SEQ ID NO: 330902 - DNA, 122 bp, Homo sapiens
tgggggcccaattctgttgctttatggcgacagactacagtatttagagatggaaatgatcgccagcctcgttttacaaacaggaccaaggaggcagagtgaatcctcatgggactaactaa

SEQ ID NO: 330903 - DNA, 122 bp, Homo sapiens
ggaaatcattaagatcagtaacccagggctctcaagtatggacagttagagatactgactcggaactgagatttagggaaaacagttattcagtacctatttctagaatgtttgaatataca

SEQ ID NO: 330904 - DNA, 122 bp, Homo sapiens
cgctgaacggcagtttgggagtcggaccggggcctgtggattaggatgcagcctgcttcccgcccagccggctcggccaggccagcgcccgcccctccctccccgctcaggcttcggactcg

SEQ ID NO: 330905 - DNA, 122 bp, Homo sapiens
ggagccctgttaggccaccggcattggaggtcggtgaggaaggggactccccaactcccccgactcccaaccgccccacctccgcatagccttggagacacctgggggaaggggctgggggg

SEQ ID NO: 330906 - DNA, 122 bp, Homo sapiens
cccacatcacccagtatatcaggagcaaggctaggagtccggtcccaggccacctctcaccgagaagagcaggccccatgttggggacaggaatcacaatggggggaaagttcccaggccac

SEQ ID NO: 330907 - DNA, 122 bp, Homo sapiens
aggctgccctaggcttggtgtgcaagggaggggcccctacttacttgtggcctgtcccctcgtgaatgtgtctcatgtccccagtggggtttttcagtgagggtcatggtctccaggatgca

SEQ ID NO: 330908 - DNA, 122 bp, Homo sapiens
ttttacaatagcttaataattaatgttcttgtctctgtccattccagaccatctcacatgcgaactcaaactaatctttttaaacattattgtttatgtcatcccccttctcaaaaatgttc

SEQ ID NO: 330909 - DNA, 122 bp, Homo sapiens
ccagattattgtaatgtttagtcagggttgaaaaaacactgactcattcctgggaacaggcggtaacaccagaaatggcattgtcagagaccctgtggaagaataagggagactggtgccct

SEQ ID NO: 330910 - DNA, 122 bp, Homo sapiens
caaggaatcccaaccatgtcttctacctcacctggaacaaaatctataccctttttgccacggcctacagccctgcagccctctgccctctccaccccacagcctggccacgcttccctggc

SEQ ID NO: 330911 - DNA, 122 bp, Homo sapiens
aacgcgccaacggccttgtcaaacaacacctaatcaaactggctctggagacacgccaatcgtgggtaaccttacttccctttgccctcgcgcggctccgggcagcaccccgaagccccaca

SEQ ID NO: 330912 - DNA, 122 bp, Homo sapiens
cagctcggccgtcaggttgccccaaggccgccgtgggggctgggacaggcttggcctgggcggggactcctcctccctttcctctgctggcctcgagggccaagggggccgtgggggccgcg

SEQ ID NO: 330913 - DNA, 122 bp, Homo sapiens
accatggcacaacatattggtctcaagcatctgtttatttgatcaggggagctctcatctcgagaggaaacgggtgtagaagagagggactggagaatatttaccaagttcatctattcttt

SEQ ID NO: 330914 - DNA, 122 bp, Homo sapiens
gccagaccggggttcacatagagaaagacgcagctccaggcccaagcagcccgcagcccccggcttccagacagctcatttgtcttgattatctctgctgctgcccccagcccagcctcatt

SEQ ID NO: 330915 - DNA, 122 bp, Homo sapiens
gaagtgactctcataggctgtaggggcaaggagaccttccagtgatcaagatgtcagcatcggctgtttatttctggtcttggctggcagcaatgtggccaacttcggaccagccagccaca

SEQ ID NO: 330916 - DNA, 122 bp, Homo sapiens
tgatttctttaaaagagaaagagggccaaagcctgagaagagggggttttttgatggctgcgagtagaagacaatgactggaattcagcaggctgaggccttcaagctcaattaaagatgac

SEQ ID NO: 330917 - DNA, 122 bp, Homo sapiens
aacgttgcaggaccgcacggagaagatgaaggagatcgtagggtggatgcccctgatggccgcacagaaggacttcttctgggaggccctggacatgctgcagagggctgaaggaggcgggg

SEQ ID NO: 330918 - DNA, 122 bp, Homo sapiens
ggaggcagctgggaaaggcgaacccagtgagtacttcatccgaggaacctccctacaacccgtcctggccacaaaaacagaactcccaccagttggccctgagtcattcattcccctcccgc

SEQ ID NO: 330919 - DNA, 122 bp, Homo sapiens
gaactcccgtctggtggacactcccccagggcctcggtgtgatggagtttcctgaatcagcgcaggcagacgtgggacacccttgtgcaccttttcattttacttctgtttttaaataaagg

SEQ ID NO: 330920 - DNA, 122 bp, Homo sapiens
gattagctgccagactaattgctcaccaccaccaaccttgtttcgtaagcaaactgggcccgagggtaaaataacatgcacactgagccaaactttccaacatgtgctcctaacccttcccc

SEQ ID NO: 330921 - DNA, 122 bp, Homo sapiens
gtcctctacggtgactgtgcgctggtctgcggccacaggcactgccctgggctgcccgtccgtgtccctgtactggaccacgaaggagtcaaaggggccctgggctaccgtccaggacaggc

SEQ ID NO: 330922 - DNA, 122 bp, Homo sapiens
tagttacttaagcgcgctcccgctctgcaaagcgaccttgcgggaacgccgagcgccgcgcgcggttattacgtcacatcctggttccgcctctgcaagggccccagattcctcgcgaggaa

SEQ ID NO: 330923 - DNA, 122 bp, Homo sapiens
gcaccccaaacaaagttccgagacccgaacctagggcctagagagctgccagcagtgtcccgggtggtgcaggctctggaaactccacctgtctgtccccgactctgggagggaaaagggga

SEQ ID NO: 330924 - DNA, 122 bp, Homo sapiens
gtgctctttcaccgaggtcagagccctcactcagctcagccagtctttgaagaaggttcccggacttgcaccgcacctaactggccgcagataagtggacctagaagggtggggaagactgg

SEQ ID NO: 330925 - DNA, 122 bp, Homo sapiens
gcaccctggtctagtgagcaaagtgaatattggctcttcttttgagaaccggcctatgaacgtgctcaaggtacacggtgcagggacggttcttcctctcgatgtttctagaatctccctcc

SEQ ID NO: 330926 - DNA, 122 bp, Homo sapiens
ggcacgatttttagagcctgggaagtcggctgctgttcagtccttcctagcctcctcaggcgggagccgcggcccactcagtcagttgcggcccactcagtcagttccggccccagccccga

SEQ ID NO: 330927 - DNA, 122 bp, Homo sapiens
atctctttcatgttctcctacatcttgctcaccatgtgccgcaacctcatcaccttcctgcgagaaaccttcctcaaccgctacgtgcccttcgacgccgccgtggacttccatcgcctcat

SEQ ID NO: 330928 - DNA, 122 bp, Homo sapiens
tttctctgatcacatccttttccttcctaccagttctgcccggggtttcgtgttgcttcccggattgtttggcaaagttaaccctcttcagggcacaaacgatcctaccgagtcttacagca

SEQ ID NO: 330929 - DNA, 122 bp, Homo sapiens
ggcctccgatccctgtgtggctgtttggcgggtgggcgctgtgttcctctctcgtaaagccgtgcggtctgtgggccgccattcagaaactggatggacagcttcggcggtgggaagggaag

SEQ ID NO: 330930 - DNA, 122 bp, Homo sapiens
ccagtgatatggttcccatgatccaggagagaagaggatgatgttactttcaatatcgcacggggtggacacgctccggtgatattgttcctaatttcaacgtgggagaggatgatactaca

SEQ ID NO: 330931 - DNA, 122 bp, Homo sapiens
gccgcctccccgagctagagatgcggccgccgccgcgcccgccgccgtgtcccccgcggccgctgcctcatgtcggaagagctgccgccgccaccatctccggcccctgccccgcccgctgt

SEQ ID NO: 330932 - DNA, 122 bp, Homo sapiens
cagtgtctcatctcacatcaaaaaggccacccctgagccacttggtgggaaagaagaggccgagctggggctggagtcctcgtccctggtcctcaaccccatgccctttccatgagccgagg

SEQ ID NO: 330933 - DNA, 122 bp, Homo sapiens
ttcgcacccaacagtgcgtctgaggaacgagctgcagtttgagcgttcccctgagatgtgcgtagcctccgtgtaaatgtccactcccatggcttaattgcctatcagacgcattttcccag

SEQ ID NO: 330934 - DNA, 122 bp, Homo sapiens
ggtgaggccttgtagccagggacccttgatcctatagccctaggtgggctctggcaggagcgtgatctgccatgaaccatccccacatttctgtgaggtttccttcatgactgagaagccac

SEQ ID NO: 330935 - DNA, 122 bp, Homo sapiens
tggggggactgagcagacccccgcattcctgggtgcccgaagggaggccgaggccgcagccgttttcctgaaggtggcagaccaaaaacactgccctgggggtgaggattcggccagacccc

SEQ ID NO: 330936 - DNA, 122 bp, Homo sapiens
ttccccgcagaacacccggaatttcctcattttttaagttactcaactattttgctttcccgcaggcgtagccgcttcgccggagcctgggtcttagcgttttgccgccgccgccgcctccc

SEQ ID NO: 330937 - DNA, 122 bp, Homo sapiens
aggttcgggaaaggaccgaggggatgtgccgtcgtgcgagggctggggctgggggagccccgagatctcgaagggggtcaccagggtggcgccgagggggtgccaaaagtggggggccgtgg

SEQ ID NO: 330938 - DNA, 122 bp, Homo sapiens
gtccccctcagcatgtctgaaaaagcaaccgtgggagtgtggtcaacacacaggagcgttcgcgcctgtactgaaccctgggatcctgcactttgtgcagaggcacaatcctttcgccagaa

SEQ ID NO: 330939 - DNA, 122 bp, Homo sapiens
tagccagcgaccacggaggacaggcagggcaccacaacggcggcggctggtgggagacatcgaggaggtgcccgtcagcccaggggagggtgcatcacccagcccctgctgcccatcggatc

SEQ ID NO: 330940 - DNA, 122 bp, Homo sapiens
catccttctgagtgccaccgtccccaacgcccttgagtttgctgactggattgggtgagacgtgtgtcccgggttgcctgggtgaagggggctacagtactccttgattcgggtgggggact

SEQ ID NO: 330941 - DNA, 122 bp, Homo sapiens
ccagtggtttgctgggggctctggggcctttggccacaggctgattggtggttgcactgtcggcctccctgcttttaaggttttgtgatcagaccgagccactactggcttccttgctcctc

SEQ ID NO: 330942 - DNA, 122 bp, Homo sapiens
gtagaggggtgagcgactagagattagacgtcccacacaatcatcagtttgccaggtgcacgccaccaaaattgggtattagggattagacgctcgccccggtgcttccggccctgactccg

SEQ ID NO: 330943 - DNA, 122 bp, Homo sapiens
ggcggccccgccacgacttgaaattttccacaagcagcagctccaggtgggccatggcgccgccctccacgcctcacccgcgttatcaagcgcccgcggaaaaagcgcgggaagggattcgc

SEQ ID NO: 330944 - DNA, 122 bp, Homo sapiens
ctgctcgcccagacctccatgtagcggcatctaaaggctgggaccctccccagctgcaaacgctctcctcgaggattctgcagcactctcccggccctcccgctccccactatcccgtggct

SEQ ID NO: 330945 - DNA, 122 bp, Homo sapiens
aagtggaaacaacccaagtgcccatcaacagcacaaacatttataccattgaatgccttacggcaaggtaacaggatcaagtacagctacatggaacacatagatgagggaaataaaacaca

SEQ ID NO: 330946 - DNA, 122 bp, Homo sapiens
ggccgtgggcggccgtcccgaggcagggcggggctgcagacgtgggggcggagctgcgggcgcgaggcggggcggggctgcgggggtgggggcggggctacgtgcgtgggggcggggtgggg

SEQ ID NO: 330947 - DNA, 122 bp, Homo sapiens
aaaccgtgccttccgctcatcccattcctgcccttttagatgcgcctcgcccacccaccccggacttctttgggactgaattgaaaaaatcaccgcacaaaaatgccggtacatgcccgacc

SEQ ID NO: 330948 - DNA, 122 bp, Homo sapiens
aggagaaaatgtgagggtactggacatctctaagggaaagtaaggggagcatagcaagggcgtggagagtccttgaagccttacctcatagctgtgctaagggtcatccttgaattgaagat

SEQ ID NO: 330949 - DNA, 122 bp, Homo sapiens
accctttccccccagattccggcactgggtgccgcgctctctcccccagcaccgcgcccgcgcccccggctcccggactgggcatgctcagtagccgcccgcttcgtgctcccagggaagcc

SEQ ID NO: 330950 - DNA, 122 bp, Homo sapiens
tgctccagcccacggcttctgcgcccctctctttgaggggagtggtggggatagcaactgcgaggcttgtctctcagtgtgcttcaggggccctgcttagaggagcacagtatttccattct

SEQ ID NO: 330951 - DNA, 122 bp, Homo sapiens
gagcgccttgcgcccgcccccgatgggccggatgccggggacctgcggaagcagaggctgcgggggtagagatccaactccacggagtgagagagcagctttgcgctaatggggccgggtgc

SEQ ID NO: 330952 - DNA, 122 bp, Homo sapiens
gtcattaattagctaaagagacgtccctttaggttgcttctattcctttgcttttaacatcgatatccttatacatgtctctagtgtgtatgtatgtttctctataaagataggaaaaggtg

SEQ ID NO: 330953 - DNA, 122 bp, Homo sapiens
cgccccgcgccctccctcccatcaattgtcatgcagaagtgatccgggctgccgttttctcgcggccgcccgccagcccctcgccgctgccggcagaagggtggctggtaattgatcttctg

SEQ ID NO: 330954 - DNA, 122 bp, Homo sapiens
atgccccaacagcgagcaccagaaatgacaggctcactggggacacggcagataggtccccgcatgtgcacacggtgggcgcacactccatcccgtcccccctcagcctctgcgctcctcga

SEQ ID NO: 330955 - DNA, 122 bp, Homo sapiens
ccagcctccggagagggcccgaggctcagagacgaaggcactgcacccaaggccacagatcgtgcatggctttgctggaattcccaccgggcccgcaggcgtcgaggccgcgtagaaccccg

SEQ ID NO: 330956 - DNA, 122 bp, Homo sapiens
agccaggatctgccttttaacctccatttgctgttgagatgctcagttcaacctgctgtgcgggatagacatcgatgtctccctgagaagcacatataggctctctgaggtttcttttcttc

SEQ ID NO: 330957 - DNA, 122 bp, Homo sapiens
agggagtgagctaagctgggctccggggcgggaagcaggttctttctctggatgcctcagcgtagggggcctctgcacagcagagataggtttcatgatctcaccttcagttgtttgtttgg

SEQ ID NO: 330958 - DNA, 122 bp, Homo sapiens
tgaagcatgcgcagttgcctttccgtcaattcctgtcctgggcgtacgtcaagatggcggcgtctgtattaaacaccgtgctgaggcggcttcctatgctatctctcttccgaggttctcac

SEQ ID NO: 330959 - DNA, 122 bp, Homo sapiens
ataaagctagactcagtcttaaaaaaaaaaaaaaagttaatcaaagggcagatgatcctgcgtatacctgatctaatcaagagagcccctcagagaggtcaaagagattggaagtgaaagag

SEQ ID NO: 330960 - DNA, 122 bp, Homo sapiens
gtttaaaaagaagaaaactacagtatgttaaggaaccgcctctgtcggaagaaacctgcgcgcctttgctgccacccagcggctctcttctcccagcgccaacggtgtcgctccggcctgcg

SEQ ID NO: 330961 - DNA, 122 bp, Homo sapiens
gcgggcgcccctgaccttgaatggcccaaagcccagaattcctaccacgcccccggcgtccgcgaaggagcagccaacctaaccctacctgctgtgaccaggtggaggtgtgtggtggaagg

SEQ ID NO: 330962 - DNA, 122 bp, Homo sapiens
cgactggcgcgtagagcagcagcacgagcagtaggaagcagtcacccggaagcctgggggcgagaggcgaagtggtcaggcgccgaaggccgagagcacgcggggatcggtctcttcccgcc

SEQ ID NO: 330963 - DNA, 122 bp, Homo sapiens
tgacggcttggccgtcatctgggtgacttttaaatatgacggctccaccatcgtccgtatcgggcaaggagtggaataccagcacttcatcccacagtgcacagatgagatctggttgcttg

SEQ ID NO: 330964 - DNA, 122 bp, Homo sapiens
aagcctccgaaggacacgttgaccagaatgtagttgaggggctgccgcaactttttgtagcgcagtgtggccaccagcaccatggcattgagtgggaaccctataaggaagacagtgcccat

SEQ ID NO: 330965 - DNA, 122 bp, Homo sapiens
ctcgccagcctgctgtggtcccgtccccttgacgtttgatttctaaaaccgcatagtctgcggctctggcatttagaaaaagaggacaaggtcaaggcctgtggaccgaccgccgcgatccg

SEQ ID NO: 330966 - DNA, 122 bp, Homo sapiens
tttttttttctttcaaaatagcaagccttaggagctcaactccagagccaattcacttcgcgtgaagtcggcactccttgggagtagaggtcccctctcaccggctcccaccctccagaggg

SEQ ID NO: 330967 - DNA, 122 bp, Homo sapiens
gcctgaggttcagagaggttgatgacttgcttgatgttctattgtactctctggaatccccgttgcattgcgttcatttttcctaaaaacactcccctcctccctcctcctccttgccttaa

SEQ ID NO: 330968 - DNA, 122 bp, Homo sapiens
gcggcgccgcgtcgcacccggtcttctctgcaccctgcgccttgcaccggctccctctcccgttcgggcgtgcggcccccctcagactctgcccttgagttcccagcgcaggccgcacgtca

SEQ ID NO: 330969 - DNA, 122 bp, Homo sapiens
agggcctcaaacccggaggcccgcgagctgcgcgggccgtcagcacccctagccccggcgcggcggcgtgcgttcccgcctttgtccagctctgggttttcaaaccttgccccgctgaacca

SEQ ID NO: 330970 - DNA, 122 bp, Homo sapiens
ggtgaatctgtgctgtctacactgctgcccgtgagccacttagtagccaccttggtgatccgatcgacggccatggtatcacagtgcttgctttcaaatcacccttatttgacttaaatggc

SEQ ID NO: 330971 - DNA, 122 bp, Homo sapiens
cagacaggctggagctcctagggttggaagctgggtgatggggcctcattctctgccacacgagactcccccagcccagccttcccccttattgtctctcacagatactcccatacatccct

SEQ ID NO: 330972 - DNA, 122 bp, Homo sapiens
tgctgctcagtcagggtggccgtgtggtgacgcatccagcgccgcgcccctgagcagccacgcccacctggccccaggctcccctgcaagggtcgcccactgtcggggtcagcctgcagctc

SEQ ID NO: 330973 - DNA, 122 bp, Homo sapiens
cagctcccccaacaaagggtggatgtgtagaccctccacttcgacgtgtccggagcccggcgcagggaggctgacccccaaagggccacacacccacgcacgtgaacccgcgtgcacgcggc

SEQ ID NO: 330974 - DNA, 122 bp, Homo sapiens
ttcttccttcctgtccctcgtgttacctgttctgtgctacctgtgttgcgttctgctcaacgaaccctcctttgggtggcactcttgtcctgcctagccctagttctgctagagatgctcaa

SEQ ID NO: 330975 - DNA, 122 bp, Homo sapiens
gggtctggatctcagggactagataaggccagcacactgaagagttgcagaaaatgcaggcggtcaggcgcaggtctgctgcgggagcacctgccgtgtccgacagctgcactggaagaggg

SEQ ID NO: 330976 - DNA, 122 bp, Homo sapiens
tctcaggccctatttggggtgagtgtgtgaggcatccaaatgcctcctgtcggaaaacagcggcctcattgtgtgcccgattgaggtttcaacttgcaggcaactgagaggccattcagctg

SEQ ID NO: 330977 - DNA, 122 bp, Homo sapiens
agttttcttttcacctgaacctaattataaatatgtatatttggagtacttttcccttaccgtaacacttgtaagaaaattttgttatgaaacatttagaccaggcatggtgcctcatgtct

SEQ ID NO: 330978 - DNA, 122 bp, Homo sapiens
tctcataggagtccaggtggccgttgacggtcttccgacagagatgctgaagagtggccacgttggaggagaggggccggctcaacaccagggggatcttctcgcccccggagtagatgtaa

SEQ ID NO: 330979 - DNA, 122 bp, Homo sapiens
ctgttttgcggaagggataaatgaggcccaggatgagagagtacactgtagtaaaagactcgtgggatatatccaggacctgagcactgagacacctgggcctattaacagggatattaatc

SEQ ID NO: 330980 - DNA, 122 bp, Homo sapiens
gttttcctttccctatttaccatcagaatgttgctcacaaagatgtgaatgaacatttaacgctagaccccaataaatatttctcaaattaaagcaccatttaattgcatctcagcagtgct

SEQ ID NO: 330981 - DNA, 122 bp, Homo sapiens
taccacatcctttctaagcatgtttgcctgacatccagctcactcgtctgcttcctttctcgctccccccatcctgggctgggctgccttcttctacagttcaatatggggcagactaggga

SEQ ID NO: 330982 - DNA, 122 bp, Homo sapiens
cgaactcctgacctcaagtgatccatctgcctcggcctcccaaagtgctgagattacaggcgtgagccaccacacctggcctgtaagttacttttaaacacactgaaacaaagtgtgtagct

SEQ ID NO: 330983 - DNA, 122 bp, Homo sapiens
acacaaacccaaaacgaaggagaaaagcagggaagtaggggcgagacgcgaggatgaatgcggcccccaggaacagagggcagtgccgggaacagaggaaaaagccccgtggatcccggaaa

SEQ ID NO: 330984 - DNA, 122 bp, Homo sapiens
ccactaccccggctctagcgtactggcggagacagacgtgagagctcggcgcctggggttcgcgcccgggcacttgaggggctttggctcctggcccaaggactcctcagatttctcctgcc

SEQ ID NO: 330985 - DNA, 122 bp, Homo sapiens
gtctctgacacatcagcaagaaggtgtctatccctgaagaccttatttacaaaatcgccccgctcagatccagagagtaagctctagggctaacccctctaatgtgttttcagcaacagggg

SEQ ID NO: 330986 - DNA, 122 bp, Homo sapiens
agtgacctcataaaaattccaacttgaagttttaaaaaaccacctcttcatacacttattcggtagttcttgaaaatcaaagggttatagcttacatttcctaaggattcagtcatagcaga

SEQ ID NO: 330987 - DNA, 122 bp, Homo sapiens
cccctcacaatgcgactccactctgccctttcagatcagtccacgcccccgctgatctcacgttccccaccgggactctcgcccagcaccccaaccctgggagaattcaggccccaacgcct

SEQ ID NO: 330988 - DNA, 122 bp, Homo sapiens
tattagatgtttgaggatatgcacattaaactctttggagggtttagaatgaagcacattcgaatgaagggatcacgggggtcagaacaaaaaccattctagaaccgtggctcccaggaaga

SEQ ID NO: 330989 - DNA, 122 bp, Homo sapiens
gtttattagattccacttgttaagccctgttgttttggcgttgctgttgggaaactcagccgtatcaattctttgcccaagcccatgtcaagaagggtatttctcaggttttcttgtaggat

SEQ ID NO: 330990 - DNA, 122 bp, Homo sapiens
ggctcctcgggcactcctgccctccttgcaagtccccagttcgcttctccctcctcagcgcgccccaggagcagctcgcactcctggttcaggttgcagctgcccttctccaccacacggtc

SEQ ID NO: 330991 - DNA, 122 bp, Homo sapiens
gccttcgactaatttccggtggtcggagctgcaaaattaaaggccgcgcgggggcagcgccggcggctgctaggctgactccgccctgccggggcaagccagggagagcgggacctcgcacg

SEQ ID NO: 330992 - DNA, 122 bp, Homo sapiens
gtggtgagtgagggagttaaaataatcctggctcctccctaatcaatggcagtagagagccgaaagttggaagaagcacgtaaaacaggtatgtagcttcaagaagacactccttctctgta

SEQ ID NO: 330993 - DNA, 122 bp, Homo sapiens
gggtccgcgtctaggggacatcccggggacagggtgaggaggcctctgcaggtggccccgcgcatcagcgcctgacagccgggccgcgcctgcgcctgagctcccggccgccgcgaggctgc

SEQ ID NO: 330994 - DNA, 122 bp, Homo sapiens
cagcacgttccaccttcgttctccctaaagtaatttatctccttcaaaagataaaaagtacgaacacatttgcccttgaagggcagagccccggaattcaggagctctctgaacactcctcc

SEQ ID NO: 330995 - DNA, 122 bp, Homo sapiens
tccactctccggccggccgcctgcccgccgcctcctccgtgcgcccgccagcctcgcccgcgccgtcaccatgagccaggcctactcgtccagccagcgcgtgtcctcctaccgccgcacct

SEQ ID NO: 330996 - DNA, 122 bp, Homo sapiens
ttgtctgggatggaaaggtgaacacaagtgcattgcagaagctgctaatgcaaatttgcacgttctagcactggaaaggcactttcagagaacccttgcatccaattagggccaatggccct

SEQ ID NO: 330997 - DNA, 122 bp, Homo sapiens
aacactctcaagtagacagagttgcaccatacagtgaaacctcttatgttcattctctaacgtcaacagtgatcttaacattcaaccaatcttatcttcatctatacctgtactccagcccc

SEQ ID NO: 330998 - DNA, 122 bp, Homo sapiens
tacatgcagatgctacccaaggaaaagcagccagtagcaggctcagagggggcacagtaccggaagaagcagctggcaaagcagctccctgcacatgaccaggacccttcaaagtgccatga

SEQ ID NO: 330999 - DNA, 122 bp, Homo sapiens
cttgtcccatcccggaggtgcagctcccctgggccccacacaggcttgggaggagcccttcgtggggctgcgccgccctccccgaaccctctgtccccctgtgcccgcaggcccgtcccagg

SEQ ID NO: 331000 - DNA, 122 bp, Homo sapiens
ctgcggtgcggcaaacggagatgtcaagtgtgctgtcagacgcagggctctggagctgaccggagaggtacagatttgggcactgctggcattctgtgataactgaagttgaaggaagaatg

SEQ ID NO: 331001 - DNA, 122 bp, Homo sapiens
agagtgagctcagaaaaacaagctggggtcagatcacagagacagctgggcttccgggatcgttgtgtgtcctttccctggggctttgggggccatagaagggtagtgagcgaggggctctg

SEQ ID NO: 331002 - DNA, 122 bp, Homo sapiens
tggcgacatcccaaagagacactccagcacagacacagcgaggactcagttacacagccacgtcctagcttcaggggaggcagggcaatgtcacctttgtcgtatgcacctctctgccctgc

SEQ ID NO: 331003 - DNA, 122 bp, Homo sapiens
tctgggacgttggggtcgcgggaactgaggcggcaaacacaagctcgcgaaactgaaggccgcgccacgcctgctgactggtcagaaacctcgccagtcagggagcgggggtggtgctagag

SEQ ID NO: 331004 - DNA, 122 bp, Homo sapiens
ttctttgactaggaaagggaactccctgaccccttgcgcttcccgagtgaggcaatgcctcgccctgcttcggctggcgcacggtgggcacacccactgacctgcgcccactgtctggcact

SEQ ID NO: 331005 - DNA, 122 bp, Homo sapiens
gcgcgctggctcgggatcccgggcggactcccggcgagacaccgcagcgccacctagtgccgggatgagcaggtgcttttcggccgagccagtttccgtgcagaacacctgagcctgggatc

SEQ ID NO: 331006 - DNA, 122 bp, Homo sapiens
ggcatagggacgagggcaaggagcccctgctacccccagtcgcctcctcgccatcagctgcgtacaatgggccaccgctcgcggagtgcattgacagttctccattattcgagctggagggg

SEQ ID NO: 331007 - DNA, 122 bp, Homo sapiens
cccaggagcggggaggtagggttggggctggggcatttggattgtaattgggagctctgccgtacgccagggcggttccaaactctaaaccgttcccaccgtcagggagacctacagtttcg

SEQ ID NO: 331008 - DNA, 122 bp, Homo sapiens
cttccgagagtgtgaacgggggatggggtatcccgcccggacgctgactggcgtggggcccggtcctcaggccttccattacacccattatctccaagccccgacccggaggtgaggaccgg

SEQ ID NO: 331009 - DNA, 122 bp, Homo sapiens
ccatattcaaagagcacatctcagcgcctagccgacacactcgatggcagccgctgttaccgctgacacgcagttctactgctgtacctctgggtacagcgtgaagaaagtcccagcattag

SEQ ID NO: 331010 - DNA, 122 bp, Homo sapiens
tgccctttttcctagattttctttgacttaaaactcaagtgcttaggctttagttacattcggtataaaaaatgaaaaataaaaactcaagtgcttatcctgctcctcattctatggagaca

SEQ ID NO: 331011 - DNA, 122 bp, Homo sapiens
tcctgctaccctggaactcaatacatgcctggtgaatgcatatttaatggaattccttaacgtggcagtatttattgagtggctgctgtatgctgggccttgtaatagacccttggggatgt

SEQ ID NO: 331012 - DNA, 122 bp, Homo sapiens
taagaccatgatacataatagaagaatttcttccgtaacagtagccccaaacagagatcacgtgtctcctgaaacctatccagtctcatgtgcactcagatgtacgatcctggatataacat

SEQ ID NO: 331013 - DNA, 122 bp, Homo sapiens
cgtcggggctgctcccgcgccgcaggtcgccggcctccccgcgctccgcgccgccctcgtcgtcgtcggcgcccacctccaccatctcggtggccttgagcacttccacctggccctcgcgg

SEQ ID NO: 331014 - DNA, 122 bp, Homo sapiens
acagttcgcctacgacggcaaggattatctcaccctgaatgaggacctgcgctcctggaccgcggtggacacggcggctcagatctccgagcaaaagtcaaatgatgcctctgaggcggagc

SEQ ID NO: 331015 - DNA, 122 bp, Homo sapiens
atcatgctacagatgagttctaccaattctagactgggaagtaagaaaacgatgacaacccgaaggtaaaagtcataagtataatgacctgtcgtgcaaataaagggcctatttttgtccta

SEQ ID NO: 331016 - DNA, 122 bp, Homo sapiens
ttttgtgggggaaccttaaaatctttgaagagttcagactcatggcgatttctgcaacttcgtagcaggcctcattttctgtttttcccactctttccacaccataattcttaagtggattg

SEQ ID NO: 331017 - DNA, 122 bp, Homo sapiens
ccgccttcagaccccgcccccagccccgaacttccagcaagacgggccgcttcccgccctcgagccccgcccatttccaggagccttgagcccagagtctccgtcccgccctcaggccccac

SEQ ID NO: 331018 - DNA, 122 bp, Homo sapiens
ctactccttggaactggagggctcggggtagccctttctcaaatttccctcctggaccaccggcttggtcagctctacttttgaggtggtgttacaggggctgcagacaccaacctgggatc

SEQ ID NO: 331019 - DNA, 122 bp, Homo sapiens
gtgatcctgatcctcattgaggcaaacacacaagcttttttttttttttaatacaaagtgcgagatttcactaaaaaaggttaaaattgaagtgagtaatcttcggtgcataatgcaattgt

SEQ ID NO: 331020 - DNA, 122 bp, Homo sapiens
ctctgtctccaggccctattgaaaggtttaggatctttctcttcccaagtgaagccagggcgggtatccccccttcttcctctgtcaccctcccaaaatctgttagtctcagagccgggaag

SEQ ID NO: 331021 - DNA, 122 bp, Homo sapiens
gggcgcggtgcgcagggccctgattgacagaagctgtgttctggcctgggacaggaggcccgaaggaccggtatttggctggctccactctttgctccagggcttccttccagtgctggcac

SEQ ID NO: 331022 - DNA, 122 bp, Homo sapiens
gaggctgtcccttgactaacttactggcttcaatagggtaggtcaacagtgtgcaacctccgagctcccagggccacgcagaccgttgggtggcactatgccttgggcaagagaggtgaaaa

SEQ ID NO: 331023 - DNA, 122 bp, Homo sapiens
tccttgttcatcctgtacaaacccgtcagcacctcttcatccttccatgcccctcgcacacgtgttcatcccgtcgtgttagtacctgccgcgcgttctttccgtcatttgtacgtccacaa

SEQ ID NO: 331024 - DNA, 122 bp, Homo sapiens
aggccaggagaacaatcagcagaagcaaggctgtccctccacttacaggctaaataacaacgtgcttgtttcatgagttatttccagctaacaggttatgccatacttgctagtcattaatg

SEQ ID NO: 331025 - DNA, 122 bp, Homo sapiens
taaaggcctcacgtttagccattcactcagtgttttctgacagccttctaggataggtaccgttatttgggttgatgtagtgcttggtcaaatgcagtataatgaagggatcaaggaggggg

SEQ ID NO: 331026 - DNA, 122 bp, Homo sapiens
tttcccatgagcacccctcttgggtcacctgtctcattccactctgcattagggtatttgcgtgtcctcaaatgccatccctccctccctccccaccttccttccttccctccttccttcct

SEQ ID NO: 331027 - DNA, 122 bp, Homo sapiens
cacaggctgtctgaccccataaatcactgggcgcattatactatacagtctgggggtggacgtacaccctgcacggatgtagagggggctctaagactcaggcacagagaagcacaagcagg

SEQ ID NO: 331028 - DNA, 122 bp, Homo sapiens
gtgccattgtgtgtggctaaagcagctagaaagtcagtgcttctctgctgcactgtgaggcgggaagaagatgtatttccacctcgcggggcacctcgtgtcctgtctggggggtctgtggg

SEQ ID NO: 331029 - DNA, 122 bp, Homo sapiens
actaaccaacatttaaaagcacgtccctgggtaggctcgaaccaccaactttccggttaacggccgaacgcgctaaccaattgctccacggagataacctcagttggtcgctttcatctcaa

SEQ ID NO: 331030 - DNA, 122 bp, Homo sapiens
gtgcgtgtcgagttccttctccgccaccgccgccgctgcggaggagagaacgggaggcggcggctgggccgccccaagcgccgccccagcccttccaggtctcgaatctggaggccccgccc

SEQ ID NO: 331031 - DNA, 122 bp, Homo sapiens
aacaagatacggacacacacagaggagccaaaccaaaccccgaacaaagggaggaaaatccgaaggaaaccgagtggttgggcttcaaagacaccatgaaggtcagggcctcctaaacaaac

SEQ ID NO: 331032 - DNA, 122 bp, Homo sapiens
ggtcttgcacaatagcctgtgtataaacatccacgccaacaatgcctgactgtgcaatcacgctgtaattacaggccggcaggaagctgctgctaggaactgcaccattcaacctctaggac

SEQ ID NO: 331033 - DNA, 122 bp, Homo sapiens
agctctgggccagggcgctcctatatgctggacgcgggtcggacattggcatagccttcccggccggggtgcggacgctgcagtagccaggaccccacaaccgcccccacgcggaggactcg

SEQ ID NO: 331034 - DNA, 122 bp, Homo sapiens
ggctgggtcggagggcttccagaggccatggtcagcaagactcggggtagcaacaaaaggcgggaggccacaggcagcagcgccggcatccaaacaaaagacaggagcagagaggcctgaga

SEQ ID NO: 331035 - DNA, 122 bp, Homo sapiens
ggatgtgggctgaggttattcagtgactaatttccaaggggaggagaaattgacttatcacggggaaggttactttttatccatgccagtgtcagcttctctccgaaaactgggtaatacga

SEQ ID NO: 331036 - DNA, 122 bp, Homo sapiens
cttgacacaattacctgcaacatgagctcacagtcatctcttccaacaaaaatcatttctcgtggcagcctgtggcgagtgcctccactgctcaccaaaaaccaggatgttaagctcatttt

SEQ ID NO: 331037 - DNA, 122 bp, Homo sapiens
tgagccgctgcgcaggttcgtgcccagcgccccctgttggacacagtaggagctgcgcagcgccagtcccagaaatcgctggaatcctgctctggggttagagaaaactcttttattgccct

SEQ ID NO: 331038 - DNA, 122 bp, Homo sapiens
tatgcccggaggccctggccgcgctgcgtcccgctcgcttcagatgccggcccgcggatccgtcagcccagcaaccccgcgaagctcgatggtggctcctgccccccgacccggaaacagtt

SEQ ID NO: 331039 - DNA, 122 bp, Homo sapiens
tctgagattctttcagttccgcgcgtccgcccccgtccccgtcccgtccccagcctttgccgaatgcctgttactcttagctctggacaaaatgcaaacccaaagaatgtgtgtttagcgcc

SEQ ID NO: 331040 - DNA, 122 bp, Homo sapiens
cgtgaaacctgcagatgtgtctgggatcgtccctcctggtgcctgacgtcggttaacttccggaggctataaaaacaggaatctccagggcagcgccatcttccacgaaggccaagaacctt

SEQ ID NO: 331041 - DNA, 122 bp, Homo sapiens
tccgtttgcactggctcaggactcgagagccacacgtggctagtgcctactgttctggcgcgctcaggcttggagccttctctgcggaggccaagtcctgcaagggatctgtttgctgcggt

SEQ ID NO: 331042 - DNA, 122 bp, Homo sapiens
ggtaagtcgaagtgcagagaaagaaacttacaaaagcacaaccaccaaaggcagcctgaacggggagccctgtgcagactgagttgctggagactaccctctcagtcccattcctggggaaa

SEQ ID NO: 331043 - DNA, 122 bp, Homo sapiens
agcacaacccctgccaaggtctgttctgaatttctgattctccatgatgtgctcacctggcgattacccatgcacaactcctcaagtatttccaaattctcatcatattactttgttggggg

SEQ ID NO: 331044 - DNA, 122 bp, Homo sapiens
gcaggacttgtctgtcaggctgcagcactcctgcacatggggctgactgcctatgggaaccgcagggtccagcctggggagctgccattcggggctaacttgactctcatccatacaagagc

SEQ ID NO: 331045 - DNA, 122 bp, Homo sapiens
ggttcctggggcggccgggcaaagcctgggacaggaactgacagtcacaggctcccctggcgggtggttcctgtgtgaccgggggtcctgacagtgaaatgggtttgctttgaccaagcacg

SEQ ID NO: 331046 - DNA, 122 bp, Homo sapiens
tgccgtttcctggcctggaattattttgcacaccttcgtttggaggttttacagctgacccgccaccctgagaactggaccctgcaagcccggtggcggcttgtggggctgcccgtccactt

SEQ ID NO: 331047 - DNA, 122 bp, Homo sapiens
gtgaaaacccagctgtctgcgctgatacccctgggaggagcctttgctgcagcaactccccgccctcattaagtctccaccccaggctgcaccgtcaggtaaacctgggagccacgggattc

SEQ ID NO: 331048 - DNA, 122 bp, Homo sapiens
ctggaagaagaggatgcagagttaaggaggttgcagagaagcagtatctacccctcctcccgtgtttgtttgtttgagacagagtctcattctgtcacccaggctggagtgcagcggtgcac

SEQ ID NO: 331049 - DNA, 122 bp, Homo sapiens
cgatttcgcggcctttcaggtgcccgggatgccggcccctgccgcctcgaccaccccctccgccgccgccgcctcctccggagcctcggttacctccatgaccccctgctggcccccctcca

SEQ ID NO: 331050 - DNA, 122 bp, Homo sapiens
cctcggagctgccgatgcatctcccttctgtttattcttccaggctcgccttcagtcactcgtctactgcattagggctaggactacggccgtgaacgaggaggccacatccctgcccggac

SEQ ID NO: 331051 - DNA, 122 bp, Homo sapiens
agcagggcagccagccagaggcaaacccacaccaggacctggcgctcggccatgtgcctgcgttttccaatattgatgtcgacgtgggaggcaagttgctatggaggaaacgcgcacacaca

SEQ ID NO: 331052 - DNA, 122 bp, Homo sapiens
cgtgtgatccaagatgaccctagcggtgctcggaagttgctttgccgggcagcagccgttcgccagtcccctccttggccccaagccccccggtgactgtcatatggcctcacacttatctc

SEQ ID NO: 331053 - DNA, 122 bp, Homo sapiens
cccctctcaagagacctcacctggcctgtggccagggtcccctgtagcaactggtgagcgcgcaccgtagttctctgtcggccggccctgggtccatcttccagtacagtgttggatggtct

SEQ ID NO: 331054 - DNA, 122 bp, Homo sapiens
ttaggaatgtgtggcaggtctgttgccacggtccaggccttcagtgcatcttggaaacatcgttttgggggctgtaggttaggaagcggagatcatggggtctcggaagaaggtttggtcgt

SEQ ID NO: 331055 - DNA, 122 bp, Homo sapiens
ttctttaaaaatcttcgtgattggaaagactgcttcctgtgccagagagtctctctccagcgcttttgcttctgaggttggtagctttcagaaagactgcaatgcagcggttaccaaagtcc

SEQ ID NO: 331056 - DNA, 122 bp, Homo sapiens
ggctgcacagggcgctcgcgggccagcacgagttctgggtgggtgtgggctctgggggcccgcactcggaagcggctggccagcagggccccacgcagtgaggggcttagcacctgggccag

SEQ ID NO: 331057 - DNA, 122 bp, Homo sapiens
atttatacactggcctacgtgcgtatgagaaacagcccagaacagaaggcccagcattcccgcactgcagctaagcatggctgcgcgccaaccagctgcaataacagccgcgtcccagcggg

SEQ ID NO: 331058 - DNA, 122 bp, Homo sapiens
gctcttcgtaccttcccgacctggaggggcctgggttgggcctgaattcgcaggctcatccgagcgggcagcctggggtaacttcgtctccaaaaacgagctaatttgtgtaaacggcctgc

SEQ ID NO: 331059 - DNA, 122 bp, Homo sapiens
actcagccgggatgccgagtgatggggttggcaagatagtgtggcctctggttccctccacgcgtgataagtgggatcatgacagcgtccttgtgccttcgatttgtccccaagccctcctc

SEQ ID NO: 331060 - DNA, 122 bp, Homo sapiens
cacctgcaaaccgcggttgcatttggctggcatgtctcttcagtctccctacatctggaacgattcctcagtctttccctgtctttcatgttcctgacaagttcatagagtacagctttcat

SEQ ID NO: 331061 - DNA, 122 bp, Homo sapiens
gctcaacccttacataagcatcagatttagatttttagagttttgcccaccaactcaaatcggttcccttcttcttccatgtttctgatttgatatattttcctgacttttttcccctccta

SEQ ID NO: 331062 - DNA, 122 bp, Homo sapiens
gagtgcttttctcatgtacatgaatttttacagcagcacagcattcctcacctgcattgccgttgatcggtatttggctgttgtctaccctttgaagttttttttcctaaggacaagaagat

SEQ ID NO: 331063 - DNA, 122 bp, Homo sapiens
gcgtaccattcaagtgctgttatggttaaaaaatgtgactataaaaatgtcacattattacggaacctatttgttggttaggtattttccaagtcctgtctcagtttattgacttccgctag

SEQ ID NO: 331064 - DNA, 122 bp, Homo sapiens
ccggcgagccgacgctgctgcaggaggctgcggcgtggggcgaggttctcgctacggcttcgttcccgtcctcccgcggccgctctcccccggaagccctcggaggcagcacgatggacgtg

SEQ ID NO: 331065 - DNA, 122 bp, Homo sapiens
aagaatataacataatggattcagtgttcctgccccacatggataatccgaatctaatcacgacaaaggatcagacattctagagaacaactgctatcctcttcaaaaatgttgatgtggta

SEQ ID NO: 331066 - DNA, 122 bp, Homo sapiens
gccccgcagaaggttgcatgaacgagtggtgtgaagcctgttgggtagcttggccactcccgcggcatgggtcacctgcacaggaggttttgcccaccagggggcagcagagggtcagggag

SEQ ID NO: 331067 - DNA, 122 bp, Homo sapiens
ggaactcgccacggtaaggattaccacaggaattggcgggaacagcacggccggcggccccgcgactgcgcaggcgcttatggccgaggtcggctgtctgacccggcggcccgcagtccgcc

SEQ ID NO: 331068 - DNA, 122 bp, Homo sapiens
gggcgaccggggtgcgggtcggagatgatggtccagtttctttgtgagaaggcataaggccgtctgaggttcccctcgggaccttcaggccccagcaccttccccctgacgcacagcctgtg

SEQ ID NO: 331069 - DNA, 122 bp, Homo sapiens
tccctccccagggtgttcctccctgtgacccagccgcctcgacttcggcccgcttgctcacgaataaagaactcagagttgtgtgtgcaatgcacacccagacacacgcacgcacacacacg

SEQ ID NO: 331070 - DNA, 122 bp, Homo sapiens
gatctgtgcccctgagctctgcggcatccccttttccccgccgcgacctccctgcccccccggtcctcacactgggtttgggatcccgaaacccctgaacaaaatggcgaaacctaatatgg

SEQ ID NO: 331071 - DNA, 122 bp, Homo sapiens
gccccacagtcaggctcacagatccgagggatcacttctcagcatccagttggtggtcttcggtcttccctgactagctgctgatcagtttttgctcctgaaggtccaacttctctttttct

SEQ ID NO: 331072 - DNA, 122 bp, Homo sapiens
ccccttcctccatggacgcagagtggttagttaagaatgacaccatcaactgccatctgacgggccaacgacagaggctagtgcatgagatggccctgaaccctagtgtcacaatcttttcc

SEQ ID NO: 331073 - DNA, 122 bp, Homo sapiens
caaaatttcatgagacgtgtgaatcccatgcccgccaaaggcgagccagatgtggagcagcgaaggatgtgtgagcgagcaagcgagggctccggccactgcgcacagccaggtgtgccggc

SEQ ID NO: 331074 - DNA, 122 bp, Homo sapiens
tggggagtgttgctctcttctagtatctccctatggggaaaaaaatcagccacctgtcagcggccagcccatcctgccctgggtgtgtctactgcccccaggggctgctgtgggagttttgc

SEQ ID NO: 331075 - DNA, 122 bp, Homo sapiens
gatctggacaccgctcatgccagacccagtcggcacagaacagctgctggggcaggactccgtgtccctgagctcagagtcaagggcctggcactcggggtcccccccggctccctcctgtc

SEQ ID NO: 331076 - DNA, 122 bp, Homo sapiens
accagttggcgggcgcctggccgagcctccagttgtgtgcattgtgggtggggggcctgccgggggccgggcggtgggagcagagcagccagaggatggcagcacccacaaagaacgtcagg

SEQ ID NO: 331077 - DNA, 122 bp, Homo sapiens
attccatatccataacaaacctggccagtgaactgaggctgacttgaacgctttccagggcggcggcaatgtcacactgcccacagaatatgcatctcaggtgttttcttttatacttgaat

SEQ ID NO: 331078 - DNA, 122 bp, Homo sapiens
gcatctcctttcccagcagccgtgggatcaggagctccttatctgccatgcttgttaaaacgagactgtctttggggaaggaaagaaaacagcactttttgctgtggcttctttagcccttg

SEQ ID NO: 331079 - DNA, 122 bp, Homo sapiens
ccgccgcggccgacgaccgaacctcaggcccccagcaccctcccaggaaccgcggtgggccgacaaccgaacctcaggcccccagcaccctcccaggaaccgccgtggccgacgaccgaacc

SEQ ID NO: 331080 - DNA, 122 bp, Homo sapiens
ctgccatgttcgctgccttccgcctgtcctctgagatgtcttgagaggatcccattccatcgcgatggaaacagccatactgccgggaacagaaggaccaagtgccccaggctgcatgcttc

SEQ ID NO: 331081 - DNA, 122 bp, Homo sapiens
cctcttgccatagcggggttccggcacagagctgcactgcgtggcgctggttcgaggaaccgctgtgggggacaagggcactgaggggaggcctcacccctcagaaactggcccagggacgg

SEQ ID NO: 331082 - DNA, 122 bp, Homo sapiens
gatttcagatacgtcacactgtcaaatggaacctgcatttttaccccccttttcagctggcgttggacatctttgaggtgtcctgaagaggagggtggttatttggagactatcagtggaaa

SEQ ID NO: 331083 - DNA, 122 bp, Homo sapiens
cggagaccagaagccccaaacctgggaagtagcaacttgagtctggcgccttagaccactcggccatcctgacacgcactgttactccttaagtttcattatgtaactcgtagtcagcagac

SEQ ID NO: 331084 - DNA, 122 bp, Homo sapiens
aaattaggcacataatagacatttaaatatttcttattgcccaattgtccatattctcagcgttcagggttcaacaaacttgggtgtgatcaactcacaatagctatgagtcctccccgatg

SEQ ID NO: 331085 - DNA, 122 bp, Homo sapiens
ttttgtagagtccagttttctttctacacttgagagggcctcagaaacccagaaattttgcgggtatgtgtgtgtgtgtgtgtgtgtgtgtgtgtgtgtgtgtgtgtgtgtgtgtgtgtatg

SEQ ID NO: 331086 - DNA, 122 bp, Homo sapiens
ggtgagtacccatgtggtttaacgcttgactcaccttctaggctgctatgtccctgtggccggggctcgcgtccctggcacgcatgtggccctttcttggaggggaggtgcatggtgagcgg

SEQ ID NO: 331087 - DNA, 122 bp, Homo sapiens
tcctgggagcctagaagtactgcagtccagcaactccgggcaggagtcggtgctggcagtcgccctaagcgcttgtgcgctctctctctctctctctctctctctctctctctctctctctc

SEQ ID NO: 331088 - DNA, 122 bp, Homo sapiens
cagctcgccaccgacgccgcaggaagccggggagacgcccccttagtcttctagtcgagccggccgaggacccatcctgggatcgggctgtctaccgcaaacgcctgatcacaaggtccgaa

SEQ ID NO: 331089 - DNA, 122 bp, Homo sapiens
gcgtcccaaagcagctgggggccgccattttgccgtacggcactggctacgcccggactccggtgcgcagccagtggagctcttttcacccggtgcttctacgactccgccaatcagaaact

SEQ ID NO: 331090 - DNA, 122 bp, Homo sapiens
gcaacaaagaggattgaaccttggacctagtgtgtctgagcagtgccccagcccccatgccgctttggatttcagtggcctctgcagcaatttattattcttacatcagatgtttgaagtag

SEQ ID NO: 331091 - DNA, 122 bp, Homo sapiens
tgtctgtttattttgtaaattatttcctcctcttaaaataaattcaacaggcttcttgcccgtcattttcaaacatttagatccctgatccttaaaatactacctttccttgctgtatggca

SEQ ID NO: 331092 - DNA, 122 bp, Homo sapiens
gaaaggaaaagttgggtccctagagtgaagaccgagttctttctgtccgtctacactgagcgtactcggggaatgagttagagccagtctcttcctcccctccccccttctcatccctcact

SEQ ID NO: 331093 - DNA, 122 bp, Homo sapiens
caaaaactgcagggggctacagaacaaaggactgagtgtaggcagagagatagagatccccgaggtgtggggcagagcccacgcatctgaattccaagaacaggcgctttctgacagagaat

SEQ ID NO: 331094 - DNA, 122 bp, Homo sapiens
cctgtgttccaaagggacaagacacatgccaggcccatgcacagcttcattgaaggaccacgtgacaggaagcccagcatgcttgtgatactctggcccacctggaatgaagcaagcaaaca

SEQ ID NO: 331095 - DNA, 122 bp, Homo sapiens
ctcgagagaacgcccccagaccagcgcttccgcttccacgtcctgcccctagcggcctggcgcatggggcggacgtagcaggggaagctgaaaaaagcatctttatgtgactcatatttttt

SEQ ID NO: 331096 - DNA, 122 bp, Homo sapiens
ccccaccaatccgcagcggcttcgtcacggcgctcttcgtcgcactccaacccgccgcgtcggcggcatctctcgcgtgctcttgcttgcgcactaatttgtcctccaccgcctcccgttca

SEQ ID NO: 331097 - DNA, 122 bp, Homo sapiens
cggagccccgcccagctaggtgagctagggggcggggcgcgggggcgcggtgacgcgtgacgccggatcccggaagtgacgcgctcgtggggaaaaggcagggagggggtggtgtccccagc

SEQ ID NO: 331098 - DNA, 122 bp, Homo sapiens
gcagacagaccctccccaaccctgctataggagacctttcactctctctatcgccagctccgggtgggaattagtcaagtgtcttacctagacatggtgcttttgttccttaaaaagaaaac

SEQ ID NO: 331099 - DNA, 122 bp, Homo sapiens
ggctggggtgtgtgtgtgtgggtgtcttccagcggccctggagcctctgaagcgacagcccgctcctcagggaggcgctcctggcagccacagcccacagcaggacagccgctcagcgcgcc

SEQ ID NO: 331100 - DNA, 122 bp, Homo sapiens
ttataaaaccatcagatctcgtgagacgcactcactatcacgagaacagcacgggggaaccgcgcgcatgatccaatcacctccacctggtcccgcccttgacatgtggagattattgggat

SEQ ID NO: 331101 - DNA, 122 bp, Homo sapiens
caaacgcccagctgtggcatcctcctgctgcaggtgaggagtgggcagcagggagggctgcggcgcctgctctgtccccatcccggtctctgtgtctcttgaactcactagggcgcatccag

SEQ ID NO: 331102 - DNA, 122 bp, Homo sapiens
agtgatccacccacctcagcctcccaaagtgctgggattacaggcgtgagccaccacacccggcctgtaagctatattaaagagtttaaacctaatgctaagagcagtaaaatgccattgaa

SEQ ID NO: 331103 - DNA, 122 bp, Homo sapiens
cctccttatgcaaatagagcggccgcgcggggctgggggcgggggcggggtgggcggtggcgcgtgggggcgggggcgggggcgcggccggcgctgggagggcggggcgctccaggtggcca

SEQ ID NO: 331104 - DNA, 122 bp, Homo sapiens
gttctttccattacgcaacattcttcaagatgtggacgagtgcctggaaccaaacgtctgcgcaaatggtgattgttccaaccttgaaggctcctacatgtgttcatgccacaaaggctata

SEQ ID NO: 331105 - DNA, 122 bp, Homo sapiens
catgacaactacatggactactcgattctgaactagatgctttgctataaaggatgtcttcgggactttaggggtcaagaaaacttcccctttgcactctgaaggttctctaaacaatctac

SEQ ID NO: 331106 - DNA, 122 bp, Homo sapiens
taatgaaggtggggagctgccgagtgcaggggacgggttctgggcacgtcccctgctccccgtcactgtctcctcctgcttgctcacccggctgtttctcaccccatcctctgtgtgtctgt

SEQ ID NO: 331107 - DNA, 122 bp, Homo sapiens
accacggctgttatgggtgcggttactatggcaacagagcaaccggaagcggaagactgccggtttccttgtcgcaagaaatctgttaggaacaaaaagggaccactctcgtcagtctctca

SEQ ID NO: 331108 - DNA, 122 bp, Homo sapiens
gagggatgtgcacatgcctgtcaagcccgtccgggcaaggggctaggggctaataaggtgcgaaggagggggctgtaacggaaggaggaagggcgcacgcgctggggagggatggaagtggg

SEQ ID NO: 331109 - DNA, 122 bp, Homo sapiens
gcgcgccctatgcggtccctgagcctccagaaccaccgatcactgtttggcacaagcgtgcgcgccgtgtgcagtccctgagcctcgtggactgtttggcacaagagcacccactgggtgcg

SEQ ID NO: 331110 - DNA, 122 bp, Homo sapiens
agacccccagcttccctgggcggccgcgacctcccgcctccccgtctgccgctgagggcccgcggcgtacacaataggcttcccagaagggttaagaggcagaggtagaagaaatacggact

SEQ ID NO: 331111 - DNA, 122 bp, Homo sapiens
ctctgctgaccagcacttgcagatggattccaggaacgtggctagagctgccaaagccatcgctgaatcctgccaaaagcatcccaggggattttactaagggtggggagagcagggaacat

SEQ ID NO: 331112 - DNA, 122 bp, Homo sapiens
tgtttttgctcgggtgggaggctggccatggtgatctcattacagagctgcgtactggctcggaccaggcacgtgatgaaaaaagtttgggtctgtgtgggctggaaacaaaacacccttct

SEQ ID NO: 331113 - DNA, 122 bp, Homo sapiens
cgcccctccctgtgccttctcaccctctggtcctggctgggcccgtcccgccccacgtcccgcctcccactgccctcagcctctggaacggtgcctgcatggctggcactatccagcgcaga

SEQ ID NO: 331114 - DNA, 122 bp, Homo sapiens
ctgggcccatggaggggtctcaagtcttcagttctcaaagatcaccttttaagcttcattcggaacatgacacagccacacgagtcctagccctgaatctcacgaagacctcagtacacctg

SEQ ID NO: 331115 - DNA, 122 bp, Homo sapiens
tggtggggaggaggctggtgaagtagcgtcaggtgcgggcctggcgtcggcgagtcaagtcgagctgatccagggccttctttctgcagcttcatcaggttctcaattagcggagggcgctg

SEQ ID NO: 331116 - DNA, 122 bp, Homo sapiens
gttagggctgagaattatcctcccctctccctgccacagagccggccacgtggcctgccccggcacctgctccgccttacatgtcattatgcgtctccgagacagcgtctctcacatctcac

SEQ ID NO: 331117 - DNA, 122 bp, Homo sapiens
aaatctctagtgccttctttttattctcgcctgtagaatttctcctaatgcttttagatacggcaattccactttctaaaatcctttcatgatatccccttctttccacgtttgtcagaaat

SEQ ID NO: 331118 - DNA, 122 bp, Homo sapiens
cgcttcgggcgtttccttatcaggttcaccgctccctgatctcgcgctgcacttcgtaggcgcagccgctgcttgggaagtcctacttaaggtctaacccgagatgatcttgctgcacctca

SEQ ID NO: 331119 - DNA, 122 bp, Homo sapiens
actaatttaagaaaccaccacttgtgaagttttgatttagtgttaacaaatacccacaaccgtctgaaaacttttaaaatacaccttctactaactacatatttgcatgaggttaggtcatc

SEQ ID NO: 331120 - DNA, 122 bp, Homo sapiens
ttttcaaagaaaggtgaagcatctaaacctgtatggtctctaatgacattataatgaaatcggctccatggagttctcttaaaataactacaacctgctctgctctgtagatgaaatcaagg

SEQ ID NO: 331121 - DNA, 122 bp, Homo sapiens
gcactggcatggagggcaggcacatgttggtgagggacaattgttaccttgtgtgagctgcggagataccaggaagcccctggacacaaatggcaaaggctccttcggaagttgttggatcc

SEQ ID NO: 331122 - DNA, 122 bp, Homo sapiens
aatcccttgggatttataggtagtttaccaacattctagttatttctcaccatgatccttcgtattaaattattcagtttttacggagaagaaaatgacaatgttggaaggctgtaacaatg

SEQ ID NO: 331123 - DNA, 122 bp, Homo sapiens
taaactgaaggctgcttgggatgcccatcacgttcccttatgccagccttagcacagcgtcggggtcgcccacacccaaggctccccctgtacctgtggaagggctagaatggagacaaaag

SEQ ID NO: 331124 - DNA, 122 bp, Homo sapiens
aagcagacaaagatggggatggaggttcccaggggagcgaacagcgtatgcaaaggccagcgcatgcaagagaactgagagccacagagtgagagggtgacctggctctgcgaagttcccca

SEQ ID NO: 331125 - DNA, 122 bp, Homo sapiens
ctgagctctccctttgacccactacaacactttcttttcttgggcaatatattaatagcacggtggttatgtcacaggcctgtgactggcttgggctcaaacccgggctttttcacttacta

SEQ ID NO: 331126 - DNA, 122 bp, Homo sapiens
gtgggcgggagaaccgcggcgtccacgtcccgtcccacccgcgccgcgaatggtgggtgacgtctccgccggcggggggagcgggtgtagcggaggagcaggcggaagtgacgtagggcccc

SEQ ID NO: 331127 - DNA, 122 bp, Homo sapiens
tgggtggggggcctcgtggcccggccggcgccccgtccccttctgcatgtctgaggccaccggcaaccgccgccccactccagatttgcccccgccttgttttgaaagccccttatttataa

SEQ ID NO: 331128 - DNA, 122 bp, Homo sapiens
gcctggagtttggtgacagtgatacttctccctgtagggcaataagctggcagtctcggtcgattcccagtcttgcttgatttttagttaaaatttggaatgactcagtcgtcagggcctca

SEQ ID NO: 331129 - DNA, 122 bp, Homo sapiens
tgaggagcgaggagcgagaagccagtttaggagcgtgagaatgctgcttgttcagtctcccggtttttggctccccgcctttggggtccgcctgagagcggggagaagtcttgggtctgaat

SEQ ID NO: 331130 - DNA, 122 bp, Homo sapiens
ctcggaccgtcccgggagaggcgagaccagggtcgaagggtccagggctgaggggtccagcggtcccgaattccagaatccgaacttggggtccaaaggagtctgggcatcttaaagttcag

SEQ ID NO: 331131 - DNA, 122 bp, Homo sapiens
ccaggcccggggcaggagggtcagctgggcagcatccgggcccgcggattcctgcaaggtcgcgaggtgagaggtgcggggaggatagacctcgggctcggcgcacagggtctgggccagac

SEQ ID NO: 331132 - DNA, 122 bp, Homo sapiens
attccaaagaaggaagtggcttattggcttattgtagtgtcatcactaggagtcttggaacgtttcctgtaagaggcgtataatgtggaggggtaccactagagggctctgcagggacccta

SEQ ID NO: 331133 - DNA, 122 bp, Homo sapiens
cacgcccccttcccctcctatctcccttcctgcttaagcagagaataggtcagctgagggcgggctgtgtgattacacctctcgggaaatccaagtatggcacctgagaggacgtctcggaa

SEQ ID NO: 331134 - DNA, 122 bp, Homo sapiens
cgtcccctcccctgccctgggggcggtcctcgcttgacaggcagagttgcgggcgacagccgcacgtggtccccctggatggttctgcgggcgaggtgggcggaggacgccccggtgagtgc

SEQ ID NO: 331135 - DNA, 122 bp, Homo sapiens
ctcctaccgtcagcagggtggccctggtggtggcggagtcctccaggtgcagcttcctcccgccgagcacgcccttcaggtgcttccggacctcctggttgagcacgcagtggaaaaggagg

SEQ ID NO: 331136 - DNA, 122 bp, Homo sapiens
gggtgtcatttccaacggctactaggaagtaaggtgttggaagagagtgttgcttccttacggagaatgcactgcaaaaaattcagcagagctcaccattgttctgagatttcaggggtcaa

SEQ ID NO: 331137 - DNA, 122 bp, Homo sapiens
gtgccctctactggaggggtgaagaaacctcatcgttacaggcctggtactgtggcgctccgtgaaattagatgttatcagaagtccactgaacttctgattcgctaacttcccttccagcg

SEQ ID NO: 331138 - DNA, 122 bp, Homo sapiens
tacacatgactcagctctttgcccactccctgggtaactcacagaccgggtctggaaggccgcagtccccttgtgtgaggagctggtactcagtgcccggtccttccttaacttctaacaca

SEQ ID NO: 331139 - DNA, 122 bp, Homo sapiens
gcccccgcacgctttctgcttgcacggctaaagctctgtgcccagtatgcgccaacacctcgtccccacctcccatcccgtccctgaagccatcgttccactctctgtctatatgcatttaa

SEQ ID NO: 331140 - DNA, 122 bp, Homo sapiens
ctcaaagcgtgtatgtatgttgaaggtggggaggcagaggcagctgggttatcagtcccacgtgtgacattctccagggggaatgtccatgacagtacattaccaacaacatttccttcata

SEQ ID NO: 331141 - DNA, 122 bp, Homo sapiens
ctccttcccccattctcccggattaattaaggaggcagcggcaggaggctgagtcctggccgcgggccggggccggggcgccgctggcaggagcgcttggggatcctccaaggtaggagaaa

SEQ ID NO: 331142 - DNA, 122 bp, Homo sapiens
atctcagggctacggtggacgcacctgcttgatgtcatggtactggcccagcagggcgtacgggcagtaggagatgctcatggagacgatgcccatggtgctgatggtgaccatggcgacgt

SEQ ID NO: 331143 - DNA, 122 bp, Homo sapiens
gctgcggagtcacgcgcgcatccacgtgtcccggagccccacgcgaccccgtgtctcagacgcccaccagtgtggcgtgtgcggcaagtgctttggcaagagctctacgctgacgcgacacc

SEQ ID NO: 331144 - DNA, 122 bp, Homo sapiens
gcttaaataatatcacccatgaacttgattattttctttaccgtagtctcttgtttccttcgtcttttgtgtttgcagactccatttatccaaaaagaatatgacagtcatcccagtattac

SEQ ID NO: 331145 - DNA, 122 bp, Homo sapiens
cacccaggacaggtgactccacccctctgtaacaggtcccaccctctgtgcaggccaggtcgcttgcagcctctctcactggggcccagggtgccccggcccccccacatccctgcggtctg

SEQ ID NO: 331146 - DNA, 122 bp, Homo sapiens
cttcagttacaagaaccaaggaaaaaggagggtgtaattgcacgtcagagagaaagatggcggaaatgggcctctgtggcagatgagccaggtaatccctgctctgggatccacaatcgggt

SEQ ID NO: 331147 - DNA, 122 bp, Homo sapiens
aatataactgaaaccaatactagccagctccaagctaccctcatctattgcctagataatcgcaatagccccctgcctgctctcctgcttctatttcatccttgttcccgcacctgtctgta

SEQ ID NO: 331148 - DNA, 122 bp, Homo sapiens
ggggcgcaggtatcactatttgtctttttcaatctatctgtgattgactctgccaaacatcgtttcatctctatttccatctgtgcctctttgtcttgatttatctctgtctgtcgttttgt

SEQ ID NO: 331149 - DNA, 122 bp, Homo sapiens
caacatgcattaactcatttaatttttacagttgccctctgaggttggtgttattattctcgttttatagatgaggacactgaggtctagggaggttaaggctcaggttgcatgttagtagc

SEQ ID NO: 331150 - DNA, 122 bp, Homo sapiens
ccaggccttcagcctctttggaatagcgtgactggcctcccctcatagtgattctccacacgtctgcctacctgaatttctgaaacacaaatgtcactatttggcttaaaacactccctttt

SEQ ID NO: 331151 - DNA, 122 bp, Homo sapiens
actccccaggagtacgaccagttagcggccaagactggcctggtccgaactgagattgtgcgttggttcaaggagaacagatgcttgctgaaaacgggaaccgtgaagtggatggagcagta

SEQ ID NO: 331152 - DNA, 122 bp, Homo sapiens
ttctgttgttctttcctgctgtgctttggccatatattccttgagaacagatgacttgcacggctaaggtgttatgcactggccaccttaggcttggtttatttgagcttctaacttccctg

SEQ ID NO: 331153 - DNA, 122 bp, Homo sapiens
gtggagggtgaaagcacgcgcatctgagctggaggaggatggccacaggctcggaaaccccggcggcacacgtaggtgagtgactgcacactttctcgacccagctcccataaatgtccaga

SEQ ID NO: 331154 - DNA, 122 bp, Homo sapiens
acagtcttagcaacagtagctagggacactacccagtgagcaccttggcagccaggatcccgcctcctccctctaattggtcgcgaccggaaggaggccactacggggcggggctagggagg

SEQ ID NO: 331155 - DNA, 122 bp, Homo sapiens
ctcagcctgcttctactcatggcagaaggtgaaagggatcctgtgtgtgtagagatcacacggcaagaaaggaagcaagagagtggggagaggtaccaggctctttttaacaaccaactctc

SEQ ID NO: 331156 - DNA, 122 bp, Homo sapiens
gggtaaaatgatcgtgaaaaaaagcaccgaggagtactttgagctcgaacggaggccatccgtgtaaagggccagattctgtcaatggatcgatccccccgatattgatggaaacccctgag

SEQ ID NO: 331157 - DNA, 122 bp, Homo sapiens
gaacggtgtggaaaaaacacacctgacgcttgccaccaactggcctagagaacacaggaccgggtatcaggtcacccggcacacacgcagactccacatacaagggacacactcagtgtgga

SEQ ID NO: 331158 - DNA, 122 bp, Homo sapiens
catccaggagacaatgagcccctttcccagagaagccgagtgcccaaggcactgggctgtcgccgtcagaagactgccgagcggaagccctgcccaccgaggtggcggagacaggcaggcct

SEQ ID NO: 331159 - DNA, 122 bp, Homo sapiens
tgctggggctcatctgctgtgtcaggatggccttgagcttcttgatctcctcctggtactcgcgaagcagcgcatccttggggtcctcattgatgcgcggcttgttcctgatgttcttggcc

SEQ ID NO: 331160 - DNA, 122 bp, Homo sapiens
cactctgtttgtaaagtctgcacgtagatattttgaccacttagaggccttctttggaaacggttttttctcatgtaaggctagacagaagaattcccagtaacttccttgtgttgtgtgca

SEQ ID NO: 331161 - DNA, 122 bp, Homo sapiens
ctgagacagagtctcactgtatcacccaggctggagtgaagcggcatgatcttggctcaccgcaacctctgcctcccagcttcaagcaattctcctgcctcagcctcttgaatagctaggtt

SEQ ID NO: 331162 - DNA, 122 bp, Homo sapiens
cctttaaattagccccacgcatgcgcgacttttctagcccgagcccgccgtctgcgcctgcgatttcgcccatactccccggtgcccgcctcgtgacgtgccgcagtgttacgaagggacac

SEQ ID NO: 331163 - DNA, 122 bp, Homo sapiens
gcactgtcctttcagacaaagtttgtacaaattcctgaactgcagatttgctaatgtgaccgcgtatacttatattcataatttaagtgattgtttatggtcagatacatattgttaaactt

SEQ ID NO: 331164 - DNA, 122 bp, Homo sapiens
gaaccacaggtttttcatgttcttttcacacgaggtccatgactctcagaaagcatttcccgtgtaagcagaacgccgaatttaaggaaatgtgtggtggtttccctgtgggcgcttaagtg

SEQ ID NO: 331165 - DNA, 122 bp, Homo sapiens
attaatattgactgaaaagtctagtacccagtaagcactcaaaacctggtgaaaataaagcgtctgtccacaatgcttggtgctcaatgcccgacacttaatatgtgctccatgagtggcaa

SEQ ID NO: 331166 - DNA, 122 bp, Homo sapiens
cacttaccctaagtcgtaaggctaggaagaagtggatctgagctctgaacctaggtctaacgccaaaactccgactcttgcaaagccatcctgctgcatctgctggacagctctactcgaaa

SEQ ID NO: 331167 - DNA, 122 bp, Homo sapiens
ggaaggaagtcgcgtgctgaggggtgtgacggttttcttgctcgtgggctcggacgagtacggagcgcctgcagggacagcctggtacgcggcccccgccccttcgtgcgcgcgctgggcct

SEQ ID NO: 331168 - DNA, 122 bp, Homo sapiens
ccctattgctggagctctctccgggactcgggactgggctcactgctctgggtgctggagcgcagcacactttccttttttacctcagggagatatttgcggaatccctgacagaggaacat

SEQ ID NO: 331169 - DNA, 122 bp, Homo sapiens
ggctgcgcgccctgctctgtcactgttgggctaggcgggtgccggctgctggcgaggagccggaaggggcagcgcaaggcggcgggtgggagtgggcacgggccgggcttagctaggagcgg

SEQ ID NO: 331170 - DNA, 122 bp, Homo sapiens
gttcctgcattagttttataatttttaaaaccagatctttagtgcctatacaaccatctccgcttctgcgttcctgacctagcgtttactcacagcttcccagggctcattgccatcccaca

SEQ ID NO: 331171 - DNA, 122 bp, Homo sapiens
cgtcaagttttagccaatgagttgatttggagccatacgctccaaagtccaatagcaatccggacattctctaaaagaggaagcgaaggaaagaaaggggcttatagtgggcgaggtctata

SEQ ID NO: 331172 - DNA, 122 bp, Homo sapiens
aacccggacttggtcctgaccccaaggacaccatcattgatgtggtgggcgcacccctcacgcccaattcggtaagagtctggacaggctgggaggcacgcctgggccctgcgagtgagcac

SEQ ID NO: 331173 - DNA, 122 bp, Homo sapiens
tgtcctctgcctgtctcctgccccatctggccgctgctcatccaggaaggtcggagatgtcgggccctcccacctgggtcacgcgctaggcatgcctgagagcaaaggccacgccccgacac

SEQ ID NO: 331174 - DNA, 122 bp, Homo sapiens
cggctccggggaataatgagtgtctgtcaggccgtccccgggtgactgggcggggcggggcggaggcggcgcgggaggcgggggtggcgggggaagggcgcagggcggggtgcgtgtttgcg

SEQ ID NO: 331175 - DNA, 122 bp, Homo sapiens
acccatggcgctggcgcccaggggccgctcctcggactacagcacttgctcgtcgccctgcgccctgtttagttctcatcaccagcagcctggactagggccctggtccttctggcctcctt

SEQ ID NO: 331176 - DNA, 122 bp, Homo sapiens
agacgggagactccctcccggagcaggtggaggcacaggaccattcgctaccccatctgccgacacctgcgggggagcccaggcattctttgtaaaccctcctgaccacctggctcaaagaa

SEQ ID NO: 331177 - DNA, 122 bp, Homo sapiens
agagtgtagccgccagtccttccctcatccggaaccttctggtccacatttccttccaagcgttagtcctcggctctccatgcttggctccctagtgtcacacaccgtcctttctgggtggc

SEQ ID NO: 331178 - DNA, 122 bp, Homo sapiens
actgcgtggagagcgacctgcccgaggcccccgcctcggagcagctctcgccgcccgcgtcgccacctggggctccgccagtgttgaaccctcccagcacccgctcttccttccccagcccc

SEQ ID NO: 331179 - DNA, 122 bp, Homo sapiens
ttgaggagcaaacctggggctgcggagaaccggggctgtctgtcttctcgctttgggggccgggcgccctgcccctcgcccagaaaagcctggaaatggtgtgggctattgttgggagaacc

SEQ ID NO: 331180 - DNA, 122 bp, Homo sapiens
caggccttaggaggacggtagagtcctggagagctgccctggcgccgctgcagggacctccgctgtgtcccccagtccctcaaagctctcctgggccgcattttcccctctcatgtctgtct

SEQ ID NO: 331181 - DNA, 122 bp, Homo sapiens
cgtgatctggccgcctcggcctcccaaagtgctgggattacaggcgtgagccacagcgcccggccaaggttaacttttagaaaactaatagtaatgaaaatggtttctgtctgagagcaaga

SEQ ID NO: 331182 - DNA, 122 bp, Homo sapiens
gcgggaagtcctcggatcctggatgagaaagagccttctctcaccggctcccagaccccgcgctttttaatacctgtccttgcagagcgactggtcattttaggcccgagtcgagcctctct

SEQ ID NO: 331183 - DNA, 122 bp, Homo sapiens
tgtctgtctccactacccctccctcactggagtctccttgcacacagagcttgatccaggcgggaagcaggagggagttaaactctacctccttgagaaaggagtatctatgtaattatttg

SEQ ID NO: 331184 - DNA, 122 bp, Homo sapiens
tattttaattacatatgtttttgttttgttttagttgtgagtagaagaagggggtgaaatcgaagtgatacttactgaagttatcagtggtgactatcaggatgtcacatgtttgaggacaa

SEQ ID NO: 331185 - DNA, 122 bp, Homo sapiens
tgtggccggcaaccggcgcctcaaggagagggcgaccaccgccgccatcttggctcctgacgtcagccccaccccttaaccccgaggtcgctctccgccggtgtcccgtcgaacatcgcggc

SEQ ID NO: 331186 - DNA, 122 bp, Homo sapiens
gcgggaagccgagaagaacgggactcaaagcccggctgggaagtcaggtatctagttggccggcgataagggtttcaccttcaggactggagctccacaagattcaaccgttatatcaacct

SEQ ID NO: 331187 - DNA, 122 bp, Homo sapiens
cagaaaggtgccttttctgggtctgttttagagttgactcaaaaacacaaattctaatcccgcagagaactgcttgtgttgaaatatttacagaaggtcaggggtttctcctcccgcctgga

SEQ ID NO: 331188 - DNA, 122 bp, Homo sapiens
ccaagctttttcctctctaagaactaaccaagcctagtgcttctttgctctgagagcaggcggacattggtttatggtggctagtttgtactaggtagaaaggcaaaagagggaatgctaca

SEQ ID NO: 331189 - DNA, 122 bp, Homo sapiens
tggcacagaccacggggtcgggggcggggaggaggacagccactaggtgaaaggcagggtcgcaatgggttgcactgaagtgttgctctatcaaaggctttctgaacacaagacataacaaa

SEQ ID NO: 331190 - DNA, 122 bp, Homo sapiens
tctgcattggactagattgggaagtaggccctacattaggggacgaaactcatgagtgcccgggtattttcagctattattggggatagggactctgcgggtggctagaggtactgctaagc

SEQ ID NO: 331191 - DNA, 122 bp, Homo sapiens
cctagacggcgagtggcaagggtcaaaatagattcgcccagtagacgccctcgacctgttcggtcctcgccttcagtgcgatagacctttaagcgtcacgtgactcccctcgggcttgtccc

SEQ ID NO: 331192 - DNA, 122 bp, Homo sapiens
ttatggcaggaggtgcctttggggcagggtcctgggtcctggaagcactcgttgacatcacgttcacaggcatggccctcgaagcccggtgggcagtggcactggatctgggggtatgtggc

SEQ ID NO: 331193 - DNA, 122 bp, Homo sapiens
tccacctgcctggacagcccttcctgctgtgccacccccagccaggtgagctcgccaccccggctccccgccctgccttgaccatcagcagcaggcagaggtgctgggcaccaaggccattg

SEQ ID NO: 331194 - DNA, 122 bp, Homo sapiens
aggggtgagtccaaacccagcttttccagactgctgggttttccagggagtctggggctgcgctgccctgtctccagggcgttattctccagcgctgcccatccccctcccaatctcggggc

SEQ ID NO: 331195 - DNA, 122 bp, Homo sapiens
gccagagacgtgtcactgaaacgcaaatataattatgtcactcttctataaaacatggttcgcaagctcaccatcacctatttactggatacaagccaaaaatatgggataggacattcttc

SEQ ID NO: 331196 - DNA, 122 bp, Homo sapiens
cttctctgcctcgggccaggccgaggccagtccctgccagccgcgccgggacctggacggcgtggccccgaggccctcggaatccaccccctccgggtgtccccccactaccgccccccacc

SEQ ID NO: 331197 - DNA, 122 bp, Homo sapiens
tcctctgctttcacaggctcgcgcggccggacattgtgggtgtgcgtgctggatttctcccggatgctctccgactaacatggatgtcccaccattccttgcagtggaaggttgttccttgg

SEQ ID NO: 331198 - DNA, 122 bp, Homo sapiens
agaaggcgggtcggggctcctcttcctccgtctggcctccgcggaccctcagagcgaattcgctctactcgattccagggcttgttgagtccttctggcctcttcaggggagggtttgaggc

SEQ ID NO: 331199 - DNA, 122 bp, Homo sapiens
gtgagcgggcagggcatacccaagaacacttgcgcctggttttggttcttttacattcatcgagaggggctgggcagtggctcgaactgtcccggcaagcggtcgcaggcttgtggctaaag

SEQ ID NO: 331200 - DNA, 122 bp, Homo sapiens
tatttttgtttggtcatatggctttatgtaagattttgttagaaggggcagcctaattagcgtctgagatcctgaaagactagaaacagtttgcctgggtatatatcccagcttcctctttc

SEQ ID NO: 331201 - DNA, 122 bp, Homo sapiens
cgctgtctgtccctctcttccccgtataaacgaaatagtgtggcgagtactaagagataccgttaaagaatccaaagttccttctctgaggctttcagccaccaaccaagaagcactaactt

SEQ ID NO: 331202 - DNA, 122 bp, Homo sapiens
ctgcgcttttccgacaggcttaaaaaaggctcatcacgagattatgtcctgcacctggctcggagggtcctacgcccacggagtctcgctgattgctagcacagcagtctgagatcaaactg

SEQ ID NO: 331203 - DNA, 122 bp, Homo sapiens
tggagcgtctccacactttccttggtccctccagacatgcagcagagcaagtcaaattgccgattgtaaagtaaagacctgggggttgctccggcggctttgaggagggttgggagtagtag

SEQ ID NO: 331204 - DNA, 122 bp, Homo sapiens
atgtgcagaaacccagagacaggaaggaacaaggcaggctgggggaatctcatgtggtttcgtatgactggtgtgtgtacgtgggaggttgtggtagttaaaagacatccacaaattctttg

SEQ ID NO: 331205 - DNA, 122 bp, Homo sapiens
aaacccaatagtacacaaacaaaggcccaaagagaaaccttccaagtgctctatgcctcacggtttagcagaaaatatcaagcaactctcaacctagctggtctgtagcttccacaaatgaa

SEQ ID NO: 331206 - DNA, 122 bp, Homo sapiens
tgagagggcaataagagactgtagccaccagctgcatacagctgttgagccctggaaaggcggctagtctgattcatgatgtgctgagtttaatatatacactgggtttcaaaggcttagtc

SEQ ID NO: 331207 - DNA, 122 bp, Homo sapiens
tacaacaaagagctcctgaatcgccttaaactaatttttaacattgtactagctatgtaccgtgtgtatacacagctcaagatgagcctggaacacctcgtgcttggctcagtaaggccttt

SEQ ID NO: 331208 - DNA, 122 bp, Homo sapiens
aaatctctccaacttcatcaaggccatggttggatacgacatgaaccccatggacctgttcgaggccaacgacctgtttgagagtaggaacatgacgcaggtgcagctgtctcttctagccc

SEQ ID NO: 331209 - DNA, 122 bp, Homo sapiens
gcctgcgtgcttcatcgccttgtgcccatgaggggacccaggcaggcggaccccagagcccgcgtgcttcatcgcctcgtgccctcgaggcctcagggctctgtcttcctctgggcagtacc

SEQ ID NO: 331210 - DNA, 122 bp, Homo sapiens
gaccaccacgcctgcaaaaagcggtgggaaagttgttacgcttagaaaactaccaacacgcgcatgcctgtaatcccagttactcgggaggctgagacaggagaatcgcttgaacccgggag

SEQ ID NO: 331211 - DNA, 122 bp, Homo sapiens
tcccaggacccctccaccccaggctgcccagctccaagccctccacagcacccttccaggcgtgtcatcaatgtaaggaaaacctctatcatcagccttgctgtatccaagagaaccactgt

SEQ ID NO: 331212 - DNA, 122 bp, Homo sapiens
cccagggcctggcacggggacaggaagccccggccctcccatcgccagagatctctccgacggcttcccagctgcacaggccctgctgggtcagcagaagccttgtctccttgctgaagaga

SEQ ID NO: 331213 - DNA, 122 bp, Homo sapiens
acctctgcccccgggagcgcgccgaatgcggggtggggctgctgtcgcaggccgtggagccgcagccccgctggagggcagggtccggctgggcgtcggggtcctggcagagacagcggtga

SEQ ID NO: 331214 - DNA, 122 bp, Homo sapiens
cctgtcagagcctccaggaaaggaaatgggctgcggggcgcagcgaggctggacagcgggcgctggcccaggactccccttgcccagaggagaaaatggaggctgagcctccggagagccca

SEQ ID NO: 331215 - DNA, 122 bp, Homo sapiens
caagttggcacagctcccagtgccagacttccaagtctagttctcagagccactgggtggcggccattcccagccagtgaatgctttgtctgtgtcagcactgaccgcccccttaaatagcc

SEQ ID NO: 331216 - DNA, 122 bp, Homo sapiens
gtgtctcactcagtaattcccctcctggctgaaggggtttggcttttttaagtgcgcagacgtccagccttcactggcatatacgggtaccccagcctcattttacagatgaggacctgagg

SEQ ID NO: 331217 - DNA, 122 bp, Homo sapiens
ggccaatcggcagcaagtgaagagctgcggccaccaatgagctggggcttgtgccagccgcggccgccgaggcccgtgccccgcggggggaacagatgaagcacatctggacagctgtgcgg

SEQ ID NO: 331218 - DNA, 122 bp, Homo sapiens
atgaataccgtcgaagatacctgcctgatattccaaaatggcccaacggagccctgatcgcggcgttcctatgttgaggttttaacttcgattttaagaggggtcctgggagatagtaggca

SEQ ID NO: 331219 - DNA, 122 bp, Homo sapiens
gcgcccttccaggggccagacctgctccatcctggacggcgaaacgacctcgggagaccccggttaggaccttactccagggatcaactggaatcaaaatccaaaggatccatggcatccag

SEQ ID NO: 331220 - DNA, 122 bp, Homo sapiens
ggcccccacacgtgcttacgtttaagggagtcagaccccggtccccggagctgtgtcccgcggctgcttaacggcgaaagcttcctatttgtaacccgaaccgtctgagctactgggcatgc

SEQ ID NO: 331221 - DNA, 122 bp, Homo sapiens
cgagactagcggtcggggcgggcgggtcgagcctcccggaagtgggccagaggtacggtccgctcccacctggggcgagtgcgcgcacggccaggttgggtaccgggtgcgcccaggaaccc

SEQ ID NO: 331222 - DNA, 122 bp, Homo sapiens
cgctcacccagcatcttgctgagcaccgcgttgtgcaggtccgggttctgctgagccagccgcttgcgctcgtcctttgcccacaccatgaaggcgttcatgggccgccggatgcgcgactc

SEQ ID NO: 331223 - DNA, 122 bp, Homo sapiens
caaacgaggcggtgctgaggcccgcgagctgccgctctagccgaaacctggtcagagagtcgcaccgcttccgtccgtcggacagaggaacggtggaagtcgccggaagttcggtgggctcc

SEQ ID NO: 331224 - DNA, 122 bp, Homo sapiens
tttccacctactcgtgctgttactcttcactctatgatttatttgtttttcagtccctgtcgatacttaagttttactctgtagggagattctcatgtttgactccattaaacaagctttga

SEQ ID NO: 331225 - DNA, 122 bp, Homo sapiens
ctggaagctgcctgtccccagcaagcagcatggccagatccgcggctaccaggtcacctacgtgcggctggagaatggcgagccccgtggactccccatcatccaagacgtcatgctagccg

SEQ ID NO: 331226 - DNA, 122 bp, Homo sapiens
acccagccacgctggggagggcgggcgcagagacggaggacccagctataccatggagggcgggtgcagaggggccaggcgagagggccaggcaggcacagagacagaggacgcagctttgc

SEQ ID NO: 331227 - DNA, 122 bp, Homo sapiens
ctggaggtcacgttccctaactgatcccttggttctctcgggtggagccttcagcgtgcacggcggggtttgactttgccaccgtctctcttctgggttccaataaagttttcctcttcctc

SEQ ID NO: 331228 - DNA, 122 bp, Homo sapiens
tgtttaagggttcacagcccctgtctgtgtggttagatctgcccctgctcacttgactgccggttcttatctctaaatgcctttgggaatttacaatttatttggacttttggggggaattc

SEQ ID NO: 331229 - DNA, 122 bp, Homo sapiens
gaggcggcagcctggcggagcagcccccaccgcggccggcgcgccccctcgccacccctgcgcgccagcgccggcccgcccctcccgctggcctctggcggcttaaccctcgcctgcccgac

SEQ ID NO: 331230 - DNA, 122 bp, Homo sapiens
aggccacgcgagatggcgagagctgggccccgctgagggtgctctggagcgtgggggttccgggcacagtgtctgcctagtcttctttccttgaaaactttattggagcaatgatttcaagt

SEQ ID NO: 331231 - DNA, 122 bp, Homo sapiens
gacctggcgtcgggagggcgcggagggggccggggcggggcgctgcgggatggtctggtccggtcaggtcctcacagtggcgcctgagggctgaggctcccgctccagcactgctccgctcc

SEQ ID NO: 331232 - DNA, 122 bp, Homo sapiens
cccttctctgtgcaccctactcattgactgagaccacaaatgcttactgaataccaactccggccagctggggaatcactcacgctgttacattaagctgtatcactttgcctttgtggagc

SEQ ID NO: 331233 - DNA, 122 bp, Homo sapiens
atatactacggtggcttcaatcgtcccaggtgtgtggtttttttctgcagaagagttcatcggcctgagttagtccaggagaaggtggatggttggactaatctatagttggaagcttataa

SEQ ID NO: 331234 - DNA, 122 bp, Homo sapiens
actccgacgcccagttatgagagcgtagcggcgcaccaccgccgggtctctcggagagggcgcgcccgctggccagaggaccaatcagtgcacggcaggctcgcaggccgcccccccccccc

SEQ ID NO: 331235 - DNA, 122 bp, Homo sapiens
tagtgggtctcgtcaaaaagcctctccagctcattgagttgttccagggtgaaattggtccgacttcgcctctgcttgattttggtctggccttcgtcctccatccctttcgcatcctcttt

SEQ ID NO: 331236 - DNA, 122 bp, Homo sapiens
cgctcggagaacacgatctcccgcccagctcttttcaactccccgcggaagtgctcacaccggaacccctctgtgtccgcactttgccattggccgaggcttccgcccgcttccattcgctt

SEQ ID NO: 331237 - DNA, 122 bp, Homo sapiens
gtcaggagtcggtcctgcacatcgcgtagagcgaagagacgacacctacctgaccatagacgctccccatccgcccagcaaccgtggtccatgctgcctgcgtccaccgccagcgtcgaaaa

SEQ ID NO: 331238 - DNA, 122 bp, Homo sapiens
cgagttatctcctctttggcagtcatccctgctttcctgtgtggaggaattgcccacattcgcatttgcaaacagaggctcactcaagtgtcactaaaggaaaggaggtggagcctgaagag

SEQ ID NO: 331239 - DNA, 122 bp, Homo sapiens
ggaccctaggaggcagctgctgggcgggcgagttgagtcatttccctggaacttagcttccggagacaactttgttaagttaaggcaccttgcaccaaaaaaggtggcaagctctggagagg

SEQ ID NO: 331240 - DNA, 122 bp, Homo sapiens
tgtccaggcttcctcctctacagtaaagacaaggagaatggctgcttcctaaggtgatggcgaggtaggatgaggagtgtaaacggcccaccctgctcccagtggtaactatgggtatgatt

SEQ ID NO: 331241 - DNA, 122 bp, Homo sapiens
tgcaccaccacaagtgacagcaactgataaaattctttgagaaagaggcttcctgcccaccgcattccactgttcagcttctagaggaattgtcagtagaacttctactaaatttggatacc

SEQ ID NO: 331242 - DNA, 122 bp, Homo sapiens
gtggtttctaaagttttccatgtatgctaaaaagtatagcaataattaacatttgacttacgcaggaggtgagtgattatatagctacagaaagagagagagggtactctgggagcactagg

SEQ ID NO: 331243 - DNA, 122 bp, Homo sapiens
cagccccaccttggaagaacggatgaaatcgttcagtccattcacctgcaccgttgcctgcggtgctagcctctcactggttcctgagtagacccaccttggaagaacggatgaaatcgttc

SEQ ID NO: 331244 - DNA, 122 bp, Homo sapiens
ggccccaggaaccagcacacggccaaccgcgcacaaagactaaactatttaaaacgttgacggttcctccatagacggacggactccagcaagggaggctgctttttgagttagactttcca

SEQ ID NO: 331245 - DNA, 122 bp, Homo sapiens
gtttagctgaaagagagcagtctcctaatttacagaagggaaggcagataaaccaagacgcgccagggacaacagggaatcaggaagcaggatttgaggcctagaacccagtttccagatgc

SEQ ID NO: 331246 - DNA, 122 bp, Homo sapiens
acaagctgcgttaacatgagggtgtatattcttccagatggtttttccttgtaacatgagcggggcttgtttttgcagaacctgcatcataaagtgctgaaactctctctctctctctctct

SEQ ID NO: 331247 - DNA, 122 bp, Homo sapiens
acaataataaatacctctgatattcatttgatggttgtctcattctgttgaacttcagaacggcattctaaggccatttgtgaaggtgccatctccacagagaaggccagagaagatgaaca

SEQ ID NO: 331248 - DNA, 122 bp, Homo sapiens
tgtgatgaggctgaggtatgtacgtcccagaggcggcccgaatctggcaccgacaaggaccggctcatcgtcgggagcaggttctggtccccgcctctgaggagcaaattgtggattcttag

SEQ ID NO: 331249 - DNA, 122 bp, Homo sapiens
atacagaataaacggtttttttttttccttccctttgccacggtccagtgcaggtggggccgccttccacaagccttcctcagtgtggtgactcaggtgtggtcctgctgtactggagtcct

SEQ ID NO: 331250 - DNA, 122 bp, Homo sapiens
tctatatttctatgtcgatttaggtattgaatgttatgagttcctatcaatacctccaatcgcaatcccctctacaagggtctttccagattctctctttccatatttgtaacttgatgctc

SEQ ID NO: 331251 - DNA, 122 bp, Homo sapiens
gagtctcggtgggatattgctgctgcacctggtcaaggccgttccttcagtgttttcagacgccctgggaacgcggctgcagggtccggtcttcggtttgcacagctagaggccgcgcagca

SEQ ID NO: 331252 - DNA, 122 bp, Homo sapiens
actgagagctgtttccttacccctggattgaaaatacacttttacttgttcttctccatgcggaccttgcttagaacttgttatttttcatgtatttttaagttgtgtgcattgtctctttt

SEQ ID NO: 331253 - DNA, 122 bp, Homo sapiens
cagagcaggcctggggatgtcctgactcggactgactccaagatgtcaccactagaccaacgcattcccagttaaccttggccttggagggtgagaggtcacagaaataagcgagaccagga

SEQ ID NO: 331254 - DNA, 122 bp, Homo sapiens
gggggagtgtacatggctgttcttttctgctggggcgcccggcgggccctgcctgtggttcgccctgtgtgcgggcggtgtgggcgtctttgccgcagggtgcttgtcgtggcaagggttct

SEQ ID NO: 331255 - DNA, 122 bp, Homo sapiens
gtgaccaaagacttgaccactcaaagtccagctccccagaacactgctcgacatggacaccggtgtgattgaaggtggattaaatgtcactctcaccatccggctacttatgcatggaaagg

SEQ ID NO: 331256 - DNA, 122 bp, Homo sapiens
tgtgccgagtgccagtgaactggggaaaggtcccatcccctcctcccagagcactggccccggcaatttgcacttcctcacagactggacgggaggcctcaagaagtgaggcctatcaggta

SEQ ID NO: 331257 - DNA, 122 bp, Homo sapiens
catggagctgggtcccggaggtcaccaggagccatggtccgggctcccacttctcgcggccgagacactggcgtggtgcttctcatgcctgcatcttccggggacagccaccattttcgtcg

SEQ ID NO: 331258 - DNA, 122 bp, Homo sapiens
cccgacacacaggtgggcacagaagcgcgggagctcccggcacacaggcaggcacagaagcgcgggtactcctgacacactggcagcctcacagccccacctccccacagacgtggtgtttg

SEQ ID NO: 331259 - DNA, 122 bp, Homo sapiens
ctctgagctgtggggtgtccgggtgattctgaggcctgcgtctctgagctgtggggtgtgcgggtgattctgaggcctgcgtccctgagctgtgggctgttgaggtgattctgaggcctgcg

SEQ ID NO: 331260 - DNA, 122 bp, Homo sapiens
tctcccatccgcagcgggaggctgggacggcaggtagcgtcctccttgtggggctcacatcgaggatggtgactacgaaactgaggtcactgtgtggccagcaggaatcttagcagacccag

SEQ ID NO: 331261 - DNA, 122 bp, Homo sapiens
ttattcacttattcaatatttactgagcatcatagatattaattgaatgtataaaacctacgaatggatgagcagcactattccaggcactggtaatatagtgataagtaaggcgaaatcct

SEQ ID NO: 331262 - DNA, 122 bp, Homo sapiens
caagcatcttacacatttacccttaaagtaagcctaggaagtacagttgcttttaaaccacgtgggtttaaactgcttaggtccatgtatatgcagattctcttgtgcctctgccacccctg

SEQ ID NO: 331263 - DNA, 122 bp, Homo sapiens
gtatgtgtgtgtgtgtgtgtgtgtgtgtgtgtgtgtgtgtgctgtttttgagagcatggtcgtggaacggttcattgatgaggggatgttcataagagacctgaatgatgcaagaaaatgag

SEQ ID NO: 331264 - DNA, 122 bp, Homo sapiens
aaatccacgggttcacagtcaatagcagctaacgcctgaacccgtggtgagccatgacgccgccgtcagggaaagggaaggcccagagcatctcctgtcttccctgggaaggcgaacctgtg

SEQ ID NO: 331265 - DNA, 122 bp, Homo sapiens
ttcatgttcttttcacacgaggtccatgactctcagaaagcatttcccgtgtaagcagaacgccgaatttaaggaaatgtgtggtggtttccctgtgggcgcttaagtgaggatttgcatgt

SEQ ID NO: 331266 - DNA, 122 bp, Homo sapiens
acactcattacaagacttaggaagttgcagctggtttagctttcctgcgcgcccaggagacggagaaggaaaactacgactcccagagtgcttagagagaacacgcgcgtcgtggcctcaaa

SEQ ID NO: 331267 - DNA, 122 bp, Homo sapiens
agtttggctcagaagttgctgactatggttatcacctttaggtcacccttcctctctcagcgtgaaacaataacacagatcattttatatttttggatggcaccaatattaaagattttaca

SEQ ID NO: 331268 - DNA, 122 bp, Homo sapiens
atctccagcttccagtcagttacccaattctgctcatcttaggacctatttctcaaatcccggattgggggcagggctagagaccactccggagatgacagagcagtcccagtgagagacag

SEQ ID NO: 331269 - DNA, 122 bp, Homo sapiens
tgctccggtttctcgtgagaccccggggcttcagcttctcgtttgcggagcccgcggcggcgtttcctggggcaacagcaatggcggcctcgctgtccgagcggctcttctcgctggagctg

SEQ ID NO: 331270 - DNA, 122 bp, Homo sapiens
tcttgttcattgtagcattattcacaatacccaaaatatagaatcaacttgaatgtttatcgatggatgaatgaataaagaaaatgtggcaaatacacacacatacacacacgcacacacac

SEQ ID NO: 331271 - DNA, 122 bp, Homo sapiens
gaccccagcacgcagcacggtgccaggcatggaactgacacgtgatgcccgtctgtttaacgagtgaacaaaggcaccagaggctttcttcccttgaacaccaatcttccaacctagattag

SEQ ID NO: 331272 - DNA, 122 bp, Homo sapiens
caccagagcagggcaaggggtggagcttgcagggagacagcttcagctccgggaaggaagcgctttctgtcagttacaacagtctgcccatggagcgagctgacttgcatggcgctgggctc

SEQ ID NO: 331273 - DNA, 122 bp, Homo sapiens
ttgctgaactaggaagctcctgaagcagccgccttccccctgtccctcagaaactggaaccggattaaggggcaaacgcccttgtgtgtctttgctggcctaggaagctcttgaagcagccg

SEQ ID NO: 331274 - DNA, 122 bp, Homo sapiens
agcctgcggcggaggcggggcgcggaggcggggctgaggacaccaaagttgggggtggtccggggagcggaaaggggacggagggttgggcgagaaacgaagggaaggggagagggtctgaa

SEQ ID NO: 331275 - DNA, 122 bp, Homo sapiens
gcagggccagaagcgcctcctccaggatcctccccgcgctggcccgccccacaggagcaccgcccctaccaggagcccggagctcttcccagggcccgcctccccgccagggggcgatccac

SEQ ID NO: 331276 - DNA, 122 bp, Homo sapiens
gtccccagaagggcgcttgcccgtgtcgggagtgaccagagggccagcaggcaccggcttcgtctttccatcgcttgccaggcagtgtgcccctggttgcaggttctctgggaattgagcag

SEQ ID NO: 331277 - DNA, 122 bp, Homo sapiens
gtttccataacccctcccccgccgccagggttttatgcttctgtacagacttctccccaccgctagtaccccaatgctcaccgtagtctctggcacatgcagtgtgttcatcaaatgtttgt

SEQ ID NO: 331278 - DNA, 122 bp, Homo sapiens
ggagacgactccagggctgggtgaggcgctgacccccaggagctggggtgccgaggggcgcgggccacagcggtgcgagccagtcgggcgcccgcgcggtggggcgcgcggcgcggggattg

SEQ ID NO: 331279 - DNA, 122 bp, Homo sapiens
cccataggcatatgagctctgctccactcctcgcttgccggtggacgcaggcgccgcggccgccagctctgtgaacgcagcggggtctcacctccaggctacccccaacctcccgctcggtc

SEQ ID NO: 331280 - DNA, 122 bp, Homo sapiens
caagtattgctttaaatgggaattcagtaggagggttccttaatcaagttgatgctttatcgaagacgtacccacgatctttttaacagtgcggtttcacctaaaggcaaacctttggatga

SEQ ID NO: 331281 - DNA, 122 bp, Homo sapiens
aaacttgctgatgaatgactaaatggacgttattctgagtttgttttgcggccaggtgagcgtatacataaatctacaacatgcagatgctgcgacgtgaccccgaaggggtaggcacggtt

SEQ ID NO: 331282 - DNA, 122 bp, Homo sapiens
actcccaactgttttgactgacatcgttggcacttcgtgactgattaaggcacctgcctccggttccatgtcacttcgtcttgggacacgtggcgctaatgccacttttcaaccccccaccc

SEQ ID NO: 331283 - DNA, 122 bp, Homo sapiens
ctgagatatagttctccaggatggcccgggcgcagccgccacacttgggtgcgaacatgtcgaagtagtccttgcgacagtaggccttgccgtccttctcgtggaaccctggggagcggggg

SEQ ID NO: 331284 - DNA, 122 bp, Homo sapiens
cccagagcagggccagcctaccgatgtactctatggcttccatgaaccaggagctgatgtcggccttgtggttatcttccactgggatgcacttgtactgatagtgtccttcaaagtggttt

SEQ ID NO: 331285 - DNA, 122 bp, Homo sapiens
tggtactccgggacaggagactgtcccggaaaaacatggctgagcacaacccaaacttgacgccccgcacaatcgtggcagtcgcggcgcccgacgttcgggcggccgtgagcggtcctagc

SEQ ID NO: 331286 - DNA, 122 bp, Homo sapiens
ttcagacatgggctgaccagtctgatggatgttgagtttatggaggtggttgaagtagaacgagagccaagtgcctctgaaataaaatcacatcgagggaagaggctgtgaatgtgaataat

SEQ ID NO: 331287 - DNA, 122 bp, Homo sapiens
cttatcacagcactagagacaactttaaattgagcattgacccctctgctcacaaatgaccgccggcgaccgcacccctgggactttctcatggaacctgcttctacaggctctgccacctg

SEQ ID NO: 331288 - DNA, 122 bp, Homo sapiens
tagacagttactgaggcttttaagccttcaaacactcggaaaaggaggtggtcatgaaggcgcttataaaaagggatatttttacagggaatttttatctagtatcagccaggtgctttccc

SEQ ID NO: 331289 - DNA, 122 bp, Homo sapiens
ttgtttggatgtcccagttgagtttggtccaatgagttgggggggtgtctctccatttggcgggagtggggagggagaccctggaactcctgagggatcggtggggctgcccctcagggcgc

SEQ ID NO: 331290 - DNA, 122 bp, Homo sapiens
cttcttccctttctgcccggtcaatcttgaagactctcctccaagaacaagtccacaactcgggccctgctgtggtcagagtgcaaatgttggtgtcaatcctggtccctggtcatgcatga

SEQ ID NO: 331291 - DNA, 122 bp, Homo sapiens
acttttttattctccgctccccaccctgcagaatttaaacaccatgaacgcaaagattttcgtctgttgtcttcactgctgtaaagcccaactcccaggctagggtttaaaacttagtaggc

SEQ ID NO: 331292 - DNA, 122 bp, Homo sapiens
gctgtgttcctataaagatttatgtatggacactgaaatttgaatttcatataattttcacgtcataaaatgttcttctattgatttaaacatggtctttgttaggttttgaagggaaggtg

SEQ ID NO: 331293 - DNA, 122 bp, Homo sapiens
gacgcggtggggcgggtctggcgggggcggggcacctctgtgcagggttcccagtcaccgcgacgctcctcgggaagccatagggcgcctcccagcccgtctccccgctccagtttagaacc

SEQ ID NO: 331294 - DNA, 122 bp, Homo sapiens
cgtacacgtacctggggcggtgcagtcaccgctgcctctgccagttcgtgtgtgggacgccggccatcaccgcatttccgcgtggacgccggcagggtggaacgcctggctttccccggcca

SEQ ID NO: 331295 - DNA, 122 bp, Homo sapiens
aggaagccaaagggtgaagaggaatcccaaagttccaaacaaaagaaatgcagggggatacggccaggcattgaagtctcatggaagccagcccctcagggcaactgaccgtgcaagtcaca

SEQ ID NO: 331296 - DNA, 122 bp, Homo sapiens
ggagtttgagaccagcctgggggcaacatactgagaccttgtctctaccaaaaaaaggttcgccaggcatggtggcacgttcctgtaagttgcagctacttggaaggccaaggcaggaggac

SEQ ID NO: 331297 - DNA, 122 bp, Homo sapiens
tgaagtcccgccctgcgcggggctggttcccgaggccgggttgtccaggtcgcggtctggcgtgagtcctcgtgcccttcccggctcggggattacctctctggctggtcccctcctccgtg

SEQ ID NO: 331298 - DNA, 122 bp, Homo sapiens
cctctgtgtctccgcagattctcttaaactcaggacgcgcatcggtctgtccgaccttcccggcaagagacaaagtcactgctgggaggccccctcggacagttttcagttttaactttcgc

SEQ ID NO: 331299 - DNA, 122 bp, Homo sapiens
ttcaaagatctgggtggccacagatgacagatatctgccatactggtctagttcccagcacgctggacccgcagagtgatttcagggaacagaatcagaggaatccacccgagggcttctgg

SEQ ID NO: 331300 - DNA, 122 bp, Homo sapiens
gagtcaggtaaaagaggggccaggtcagtgcggccgatatttgcaggtcaaaggaggaagcggggtgaccagccacttggggactcacaactgaattatagtatacaggaggatgtgcggag

SEQ ID NO: 331301 - DNA, 122 bp, Homo sapiens
taggctccatctccaacactgggggtcaaatttcagcatgaggtttggaagggataaacacgcaaactatagcaatgccctatctaaggtgggcagctgctaatcaggataatggaaggtat

SEQ ID NO: 331302 - DNA, 122 bp, Homo sapiens
gcaccttgtgtcaatacactattgacagcttgtcaaatccattcatgaagacagcaacagcgcgaagctgaccgagtccgcgggcttacctcgctccacaccaacatagttccgaatacaac

SEQ ID NO: 331303 - DNA, 122 bp, Homo sapiens
aggagactgaccttctgagaaccactatgaaagtcccagggaagaggctaccccaagccacgtcggcctgcgtgcccatctccaggactaaaaccaatggcctatccaagcacatgaggagt

SEQ ID NO: 331304 - DNA, 122 bp, Homo sapiens
agccacagcctgctggactcaggactgtcctgtcaactccagacaactgaataaacaggccgggtacagtggctcgcacctgtaatcctagcactttgggaggccgaagcgggtggaccact

SEQ ID NO: 331305 - DNA, 122 bp, Homo sapiens
tacgcgaagggtaggtagggtggagtcccaggcagcgcgtgacggccggatgcccagacgcgcacgtcgcccgcaggcgcacgcctggacccgggggagccggctggggcgcccaggaccag

SEQ ID NO: 331306 - DNA, 122 bp, Homo sapiens
cggggacgctgcactccaagagcagctgtcacggggtcagggagagtcatcttgggatcccgaaatctgtactagtgtggtctttcagtgttttccttctggttttggttaaaacaaatgtg

SEQ ID NO: 331307 - DNA, 122 bp, Homo sapiens
tgctcaccgtggctcagtctgcttctaaaactgggtcaaagggctcactcagaacacgggcgagtcaaagacaaacagcatctctccaacatgtacatagctgccctgctcctgagcatgtg

SEQ ID NO: 331308 - DNA, 122 bp, Homo sapiens
cccagtgtatgcacaaaacaccctgtcccgggccccagatgtgtgcaggtttctaattgccggtgctgcactaagatttgaagggtgagagagttgcaaaatcacgaacaccgagggcggtg

SEQ ID NO: 331309 - DNA, 122 bp, Homo sapiens
tgctcccctcagcccaggatagaccctcttttccaggcctagcgcagagcccggggatgccgcccgggggagcctgaggacccgctccagctaggcacgccaggccccgccctttgaggaca

SEQ ID NO: 331310 - DNA, 122 bp, Homo sapiens
cttgcgtcagtgccgcggctctttaacccgaagggagattttttttttaaagccagaggccgttgacgctgggtagcctttggctggggttggttatgaactccgacacagcggtggtgcat

SEQ ID NO: 331311 - DNA, 122 bp, Homo sapiens
tgacagactcgtgttgatgaagacctttagggaatttccttccccctccgctccccgaagcgcttcttagagcacatctcattaccgggctccattctcccgtcctgcacatgctccctcac

SEQ ID NO: 331312 - DNA, 122 bp, Homo sapiens
agcgctggggcattcttgagcatctcatagaaggagtccagtgtcttacggtaaaggcttcgctgcaggacgaagggccggaagaggttgaggggctcggccctgagcacggcctcagggag

SEQ ID NO: 331313 - DNA, 122 bp, Homo sapiens
actggggcttgtggggtcccagttacttttcatgtatcatcaatctgggtgataacctggcgggctggatgccatcttctcctctttcaaatgagagacatgaggctcagaaaagttatagg

SEQ ID NO: 331314 - DNA, 122 bp, Homo sapiens
ctacagattccaaaacgccaagacccggctgaggcttcttctggtctaagcgggaagatgcggctatacactggactttacgtgtctgggccatctcttcccttggcatttgggaaaagttc

SEQ ID NO: 331315 - DNA, 122 bp, Homo sapiens
acctattctccctttcttccctctgctctcctactttggcctacgtgagaagcaaacagacgctaatgagaggaggaggggatgtggagagagagagagagagggagagagagagagagaga

SEQ ID NO: 331316 - DNA, 122 bp, Homo sapiens
gaagaaggaaggcagaaccaaacccaggagggccagtgtactgcagagtcaaagagttgacggattggctctgttgctctggatagtccattttcccttcaagggtaattgcagtgcaacct

SEQ ID NO: 331317 - DNA, 122 bp, Homo sapiens
cgggggctgcagggaaccctgtgcagcaggaagccccgctggcctgggagcacatgaaggcggcttcagccgggcgtccggccgggctccaggtcgggtgcagaggcggaagctgtgctctt

SEQ ID NO: 331318 - DNA, 122 bp, Homo sapiens
ccctcgcctctggctattgcctctcaggcagtggactccaccctctcccaggtggcatcccggtggagagttactgccaggccaggcagggcaccctgccaaccccagcatgctttgacctc

SEQ ID NO: 331319 - DNA, 122 bp, Homo sapiens
ccttcccgccccagctgccgccgcacatagtaggttctgtctgggactgggcagggccatcggggctgggggggcggggcttgtgggtaaggcgggcggaggcggggaccctccgcccgatg

SEQ ID NO: 331320 - DNA, 122 bp, Homo sapiens
taaggctccctttaagtgcggctcccagggttacgtattcccattgcctacaggcgaggccgcgggtctgtaaacaagcgactgccgctgcaacctccattttgcttcctggcaccaaatct

SEQ ID NO: 331321 - DNA, 122 bp, Homo sapiens
ctctgtttggggcgctatgagccgaatgcccctcagatttggaaaaagttgggtgcatctcgcctagtttgaagggaatcagtaggctgggttttccataggttcctgtcagcttcatcaaa

SEQ ID NO: 331322 - DNA, 122 bp, Homo sapiens
atgggtgtgactcgcttcttcagtaccctgcagctcaaacccctagagggagcatgcagacgggcaggtcatggggagcatgggctcctaccccatggcagcacctagggttgagtgtttac

SEQ ID NO: 331323 - DNA, 122 bp, Homo sapiens
gctgggggctgcctggtggacttgcacacatgctggctccatacctgtcactgtggtggacgctcagagctctacagggccagctgcctgcccctgccccaagtcccccgggctggggttgg

SEQ ID NO: 331324 - DNA, 122 bp, Homo sapiens
ataaggaagagatccagtggttatcttaactaagtgaccaaatccagcgtcatcagcagacggggcaaagtggcatgtgctttctggcatggcactatatgaatcacacaacattacctatg

SEQ ID NO: 331325 - DNA, 122 bp, Homo sapiens
ttttgctgagagcgcatcaggccaaagtctggtgcatcaaactttagtagtttcccatcccggctcccagttggctctgagaaagaaaagggaaaggaaactcatgttatcaccacagctgg

SEQ ID NO: 331326 - DNA, 122 bp, Homo sapiens
ttactccctccccctcatctacctgtcaaagtcactgatcttttgcatttcggaagaggacgtcaacgggaaggaattccccctctgggtgcgggctccgagagggggcgacttgcaggagg

SEQ ID NO: 331327 - DNA, 122 bp, Homo sapiens
aaaaaaacaaaaagtacatttccttaaacacctacctgcctcttacaataggcagtagtccgtaaaagaaaaaaaaaatcaattccaatggaactgcatagctagaaaagccatactttgtc

SEQ ID NO: 331328 - DNA, 122 bp, Homo sapiens
ccagggagcaggcgtgagcacgtgcccacccgcaggtgcccgccacggccagggagcaggcgtgagcacgtgcccacccacagatgctcgccatagccatcaccctaaaacacactacaaca

SEQ ID NO: 331329 - DNA, 122 bp, Homo sapiens
cgactcttccttcattctcgctgccagatcccacttcgtctccggtgctacctctgtatgcgtgtttctcacatgtcctctcctgcagcctgcagctggcaccctgtggtcgagatctagcc

SEQ ID NO: 331330 - DNA, 122 bp, Homo sapiens
ctctccctgtcctgacggagtccagtctcactccctggacctcagggccctgatttaaggcgctttggcgttggctgccggtgaaagccatttaggagcgaagtttgcattggcctggctcc

SEQ ID NO: 331331 - DNA, 122 bp, Homo sapiens
tttaaacaccctctcagagggtattctaggggtaaaaaacccttcactcgtttgaattctcgctgaatttaaagtgaatgtctacttatcatagcccaacaagataaagaaaaaaggccttt

SEQ ID NO: 331332 - DNA, 122 bp, Homo sapiens
cggagacactgcgcggaccccaagccgggaggggccagggacgggcaacgcggggccgggcgaggctttcagtgcgcccggtttctcagacctccagccgtgtgtggcgctgtccccgtctc

SEQ ID NO: 331333 - DNA, 122 bp, Homo sapiens
ccgatctctagtcttcagtcttggccctgtttcaactttcagtttcacatgtggaaaaatcgaaactctaactcagctgagtgttagtcaaagaaggtgtgtcctgctccccaatgacaggt

SEQ ID NO: 331334 - DNA, 122 bp, Homo sapiens
aggctgctaaggaaagggtgacagcttctgatgtgctgttactgcagtagcttagggccccgcagagctgagtctcagctgaagctgggaaggtgcaagagagctggaaactggaaccaact

SEQ ID NO: 331335 - DNA, 122 bp, Homo sapiens
atgcaatgcagaggacgagcctatgtaacgagggaggctggtctagcttcccacgaaaatcgccctgctttgcctctcccttgcattctccacgcatcaaagggacacgtgtaaggcgaaac

SEQ ID NO: 331336 - DNA, 122 bp, Homo sapiens
agcgggttcctcagctctgaaatggcggccgccaggaccccgaggccacgcctctagaggcggggcctgaattcctaaataattgtctttcaagattgacatgtcgcctcagtttcttttta

SEQ ID NO: 331337 - DNA, 122 bp, Homo sapiens
ctccgccgagggtcagctggggcgaggccggcctcccgcccctaactattcccacactgtcgctaacctctcagagtctccccggccggcaccagccgagctagctcgggcgggcacggggc

SEQ ID NO: 331338 - DNA, 122 bp, Homo sapiens
catgctgaatgactcggatgatgatgtgatttatgggtaagtccctgtccgttagaaggccggcacaccttgggcatcccggcacggccttgcatgtttctgaatgggttactcttctaaaa

SEQ ID NO: 331339 - DNA, 122 bp, Homo sapiens
tcgccaacattggaggagatgaggtagcggatgaattgcttcatgttgctgtagatggcccggccctcctccaccgcagccacgatggaggcaaagttgtcatctgacagcaccatctctgc

SEQ ID NO: 331340 - DNA, 122 bp, Homo sapiens
agcctggcacttaattacagtgcaaagatctcattatagagtcttctcagctcccctcctcggctggcagcttgaagcctgagtgacaaattgcctaggtaggtctccaagggctgtatgta

SEQ ID NO: 331341 - DNA, 122 bp, Homo sapiens
tctatccagtctgtgcacttcacctccctggctcccgctctcccctgagcttacagtggacgcggggttcttccgaacccctcttgggaatactgaatggaaaagggggagcgtgcgcaagt

SEQ ID NO: 331342 - DNA, 122 bp, Homo sapiens
tttcctagatgctgaactggttagttttgccctggacagagcactgtgatatacttctaccgtttcctgaaaattccttttatgtcagaattgacatttcgagagcacaaaggggaatccca

SEQ ID NO: 331343 - DNA, 122 bp, Homo sapiens
taggttggctaggttaggtcccctttatgacaaaaccaaaacagaattgatgcccccacccgtcaagggcacttaaaaaaccaaaactcaaagttcagggccaagtttgaggatgtgcagaa

SEQ ID NO: 331344 - DNA, 122 bp, Homo sapiens
caatccggtgacgtcacggaggcccggggccgccccctggaaccactgtcccgctgttgccgtaaacacacaatggcattgccggagttgatcatatcccaaatacctttcttctcattcca

SEQ ID NO: 331345 - DNA, 122 bp, Homo sapiens
gtccctgccgaggactggcctagagcaagcactggaaaagaggccctgccatacaccctgcgtacccactgccaggaccctctcagacaagcgtggcacagccatgctgaccttccatctgg

SEQ ID NO: 331346 - DNA, 122 bp, Homo sapiens
tggttctgggaagttgggctcagaacagcttctgggtgtccagggacagctcacctggggcgtggtcgtgcgaatgcaccgcacagaagctggccccagtggccctgctggctcaaggagca

SEQ ID NO: 331347 - DNA, 122 bp, Homo sapiens
caagccagaagttctgcaggctgccccttagctagatctccacccagaccccacttaggtcggccctgtccatttcttagcttgcctgaagagggcgctttgggattggtgtcatctagcac

SEQ ID NO: 331348 - DNA, 122 bp, Homo sapiens
agcgtccgtataataattgtttgttttgcaacaagcatttaataactttcaccggcactgcgcacgctacctatctgcctcaatactccgcccggcggtgggcaggatataatgcaagagac

SEQ ID NO: 331349 - DNA, 122 bp, Homo sapiens
acaagtggtgatgagagaaaagttacctgacacactctggcttatttcacaggcatggagcgccatccacttagctgctggggttttcctgagttttatctttcctctctactcattctaag

SEQ ID NO: 331350 - DNA, 122 bp, Homo sapiens
gatctaccatgcctgctttcaaaaatccttcataatctaatcctaatctattcaacctcgcgtctctttattttcaacatgtactctctgttctcgccagttacactttatcttagcccaaa

SEQ ID NO: 331351 - DNA, 122 bp, Homo sapiens
gcggggagggtgttgtgttttgcgagcgcggagccctggccttggttttgttgtggtcggcgtcgtgtcgccctctcttctgccgccccgcacttcctttgtacgtagttaataagcagtgt

SEQ ID NO: 331352 - DNA, 122 bp, Homo sapiens
agtgtgctgtgatcatgccactgttctccagtctggacaacagagcaagaacttgtctctcggggaaaaggaaaagaaaaagaaaaaaaaaaagaatagtaatataaatctaggccagatgt

SEQ ID NO: 331353 - DNA, 122 bp, Homo sapiens
aatgaaatgcatcagacaaacatctacaaacaaacatgaatacatgggcatacaaaagcacgtggacaagttttctgtacagtttatgtctcagatacttctatgtatacataagaaccact

SEQ ID NO: 331354 - DNA, 122 bp, Homo sapiens
cttacatagtttccagatgacatgactgtatgtttttgccgtttcctccatcatgccaaacggtctagagaagttcctgctgccagtgcagcgactgctcctactgttctcaataatgagta

SEQ ID NO: 331355 - DNA, 122 bp, Homo sapiens
tggaatgccaaccccctaggtaggtgccagggccaccacaggaacctgactcgcaggagtcgtcctccgtctctacgcgaagcgccccctcgaggtgggcagggggtggcggcggcgacggt

SEQ ID NO: 331356 - DNA, 122 bp, Homo sapiens
gatgggagactggggagggattggaaagggagggttgtgagattgagggtgtaaatcatacgtcgtttattccaacaatgttcgcccagcagtagagcttgtgttggccgcgtggcgggtaa

SEQ ID NO: 331357 - DNA, 122 bp, Homo sapiens
acctgactctgccatttctaagtgttgtgattaggtaaatcactccacctatcccaccagcggtttcctcatccatataagagtggcataatatgttcattcttcctcttagtcctattaca

SEQ ID NO: 331358 - DNA, 122 bp, Homo sapiens
tccgcaatccctgggcggggctgggcggtatggagggggcttacggcagtcggcctcgtccgatttgtctttgcagtcgcggtcgccgtcgcagcgccagcccaggtgcacgcactcgccgc

SEQ ID NO: 331359 - DNA, 122 bp, Homo sapiens
cggcctcgtggctttagggactggctcgggccgcgcccaccggtggtggagcggagggcgcggccaaaggtgcccaacgccgcccacgcgctggactccgctctcaaccacgaggaccgtct

SEQ ID NO: 331360 - DNA, 122 bp, Homo sapiens
gtgtaagcacttagcatagggtctgacaccattattacacaacccaggtaataaagcaagcggggaaaaagtgccaaacatattctacagttccttctaaaacattaagaaatttcaaagtg

SEQ ID NO: 331361 - DNA, 122 bp, Homo sapiens
gcgctgaccctgagaacgcgccgagcagtccctccgtgaggcggaaagggcctggtgagccgtggcccaggcctcgccggcgcaggagaaggagaagggggcggatactgcaccttcccccc

SEQ ID NO: 331362 - DNA, 122 bp, Homo sapiens
tgcggcggggaaggggcggggagagtgtgagggaccaggcgggaggtggagaagggctcgcggagccctagctccaccgcagtccaaccttcggccccggccggcgagagggagagcgctga

SEQ ID NO: 331363 - DNA, 122 bp, Homo sapiens
ctatttccctggggatgtgcaggtaactcggggcctgcctgggtatctgttccttcctctcgtgtatacgtacgcggtcactgattcttccctcgtggctgctgcctggttcctttccttgc

SEQ ID NO: 331364 - DNA, 122 bp, Homo sapiens
catgagccccgctgccctgcacctgcgaccctcaggctagaccttggactgtctacaacacgagtcaggcccaacccgccctggaaatcatcgtaggaggttccagctcagtgcccagagac

SEQ ID NO: 331365 - DNA, 122 bp, Homo sapiens
ggtagacctgggcggggtggggccgcgaagcagggatccagggcgcctgcgcggaggaggcgggctccgaggggccgcacaccggccactcgcccctccctgcccggggttgccatggggac

SEQ ID NO: 331366 - DNA, 122 bp, Homo sapiens
ttttgtaaaaggcatgaaaaattatacatgcaaatgtgttgcccacactacaataacacacgttgtcttgaaacctcaaatcatcattagaggaattgtgaggaaatgggctgcaaccatgg

SEQ ID NO: 331367 - DNA, 122 bp, Homo sapiens
gatttagatagaggagttagctgctcgactgtctcctatatttatactcttacccctgagcgtccatttaatgttttcttctccttataaaatacatgtctaaatcctcttctaccataaaa

SEQ ID NO: 331368 - DNA, 122 bp, Homo sapiens
cccgaagagcctgccgagaccactcatcgcgagctcgcctctcccgcctccgcccctcagcgtcctccagacttccgccttgctcctgggagggtgatgtctcatcacacagggaccagcct

SEQ ID NO: 331369 - DNA, 122 bp, Homo sapiens
aggtgttccaaagatcgtgcaaatgatcttggggtcacagctcttctaggggttgttattcgtacatagggctaaaaatgttctttctgctggagttgctaagcgggtggtgcctacatgaa

SEQ ID NO: 331370 - DNA, 122 bp, Homo sapiens
aaagggaggtgtttagctcccatttggcagatgggacaactgaggctgagcttgacatagcgcgttttcccaaattctgcagcagtaagtagcagtagagcgcaaactaatgtccacgtgta

SEQ ID NO: 331371 - DNA, 122 bp, Homo sapiens
gtgtgtggagtctgtggcaatagacacagagatggtaacactctactacacacacacacacgcacacacatacttgcatgtggatgcaaacacaattggtgcatgggttttgtttaacaaat

SEQ ID NO: 331372 - DNA, 122 bp, Homo sapiens
aagcatgtttatgaagaccatttgaggtagagaacatgcaaagatacattatacaaacagcgtaagtacctggaaatcacagaggaagtgtcctgatatcagttgcattttcctttaaaaat

SEQ ID NO: 331373 - DNA, 122 bp, Homo sapiens
ggaggagcccctgggggatggggaccccattctcctgcttgctctggttcccacctgggacgcctccgtaggagcccagaaagacgatccactacatggtcccgggacagagcagcgcgccc

SEQ ID NO: 331374 - DNA, 122 bp, Homo sapiens
cagtaagaacagagaaaatcccaggaagacaagctccttcagtcttctcaacaacacctccgcagaaccacccactgtgtgaggacaagctgcttagatgtgtccccgttactgcagctacc

SEQ ID NO: 331375 - DNA, 122 bp, Homo sapiens
ccgcttccttcacactgggtcgccccaccagccgcctgggttccagtttagcactgccgacgacttgctgtgcctggcatgtccttgctcccaaatgtcacatctatgaagcctcaccctaa

SEQ ID NO: 331376 - DNA, 122 bp, Homo sapiens
atcatagctcactgcagcttcaacctcccaagctcaagtgatggtcccacctcaacctcccgagctcaagtgatcatcccacctcgacctctagagtagctgggactgacgcgtgccaccat

SEQ ID NO: 331377 - DNA, 122 bp, Homo sapiens
cagttcctaagtatcaaggcaccctgggctctggttaatttgggaagttctaaacaaggtcgaggcaaatgagagccaggagtttccagaaccatcaagaggatacagccaaagaccacagt

SEQ ID NO: 331378 - DNA, 122 bp, Homo sapiens
cagcctgcacagcaggtagaatgatcctcctcagtgatcgctgtcgtctttttctgaccccgaaaccatcagcgtttctgattgcgcactcacatgaggcttgtagctcagcttcagatgct

SEQ ID NO: 331379 - DNA, 122 bp, Homo sapiens
gtaaatttccagttgtagaagcctcttgaaggcggaaagcccttttttgaaaattataggcgatatgatctcctccagtggacctagcactgggttaagagtctctccagacttgtcactgc

SEQ ID NO: 331380 - DNA, 122 bp, Homo sapiens
ggctcggagtgccgggccgtcggttcttcattcctgccctcggggcagacggagtgaccccggcccccactccccgccccgaccatggtagtgttcaatggccttcttaagatcaaaatctg

SEQ ID NO: 331381 - DNA, 122 bp, Homo sapiens
gaatagccacgcgttgtctgtcctggaaggaacaagccagtgagagccggtttaatggggcggccggcgaaaggggcttggtgaggcccgcgctcctcggggtgggggcgcggggatgggtg

SEQ ID NO: 331382 - DNA, 122 bp, Homo sapiens
ggaacataaactgagctaattaaaaggaactgcaaagggctgttggaaatgatgcagacgcgtgcatcctttgctttcagaccatctttgacctttttggaatgtgcagtcatttcccctcc

SEQ ID NO: 331383 - DNA, 122 bp, Homo sapiens
tggtggtcaggaagggatcattgtgattggtgagtgaaggcacgaagcaagttaggcccacgggtggtgactgatgttttgatctatttgttggtcacctggtccgccacaaagctatctcc

SEQ ID NO: 331384 - DNA, 122 bp, Homo sapiens
ttgtgatttgtcgtttccagtccagctagagtcccaaggccaagaactagacccttgcagcgagatccgcgcccccccccaccccaccccgcctcattctccacaggcgccacagccacagg

SEQ ID NO: 331385 - DNA, 122 bp, Homo sapiens
tccagcctgggcaacatagcgagaccagaaaataagcaagtaagttactctctgggctgtcgtaacttattttttctttttctcctgcaaattgcaactcagaacatttggtctgccagact

SEQ ID NO: 331386 - DNA, 122 bp, Homo sapiens
acatgggactacattcccatagggcagcttagttacttaggtaagattcccaggacactgcgcgaggccagccaggcatgacaagaaagggcaataccctgccccatggaaggaccgttcaa

SEQ ID NO: 331387 - DNA, 122 bp, Homo sapiens
cggtgggatcctcaggccatgttgtggctttctccacaacatttccttgtatgtggatagcgtgaaagaagcttgtgatcctgcccccaccctccccaccgccacattttttaaagtgtaag

SEQ ID NO: 331388 - DNA, 122 bp, Homo sapiens
atagagtgagcatgtgatagagtgaacacgtgatagagtgaacacgtgatagagtgagcacgtgacagtaaacatgagctagagtgaatgtgtgaaggtgaacgtgaggtggagtgaacgtg

SEQ ID NO: 331389 - DNA, 122 bp, Homo sapiens
gccccctacgcggggtggtggcaggaaaccggttcctgagttttccttctttctcttcctcgacacgacctccccaccagtgtgtttctgtttatcctcctcgcccgggggctgggtccctg

SEQ ID NO: 331390 - DNA, 122 bp, Homo sapiens
caagcatgtcataagcagccattgttgaaacagatatgctgcaggggctggagtgacaatcgctaaatgtccccccaccacacacacacacacacacacacacacacacacacacctgcccc

SEQ ID NO: 331391 - DNA, 122 bp, Homo sapiens
agaaaacaacctggctccagaaagacaattaacaaaggctggagaccagccaccccctcgcggcgcacgcacgcaggcagctgcgtgggcatagccgcgcccgccagcgccctcggtgggca

SEQ ID NO: 331392 - DNA, 122 bp, Homo sapiens
tccctgtcatgttgaaaaggaaagtccagaaagatttggctgtgtgttgcctgcactactcggggccctagaatacaaatatggtagctgactcatggggtaagtatctccctatgtcagac

SEQ ID NO: 331393 - DNA, 122 bp, Homo sapiens
cttagggtggccaggcagttgtttgggcaagaggaggcaagaatttaaattagaaggcaacggtgggagtgtaaagcaggaatatttagcctcagctggactgagagtatgtgatatcacag

SEQ ID NO: 331394 - DNA, 122 bp, Homo sapiens
aaagagacttttttgattagctatggagaaaacgttcttcatcaaacatgaaatgcaatccggaaggcacaggtttctctctctctctctctctctctctctctctctctctctctctctct

SEQ ID NO: 331395 - DNA, 122 bp, Homo sapiens
gtgggagggtctggccccgagcccgggaagggagagcagagctggccccgggacccagcgcgcggtcgccctctgtcttgacccctgtctctgcgaggctctgggctcctgagtgactgaag

SEQ ID NO: 331396 - DNA, 122 bp, Homo sapiens
ggggaaactccgcgagcgacgcgctcgcccgcggccttccttgtcgctctcggatgttcccgattaatgggctccaagtgaccactgccaggtcggggaacacagcggtagtttttaagggg

SEQ ID NO: 331397 - DNA, 122 bp, Homo sapiens
gagcccagcaatctgccctgctctgagagctctaaatggcacgcgtcatgaccacaagcacgtacacacacatgcacatcccagaggaggcaggtgcagaggaagggctggctgtggcctcc

SEQ ID NO: 331398 - DNA, 122 bp, Homo sapiens
ttttctacataccagtcaataattcttcccatatcctccaatgtacactcagattttccacgtggtcaaacacaacaaaatcccaggtccacatcttctctgccctcccctccacccatccc

SEQ ID NO: 331399 - DNA, 122 bp, Homo sapiens
caggtcctgagccttgccctgtggggaggcggctgaggcccggggagaattcaagtgcggcgtgggcgggccggcagtgctgggggacctggcgctccctccgcagctgctgacccaggtgc

SEQ ID NO: 331400 - DNA, 122 bp, Homo sapiens
cccgcgcttccagcttctgcagctgcttcttgccgcccttgagggcgatctgctcggcttcgtccagccggtgctgcaggtccttaatggtctgttccatgttcttcttcatgcgctccagg

SEQ ID NO: 331401 - DNA, 122 bp, Homo sapiens
ttacacaacacatatttatctctcatagttctggaggctggaaagtccatgatccgggtacgggccaacgtggttcctggtgcgggcccttttcctggcttgcagatggcctcgtttttgct

SEQ ID NO: 331402 - DNA, 122 bp, Homo sapiens
agccatgagtgtgtggtaatgtgctacagcagtaacagggagctaacccagacgtcatcccggacacttttcacctgtgccctgaggctctgggtcctggaactaacccagacttcatcccg

SEQ ID NO: 331403 - DNA, 122 bp, Homo sapiens
gttacgtaatctgcccctacagctaaaaggacggaggcctgacggcgtggcctggagggacgcgctgagcccctaatgggtggtgccttcctggtgcggccgcacaggcggggccgggcgga

SEQ ID NO: 331404 - DNA, 122 bp, Homo sapiens
actgacggctcacagaacagttacatttcaatatcattcgactgaaaaccatcctgtggacgccgtgcgagcattgtccccatttcacagcttgggagctgcgaccagagaacgtgggcgcg

SEQ ID NO: 331405 - DNA, 122 bp, Homo sapiens
cattgaggagaaacggagccaagccagcatgcgacaggtagccctcatgggacacaaccacgaggcggcctcggccgtaggaggaggcagcaatgagcacctggcccttgtcattcaccatc

SEQ ID NO: 331406 - DNA, 122 bp, Homo sapiens
ccttgtcgcgtgtttccacccttcgtatgaggcaggtaccatgggtcttcaccaacagcacggcctgttgtctccaggaaatggtagcccctcacagtgctttctgtctgcttgtttagctt

SEQ ID NO: 331407 - DNA, 122 bp, Homo sapiens
ttttaaaagtttccagtacccccaatccgtgatgtttccttccgcgttgcacctcctgcccgtcaagtgactagtagagggtatcttctaaagacagccagaaagtttcgacagtgtttggc

SEQ ID NO: 331408 - DNA, 122 bp, Homo sapiens
ctggatccagtgccagagccagcacagcagttctctgcctgtgttccacgtgtgggcccccgctggcccagccggccctggccagtgacagttgcgtgtaggtgtctggttggttgctgggc

SEQ ID NO: 331409 - DNA, 122 bp, Homo sapiens
gaagctgggggccgggcaggcaccggggtcagtgcagcgagggtcaggggttgctgggtgcgggcagtgggtgcagatgccgccggcacagacgccctgtgagtgcctgggcccaacccagg

SEQ ID NO: 331410 - DNA, 122 bp, Homo sapiens
aaaggcgggtgaaaaactgcaatcagaactctccgaggctggcacggagaggcagagctgcgatagtcctgttccgaggacagtagattcgccctgaggactattcaaagctgggcagtgat

SEQ ID NO: 331411 - DNA, 122 bp, Homo sapiens
acatgctctgcagagaaatcaaagatggcggttgtatctgctgttcgctggctgggcctccgcagcaggcttggccagccgctgacgggtcggcgggcgggtttgtgtgaacaggcacgcag

SEQ ID NO: 331412 - DNA, 122 bp, Homo sapiens
gcccggtgccagcgctcggcttcggtggattctcccgggtctgggctcacgtctcctctgcgcgccttgtgctcccctatcccgcagatacgcaggcttctggagaccctgggtggacgccg

SEQ ID NO: 331413 - DNA, 122 bp, Homo sapiens
ggggacgaggccggaggatgagcgactgagggcgacgcgggcactgacgcgagttggggccgcgactaccggcagctgacagcgcgatgagcgactccccagagacgccctagcccggtgtg

SEQ ID NO: 331414 - DNA, 122 bp, Homo sapiens
atcgcagcattgcaaatagcaataataaggccttctatttatgtttactgtacactcaggcgtttggctgggaccacggcttattcctaagcaggtacaggacattagcattacctgcccaa

SEQ ID NO: 331415 - DNA, 122 bp, Homo sapiens
ccccacatcattctcaaccgccgcacctcgggcatcatcgagatcgagatcaaaccgctacgcaagatggagaagagcaagtcctattacctgtgcacgtcgctctccacgcccgccctggg

SEQ ID NO: 331416 - DNA, 122 bp, Homo sapiens
gagcttttggagaatgttttttgttactgttgtttgacctacttcattcccttcagactccgagaggtcataacacacgatataaagtgcaaggttaataatggagaatgtcgcattcagga

SEQ ID NO: 331417 - DNA, 122 bp, Homo sapiens
ctgcggacaccggcgccatctgttgggccggcgagggctttctggtccaaaccctgggagcgacagctgaactgagaacagtgggggcaacgcagtctgattctcctgggcctaatggtttt

SEQ ID NO: 331418 - DNA, 122 bp, Homo sapiens
gccaaacatgaataatcacatgtgtaaccacacctcagcacacactacttatatgtaccacgccaaacgaaatcacacccacatctgacctacacacccctacgtacacctagaatgaccaa

SEQ ID NO: 331419 - DNA, 122 bp, Homo sapiens
cgctgttcgctcctaatgcaatctttgctctttattttgggaggttgcatttttttctctcgcgatcgcttctcttccccccccttcccttccctccccaccccccaccccatccttgctag

SEQ ID NO: 331420 - DNA, 122 bp, Homo sapiens
ccgggagctaggaccaaaccaggagtcagctcagtccaaaggaaatcagggttcaggtagcgacggtgtccgtgcgtttcttcactagtgcatgtgcgaggagggctggaggcatgagcgaa

SEQ ID NO: 331421 - DNA, 122 bp, Homo sapiens
aggctgaggcaggagaatctcttgaacccagtaggcagaggttgcactgaggcactgagtcgagattgggccactgcactccagcctgggagacagagtgagactctgtctcaaaaaaaaaa

SEQ ID NO: 331422 - DNA, 122 bp, Homo sapiens
tggcagcgcaccacaagtccagtcaccctcggcgcccggagatgacgtcacgagaccccacgtggtccgaactccgccctccgtgttctgcctaacccagcaaggaggcccgagtcgctctt

SEQ ID NO: 331423 - DNA, 122 bp, Homo sapiens
atctcgcagagctttggtctgaaacaattattctgttgctaaagaaccttcagaagctgccgcgcgcaacccacgcaccacccagtcacaccccgcacggccgcctgactgtccctggtgtc

SEQ ID NO: 331424 - DNA, 122 bp, Homo sapiens
tggcctagcccagtccaagtcagaaggcctaagaacctgggaactgagagggtaactctccgtacaaagagtcctggagtcccaaggccagggaacctggagttctgatgaccaggggcagg

SEQ ID NO: 331425 - DNA, 122 bp, Homo sapiens
accagcacaagcagctcaggggctccaccttctgtccagatcatgacacaggagagactgcgggagaggctgctgccaaggacgtcacaggcagatggaaggaagcttagaggcccctactc

SEQ ID NO: 331426 - DNA, 122 bp, Homo sapiens
gtgtcagctgcgtctctgagtcaccttggaacccctcgaaggagcgcggggctaggagggcgcatcggtgggcccggggaccccgctgctaggtgtggttggcgccaaggccgcctctggcc

SEQ ID NO: 331427 - DNA, 122 bp, Homo sapiens
cagcctcgctccggcctccagcgcgccctggggtgtgccccgccagccccgcgcagtagccggagctgggaaactaccccggagtccagcgagtcctcagggctacctcctcccctcccagc

SEQ ID NO: 331428 - DNA, 122 bp, Homo sapiens
gcagcgctaaaatgcgctcagccaatccggcagctggcgcagacacgtggttcgggggcgcgctccgttgctggccctggatgctaaccctaggaaggcttttcaaagagaaaccagattcg

SEQ ID NO: 331429 - DNA, 122 bp, Homo sapiens
cagaggttcctgtattagtgctgccctgtactgacttgtgagtctccagtaacaatcctccggtgtggcacagctacaagcaatgaccagggaggcccaccttgaatcctgaacctctttgg

SEQ ID NO: 331430 - DNA, 122 bp, Homo sapiens
tgcctcagcctctgccgaggggcccgcggcgcccgggcaggcaggaccactgggcccacgcgtgcctctggacgggcctcccagccagcatgtgccgtgttgtgttcgcagaaagaagagca

SEQ ID NO: 331431 - DNA, 122 bp, Homo sapiens
atctcggcggtcacacagagttcacttaccgtagtccataaggcaccccgtcccgaaaagcgccaagtgcacgaccatcggctttaccgcctgctcagcacgcctaatgcccgccccggctg

SEQ ID NO: 331432 - DNA, 122 bp, Homo sapiens
ggatcctcctgccttagcctcccgaagcactggaattacaggggtaagccactgtgatttcgagctgtagaaaagattcaatgagatcatttacgtaaagcattttagcatggtgcctggca

SEQ ID NO: 331433 - DNA, 122 bp, Homo sapiens
ccttcccacgtgtgtcttagctgtctaggcagtacttcctgcaaccccccccccacaccccgcgcattttctaatcccgagccgaggactaaacgccagggttaggtatcatcctttttcca

SEQ ID NO: 331434 - DNA, 122 bp, Homo sapiens
aaaaagttaatctgaacttggcaactatgtttttgttcgtggaaacctggttatccagcccgttggcacagctggtttgggttttgattcccagaactcagtctacaggcctttccagcctc

SEQ ID NO: 331435 - DNA, 122 bp, Homo sapiens
tcaatcacacgacatccaacacatgccataggtgggtaatgtcaagcaatattcaccccccgcccctgaatccttcacttggtcaggagacaccctgtatctactgcaaagacttctgtttt

SEQ ID NO: 331436 - DNA, 122 bp, Homo sapiens
taggtgaagaatggcccccaggtccccgagacatggagacgcagatgaagacggagagcgcgtcggggcccactcaccactccatcagcctccatgctcggccctaaggacgccacggcaca

SEQ ID NO: 331437 - DNA, 122 bp, Homo sapiens
gcccagacactgaggacacggggctggtccacgcccagacactgaggacacggggctggtcgacgccgagatactgaggacacagggctggtccatgcccagacactgaggtgccctgagct

SEQ ID NO: 331438 - DNA, 122 bp, Homo sapiens
gcatgcggaggtcctgggtgggcgcttgggtaggtggctgtacgtgtggatttgtgcatgcgggcgcccgtgtggcacgagtgtgccaggcggcgaatgctcaggtggagggctgcagcctg

SEQ ID NO: 331439 - DNA, 122 bp, Homo sapiens
gtccttttcccacatctgcattgtgagtgagaacatttcgccagattgtggctctttaggcgcggcacacacgtggtttttgatccgtctcatcaaaagacttggaatgtccatcgcggtgc

SEQ ID NO: 331440 - DNA, 122 bp, Homo sapiens
ccagctcaccagggtgatatcactgggctccagcaagggcaaggccagcttcgcaggtgacgatgccccgtaggccgccttcccctccatcttggggcgcccgcgacaccagggcatgatgg

SEQ ID NO: 331441 - DNA, 122 bp, Homo sapiens
gaagggccctgaggaaggcacacttgctcctgttggtccctgtccttgctgcccaggcagcgtggaggggaagggtagggcagccagagaaaggagcagagaaggcacacaaacgaggaatg

SEQ ID NO: 331442 - DNA, 122 bp, Homo sapiens
aacggagcagagctttcactcctatctacatcccaattccagccgcccacgatattttatcggtctacgtatcagtatgaacggatgcacatatttactaagaggatcctaaaaattcctgg

SEQ ID NO: 331443 - DNA, 122 bp, Homo sapiens
aaccttttccccgctccccaagtgattgttgcgcgctccggtgaggggacagtggtacctcgatttcccgtgtgccagcttcgggactcagctgtgcttttgtgtctctttgattagcaaaa

SEQ ID NO: 331444 - DNA, 122 bp, Homo sapiens
acctcctccgcgacgttctctaacacacaaaacacttccgcaattcaaatttgaagagcccgccctccagccagcccgggattggcacgctcgggaattgcgccaccgtgcgtctcacaggg

SEQ ID NO: 331445 - DNA, 122 bp, Homo sapiens
ccgccttccctcccagtgggaaggccaccctgagccccaaaccacattctgttccttcctcgtcattctgcagacaatggtcatccacagaccacacgtgtggtggctttggcaaccagaaa

SEQ ID NO: 331446 - DNA, 122 bp, Homo sapiens
ggcatgggtcagagcatcctgtcagggtcatgggccatgagtgaggcagcgtcggttcgtcgagagtcagcctttgggccactggggttttctcagggagccaacaggttacccatcaggag

SEQ ID NO: 331447 - DNA, 122 bp, Homo sapiens
tacaaattaaaactagaattttgctcccttggtattcctaaataagatctatgttatgatcgttgttcagactgggtaaagaagcagccctaaacttgatctctcctggtcttaatctctaa

SEQ ID NO: 331448 - DNA, 122 bp, Homo sapiens
gggacactctgtgaccaagggctttatgagtatttcagagaacaatcagatcaggctgcccggtttatgccttggcttggctgcgggtcagctctagaagggggtgtggccttccttcttgg

SEQ ID NO: 331449 - DNA, 122 bp, Homo sapiens
aggggccgggtgggatccaggccggaatggggtcgcaccctctctgtcttgcatgttttgcggagcttaacatccataatgaagcaaaatggaagtcttttgggataaggggaatctgtagg

SEQ ID NO: 331450 - DNA, 122 bp, Homo sapiens
cagaccggaagcggaaccggtgggggcggggcttgccgtagcggacgttctggagcgaggcgccggccccttgggccccctcaagccgcggtgtactccagcggccccctgtggcctctcca

SEQ ID NO: 331451 - DNA, 122 bp, Homo sapiens
tccctcccagcccctgagtcatgaacagcaaggagtgtttgaagtttctgctttgaactccgtccagcctgatccctggcctgagcaacttcacaacagtaattgcactttaagacagccta

SEQ ID NO: 331452 - DNA, 122 bp, Homo sapiens
gcggggcctcgcgctcagccttaaagggccagggccatagtggcgcaagctgggagagcacgaaaaggggcaccaggaacgtctgtgctcttgggatcaagccgactgtgatttatttattc

SEQ ID NO: 331453 - DNA, 122 bp, Homo sapiens
aggtgctggggacgcagacgccggagccagggagcgggcggttggagtcttaagtccaaccggttccccgcataggtggctgcagaggcgaggtgacggcgcgtgcggaacgaactctgcac

SEQ ID NO: 331454 - DNA, 122 bp, Homo sapiens
cgtaggagcggcgagcagcggaggtgatgcgtctcctctccatcctgctctggctctgctcgctcctgggatgcgagggctttatgaaggagtgggctagactggcgatgcccgggtgcccc

SEQ ID NO: 331455 - DNA, 122 bp, Homo sapiens
ctcactgacttcaagaatgaagctgtggaccctcgcggtgagtgatacagttcttaaaggcggcgtgtccggagtttgtttcttctgatgtttggatgtgttcggagtttcttccttctggt

SEQ ID NO: 331456 - DNA, 122 bp, Homo sapiens
agtttagtgtggaaaccaccgacccgcgccgcagctcacgcgcgccagaaggagaccaggcgcttctccgccaggcctcatgcgcggacctattgctgctattttctttttcttaaaaaaaa

SEQ ID NO: 331457 - DNA, 122 bp, Homo sapiens
acgttcgttgtccgacgtccacctcgggacttcttcggcatcttaatgtccaagcctgtgcggagagccaagttgttctaggggctttcattgccacaagaaacatatttttcgtttttcgt

SEQ ID NO: 331458 - DNA, 122 bp, Homo sapiens
cgcacttaataagaatgaatatgtttccttcaagcagtatgtgggcaagcacatcctcttcgtcaacgtggccacctactgtggtctgacagcgcaatatcctggtaagagaattcatagtt

SEQ ID NO: 331459 - DNA, 122 bp, Homo sapiens
ttttaataagctcaccagatgataccaatgtccgctgacgtttgagaaccactgcttttccggggcggtggtggtgggtggcggggggtgttggtgggggctctctttacgttgccctggct

SEQ ID NO: 331460 - DNA, 122 bp, Homo sapiens
tcccgcggggtgggaggcggtgttcaaagtcccgggacgcttcccgcccctcccccttcccgccttcttagaggagacctcggatgagcggccctaaaatccggattctcgagcccctcccc

SEQ ID NO: 331461 - DNA, 122 bp, Homo sapiens
ccagcgccggagccggagaggccagggaagagccttcccccgaggccagccaggcagagacgcgggaacataaaacacattccagcggttggcatctgggcgcgcagctgccaggcgcagcc

SEQ ID NO: 331462 - DNA, 122 bp, Homo sapiens
cacggagctagggtccagtcttgcactgtggctttagtggtccacacagcctcctccatccggcttctgcggaagagcggtgtcttcctgcttctttaggttttcagatagtggaagctgga

SEQ ID NO: 331463 - DNA, 122 bp, Homo sapiens
tgagctcgctcacctctgcccgcctggcctcttcccactccctggcctgggcgaaggcggcgtcatagcgctccagctcgaggtcccgctcctccagcacctgaaggttgtagacaaagtcc

SEQ ID NO: 331464 - DNA, 122 bp, Homo sapiens
atttttaaaacccatttaaatttttttccttacctttttatttgcatgtggatcaaccatcgctttattggctgagatatgaacatattgttgaaaggtaatttgagagaaatatgaagaac

SEQ ID NO: 331465 - DNA, 122 bp, Homo sapiens
ctttctgctggttttgtaaacacaagaaacattcctgtgggtgagtgcataggctggatacggctgggggatgagcaaaccactgtgcctagaggaaaggattcacatttcacaggcttttt

SEQ ID NO: 331466 - DNA, 122 bp, Homo sapiens
ccatgcatggggttttgtcaccccccatccctctgtatttgggggcagcacctacctgggcgatgaacggagtgatgagagcacccactcttgccatgccgctgcaggtgcccaggccgagg

SEQ ID NO: 331467 - DNA, 122 bp, Homo sapiens
gccctggccacagcgacagcccctgtggagccggccgaggcctcggggcggggttgtggtcgcggcacctgcaggacgaactggtccggctcgctgaggcggccgggcgcctcgcggaaggc

SEQ ID NO: 331468 - DNA, 122 bp, Homo sapiens
gggtcagctcggggaggaccctgcgggcgtggcggcagttatgggtgaagcctgagggggcggggcctgatcggggcggggtcttcgggggcggagtcggctggggatggagccgctcgggc

SEQ ID NO: 331469 - DNA, 122 bp, Homo sapiens
tctgtggctcctagagttgatcccagctggaaaagtagacctgtccctactgtctggtcccgcgccctgggagtcttgtaggcgtccctctgtcccccagcccgggcatcccgctcggtgcg

SEQ ID NO: 331470 - DNA, 122 bp, Homo sapiens
tggctctctggatactgctggagacttcagtttgttaagagctaaccctggactctctcccgttcctgcctgcatgtcaattcatcttatttctaataaagccaattcttatttttctaact

SEQ ID NO: 331471 - DNA, 122 bp, Homo sapiens
tgattcccacgttggttgtgctgcaaggaccagaggtgggacgtcactcagagttgggagcgctgtgtcctggagagctggggtagaggtgactggagtcctgctggtcttgggtctgaaat

SEQ ID NO: 331472 - DNA, 122 bp, Homo sapiens
gaagctggccatgagccgctgggacccccacggctggaatgcttgtcggctggttcctggcgccctcattcactttgctttgcattcagctgctgctcagcagagacttccttaggcagaag

SEQ ID NO: 331473 - DNA, 122 bp, Homo sapiens
ctgcgatcctcacccctcctgctaggagaggctgcgggctgcccgcggacgatgtggccgcggctgctcccgagcgcatcttcggcccgggtccccgccgccacccctcttctctgctcctt

SEQ ID NO: 331474 - DNA, 122 bp, Homo sapiens
taaaaagaaactgagaggtgacaacgtgctagcagccctcgctcgccctgggcgcctcctcggcttcagcgtccactctggccatctctggccattgtcgacgagcccttcagcccgccact

SEQ ID NO: 331475 - DNA, 122 bp, Homo sapiens
gctgctggtggttccacggagccgccttacactccctccctttcgcacatggccggtggacgagatgatttcgcccctcctggcaggatcccacccaggccagctttggggtcctggcttgg

SEQ ID NO: 331476 - DNA, 122 bp, Homo sapiens
ggcaagccccaagcggcaggcaggatctgaccagtgttcacgtgtgctcacactggcacccgtgggaaggacaggcgagcgtgccgtgctgtgtgcgtgcacatgcgccacagcggcccaca

SEQ ID NO: 331477 - DNA, 122 bp, Homo sapiens
aattattggtactaggcatagtttcaggaatacagtaggggagctggaacatatcccctacggataagggaggatttctgtaacgtaattgcttttgtatattatcttccctattaggacaa

SEQ ID NO: 331478 - DNA, 122 bp, Homo sapiens
tctccttcctgcccaagtctagatctttacagtgccctgctgaactactgctgcagcttccgggctggtctcccggcagacctggatcgcctctgcctgtccagtctggctctcaggctgcc

SEQ ID NO: 331479 - DNA, 122 bp, Homo sapiens
ccgggcccggcctcttttcttgcttggtttaacattttttcttttcttttttttttttcccgcttagtttaacatttgcctggcagccaacagggcccttcagttgcacagaaaaagacaca

SEQ ID NO: 331480 - DNA, 122 bp, Homo sapiens
tggaactccacatcctggagcaccggctgcaagttgccagcgtcgccaacgagagtataccgctgttcacctacggcctgatcaaacttgccttcctgtcctccaagaccaggtaagcgcgc

SEQ ID NO: 331481 - DNA, 122 bp, Homo sapiens
gccaaaaggtcccccgttccccacgggccccaggagttctccacacgtaacccgactcaccgccagacgccgaccagcgcttctgtccggttcaaacttcggaccaacctactcaccatgcg

SEQ ID NO: 331482 - DNA, 122 bp, Homo sapiens
cgtgggggccggaggtgtacaggtgccgcaggcggatggggtcgccccagccgtagtgcacgtggggccccgcgtccgagaaggcgagggggcgcccggccacggccagccagaggccggcc

SEQ ID NO: 331483 - DNA, 122 bp, Homo sapiens
aacatgtggcccagcctattaaaagaaaaacaaagtaaaaatttgggcatattttaagaccgagttaaagctcttgggcccaatttatttcgaaagtcactctgagaacattgcactgtgtt

SEQ ID NO: 331484 - DNA, 122 bp, Homo sapiens
gtcaacgtcataaaagtatttttatggttaatttgagtaattagagaaccaatgtgttggcgtgtagttagttataaaattatcagtctcagcacaacattgacttaaaggcagggtgatcc

SEQ ID NO: 331485 - DNA, 122 bp, Homo sapiens
gctagatcgtggctgcacctattgcattcgaaggcatttgacggtattggtgattctgcacgtaattagtggagttgtctcaaacctttgcctccgccaaatgaaacctccatttgagtggt

SEQ ID NO: 331486 - DNA, 122 bp, Homo sapiens
gacactttcaggttcaggcaaacctagagtcactctaggaataaaaagtcctgaacaaggcggtctgcgggtcactcagcggccaagaccaagggctggtttccccttcaccgccaagtcag

SEQ ID NO: 331487 - DNA, 122 bp, Homo sapiens
ccgtgggaatctaacccacttttgtattcctaaacgcctaaaacctgccactggcatcttcgcataataaggaaccagtcatcgctcgtctgtgtcctggaacatatttataagcctatgtt

SEQ ID NO: 331488 - DNA, 122 bp, Homo sapiens
aacccacccccactctgttctctgaataatctgagtcaaaagcaagaaaaagttctgaatcgagagcagtaaatatctctggaaagtttggggtttcttgctacttaagcctcaaagctttg

SEQ ID NO: 331489 - DNA, 122 bp, Homo sapiens
cgctcggctcgctctccctgctggcctgggaacttagcgatttggaacccactacgtggacgatagccttgagctttaattgggcttgggagcttctacaggaatttttttttttttttgag

SEQ ID NO: 331490 - DNA, 122 bp, Homo sapiens
aggaactcacatagctgaaatccccttacagttcctctgagaaatatgtctttaaataagcgcttagtcatgggacattttatcactgattcaacaatcactctaggcctttattgagatgg

SEQ ID NO: 331491 - DNA, 122 bp, Homo sapiens
gaatcacatcacagtaaaatggctacataaacacatgtgcacacaaccagcccagagccccggggtgtgcagatggacgcctgggcttgtgaatgccgggccagggaaggagcgatttctag

SEQ ID NO: 331492 - DNA, 122 bp, Homo sapiens
gtatcccggtacgcaaaataggaattgcttagaggcgccccggggtgcctttccttacctcggtggacacacaccttcctcacagtcaccttcctcccacgcaagccccagcaacggccact

SEQ ID NO: 331493 - DNA, 122 bp, Homo sapiens
gtcaagtgacatcaacgcaggggcgggctcggccactgatttgctgcgtggcccgtggcacgtcctgcgtacaatctctgggcctacagatttcccgcaagtacagtaagggcgttgaaccc

SEQ ID NO: 331494 - DNA, 122 bp, Homo sapiens
cccttccaaaagtaggtgacttcactgtcatttatacagtaaagatggtcatggtgccagcgattttagagcaaatgttatttcccttcctggtgttttggaaagaagcctcggagctggaa

SEQ ID NO: 331495 - DNA, 122 bp, Homo sapiens
ggggtcacctcttccttgtgggcgagtggtggaagggcatcctcctgaagtgggaaggcccgctgtggaaggaactgtcctggaaatttgccatccaggctgcttctgagccatggggtcgc

SEQ ID NO: 331496 - DNA, 122 bp, Homo sapiens
ctccctcctagggttggggaaaggatgaaacaagctgatacaaaagagggatgcttggcacgctgtaagtgcaatacgagtgtcagctatgattactcttactcagggttgtgttcctggcc

SEQ ID NO: 331497 - DNA, 122 bp, Homo sapiens
acagggatgtgggcgggcctgggacgggagtgggaggggccgcggggaaagcttcggcggcggagcgcacctgtcccagctcaggtttctggctggtggttttcgtggcacgccctttgcac

SEQ ID NO: 331498 - DNA, 122 bp, Homo sapiens
taatgaggaaattaacgtggaaagtcagacttggagctccggcgaggaaggcaggagaggcgtctggccctggcatcccggctaggaccacaaagaacttgtcaggtcttctgcagcggtga

SEQ ID NO: 331499 - DNA, 122 bp, Homo sapiens
cactgccctgtactgcctttgcaagaaacatgcacagaggaaggaagaaagaaggagggacggtttccagccaggaccaatcatggcagggtgtggggtttgttctggatattgaaggagag

SEQ ID NO: 331500 - DNA, 122 bp, Homo sapiens
agacgtcgccacccacagacctcttgggttttgccatcttggcataaacagcctcggtcccgacccctgccctttattaagccctcttcagttaacccgtcgtgtcccttctgactgctggg

SEQ ID NO: 331501 - DNA, 122 bp, Homo sapiens
ggtgggctgtgcaggtcccgccccgccctcattgtcaggagggccttaggggcctgctcccgggtagggtcagaccgatgcaagggttgggccttctaagcatgacccaggccctcctagcc

SEQ ID NO: 331502 - DNA, 122 bp, Homo sapiens
gtgcctgcggatgggcccgctagaaggagttcctctagaagctgtggagtcggtcgtcaccgtggagccagagccctcacagtgaagtggagtcagatcctagattcgtctgattttatcca

SEQ ID NO: 331503 - DNA, 122 bp, Homo sapiens
aggcggtcggcggagttctaggacgacaactactcacaagggctgggcgatcacctcccacgccacgggacggagacgccacagccccttcaactttcagttacaaacgttcgtgccctgtt

SEQ ID NO: 331504 - DNA, 122 bp, Homo sapiens
caggatccaggtaaaaaccacctaaatgaggtaatatatgggaaatccccaataaagccccgacacaaagtagacttaatttttaacttgtcctcctccctctcccagtttacttctgcaga

SEQ ID NO: 331505 - DNA, 122 bp, Homo sapiens
gagggaccagaggactaaaacaaaccagctttaataccaatatagttctctcttaaataccgtgtttcccaggacaaatgcaggggcaggctcttggcagaaagagtagaaaggaaatgtgg

SEQ ID NO: 331506 - DNA, 122 bp, Homo sapiens
acgccgatgacctcaggccccactaacaaccacaggtgcgtcaacagccacgggccgtgccggcagccagggccacatcaataaccagggtcccaccgaccaccgtaggtcccaccgacagc

SEQ ID NO: 331507 - DNA, 122 bp, Homo sapiens
gacgagagcgaggctgggaggcgcccagggcaggcggtgaggactttaagcgatgcggggcgggaggaggagtcagtaaaggattttaagcaggaaaatcctgcttaaacgtttaaaaaacc

SEQ ID NO: 331508 - DNA, 122 bp, Homo sapiens
gcggtcgcactcagagcagccagccggtgccgcggacggggcagtgaggggcttagcacccgggccagcagctgtggagggtgcgccgggtcccccagcagtgccgacactgcactcgaact

SEQ ID NO: 331509 - DNA, 122 bp, Homo sapiens
tttcgagaaaaccggaagtgcgtggtcacgccccgcgcatgcgtgcatcggggcagctcacgcttcctaaatcccgtcatccagtgagaaagcagggactcttcggcctaggcagccgggac

SEQ ID NO: 331510 - DNA, 122 bp, Homo sapiens
tggcgcagccaagctgatgataaaatgaacgatcacagccctcccaggagggcaactgcacgggtgcctccctcgcaacagtccagacctcgggggagcctctcctgcggaaacggccctcg

SEQ ID NO: 331511 - DNA, 122 bp, Homo sapiens
cacacctgcccgccgactgcggggggagccctgggcgttgggggcgttggccaagacgggcgagtgggcttctcgggttctactctgtgaaggccaaggcaagggcgtcgtcgcgcgctgcc

SEQ ID NO: 331512 - DNA, 122 bp, Homo sapiens
tgaccggtactcaagacagaatcccacagaaagctcatctgctattcaaagaattagatccgtcagaaggacaaaacacgagagtacccatatttcaatgctatttttataactccagataa

SEQ ID NO: 331513 - DNA, 122 bp, Homo sapiens
tccatcagctactaggtaaacagctgatgtgggcccttgcttattctatttacaacctaccgagaatactgggaagaggctatggaagctcagcatcctttttccttcacacgtataatgtg

SEQ ID NO: 331514 - DNA, 122 bp, Homo sapiens
gatctgagggggaaaaaaaagagagagggagagagagagaaagaagagcaggaaagatcccgaaaggaggaagaggtggcgaaaaatcaactgccctgctggatttgtctttctcagcacct

SEQ ID NO: 331515 - DNA, 122 bp, Homo sapiens
tctgcagctccttacacacctgccacaggaagtggcggaaagagccgcctgtaggacagacgagacacatgggcacctggggtgtcccggcgggaggcgacaccgttccctccctctcacct

SEQ ID NO: 331516 - DNA, 122 bp, Homo sapiens
ttttcaatataacattttggttgtccgcaacttcttggttcttaaaaccgtcttgagtatcgcagtctacatttgttctttctaaacttcaccaaattccaatgaaatttgtaattttcact

SEQ ID NO: 331517 - DNA, 122 bp, Homo sapiens
ccgcgcccaggcagtagggacgaaggccgccacgctggtttagccgaagttggggagccgcgtttctgtcccgatgattaaggctcccttctgacccccactgcaggagttgtaggtctgaa

SEQ ID NO: 331518 - DNA, 122 bp, Homo sapiens
gtgagcaggtgctctgctgctggtaactactcgcagttaaagatcttttgactctttccccgacacgctatttgtcagtgtcgttttccaccacagagccaggtatttgccccgccggccac

SEQ ID NO: 331519 - DNA, 122 bp, Homo sapiens
ttggagacctccgcgggtttctagcagctcgcggcatgttggtttcccagggcaagaggccgccactgaaggtcagctctgtctttccagctgggcactggaggctctaagtctgttttcag

SEQ ID NO: 331520 - DNA, 122 bp, Homo sapiens
ctctcctggagaatgaccatggtgatcattcctgtcatcctctgaaatcaaaagagagaacgtgggcactttcttaaaagcctgaagggaatgtagacattccgacatctggtaagggagac

SEQ ID NO: 331521 - DNA, 122 bp, Homo sapiens
ggaagggaattcacaaatgtagcctccagcgggaacagctccctggctgccgagctccagcgggaggggagtcgagcgttttctttgccacttacctagtcccctgtctacaaagctggtga

SEQ ID NO: 331522 - DNA, 122 bp, Homo sapiens
attcagacctcacaatattgaaaagccaagccagacacaccacactgggcagagatccaccgtctgtgccccactcgggatataggaaaaaggttggtagcgccagctctcaaaccagagct

SEQ ID NO: 331523 - DNA, 122 bp, Homo sapiens
attgtaaatatatctaaaagagcatgtgcaacttccgtaggccttttagactttaatgaccgcaaaaaagttaactttgtacagagatcttgataatgcaaaataaatctgtactccccatc

SEQ ID NO: 331524 - DNA, 122 bp, Homo sapiens
taactagtgccttcccaggcactggggttactgctagaccaaggtcaactaagtaacgggcgtcttcccaggcactggcgttaccgctagaccaaggagccctctagtggccctgtccgggc

SEQ ID NO: 331525 - DNA, 122 bp, Homo sapiens
aaatacaggccctgtgtaaacacttgaaacacagacaagcaaatacccacgagtctttatcgctcttgattcttggcacagttccttgcatgtggtagaggcctaacagtttttcacatgaa

SEQ ID NO: 331526 - DNA, 122 bp, Homo sapiens
ccctgtttacaagagttttaggtaattataccttattaattttaatgaactcttagagggcgaccccagtcgtgggttcggcaggatgaaacactacccatttaccagtttacagacattta

SEQ ID NO: 331527 - DNA, 122 bp, Homo sapiens
gccctgagtggctgcggcgcctgagccaggcccggcctggccgctcccagcgccctgcaccgcaggcccagcgctcgccccaccgaaattgccgaacctggttcacacactcatttactcat

SEQ ID NO: 331528 - DNA, 122 bp, Homo sapiens
gaatgacaggctcttacgtttatgttataccaaaagttagcattcttgggtagaaaagaacgtagtttataatgtagactgctgagaggtccccccagccacacacacacaaaatgattcaa

SEQ ID NO: 331529 - DNA, 122 bp, Homo sapiens
tccttttcctttcctccccttcggtcctcttaaggcttttttttttcttttctgtgctctcgctctcgcttactagctcttcttttcctgttctccttctctttcttctgctctttcggaat

SEQ ID NO: 331530 - DNA, 122 bp, Homo sapiens
gctcttttctcagcggccgcagggcagggggcggggccgggtttgtttctgtttctaaaacgcggggctcagtcgaccaggaggggcgaggtccggggagtcccggcctttcggcgtcctct

SEQ ID NO: 331531 - DNA, 122 bp, Homo sapiens
atagtctcactgaacactattgcttgttaatgttcagacactaatagcactggaaagagtcgttccttgtgtcaactcatcaagtagtctaaacaagcctgttggaggctggccagttctgg

SEQ ID NO: 331532 - DNA, 122 bp, Homo sapiens
gcagggtggacgtgagtctgcccggcctgagatcgcccctgccccctaacagtcattggccgcctcttctgcttgacagctgcacccccacgcagcccgggttcatgtggggagcatttgga

SEQ ID NO: 331533 - DNA, 122 bp, Homo sapiens
ttcattgcatcaacttcgtgacatttcagggtactcagtagccttttttcttccttcccacgtgccagataggtaagattcccagagaagtaaggttccagattttctagttcattatttta

SEQ ID NO: 331534 - DNA, 122 bp, Homo sapiens
gcctcatctcacgtctgttgggcttctcgggaagccaaatggtatcgcacgtgttaaaggcgggtgtctggaagccgaaagtcctgactaactgagaatgttgactaatccggatagcattg

SEQ ID NO: 331535 - DNA, 122 bp, Homo sapiens
ccactttgctcattttctaacctaggttttaatcaccattttacccaacaaatcattgttcgatcattatttgccagacttgaatctctatgtgttttctaggactgctctaataaagtaca

SEQ ID NO: 331536 - DNA, 122 bp, Homo sapiens
gagattctgatgtaactagtcttgagtgaagccaatcagaattttttaaagcataggatacggctgtgcatttgaagctggaagccactaacccaggcgctgatcaatgaagaactaggctg

SEQ ID NO: 331537 - DNA, 122 bp, Homo sapiens
cttcgagcctcttcggcctcacgctccagcagtgcccgggcctgctcactctcccggagccgggcctccaggctgccagcttcggttgcccgttcttcacctagccgccggcagcgccgtag

SEQ ID NO: 331538 - DNA, 122 bp, Homo sapiens
attcgcgggcccctcacacactcacctgccggtaaggatagctggccatggtgattctgacgtcacactcaggcaaggggtggggctttccgctctcaaacccgcccctcgtctcggctttg

SEQ ID NO: 331539 - DNA, 122 bp, Homo sapiens
aagatattgcctgcttcacagtaaagaattcccctttccaggttttaacaggacaagggacggctaactcagatgtatgagctttggtagtacctcagctggtccattaaaaatgtgcatga

SEQ ID NO: 331540 - DNA, 122 bp, Homo sapiens
tactcccggctccaggacccggttccccgtctatgtcccaaagtccaccccgcctagctccgcgcccaaataccggctccccatactctctgtctggtgcaggcatgggcccggcaccccca

SEQ ID NO: 331541 - DNA, 122 bp, Homo sapiens
gcgcactgagactctggcctaggcgcgggcggcagcctggcagacctaggagagcgcaagcgcggaagcacagagccgggttttgttgtttgtttgttccccacccccggggacgtctttta

SEQ ID NO: 331542 - DNA, 122 bp, Homo sapiens
agaaaggcacagtaaatatattgtattatcgtcctacgggaccaccgtcatctatgtggccgtcgtgggccaacacattggtgtgaagcacatggccgaccacgtgttgtatctgaatctag

SEQ ID NO: 331543 - DNA, 122 bp, Homo sapiens
tagctgactttggctggaggactcgctgacccttccttagagggcatgcagtctgggacacgtccacgccacctcctttccctctctcctctctcttcccttccctggtttgctgtcggaca

SEQ ID NO: 331544 - DNA, 122 bp, Homo sapiens
cttgagtaaatgaaagggtaaaagattccttgaccaagacaataaagcctgaaagaggaacggactgagggggaagatcaagttcggctttgagaagttaagtttgaaatgtcggggcaaca

SEQ ID NO: 331545 - DNA, 122 bp, Homo sapiens
gagggggcccggggctgcggccggtgtcgcgggtggggagaccccgaggtgctacctgggcgtggcgggtgggcaggcggcccgggcgaggggctcgcagcctgggcgtcagcgtggtcatg

SEQ ID NO: 331546 - DNA, 122 bp, Homo sapiens
ccggaaagttgtggggcttcgaacctaaagtttcgggggatctgggctgagcgtggccgccgctccgcctccctccgccgccatttacagtgccccggcccggccccgacgcgcccgcacca

SEQ ID NO: 331547 - DNA, 122 bp, Homo sapiens
ccaggaaggggcgggggcggagagggacaggagccttggaagcgggggcgagggaggggacgaggatagtccatttatcacgaaacaatctgcattgatttaaaccaacaagttccctcctc

SEQ ID NO: 331548 - DNA, 122 bp, Homo sapiens
caggatgaggaaaaggaggcggcggcagcgctggtcttcaacatgtccgtttggtggtggcggctgcgctctgcgtctcgctgacacggccccccgcgccctcacgcactggctcacactgg

SEQ ID NO: 331549 - DNA, 122 bp, Homo sapiens
gaaagagcagtagctagaacctctaggtcgttgaccggcccagcgcagggaccctgagaccgccagatccggtgggcggcttacagtggcccagaacgcacccgccggctcgtgttagcggg

SEQ ID NO: 331550 - DNA, 122 bp, Homo sapiens
ctggggccgttgcgcctccccctccctctctcccgcccccggcgcgccatcggcgggaggcgcaggtgtccactgcatcctgcgcgtccccatccctcgctgccctggccggggccccagct

SEQ ID NO: 331551 - DNA, 122 bp, Homo sapiens
gagctcagccccgcagggtcccgggacaaggtgctgaccggtgcatgggctgctcccccgcgcctggaggctgcccagtcctagagctgccccggggcctcaagctctccgcgtccacccgg

SEQ ID NO: 331552 - DNA, 122 bp, Homo sapiens
tgacgtgatcttggcccactgcagcctccgcctcccggggtcaagcgcttctcctgcctccgcctccccataagctgggactacaaggcgccagcccggctagtgtttttttgtacttagta

SEQ ID NO: 331553 - DNA, 122 bp, Homo sapiens
cacattctccagtgttagatattcttaagcctttgggaacatttaaactcagaattaccacgtttagatttgcttctccaaaaatacagaatgtacgttgtattagcccattctcacgctgc

SEQ ID NO: 331554 - DNA, 122 bp, Homo sapiens
tgtcagaagcggaggtttcggaggcggctgcagcctcggaatagccggtcacagccactgcgctgctgtcggtgaaaggcagcccgggacctgaggccaaacgcaagctcaggccgcagcta

SEQ ID NO: 331555 - DNA, 122 bp, Homo sapiens
tcagcagttgcacatgccagctctgctgaaggcatcaatgaaaacagcagtaggggcggccgggctcctgcgaacaacaacaaaacaaacaaacaaaaaaccacgtcgcgtgcggggcacca

SEQ ID NO: 331556 - DNA, 122 bp, Homo sapiens
gcggaagcaagatggcggcagaaagagcgcgagcgagagcgtgacccacgcttgttgcagcgggaagcaaaaagagagcatttaaaaagacatttgtcagcagtgctacactgccatgaggt

SEQ ID NO: 331557 - DNA, 122 bp, Homo sapiens
ttccttaggaaaatggcaatcacgtgcagtgtcttacattcccttctcttgctcccagtccgtaattgcttatcctcctggcatccaaacttcgctcacactggaatcagctgcagagcttt

SEQ ID NO: 331558 - DNA, 122 bp, Homo sapiens
tccttgcagcctgtcttcctggcttgaggcgagtgggggatgcacctcttgtgccccctgcgtctcctccctgagatggggtgggtggggttagggataaagacagcgctccaactttctcc

SEQ ID NO: 331559 - DNA, 122 bp, Homo sapiens
ctctgggcttagagagtccttgcatgctatgtgggtggcgttcatcctgtagtgttcctacgggtttagggagtccctttccagtacccaatcagatatacattgttctttatatgctgggc

SEQ ID NO: 331560 - DNA, 122 bp, Homo sapiens
tttgttcttgaggtgtgacgtacctgcagtccgacacgtgtgactgacagctggtggctccggcaggtggggtcttccagcagctgagacggctgcaggaggcgatgctccatctctcctca

SEQ ID NO: 331561 - DNA, 122 bp, Homo sapiens
ggttttcgtgactgcaagaagggggatcccaagcacgggaagcggaaacgaggccggccccgaaagctgagcaaagagtactgggactgtctcgagggcaagaagagcaagcacggtgagct

SEQ ID NO: 331562 - DNA, 122 bp, Homo sapiens
tgaatttcacgccccgccccccccggccccaacctgcagtttgagcgtggacaacctcagcggcagagcccgccttggttcggtatcagggcctgggatcctgctggtccagattcaccggc

SEQ ID NO: 331563 - DNA, 122 bp, Homo sapiens
cgcaggaggaaacagtaccggctggaggccggtcttgcaggagcgggggactgctgggggcggggcttggtggtgaccgctggcggggcggggcctggggctcagaggggtgggctttggag

SEQ ID NO: 331564 - DNA, 122 bp, Homo sapiens
tggtgggctgcaggtccgagtcctgccccgcagggaggcagctgaggccctgggagaattcgagctcagcaccgggacccagcgcaccctccgcagctgctggcccgggtgctaagcccctc

SEQ ID NO: 331565 - DNA, 122 bp, Homo sapiens
gggccagcgctcccctctctccaccgttctgtccaaagggctcaccataggcataggccacgtccaagagcacatctttcgtcagagagaagggcttctgcaccaggtggtaggagatggcc

SEQ ID NO: 331566 - DNA, 122 bp, Homo sapiens
gaataaataaataacgaatgatttgtttggaaataaaacaaacactggctggggtagcagcgaagctgtaaaaggctaggctggggacctagtctggttgcctgttacatgcatggcttggg

SEQ ID NO: 331567 - DNA, 122 bp, Homo sapiens
gcgtcgtccgggtcggcgcgaacccgcccggccgcggttccctgcagacctctgcgcgggcggctcggcccttcacgcccttttcgttcacgaatccgagcccgctcgcctctctccagcga

SEQ ID NO: 331568 - DNA, 122 bp, Homo sapiens
gggccactgggggggcaaatcttggcacctgcccccagagagtccagttcctccctgaagcgggtggatggaggctgcccattttagatgctcagtctcttcattctgtcttctgctccctg

SEQ ID NO: 331569 - DNA, 122 bp, Homo sapiens
ctgtccagcttatttccttgtttcttcattcaaatcatcctagacattcaactagttttccgtatcctactttcatacaaatgctcatttaaagataattaagggaatttattctctctttc

SEQ ID NO: 331570 - DNA, 122 bp, Homo sapiens
tctaaatgtcatttctgcaggctaagggaagtccagcctggatctagcatcttggaagcgcgttcagacttctggatggagggatcagcaggccttggtattggtggttctacctgcttcgg

SEQ ID NO: 331571 - DNA, 122 bp, Homo sapiens
gccgttttcgtctcgctgtgttgtccgcgagtctttgctgtgaagtgcgtctgaacagctcgcttgtgcccgacctactttttccttaaggcccactcgcggaaactagtttcttgtggggt

SEQ ID NO: 331572 - DNA, 122 bp, Homo sapiens
cggcgcctcttccatgcctgtctgatgcagcctcttgcagggatgcacgtccttgggatgcggccatagccttgaccctgggcttctggagccctgaccttaacccaggggccaagagctcc

SEQ ID NO: 331573 - DNA, 122 bp, Homo sapiens
gtttgggacctgtaataccaaggcattgcaattccccttgctcaccgtttcagctagcagcggcagaatgcctctccagaaggtgtcagcactcttgtctctggaagagctttttattccca

SEQ ID NO: 331574 - DNA, 122 bp, Homo sapiens
gagggaggcactaaatgtccagcctgggttgccctggggtgaggggtaggatgacggcagcgttaggccagaagtgccaacttttcacggtctttgttgctgcagaagtcaagaaaaattta

SEQ ID NO: 331575 - DNA, 122 bp, Homo sapiens
acgcctgttcatccgctaagatccctgtggaagccccagactctcccggggctgcccaggcgtccttttcgggactcgccacactgtgcagtgactgtggattgagtgtgtatttccctctc

SEQ ID NO: 331576 - DNA, 122 bp, Homo sapiens
gcggagggggtttcgcttcgggctaagggactgtagttgtgacagccaggaaaccgagaacggaatgccaatactgcttaggcttagagtttgaaaggcatctgatttcactgccatgtctt

SEQ ID NO: 331577 - DNA, 122 bp, Homo sapiens
tataaagaacagactgctaaattgtagagtgaaatcaggttaaccatattgactggaaaccgaattcaaattaccttgcacttggttctggggagaaatgaggaggctttaaaaatagacac

SEQ ID NO: 331578 - DNA, 122 bp, Homo sapiens
ggttccctccgttccacaccgcggctccctcggctcggagccacagggaactatgaaaatcggcacgcgaggcctaagtgtccccagaaccagaggaaccacagttgcgtcatagcagaagg

SEQ ID NO: 331579 - DNA, 122 bp, Homo sapiens
tttggatgaaactattgaatgaaattattttgggggtttctttctggctctcacagtcctcgcatgctcaccatgttcccttcaatttcattagcacagcccaacaaagggttaagcagtgg

SEQ ID NO: 331580 - DNA, 122 bp, Homo sapiens
gtgcgaagggactgtcctgcgccgctgctgcagagcggcacgggagagccacaggggctgcgcgcgccctccgcgccgtccccacccccggctgcgccagcctctcctccgcgccagccccc

SEQ ID NO: 331581 - DNA, 122 bp, Homo sapiens
cggtggtagcgcctcagtggtgtgggcctgagccctgcccaggtgcccgcagagagcagccgggctgccagcggtgagtgctatctttcgcggcgacggcggggtgggtgaggtcgggcccc

SEQ ID NO: 331582 - DNA, 122 bp, Homo sapiens
gcagtaaaaatttgttttaaaaaccaagtttagttaccaacctccagaagtgagcagagccgggctaacatagcattgtgatatcactataagctggctttggaaatgtactcacagatgat

SEQ ID NO: 331583 - DNA, 122 bp, Homo sapiens
ggttcctcttccccctccttgctgtgtgtttgatgtgttgaagcaggagggagaacgccgcgagcagcgccgtgagcaacactaccatcgtccccagcactgcggatccgggccctagcggc

SEQ ID NO: 331584 - DNA, 122 bp, Homo sapiens
atattactcccccagacttggaagccgctgccagagtgacgctttgatggtatctgcaagcgtttttgctgatcttatctctgccccctgaatattaattccctaatctggtagcaatccat

SEQ ID NO: 331585 - DNA, 122 bp, Homo sapiens
gagatgaagcctcgagctgggcctgtttccatgccaatggccttccccgtggagacacggcgatgagaagccaaaaacagtcaccgtcgctgctcagaacccctcaagctgtcaggaaatgg

SEQ ID NO: 331586 - DNA, 122 bp, Homo sapiens
cacccccgtgcccctcacttggtggttggctttggccagcgggggcccccagcaggaggtcgaggaggaagggagagcgagggcctcgtctttactttcccggcttctttgtgagctgcctg

SEQ ID NO: 331587 - DNA, 122 bp, Homo sapiens
cggcaaaaagttattgctgaggtcctaagcacagtcggtgttacgatctcagatgtgagacgtgaacggcgcccaggccggatagcttgttcccattccattgatctgagataaccccaacg

SEQ ID NO: 331588 - DNA, 122 bp, Homo sapiens
tccagacccccaatctgcccagagaagccatgacaggagactggtgattggtgcaagcgacgtgggatgaggtaatctctcccccacccctttttctctagcatccgtagactgtttgcatc

SEQ ID NO: 331589 - DNA, 122 bp, Homo sapiens
ccttatttatttttaaagtcaaaccactaggaaaatatatcacagcctggaaacagcaaacggacaggctatattataatttcaagtaataagttggtgaaaattcaacgaagttgctatca

SEQ ID NO: 331590 - DNA, 122 bp, Homo sapiens
taattcatccgtgagcccttcctgtttcctttagctggccgatcttaaactagaccgccacgaaatggagccctgagacccactctcggttttcggatttggtgagtctggggcagcgtggg

SEQ ID NO: 331591 - DNA, 122 bp, Homo sapiens
acttctgcaccaacctaacccggtaaccacgggtgtgtgaatgtggcgatgggcaagttccgagagctaggagagcatctagcttcctgggaagttccgagtggtaggagagcatctagctt

SEQ ID NO: 331592 - DNA, 122 bp, Homo sapiens
cacgctcactcagaagctcagggccgcctcgcgaccctcacctacccctcccggcaccgccgctgtcggaactgcagccagccccttgccagctggccagctggttcctccggggtccggcc

SEQ ID NO: 331593 - DNA, 122 bp, Homo sapiens
ttttaaagatgaaaactaagcccacgaagcttgagtcatctggagatgaagcagtcgcagcggagcagtcttggtaatggagaagatcatgtcagcgctgagaaaggcagggagggaggcct

SEQ ID NO: 331594 - DNA, 122 bp, Homo sapiens
ggttgtctttgtagccagttcagcaaacacctgttatgcactttgtagctgtcgcgatggcggttctatggtattgaacttagaaagtcaggcatcgttgaattcgttttggacattttgac

SEQ ID NO: 331595 - DNA, 122 bp, Homo sapiens
ccactgacggcaggcagtgttgttgggaagagagcaaaggcagggagtctggtggtgtgacgatgaagataataaaggaaattattaatgcgtctacagtattttttgcatatttatcttac

SEQ ID NO: 331596 - DNA, 122 bp, Homo sapiens
gccgtggctggtgatggaacacctggataaaaacgagtgtgtgtgtaagttgtccagctccgtcaagacaaacctaggcgttggcaagatcgccatgacccagaagcgcctgttcctcctaa

SEQ ID NO: 331597 - DNA, 122 bp, Homo sapiens
tatttctaaaagtaatcacatatatattatattcctactgtggcccttgccatggatcaacgaaaaatatgacatagtcaaaatagaccaaaacatctggccttgttgtaaccaatgggaaa

SEQ ID NO: 331598 - DNA, 122 bp, Homo sapiens
ggacctcgggagattccctacagagcccctggggacatttcgtgtttacccacttagggccggtctctgtgttcataaagtgatgcctgtgggagattctaagcacagaagggccagggaca

SEQ ID NO: 331599 - DNA, 122 bp, Homo sapiens
gtctgcagccctagatgagtcctatcgatgcctccctgcaccctgacatccaggtgcacccggctgctggcgtagcattgtgattattgctgtatttctaggctgagcacagtgcctggaat

SEQ ID NO: 331600 - DNA, 122 bp, Homo sapiens
caggggggcgatctgggaatcagtcccctgtggataccaaggtacaactgtatttattaacgcttactagatgtgaggagagtctgaatattttcagtgatcttggctgtttcaaaaaaatc

SEQ ID NO: 331601 - DNA, 122 bp, Homo sapiens
tcagctttaagggctcagacactctaagttgagcttcccagtgtgaatctcccaggcacccgtcagtggaggtctctgtatgtaagagctcttccagtctcagagaaagttctccaaacttc

SEQ ID NO: 331602 - DNA, 122 bp, Homo sapiens
ggagaaagactcagataaagacttgagtgctgtgcagcaaactccgaggaagaaaagccgcgtgcgaactggagaaggacatatgtttttgttggcaattgctccaatttcatttggacatc

SEQ ID NO: 331603 - DNA, 122 bp, Homo sapiens
aggggcctggtccccattacccagaagcctggacctccaaaccggagctattaatcacagcggtcatgttcccatcattgtcctggtgggggttgcatgcttttctggcagcatctagaatc

SEQ ID NO: 331604 - DNA, 122 bp, Homo sapiens
gaaagactcctgggccctccctttgagcatttactaaaaatggcttgcaaatacgaatcccgcctctatccctttgagatgtatatctatctccttcagctcaggagtgtctttctttagga

SEQ ID NO: 331605 - DNA, 122 bp, Homo sapiens
tccacatgtccgggggctgtcagccgtgagccaaatgtcattagcatggatgtcacaagccgggatgtcaaaatacaattaacatttaaaagccccttccgcccaagacctcgtggccgcct

SEQ ID NO: 331606 - DNA, 122 bp, Homo sapiens
tctccccagcctcctgtgcacctgctctggggcgggagcctgtgctgggtgtatccggagcgccccctgcagcccagccccaaccatgcagggaggtttctatctgagctgacagagtatat

SEQ ID NO: 331607 - DNA, 122 bp, Homo sapiens
tatgaacttttcctgggggaggggcgttctggtcatcctggcagtttggcaatggctcctcgtttctgcccagtgccccagcccatttgatctcaggatcccagcctcttttgatattgacg

SEQ ID NO: 331608 - DNA, 122 bp, Homo sapiens
cgcccactcgggtcaggcttggggagggctccttggggcggcttttgagcctcatctgctcgaagccctcatggggggaggccgagagccactcgtgctgccggatctccatcctgacatga

SEQ ID NO: 331609 - DNA, 122 bp, Homo sapiens
actttgggaagttctgaacagccccagcttcgctgcattccccaactccctgcaacccagcgtaaacaactctgcactcagccgcttggagaggttgctaggatattatcgctttgggaaat

SEQ ID NO: 331610 - DNA, 122 bp, Homo sapiens
aagttaacttagctttgtttaaaaatacctcagctgaagctaggaagtcctaaaatatctcgttaagagaaaatgtttaagtaaactgaaccattgggcaagcaagtgaagcaaacggagtg

SEQ ID NO: 331611 - DNA, 122 bp, Homo sapiens
ttgccgggggcagagggccagcaaagaaatctggggtagaaaacaggctcaaaatgatttcgctggtgccctacgaggttgacttctggttcagcgagcctactcactccctgggtagggaa

SEQ ID NO: 331612 - DNA, 122 bp, Homo sapiens
cagcccctgagaaggctgctggttaagcctgcggatatgatgggtcacagactccccgtccgaggtgtcggtctgttcctctcgccgctcccggctcccgctgcggctgttggaactggagc

SEQ ID NO: 331613 - DNA, 122 bp, Homo sapiens
ccctggtggtgcctcctcaggacctcctgcctccagccgcacaaatccccaagaatggcacgtgggtacaagggtgttgggaagtgtcatcctccagtgctgacttgagtgtgtgtgtgtgg

SEQ ID NO: 331614 - DNA, 122 bp, Homo sapiens
gtgatcaaaagcttcaggacgctggtgagtcactgcggaggagccgaacactgaccgcgccgtccccgccaggctcccgcgcggccggcaccgcggccctgagcgcaggcggccccgggtct

SEQ ID NO: 331615 - DNA, 122 bp, Homo sapiens
tgcagccccagtgtgcgctgcgcccgacgcccccaagctgcagctcaggacgccgcgccacgcccccgccgcctccgaacagccccgccccgcgcgcttcccagcacgcacacctaccgccc

SEQ ID NO: 331616 - DNA, 122 bp, Homo sapiens
ttcattgggaattctttggacacaagcaccaaaaatgacctggctagcttcagccgaaaacgagttgatatgaaggttgtatataaggcaactcacagaatcagaggaaagctgaaaattta

SEQ ID NO: 331617 - DNA, 122 bp, Homo sapiens
cgcacgtaccattcttcggcaaactctggatcaccttcacggccgcctcaaacctagtctcgtgcacggatctcgtgtccgccatctccagctgccagtgttggccccggtcccaaggtctg

SEQ ID NO: 331618 - DNA, 122 bp, Homo sapiens
gtcacccccactccacaggccaagaagcttgaagcagctcatcgagggggaccagacaaacggtggggccagggagggcttcctggaggctcagcttgctccagtgtcaacaggggagcaaa

SEQ ID NO: 331619 - DNA, 122 bp, Homo sapiens
gagaagcctggggatgtgctgtccttgttgatgcctcccctcggtggctgggagctgctccggtcaaaatggcccccgtggctacatttccctgggttggggaaagggatctggagagtgga

SEQ ID NO: 331620 - DNA, 122 bp, Homo sapiens
ggctgctccaggctgccctgggctcacagggggctctttgcatttcccttagctcctctgcgccctggtgatggcagccattctcctgaccacgagacccaaggtgagtggtggcccctctc

SEQ ID NO: 331621 - DNA, 122 bp, Homo sapiens
ctagcctggctatccctggccagggccctccctgtcctcctccccccgccactccaccggcgtcccctggacctaccgatcctgaggtagcccatctgggagagcttgcaggacgccttgcc

SEQ ID NO: 331622 - DNA, 122 bp, Homo sapiens
ctgccaaccctcacaagtagtccgctcactaaactttccttagacaaatcttttgaaggacgatctccctccaccactctgtctgataaagccataaaatgtgcgctcttcaagggcagggc

SEQ ID NO: 331623 - DNA, 122 bp, Homo sapiens
ggcgtgcagggggccttgggtgccaccgagtccgggaggaaatctaggccgccatccgtccggagactggcacctgtgaccaccacccaacatgtattgaacaagggcttggaggtcctttc

SEQ ID NO: 331624 - DNA, 122 bp, Homo sapiens
ggtcgggaccgtgaatcaccggcccgcggtgccgccggcctggagcccggcgagtggccacggcgtccgcagagcgaaacctgccccgcaggccccgaaatagcttgttgtggaaacacttg

SEQ ID NO: 331625 - DNA, 122 bp, Homo sapiens
ctgctccccgcacccacctgcacccctgccggtgcgcaccacagtctagctcatcgctgccgtcctcgcagtcctcctgtccgtcgcagaggtagtctctggggatgcagtgcccattgcgg

SEQ ID NO: 331626 - DNA, 122 bp, Homo sapiens
agagaagatggtcggtgtaacgcgcttgtgatgctcaaagagaagatggtcggtgtcatgcgcttctgatgctcaaagagatcggtgtcacgcgcatccgtgtgaagacaccgccaaacagg

SEQ ID NO: 331627 - DNA, 122 bp, Homo sapiens
gccctgttcgcgtgattgtggatgggctttgtgacctgcacagcgctgattctggcttgacggccaccacagcctcgtaaggggaggccgcagttgcgaggaaggggatgtgcttagtttgt

SEQ ID NO: 331628 - DNA, 122 bp, Homo sapiens
ttctgaaaacctgtggctaaatgtctcttctgtttatatcaggcgtgttacaccttcacacgcactagggatccaggtaagcccagcggcccgaacgtcattactgactggtgacactgcag

SEQ ID NO: 331629 - DNA, 122 bp, Homo sapiens
gacgggcagcagcagcagccagcaaaagccctcgcaaagtgtccagctgctgcactgccgcggggactcccacagcaccatgactagttcgtgcaactctgcagcagcaaacggcttccgag

SEQ ID NO: 331630 - DNA, 122 bp, Homo sapiens
gtgtgctgctttggggggaatttccctgatcccagggaaggggaaggaaatgaattctgacgagccacgtagccgcctgctcgtgcattctagcatttgttttcagcagccttacgacttca

SEQ ID NO: 331631 - DNA, 122 bp, Homo sapiens
ggagtggagatatgggcttgaggtggggatatggacctggaggctgggtctctgcacagccgacagccctgttcttgggtgcaggtaggcactgagggtgagtttaccttcagcccaggaag

SEQ ID NO: 331632 - DNA, 122 bp, Homo sapiens
ctaaggctcggcgagaaatcgagtgcagcgccagcgggccagcatttctagggaacccagcgcactccccgcagctgttggctcaggtgcactgcccggggctggtggggcgggccggctgc

SEQ ID NO: 331633 - DNA, 122 bp, Homo sapiens
tgagactccgtgggcgtaggaccctcccagccaggtgcgggatataatctcgtggtgggccgttttttaagcccgttggaaaagcgcagtattcgggtgggagtgacccgattttccaggtg

SEQ ID NO: 331634 - DNA, 122 bp, Homo sapiens
accactagataatttataaagaaaaagaagtttaatggactcacagttccacgtggctggcgggtcctcacaatcacggcagaaggtggaaggcaaaaggcacgtcttacctggtggcaggc

SEQ ID NO: 331635 - DNA, 122 bp, Homo sapiens
gccctccctagaccctttatacctactttacctttcggaggtcaagacacctcctgttgccgcctcctcgcccaacacacaggcgccccccgcacgggtaccaagcttgactaacggcctct

SEQ ID NO: 331636 - DNA, 122 bp, Homo sapiens
gcacagacgcggtcaccaccgggcttttgctccagcccaggggtgctgtggtgcaggctgcgagcctcccgccttcccagtgcgcaggctgggcggcatcggcggtgcctgaccggggacca

SEQ ID NO: 331637 - DNA, 122 bp, Homo sapiens
cgccgcccctgctggtgttggggtgccccctcctgccaccgggggtggcgatggcccgttcgcctgcccactctgctggaaggttttcaagaagcccagtcacctccaccagcaccagatca

SEQ ID NO: 331638 - DNA, 122 bp, Homo sapiens
ggcgggcactccacgatgcatatgggcaccactgaagagccaagtcttactgaagggactcggtgtgtttcacaatttgtgtcatacacaaatgtgagggtgtgttccaataggtggtgctg

SEQ ID NO: 331639 - DNA, 122 bp, Homo sapiens
aaagtgataggcagcagagctgacgggctgaggggcagctgcgtaaacctctgctttgggcgccacaagccacaagccggaccaccacgtgcgtacaggggcagcgccgggggcgtggcggg

SEQ ID NO: 331640 - DNA, 122 bp, Homo sapiens
gtggtctgtagctgtagtcccagctactcaggtggctgaggtaggaggatcaccttagcccgaggatgttgaggccacaataagctgtggtcataccactgcacaccagcctggacaacaga

SEQ ID NO: 331641 - DNA, 122 bp, Homo sapiens
gacagcatcagcactgtgataactgagccagggcagcctgtcagtcactgtgtcggtcaacggcatcctttctggtggctgcattactctctctgaaggctccccatgaagtgaaggactaa

SEQ ID NO: 331642 - DNA, 122 bp, Homo sapiens
tgttcttcagaacagaagaacctggagaacgatgttttcaaacaccaagatcctagaaggcgagtactagaaggaatttaactgcagcctgtgccactcagcttcacgaggaagaaagcggc

SEQ ID NO: 331643 - DNA, 122 bp, Homo sapiens
cctcgagggtcaaactaggcgaaagaagttcgcttttagaggaagagaggaaattgaggccggaaagaagatacctaagctttcagacatggtttacttccacagtcacacaatttaccaaa

SEQ ID NO: 331644 - DNA, 122 bp, Homo sapiens
tattcagacgagatgaagccgccaggatggctgggggccggggctccgggggtggggcagcggggtccaggggcctcagttaaccccttcccggtcctggttaacctctgcatcccctcagt

SEQ ID NO: 331645 - DNA, 122 bp, Homo sapiens
aaactgaatgcagaagaccgcgtggctgaccaccaacctttcttttcctgggaatgggctcgtcgaagagcaggttgctggcctccgcctcgtcgatgccgtcgtctggctgcgcggggctg

SEQ ID NO: 331646 - DNA, 122 bp, Homo sapiens
agagtaccaaataaatactccttcgaaccaacggtatactgagagccctgagcttgtgggcggggccccggagcctcccgggacctaaaggcagagggggcgtggctgagggtggtccagac

SEQ ID NO: 331647 - DNA, 122 bp, Homo sapiens
ccatgcccctctaaaactacagtaaagaaacatttttaaaaatacaaatcctcaaggaagcgagaataggagaggaggcgacaatatactggaagctggaaagtacgtgcaggaggtgactt

SEQ ID NO: 331648 - DNA, 122 bp, Homo sapiens
gtacccttctcctttctctacagtgcaccagtccctgtgggaccttccattggcatcctacggagagattattactcttttcattgttttccttacaaattagtttctggatttaatggctt

SEQ ID NO: 331649 - DNA, 122 bp, Homo sapiens
agagcgttagtcagagcgaagttctgggcacctggagaagaccctcctcagtgcctgtgtcgccgagacgggaataacctttcagccgatcgataacttggagagaacaggcggcggcggct

SEQ ID NO: 331650 - DNA, 122 bp, Homo sapiens
atttaataaatgtctgctgtgtgtctgccagaatagaaaggagaaaagggcagactcagtcggctggccccagtgcttaaggcagtgcaggcccaagtgggcccagcctgctgctgagtcag

SEQ ID NO: 331651 - DNA, 122 bp, Homo sapiens
aggacgccgcctcttgaagctgggtaacgttctccgtgacttcacgtgtgtcaacctcagcgacagccctcccaacctcatggtcagtggcaacatggacgggaggtacgtgagttggaagg

SEQ ID NO: 331652 - DNA, 122 bp, Homo sapiens
gacagttgtaatggcaggcacaggtcttgatgaacatcatgttcttcttcatgacctcgccgtcagggcacttgaactccaccggcagggtggtggttctgtggggggtgcagcatcggccg

SEQ ID NO: 331653 - DNA, 122 bp, Homo sapiens
atgccttttctccttttaaaaaacccaacacacacggaatataagaagaaagatttttatcgtgtttagttgtgacatctcagatcctcccatttgggtgcaatctatttttctacagagaa

SEQ ID NO: 331654 - DNA, 122 bp, Homo sapiens
tccctggagcctcacctgcccttagtatttggcatgccctgcatgccaaatatttctagccgagactatgagaaacacatctgaaaggaagccatttccctgaacagcagtacccaaagcca

SEQ ID NO: 331655 - DNA, 122 bp, Homo sapiens
ccaccgcagcccacttcttactgggattgtcacagctgtgactgctgcaacaactgagtccgctgggatatgctgaggccagtgccagtctcgggtcctctcactccttctggattcagaga

SEQ ID NO: 331656 - DNA, 122 bp, Homo sapiens
ttcttgagcaacactcaagaacgtgcacgtggagtgctactagagtgcactccacgtgcacgttcctccctaagagccactgcaaggatcctgggcctgctgcgtggcccaagaatccacgt

SEQ ID NO: 331657 - DNA, 122 bp, Homo sapiens
ggtcctcataatcctgctcctctcagaccactttccctcagatgccggagaactcgcatccgtccccgttccctaagtcccgtcttagagcccgggtccccacagccgcgtcttctccgagc

SEQ ID NO: 331658 - DNA, 122 bp, Homo sapiens
acggtgctggaaactccaagcaggagagtcagtatgatctggagatgggctgcagggggacgggtgcctcatcacccatgagttcttgcatcttgttagaaggtctctcagtagccagatat

SEQ ID NO: 331659 - DNA, 122 bp, Homo sapiens
atggggaagcatttcacagcatctcaagaatcacagcaaaaatgttttagatttggtaaacgtggtgtccctcaatgaaatggctgcaatcaaaggttctcaaatcagtgactccagagagc

SEQ ID NO: 331660 - DNA, 122 bp, Homo sapiens
ccgcgagcccctttccgaggcctttcgggtccccccggttatccccgcccgggcggtgcgcgcccccgctgttcccgcttccgctccagagaggcagggctttccgagcctgctagccccgc

SEQ ID NO: 331661 - DNA, 122 bp, Homo sapiens
tttacctttttcgggggtttgcagctgctcagcctgctgtgtctgcagcccatcctcctccgggggctcccggacgccgcttcccaactccggggcccccagaggagcctgcgatccgggcc

SEQ ID NO: 331662 - DNA, 122 bp, Homo sapiens
ccgggagcagggcaacgaatccttcaacagcagcccagatgctcacagcagtaagcgttgcgctcaagggggccacctaacaccccaaaagcaaggctctgaagacctgttctccaacaccg

SEQ ID NO: 331663 - DNA, 122 bp, Homo sapiens
acgccccgcccctggctcccccgggagggcggctcaggggcggggacgggggcgtggtcccgccgtataagaacggagggggcggcggcgggacggctcactcggtgccgctgcctaggggc

SEQ ID NO: 331664 - DNA, 122 bp, Homo sapiens
ttggcgtgtgccacctagtggtgaaacctggctactacaggctgcgtctaggcgagaactcggagcgtggttgatttcattcaattttgttcacggcagggctgaggaagggaataagtgaa

SEQ ID NO: 331665 - DNA, 122 bp, Homo sapiens
gcggtgcttggggtaggtggtaggtagtcactgctcttggttgcacatcctggagcatcccgtgagctccaagtaaacttataagcaagtgttattattattctcccactttacagagggga

SEQ ID NO: 331666 - DNA, 122 bp, Homo sapiens
agagtcaaattacacgggcaaagatcagcccctccttcaattaaaaagccaggggcagggcgtaataaggaagtggttctccttctttaagcctcttttcaggctgagtcctaaacctgaag

SEQ ID NO: 331667 - DNA, 122 bp, Homo sapiens
ggtagactgaggcagaaagatcacttgagtccaggagttgtgggcttttgtgcactatgccgatcaggtgtccacactaagttcagcatcaatatggcaacctcctgggaacggaggaccac

SEQ ID NO: 331668 - DNA, 122 bp, Homo sapiens
aaatgaagcaggtttggagcagcaactactgtgagcggcccccgggggctctggcagccgcgcctccagggcgctttgctaagctttgtccagccgcggcaacccgcctcccccagcccacg

SEQ ID NO: 331669 - DNA, 122 bp, Homo sapiens
agctgggattataggcatgcaccgccatgtctggctaatttttcttttctgacggcgtctcgctctgtcgcccaggctggagtgcagtggcgcgatctcagctcactgcaagctccgcctcc

SEQ ID NO: 331670 - DNA, 122 bp, Homo sapiens
gcttagtgtagaagagatagtggccctcatagctaattgcccatattttgcaaagggcagcgtggaaacgggaagccacagccttacaaggacaggatccctaataaatattcccatgatga

SEQ ID NO: 331671 - DNA, 122 bp, Homo sapiens
ttcttcttggcctaacagaagtgcttctagcatttgaccattaaagtgctgtcctggaagcggagacaggtgcattttgtcatgtggtagtgaagtccatccactcttcttttattagattt

SEQ ID NO: 331672 - DNA, 122 bp, Homo sapiens
tgtgctggaacatgatgcaggtgctcatgaaaagccagaagggctcgctggccgggggcacgcggcctccgcagctgaggaagtccgagagcgaagagagcaggaccgccaggaggcagacc

SEQ ID NO: 331673 - DNA, 122 bp, Homo sapiens
ggtctgccgaaatcacacacttcccaatacagggggacttggcctttaccatcaagtattcgatccttccttgaaatggcattatctggcagtgtatggattacggattatacccagtgcat

SEQ ID NO: 331674 - DNA, 122 bp, Homo sapiens
ccaattcctattcatccctgagtttcagattaaaagtcacttcctttggaaaccttacttcgctacttcgctacttactgcactacttcgcagcatcacaactatgatggaaatccttactt

SEQ ID NO: 331675 - DNA, 122 bp, Homo sapiens
gtgggtggagcaggggaaagaaggcgccggcggagggagcaccccgctgtggttttggcccgtggcctgccggctgttttgagagacaccaacacaataaagaagccgaccttccttcttca

SEQ ID NO: 331676 - DNA, 122 bp, Homo sapiens
cttggggggttgatggtggcagagaagtctctgctgggtgtgtgggaggatccctctgagcgagggaggaatctggtaaaagtagtaaagatccactcatcaggacctgtgcttcttgccta

SEQ ID NO: 331677 - DNA, 122 bp, Homo sapiens
cccccaccttcaagacaacttttttctcacctctgtgggttcttctcaggcacaatcctccgttgagctcagaggctctcctttttctctcccttcccttttccttttcctctcagaaaagc

SEQ ID NO: 331678 - DNA, 122 bp, Homo sapiens
gggccgaaggacgcagggctttgacgtcccgagccctgcgccccaccccgtgcgcttttacgtcacctttcaccggttcaacacccgctccccgatctgcgcatgcgcccgcccgaggcctg

SEQ ID NO: 331679 - DNA, 122 bp, Homo sapiens
ctgccttgagaacagtcaaccagatacccatctggggcccctggggcagggggcagggcacggaagcaaaagcgtttagattctagcggagttttgaaaactacccacccagcagggaaaaa

SEQ ID NO: 331680 - DNA, 122 bp, Homo sapiens
ggcttctcttttttgtttttcgtctgcttatttttctggtatttagctgcatgctaaaaacgatctttttttcaaacatgaagtcacaattaggtgctaaaagccactgaacgcacccaaac

SEQ ID NO: 331681 - DNA, 122 bp, Homo sapiens
ctgggactcccactgaggaccccaccaaatggagctgctggctcagagaccccagataagcgggacatgaaggctgagcttcagcgttctttgtgctaagtttcttcttgaggggcttggag

SEQ ID NO: 331682 - DNA, 122 bp, Homo sapiens
tgcaggccggcccgcggcgcgctggggcggggggcagcccgggtgctgcagtggggaagccgcaagccaggacctcgcagtcctgcgacacctccgcgccgccagagcccgggactctgttc

SEQ ID NO: 331683 - DNA, 122 bp, Homo sapiens
tcttcgggtgaaactagcctgaaataagtactgagatcatgcttggaggtcccgctggcccgtggggaggggtggcggtggcggtggtgcggggtgaagggagggtcggtcctgctttgctg

SEQ ID NO: 331684 - DNA, 122 bp, Homo sapiens
ttcttgaccttcgccagggcccccttgttggggaggtggctggtggcaccataggagtcccgagtccctggatccagagctcgattctccatcagcttcccctgacactgggagagaaagaa

SEQ ID NO: 331685 - DNA, 122 bp, Homo sapiens
ctgggctcaggtgaaatgatggggacagcaaggtgtctctaggtctcaggcaggtccatgcggactgcaggacagcgtgtggggagcgctgaactgggctgggctcaagtgaactgatgggg

SEQ ID NO: 331686 - DNA, 122 bp, Homo sapiens
ccgcccgcctcggcctcccaaagtgctgggattacaggcgtgagccaccgcgcccggccccggctcctgctcctctaaatattagaggcaagcctcgaaccggagctccgggatgcatgcca

SEQ ID NO: 331687 - DNA, 122 bp, Homo sapiens
ggggtcgcggccgtcaggggcactcagcgcgccgtcggggtccagaactacctggaggtgcgctcagccggtcacgggacgcccggtgaggggtaagggggaggctcccgcccgcgcgtccc

SEQ ID NO: 331688 - DNA, 122 bp, Homo sapiens
tgaccagcgctgcggccggtgcccgaagcagcgagcagcgcacctcagctccggttgccgcgcggcatggtatttatctgtgggttcagtgcgcacagcgttgtccagtctcgaaaccaccc

SEQ ID NO: 331689 - DNA, 122 bp, Homo sapiens
tagttgcaaatcatatactttgataagggattatctaaaatatgtaaagaactactacaacgcaacaacaaaaaaagaaaagcaaattttaaaatgggcaaagggctagaagagacattttt

SEQ ID NO: 331690 - DNA, 122 bp, Homo sapiens
aagaggcccagtttgagaagctgacccgggcgctggaggaggaacggcgccacgtctcggcgcagctggaacgcgtccgggtctcaccacaagatgccaacccactcatggccaacggcaca

SEQ ID NO: 331691 - DNA, 122 bp, Homo sapiens
aataaaattaagaaaattgcatatatcaagtattctgcaaaattagatacacatatcacccgatatatatgtgtaacatacacatatgacattgtgaacagttgtgcacatcattaaaaatg

SEQ ID NO: 331692 - DNA, 122 bp, Homo sapiens
tgccagatagtaaatattttagattttgcaggccatgctgcttttattgcagctacttaacgttgctgctattacacaaaagtagccatagagagcgtgaaaaccaataagcatggctgttt

SEQ ID NO: 331693 - DNA, 122 bp, Homo sapiens
ctttccctctctctctctttctctctttctttctaaggaaccttgctctgtcgcccagaccggagtgcagtggcgcgatctcggttcactgcaacctccacctcccgggttaaagcgattct

SEQ ID NO: 331694 - DNA, 122 bp, Homo sapiens
ccttggtgagaagagaaccacaccactggggattttgcacccaggcccagagtgcgctcccggggacagtggcacagctgcaagcgggggtcccagagggaacctcagaggcaggggtcacg

SEQ ID NO: 331695 - DNA, 122 bp, Homo sapiens
tgccggcgggggctgagtactgcagctctgcccggcaccctgcctggggtgagtcctgctcgctgcctcccactctgtcagccattagccggggggtcacagcgagcctcacacatgcctct

SEQ ID NO: 331696 - DNA, 122 bp, Homo sapiens
catttctaagcccctttggtgaccagagctgacaggtgagtcttagttcttttctgcttgcgaagtttggtgccacagggttgaagagcataaagtacatcacctcttagtttcactgtcca

SEQ ID NO: 331697 - DNA, 122 bp, Homo sapiens
gcctgccccacatggcacagacggggccaacttgcccatccctgagtcaatctttggggccgaggagactgggtacctgattggttttggccagtagcttactacccccagaactggagtga

SEQ ID NO: 331698 - DNA, 122 bp, Homo sapiens
ggtgattattgagctcctaataattaatttttttccttcttactgcataaataattcttacgactcccagttcccatgcaatgcagaggcttctcattaaaacctacccctcaaaatataag

SEQ ID NO: 331699 - DNA, 122 bp, Homo sapiens
tcagacagcccaaagtaatccccatcaaagttaacaggtctgaatcaggacttccagccacgcttggggtttatatacagcttgtctcagagaggcgatgcttttcagacactaatctcttc

SEQ ID NO: 331700 - DNA, 122 bp, Homo sapiens
gtcctcagaggcccttgaggtttcaggccaaggctggggcctgatgcccacctccctgcccgccctcctcgtctcccgggaagggagtgggtgagtcatgcgcgtgggtagagtgaccagag

SEQ ID NO: 331701 - DNA, 122 bp, Homo sapiens
ccgtctccctgggccttcgcccacccctccccgcccccttctccctgggccttcagtccccgtctcctggaccttctgctgtggtcctcgttgtgcactgcttttctgtggcttcatttaat

SEQ ID NO: 331702 - DNA, 122 bp, Homo sapiens
atcctgaggtcagctgtctcctatccgggtaggggtaggtggagggtgctggtggaaggacgctcttgtccgagtcctcagtaaatcctgaacacaggggaggaccaatgaggagagtgcac

SEQ ID NO: 331703 - DNA, 122 bp, Homo sapiens
ggaggaagaatgttcggttagttcctttcctccggccgatctcttttttttcttctggcacggtccaacagacactcctggcacttggcttcccgggggctgctcgcccccggcccagaggc

SEQ ID NO: 331704 - DNA, 122 bp, Homo sapiens
ttcgcttcccacaaagaggtccggctcctccacttccgttaggctgagcaccggctgaatcgcggaaacccgactctggcaatgtaggttccccacgccgggagttcccaagctgggttgga

SEQ ID NO: 331705 - DNA, 122 bp, Homo sapiens
taagcaagatcaatattaatatccccaaaataaaattagcaagtccatgatccaaaactccgtaacacttctcctgtaacaggtaaatattcattggtttcttcttcaaagttattcttctc

SEQ ID NO: 331706 - DNA, 122 bp, Homo sapiens
gggcatgttctcgaatcaccaggggctgggtctgggatagcgtgcgtgttctgagggtgtcggaaggggcagctgggattgggaaggggcgtggcctgagccctttgactccgcccgcccct

SEQ ID NO: 331707 - DNA, 122 bp, Homo sapiens
ggggccgcgcttgcagctggccgagtccgggccagctgaggggctggcggtgggcgggagcggtcggcggcctcagccccttcagagagcgactttcaaactcgcgcccgcgtcgcggcagc

SEQ ID NO: 331708 - DNA, 122 bp, Homo sapiens
tctgcgaggaagaggaattctgtcattcttcctaaacttaaggagattggcagtgggtggcgagctggaagggctttgttagtcgtgatagcttaagcagtcatttggaaaggcccatttag

SEQ ID NO: 331709 - DNA, 122 bp, Homo sapiens
gggcggcgatctcccgctgggcaagggactggcgggccttaggggacgcgggaagcggggcgccctaggcggagagggcggagccccaggcgcgctcgccccgccccctgagcccggagccg

SEQ ID NO: 331710 - DNA, 122 bp, Homo sapiens
gctgggctccgccagctcctcttgccaccaaagtcatgagtcctttcagagctgcaggcccgtgtgtgtgcatgtatgtgtccgtgtgtatgtgtgtgcacatgcataggccttttgtgtgt

SEQ ID NO: 331711 - DNA, 122 bp, Homo sapiens
tcaagctgcagaacttttgacccgatgcaacgaccaaattcagaggatggtgctttataacgcagggagatgaaaacataaaagcaaatcatttttaagatatatccaaatcagaactgccc

SEQ ID NO: 331712 - DNA, 122 bp, Homo sapiens
cttcccggccgcggtggaggccgccatgtctgcagcagtcgacctctggacacctgtccccggcacggacgctagaaatcggctctgagagctcaccgaaaccacaaagctttcagaaaaca

SEQ ID NO: 331713 - DNA, 122 bp, Homo sapiens
agaaataagagttcgatcccacaatctcagagccttcccaaagtttcctctggtgatttacgactaggagctctaactgggaaaatgggggtttcctgacgcttctaaatcttagactaaga

SEQ ID NO: 331714 - DNA, 122 bp, Homo sapiens
tgatcatttacagactccctaccatgaaacagtctactccttgttggatacactcagccccgcctaccgagaagcatttggaaacgcactgcttcaaagactggaagctttgaaaagagatg

SEQ ID NO: 331715 - DNA, 122 bp, Homo sapiens
actgtgggaactcctaaagcagcctgtgtcaggctgctgttatcaggctgaacctgacaccgggtcctgaagtttagaagccaggcattcaggaaggaacaatcacaagcctgactggaatc

SEQ ID NO: 331716 - DNA, 122 bp, Homo sapiens
agtgggtctgtgccaggtctcccgccggtggaaactgttggcttccatggcagcaggaagcggagtcgagaccacttccggaacaagagcagcagccccgaggacccaggtgctgaggtctg

SEQ ID NO: 331717 - DNA, 122 bp, Homo sapiens
ctccagctcaaaggctccaggggtgcagtagtcctcctcctccccttcctcctccatcttcggcgacagcctcttggcagatgagtaggcattcttgaggcttgtcttcacttctccagatg

SEQ ID NO: 331718 - DNA, 122 bp, Homo sapiens
gctcctagtccgggctgagcgtctactcgctggttaaggtcggtccttccaggtccacagcggcctccacgcggcccaccccctgcctgctccgccccctccagccccctcccgcgctctca

SEQ ID NO: 331719 - DNA, 122 bp, Homo sapiens
cccagccccgtcgccgcctctgcccgaggtgcccgggacaccagggagcccaggggtcaccgtgtagctctgattcctgcccgcacccccgtcaggctgttcgagatgaacttgggtccccc

SEQ ID NO: 331720 - DNA, 122 bp, Homo sapiens
ctgcgcccggccaaaaagaagagtttttaaaaggcacagagtttacttataaatattctacggccacatctaaataaggagagaactgtattttttcagggatttggcctgtccaaaatcag

SEQ ID NO: 331721 - DNA, 122 bp, Homo sapiens
tagtgcgatgggggcagccaagggaaaagtgaccctctctcctcctgggtgggataggaccgttggatcaagccacaggcagtacctgacctgcaggagaccagtgccctggctctgggcct

SEQ ID NO: 331722 - DNA, 122 bp, Homo sapiens
tgcataacaactgaggggtgggtccctatttcctctctgggatctgtagccaatcattcacgaggtaaacagaacgaccgagtttctctcagccgagaactgtggctgcccctccggtgaaa

SEQ ID NO: 331723 - DNA, 122 bp, Homo sapiens
gaagtcgatgagcttgattcgtgggttgggcacgttcttgtccagcagcatgatgttttccggctggggtgggaggaggctcagcagggaaagcacgggcctcccccaccctcacccccacg

SEQ ID NO: 331724 - DNA, 122 bp, Homo sapiens
ccttttcgcagggaaggtgcccggccaaactctgctctcttcctcccgcccctcgagtcacgtgatccgcttcaccttgtcgcgcgcccatcctaaacccgcgcgccccgcctcggctgcaa

SEQ ID NO: 331725 - DNA, 122 bp, Homo sapiens
tgggatgcgctggagtcatcgatgcatcacaaggccttctgaaccttgcaaaggcctgcgcgaatgtgagggaatgagttggacctctctgggcttcagttttcctcctgtggaaaatgggg

SEQ ID NO: 331726 - DNA, 122 bp, Homo sapiens
gcaggagcccctgcaccccagcctctcaaggtcatttggtggccctcaaggacagaaaaccgcctcacccttgggccccgcggggctgcgcacgtcctctgacacctggcgcacaccactga

SEQ ID NO: 331727 - DNA, 122 bp, Homo sapiens
agtgaccgagactcatcttagaactctccgggacacacaagggactgacagtaaggaacacgcatacacaagcacacacccgcaggcacagctttcagcttgcaaggtaacctgtaaaaggc

SEQ ID NO: 331728 - DNA, 122 bp, Homo sapiens
aacagccttgccgtttaggaaacatcctttctcttagggtaaatgccagatgcttcttcacgtaagaactttcctattccccctctgctcttcactcctgaccaggcctgacctatgaaagg

SEQ ID NO: 331729 - DNA, 122 bp, Homo sapiens
tgatgcgattggcattgacatctgtttcgggagaaagcgaggaatggagccgaccccacacgtaaacactggtcagcactacacagcgtgttggggcaactggacccactggggcaaaagca

SEQ ID NO: 331730 - DNA, 122 bp, Homo sapiens
ctgtgccctggcagagatgacctggcaaaattctcaacttcttccctgaggcagtgcacccgcagttctcggcggcgaagtctttggggcagaagtcccgagccttcagaacggcaggcttc

SEQ ID NO: 331731 - DNA, 122 bp, Homo sapiens
cagccacattccagaacagcatatgtttcatctcaaatccacaaggtttgcacttccaagcggagccaaagagaaaaaccttggcccaggctgcaaatttcttaggagaggtgggggtcagg

SEQ ID NO: 331732 - DNA, 122 bp, Homo sapiens
aaggggctatgggctccacaatacttagcacttgtccccaagtgtaaacacttcccatggcgtgcttcttccgtctcccaggttaggcacaacgatgccaaggtgctgtcatcgacactccc

SEQ ID NO: 331733 - DNA, 122 bp, Homo sapiens
ttcagatagcgagagacacccttaactgtctcccgaggccgggattggccagagcggaagcggagacgcacttcctaggggcgcgtctggcacgcactgcgcagccgcggtgggaggaggca

SEQ ID NO: 331734 - DNA, 122 bp, Homo sapiens
atggaggccgcaccaaccgccccttcctctgagtagcagacaactgaagaggcgtcttgccggcgtgtcccaataaaacccggtgcgattggctcccgccttaccccatcgcttatgcctat

SEQ ID NO: 331735 - DNA, 122 bp, Homo sapiens
gctggggaaaatctcaaagtctgcccatctgagattccagcaaagtcctggcatctttaccgcagctcagctctcctttgtgttccttttgtgatggtttcctattatatttcttctgatgc

SEQ ID NO: 331736 - DNA, 122 bp, Homo sapiens
ccccaaagttgtggcctgacaacctttctttaacatgctcctcctgggcctggctctgatcgacaacaaaggagcgcatcatttttgctcccggcttctgcttctcctgatctttgattcaa

SEQ ID NO: 331737 - DNA, 122 bp, Homo sapiens
agggtgcaggcacgagcttaccacacactcaaacttcacggcgggctgagggtgcaggcacgagcttaccacacactcaaacttcacgacaggctgagggtgcaggcatgtgcttactaggc

SEQ ID NO: 331738 - DNA, 122 bp, Homo sapiens
cacattttatcagaatccagttttaggaagagcatagtcccaggcattacagggcagcagcgaagggggagagggagatgggttacctctgaggccacgaggccagcatccccacagggcct

SEQ ID NO: 331739 - DNA, 122 bp, Homo sapiens
gctgagaggatgaaatgaggtgccgcacataaggctctgagaatggggctcagcctttcccggctatggttaattaccacaggctccagggttaggcaggcaggcagtgcccagacaccagg

SEQ ID NO: 331740 - DNA, 122 bp, Homo sapiens
tgcctcagcctccccaacagctggaactacaggtgtgcacaaccacacctggctcattttcgcatttttagtagaaatggggtttcaccatgttggctaggctggtcttgaactcccaacct

SEQ ID NO: 331741 - DNA, 122 bp, Homo sapiens
ccaatcggcgtggccccgcccccagaccgtcccttcgttgcgacaccaactagctcgccccgcccactccgtacacctaagaggggcgcatgacgtacatccgctaacatgcagccgccatc

SEQ ID NO: 331742 - DNA, 122 bp, Homo sapiens
aatacttaccttatgtctggaaatacagataatgtgatttttaaaaaacacattgagccccgttttacttctgtggtatggtaaaggcacaggtttattcaatgaaaatcagacgttaacca

SEQ ID NO: 331743 - DNA, 122 bp, Homo sapiens
atggctcaagggtcaactgctcctgcggcttcatgttctcctgttgcatctttttcacttcggaggcaaacacggcctcggctgaggctgtggagtcaatgcagttggcctaaagaggagaa

SEQ ID NO: 331744 - DNA, 122 bp, Homo sapiens
cccagcagctccctgcggctccggccctggaggcctgaggtggccttgcctccaggagcccggcctcagccgtcacagccgggcttggccctgcacttaggatccaaagggcaactcttggc

SEQ ID NO: 331745 - DNA, 122 bp, Homo sapiens
ctttagcctgacctgaaatagtatagctgctgccacctggctcccttagcgtcagtcagacggtgcagctggttcctaggggtgagggctgagccagcagggtccgtgcccaggagggatgc

SEQ ID NO: 331746 - DNA, 122 bp, Homo sapiens
gcatttctttaaagcatcggaaatgaatgcgtttgagtaggctccacacacaccgctccacgggcaccaacacacacatcattacactggtggggaagcaagacaggagcacactcttgcca

SEQ ID NO: 331747 - DNA, 122 bp, Homo sapiens
ccgggccctctgcctctgtcccagcgtgccctcactcccgcccctctgcctctgtcccagcgtgccctcgctcccgcccctcagcccacgtggcctcccacccgatgctgccatgccccagg

SEQ ID NO: 331748 - DNA, 122 bp, Homo sapiens
gctggtgttccgggagcatctgcttcaggatagggttttctttgggaacagaggaaggagcgcagggggtcacagtgttgggggacacctcaacatgatgcctcaggctgggcctgcctggg

SEQ ID NO: 331749 - DNA, 122 bp, Homo sapiens
tttttccgactgcctgataaagcgtcagctccgacataaatcaatcgggcgagggggctgcgctctcgctgtcatccgtccgcaccgcactccatatcgaggatggattgttttatgctgat

SEQ ID NO: 331750 - DNA, 122 bp, Homo sapiens
gtcctctcgcagtgggctgcgggcctgtccgtcaagcgtggtcccgcccctaactcgtcccgccccgctgaggtcgtggcgaagtcatcagggaccagttttgtgctttccatggttggatt

SEQ ID NO: 331751 - DNA, 122 bp, Homo sapiens
gagcttgcctgtggcaagtcagcatcctgcttcacacctcacatacagctcttctcctttcgctgtgctcatcccatgtatgataaaaagattggccaggcgcagtggctcacacctgtaat

SEQ ID NO: 331752 - DNA, 122 bp, Homo sapiens
ttggaacaggaaatggttaatagtgtttgcaaataaaaactctctgttctatcctgttttcgaaacatttcccagaagttaaaaaataacacccaatttatctgcccaatttaagaataaac

SEQ ID NO: 331753 - DNA, 122 bp, Homo sapiens
cagcgaaaggtgaaaagaggaacaaagaacattctcctggacgccacccacagaaagccacgtgcaggcttggccctcaccttggggaccttggacacggagctggttatgtcacatctggc

SEQ ID NO: 331754 - DNA, 122 bp, Homo sapiens
ctaatttaccaaacctcccagccagggaggcctggacggccaccacttactgtattcatgcggtagctaagagaaggaaccgtattccctgagccgctttccagctacccgcagaatgagaa

SEQ ID NO: 331755 - DNA, 122 bp, Homo sapiens
atttgtacaacgtgcataaaacatgaaattacccttggccacttccaggcgcgcagccagcggctccctgcccttcccctccgggccctgagtaccggccccccaccaaggaggagcccgag

SEQ ID NO: 331756 - DNA, 122 bp, Homo sapiens
gacatggaccgagggagcggcgaactcccctcccccaaatccacaccgaggcctgggcgccgagcctcagcccccaagccagcaacctgccgtggactcacagatacacaccctcggagaca

SEQ ID NO: 331757 - DNA, 122 bp, Homo sapiens
aatatcacctggccaggccctctctgcttgtccgtttaaaaactgcaacctgactggatgcggtggctcacgcctgtaatcccagcactttgggaggccgaggtgggtggatcacctgaggt

SEQ ID NO: 331758 - DNA, 122 bp, Homo sapiens
agggcaaggcctgggaggggaacaagcctgggggttcccacggggcagacagaggagacacggctgcaggtccgaaggccatggtaaggaccttccattccgacttcagccaccatgcggag

SEQ ID NO: 331759 - DNA, 122 bp, Homo sapiens
aacccactagccgtgaggttcaaagcaagtccaccagacctctccaagcctcagctccctcgtgtaaaacagagaggtctgtaactgccacacgggtcacggttgagaagcgtgccaggtac

SEQ ID NO: 331760 - DNA, 122 bp, Homo sapiens
gatgggccagtctccaccaatccgttccctggcaaacttgtattctactcaaagcttcctcgtggcctcctgtctggaccttccgcagccccctctctacccccctggacgacttcttatca

SEQ ID NO: 331761 - DNA, 122 bp, Homo sapiens
caaacatttcaacatactaaagtttgtcactgaaagctctgtaggaacagaaaaaaaaagcgttgtgagtgcccagagatgtgctgaatacctatgggaacagttcagatctcatttatact

SEQ ID NO: 331762 - DNA, 122 bp, Homo sapiens
aagccaggcgattcagaccccgccaccgcgtccccagagactgggcggaaaccggagactcgcctcccgaacccgcgaaactatctcccgcgagactgccccgccccaaccccgccccgcaa

SEQ ID NO: 331763 - DNA, 122 bp, Homo sapiens
cctcagatggagttggtgcataacaagcagaggtatccagggtcgcggtcctgcttgccacggaaggggccgccttgtcagttgtgaccacccagccctggaaatgtcagtaatgctgtaag

SEQ ID NO: 331764 - DNA, 122 bp, Homo sapiens
tctggctgggcggagtcagatcggctttaatagagggagcctgaggaggctcccggggtgcgggcgcggcccagccccctcctacttggctgcggctggcggtggggcctgggccgacgctg

SEQ ID NO: 331765 - DNA, 122 bp, Homo sapiens
gcacgggggctgcgtggtggcctctgtgatgtcacctggcagaggtgcctgagctgggcccggcgtggagggcataggcctcactctctgactgcctgacagtccctacagtgagcgggacc

SEQ ID NO: 331766 - DNA, 122 bp, Homo sapiens
tggccaccattttatttgagggacctgggcatctgatggttttggtattcgtgggagtcccggggccagtacccatgggtactgagggatggctgtatatataattatgtgagtgtatatat

SEQ ID NO: 331767 - DNA, 122 bp, Homo sapiens
ttgaagcaaggaactggaaatggtccttttagggatttatgctctggattccagaaaacacgcaaacagggccaataaatgcatctttatttttgtgtccattttgacctggtcaaggaaga

SEQ ID NO: 331768 - DNA, 122 bp, Homo sapiens
cggcgggaatttcccggtcggggaggccggaagcagccccgccgggctcgcggcagcgaacgcaaaatccgatctctctcccgggggagcaaaatggacgaaaggcgaccccccaggcaggg

SEQ ID NO: 331769 - DNA, 122 bp, Homo sapiens
ctaactgatacactaaggaacttggaacaagagcccaccagatcctgcatggcctggctccgtgttccttcccccacccccctaatttgggacccctcttctcttggttcaccacactctag

SEQ ID NO: 331770 - DNA, 122 bp, Homo sapiens
gggagttgtgcctgtgctccacacgtgaccagggttaacccagtggaaatttgtccagttcgtgtgaaatctgtaaattcctcctctgatttcaactgcctccgtcactgccctttctttcc

SEQ ID NO: 331771 - DNA, 122 bp, Homo sapiens
gtagcaaaaaaagtagcttctcagttgccttgaggtggctgacattgctgtgtatcttagcgcttcccaacctgggcatgtttcaagtgtagctagtttcttatggcatgctaagcccttaa

SEQ ID NO: 331772 - DNA, 122 bp, Homo sapiens
acaccacctacctcataaaactgctatgaagattaaatacaggccaggcatggtggcttacgcctgtaatcccagcactttgggaggttgaggggggcggatcacctgaggtcaggaattcg

SEQ ID NO: 331773 - DNA, 122 bp, Homo sapiens
gatgctgccgcagcaagtcggcttcgtgtgcgcggtgctggccctggtgtgctgtgcgtccggcctcttcggcagcttgggtgggtgctggtacgggtcccctcttcctggggagttggggg

SEQ ID NO: 331774 - DNA, 122 bp, Homo sapiens
tgacctcgtgatctgcctgcctcagcctcccaaagtgctgggattacaggcatgagccaccgcacccggctggatccatatttttatttggctcctctgctggttctaatgcaaccaaccca

SEQ ID NO: 331775 - DNA, 122 bp, Homo sapiens
taaaaggaaccggtctcgacaaggatctgggacactctttcccaggatgcaccaggcctacgactagcggaccgactcccacagcgcttcaaggcggagcgctcggttctcccaggatgccc

SEQ ID NO: 331776 - DNA, 122 bp, Homo sapiens
gccaagcctgatgtcaggagcagagaagcacctggtttcttgggctaggtcagagcatttcgctaacaagtctgtgccttcctgatgataactttttccctgcccagaaatcttggtgcaga

SEQ ID NO: 331777 - DNA, 122 bp, Homo sapiens
gcagaggagcctgtcctgggagccccttctcaaactcctaagacttgttttcatgtcccacgttctctgctgacatcccccaataaaggaccctaactttcgatactgacttcctgggatct

SEQ ID NO: 331778 - DNA, 122 bp, Homo sapiens
caccgcccctcttccctctgggacgcgttactgacgtatctactgatctttccgaccctgcgccaccaatcccctgcctacatccggaaggggcatggacctgcgcccgggagatcgaatat

SEQ ID NO: 331779 - DNA, 122 bp, Homo sapiens
accacggtcctaagcagagaggcaggcactcctcctgggaggcagaggggacatccgaaacgggtgcagccccagctctggagcaagaagctctgccacacacacgccccatgttcacatcc

SEQ ID NO: 331780 - DNA, 122 bp, Homo sapiens
tcagttgaaggccgtccttgcctgctggactttgatctattgaagtggtgatgggtgttgcggtttcagccataaaggcatctggcatagtaggcaagaagggccagagacccgaggagagt

SEQ ID NO: 331781 - DNA, 122 bp, Homo sapiens
gaggaagacttagccacttaccaagaacaaggtaacctgtgttctcccgggtgtaaaccgcgtctctgtgaagggaaagggggaagagggccggcaaggacctccagtatcagcgaggacta

SEQ ID NO: 331782 - DNA, 122 bp, Homo sapiens
acgccagcacaaattcaaccagtgtcacatcatctacagccacagtggtatcctaactaccgtctttttgctaggacttaaactgacttgagtgtggcaaaaagttaacaaaaaaggagaaa

SEQ ID NO: 331783 - DNA, 122 bp, Homo sapiens
tcctgtcccggctgcggaagtgcgcgcgccctcggcaccttaacagttccgcccctctcccggacccagccaatcagcggccgcctcttgcgcgcgccccaccgaccaaaatggcggctgcc

SEQ ID NO: 331784 - DNA, 122 bp, Homo sapiens
cttctctccccgcccccagcacgagccgggatgaaaacgctgggccgcataggcttcaggcgtccagcttccgggttgttagatgccgaggttcaaaagaaacgatcacttcagtggcgtgc

SEQ ID NO: 331785 - DNA, 122 bp, Homo sapiens
attttggggaaacattttaagctgtcctgtcccttctccagctctccaagttatataatgcgtccttgttgaaaatgctgataatgctgtttgggtggcaggaagccaatttcaggctacat

SEQ ID NO: 331786 - DNA, 122 bp, Homo sapiens
gccaagtctgatggaaggagcttgtttcttgcatgctattttatcatcatcactttaacccgatttcacatttttaattcatttctaaattattttaggttatcggcagatttctaactttg

SEQ ID NO: 331787 - DNA, 122 bp, Homo sapiens
tcagagtgataggaagcaccactcagctacagtggctcgttggtctaggggtatgattctcgctttgggtgcgagaggtcccgggttcaaatcccggacgagccctcgtggctactgttttt

SEQ ID NO: 331788 - DNA, 122 bp, Homo sapiens
accagccaatgggccggatggataggacgctcctcccggagagtagtgagacccctggtgcggggcgattggcggcgggagcgatgagtggcagccgcacggcccaacgggagctgtgcgtg

SEQ ID NO: 331789 - DNA, 122 bp, Homo sapiens
aagagaaaaacgagtgaaaacagggaatcatgacactttgtttttttacgtgtaaatattcgcaaaacgcccaaactggtaactttgggaacacgggttcacgcagaagaagggctgctgtc

SEQ ID NO: 331790 - DNA, 122 bp, Homo sapiens
ttcccaaacagcaggggttgtgtgctttcacatagcagtactgtacaaggaaaaccccgtcggatctgttattgcgggatacttgtgaaatatacataggattctttcttatggctgcatcc

SEQ ID NO: 331791 - DNA, 122 bp, Homo sapiens
aggtcctcctgctcacagcaaatcgccccactctccaccgcggtcccgccaaggtcacagcgctactgccactccacggccccagctcggagaaagggcggcgctatagagaggacgggccc

SEQ ID NO: 331792 - DNA, 122 bp, Homo sapiens
gccccggggctgggggctgcactgccttggtctccgccctagagctatgtgtgccgggggcgcagcacatccaccggctgcgtccgcggtggagttgagcaaactttttggctgttgcagac

SEQ ID NO: 331793 - DNA, 122 bp, Homo sapiens
ccgtccctcgcttcttctcatccctgcttccctggcagtcccgttaccacgctgtcccgacgcgaaggccctcgccccgccccgtgccccgcccccgcatcgccccgccccaaccccacccc

SEQ ID NO: 331794 - DNA, 122 bp, Homo sapiens
caggcaggctatgcttggctcacagaccatgcagggctgtctgggcatgtacccagcctccgcccagatgctggtcccacctggaccagccctaggtgggaagaaagagattccaggggaat

SEQ ID NO: 331795 - DNA, 122 bp, Homo sapiens
ctgcccgccgacagacgcaaggcctcactaatcgatggccgcgccccgcccactgaggatcgttgccactggcaacgacaagcccaggcctgccctctgcatcccgtttctttctccaagag

SEQ ID NO: 331796 - DNA, 122 bp, Homo sapiens
ccccagccccaggccccagggagcgtctctgccaggggtgggccgtggggctgggggaggcgtgggtgtgcctgggcaccggggtggaggtgtgggcggggcttagcgtctcacccacagcg

SEQ ID NO: 331797 - DNA, 122 bp, Homo sapiens
tgtcctaccttcatattttctttcacgggttccagacttccagttagcagccttgggagacgaactaccagatctctagtctgtggttgcaaacaaaacaatctagtattactatacgtgca

SEQ ID NO: 331798 - DNA, 122 bp, Homo sapiens
gccgggttcggaacagcaggctgggatcagcaaccatcgagacgcatccgccgagacctccgagcatcctagagaggacacggaagcgagtctttccttacgcacctgtctaacagcgtccg

SEQ ID NO: 331799 - DNA, 122 bp, Homo sapiens
ctatctttccaatttcagttctctttcctttctagtagagacaaaggaacacattttatccgtgaactcaaaaactctgacatcggtcatggatttgggaagacagtcttcccttggtgtct

SEQ ID NO: 331800 - DNA, 122 bp, Homo sapiens
agctgcctaaatgtatggtgatgcctgttcttgatgttgtttggtagatgactggctcgacgtatgcccttctcagtgctgtaggctgcatgttaaagctgcctttctttatcaggttctaa

SEQ ID NO: 331801 - DNA, 122 bp, Homo sapiens
ttattaacacaaaacttaggatggtggtttcctctgaaagagaaggatatgattatagagcggcagatggaagggttcttccttgagtggaagctttagcaaaggcagtttcagtggagtgg

SEQ ID NO: 331802 - DNA, 122 bp, Homo sapiens
catggccccgggataatgcatcctggggtctgggaagcggctctccgtgagggttggcagcgtggggaaggagcggtcaaactggcgggggtcggagaatgggttcagttccgaggtgcctg

SEQ ID NO: 331803 - DNA, 122 bp, Homo sapiens
cttagccctttttatttctatgtcagtgttacaatgagcttgtcaagttccacaaaaagccggtttagatatggttggcactgtactaaatgtagatcaaatccagaactggtatcttggcc

SEQ ID NO: 331804 - DNA, 122 bp, Homo sapiens
cgcttgaacccgggaggcagcggttgcagtgaactgagatttcggcattgcactccaacccgggcaacaaaatcgaaaactccgtctcaaaaaaaaaaaaaaaaagaaagaaaaaagaaaat

SEQ ID NO: 331805 - DNA, 122 bp, Homo sapiens
gagaggccaccgtgaggcctgacctgggcctcgggagcttggcttgaggaagctgtgggccgaccaatgccgccaggagatgggtaggcactgagtccaaagaggttgttgagaggcaggag

SEQ ID NO: 331806 - DNA, 122 bp, Homo sapiens
tggccagtgggtagtgactgttcctcacacacagtagtaggaggtccatgcgttctgtgtcggaggctactgcctctcctccattagtggagctgctggaggccccaggaagcatgaggcag

SEQ ID NO: 331807 - DNA, 122 bp, Homo sapiens
gcagaggggatagatgacttattcaaagccacatttgtaacatagcctggattcaaagcacgtctgcctgaattcagagcccactggctctggagccagaccactgaagtttgcattttgct

SEQ ID NO: 331808 - DNA, 122 bp, Homo sapiens
tggcatcctccctgtcctgcttcacctgagacaccccttgtctcataagacatgcaactacgggaggggtgacaggaagacaagacacgatttcctcaggcccagtttggtgtggggagaaa

SEQ ID NO: 331809 - DNA, 122 bp, Homo sapiens
agcttgaaacaataataaaagcatatctgcatataccaattaaggaagctgcccgtgatacgttaaaaatagtagtcattgttctaagcacttaacttgtattatttcatttgctatcgatt

SEQ ID NO: 331810 - DNA, 122 bp, Homo sapiens
tgcttggcacacagaaggctcttggtgaatggtatctacattcatgaagaaggactgcaccgggtctgtcccccttacaagaaggaagacaaccagcaattgggcctcctgctagtgcaaat

SEQ ID NO: 331811 - DNA, 122 bp, Homo sapiens
ccttcactccaagctagattccgagaatccaacaaacggtacttgccaaagggaacctgtcggctggtgggatgatagagatcagacagttgccacacaatgtgaaaagtgccgtgaaaaag

SEQ ID NO: 331812 - DNA, 122 bp, Homo sapiens
ctatttgggaggccatcttggcgcagggcgtctttttgaaaggttacctgctagagattacgacctatcggggcatgcatagaattggatatgttccttgttattcgcgtcagcagtcactc

SEQ ID NO: 331813 - DNA, 122 bp, Homo sapiens
ccggttcacctccctgtggaggacctcctctctctgtcattggaacaagccttgctcggtcgtcagtgtggatgttcctgggtcccctagaacactcgaaatctccccaaaaataccagaga

SEQ ID NO: 331814 - DNA, 122 bp, Homo sapiens
gcacggtccctgccctcacagaaaatctcatacacagagcaaaatgatcttgttatcatccgtttctggattttgcaccttagttcttgtctcatgtcatcattgaagcaagactttaatga

SEQ ID NO: 331815 - DNA, 122 bp, Homo sapiens
aaggagagaaaaatggacccccatctccaaaatctcagacaagccagccatggtggctcacgcctataatcccagcactttggggaggtcaaggtgtgcagatcacctgaggtcaggagttt

SEQ ID NO: 331816 - DNA, 122 bp, Homo sapiens
tgcttccgggccagcgcgagttccgggtgggcgtgggctcggcggacccagcactcggagcggcaggccggccccaccagcccgagcagtgaagggcttatcacctgggccagcagctgctg

SEQ ID NO: 331817 - DNA, 122 bp, Homo sapiens
caagaactagaacccaatcttccagcccgggtgcctagcagtgtctccaatccgcagcgccgggtgctacggctgtccgggcataaaacatggtcccttagctcatgatgcttatgatctga

SEQ ID NO: 331818 - DNA, 122 bp, Homo sapiens
ggcctggggcggggcttcggctggaccctgagggatgggcctctgggggtctggaggcggcgaggccgggccagctgagggtcaggccccagtccttaaggcttgggcctgggaggccgggc

SEQ ID NO: 331819 - DNA, 122 bp, Homo sapiens
cacaggatactcaactcttcgggttcagtgtgctgtgtggagggagaggaagttgacacacgtgaaccatagaataaacaacgaccacagaacatcaaggtagagatggggctgctgggtat

SEQ ID NO: 331820 - DNA, 122 bp, Homo sapiens
tgtgatcctaggagaaggagccctccgtggcgtaggcccgtgccttgctcattctaagcccgcggatacagcagggcccccatgttgcaggtgctggggaggacctgcggaaacgcggcgcc

SEQ ID NO: 331821 - DNA, 122 bp, Homo sapiens
cataggaggactgcagagctgtcgctggtgctgactcaaatttatggcaagaggtgcacacgcaacaaaatggacaattttttaaaaaatttgtggcatcaagcgtacctatatatctgatt

SEQ ID NO: 331822 - DNA, 122 bp, Homo sapiens
ggagaaggcacaggcctgtcccgggtcccggcaggtcagtgtgaaggtgggcgctgccggcggaaccacggaaggggtggaggtggctggcagtaggagtagggaggggcggagaaaggatc

SEQ ID NO: 331823 - DNA, 122 bp, Homo sapiens
tccgcgttcgtcacttccgctgccgggccacctgagtgaaggtggagcgagagccgggatcgtcagggtggtggcttttctcctccgctcctaaaagctcaatgtatgaatagccccgggat

SEQ ID NO: 331824 - DNA, 122 bp, Homo sapiens
ctccctcctccaagcccccacccccgacagcggcctccctggggacctcccctcgggctgcgctttcagcccaaacacagggaggtcttccaggagcctgcccagtccccacagcagcccag

SEQ ID NO: 331825 - DNA, 122 bp, Homo sapiens
ctttccacccccaagccttgaggaaaatccacttgagacttttttccatctccagatttccgacggtcgatatcctcctgcatccagcccatttcctagtttcctgaagggtagggaggacg

SEQ ID NO: 331826 - DNA, 122 bp, Homo sapiens
cgtccaagtggaggaaacacaattcgccttcagctcagcctggctcctgatcccacgcgccgctccctctgccagccacacagcctccatctgcgaggcgctctcgtgggcacgactctggg

SEQ ID NO: 331827 - DNA, 122 bp, Homo sapiens
tatttattgatcttttgtgacacgcgcgtgggtttccatcagcaatgaagtcaacggtcgcggcgctggagcctgcagaactcgcgctctagatctcgcgagatctccgcccagggcttcgc

SEQ ID NO: 331828 - DNA, 122 bp, Homo sapiens
gtgagaacttccaacaagcctcaaagtcccttgagactccccaatacctaataaggcatgcgaaatgttctcatgaactaccccacaacacgcctaaaactcaaaacacccaaaaatatctc

SEQ ID NO: 331829 - DNA, 122 bp, Homo sapiens
gcggcaggcagccaggaaggaggatggggcaggggtgccggcggctaaaggagatgggggcgcagaaacccctatagggacccatgcaacccgctttctcaccctgggagactacgcaaggc

SEQ ID NO: 331830 - DNA, 122 bp, Homo sapiens
tccgcggcgcgcggcgaaggtgagcggcggcggcggggcggggcaggggcggccgaggggcgcggggcgcggcgcgcgctgcctgcggctcaacttcctttgcatggaccctgagctccaag

SEQ ID NO: 331831 - DNA, 122 bp, Homo sapiens
attcccagtccctgaggccaccgcagtaaggcagtggggcgcctccccttggtgggggggcgggaatcagagaccccgacccgaaggagactgggtgatcccagacgagcccccaagactgt

SEQ ID NO: 331832 - DNA, 122 bp, Homo sapiens
gcgccccgccccgccccccccacgcccggccgggcccctccggcccccggagccccgagccgcctccccgcgccccgcactgccccgccccgcccagctcccggcgcccctccccacccgcg

SEQ ID NO: 331833 - DNA, 122 bp, Homo sapiens
gggtttcaaaggatgattacaggcaagaacattatctgtggaaaatgaggacaacattctcgaacgagggatacacatacaaagacaaagaatgaaactttggtgttcagaaaactagaagt

SEQ ID NO: 331834 - DNA, 122 bp, Homo sapiens
agcttcaaagacacgctgtgaccctgcggctcctgacgccagctctcggtcgggaccgagcgggtctctccacggcaaccgccgacgtcacgaacgtacaactgtaccgtcgcgagaggacg

SEQ ID NO: 331835 - DNA, 122 bp, Homo sapiens
cctcttgctgtgtcttacttcataaggagttgtatcttcccacctccatttcaatactgccggttaggacctaagtagaagagcagtaaaggctgattgacacacagggggatggagttggt

SEQ ID NO: 331836 - DNA, 122 bp, Homo sapiens
cggggcgattctggcaactcagccagaggaagcctggccctcgcctcccagcgttccccccgccccccgccccagtgcaatgtccgcagtgcccgggcgtctgcccgctctctgtcgcccta

SEQ ID NO: 331837 - DNA, 122 bp, Homo sapiens
tgaagctgccatgccattgggagacgaatctgtgcgcacatgctcacatcggctgcctctcggaagcttctgtttccagcctgagcgttgctttgagtgttaggggctgtaggcgccagctg

SEQ ID NO: 331838 - DNA, 122 bp, Homo sapiens
ttcaagctccttatcctaggctaattttatattatgttaaatcacttgtttttgttctcacggcttcctgcctgctataggcataattacgaggaagcagaacttctccagaagcaagcgca

SEQ ID NO: 331839 - DNA, 122 bp, Homo sapiens
accccgggctccggagccctgggcttttcctatgaaacgccactgatggggaggccacaacgccacccggagccctgggcttttcctatgaaacgccactgacggggaggccacagcgccac

SEQ ID NO: 331840 - DNA, 122 bp, Homo sapiens
cgccgcccgtggccatcttgtaggcggggacacgccgaggtaacttccagggtgcgccttcgttgtcttctccaagctgtagttctacgtcccgacctccctatcataccacactcttcagc

SEQ ID NO: 331841 - DNA, 122 bp, Homo sapiens
gccgcgcccccgccgcagcgccggcggccctacctgcagcatcactttgtactgctcctccggtttctggaccacgcacatattacatcccatgttgctggccggcgagaggaggcggaggg

SEQ ID NO: 331842 - DNA, 122 bp, Homo sapiens
actgtcccccttcccactgattaggggagttggcatttcaggaaccagagtttctaagggcgccaaatagaagggctcaaagggaatcagcaggcgatggttactgtgggcgggtaaatcag

SEQ ID NO: 331843 - DNA, 122 bp, Homo sapiens
gcctttcgagcaggctgggggttgaaccgggttcaagcagtggacgctacagctcccgggcgcagcccccggggtccccgcccccactccgtcccagcccagcacgctctacatccccaaaa

SEQ ID NO: 331844 - DNA, 122 bp, Homo sapiens
gggcagctgaggctttgcaagacctgttttcagccctttccttcccccaggatgagctgacggcagcccattcgctctgcttctccccggatggctcccagctcttctgtggcttcaaccgg

SEQ ID NO: 331845 - DNA, 122 bp, Homo sapiens
cattggcactcccccaactcctctgctcttgtgacaatccaaactgcctccagatattgccggatgtttcctgggaagggattgctcctgactgagaactgtccccaggtaggttcatgttc

SEQ ID NO: 331846 - DNA, 122 bp, Homo sapiens
ccgcccggcagaggcaaaggttgctggataccggtgcggtcctgcctcgggcgacattcgcgcacgcacacgaacttccagccccgacattttcgcgggaaacctgtgtctgtcttgagtat

SEQ ID NO: 331847 - DNA, 122 bp, Homo sapiens
ggtgagaggcgagggcaggctgggagacaacaactttcgcagcgacttggccggggctggcgccctgcgcgttcccgggccgtgcgctcgctctgagacccgctccccgccacgctctctga

SEQ ID NO: 331848 - DNA, 122 bp, Homo sapiens
ttatctctagtggttttgcctgctaatcttctttttccctgaaagaacaccctcacggcacggcgttttccttaacggtcaggcgttttcccgggcagcttacctgctcggcctgggtcttt

SEQ ID NO: 331849 - DNA, 122 bp, Homo sapiens
attgtgcaatgttatacaacaacttcctcaaagtgctaagtgaaaaggacattggcctggcgttagtcagggaaggcgtcctggagggaggggaatttgaagcagagctttgaaaaacaaag

SEQ ID NO: 331850 - DNA, 122 bp, Homo sapiens
ctgtgccaagaaccctaagctactgtgggttaattggagttgtagcaagtatttctttctcggctgtctcttttagcagagcttctctctctctctctctctctctctctctctctctctct

SEQ ID NO: 331851 - DNA, 122 bp, Homo sapiens
gctcacaaggggcacataacatccgaggatcccatttgcggccgggggaatggcagagatcgccccccaggtctgcccggcgctcagggaattggtggcagcgtctatttcagagtttatgg

SEQ ID NO: 331852 - DNA, 122 bp, Homo sapiens
cggcgcccggcgcgccacggcccgtagcagtccggtgctgctctccgcccgcgtccggctcgtggccccctacttcgggcaccatggacacctcccggctcggtgtgctcctgtccttgcct

SEQ ID NO: 331853 - DNA, 122 bp, Homo sapiens
ccactacacccagcccaaatcactcttttatccattctataagatctttactctgcacatcgaagctctattcatcttcttctaatgtccagtccaaaacacacatcctccaagtttttctt

SEQ ID NO: 331854 - DNA, 122 bp, Homo sapiens
gactgtggcttagtgtggctcatgaggggatgcacagagcattatcagtatggagacacacgcttccagctcatgatgagctgagtgcagagcaggagcagtgacaatggtaaggccttgaa

SEQ ID NO: 331855 - DNA, 122 bp, Homo sapiens
cggtatagtcaaagaatagaatattacacagaaatgaaaagaatcaactactgcttaacacgtagcgatacaaatgcattttacagcatttggttgattaaaagtaaccagaggtgagttca

SEQ ID NO: 331856 - DNA, 122 bp, Homo sapiens
agaagggttgaagaattttgttccgcccatccagtcccttccactaccaccaccaggagccggacaagctattgagatcattttgggacaatgtggaggtcaggggcttgatgccatttaaa

SEQ ID NO: 331857 - DNA, 122 bp, Homo sapiens
ctaagcaacgtggcttagtccatcagcatcttattctgggtaataaaaaataaaaataaacggatacctgttttccactgctaaaactgaagcaccactgtgtgagcaacaggaagggagag

SEQ ID NO: 331858 - DNA, 122 bp, Homo sapiens
tgtggggcctttccggcagctcctcgccctgcaggcctgggctcagcacttcctggcagccggggcccctttccggtgctcccgtcctggagggtccctccgtgtgtcctgcggggcctccg

SEQ ID NO: 331859 - DNA, 122 bp, Homo sapiens
gaacttcggagtgcttagggggaggcgctgctcagcataagttcccacaggcccagcaggcgttcgcactctgtggcctcctgttggaggaagggattgggcttttccactcctcctgggct

SEQ ID NO: 331860 - DNA, 122 bp, Homo sapiens
actcccttacctgtggacataaaaaatgggatgcggaactttccactcagcacgcgggcccgcagattctgcagtgtgcttccatcaaatggcagggcaccgcacacaagcacgtagaggac

SEQ ID NO: 331861 - DNA, 122 bp, Homo sapiens
aaggctgaaaaccaggtcttaaagtgtgagagccaaagggcagcagcccaggagagtgttcgtctggagccccggggtttaagtctccacactcacatgggaaaggagacgaggcctccctg

SEQ ID NO: 331862 - DNA, 122 bp, Homo sapiens
agcacgtggcctggagcccagcctcccgccccgctcggtcacgtgagcctggctctcacccgcgccggcttccacaccccgcgggactgagaaccgccctcccactagctcgcaggcgcagg

SEQ ID NO: 331863 - DNA, 122 bp, Homo sapiens
tatgctgttactgagccaaattctgttctttttctatttggaattccaggtacactccctcgtgcatgagctcagcatgaggaaggcaactgaagcagtgatatatatcttctctttcctag

SEQ ID NO: 331864 - DNA, 122 bp, Homo sapiens
cggctccccccgcagctgcctctccgccccgctctttgtgtcggcgcctggagaaggccgcgtgatgtcattgctccccggggcagggaaacagaggcgggataaagtcacctaccccgcgc

SEQ ID NO: 331865 - DNA, 122 bp, Homo sapiens
gagtagaggctgctcaagagaaggatttttaaaaagtcagtcccatggacatgtgcagctcgagtctgggccctgaggcagctcccctgccatcatcctcctgcacaccccagatcctgagc

SEQ ID NO: 331866 - DNA, 122 bp, Homo sapiens
atccacccgcctaagcctcccaaagtgctgggattacaggcgtgagccaccgcgcctggccgtaagtcttacagataggtttgccactcaggcagttggattccagagctcagactctcaac

SEQ ID NO: 331867 - DNA, 122 bp, Homo sapiens
cagaagtctggttgccatggtgcgcctcgcgggattaggggccggtagaggtgggcgggtcgggcggaagtcggtctggtcaccatgggggccgcagacgcctgcactcgggacttcctctt

SEQ ID NO: 331868 - DNA, 122 bp, Homo sapiens
attttctggttgagtgatattaaaaagttatttcacctctcctaactgtgagttatttaacggtgcctcagctgtctcatcttatattaagtactcgacaaatgtgaattactgttattact

SEQ ID NO: 331869 - DNA, 122 bp, Homo sapiens
ctcctgctcgcagcgtgagaagagccaggaaggctgtggagtcacccgaggaaaccgagacgctcctaaatagcctatgtggggaacaaagttccaataagtgtctcagccggggcttcaca

SEQ ID NO: 331870 - DNA, 122 bp, Homo sapiens
ccgcgaagtggaggcacacgggaggtctgagagccgctttcccccagagactgggcggggcggctccgggccacggaagcagcctcgaaccagccgcgcagccctgacaagacgctggaggg

SEQ ID NO: 331871 - DNA, 122 bp, Homo sapiens
aggtagcgacccttagagacgcaacgtggcgcagcggactcggctgcgtggggcaagggccggggccggacacaggagcagcggggatgccgggtgcgctccgagggtgtggcccccgggct

SEQ ID NO: 331872 - DNA, 122 bp, Homo sapiens
tgttttcgtgggtcttgctgacttctctgtagctgcgggcagggtttgccacgaggcctgcgttgggaaggggttcggagagggcgctgatgttggagggaagtcccagggaagaggcagag

SEQ ID NO: 331873 - DNA, 122 bp, Homo sapiens
gctaggaactaagttcctaaggcactctgctctataaacaagcttgtcacactacataaacgtggcatgtcaagggattgaaagtctgctctaaataatgacaggaaagggaaactgccata

SEQ ID NO: 331874 - DNA, 122 bp, Homo sapiens
ctgagtcgacctgcagtacagcgttattagtctttttatttgcttattgcatcttgggagcgcgtgggtgggtgaagggagcgaggataggaagtctatggagatttacaccagtttttttt

SEQ ID NO: 331875 - DNA, 122 bp, Homo sapiens
taccatatgaggtcgcaccacaaaaaggagtatgcgatggagcccttggtgaagcggcggcgagaggagaaactcaagtgccccatctgcaatgagtccttcagggagcgccaccacctctc

SEQ ID NO: 331876 - DNA, 122 bp, Homo sapiens
tgctttaaaaaaagtgaatttcaagctagtaacaaggaaagtaacctttattcacggagccgatgggaggtgtgctgccccacgccacgcaccgtgcctgtgttgtcttgtgggaagcctgc

SEQ ID NO: 331877 - DNA, 122 bp, Homo sapiens
ctgctgcacccggagctgctgtcccaggagttccttctcctcactctggagcaggttgggcgcgccggatcggagggtgggcgggtgggccttcccaggtgaggcgcttgcacccgagcttg

SEQ ID NO: 331878 - DNA, 122 bp, Homo sapiens
cccagcattgcaccaaagtgtgctcgtgcaggacctcgaagatgccccgtgggcagcgttcgggctgaggctgcagggggccttgggagcacggtggccctcctgtctgttctgtggaccgg

SEQ ID NO: 331879 - DNA, 122 bp, Homo sapiens
tggctaagctgaactacctgcaccaagggaatatttaaggcctctgggacagcctggctgcgtatcacagtatacgccctgcaaagagattgggataggaatgccacctgcacacagaggag

SEQ ID NO: 331880 - DNA, 122 bp, Homo sapiens
atctcatttaatcctcacaactactcttgaaatatgtgttattatctgcagaacagttcccggggtggctaagggcaaaatccaaaccgcagtgggttaagaagtgactgagtggggagaat

SEQ ID NO: 331881 - DNA, 122 bp, Homo sapiens
caggagcgcaacctgctgggtcctgttccagcccgggagttcttgttgttttgctcttcgcgataaatgttgctgctgttcactctttaggtccgcgctgcgtttatgagctgtaacacgca

SEQ ID NO: 331882 - DNA, 122 bp, Homo sapiens
ctggcggtgacagccgagggtggacagcaatcagattctgaaagtggagctgacaagatgcgctgatctggaatgtgaggtgtgatagaagaaaggcagaagggttgaccacagcgtttgag

SEQ ID NO: 331883 - DNA, 122 bp, Homo sapiens
ctcggttgctagggacattgcggagttgcgggactacgtttcccacgtcgccccacgccacgcccccttggcctcgccggaaagacgtcccaggagcctctgggcgtagagccccgcctccg

SEQ ID NO: 331884 - DNA, 122 bp, Homo sapiens
gctcaccaggtacccccgcagcgcgccgggagcgcctttctccccgccgccgcgagcatgcgcagtgcccccagccagtcccgggatccacggcgcgcgcccctcccagccgcgcgcgcccg

SEQ ID NO: 331885 - DNA, 122 bp, Homo sapiens
gtggaggacagctgcccttccagcggggcccatccaggtgtttgacccaggtgctatacccgccagtccctgacagcagttggctttttgctcttagtacctgtatctgcatcctaaatttg

SEQ ID NO: 331886 - DNA, 122 bp, Homo sapiens
ggaggaggggcaggctggggcgggggacctgtcgggatgccccgacttcaccaccttccccggcccccattggtctgctgtgggtcccgagagacttcaggagagttatcttcagcctctca

SEQ ID NO: 331887 - DNA, 122 bp, Homo sapiens
gcgactggttctggccacactttccaaggtcagctccctccctccctcccacctttacttcgaatatttgccttcggccaaacttgctccgaactgctagaagggacactgttgtcttcctc

SEQ ID NO: 331888 - DNA, 122 bp, Homo sapiens
gagaaaacaggatggggcactgcctcactgaggacctgggggtgggaaggaaagtgccaacggcagctctataaaagctccctggccaggggacctagggcaagcagtggtttctcctcctt

SEQ ID NO: 331889 - DNA, 122 bp, Homo sapiens
aagaaacaacgccaatagcatgccagagaggctgaaatccttccaaaccaatctggaaaacgcaaatgctttagataataggtgcactctaattcaaatgcctcaggttacattaaagaaac

SEQ ID NO: 331890 - DNA, 122 bp, Homo sapiens
gctcgcagggaaacaacctggcagtgggacctgctgctcatggccttccttgaaaggccacgaagcaggatgggggctgacgaccctttgtaaatggccccagatgtgagcagctattttaa

SEQ ID NO: 331891 - DNA, 122 bp, Homo sapiens
cagaagggagcggggggtgggggggtgggaattaaatgcttttgcctcgtttataaagagcgagttttcaggaggtcccttctcaaggaggaggggggcacctctcccccaactacaagcag

SEQ ID NO: 331892 - DNA, 122 bp, Homo sapiens
ggccgcagggagaactcgcctccccgccccggcacgggcactgtctgcggccacgtgccccggaggtcgcggcccaaccagccccgccgacttgttccgctttcgccccagcccccggcggg

SEQ ID NO: 331893 - DNA, 122 bp, Homo sapiens
taagactagaatagacctgctcatgggaatatgacttgccctttcttgaaattgtggtgacgtgaatggtgcttgctttgacattcatccatttattctttctgaaaacatttgttaagtgt

SEQ ID NO: 331894 - DNA, 122 bp, Homo sapiens
ttcactgggcccctgtgtggggggacggccaccaagccatccttttgtaccctagccacacgtggcagacgtttctcagaggaatgctctcgggtgaggtatgttattgaatgttttgctct

SEQ ID NO: 331895 - DNA, 122 bp, Homo sapiens
tgggggtggtggcaagagaggccctggtttctgtgttatcctcacccatctgaagttctccgctctctcagggtatagcctagagatttctacctttgactctctactcttatattttcttc

SEQ ID NO: 331896 - DNA, 122 bp, Homo sapiens
gcctggattacaggaaagggctgcgtttagctgcgcacccggccacggctgggacaaacacgcgcagtgacacgcggcggctgcggttcccgcgctggccgcggtcgggctctggcgctcct

SEQ ID NO: 331897 - DNA, 122 bp, Homo sapiens
ggggcaacatgacattgtacccactctcccactttgctgcgtttttctgaatggtgaaatcgtggtcagccactgcttctaaaggcagctgctctggctgcatcccatcggttggtggaacc

SEQ ID NO: 331898 - DNA, 122 bp, Homo sapiens
ggttgcctgagtgacagctaaggccggccggatctctgggggcctgacttccacccaagacgccactagcttggtgaggggccccagagctctccaccgcagctcagccctccgcagccctg

SEQ ID NO: 331899 - DNA, 122 bp, Homo sapiens
agtggcgcaagtgcttcctccacttgcgtgggtggcgtctcagcgaaggtccgcgcccttcgagtgtctggaaaggagccgtgttgagcttgcaaccatttttggagtggggcatctttaac

SEQ ID NO: 331900 - DNA, 122 bp, Homo sapiens
gatcatggacctaatgcgggcgctgaaaatagggattagggcaggattccggttagaaagcgccagtgttaaaggctaaggagacacagcgccccctaaagagggtgcggtttaaaaatcgc

SEQ ID NO: 331901 - DNA, 122 bp, Homo sapiens
aaacaaagaaagaagctcaaactttggatgctctgaaaccaatgtaacgagtaaagtgaacgggaccatctagaggaagtttgtgatttagtttttcattggcagttgtagctgcaaacaac

SEQ ID NO: 331902 - DNA, 122 bp, Homo sapiens
gtcttgaactcctgacctcaggtgatctgccagcctcagcttcccaaactgctgggattacgggcgtgagccaccaaacccagcctagtcattcttttaagataggtctgctggcagcaaag

SEQ ID NO: 331903 - DNA, 122 bp, Homo sapiens
gagatggggtctcaatacattgtccaggctagtctcaaactcctgtactcgagtgatcctcgagtcgcagcctcccaaagtgctgagattacagttatgagccactgtgctttgcctcagat

SEQ ID NO: 331904 - DNA, 122 bp, Homo sapiens
ccttctgcatcctccgctggccccgtggttgaactttaatggcagggccggggtctccagcgccacgccgcccacagcagcccattcgggacgccctgcaattggtcctgcccctgtcctcc

SEQ ID NO: 331905 - DNA, 122 bp, Homo sapiens
ctaatctactcatgcctgtggacagaccagtccatcttccttctcttaccatacagcactcgcccctgagctggtcattgtctattcctacgatggctggccttcacctatgcagaatgaca

SEQ ID NO: 331906 - DNA, 122 bp, Homo sapiens
agcatccttccccgccggtggccgcccgcccgcggcccgcgctcgcagcctcccgcctggcggttgacttctttgtgtcgtattctctgcctgcgccctgtctctgcaggacctgttcgttc

SEQ ID NO: 331907 - DNA, 122 bp, Homo sapiens
caaaagtccccacagccaccaatctggccctcctaggacgcggcaacagaactgtgaaatcgcaaagagagattattaggacaagacgttccttcccctcagatttgtgagaaaacttcaag

SEQ ID NO: 331908 - DNA, 122 bp, Homo sapiens
attatcctcataggtagtgatcccagaggaaagggtgctatgttctctttttcatttccacgttaacccctctaatggatttggattggccctgctcgggtcaaattcccacagtggaagtg

SEQ ID NO: 331909 - DNA, 122 bp, Homo sapiens
tggggtaaagaatatggcgctcttggtgcaaactcttgggcatctgctaggatgtgagaacggtagtaatagcaggaaggggtgaaaagcttgtcttctccactgtctttgtttgccagggg

SEQ ID NO: 331910 - DNA, 122 bp, Homo sapiens
tggctcggggggctggcgagccgcagcttggacaggatctggccgcggatggcctcgatgcgcttccgcttcaccagctccatgtcgatagtcttgcaggtggatagtcccgcggccggccg

SEQ ID NO: 331911 - DNA, 122 bp, Homo sapiens
ccaagaacacgcgagcatgtccgaagcagaaagtcaacaactaggctggagtttccccctcgcgcatattcagtagggaaagcgagggcggaggactaggctggcttctacggccccagttc

SEQ ID NO: 331912 - DNA, 122 bp, Homo sapiens
gctatacttttatacaactggcagtgcagtgggttgtttacaccaccatcaccacaaacacgcaagtaatgaattgttctaggatgttatgatggctacaacagcactaggtgataagaatt

SEQ ID NO: 331913 - DNA, 122 bp, Homo sapiens
gcccagcgtctggacccctctcggtgatcccctccccattcttcatctcatccctggggacgtatagcacagcagcagcagacaaacctgggttcagaacaagtccggcttctgccttttat

SEQ ID NO: 331914 - DNA, 122 bp, Homo sapiens
cacacaccgggggcggggcgaccggagacacacacctcacggaggtagcccccgccagcacgtcccagtggttagggactgtgcgtgctggtccagctctccatgtcttccaggccgcgcga

SEQ ID NO: 331915 - DNA, 122 bp, Homo sapiens
gctgacagccctgtgctggcgtgtgcaagtcaaccccggttcccatggccgcagtgccgccgatgccactactgcctttgattcagagcacacggcttagccccagggaagctgagatggtg

SEQ ID NO: 331916 - DNA, 122 bp, Homo sapiens
ggacagcatctgtgtgtggaaatagtggggagaacagagatggtgtggttagcagaatcacgcccccccagtatgtccatacttaaatctgtgggatgtataaatatgttacttcacatggg

SEQ ID NO: 331917 - DNA, 122 bp, Homo sapiens
tgctggagaagatggagctgctggaccagaagcacggtgagcgccgccctcctccccgtccgctctccatttcagaggtgggaaaactgaggcccagaggggtactctcagggccaggccac

SEQ ID NO: 331918 - DNA, 122 bp, Homo sapiens
tcccttcgcctaacagccttcttatccgccagggagggggaggttgtgtgtgtgcacacacgcgcgtgcacgcacacacactctctcgcactcttgtgctcacgctgcctctctcctgctgg

SEQ ID NO: 331919 - DNA, 122 bp, Homo sapiens
gagccaagattgcaccactgcactccagcctgggtgacagaatgagactccgttccaatgcgaagtctcttaagaccaaggagagcagacattctgatgtttcccagattgacagcactcat

SEQ ID NO: 331920 - DNA, 122 bp, Homo sapiens
ttttattaagccacaattctaaatctctgagtcaaaagcatttgtcaaaattcctgcttacggactattaaagttcctgagtttggaaggagttcttttttcctaaattccacgttgccctt

SEQ ID NO: 331921 - DNA, 122 bp, Homo sapiens
cccctccgggtgtcgccgcagctgaatgattgcgttggtggaacagctggcccgcttgtgcgtgggccaggacacggtggacctgttccgcctgcgttcttgccggtccatgtttggattag

SEQ ID NO: 331922 - DNA, 122 bp, Homo sapiens
cccaacccccactacacccacacgccagcaacttatgcccatgaggcattcctgcaagcacgtagtggcctttcccgactctgcccttgcacacaaatctcaggctggactaacacttttac

SEQ ID NO: 331923 - DNA, 122 bp, Homo sapiens
tgtcccacccactccctcactcctaatatcagccaggctgctatagctttgtttatcagtcgatgaaattctagtccagggccttcatttgcctctgcagctgagagcgcactcttctcagc

SEQ ID NO: 331924 - DNA, 122 bp, Homo sapiens
ttccaccttgattgtgaggcagccaggtgggtgagcgtccctgcagaaactccaacctgccggcccactgaggtggagccccgggaggttcacaccctttgcagcagggaggagcctggccc

SEQ ID NO: 331925 - DNA, 122 bp, Homo sapiens
tgggacccagagggcttgaggacatctgcaatgctccagaagcccaagagcgtgaagctgcgggccctgcgcagcccgaggaagttcggcgtggctggccggagctgccaggaggtgctgcg

SEQ ID NO: 331926 - DNA, 122 bp, Homo sapiens
agaggcaagagcgaaatcaaagcagcgtggaggagagagaggcagagaagggagaaagaacgagagagccagaccgaatctgcctccaccaatgggatcagcggctgcgcagcgtcaggtga

SEQ ID NO: 331927 - DNA, 122 bp, Homo sapiens
gctgaactttaacccagcatttcccaaactcacctgatgatgagttgctgttctgtgcaacgcctagaaatgtcagagatatgcatagactgtagtctggagacagataaacttacccagct

SEQ ID NO: 331928 - DNA, 122 bp, Homo sapiens
tgctgccctccaaggccagggcagaaggaccttgctgcttctgtgttagtctctaggagacgccagccaccatgtaagaaacggataaaccctcacacctgtaatcccagcactttgggggc

SEQ ID NO: 331929 - DNA, 122 bp, Homo sapiens
gggggacgcggtccagatgctggggacgtggcgggtgacagcaagaggtggtcctggtcgcgcgcatcttcatttgcgcccgccccctctcaccacccctatctcccatcaggggtctccat

SEQ ID NO: 331930 - DNA, 122 bp, Homo sapiens
ctctgagctgtggggtgtccgggtgattctgaggcctgcgtctctgagctgtggggtgtccgggtgattctgaggcctgcgtccctgagctgtggggtgtccgggtgattctgaggcctgcg

SEQ ID NO: 331931 - DNA, 122 bp, Homo sapiens
cgcgggcgccgccgctacccccacccctcctcctcggccggcggccgtgaccctggcaagcgtctgcccaaagcccagccgcctgcagcccgacccctggcggctgggagggccccctgcac

SEQ ID NO: 331932 - DNA, 122 bp, Homo sapiens
aatccttgtggttgacatatttgactcttcaagttgcaaaaacctaccctgggatgttttcggttccctgtacactgttgatacgggacagaggagctctaaaatatgggcttggcccagga

SEQ ID NO: 331933 - DNA, 122 bp, Homo sapiens
agccttggaaacgtggaggagccccttaaagccaggccttgtccctccagggggaacttgcggcttgggaggggacacccactgcatggcttctggaaagagccggactcgcagggccagga

SEQ ID NO: 331934 - DNA, 122 bp, Homo sapiens
aataggtgtctcctatattttgttccgttttctaattgtttatagtgggacactaagtcccgacccattttcttttcttgcccagagtggaagttttaggaaactccttatggaaaatgtga

SEQ ID NO: 331935 - DNA, 122 bp, Homo sapiens
cgtactagcggaggattcgcccagtgctgagcccgagaatgggctgtaccacagcggcagcgaagggaggggaaggcgacggaaaggaggcctgcgaaaggagcattaaggagcacactttt

SEQ ID NO: 331936 - DNA, 122 bp, Homo sapiens
ggcctgcaagtgacttcaggatgctgatgatgccctcaaggtgagagccagagaaaatcccgtcaactctgccaaccaagggcttcaatgggcatgtgtgtggttttctccggcaaagaaca

SEQ ID NO: 331937 - DNA, 122 bp, Homo sapiens
gggagcacgagactggtttgtctgatgctgctgccggagctgaggtcttgcctggagatccgaacgagacaccacgtcaaccggcgcggggagtcccgtgaagacatgagggcgccaggagc

SEQ ID NO: 331938 - DNA, 122 bp, Homo sapiens
cacttgaaaacataagtaatcattccggtaacagacaatgtagtctaaccaaaatcacatcgcaggttgacagccaactgttgttttcatgaatagtaaactgggataccagaatttaaaac

SEQ ID NO: 331939 - DNA, 122 bp, Homo sapiens
ccacgccccaggctctgagcaccgccctggggcggggtatttggcactttcggagggattcggtctggccctcagggcttcggaatcggacttggctggggtagagcttgaactgaccagaa

SEQ ID NO: 331940 - DNA, 122 bp, Homo sapiens
tctagccactttataacaaacagttggatgttttgaaacattacagtatttagcagtctacgctatgaactgaacaaatttgtaatatttaatcaggagtcttaggaatggctaatatataa

SEQ ID NO: 331941 - DNA, 122 bp, Homo sapiens
ccaggccagggtaggcaatctgaggcctggcaggcggcggaaagcaggcggggcgcccaccgggggggcctaggactggcttactcaagcacctgttgatgttcctggggaagaagctgaga

SEQ ID NO: 331942 - DNA, 122 bp, Homo sapiens
ggcagtcacagctctcagactcctttctgacaatgtccatcactgactccatcagttccgcgccttctgtgtagtgccccctagcccagttgtttctggccccacactgacctgtaagacag

SEQ ID NO: 331943 - DNA, 122 bp, Homo sapiens
tgacgtataaggatgtggaggccaccaattggctgcgctgtgcgaagacggacaggtaggcggggcgggaggaggtgtggtcggcagagcaaatccaatagtcttttccgcggcgggcggcc

SEQ ID NO: 331944 - DNA, 122 bp, Homo sapiens
cttcaggctgtgggtccgtccgctggtggaggggaaggtcggggctggccccgggccccgcgctgctgggccccatggtcagtggagacgcctcctggtctcccttcagagctcctcgtcgt

SEQ ID NO: 331945 - DNA, 122 bp, Homo sapiens
gaaagcgattggactgtagcgtaaccccgtgctgtaatataggggccccaagaccaccctcgggttcagtaattcactaggactcatggaatacagcagagcatttctgccaggggtacggt

SEQ ID NO: 331946 - DNA, 122 bp, Homo sapiens
cagcgaagcgcctgcggcagccggaagcgaaagtctctggcttctctgcgtccaggtcggcgcgcgagcacccggaagccgcttgcgggctcccggaagcggcgccctctagcgttctcgag

SEQ ID NO: 331947 - DNA, 122 bp, Homo sapiens
ggagaggttgcgtaaaggtgccggcctgctgctggccggggctggcagcctttcagccgccgcgggtgagtcaacacctgggaattgcatccaagggcggccctttcaagctgcctggaact

SEQ ID NO: 331948 - DNA, 122 bp, Homo sapiens
aggtcctttgggggttccagagacatgtaacatggtccttgctctttgagagtttagcctcgctgagggaatgaagatatacagaacagaaatatgaaaaaggcactgttgaaggggaatgc

SEQ ID NO: 331949 - DNA, 122 bp, Homo sapiens
gaacagcggctgagcctgcgcttcggaagcatggatgtgcgcctgcgctgcgctagggcgcggcgggcggtttgaattttgcttacagagtcccgtctcaccatcctgggcttccaacggag

SEQ ID NO: 331950 - DNA, 122 bp, Homo sapiens
aaggtttagctttcttgtggaaatctacattggctgcacttcctagatattcccattgggcgttgatatcctcttatagcacttcctccactacgatgtgttgccacacttactaacatagc

SEQ ID NO: 331951 - DNA, 122 bp, Homo sapiens
atcttcagctccatcaccatcctggagaagggccatgccaagcactggttcagctccctgcggccaagtcgaaatgtggtcttcagcatcatcgagcatttctggagggagctgctgctgtc

SEQ ID NO: 331952 - DNA, 122 bp, Homo sapiens
caggaagatctcgaaaatactgcttcagcatgtctgccacgtcataagcagactgtccttcgtagttgacacagtctatggcaccttcattcatctggcgcagagcctgaatccgggacttg

SEQ ID NO: 331953 - DNA, 122 bp, Homo sapiens
ggatttgagtcactgaagtgtgcatggcttcttgctcagtggttccctttctgccagagacgcagctctagcttcaaaaagtgttttgatttctgtcgcgcacccatgaaccacttcgaaag

SEQ ID NO: 331954 - DNA, 122 bp, Homo sapiens
gaggccgaagtgggtggatcatctgaggtcacgagtttgagaccagcctgggcaacacggcgaaatgctgtctctacaaaaagtacgaaaattagctgggcagccgggcacagtggcttacg

SEQ ID NO: 331955 - DNA, 122 bp, Homo sapiens
ggcctaggggtagggcataaagcttggagtggcggggttggccacgacgagccacagcaccggacttccaacgacccagtactggaaggacccttctccccccagtggacacgacaggagcc

SEQ ID NO: 331956 - DNA, 122 bp, Homo sapiens
ctccccactccgtgtccactccctgctctgcgacccgctgcggccgtcacagccgcccggcgggagctggaagtggccgagccccctcggtcccctcaggggaatttttggaccaggtgccg

SEQ ID NO: 331957 - DNA, 122 bp, Homo sapiens
tctcctagctgtcgtggatctcttagagcataggtgtgccctgtaacctggcaatgcacccggaaaacaaagcgtgcgacctcaagggttatcacctgcattttgcagaaacctaagagaaa

SEQ ID NO: 331958 - DNA, 122 bp, Homo sapiens
ggtgtctttgccacggatgtccccagactccagtccgctaatcgccaccagactccagtccgctaatcgccactgtgaattttgaagaggaggcttagtataaaggttttctaaaaggattg

SEQ ID NO: 331959 - DNA, 122 bp, Homo sapiens
ccccggttgcccggactccttgagacggcgctcccgattgggtgtcggcccagtggagggcgggggccagcgctagcctcgagggtcccgggcctgccctgtgcgcgcggcggtccgcggtc

SEQ ID NO: 331960 - DNA, 122 bp, Homo sapiens
aggagggagagcccggcccgcgggccgtccgtcccccacaggaaaccgccggggaggccgcggcagggacccgcccccaggccactaacagcaacaacagagaggctggagctctgcctgcg

SEQ ID NO: 331961 - DNA, 122 bp, Homo sapiens
gattgcttaaataccgcccatgattttccagcacttacagtatcatcaatcttagcagaccgtattaagcatgtcaccccagtgacaccttctttacacgacttgatctgtaatataattca

SEQ ID NO: 331962 - DNA, 122 bp, Homo sapiens
tctgaaagggtctgctgagcttcttaatggccacatttctgtcaaggacagcatcatacgcggcactgtagagatccaagagcaactcagaattaagaacaaaagattccttagaactcttg

SEQ ID NO: 331963 - DNA, 122 bp, Homo sapiens
tcagccctctacagttttccttgcacacaggcatattaatagtttttcatttctgtttgacgcatgtgctagttatgttgttagaccacgcgattctcaaaaagctggggatactctggttt

SEQ ID NO: 331964 - DNA, 122 bp, Homo sapiens
gttagtttactcagctttaattagatagttgagtcatatattttcaacatttttctgtatcgtatttattatgcacaaaaataaagtgtgatctctaatagcatggctaaaggtaatgccaa

SEQ ID NO: 331965 - DNA, 122 bp, Homo sapiens
gaatgctagtttccccacatctcaccaacactgtctagaacgcatagttttagagatgaacgctgggaaccgacgcactgtttgctctacctctccccctcctaacagtctagaacacaggc

SEQ ID NO: 331966 - DNA, 122 bp, Homo sapiens
cgggggcttggggagggcggctgcgagcaggaggacgaagttcgaggcccgagctcttggcggggccgccccttcttcggggcaggcgcttcctaaggaggagtctcttgggggcggaggcg

SEQ ID NO: 331967 - DNA, 122 bp, Homo sapiens
ttgcgcttgatgaagaagcagatcggaagtaactgctccctcctcaaggttgtcttcagacgtcttggggacgttcctaaacactgagggggaagacagccaatagcacccattaaaagaaa

SEQ ID NO: 331968 - DNA, 122 bp, Homo sapiens
acatagaggtcctgttccgtgcggacacctgcggggaccggaggggcacgagtcaagggccgtagagccccttccgggcaccccaaacccttctctgccatgggtctgaggcccaagcagcc

SEQ ID NO: 331969 - DNA, 122 bp, Homo sapiens
ggtggtactgggctgctcctgagtaactgagcagactcaggaaccccaggtcctgcccttcgtccagttcccagttgccctggacaaagagtgagtgtatctgacacatcaaaaatcctcca

SEQ ID NO: 331970 - DNA, 122 bp, Homo sapiens
cttcactgagtctctactctgagctggacaggcaaggatacaccctggctcctgcccccacggtactcatggtccaggctcgaagtccctgtgtcatgatcatggttggggcagcaggaccc

SEQ ID NO: 331971 - DNA, 122 bp, Homo sapiens
cttcatcagctcgtggaccttgtcagtggtattgaccaggggctgggtttccaggctgagcgtggaagccatgctgaagaggaagaggaggtcggctgccgccaggttgaggatatagatgc

SEQ ID NO: 331972 - DNA, 122 bp, Homo sapiens
cctgtaagaacccaaaggtcttgtacagagctggaattcggcgaaaaacttgctccaacacgccaaatctgccgcatcctcaataccccaccctcttccctctgcgcttactgcccacaccc

SEQ ID NO: 331973 - DNA, 122 bp, Homo sapiens
cggacgcaggcagggtcttggggcagcgcctggctcccgcgctgctcctcctccgcgcggcgagggatctctgtgcgtcctcactggcccatgcacccagcacctgcgactcccgccgtcgg

SEQ ID NO: 331974 - DNA, 122 bp, Homo sapiens
gccttaattcggaggaaacccaggacttgagagagccatacaatttgaaagacgaagcaccgtgaaatgcagaaagttgtggttcggatagctcagctgattaatttcatgttgccacagtt

SEQ ID NO: 331975 - DNA, 122 bp, Homo sapiens
tctggcgtacggagtaaaagaaattttctgttcttaaggcttgtactctgacaccattctcgttgtattgagggtatatagcttacccagcaaaggaggtaatgtgaaatggaaggactggc

SEQ ID NO: 331976 - DNA, 122 bp, Homo sapiens
atccccgggaccgtcctcaattcacctggttcttctgggcctcacgtcaactgtgtgtgtcgctgatctctccagccgccctctcctcctcctcgacacccacaaccactgcccagcgcatc

SEQ ID NO: 331977 - DNA, 122 bp, Homo sapiens
ccggcaggagcgcgagagggcacggggggactcggaggccctggacgaggagagctgagccgcgggcagccaggcccagcccccgcccgagctcaggctgcccctctccttccccggctcgc

SEQ ID NO: 331978 - DNA, 122 bp, Homo sapiens
ctgccgtggtcctgtcaaatggtgctgggggcggggccaggaatcacagcaggtgtctgccgctagcgctcggagcctgtgctgggggcagggtggtgcatctcatgcctctgccgcttgct

SEQ ID NO: 331979 - DNA, 122 bp, Homo sapiens
ggactgcaatgtctcaatataaccctagaatgaagacgcgtcgaatcctgaaacaagtagcgttgaaaaccttcattcaagacgtagtgtgtcccaaatcagccctacctacggagcacgcc

SEQ ID NO: 331980 - DNA, 122 bp, Homo sapiens
gcccagggcggggaaccggggtcgtaagtcccctggggagggacacggacgggaagcagccgaggggggtgaaagtccccgagaggggcccagccactacagagaaagccctggcgagagaa

SEQ ID NO: 331981 - DNA, 122 bp, Homo sapiens
taaggcgactccggtcgctctgaggggcagggccagccagccccctcccacccacgcacacgctccccctcagagccgccggcccagagaaaaaccgccacatgcagctcccttccacacgc

SEQ ID NO: 331982 - DNA, 122 bp, Homo sapiens
ggcaggcaggcggcgctgtgctccaggtagaagtggccgtcagggcaggggcctgctgggcggcatgggcgggggctgcagccggctgtggtgggcagcccggctctgcccccacacccggt

SEQ ID NO: 331983 - DNA, 122 bp, Homo sapiens
cgccagctgcagtcccagcgccgcacagagctgacctgggaagtgatggatttatagccgcggcaatcttgccatcagctccagcttttcccaacagccccaacccgctttcccggtcagtc

SEQ ID NO: 331984 - DNA, 122 bp, Homo sapiens
tgtgtgttgggcaggcaggtaaggggagtaagaccaggacaagtgttcctggcaaagttccggtgacagcattaaacattcagatggtgagggagttaatatggttggagaacaacaacttt

SEQ ID NO: 331985 - DNA, 122 bp, Homo sapiens
ggcggtctggctgctgctcacgtggataggtgacgaatcacgtcccggctctctgcactgcggggcggggcccacgctttgctgcccgccctgccggccccacccccagcctggttagcagt

SEQ ID NO: 331986 - DNA, 122 bp, Homo sapiens
gatcctcttccaggcgcctgatttgctggagataggcgatacaggcagacgctgtccagtcggtggcctctccagagtgaggggcgctcctggtgcgtttgggccggcctgtcctaacaaat

SEQ ID NO: 331987 - DNA, 122 bp, Homo sapiens
accggctgcgcccagctccagggggtcccaggagtgaggctgccccaggggcagtgggggcgggggaacacttgattgtgtgccctgtgagctcttgtcactgtgtgatggtgtggtccggg

SEQ ID NO: 331988 - DNA, 122 bp, Homo sapiens
ttcccaaaaagtcacattggctgtgggtcgggctgcgtcgcgcctttcctggccgcggtgcggggacctctgggaccgctccctccagcggactctctatttagtctctgtttacttagagg

SEQ ID NO: 331989 - DNA, 122 bp, Homo sapiens
cccctggtactgaatctcatctccttctcaaggctccttggatcaagttgggaccggcagcgccaaggctgctctccgtgatttagcagcaacctagagtcagagagaccggaagatgggag

SEQ ID NO: 331990 - DNA, 122 bp, Homo sapiens
gcctgccagggcagaggtagaattggatcctggatcttctgcttaggacactctccctaacgttgccccgttgaggtaaactgaggaatggagagaccgatatggcagaacaggaggatatt

SEQ ID NO: 331991 - DNA, 122 bp, Homo sapiens
gggcctgtcatttcagcatctgctggacagcagaacttcgcatgcaggatcctggagctgcgtcgggttttgaatcagggacaatggaggaagtgggaaactgtgaagagagtcagagggct

SEQ ID NO: 331992 - DNA, 122 bp, Homo sapiens
tctggaatgcttgcttaacacacctgtcattttaaagaaagaaaccaaaatagaacatctcgcaagtggggcatcctcaataactatgttagaaaaagtataaaatcaatgctaaaggcatc

SEQ ID NO: 331993 - DNA, 122 bp, Homo sapiens
accactggatttagcttccagcctaaaacaaaggcacagagacctagtcactgccttccccgacccttttcccaccaaaacgtatgcctgggaaccccagcgacaccggtggagcccttggg

SEQ ID NO: 331994 - DNA, 122 bp, Homo sapiens
tatggatgtgttccagcaattgattgctgagcaaaaaataatcttaacgcatacaaacgccgggcatggtggctcacgcctgtaattccagcactttgggaggctgaggtgggcagatcaca

SEQ ID NO: 331995 - DNA, 122 bp, Homo sapiens
gtgtgggcgctgaccgcgcttcgggcagagtggcagatgcggcccctgggtgatgcgcaccgaagtcatgtgaggggttgattggttgtgcggcaccactgtttacccacttgtgttttctt

SEQ ID NO: 331996 - DNA, 122 bp, Homo sapiens
acatagcacaggtaacttggaattccatttggaatgaccccaccacactgagcagacctccgagtggcctctgagcgtgctgccaacagcagcagcacccagcatggcacagctggaacccc

SEQ ID NO: 331997 - DNA, 122 bp, Homo sapiens
ccgcatctccatttccccgcctgcccctcacactgggagccgcccgctcgccccgggacgcggggcgcccctgaacccgcccgcgcccctagccacgactcccgtcccgaaaactacggctg

SEQ ID NO: 331998 - DNA, 122 bp, Homo sapiens
ggccaccccagggccagaccccgagggccctggaaccgtcactgtccccgcgcagatgtccgcatgcacaaagtccacacagggcccaggtggagggctcagagcccagccccggggttctg

SEQ ID NO: 331999 - DNA, 122 bp, Homo sapiens
cgcagaatcaggtcctagaggagtgcgatgcgcgcccttggtcactagagggcgcagaagcgcaggccctggggaaggcggagccaggaggagggatctcagatccctgcgagtttgttgat

SEQ ID NO: 332000 - DNA, 122 bp, Homo sapiens
ataaaagttgccaggggttgtggctcatccctgtaatcctagcaatttgggagattgaggcgggaggaccgctcgagcccaaaagtttgagaccggcctgggcaacatagggagaccctgta

SEQ ID NO: 332001 - DNA, 122 bp, Homo sapiens
cgggaagacttggggagttcgggcaaagtagcacattcaagcatgatctatttttatttacggacagaaagaaatattagttctgttaggttccaccgagtaaactatttgttgagagagca

SEQ ID NO: 332002 - DNA, 122 bp, Homo sapiens
ctctggctcaacgtaatcacaagtcagacttcaaatttcattcatcagggtactagcatgcgaaacacaggccattccaaaatgccacgtgcagccccaaaccatagtttccttgctgacgt

SEQ ID NO: 332003 - DNA, 122 bp, Homo sapiens
gccagggctgctgccgtccatcaatgtcacctccttaggaatctctgcatctgagtggggcggagcacaagacagcagccttgtgagaactctgctctgtgctccaggtgagtgttcaggta

SEQ ID NO: 332004 - DNA, 122 bp, Homo sapiens
ctctgtctgatagctcatagtgccaatcttctaggcagttacaggaaaagggttggggaccgggtcctgtgacctgtctccttggtagccatctctagtttcaaggcttctcagtccacctc

SEQ ID NO: 332005 - DNA, 122 bp, Homo sapiens
ccaaccaattacctttggcgaggtatcagctgtgttttgctaatgagcattgccggaagacgttctggaagctcacagaacacagggacttgtaagagtcacagtggaatcagacaacctgt

SEQ ID NO: 332006 - DNA, 122 bp, Homo sapiens
ggaggcagaggcaggagaatcgtttgaactcaggaggcagaggttgcagtgaaccaagatcgagccattgcactcaagcctgggggagaagagcgagacttccctcaaaaaaaaaaaaaaaa

SEQ ID NO: 332007 - DNA, 122 bp, Homo sapiens
tcctcagagggcagacccagcgaggcgtcgtggcagctgcggccgcggagacgccggctccgcctcttgcacacgccccctcgcctgaggccccgccccgcccgcgatgcccccgccccctt

SEQ ID NO: 332008 - DNA, 122 bp, Homo sapiens
ctagcccagcctctagagaactggagcaccacggggctcaaaggggcctggggccaaacacggaggcccatctgacttggctctgtctctgctcctagcccctgctgtctcttcactctcct

SEQ ID NO: 332009 - DNA, 122 bp, Homo sapiens
ccacgtgggctcggtgaccccacccaagacctggggcagtgcacactcggcagccccacccgagacctggggcagtgcacactcggcagccccacctgagaccctgggccacgtgggctcgg

SEQ ID NO: 332010 - DNA, 122 bp, Homo sapiens
caagagcgaccctcgttcttcacacgaggagaagaaatggacacgtgattgaccattaggcgccaccagggccaaactatcttatggaaggaggaaaagaagcacagaaagggcatgaaatt

SEQ ID NO: 332011 - DNA, 122 bp, Homo sapiens
tcacttcccccggatcccgccttcaattgcgcgggcaccagatccccccactcacctgtgcgtgccccggatccccatcacttcatcactggaccagggcctcccacctgcgcgggctccgg

SEQ ID NO: 332012 - DNA, 122 bp, Homo sapiens
caccaagatttctcaccaacactactgacaacgagcccgataattatctgttgtgggggccgtcctgtgcattgcaggatgtttagcagcatccctggcctctacccactagatggcagtag

SEQ ID NO: 332013 - DNA, 122 bp, Homo sapiens
tcctctgaggtgaagtggtaaacacttttggcctatgactgcaggtaataaaaatctgtccgggctgcccgaggggaggggcgccggtaaagccgtagctgcagcgaagccccgcgtctgcc

SEQ ID NO: 332014 - DNA, 122 bp, Homo sapiens
gtaaaaagcattctttctattatagaatccataaccacgctggttagccactgacagcggcggttagccaccgcacctcctctcacccccgaactaatctcgtttcctctatgggtgtaaaa

SEQ ID NO: 332015 - DNA, 122 bp, Homo sapiens
tcaggttctggtgagggccctcttctgggttgcagactgttgactttttgtaccctcacacggctcaaagagggtccctttaataaaggcactaactaatctctttcatgagggccctgccc

SEQ ID NO: 332016 - DNA, 122 bp, Homo sapiens
cccaactctggccttatgctggatcagggtccgagggcgctttgaggcgaaggtggcgctcgccaggtgctcaacatcaaatacgaagtccccgcccctaacgtggcctaaatttgcttcca

SEQ ID NO: 332017 - DNA, 122 bp, Homo sapiens
taagtgtgtggatgacaggcagaaagcaagtcagactgaaactcaaaaacaccactatgccgtctcagacagggccagagcacgctgacggccagaaagggtaaaggagggaggcctgggag

SEQ ID NO: 332018 - DNA, 122 bp, Homo sapiens
gtggctggcgaccctgtggtggggacgagggggctatgagcagaccaggagccagcatcacgtttctctgtctccagaatcgaggacggagagctgccagagaggccctggcggggtgtctg

SEQ ID NO: 332019 - DNA, 122 bp, Homo sapiens
ctcctcctgtgtccctgagccagacgccctcggaactcggcgtggggcgcctggtaggggcgtgggtgcggctggaaaggaggtgaccccaattctggtctccatcaccagagaaagcagga

SEQ ID NO: 332020 - DNA, 122 bp, Homo sapiens
tctggtccacagccggatctcctcggtccccaacccggagccgcggccccacgcccgccccgcctgccgagccttctgcacggcacttgaagtgaatgaatcagccgcggccgggtgcgcgg

SEQ ID NO: 332021 - DNA, 122 bp, Homo sapiens
ctattttcctcctgccgttccgactcggcaccagagtctgtctctactgagaacgcagcgcgtcagggccgagctcttcactggcctgctccgcgctcttcaatgccagcgccaggcgctca

SEQ ID NO: 332022 - DNA, 122 bp, Homo sapiens
aagcccggccgcaggagtacgcggctagcaccggcgcccgggacgcggacgtcatccgagcgcccattgacagtacagcgggaggtccggagcccagcccagtttgccgcaaggacggcttc

SEQ ID NO: 332023 - DNA, 122 bp, Homo sapiens
gtcattttaaatatatattctgaaatctttgcaaattttaacagaagagtcgaagctctgcgagacccaatatttgccaataagaatggttatggtaggtatgactagatttataatctgtt

SEQ ID NO: 332024 - DNA, 122 bp, Homo sapiens
tatttacattgtattaggtattatgagcaatctagagaatatttaaagtttacaggaggacgtgagtaggtgatatgcaaatcctacaccattttatatcagggacacgggcatctgggact

SEQ ID NO: 332025 - DNA, 122 bp, Homo sapiens
gaagttcagtggctaaaatattgtgacaccagccagccagtggaaagctgtcctgctctccggcaaacatgggatgttgttggtggcaggaaggaagaatgtcacgctatatcttgctgctc

SEQ ID NO: 332026 - DNA, 122 bp, Homo sapiens
ttccgtttcttccctgccggctggttcacagagacaggtagagacagatggctggtgtgtcgctgcacccagactctcaggaggagtgagggaggagagggagtgagggcaagcagtcagca

SEQ ID NO: 332027 - DNA, 122 bp, Homo sapiens
ctgcgcctgcgcgctagtccttacgcggtgccagagactataagtgggcttgagctcgaccgcgcgcctgtggaagttctttctctactcgaaaaagggaaagcatttccttgagtttgcgt

SEQ ID NO: 332028 - DNA, 122 bp, Homo sapiens
ggcaacactacggccatcgcgccgcaggacacgccctccacgaccggcggaccgccgcgacgctccagctgactgcgcctacctgtggaggatcctgaccccccgccggggcagggcgagac

SEQ ID NO: 332029 - DNA, 122 bp, Homo sapiens
gtaatactagcaaaagaacatgaaacatcacagtattagctgagtttatcttctaagccccgttgaagagttctctggtaaaataagttggaatactttgtttcagtcaggacctaagggag

SEQ ID NO: 332030 - DNA, 122 bp, Homo sapiens
gcggtttgcgcgcacggggagcgacagcagaagttcgaaaatcgccgaggggggagccagcgccgcagcttcctgcccccggcccagccctctggccccggcggcctgcagcctgacttcct

SEQ ID NO: 332031 - DNA, 122 bp, Homo sapiens
tttgcgagtgacctaaggccacctctcgggggagctgggggttgccttcccacgtctgcgcgtctgcaccccatgcccgggcctggaagtcagactcgggggcggtgctgcagcaccaggcc

SEQ ID NO: 332032 - DNA, 122 bp, Homo sapiens
gtatctgatgaagaagcgctcggtgaccatcggccgcaactcgtcgcagggctcggtggacgtgagcatgggccactcgagcttcatctcccggcgccacctcgagatcttcacgcccccgg

SEQ ID NO: 332033 - DNA, 122 bp, Homo sapiens
ctttgcaatacagtgcgcccccaaagctctcgccaaaggtttttgttccgaagcaacacccgggctaattaaatgcctatttagaagtttcagatgacatcttgcctcatagaaaaggaatt

SEQ ID NO: 332034 - DNA, 122 bp, Homo sapiens
tctgaggagagaaattattagaactgttatcttagtaatgttacccaaaatgatgttcaccgaactaaaatatgaagagacaaagaggtctgtaagagaggctattacaacagctgatgtgt

SEQ ID NO: 332035 - DNA, 122 bp, Homo sapiens
ctcgttatttgccgcgtgtggttgggggtgtctgcacaggggccggccggtcttttgccccgggctcaatggctggattgtggaaactgcacccgccttcaggttgttgagcaactgatggg

SEQ ID NO: 332036 - DNA, 122 bp, Homo sapiens
gccgccactcgggcccggcggaggggcgggcggcgccgcgtgaggcccggcggattgggccggctgccgtccatctggccgtgagagcccttcgattggctcatctcgccaagggaggcggg

SEQ ID NO: 332037 - DNA, 122 bp, Homo sapiens
ctatcttgatttccactggaaactatgcctccagacccacctctaccaggtaccatttaccgttttccaccagttctagcctgcagcatgtaacctgcaccaggacacttaatttttttttt

SEQ ID NO: 332038 - DNA, 122 bp, Homo sapiens
ttccgcatcgcaagcatcaagcccgtcataagtgagactcccctccccgttgacctctaccgctatgatgagatttctggcaaggtggaacactttggtaagtttggagtcatctattatga

SEQ ID NO: 332039 - DNA, 122 bp, Homo sapiens
tggcgaagggagcagatagccctttctggctgacatttcttgtgcaaaacatgctgaatacgattagcaatccccccgcaccgcggcgggcgcccgcagccaatcccgagccagagtttccg

SEQ ID NO: 332040 - DNA, 122 bp, Homo sapiens
gtctgcttggttcgggccattttctttcacctaagaaagacgccccgaagataaggccgccgcgctcacccgggccgccccccagggctgcggggggaggaacagatcctggccccaccgcc

SEQ ID NO: 332041 - DNA, 122 bp, Homo sapiens
actcccctccatcaattcttggctcttccaccagaggggtccttctaaagcacccacatccgtccatgccactgctcagccttttctttcaatggtttccaagtccccttataattaagttc

SEQ ID NO: 332042 - DNA, 122 bp, Homo sapiens
ctcacatggctgggttactgtaacagcaccatgaaccccatcatctacccactcttcatgcgggacttcaagcgggcgctgggcaggttcctgccatgtccacgctgtccccgggagcgcca

SEQ ID NO: 332043 - DNA, 122 bp, Homo sapiens
ttaattttattgacgcttgatccttgggtacatgtctttttagtattctgtgtgattaaacggaaagtacccctaaagttcttttgttgcctaatgaagtatgatggttaataaaggtaaag

SEQ ID NO: 332044 - DNA, 122 bp, Homo sapiens
gctcacttgtcatgtcttacattctcgggtttagacgaacgcatgtctgcagtccctgtgcgaccgcgcgtccaccatcacggccgcgtgcagtcggttcactgctgcgtgcgaccgcgcgt

SEQ ID NO: 332045 - DNA, 122 bp, Homo sapiens
ttgagggtgagggggcctggagcgactgagggtccggcgtttggccgggatcccggaaagcggcgtccctgggggtgtgggttttggaggggttcctgaggaactggattccgagcttgctc

SEQ ID NO: 332046 - DNA, 122 bp, Homo sapiens
gacagggttttgaatcacttcgggatcattttctttatttgaaagaatgtgccttggggccggacatctaaagctccccaaatggaatttcaagcataatttcaaaactttaagaggaatgt

SEQ ID NO: 332047 - DNA, 122 bp, Homo sapiens
gcctgatgcggagcttggagagccatgagctctctggtcacagtgccctgggggtgggggcgagcgtctggcgtcctctggggcgcagtcccgagagagccccttccgggacctcggacgca

SEQ ID NO: 332048 - DNA, 122 bp, Homo sapiens
gtggagatatttattcatttattcaattgactatttattctccactatgaattaggccctcggccaggtagcagatataaagcttaataagatatatggctttccgcccaggtgctcatggt

SEQ ID NO: 332049 - DNA, 122 bp, Homo sapiens
ggggccgccactctccaccctgaccccctgcactttgcttcaaagtctctgatgcgctggcggaagcagggctccactcggcagggcctcttggccagcagcgttcacaggccccacaaact

SEQ ID NO: 332050 - DNA, 122 bp, Homo sapiens
gaccacaccgtggtcaagctccagccaggagatatggctgccatcaccaccaaggtgctccgggtgaatggggagaagatcttggaggacttcagcaagaggcagcagccaaaattcaagtc

SEQ ID NO: 332051 - DNA, 122 bp, Homo sapiens
taggaggagacggttccaggcagcaggatggggccggtgaaggaggtcttgcttgctgggcggtaaaacagcttgaagccgccctcgtgctgggccagccggggccaaggctcccacagcag

SEQ ID NO: 332052 - DNA, 122 bp, Homo sapiens
gagcctggaaccctgggcttttgtacttaaggaagcgaaggtcgggtgacagccaagctccgtgttccagtgggaaggtcccatgggtctgtgttccacgcctcttgtcatgaatatggggg

SEQ ID NO: 332053 - DNA, 122 bp, Homo sapiens
ggcaggatttcagggctggtggttttaaaagcttctctcaatgtgaatttgagtccaaagcgaggcgatgcgtgtgtttatatagaggcgggaggctgcgccgtgggcgccccgccagcacc

SEQ ID NO: 332054 - DNA, 122 bp, Homo sapiens
gctatcacccatctgtgttctctgtcattttgtcatttccagtctctgcccctactgaagcgtgtggccatccgaaaccaccttggagaccgggtagatcccagctgaacaaagcaggcagt

SEQ ID NO: 332055 - DNA, 122 bp, Homo sapiens
tgaaggcggcactgctgccatctggcggacttcgaaggagagacccataaggggagaagtcggttcaattctggcatcttgccgctactttctaggtacggtgttggggcatttaaagataa

SEQ ID NO: 332056 - DNA, 122 bp, Homo sapiens
ggagcttgggcaacagccgccctgtcttcctttttctgcaggacggggccaggcacagaacgagctccccaggcccagctggtgcctgcctggccgagcccgggagagaaagcccaccctgc

SEQ ID NO: 332057 - DNA, 122 bp, Homo sapiens
tttctgcttcttcatgccactcagctagtgagagaagggtcattggcaagatctgtaccacgtgctggcttcttgcaagaggaaagagagtgtgcaagagtacagtaccaggaaggcaggct

SEQ ID NO: 332058 - DNA, 122 bp, Homo sapiens
gcgctcgggggtacgagattcgttccccgtgggaagagtggtcaagggcttcccagtagtcgtcaacacttccctttgagtgtaatgctgcaggagtacagtccagaccctcagtggaatcg

SEQ ID NO: 332059 - DNA, 122 bp, Homo sapiens
aaaaacatggccttcctaaacccagccttggcgcctcctgcacagcccagagacccagggcggcggacaacagaaaacctggggcggcggacccaaccctgcgcccagaaatcccaggacgc

SEQ ID NO: 332060 - DNA, 122 bp, Homo sapiens
ccagtgagtcagggctctttctacacggggtcagctgactgtctcaccaaatggccctgccgcctgttcagccttgtctctggctttatgtgtccctgtcactacacacctgttgctgggtc

SEQ ID NO: 332061 - DNA, 122 bp, Homo sapiens
cgttcgcgggcaggcgtgggttctgggttggcgcaggctcagtgggccccgcactcggctcggccagccggcgcctgcgggacttgatcagggactagctccctctgggctgcctgagcgcc

SEQ ID NO: 332062 - DNA, 122 bp, Homo sapiens
ctaaggacctcgctaacaataatctggctgcgctgggactcagcaagagcagacacccagcggattgccctggtgttgccaaacaaatgtccatttaggtgccataaatggtgctgctagaa

SEQ ID NO: 332063 - DNA, 122 bp, Homo sapiens
cctgcgggtcaaattctgcctgcttgggtttgtaaataaagctttattggaacatagccacgcccatttccttgaacagcttggaaggctgctttgacactacaggggcggagtggagtagt

SEQ ID NO: 332064 - DNA, 122 bp, Homo sapiens
gcagatgcagatttaggtggcagggagcgcggcagccctggcggagggatgcaggtgggccggaagatcccacgattccgatcgactgccaagcagcagccgctgccaggggctgcgtctga

SEQ ID NO: 332065 - DNA, 122 bp, Homo sapiens
cccacctgcaaaaaggcacttccttcttacagtcggctggagctgcaggttcgcaaggtccgtgaaggaagcccggctcagtgtgtttagttccgtctttttgggtctctacctgaggctag

SEQ ID NO: 332066 - DNA, 122 bp, Homo sapiens
actaagtgtcttcaaacctccccctccccggcttcctggataatagaagttcccgaaggccgccgattccagaagatactgtctggcgtgaaattagtctcagtagaaacataagtcccgcg

SEQ ID NO: 332067 - DNA, 122 bp, Homo sapiens
tgttttgttttgttttttcaggtaccacaaagccactagtgcacagggactcagaaaagacggcaggagcccaaggaaaactccaatttgagtacagccctgccttgtttcccccagagagt

SEQ ID NO: 332068 - DNA, 122 bp, Homo sapiens
actgatacgggcaggcaggcgctgttctccccacgtattctcggcttccccgccatacaccgtttctgagtggggagaactggttgactgctgaatcccaacacaaatccttagagcaaaga

SEQ ID NO: 332069 - DNA, 122 bp, Homo sapiens
ccacaagctgctagaagggtaaccccaagcccgttctcggttctctgcgaggatgacgtccgtgttgctcttcccctcagctgagtggatgaagccctttgactcacgtgccaccagcccaa

SEQ ID NO: 332070 - DNA, 122 bp, Homo sapiens
tctgtttgtcatggcccttgggcccacaccatggccttcttctctggtaagaacagggcccggcattctgggctgcgacctgacaggcccctgctgggggcccttggcacagggcccacaga

SEQ ID NO: 332071 - DNA, 122 bp, Homo sapiens
cccagtcctgccgagctgacggcgtcccggatcacatggagcccccgccccaccccagcccgccccccgccgccaacgccggtggcccttccagtcgcgttactacccagagattcatttgt

SEQ ID NO: 332072 - DNA, 122 bp, Homo sapiens
cccgggagaccggtccacctgagccatcttgggggcctggaacggggggcagggtcagcccggctgagctgtggcctgagggtggggagggagtggttccccagaaatgtcactgccaggat

SEQ ID NO: 332073 - DNA, 122 bp, Homo sapiens
tcccacgccgccggcgcctgcgcgccgcgtccgctgtccgcgcctgcgcgcctctctccccgcccaacccacgacgcgggcgctcctcactctcgcaacggtcacgcagaccccgcctctgc

SEQ ID NO: 332074 - DNA, 122 bp, Homo sapiens
ctgcagaacccgctgaccactcacagagcccagctcgggggagggctttaaggtgaagcacgtgaccccctgcttgtgcggcccgggcggggaagtttgcgctcccgaagtcctggagctca

SEQ ID NO: 332075 - DNA, 122 bp, Homo sapiens
acggtacgtagtatagagttgtcctgagggtgaagcgagtttacacttggtgaggcgcttcgaatcgtgcctggccggccccaaatgagcacgcagtaaggttagcagctgctgccgtcact

SEQ ID NO: 332076 - DNA, 122 bp, Homo sapiens
ccacctccgccccagtttccttctacaagcctcagtctccagctttgaaaactgggcaggcgtccccccatccgcacccccaccccttccccacgcattccccgctcggtcacggctgtcca

SEQ ID NO: 332077 - DNA, 122 bp, Homo sapiens
agagccggagaaaggcgaaaggcgcggtgagcaatcgccgacgtagagagggcagccctccgcgctgcaatattgagaaggcacccgcgggacgcatgcgcacggcggacggaggcgagccg

SEQ ID NO: 332078 - DNA, 122 bp, Homo sapiens
gtggtgtgggccacagactcggctccgataagagcagtgagagagcagcacgttggatgacgagcgcagattcaaggaatggaatttacgttgcccagtgccagcaaattccgagaagtaat

SEQ ID NO: 332079 - DNA, 122 bp, Homo sapiens
aataaaagcgaatttgataacgcgatggcctcgacagccgctttggataaccgaggtgttcggggacattgtgtcctgactttcatttctatcacgtttcctgccaacagtgctcttgcaag

SEQ ID NO: 332080 - DNA, 122 bp, Homo sapiens
ggatgatggtgaaacctcgacacggtggttgagattaaggatgattgtgaaacctcgacacgctggttgagattaaggatgattgtgaaacatcgacacgctggttgacaggatgattgtga

SEQ ID NO: 332081 - DNA, 122 bp, Homo sapiens
ccctcaggagcgcgttagcttcacaccttcggcagcaggagggcggcagcttctcgcaggcggcagggcgggcggccaggatcatgtccaccaccacatgccaagtggtggcgttcctcctg

SEQ ID NO: 332082 - DNA, 122 bp, Homo sapiens
actaatcatcagggaattgcaaattacaaccacaatgaaataccaccttaccacagccagcgtaggtattattaaaactcaaaaagcaacagatgttggtgtggatgtagtgaaaagggaac

SEQ ID NO: 332083 - DNA, 122 bp, Homo sapiens
ttctgagcaacttgttgattctgaatacatatactgagatggagagcacttcaagagttgcggctttggttaagaagatcaggagttcatttgcaatgtacttaatttgatttgcctattag

SEQ ID NO: 332084 - DNA, 122 bp, Homo sapiens
tgccccgcccacctcctttcggtcccgccctcttaccaccaggccccgcccacctgttcccggtctccccgcccagccgtcagatcccgcccatcaccttccaggccccgccccacctgttt

SEQ ID NO: 332085 - DNA, 122 bp, Homo sapiens
accaggtaaagggtggacgtagatttaaaaggtcactcgtgtataatgcggctggatccccgggtcaaaaaaagggggcgagacagaggatgagagtccctaaagccaaaaggacaataaga

SEQ ID NO: 332086 - DNA, 122 bp, Homo sapiens
acagttttcaaatgacgtctacacctccagcgtggggaagccgtttccctgtgagtcctccgcagggcagagccatgcggctctcctggagccctacttcccccaggagccctacggagact

SEQ ID NO: 332087 - DNA, 122 bp, Homo sapiens
ggggccgcgtctacaccaccggactccgcctggggcgtaagaggtggcgggggcgagggccgcggggtcactaggctccggcccaggcctttagttccggtcgctgcgcaaatgaaaagcgg

SEQ ID NO: 332088 - DNA, 122 bp, Homo sapiens
ttttgcctctggacaatcactctgaaaatacatcatatccaggggaaggggctagtcaggcgtttcacttcaaggctttttgtaggccactgagcagaaagagtgttaagaccacagagcag

SEQ ID NO: 332089 - DNA, 122 bp, Homo sapiens
ccctttcaccctgactcaaatataatcactcacagagtgagtcaggccaagcttcctaagcgtgctccacccaacagaagtgggataaaggatactcagataattagcatttattaagtgct

SEQ ID NO: 332090 - DNA, 122 bp, Homo sapiens
agggcttccacatccctctgcttccccatccagcacgcgctcctgacaccatgctctgttcgggctttgtcagaggtcctggcccacggcctggagagaccccacggccccagcaacaccac

SEQ ID NO: 332091 - DNA, 122 bp, Homo sapiens
agagtctggctactgttcctccgcctccctctcgggcagctccctaagccggctgggacgcgcagagtgaaaatggtccaccattcaggctccattcagtcctttaaacagcaaaaaggtca

SEQ ID NO: 332092 - DNA, 122 bp, Homo sapiens
tgtcgtctactatgatgtccacaaatacttcagcatgagcgcccgtcaaggagtcagttgcgcgtatgctcagcttatatgccgggtgggcctcaaagtccagaggagctatgacattgata

SEQ ID NO: 332093 - DNA, 122 bp, Homo sapiens
gctgcgctgcggaggtgtggggaggtagggagtgggtgagcgcgtcaggaccctgcaacgcgggacccgtcgccagtatcacctaaggggagtcgcgcacaactccgcacaaatcaatgact

SEQ ID NO: 332094 - DNA, 122 bp, Homo sapiens
gccgcagcagccctggcgacccgggcccctcggagctccccttcaggatcgtgcaccaagcgcgcacgtcccgggctctgcttcgcgacccacagcgaccccagctcctccacgctgcagcc

SEQ ID NO: 332095 - DNA, 122 bp, Homo sapiens
atctggggtcgctttgtaaggagctccgacctccgggcagtgcagggatactcgacggcgcgcgatgtcccggcggctccgcgagcctggcgcgctgagagccccagcagtccgagtcctcg

SEQ ID NO: 332096 - DNA, 122 bp, Homo sapiens
ttataaaaacaaatggaagccccggcatggatacactttcttcatatttatgatgttctccgggccactgcagcatctggttggatcggggtatccagagcttacactcatagaccacattc

SEQ ID NO: 332097 - DNA, 122 bp, Homo sapiens
ccagtggcctatttatctaagaggctagatcctgtggcctgtagatggccaagttgtctgcgagccgtagcggctacagcaagcctggcccaagaagatgataagttaactctaagccaaaa

SEQ ID NO: 332098 - DNA, 122 bp, Homo sapiens
atcttggctcactgcaacctccacctgctggattttcctacaggtgcctggcaccatgcccggctaccttccttgacatattaagagaaaactgatctaatctccctttctagtccacccag

SEQ ID NO: 332099 - DNA, 122 bp, Homo sapiens
gcgctgggagggatcgcggggccgatagggaggcctggacttgaaggagccgaccgtggacgggcttaaagaaaatgcagtgtttgatgttgggtgttgcagatctcttactcaagggaatt

SEQ ID NO: 332100 - DNA, 122 bp, Homo sapiens
ggatttcaaggaaaatgagtagcggtaacttacccaccttactccacggttactgtgaagcgcccagaagagaagccatggatgtgggcgacgcattcgaggttagcttcagaagcagcggg

SEQ ID NO: 332101 - DNA, 122 bp, Homo sapiens
gcacttcaggcctcttaccacgcgtcccgcgcggctgcggcgctgcgcggaggggctcctcggctcaagcccagagagagttaagtgggtgtgattgatggagtgttctctcttggggctcc

SEQ ID NO: 332102 - DNA, 122 bp, Homo sapiens
tgagactttgtcagtggaggctcaggtaagtccccacagtgctcatgccttccaaaaccacgcccatttccagtgatgatggtttgtgccacaggccaagtactgaacatcatgacactcat

SEQ ID NO: 332103 - DNA, 122 bp, Homo sapiens
cagagtgaaaaaggattttagatttgatttttattttttattatctgactttctaaatttcggctaataagagctagatgaagagcctcagctctggaatcgactgctgaggcctgaatcca

SEQ ID NO: 332104 - DNA, 122 bp, Homo sapiens
atggtggcttagaacatgtgggccttggatgggatcctgccaaggggtgtgtgacctctccgaagcctccagggatgatactactccctggggtgcttatgccaaccacgttagagacaatg

SEQ ID NO: 332105 - DNA, 122 bp, Homo sapiens
ctcccaccctcggccggggtcgcggggcgaagggcagaccacggagagggacgcagagcgcgcaagcagaaggcgcccccctcagccgtcggagccccgctgttgctgccccgcaggggacg

SEQ ID NO: 332106 - DNA, 122 bp, Homo sapiens
ctccccgccccccaaaatccaaagagcagcagggcagggcctgacggccggagggcaggccggtcggctggagagcagcggagccgcagagcagaagcgcccaccttggaggccaaaatcag

SEQ ID NO: 332107 - DNA, 122 bp, Homo sapiens
gggccctgacctcgctgtctcctccaggtgtccgtctgccaggagatggtgaccgagctgcgcagcattatcctgtgtcaggacagtatccacccccgccggcggcgcgccgcagtcccgcc

SEQ ID NO: 332108 - DNA, 122 bp, Homo sapiens
gaaggtggcccgtggggggggcggggggagcggaagaaggaccgggctgtgaccgcgggacggtcctgtcctcctggccctgcgtctctcgagctgctggcttctctccgccgacgacccgc

SEQ ID NO: 332109 - DNA, 122 bp, Homo sapiens
cctgccactggagcatcatttgggagcgaatccgtctcaggttccagccaaggtgtagggcgaggggattggcccgtgcgtcgggccaggctcagtaacgccttctccaagtggatggcggg

SEQ ID NO: 332110 - DNA, 122 bp, Homo sapiens
gggcctaatgaagctgtccggccaacctgcaggagagagctgaggaagaaccacttgccgcgccaggagcatcccgcgccgcactatggaggcagccatcttggagcgtaccaaaaggaaca

SEQ ID NO: 332111 - DNA, 122 bp, Homo sapiens
ccccaaggccgtcagtgtcttcttcaaggagctcatacaggagtttgggatcggctacagcgacacagcctggatctcctccatcctgctggccatgctctacgggacaggtgagggtggcc

SEQ ID NO: 332112 - DNA, 122 bp, Homo sapiens
cctgcgattgcaggcgtgcgccgccactcctgactggttttcgtatttttttggtggagacggggtttcgctgtgttggccgggctggtctccagctcctaaccgcgagtgatctgccagcc

SEQ ID NO: 332113 - DNA, 122 bp, Homo sapiens
gccacctgtgggacaggccagagcgggtcagcattaacgtggggtcctggcttcctaagacgccacggaagagcttggttctaggtgagagggcacgcttcagtgagaaccagatcctatgt

SEQ ID NO: 332114 - DNA, 122 bp, Homo sapiens
gtcaggattgtgagggggacaagacggcagctgcaggagggctggcaatgttttttttgacgtatgtattcattatttgcgccatggatttgtaataattcattaagttctatatttaaaat

SEQ ID NO: 332115 - DNA, 122 bp, Homo sapiens
gcacccctgctgtgcgtttcgatactgggcgtgctggcgccacaatctccgctcttgcctcgtcttcctggaaatggcacagagttctttgggaaacccttgctctgaggatcagcgagttg

SEQ ID NO: 332116 - DNA, 122 bp, Homo sapiens
taacttcccatccagccaggagtctgcactcttcagtctttgcaggtaagaggtacacggcgcttatgttaactctggggcatgtggcacgctggaggtatttttgaaaaactttacttcta

SEQ ID NO: 332117 - DNA, 122 bp, Homo sapiens
gaaagtgtcacctttctcaaagctaagatttttccttattaaatgggagatcccagagtacgcacgttagagctgaatcgctgagtgtgtctgcagagagaaaggaaaacaccgtgagcctc

SEQ ID NO: 332118 - DNA, 122 bp, Homo sapiens
actggtccccaccacagccctacccctccctgggcgtcgcccgcccccccccactctgcccgccacgatgccaggctcagtccctccagcactgtgaggtctacattgccattccacagatg

SEQ ID NO: 332119 - DNA, 122 bp, Homo sapiens
agatggggatgaagggagcaggagccagagaggggatcctgccccaggactcttcgttaacgttactaaaccccactctggagggcagggaggggtacagctccccctcactgggtgtctgg

SEQ ID NO: 332120 - DNA, 122 bp, Homo sapiens
ttaaaatgattttctgccctcaccttttgataaatgctgttatcagtaatttcctcatttcgtgctttgatttccttttttattgcatatgtaatctctgacccacatgggtgatatgggat

SEQ ID NO: 332121 - DNA, 122 bp, Homo sapiens
gattcaaaggccacagggcaggggagcctggctctccagagccaagagcaccctggcctccgcccgcctccaggccgaatggccgagcccggacaccactgcggagttacagtgcaggtttg

SEQ ID NO: 332122 - DNA, 122 bp, Homo sapiens
ggtacttaccaacgcgaggcgttgcctgaattttcctctgcgggtttcaggaagaccctccgtaggttatttgacattttagtggggagaaaggggacacctcatccagaaaagtgggaagc

SEQ ID NO: 332123 - DNA, 122 bp, Homo sapiens
atgttgctgctgttcactctttaggtccgcgctgcgtttatgagctgtaacacgcaccaccgagaaggtctgcagcttcactgcagaagccagtgagaccacaaacctaccgaaagtaagaa

SEQ ID NO: 332124 - DNA, 122 bp, Homo sapiens
ccatcccacagtaaaacagccagccctgctgcaggagtccagcaccaatggccgccatgacgagtgggcaggccattcaccattactccaaaacaaataagtaacagtgatcaaaatggaga

SEQ ID NO: 332125 - DNA, 122 bp, Homo sapiens
tgtccctccagaaagcgcagaggggcggggccatggccagcacagatctaggcccaactgcgcgggcggcgagggcgcgggcagtgtgggcgcaggtggtgtgggcgtgggtggcatgggcg

SEQ ID NO: 332126 - DNA, 122 bp, Homo sapiens
actaccagatcaaccaggtagagggtaggctgctctgtgtttttatagcaggaagccagccgcatccacaccctctccccattgggggcacctgaatcttgtcccattctcccagctgaaac

SEQ ID NO: 332127 - DNA, 122 bp, Homo sapiens
gcgcagggcccggatgtggagagtcactttaaactgctccaggagccaaactccctgggccggccgcccgcccgcccgcccgcccgcgctcccccggccgctctgcttccccgccaaggccc

SEQ ID NO: 332128 - DNA, 122 bp, Homo sapiens
ttggcccgagaggagagttggggcttgggggacgccgtgaactccatggtccccagcacgcggtcctggccagggacggggtcgtccgaactgccgtccagattccccaagggagacaaaga

SEQ ID NO: 332129 - DNA, 122 bp, Homo sapiens
ctttccccgtggtctgagtttgtggctgcatttttatctctggtggctctgctacggcggcgcagaaatgaggcagaagcggaaaggtgcgaaaggggaaggagatgggggaaaggggtggt

SEQ ID NO: 332130 - DNA, 122 bp, Homo sapiens
cattgttgttgtagcggtagcccagggccgccagcagctgcttggagaaggtgcacacggcggccaccagggcctggcagaagatcgcgtctctgcgcagctgcagctccgtgtctgggggc

SEQ ID NO: 332131 - DNA, 122 bp, Homo sapiens
tcagcttcctcgtctgtaaaaccaaggaatgaatccgggactcagcacagggggatgctccgcaagactctccggcgcctgcgcggctcttccccagctccccctgcagctacgtcacctcc

SEQ ID NO: 332132 - DNA, 122 bp, Homo sapiens
acaagaagagaggaaagatgtcagaattagccagagataaaacaacggtgtcgcacgtgacgactatctgaggttagtgtcacgtgagtagtaaaaagaattcaccaagacagttgtaaaga

SEQ ID NO: 332133 - DNA, 122 bp, Homo sapiens
gtggcaagctgagaaaggggctttaggcccgggaccccaggcactgacccgcacacatcccgcggatcgcctattcattcgcacagccctccagtcgcccaggctcccattgtttgctgagc

SEQ ID NO: 332134 - DNA, 122 bp, Homo sapiens
cgccctgcccgggcccgggcactgggtccgtgctgtcccatggaggtagggagcgctcctcggcccccgcctcgtggttcaatcctccccgcggaagagccccacactttgctgggtgtggc

SEQ ID NO: 332135 - DNA, 122 bp, Homo sapiens
cagcaccacgacgacgaggtgagtgcgtgggggcgtgtgtttgtgtccatcggataactgcgtgtgtgctcaacagcgtttcccggccggtcccacagcgaggggaggaggccctctccgga

SEQ ID NO: 332136 - DNA, 122 bp, Homo sapiens
cgaacagagtagctattaatagtggtaacagactctcaattaggggctcaacatcatggtcgctgaacagaatcacggtcgctgaacagaatcacactcttcacgccgccttggagccaaaa

SEQ ID NO: 332137 - DNA, 122 bp, Homo sapiens
gcccccagagaagggtcgggaggtggccaaggagctgggcatcccctactatgagaccagcgtggtggcccagttcggcatcaaggacgtctttgacaacgccatccgagctgcactcatct

SEQ ID NO: 332138 - DNA, 122 bp, Homo sapiens
ggccttccctgtctttcttcttcctcttacagggacatcagccttaatggatcaggcccccgacacttttgcccacatttaaccttattcacccctttaaaaaccctgtctccaaatacagc

SEQ ID NO: 332139 - DNA, 122 bp, Homo sapiens
cgccgccgccatcttccgttcgtcgccgggaacggtgcgcacgcgccacacacccagggccgccgggaaatggagtccagagcacagcccgaccccgcccatgcctcgtcccgtgcgagcgg

SEQ ID NO: 332140 - DNA, 122 bp, Homo sapiens
ttgagcgaatccctcatcccggcccctctgagcaacagggaccccagcggctcagagacccgcggtcagtacctgggacagcgtccgctaagtttccacccctcgaccattccctgtgtccg

SEQ ID NO: 332141 - DNA, 122 bp, Homo sapiens
ctcggaaaacgaggctggccagtgggtcgggggcctctcttctcggtccggggtggtgttcgctcagaggggtagtagcagcccaggggaacatgggccccggggcatcgtactcctcgcca

SEQ ID NO: 332142 - DNA, 122 bp, Homo sapiens
ttttttttttctttaaccgataacccaattctagacggaacataaggtgcaagagaaatccggggaggtggaggcagagaaagggaagggcaggaggtggtcgcaggatgttgcctgcggct

SEQ ID NO: 332143 - DNA, 122 bp, Homo sapiens
gaagatgcgcagctccacgctgcaggacccgcgccgccgggacccccaggacgacgtgtacgtggacatcaccgatcgccttcgttttgccattctctacagcagaccaaagagtgcatcaa

SEQ ID NO: 332144 - DNA, 122 bp, Homo sapiens
gcaggggacgggggaggccgctggggacacggcaggtgacgggggaggccgcggggcaaccggcagggaacggggttggccgcgggggtcgggacaggggtccggggcggctgcgcgggagg

SEQ ID NO: 332145 - DNA, 122 bp, Homo sapiens
ccattgcactccagcctgggcgacagagcgtgactctgtctcaaaaaaaaaaaaaggtgccgttagacttggctcaagctgggctgcggtaaactttcaatttgtaaaaaacatgcaatctg

SEQ ID NO: 332146 - DNA, 122 bp, Homo sapiens
gctgtcctcaggaatccttgcctcagctctgaaagctgactgtgccgactttgttctccacgtggcatttgccagtagagaacagtgtctccaggcagatattcctcccagcaagtacctcc

SEQ ID NO: 332147 - DNA, 122 bp, Homo sapiens
tattagctttgctttttagtgattcactcaagctaaagtaagagtttatgtctggtattacgttgagagcttttggaagattatcttccaggttgtctttagaccatctttgtatctggttt

SEQ ID NO: 332148 - DNA, 122 bp, Homo sapiens
gacagcagaggcgagggtgggaaggggcggccgcggcggcccgcagcggttcaggcgctgcgcggctgctctggcgtccagtcctacccgcaacccgccgcgacgttactgctgcagtggag

SEQ ID NO: 332149 - DNA, 122 bp, Homo sapiens
agagccagcaggcccccaggatgaggccagaggatccggctcgcctgtgaagagcgaaagcgtcttccctctgcgagctgcggtgtccccgggctctgcggtgggggcaggctgccagcact

SEQ ID NO: 332150 - DNA, 122 bp, Homo sapiens
agatgtttgctcttgaaattttgtgaacccctggtgattatggtaaaaccacattcccctcgctaggaaaccagtgctttagcactacaaactacctaggagactgatcctggggaggaagg

SEQ ID NO: 332151 - DNA, 122 bp, Homo sapiens
cccgagagacctggggctcacatgtgattcccgccctccagcgtgctgagtttagcttaacgccgtcacggtgtccctgcggcctccagctcctcctgccccccattcagacccacctccaa

SEQ ID NO: 332152 - DNA, 122 bp, Homo sapiens
gctggtgttgatgggggttgcggtttcctgccactcactccccatgggtcctgtggggggcgtggggatgcggggagagggtttcagaataggatcccggactgggagggaagggacaccat

SEQ ID NO: 332153 - DNA, 122 bp, Homo sapiens
cgcagcgaggatttcagaaggggctcacctggtgcaggaaaagttcagttggcagcccttcgcgagcaggtcctccccagcccgcaccgagaaggcaggcgcccgggccctctgactccagt

SEQ ID NO: 332154 - DNA, 122 bp, Homo sapiens
cagggcgtgcgatgggggtgtagctcgcttcttcagtgccccgctgctcaaacctctagccggagcgtgcagaggggcacgttgaggagctctaaccccaaggcagcatctaggagtgaatg

SEQ ID NO: 332155 - DNA, 122 bp, Homo sapiens
aaacatggcgcgggctggccctcggctggtgctgagcgaggaggcggttcgggcgaagagcggcttagggcctcaccgcgacctgggtgcgccggagggcgggcgggggtgcaagcgtgagg

SEQ ID NO: 332156 - DNA, 122 bp, Homo sapiens
ggctccgccccatctctcccgaagtcccgcctcatcccacccagaccccacccatcccgccgcggccacgccccatcctgcccgaagccccgccccatcccgcccgaagccccgccccatcc

SEQ ID NO: 332157 - DNA, 122 bp, Homo sapiens
cgttggcgactcctaactaccaagaaaaggagctctcggaggagatttcgtcgagtgctacgtgtggctgtgataagggcaggcaaagcgtcttagcactctacagctctggcgtggttgga

SEQ ID NO: 332158 - DNA, 122 bp, Homo sapiens
gacttcttaaaattaaaagtccccaaagggcaggaatcaggtttctttcaacacagcattcggctataatgcttttgtgacatttggaagcaatataataaaacagttcagagcacagggcc

SEQ ID NO: 332159 - DNA, 122 bp, Homo sapiens
gcgttttagggacatccctggattgtcaagaaacgctggctcatccggacccccggggagcgcagcatgaacccaggagcaccctgacaccccgaaaacagggaacctggggcccttctcaa

SEQ ID NO: 332160 - DNA, 122 bp, Homo sapiens
ggcacgaattggctggtggtggccggccccgccccggcaggggcgcggtgtattttggttcgcctccgcgccccgccccgccagccgctccctccgcggccgccccgcccctcccgcgccgc

SEQ ID NO: 332161 - DNA, 122 bp, Homo sapiens
tttttatcagacaccgtttataaaaatgtttcagatagattaaaacctaatagtgagcagcgaaattaagcatgtctttggaagaatgaggatcatgttcttgttctcaggatggggacaga

SEQ ID NO: 332162 - DNA, 122 bp, Homo sapiens
cagcttcaggtccacccacgaatattcataaacttgacatgtctgctgattgaaccctggcgtcactacccttcttggctggcctgggaggtttgattcctttccctacagtcgtgctcaaa

SEQ ID NO: 332163 - DNA, 122 bp, Homo sapiens
agctcccattgctcccgcgagtcactcaccttgttttgcgaggaggccgcaggcggaggtcgtgagattacgggcccaaggcccgcggctactggggccgcctcggcccactcaggctcttc

SEQ ID NO: 332164 - DNA, 122 bp, Homo sapiens
ccctccctgttttggaaatcctgtattagcaaaggggacagcgccagacagttgagcacacgcgttctttataaatgatgatgtctgatacagtgatgcttttaacagggttgtgtaacgcc

SEQ ID NO: 332165 - DNA, 122 bp, Homo sapiens
agattgtagtcacagccagggagatcgtagtcacagcaaggtatgggaggtcagggcccccggaaaaccaccaggaagagatgacctgtccaaagcagagagagcgaagggaagcctgagcc

SEQ ID NO: 332166 - DNA, 122 bp, Homo sapiens
gcaggagctcagcgcccaggggagcgctggagggcagagaccagctaggatgggccggggcgtccgccatggaccccacgtggcatttgctgagctcttccactgcctcctctgccctgcgg

SEQ ID NO: 332167 - DNA, 122 bp, Homo sapiens
cgatccagccgagcccacaactctgggaggctggttctgcctctctcccgaagcgtcgcccggctaagcttcgagcaccaggacacacaaccgccgactattccagagcccacagtcggctt

SEQ ID NO: 332168 - DNA, 122 bp, Homo sapiens
cggagcgctggagcggagtgggacggccagcctgggcccacccccgtaccctgcaggtcccggcccacgcacgctcgcctggagtgcgcgccccacctctaggccaaatcaccgctttcccc

SEQ ID NO: 332169 - DNA, 122 bp, Homo sapiens
agcccatgcagggcagccaggaaggacagtaggccatgtagccagaggcccagcggtccacgcaggcccagtgtgtccaaggctgcccgcagtggtcgtgagcacagggccagcagggcaga

SEQ ID NO: 332170 - DNA, 122 bp, Homo sapiens
ggcggacatcgtgctggagctggtctaaggcgccctcaccgtgcttgctctcgctgccgacgctgttcttccaccagctgtaggagaagcccaaggaccactggtcccccgggtagtccaag

SEQ ID NO: 332171 - DNA, 122 bp, Homo sapiens
acctcctaggcttaagtgatcctccctcctcaccctctcaagtaggtgggactataggtacgtggcacctcacctggctaatttatttttgtactttttgtagagatggggtttcaccatgt

SEQ ID NO: 332172 - DNA, 122 bp, Homo sapiens
cttagagcgcgctgagtgtccgttggggcccctgctcttgggggcgcctggggctctgcgcgcccgcagggcaggtttgcgcaccgagtgtcacagaagtgatcttcctcggtaccggcctc

SEQ ID NO: 332173 - DNA, 122 bp, Homo sapiens
ctggccgtttcattatattgttgttaaggctcttctccttgtcagtttaccaggtttgaccgcccagccctggtctctgcgtggaaacccccgggggcccctctccttccagtaggcaacat

SEQ ID NO: 332174 - DNA, 122 bp, Homo sapiens
gtgtgtcccatagtaacctgttacaacattatttataagctgccatccctagccttcccccgcttcccctccgctccctcgccagacttgcgggcgacgggcacagccgcgtctggctcttc

SEQ ID NO: 332175 - DNA, 122 bp, Homo sapiens
ccgccgcgggcctccacggtgggatctgcgcgcggccggtgggcagccctcgacccggggcgcgtccacagcgcccacccgcggcccccaaacacctcgagagcagatcttaggggttaacc

SEQ ID NO: 332176 - DNA, 122 bp, Homo sapiens
agaacacctggcatcacagagtacctcctgtaggcagcagtctcccaggacccccccacacgcagcccatgctggatgagcagccccttcaaatgcaggctgcgtcccacaaatctgtgtcc

SEQ ID NO: 332177 - DNA, 122 bp, Homo sapiens
cttcctcccgtcatcagccaaaggccccggaagtgatgtttgcgcgccgtgcgttacgggcgtgcgctggcggtgccgggggggcggggcaagcagggggtgtgtgtgaggctggagcggac

SEQ ID NO: 332178 - DNA, 122 bp, Homo sapiens
tgcgagcgactcgggtggtttatgagaagtgacacttaatacccagcttcttgtatctgccgccgagcagttaacgttaaagcccgctctgtaccaccgcggatgtgactgctgtaaatacc

SEQ ID NO: 332179 - DNA, 122 bp, Homo sapiens
gcagccagggacctgggccatggcctagaactcagccgacccaggagccaacccaggagacggtggggggaggggaggcatggggcgcagggactctctgtgaccggggatggagacctgga

SEQ ID NO: 332180 - DNA, 122 bp, Homo sapiens
caaagcagcatggagcgtgggcctggagaggaaagtgggagacgcccacaaccctttccccgaccaaccctaaccccagtctagatcagcagcttctcctgttagggcctcctataccctgt

SEQ ID NO: 332181 - DNA, 122 bp, Homo sapiens
cttgctggatcatgagcacagtggacaccctggtggatccggagggatggaactcagcagcgggtctgcgacggcggaaaacagcagtggtggacagccagcaaaactcagcttgagctgta

SEQ ID NO: 332182 - DNA, 122 bp, Homo sapiens
ggatggaaatgcgggtcaccaaggcgtcgccactgctgttggagctggagctgccgctgccgcccgccgccccagacccaaaccgggtggtgttcccgggccccgggccgggcggtggccgc

SEQ ID NO: 332183 - DNA, 122 bp, Homo sapiens
tgactgtccgagttgcgggggtgggtgattcggggacaggctctggtgccttcgagccaccggttctgcagctcctggaatgtcacagttgtattttacatgaaggtccttccctgctggct

SEQ ID NO: 332184 - DNA, 122 bp, Homo sapiens
gtggctgagagacccgccgccttccgagcgcgagtgatgaaaaggggagggaggccgcgccgggcgggccggccgctcacaatggagcaattatttgtctaaagttccatcctctgcggagc

SEQ ID NO: 332185 - DNA, 122 bp, Homo sapiens
tgtcgcttttagtttgaccgcacacatatgctcagagaaggtcaaaatgcccatctccatcgcctgccagaaattgtcccaaattccaattaagatattgtccaaaagttacctcagactaa

SEQ ID NO: 332186 - DNA, 122 bp, Homo sapiens
tctccacccatgggaggcaagaagtcacagtaccccagagtctgtctgccttggaagctgcgtggagaatgataaattaagaggcgtattaaatacgtgggtaaagccagcaaggaccagcg

SEQ ID NO: 332187 - DNA, 122 bp, Homo sapiens
acgcctgcgcagtgatatgtactcgccgtctcctgcaactccatccgtaccgaacactgccgcgccccgccccctcacacagcccggcgcccgcctacccccgcaacgagagtagagggcgc

SEQ ID NO: 332188 - DNA, 122 bp, Homo sapiens
cagtgaaaccccgtctctaccaaaaaatacaaaacaaatttagccgggcatagtggcgggcgcctgtagtcccagctacttcggaggctgaggcaggagaacccgggaggtggagcttgcag

SEQ ID NO: 332189 - DNA, 122 bp, Homo sapiens
caggaggcggcgcggggctgctggggccgcagcgcagccgggaagagactcgggctgggccgcgcctgccgggaggcctccccgctcccggaccccggctgcccacccaccggcgcgtgggg

SEQ ID NO: 332190 - DNA, 122 bp, Homo sapiens
atttctaaatcatgaacaccaaaggccttaaaattgggcattgggccatgtccaatccttcgatgtttagctattaagggagaaggaggcaacacagaggtcattgtatccatcacatttta

SEQ ID NO: 332191 - DNA, 122 bp, Homo sapiens
cctgcagccacgcctgggggagcggcggccggtagggccgggcggctgcgaggccagaaacgcctccaagagctcctacctggggtccagaaggtagtctggggagcaagctccggagagac

SEQ ID NO: 332192 - DNA, 122 bp, Homo sapiens
cccagtgcaagctcgacctagcttcttccgcctctccacgaggaggcgctcccgcgcacgcgcctaccacgttcctgccccctagccgcggccggaagtcgtcgaaccaggacgtcgggact

SEQ ID NO: 332193 - DNA, 122 bp, Homo sapiens
agcctgcacgcagcttttgaccctctgccacccggcccccaagctctagcttatgtgttccgaagttgtgagtccttccatgccgggacactgctgagcagccccagggaggggccagggta

SEQ ID NO: 332194 - DNA, 122 bp, Homo sapiens
gcggatttaggcgacgtggggagatgccaaagtgaatacacggtgacttctaaatctagacgtctggaaggggccatgagagccagacaactgggcccgaaccccgcccgggagccagggtt

SEQ ID NO: 332195 - DNA, 122 bp, Homo sapiens
gagctgttggagaagtggatgtgcacggacaccatgtggggatccccggagaaaggttggcggctgaaggtgtagtccacagccagcccctcgccagctacccggtgcagcagctcctgccg

SEQ ID NO: 332196 - DNA, 122 bp, Homo sapiens
gaggctccctccctgctgaatgctgaataggaagtgagtgctgctcgctccgcagctttccgcagtaaggaggaggggggaagggggctcaatcccgccccttccccgcccccgaccaccac

SEQ ID NO: 332197 - DNA, 122 bp, Homo sapiens
gggacgcagcactttcgctctcctccttcccttccgcctgcgagccctgcccgccgcccacgtcctccgtcctcttggaagcagttccactcacgcctggatgaggctggccaggtcgttct

SEQ ID NO: 332198 - DNA, 122 bp, Homo sapiens
agagagaccgtcaccacccaggccgaggggcagcgcaagatggacaggaaggcgctcacccgcaccgacttccaccacaagcagcttgagctgcgccggaaaatcagggacgttcgcaaggt

SEQ ID NO: 332199 - DNA, 122 bp, Homo sapiens
gtggcggctgcaggatccgggaggggagtgaaagctccgctggggcgctccattagtgagcggtgatggttgccgcccacttgtattgaagcgtcctttgtcactaacaagttaaattagag

SEQ ID NO: 332200 - DNA, 122 bp, Homo sapiens
actgctctgcaaaccagtgcagaagtctaaatgactgacaggcccagttctttccaggctcgcccgctgaagatggctgtgggagtgttgggtgtgagacacagggtggagaaaaagtcagg

SEQ ID NO: 332201 - DNA, 122 bp, Homo sapiens
ccgaggttctgggcagccacagccccggaggccttacaggagcgacctggcaattcccgccgccggccgccagaggaagctgctttgctgctgtcgttgcccagcaactcgtagcccggaag

SEQ ID NO: 332202 - DNA, 122 bp, Homo sapiens
atctggtatgtgttggcaatttttttgtatgatatcccctaatgagggtctgttatgtaccgattactattttaggcactgaggattcagcagtgaacataacagaaaaaatactgggggga

SEQ ID NO: 332203 - DNA, 122 bp, Homo sapiens
gacgctgttcaagcggaaacgcagagagaaacttcagcccccggggcagagcgttggcagcgaggggagggggcccaagagctccttgcaggcgcacaaaccaatctgggctattccaatat

SEQ ID NO: 332204 - DNA, 122 bp, Homo sapiens
aagttgttcagcatttagaacatcatcatatgaaccatcagttaagtcttctgcggacttcgaagagcgtatcccgagctcgcggtcgccccgccgccgaccccgggtcagcctgtaaatgc

SEQ ID NO: 332205 - DNA, 122 bp, Homo sapiens
cggaaccgccaagctcccgggcgggggaggggcccggccgcagagcgaaccagccctctccggccccgctctccaacgtcagtacctggcattctgcggaaaccggctggaagggggagcac

SEQ ID NO: 332206 - DNA, 122 bp, Homo sapiens
tcaagtgtgataaatttctcttaaattaattacaaacagaaagggtatggtgagtcagctcgtgtctggaatggagcccataagctaagtgtaggccgtgagactgcacttgcatcatgagc

SEQ ID NO: 332207 - DNA, 122 bp, Homo sapiens
tgttgtgcctcagggaatagggaggcctgaggaggggtggggtgggggggagcggggaggcgacagctgctgtcagaacattcgcattttatcaatcaagttcactgattcatatgggcgcc

SEQ ID NO: 332208 - DNA, 122 bp, Homo sapiens
gccatccaccctctgtgactgggcttttccaggtcacccctcgctgccaggctctcttcccggtccagagcccacaggatcctacaggaggggccaacaactgcttgcctttgaaacttgaa

SEQ ID NO: 332209 - DNA, 122 bp, Homo sapiens
cccttgttatcagtccatcctctgtgctactgaatccatttttctaaaatgcagatttgacgtcatatctgtgcctaaaagtgctgagtggctccttttcaggatagaattgtaatctctca

SEQ ID NO: 332210 - DNA, 122 bp, Homo sapiens
tgtgagcatagcaggcttccaactgacccctggttcctccctcatcctccgtaacccacccgccacctgcagtcagagtgaccacctaaaacccactgcttgcacctgccgtggcgtccagg

SEQ ID NO: 332211 - DNA, 122 bp, Homo sapiens
gttgccacctggcccatctgtagagtggcccaaatctggtttttgcctcctctagcaagacgggtttggtgtgctaggtgattctgacacacaccaggtccccgccttcctccagcagcctg

SEQ ID NO: 332212 - DNA, 122 bp, Homo sapiens
ccctcctccccccggcaggggctgggccaagatataaatagggttggcggctgcagcgggcggcaaacagcccgcccggcaccaccatgctcgccctggaggctgcacagtaagtgagggcc

SEQ ID NO: 332213 - DNA, 122 bp, Homo sapiens
gggaaaaggcacctgagaattcatgcattctgctctcataaatgctcagagataagtcctcggtaactcaagggccccaagatcccacaagttctgtcaccggggatccacagtgatgcaca

SEQ ID NO: 332214 - DNA, 122 bp, Homo sapiens
taagaaactagaacaagttagagccaaagaggcctggcgggcgggggtgcgggtggagtccgggccgggtggcgtggaaggccgagcacagctgcgagcggcgagtcccgggagaggaggag

SEQ ID NO: 332215 - DNA, 122 bp, Homo sapiens
aggaagttgttgagaggctaaaacataagcctatagcttctgatagctatcgtgttacaacgagaggaaaccttgagaatgtatcagttcagaggaaaacagtgagagattgagcacataaa

SEQ ID NO: 332216 - DNA, 122 bp, Homo sapiens
tcccatatcccaggtctcacctgctccgggccccgaaggtctcaggatgctgtggctgcacgcggacgccagccgccctaaggtgaccgtcagggaagatgctgccatggccgcagcctcgg

SEQ ID NO: 332217 - DNA, 122 bp, Homo sapiens
ccgcggggcgcacctgggggttcaggcgtgcgggctggactaggcgcagcaacatgatgtcgttgcggtggctgcgcgcttcgtagcgcgggtgtggaatgacccgagacgtggtccgtagt

SEQ ID NO: 332218 - DNA, 122 bp, Homo sapiens
ctgctgaggccagtctggagccggcaaagggagggaaagggagctcccctgggtgtttcccgggcagcctgccctctactgcaggtggcctccagctgctcagaacagctgcggaaggaatg

SEQ ID NO: 332219 - DNA, 122 bp, Homo sapiens
aagggacgtgagcagggagcagagcatcagcaagaacttccggaagatgctgcgggacagcggctcggccgaggtggagagggcactggccgggcccggaggggccatcctagccggaggcg

SEQ ID NO: 332220 - DNA, 122 bp, Homo sapiens
agggaggcgttggggccggctctagggagcaaagctgtcggagtccaggcctctatcacccgactgctgacactgccctcccatccctgctctacaagcgggcggtggtgactacacgaggc

SEQ ID NO: 332221 - DNA, 122 bp, Homo sapiens
cggagggccgggtcgcctcgagtctctgggtccgagatccaccccgaaaccgcgggaccccgagacccttgacctgggagaggcccaggcgcctttacccggtttcattttcagtttaggcc

SEQ ID NO: 332222 - DNA, 122 bp, Homo sapiens
cctctggccagcttgtttgcccggcccgcggcgtcccctgcggcccatcgctgctcctcccggaacccacgccacttagtctggtcccgaccctgcactcgctgctgctgcctttcccacct

SEQ ID NO: 332223 - DNA, 122 bp, Homo sapiens
agggagggggagtgtggcactgatgcttacaatcaaattatagaaaagaatccctccctgcgaagtagcccatactgatggaagtaagcactaaaggttgttctccacataaggagatcgct

SEQ ID NO: 332224 - DNA, 122 bp, Homo sapiens
actgcaacattttcagataagactctagcatctcagagggattctacaaaatgcaacattcgcttacatgtataaattgtggcttttaaactgtgtttactttattttgtattcacatgaga

SEQ ID NO: 332225 - DNA, 122 bp, Homo sapiens
gaaaatgtctaaggcagctgaggctcctccattcaggcgactaattgtaaagatcatacacgtattttccttttaattctgtgagcagggagaatatggtcagggcagcagtggagccagga

SEQ ID NO: 332226 - DNA, 122 bp, Homo sapiens
gcagccatcacttaccctaagctgactgttccttcagcatcagagggtcatccctggggacgaggaagtcatgaaaatcatgggatgtcaggaccagacactctcctggagctcacacagcc

SEQ ID NO: 332227 - DNA, 122 bp, Homo sapiens
ataaatagcggccgccatcctgcttctcttcagacacacttaatttagccggcaggcacacggatgcttatttttaaaaaaagaacttgttttattgcgctcgaggtgaccgggaaggtgtc

SEQ ID NO: 332228 - DNA, 122 bp, Homo sapiens
cctctgctttctccgcctacttgggtcggcgaacacttccgccttggtgccgcctcgccccgacttcccagtatgccccgcgccgtctccctggccacggttccaaacagccgtggcccgcg

SEQ ID NO: 332229 - DNA, 122 bp, Homo sapiens
tcaggacatggagcgggaatactcagcccagggcaccctggccttttctctctgggctcccgggtgagtgttcaggacagcagccaggtcatgactgatgattttctagggacctctacttt

SEQ ID NO: 332230 - DNA, 122 bp, Homo sapiens
gcaacttttgtcacccactatgcagggaagttcaagctcctggaacaggcccgggatgtgcgggagccagtgaggtacttcagcagcgtggaggaggtggccagtgtcttccctgaccgcat

SEQ ID NO: 332231 - DNA, 122 bp, Homo sapiens
tttttatgacactctactcaagccatacatacatccttgtgaaccccaaattattcagcacgtattaccacaaagcttacaataactcagtgggttaagttgtatatatatacacacataca

SEQ ID NO: 332232 - DNA, 122 bp, Homo sapiens
ctgttggcacctgctgggattgggtagtgcacaggaattccctcatggggtctccagagccgatgctaagctgagggatcagagaacctctgcctcagcttcccaggacacccacacccagg

SEQ ID NO: 332233 - DNA, 122 bp, Homo sapiens
tgctgcctcaggcaacgggctttccgactccttggcttcttatgtgaggaaaccacagcgcggccggcatccagagagtcggttagccgcgaagttcccgccggacgaagggaccagccagc

SEQ ID NO: 332234 - DNA, 122 bp, Homo sapiens
aggtctccctgtctcactcaggatggtgtgcagtggtgcaattagggctcactgcagcttcggcctcccaggctcaagtgatcctcctgcttcagcctcccaagtagctggggactgtaggc

SEQ ID NO: 332235 - DNA, 122 bp, Homo sapiens
ttgtggggcaacatctcacaaaaatagactcttaaagtcaagagcataaaaaagaatatacggaagacaagtgtctcatatgacacaaagcatctttcttgacagggagtcgaaagcaggtc

SEQ ID NO: 332236 - DNA, 122 bp, Homo sapiens
aaacctctgcctgcccactggagagcagcgggaatggcttcaggaagcggctgccgcctccgagactcaccgacctgccgtgctgccacttctacaccgaaatggctggtccgaggccgcgt

SEQ ID NO: 332237 - DNA, 122 bp, Homo sapiens
ctggcgatgctggagaagacggtggaaaaatgctgcatctccctgaatggccggagcagccgcctggtggtccagctgcattgcaagttcggtgagtgggcagccggccagccaaggggtgc

SEQ ID NO: 332238 - DNA, 122 bp, Homo sapiens
tggctgtcaggactcctttcatatgcagtttcctgagggaagccttcccaaagcccataccggggcaggggcagcagtccccctggcgagggctgttgggtgagaaaggaacctggtgcaga

SEQ ID NO: 332239 - DNA, 122 bp, Homo sapiens
cgcgccgcactatggaggcagccatcttggagcgtaccaaaaggaacagccaacgggttacggacagaggaaggggcggggttacagctcgacctctcggggcgcccagaattggacgaatc

SEQ ID NO: 332240 - DNA, 122 bp, Homo sapiens
cgaagacgcatgcgtggcgacaacaacaacaaaaaccacaacccacattacttgagggctcgggcgtgcgcaaagctccgggttcagtttcccgcgctggaactttttcaatagtaaacgag

SEQ ID NO: 332241 - DNA, 122 bp, Homo sapiens
agaccacacttttcctcagtaccattcagtgatgaaccaatcccgtctgttgtgggaggacgggagcagatagacattaccttttgggagaaagtgcaggagtggacagggcacctttgcta

SEQ ID NO: 332242 - DNA, 122 bp, Homo sapiens
gtttcagaaggaattgagcgcgactttttgggttttcgctctttatttttagtttggcatcgtgtgccttttggaagattttgttcttgatattctataaaaataagacctcggggttgtta

SEQ ID NO: 332243 - DNA, 122 bp, Homo sapiens
ctctgctggagaagataagggaggcactcagctttcttcaggcagagtgtgggggagccacgatgtataaatggggggccaagaggcagcagagacactggcccactctcacgttcaaagca

SEQ ID NO: 332244 - DNA, 122 bp, Homo sapiens
aaggcacccccgctttgctctcagccccctgcgactcccacagcacttcccacaggatagcgtgactatctggttatgggtccatcaccccattttattgtgcacaccttgaggcaagtaca

SEQ ID NO: 332245 - DNA, 122 bp, Homo sapiens
atctcaggtgatccgcccatctcggcctctcaaagtgctgggattacaggtgcgagccatcgcgcctggcctagaggtgtacattttttaacagaaccattcaaaaggaggttgtggggatc

SEQ ID NO: 332246 - DNA, 122 bp, Homo sapiens
cagaaattgggcagagtgcaccgtggaaacacgtgcgtgtgcctgcgccgcagcacagaccgagctgttctcaacgtcggaatctcagcccgaggctgtggcacccagcttcagtccttgca

SEQ ID NO: 332247 - DNA, 122 bp, Homo sapiens
aggttattagcagattattggttctttatcaacctcaggccccaatctccaatctcccaacgaagctattgtcgcctaataagatgcacttgataatcttggcatgaaggtggtggagggcc

SEQ ID NO: 332248 - DNA, 122 bp, Homo sapiens
aaagcccccacaaatgccaggactccgcggcttcaacttccctccgaaccaattccagtccgattttatgggatcagggtgtgacccccaactgcagaaggcaatgaagagactgcggcgag

SEQ ID NO: 332249 - DNA, 122 bp, Homo sapiens
ctgcggaggctgagcggctggaggaagccaaggtggagttgcaccgaatcagccgggcctcggacaaccagggcgtgccagtgctggtgctggccaacaagcaggaccagcccggggcactg

SEQ ID NO: 332250 - DNA, 122 bp, Homo sapiens
gcagacacagcgccctcagaggccggctgcagaaaggactggagacactgcaaatgaaaacgtctacacgagaatgcagacacagcgccctcagatggctgcagaaagcgctggagacattg

SEQ ID NO: 332251 - DNA, 122 bp, Homo sapiens
tgcagccggggtggtgtcggggtttcccggctcagcacattctcccctactccccacagccgccccgatattaatagccctgccgcagcccatccagctggctcagagccgttccccatgcc

SEQ ID NO: 332252 - DNA, 122 bp, Homo sapiens
agaggggaggaggaaaggaggactggtctgaggcaggggagagttcagctcagctgcccacgtagatgtcaggacctgggcaccaagggcccatcaccccaaggccctggttattttttgat

SEQ ID NO: 332253 - DNA, 122 bp, Homo sapiens
gctggttctagcgaagactggcaaacccagagcaagctgactccagggtcttggtgggagcgtcgcccaggatcagtggtgcaatctgtgtccctcccacctccctgggcagggcctggaga

SEQ ID NO: 332254 - DNA, 122 bp, Homo sapiens
tggaagaagtttccaggccaacgtgaagttttcctgtcttgggtacatgcgagccccacgcgtctgcgagtttgggttagtgtgtcaacagggtcagtccccgtatctactttgcgaaagct

SEQ ID NO: 332255 - DNA, 122 bp, Homo sapiens
ataacatcgtccagccaggctcactgtgggcagggtgactcactgaagacggcctgcgatcgccaggtgattgttgttgtgcccagcctgtggggctggggaggaggaaggggggcaggcca

SEQ ID NO: 332256 - DNA, 122 bp, Homo sapiens
ttccccggcaggcatgcgcagtggcacccgcaggatgcaatcctagtctgccaggctgggcggcggtgtgggcagaacctttcctcatccttacttgtgaaattggggtcatcgtggtcgct

SEQ ID NO: 332257 - DNA, 122 bp, Homo sapiens
ttcatttcctggttgatggcttttcttcccgagccatctgggaccctgcggggagagtcccgcccctccccgagggcaccagccggctctctctgccatcctggccagccagcagagcccgg

SEQ ID NO: 332258 - DNA, 122 bp, Homo sapiens
aaaacaccccagagtgaaacgagccgaaatcccaagaagtggcttcgacgacggacaccacgagcagcagcctgcgctggaaatgtctgtaccgggcgaggaggggcagagaaaaggcatct

SEQ ID NO: 332259 - DNA, 122 bp, Homo sapiens
tcagttgttaaccctctacttgaaaacttcctatccgccatgcctcctttttctggctttcgttcttcccttctggctacaattttttgttactctaatctcttgttctgctcactttctct

SEQ ID NO: 332260 - DNA, 122 bp, Homo sapiens
tgggggacgctgggacagcctccccactcactctctctctctttctcccccgccgcgccccgcagtggcggctctgcagactgagatggagaacttggccctgcatctcttctacatgcaga

SEQ ID NO: 332261 - DNA, 122 bp, Homo sapiens
ctggccagcacctgatggtgttgcaggctggcccagggacttgtgggctttgggccaggtcggcagcctgagttctgctgggggtcacatctttcctgagtttcagtgtcaggatgcatggc

SEQ ID NO: 332262 - DNA, 122 bp, Homo sapiens
aaatgaaaagcatcttatttcaggcaaaaaggcctgtgaatgattaactctggttccatgcgttgggactttgcatagcaaccccgtggcttgcaacgacaaaaaagctcaaggcaggaaca

SEQ ID NO: 332263 - DNA, 122 bp, Homo sapiens
ctgaggacaaggcgctggctttgctaatcacatcacaagaccttgagccagggccaaaggcgcggagtggcgcgggacgtcccgggcgggggagctgactctgaggacaggaggaaaggccg

SEQ ID NO: 332264 - DNA, 122 bp, Homo sapiens
gtgcagttgaaacaatcaatgtggctgtacttttgttgtaagacctggctctttccgactcgctgacgtttgccatgcttgtcctgagcttctccagagaaatgctgtcttctggcaggaaa

SEQ ID NO: 332265 - DNA, 122 bp, Homo sapiens
ctgacccttgattctaacacaagacagtctgatgtcagagcccaagcactggatggagggcgagttgcagaagaagggaggtgggatttgtatggggcatgcagagtctgagcataagtgag

SEQ ID NO: 332266 - DNA, 122 bp, Homo sapiens
ctcaggtgatccacccacctcagcctcccaaagtgttgggattataggcgtgagccaccacgcctggactaatatgagttagaagtaaatgaactaattcagggatagacacttaatgtgaa

SEQ ID NO: 332267 - DNA, 122 bp, Homo sapiens
taaggcctttctggtcctgcgatcttgatccctggttctgcctttgtagttctcaattttcgcggtgtcccgaatgtttttccagttccttccgcggtctttgtggtgctaaaccgaatgcc

SEQ ID NO: 332268 - DNA, 122 bp, Homo sapiens
tctctccctccctccctcccactctctccatccccccactcctttcacctcccttcaccccgccctgaaccatggtggcaattcaacattggacttcaaataaagttatccagtgtttctca

SEQ ID NO: 332269 - DNA, 122 bp, Homo sapiens
aagggaaaacggtaagcattgactcctttttcagagcagtgcttctcaaaccagggcaagcggtcagcatctcctagagagcttgttaaaacataggctgctgggcttctcccccagagttt

SEQ ID NO: 332270 - DNA, 122 bp, Homo sapiens
caggaaaagcagctgctcagcactcgcagcccatcctccacctgctcaggctgtaggatgcgggactcagtctctcagtctcagcttggctctccaccccgcgtccagacagtgagccaatc

SEQ ID NO: 332271 - DNA, 122 bp, Homo sapiens
gggtggcagtgggcaccctatgccaggctccagggtgtctccctgagtgtggccctcctccgggtgtggcctcacccttggctggtaaaagatgtgatatcctgacaatggcaaaagtccag

SEQ ID NO: 332272 - DNA, 122 bp, Homo sapiens
catgttgcacctctgtctctgaacgtgatccttctgggtgcgcgcggggtccaggtgaggcgttttgggtgcgtttttatagcaaggaggcctttgggctttaaaatcctcactttatttac

SEQ ID NO: 332273 - DNA, 122 bp, Homo sapiens
acagactcatagagattaaatgatcactatggtccttcttctgttaaatggagccaaagacgcctatgttgttctgaagtcttgtaatgtttaacttctgagaacttagattagtggtgtga

SEQ ID NO: 332274 - DNA, 122 bp, Homo sapiens
caagtactcacctcccagagacctggcccagcgggtcctcatggcagcaccaccccctcccggtgcccacgaccattcgtctcccatccggcgttctccaggatttccaaagacgcccgttt

SEQ ID NO: 332275 - DNA, 122 bp, Homo sapiens
ccagctgagtgactgtgggagaggcagaacccacatttgaacacttctaacttcagtctgcgcaagcacccgagccctcaccttctcaaaaccccaattctagttcctaccacttcttcagc

SEQ ID NO: 332276 - DNA, 122 bp, Homo sapiens
cagggcccactcccttccctggagcctgcagcttatctagttctatcacctgagaaggtccgagggctaactggagattataaagactgtagggcaaagccttgcatatcttttcttcgtat

SEQ ID NO: 332277 - DNA, 122 bp, Homo sapiens
agattcagcttttagggttggcctcaggctggagctccagacagatgcctggagtccaggcgctggagggtcgaggacgagctgggcaggcggatcggacccctctccccgctgccagatgc

SEQ ID NO: 332278 - DNA, 122 bp, Homo sapiens
acttaaaaatttaatgcaactcaagcattttaaaaccccaaagaatcttaagggtccatacgaagcagtttgaaaaccattgcataaaggtttgccatcactaattaactacttgatctctg

SEQ ID NO: 332279 - DNA, 122 bp, Homo sapiens
tataccgaagaccccaaaaggggaccctgggtctgctcaccaggttctccctgcagtcctcggaaattctggagctccctgtcccatggcagtaaagaaaagagtgccatcccattccagca

SEQ ID NO: 332280 - DNA, 122 bp, Homo sapiens
cttagaaattcaatataataacagtccaggagcctcttgagcctttcaacatcctcagcccgctttttccatcctgcctttctttctgcccttcttggataatctttcccactcatttttcc

SEQ ID NO: 332281 - DNA, 122 bp, Homo sapiens
ctgctccctccagaggccttgcagggggtcattagccctgagccctccctggcgggagcacggccttcctttccagaccaaatggggcagggcctctacatgtgctgtaagcgtcaacacag

SEQ ID NO: 332282 - DNA, 122 bp, Homo sapiens
gcctcggctcccccacttgccccgtaccttgggccagcgagcccctcgcccaccccgacccggcttctgttgaaatgcccaccttagggcttttatgaggcttgaatgagtccgtgtagtca

SEQ ID NO: 332283 - DNA, 122 bp, Homo sapiens
tgggttcagctccttcttcatggacaggacctgggggaacatcgaggtgtacacacttaacgcagccagtaaaacgtcagcagccctgaagatgcgcgctggactcgaagaggagttcacac

SEQ ID NO: 332284 - DNA, 122 bp, Homo sapiens
ctgggccctattgagcaggggctttgtgggatacggttaggagtctgacatttcaaagaacgtttgtgagtatgtaatatgtacctggcactatgccagacactggagagttgaagatgaat

SEQ ID NO: 332285 - DNA, 122 bp, Homo sapiens
tgatcacacagacattaaagaggatgatgtccaagctttaactagatttttctgactttacgcaccttcctgataacagccagcttgcataaataccacttatgaggaacaaacaggatttt

SEQ ID NO: 332286 - DNA, 122 bp, Homo sapiens
cccactgctcctggagttcgctctagcggtgggaggccgacgattagcagcgggaataagcgatggaggggggtcgggccgggaaccgcagggatcctgggtgcgggttgcgattgcaaatg

SEQ ID NO: 332287 - DNA, 122 bp, Homo sapiens
cgggcgccgggaggggatgctgaggctgatggagctgcctccagggctagggccactcaccggaggagggcggggcctgcacttgaagtcaggccgcacctgtctgtttttggaagggtagc

SEQ ID NO: 332288 - DNA, 122 bp, Homo sapiens
ctggttctaccacttcctcagtatgtgctctgggacaaaacagcatatttggcaacatctcggtgtccttatctgcagcttgaagagggtaagattttgcatctgacacccaggaaagtgtt

SEQ ID NO: 332289 - DNA, 122 bp, Homo sapiens
gccaggtccggctagcgcgcaaggccatctgcgagctgcagctcaggccaggaaggcagccgagccccaaggcccggcgctcggggcccggcgagtgggtcaggagccgagcatacctcggc

SEQ ID NO: 332290 - DNA, 122 bp, Homo sapiens
tgcttgcaaaggcctgggactgctgtgagtgtacagctgggtgatgtgcgtgtgtccccgcgagtccacacctgtgcccacagctgtgagggagcagcatatggctgcccccagattgtcca

SEQ ID NO: 332291 - DNA, 122 bp, Homo sapiens
agacagggtctttttatgttgcccaggtggttctccaactcatggcctcaagggatctcccggcctcagcctcctaaagtgctgggattacaggcatgagccactgtgcttggctcagttct

SEQ ID NO: 332292 - DNA, 122 bp, Homo sapiens
ggccttgatcctgaacaaataccgcgtcctaatgcggcctcctgccaaggcagaagcatccgttggcagccagatgccccggtttaaacggttctcctgctctatcctgaccttcccactgt

SEQ ID NO: 332293 - DNA, 122 bp, Homo sapiens
cagctcctcctccagcgccgccttgagcgcgccctggcccgccacatccgcccactgcaccgggggcccgcagtccaccatcttgctcgtcaccagctccagggccccagggtccacgcctt

SEQ ID NO: 332294 - DNA, 122 bp, Homo sapiens
gactcagggcatccctcctcacactgcacaaggaggtgctggcagcttgtctggctcagccggggatcccaaggtaaagtaggggattcgtggcaggtatcacctaagctgggtgatgagga

SEQ ID NO: 332295 - DNA, 122 bp, Homo sapiens
gaaaacgtcccacaagatgaacacgaactttctctagacgaaaggcagctgggagcaggacgcgtccacgagtcccgatgggaacgcgcccacgccgcagctgggactcgggagaggctagg

SEQ ID NO: 332296 - DNA, 122 bp, Homo sapiens
cgccccctttccggcaggctactgggctccgcccacacacctcccggcctggttcctaaacgccagctcggagcaatccccttgggctggagccaaatccctgctgtgattttaaggaagac

SEQ ID NO: 332297 - DNA, 122 bp, Homo sapiens
atccttgtttccctctggcactccactgcagacacagctggagtttctcccacaggaatgcggcatacagggacctatagacagccttcctggaacaagccagggtgagcacagccctacag

SEQ ID NO: 332298 - DNA, 122 bp, Homo sapiens
ccctgccccctttttttcttttaaaaaattttctccatcatctgcaacttaagaaaatgtcgctgtcccataggaggaggcagattcaagaaaagatgtgggtgtcagataatggcaggtag

SEQ ID NO: 332299 - DNA, 122 bp, Homo sapiens
tgactacaactcccagtactgaagaggctgctcttgcgaggaggcggtggggacaggctacggaggatttcgggacttggagtttttgcattgagtgtggtgtccgcaggtttcagcacgtt

SEQ ID NO: 332300 - DNA, 122 bp, Homo sapiens
atatattctttttacaaatgaccccaataagcagtctgttctatttctccattagggcagcgtattgggttatgtttcaagttcctgccagttgggactgccttcatgcaaaactttgcaca

SEQ ID NO: 332301 - DNA, 122 bp, Homo sapiens
ccatagatggtgggttaatgacggagaggggcgctcttagccaagggatacacagggcagcgcggcactacgctgcagttttccggctgcagattctgtttgtcatctgctggaaatgtcca

SEQ ID NO: 332302 - DNA, 122 bp, Homo sapiens
accgtggggtcctgtcacagaaaccccagcagcgcagccaccggactgggttctggaggccgagccgcagtccgtgcggcggcgctgggaagagaaggcgccccggcagctcccctgccacc

SEQ ID NO: 332303 - DNA, 122 bp, Homo sapiens
gaagctgcagagtttcgcggtgagtgttacagctctcaaggtagcgcgtctggagttgttcgttcctcccgctaggctcgtggtcttgctgggctcaggagtgaagctgcatatcttcacgg

SEQ ID NO: 332304 - DNA, 122 bp, Homo sapiens
aggaagtgcccccgcagcgaagagaagcaaaggctacctggcttgaaggaaaggtttccccggagaccccacgatggcttaccaggccagcctaaccattatgcattgagtgcctgttatat

SEQ ID NO: 332305 - DNA, 122 bp, Homo sapiens
gagcatattcaaaataaagactgtggcaaataaactattagagaaaataagtcaaagtggcggccagtggcaataagtacaatacacaaatctgggcaagtctgggagcattattccaaaat

SEQ ID NO: 332306 - DNA, 122 bp, Homo sapiens
cgccctaggttccgcctcctggcagtcttgccgccaattccccagttgagcgaggctgctcgcaacccctaacaccgcctgggtctcccagccgcctggtctccccacacccgcccgcccga

SEQ ID NO: 332307 - DNA, 122 bp, Homo sapiens
tcagagctccaaaggaaaacttctgcgacttcaagaacgtcctgcgcattcacatggggtcgcttcctggctggttgaggagagtgaaagttctagtgcctaagcctccttttctcttgccc

SEQ ID NO: 332308 - DNA, 122 bp, Homo sapiens
ttatcactagataattttacagcattaggtgaatcactctgttgggtcacaggggccggccgcttccttcttccaccacgagagggcgctgtctctccacgagaggcgcgaggtagctctag

SEQ ID NO: 332309 - DNA, 122 bp, Homo sapiens
gtgtcaggcggctgtgttccttcgccacgcaggcgccccgcgccttttcccgcagctctgcgccactcccacactcccgggtccgagctaacctagaccacccgtgaggaccgccctcgggg

SEQ ID NO: 332310 - DNA, 122 bp, Homo sapiens
ttattctccccctccccctcctgcacacgaccatgtgtctcctggctgggcctttggggacgcggcccctggccctccgtggcctgtgttcctgttgttcgcttctctcccagcggaccact

SEQ ID NO: 332311 - DNA, 122 bp, Homo sapiens
agatgcaccgtcaattacaaacacttggacaagtctaactttttttttcttctacaaaaacgctttcaaaagcaaccttagcaacgcccaaataagaagccacctctaagcaaaatagtata

SEQ ID NO: 332312 - DNA, 122 bp, Homo sapiens
gggtgcatttcagactctgggctgggaaatcatgcacccgtgtcgcattcccactccagacgccgcagttttgaggcgcaatggggcctttggcctgatcatactcaggaatccttttaggc

SEQ ID NO: 332313 - DNA, 122 bp, Homo sapiens
ggtgtctcatattagaatttagtgcatcttctcttcagatgagcagacacaggcgaagaccggatggtgtgagtcggtgtctcatattagaatttagtgcatcttctcttcagatgagcagc

SEQ ID NO: 332314 - DNA, 122 bp, Homo sapiens
caaagatgacaccgatagtcttatttcctgtggggatgggtgtgattgaagacacagttacgtccatgccatcaatctgtgtgtggaaaagtcggcaggtcgcgcgcacacacttgtcgctt

SEQ ID NO: 332315 - DNA, 122 bp, Homo sapiens
taatttatctaacctgtaatgcatccagttgttcaaaactcctttgggcagcacccactgcgtgcccagctctgtgcccaggtcctgagggctgctgttggttgtaacgtttcatggaaaga

SEQ ID NO: 332316 - DNA, 122 bp, Homo sapiens
gaggcggctcagcgcccgcggttcccagcgcgggcggggccgcggcagaggttcccaaaccggttgcacagaaacagcgccaccccctactgcccgcggggccacctgtgtgtgcctttcct

SEQ ID NO: 332317 - DNA, 122 bp, Homo sapiens
ggaagtggcgcgggcggcaggcggggaccggaacggggcgcggggcgtgggtgcacgtggcgctcacgccggagccccacggtagaaggattgggggtgccggaagcaccgcaccgtgcgag

SEQ ID NO: 332318 - DNA, 122 bp, Homo sapiens
ccctattcgttgcggcagcgcagcagccaccggacaagcgctagcaacgtcacaaccgcccgccaaaatcgcacttcccacccagaaaactgcccaagggcgaacgttcccggggcgggact

SEQ ID NO: 332319 - DNA, 122 bp, Homo sapiens
gaggacggccggggctgtggtgcccaaccggtgctaaactcaagcttgggaggtcgcccacgagaaacagtcgcccttccccacccgcctgctcggcttggcggggagcgggatgtcgctgg

SEQ ID NO: 332320 - DNA, 122 bp, Homo sapiens
taattctgttttacccccaaggcctgttttcttttcattgccagagtattgtcggttatgcgtcagctcttttgtcattaggtacagacccttcattcaatcctcagaaacgttgacatgaa

SEQ ID NO: 332321 - DNA, 122 bp, Homo sapiens
tcagtccgcgccgcaggtggtgcttgtctgcagagtcatgacctgtaagtggcgcggccgcgcgctgcagctcgagttcgggccgcgggggaggctttggagcggcgccggcggtggctcgg

SEQ ID NO: 332322 - DNA, 122 bp, Homo sapiens
gcacgaccggggacaggaggaggacactgcggtcgcaaagcccaggccgtgcaaaggccccgtggtcagccaggagcccagttctgcctgctttttattctggccatggtgaaagctgatta

SEQ ID NO: 332323 - DNA, 122 bp, Homo sapiens
tcacggcagcctccatctccctgggcttaaatgatccttcttgggcttcagtgatccacccgcctcagccccccaaatagctgagactacaggtgtgcgccaccacagctagctatttgtgt

SEQ ID NO: 332324 - DNA, 122 bp, Homo sapiens
ggcagcatacttcgcacagtcagccagaagatggggctgggggcccggaagtggtaggggcgtcggaaagggttggtgttcatccgcttgcggaggaaagccaagtacttcaacttgtttct

SEQ ID NO: 332325 - DNA, 122 bp, Homo sapiens
ctcaaatgatccgcccgcctcggcctcccaaagtgctgggattataggcgtgagctaccgcgaccggcctggaaacctgatttggaaagtccacccagttagtgagtggcagttgggaactg

SEQ ID NO: 332326 - DNA, 122 bp, Homo sapiens
ttaagttctaactggaaggccaaaatagcaaagatacattcttccagggttgccatattacgtaaataaaaattcttcatttttgatctgaaattcaaatataactgggcatcctatatttt

SEQ ID NO: 332327 - DNA, 122 bp, Homo sapiens
cctcctgcagtgaagccggtggtgttcctgaaggcgctggatgacctgtccgcagaggagcgcggcaccctggccctgcagtgtgaagtctctgaccccgaggcccatgtggtgtggcgcaa

SEQ ID NO: 332328 - DNA, 122 bp, Homo sapiens
ggggggattcccaataggagctccgagcttcactttctcgtcttctccccgcgcccctcccgtcctgccgaccccaggtgtcctgtataaccagttcctgtcgcaagtggactttgagctgc

SEQ ID NO: 332329 - DNA, 122 bp, Homo sapiens
cctcatattcttgggcagaaatgtggctttgttccacacatccacactggtcaggcagcccgtgggcttatctccgtctgttgagggcacatccaaaccctcggaaaactgtcaagactggg

SEQ ID NO: 332330 - DNA, 122 bp, Homo sapiens
ccaggccgccgggaagtgacacgttgttctttggcactggcccgcgctgcgcagggagggcgcaggggagggaggcggtggcggcgggcagggaggagcccccggccccgcccgccctccgg

SEQ ID NO: 332331 - DNA, 122 bp, Homo sapiens
actgccttttcctccctctttccgttctctaattcctcctcttcctgctggtctccttcacgccctcaccttaggattttgagactctcctggaccccactgtcacccctgccgccctgtcc

SEQ ID NO: 332332 - DNA, 122 bp, Homo sapiens
tcattcaaacaagccagagccttagtagcagccaccccactttcccgccgggctgggccacgatgctgacccagcgacacacagctcccttgtgttcccgctggacgctggcccggcggccg

SEQ ID NO: 332333 - DNA, 122 bp, Homo sapiens
ctacctggtgttcctacccgcaccggggggtcccagcgcaccggaccccggtttacaggccgggtggttggaggcccagcactgcccagagccctgggcccctctcagctcaaagacccggg

SEQ ID NO: 332334 - DNA, 122 bp, Homo sapiens
agagagagctgcgcgtggcccatgtgacatgccgcgggcgagagggttaactgcatgtgacgcgaagggctgaagttgggcacagagcgcaactggcgttgcattttcgcgggggctgcatg

SEQ ID NO: 332335 - DNA, 122 bp, Homo sapiens
caggccgcctcggccctggggacatttgcggcctcggagcgtggctgcggctgaagtagccgccgggaaatggaaggacaggcgcaggcccggctggagccaccaccgcggcgcacggcgcc

SEQ ID NO: 332336 - DNA, 122 bp, Homo sapiens
ttccagagtccgattgatttttgcaattattcctaacgaggggtcgatcttggcgtacatcgttgtcatcacgcccaccaccacgataagccaactggaggggcttgccgggtacacgccag

SEQ ID NO: 332337 - DNA, 122 bp, Homo sapiens
ctcttatcttctactcacctcattgccagaaaggtggtacatcctggcttcctggagcagcgggaagacctctgggcactgcctgatgagaggatctgcttccaccgtctccacaaagtacc

SEQ ID NO: 332338 - DNA, 122 bp, Homo sapiens
ggggacgcggggtcaggccaccgcgttggccaggccgctgcaggtaagtgctggacggggcggggcgaggctgggcgggaccctcaggggcgccaagcgctcctggcgaccccctgcggcag

SEQ ID NO: 332339 - DNA, 122 bp, Homo sapiens
aaccgcagaggtcccatgcaatctcatgctgacaggattacaggcatctctgtaagacgtcgaccaccctgacctgaaattcatagactgaagaaactcataggaccaacacagtgagcagc

SEQ ID NO: 332340 - DNA, 122 bp, Homo sapiens
gggcctgtcagctcactgggccatgcctagtagatccaccctttcccatctacagatgctcgtacttacccaggttccggggcacgcgcggggcagcccccgccttccagagaacggcggct

SEQ ID NO: 332341 - DNA, 122 bp, Homo sapiens
tgggagcgtcgccacggtagtcctggctggtctgctggccagcacctgcctctccttcttcgtgggtactggccctcgccccagataacagcagccccactggaaccagtgggcacttccac

SEQ ID NO: 332342 - DNA, 122 bp, Homo sapiens
gcgggggaggcaggaccggagccctgaggccctggccggcctcggggttgaggctcagctcgggataagtgatctttggggcccgcagaggacgtctccccaagacccagtggcaaccgggt

SEQ ID NO: 332343 - DNA, 122 bp, Homo sapiens
ccttgcctcccaaacccgttagagcgtaggaatcattgggagcacgtgataaaaatgccacggattgtggctcaccaaagcagggaagcggatttggaacttaggctcccaagttgtgatcc

SEQ ID NO: 332344 - DNA, 122 bp, Homo sapiens
cccattggcccatggtagtcacgtggaggcgccggggcgtgccggccatgttggggagtgcggcgccgcggcccgcgccacctccgccccccgcggcttgcctccagcccgcccctcccggc

SEQ ID NO: 332345 - DNA, 122 bp, Homo sapiens
accttgggggcattgtgtcccacagggacatgaggtccccttcgagatttcattgcaaagcgcatgatttgcctcttcacaaaaataaatagcagtacaaacacctgtccaaaaagatgtaa

SEQ ID NO: 332346 - DNA, 122 bp, Homo sapiens
gaggcagcacttgaaacagcacatgatgcagcgggctacagggttctgcactcctgggagcgaggaaggctcatgtttggtcactgcccctccctaatggccttccccagctcctgactcct

SEQ ID NO: 332347 - DNA, 122 bp, Homo sapiens
gtgcagtaaaatgtccactaggaccccattgccaacggtgaatgaacgagacactgaaaacgtaagtaacctgggcgttgtagttggcggaccttcggggtggcattcgtgctcctcgggca

SEQ ID NO: 332348 - DNA, 122 bp, Homo sapiens
actgcccagctccaggcaccatggcgccccagtgatgtagccgaacacccgcgcctctaacgtcgccaacggcccacctctatggtgtcggcgaagacccgcccttgtgacgtcacggaagg

SEQ ID NO: 332349 - DNA, 122 bp, Homo sapiens
ccacccctcttctgagtcagcatgcagccacatggccccacatggtgcagttctggttctcggatgagctgtcatatggggtcctccctgtctgcctttattaaagcacttggtgatttcca

SEQ ID NO: 332350 - DNA, 122 bp, Homo sapiens
tctccctcaccttagccaaagctcgactgtcattgagcctcctgcgcatgtgcaggagggcgtcctgggctcccgaggttcggcttcacccagcagtaaaacgcatgcgcaaagcttcggtc

SEQ ID NO: 332351 - DNA, 122 bp, Homo sapiens
ccacgcgctcagctgcagctaccaccgccaggtggctcccggcagcagcggtggaaaccccgctgaccttgcccgccgccaacagcagtgaggataccacggctggatcccttgccagggcg

SEQ ID NO: 332352 - DNA, 122 bp, Homo sapiens
tatgcaggcttgttacctgggtatattgtgtgatgctgaggcttggggtacaaatgatcccgtcacccatattgattgggacattaggagcagggtgagggagaacttgtatgagcagccac

SEQ ID NO: 332353 - DNA, 122 bp, Homo sapiens
gcctctagacccagggacccctctcacgaatgggggactcatctacgaacgaggaggctgcgtcacgaatccgaggctgccgtccaactacaggggacccgtctcgtctattctccgagtgc

SEQ ID NO: 332354 - DNA, 122 bp, Homo sapiens
gtaagctcccgaaaatgccagaatcatctcccttgcctaaatggccgagtgttttcattgcggagcctgtgaagctggtagtagctatgtttagtggaagccctaagcactctcctcctagc

SEQ ID NO: 332355 - DNA, 122 bp, Homo sapiens
cggtaccgcgaaggagaccggtagtatctcctggtgaacccgtagcgcctctctcggtaacggcggctgcgggatcgcgaccggctccgcgagtatgaccgcgagtagcgcctgtacttccg

SEQ ID NO: 332356 - DNA, 122 bp, Homo sapiens
acagctgtggaaacaatgacccagatactgtgtctcctcctaggatatgtttcttgactccgcttatgtggttactgccaaacctggcctcagtgccttctacacacagttttgaaaaccag

SEQ ID NO: 332357 - DNA, 122 bp, Homo sapiens
cacgaggccagctctgcacccggtgtggcaggctgtgggtggcgtgtgccactaccaccccgagtctgccgggcgccatgacgcgtggtgtgggctcctctgtggcggctctggtcaggccc

SEQ ID NO: 332358 - DNA, 122 bp, Homo sapiens
ttctggccaccagagcccacttggccccacccctcaataaaccgtgtggctttggactctcgtatttcagcctgacagtctgttcccgtgtcctggagttggggaagtgctgccttcccacc

SEQ ID NO: 332359 - DNA, 122 bp, Homo sapiens
atccagcgcaaaggttcacaggaacccagagagaaaggactcgtgaggaggcggtgagtgcgttccccgctggctcaggtgcagtcagcaggaacggacgccctcccaggagcagcccacca

SEQ ID NO: 332360 - DNA, 122 bp, Homo sapiens
cgcaaagtagacaccaggtctttctcactggctttctttgactcatcaattgatggctcccgctttgcacctggtgtgactcccctcccccaggcctgccagaaggacctgtatgagatagc

SEQ ID NO: 332361 - DNA, 122 bp, Homo sapiens
cccctcggccggggaggctcccagagccagcacccgcttcctccccagggcggggcccggcggccatgggccaagcgccgtaaaatttaaagaggtgagagagacacttcgcagaaacctca

SEQ ID NO: 332362 - DNA, 122 bp, Homo sapiens
gttaccatggagaccggtagtaacaccagttgtaaacccaaggccaagagaccatggccacgttagcccggctgcaagctaggtcgtcgactgtaggaaatcagtactactttaggaacagg

SEQ ID NO: 332363 - DNA, 122 bp, Homo sapiens
agtgggaagtgtttgggtcgtgggggtggatccctcatgaacagctttgtgccctcccagcggtaggtaatgactgagttcttgttctattggttcacactagaactgattgttaaaaagag

SEQ ID NO: 332364 - DNA, 122 bp, Homo sapiens
ttgtggaaggaaagggctttattcagctgggagcaccggcggactcacgtctccaaaaaccgagctccccgagcgagcaattcctgtcccttttaagggcttacagctctaagggggtccgt

SEQ ID NO: 332365 - DNA, 122 bp, Homo sapiens
cctgcagttgctcttcagccagcccagggacttgcagtcggccagtgaggcctcggttcccgtgcactggacctcatccagcatgatggggcctgatcctgtggacacagcagatggcaggg

SEQ ID NO: 332366 - DNA, 122 bp, Homo sapiens
aaccttagaaatcctcttatctgaatcttttccctccaaccaactaactgggttagatagcggcagaatctgcaagcctcctgttctattgtactttctcctgcacccacagtctctaccat

SEQ ID NO: 332367 - DNA, 122 bp, Homo sapiens
cttattgccctaagatccagggagtcttctgggtgatcattgagaaaaaaatcctggaaacgcatcttttgtttgcctctgggagagtggggactggcaggaaaacataggtagcactttcc

SEQ ID NO: 332368 - DNA, 122 bp, Homo sapiens
atccaaccccctccgccctgttctatcgccgcatggatctgcagaggcagccgttcctgccgggtggatttgccttccgcgaaggacaacacagaaccactctgagttatttgacactgaca

SEQ ID NO: 332369 - DNA, 122 bp, Homo sapiens
tccttgtggattcatatggaaatggacacctgccatgtttgcaggcagaaaaacaggcttcgaattccacccacacctgatggctattctctgcctggaacgcctctcttaccctcccatgg

SEQ ID NO: 332370 - DNA, 122 bp, Homo sapiens
cagcggccacagggcagcaggggccatagagctaactcgtgcagctggttttgggctcagcgaggggcggtgagcgggacccgcctggctggcacttacttagtccattcctagccctggaa

SEQ ID NO: 332371 - DNA, 122 bp, Homo sapiens
aggttgtacgtgcctgagtaatgagctgatccttcttatacctcagcatcagagaatccccggtgcaggaaaagtggggtgtgcatgatggacaaggtgaggtgctgtcagattataccgtc

SEQ ID NO: 332372 - DNA, 122 bp, Homo sapiens
atggttattttacccgatgaagtaccgtatttataatctgaaaagttatgactgaaaggacgaggatgctttaagccctgtcatcagaaactgcataacagtgtgtgtgtgtgtgtgtgtgt

SEQ ID NO: 332373 - DNA, 122 bp, Homo sapiens
caagcattcaccttagtccgagcatctgagcctctccatggtactcggggagaggttacccgagcaactttgcatctggacgacgaatgttgctcggtgaaccccttttcggtatcaaattc

SEQ ID NO: 332374 - DNA, 122 bp, Homo sapiens
ataggcagctcaccctgccacctgtgcacacatttttcttcaatgtatagttcctcggcgcgcctctgaccttttcccggagctcttcaatcccagaagctatagcacaacggctgaatcgc

SEQ ID NO: 332375 - DNA, 122 bp, Homo sapiens
gtatttatcgcccctcccctccagggcagggggggagcaggagaagagtgggagcgcacccggacacggatttgtgagaccccatgagtctgctgcgtggcttttaacaggtcactcttccg

SEQ ID NO: 332376 - DNA, 122 bp, Homo sapiens
gagctgcggccgctgtgccagggtgaccggtagagttgtagccgaggtggcggcgcggggcggggcgggcggagagagaaggaaggaggtggttgtgcaggatggcgacggcggcctacgag

SEQ ID NO: 332377 - DNA, 122 bp, Homo sapiens
cactcctcagggttcacggggctgtgtacagagactctctctgctgacacgatggccacacgcccttcgtgtatgactccactcctcagggttcacggggctgtgtacagagactctctctg

SEQ ID NO: 332378 - DNA, 122 bp, Homo sapiens
atttcggggaggggtgaggccggggcagggtggggccttcttcggagggggcgcggcctccgagtaattaatcccgtctttgttgcgttttgctcctctcctgtccacccagcagggccagc

SEQ ID NO: 332379 - DNA, 122 bp, Homo sapiens
caagtgatctctctgcccacctcggcctcccaaagtgctgggattacaggagtgagccaccgtgcccagctggatcaaatatttttggaacacatggctgtctgcgctgtcctagtccagat

SEQ ID NO: 332380 - DNA, 122 bp, Homo sapiens
ctcatgttcagttgtgatcccagcgtgggaggtggggcctggtgggaggtggctggatctcgggggtggtttctcacgaatggctaagcaccgttccccttgctgctgttctcgtgatagtg

SEQ ID NO: 332381 - DNA, 122 bp, Homo sapiens
ggtgcagggtgcagggtgcgggtccctatgggatcccagcctcaggggaaagctccctcccgcctgccgagcaggtcggaagaaaactgcagctccaaagctgaaggtgtgtttgaaacaaa

SEQ ID NO: 332382 - DNA, 122 bp, Homo sapiens
tgtaaggatcctactcacatcgaaagcccagaaactcaaagccctagataataccagcctcgtttctccttttaccaaagaggatgaaactgagatgctgagacacaacctccgggctgcga

SEQ ID NO: 332383 - DNA, 122 bp, Homo sapiens
tccctgccggatacccggcagtagacaccgacgtctgggggctagcgaggcaggtgggcgcggaccgcgacccgattctggcttccaacctccgcccagtggcgcgcggggccgtcgcccca

SEQ ID NO: 332384 - DNA, 122 bp, Homo sapiens
ggtttgctgacctctcccgtccctcctcagggtccctaggagaatttttgaagaagtaatcggcagcaaggagatgggggcaatagagagtctcagactcgcagggacccatgttcgtcccc

SEQ ID NO: 332385 - DNA, 122 bp, Homo sapiens
cccccctcctccgccccccctcagctgtaattcatgaagaggctgctatgaatgagagcgcgcccaggagcggagggtagatggcggacattctctgcctttttccccccgcgctcgcttgc

SEQ ID NO: 332386 - DNA, 122 bp, Homo sapiens
aaatgaacagtgataatctaagaagccatactcccctgcaatagcacgattccacatgcacgttctcagtggtcattctgactagtcctctgtgtcatcaggggacactcaagccccttcta

SEQ ID NO: 332387 - DNA, 122 bp, Homo sapiens
ggattgctccttctctgtcaggagtctgagagggtgtggggaggacttaattgagaccagcgaggtcagcctgaccaaaccaaagtgcaggcttccaggacgaaaacagagagtaactccct

SEQ ID NO: 332388 - DNA, 122 bp, Homo sapiens
gcctgcggcgcgctcctgccttgaccaggacttgggactttgcgaaaggatcgcggggcccggagaggtaaccgccgcgcctcccggagaggtaaccgccgcgcctcccggagaggtaaccg

SEQ ID NO: 332389 - DNA, 122 bp, Homo sapiens
tcctttaatacagaatatgggtaaagatgatccgacaagtgagagacaggatcaggtcagcgggctaccactgggcctcacctctatggtgggatcatattcatctacaaagtggttctgga

SEQ ID NO: 332390 - DNA, 122 bp, Homo sapiens
ctggcaccgcccacccgccagactaagccactcccccactcaccaggccccgcccctctacggaggccccgcctctagttcggcctgttttctcagtcccggcacccgccgcgaccgcaaag

SEQ ID NO: 332391 - DNA, 122 bp, Homo sapiens
aaagcgggaaagccttgttccttgctagaaatgagcctcgcaggccaccaccatccgcaccgtacgacaggccgtccctcagctgcggcttcctgcctcaggcaggatgtaccaaacgtgga

SEQ ID NO: 332392 - DNA, 122 bp, Homo sapiens
ccctctgtggtaccagtagttctttctctaatcctcttggatgtgctaatcagtaccctgcgaatactcaaagaggaaactccacatctgtggagttctttatttatgcatgctgttcttta

SEQ ID NO: 332393 - DNA, 122 bp, Homo sapiens
tctatcattctcgggttcagggaggcggaatcgtgcctgctctccggttcctttaagaggcgtcggctccacccctctcagagtcgcggtctgacgcgagatgacagcaacgagttcggtat

SEQ ID NO: 332394 - DNA, 122 bp, Homo sapiens
actgtactaacaacccgccacccagaggccaggcgggagcgtggacggaagtgagcgcatcgggctgggagacagccgaatctcagaagtcagcactgggagattcatttctcttctcttca

SEQ ID NO: 332395 - DNA, 122 bp, Homo sapiens
aatgaaaaaccccattctgcaaaccactgcgccccatgggaagcagctcggtttccttcccgtgtcgtcgggagccctctgatggaggaagcctaaattacagcgctcataacctaacaggc

SEQ ID NO: 332396 - DNA, 122 bp, Homo sapiens
gcaccgacaccccgggggtgtgtctgtgcgggagccaggatgtggttggtggctgccgcccgccttcaagaggtcggccctccaaacctcggaccccacccccgcaaccgccacacacacac

SEQ ID NO: 332397 - DNA, 122 bp, Homo sapiens
tatgcacacaccccgactcaatggaggaccctcatttgtagaagggtaaaatgggtgaggcggaaatgcctgtatggcaccatggagttctgtgtagccagttctaatcctgggctatttgg

SEQ ID NO: 332398 - DNA, 122 bp, Homo sapiens
cttgcacagggaggagggggcttccctaaaacaaacccacagttttacaaacaagagaagcggtgctttgtgcttgcctagagtcatacccacagctacacagacaagggggagggagttga

SEQ ID NO: 332399 - DNA, 122 bp, Homo sapiens
gatggcaccaagggaggtttctgtcaagccgtcccgttccgagatgccccatcgcaccaacgaagcaactgctgagcaggtttgcactaacacgagctggcgtttgtccagaccttaagact

SEQ ID NO: 332400 - DNA, 122 bp, Homo sapiens
aggctccgtggcccgggcccttcagaaagtgccgtgagttgatgtgctggagagaatccacgtgtcagtccccgacaccttatttcttcatggcgattcctttaaaaacacccgtggagcac

SEQ ID NO: 332401 - DNA, 122 bp, Homo sapiens
aaacatttttaaatatcctggaaatgcctcaacagtggacctagatatttccctttcagccggtaggcaagagtcggtatgctctttgaagttttgcggtgttataagacactcaagaaaaa

SEQ ID NO: 332402 - DNA, 122 bp, Homo sapiens
agaacctatgagggctacagaaaatcccctacaaatgaaaggggcagaaatgacaaactgcgatgaaaggccataaggatgctcacacccgaatctaaaaagccctttgtgtgggccgcagc

SEQ ID NO: 332403 - DNA, 122 bp, Homo sapiens
ggaagcacaacaaagtgaataacaccagctaacacgtgcaagtgcttgctatgtactacacgccattacaaagtccttacctatgttacccccatttaatactctcaacaaatctacagggt

SEQ ID NO: 332404 - DNA, 122 bp, Homo sapiens
agctgtaagaccctcttgtatactggaaaccaccttttttctccccagtggctggagacacggccagaacggcaagagtgtccagtatgtaaagctgggatcagcagagagaaggttgtccc

SEQ ID NO: 332405 - DNA, 122 bp, Homo sapiens
gtgtccggagcctggagagtgtcggtggtgacagctcagggccaggcgcgtttctgcgggcgcaaggggtgtggaggctggtgaggcgcctgctgaggagcagcggtggtggggcaggagga

SEQ ID NO: 332406 - DNA, 122 bp, Homo sapiens
aggcaggagatggcctggttgacccttcgagacaaggcggcaaaaccggtgctgggcttgcggggcagggaatcaaggttcctccggttgctgtaccgtcccgcccggcccctctcccgggc

SEQ ID NO: 332407 - DNA, 122 bp, Homo sapiens
gacccatgaactgggtcaggaatgaattccagatccttctgtattgctgactgtagacaccgtccctcctttcctatttctgaaaatttttttcttttgaaattgggtcttgcctggcctaa

SEQ ID NO: 332408 - DNA, 122 bp, Homo sapiens
tccatgggaatctcagacctggactccaggccccacctgtcttagtctcctggaagaaaccgaggtcctggcgcagcagggaggagaaaagctgctcccggatccgcaagttgattcgagac

SEQ ID NO: 332409 - DNA, 122 bp, Homo sapiens
gaaatttccttggtgcttgatctaccctttcaacagcatattggttaagggcacaaacttcgaagagctagattgttatttaccagttatacgcactgagggaggtgacttaatcattttga

SEQ ID NO: 332410 - DNA, 122 bp, Homo sapiens
agcccttggtgtggtgaagctcaggctcttcctggcgccctggtctcctgcacggagctgcggtgagcacatccgggtcccgatggatgcatgcgtggggatggagggcgtgccctgagttg

SEQ ID NO: 332411 - DNA, 122 bp, Homo sapiens
gagaaattgcactgaagagatgcccccacctctggttgggcctgggggtgcctggccttccgaaactaaaagagtgggtgggaagactagtgaaacccagttcacggatggggaaacaggcc

SEQ ID NO: 332412 - DNA, 122 bp, Homo sapiens
gcttctctccgaggctcgcggcctgagaaaccttccgctccgaatgcgggctggcctctccgggaagccttgaaactcaactcctgggtgggccaggaaggttgtccgagttgggcagcgcc

SEQ ID NO: 332413 - DNA, 122 bp, Homo sapiens
gacttacacatcttccccacaggtgagcagagagctaacacctgaggataggccaagaaacgggaagcccgtgcaacctgagcgcacagatcacccccacctgcccggcactcactgtcccc

SEQ ID NO: 332414 - DNA, 122 bp, Homo sapiens
tctagggatccttggaatgcatatacccaaacaaaggccttgtgccaaacataaccagcacgtacaccatttttattttcctatgaccaatgacttagtttctgtggtcagttagtgacatt

SEQ ID NO: 332415 - DNA, 122 bp, Homo sapiens
ccgctgtgtgaaacgagcgcggggcggcgggttactcagctccgcggagacgacctccgacgacccgcaacaatgaagggaaaagagcgctcgccagtgaaggccaaacgctcccgtggtgg

SEQ ID NO: 332416 - DNA, 122 bp, Homo sapiens
gggtccgcgggggtcctcctgaggcagcctggtgccaacccgcaggcccaggctggggctcgtcatggccccgcccacctctgggtcggaactaaggtgggcctgagaggggggcgtcgagc

SEQ ID NO: 332417 - DNA, 122 bp, Homo sapiens
ctacagatcaaaatatttgccaaaaaatacccccaaaattgactatctacatagcatttacgttgtattaggtgttataagtaatctagagatgatttaaagtatttgggaggatgtgtgta

SEQ ID NO: 332418 - DNA, 122 bp, Homo sapiens
acaaacgcctcagaatactttcagccataagcagggagaggaaaaagaagataaatattccgagatccaaatagcaccgaccccaccaagccaaaggtcaaggcctttcctttcgggagagc

SEQ ID NO: 332419 - DNA, 122 bp, Homo sapiens
aaatatatgtttttcccaccgggtcccattttgactcccccaataccctccagttcatcccggagtgctgcagatatctatacatttcctggatgtctcaggaggtgaaaaaaaaaaaaaaa

SEQ ID NO: 332420 - DNA, 122 bp, Homo sapiens
gtacttagaggagagtaggtaactgctccttctcaggagctcagggagaaactggaccctcggccccagagcccaaagaagggaatgaccttcctagtgaaggaggcagtgaaggtgtagat

SEQ ID NO: 332421 - DNA, 122 bp, Homo sapiens
gtttcaccgcctgcggcgggcgccccggacccggccgggttcggacgacagctgcacggccgcgcctcggcccctgaacttttgcctgcaccggggccgccccgcaccccccgccaaccccc

SEQ ID NO: 332422 - DNA, 122 bp, Homo sapiens
ggggctcctcacctctcagatggggcggatgctgggccgagggtctcctcacctctcagacggggtggctgggcagagacgctcctcacctcccagacggggtcgcggccaggcagagacgc

SEQ ID NO: 332423 - DNA, 122 bp, Homo sapiens
gtaaactgacattacaggtttgggatggtcaacagtcaacactgagaacaggcccgcacacggctgctgttcaataagccctcgctgttatcagacgcgaagagatctgtgctcctcaggct

SEQ ID NO: 332424 - DNA, 122 bp, Homo sapiens
tactggtagatgttacaacacggatgaaccttacaaatgtggaagctaaagatgtcagtccgtagagacagattagtggttactaagagttgggtgagtgattgctaatgtatacaaagttc

SEQ ID NO: 332425 - DNA, 122 bp, Homo sapiens
cggctcctcctcagacacgatgaagccgccattgttgccagggtttccttccagacttcacggagttgggtttcacttaggagacaaattatataactagagacacaaaaattcatgctcac

SEQ ID NO: 332426 - DNA, 122 bp, Homo sapiens
cggctcccccccccacacacggcggttccccccacacacggcggctccccccacacacggcggttccccccacacacggcggctcccccaacacacacacggcggctccccccccacacacg

SEQ ID NO: 332427 - DNA, 122 bp, Homo sapiens
tctgtcctattctgtcctgacttactctgcattcagttctagctgagcatgaatgcagcccgcacccatgactttctgtggtggtgctatttttctgttttttgaaaagaaagaggtccggt

SEQ ID NO: 332428 - DNA, 122 bp, Homo sapiens
ggggccctggcccgggaccagcgccgcggctataaatgggctgcggcgaggccggcagaacgctgtgacagccacacgccccaaggcctccaagatgagctacacgttggactcgctgggca

SEQ ID NO: 332429 - DNA, 122 bp, Homo sapiens
agtgaacactcaccaaaatacattatgtttctcattaatcagacagctggaatcccaccgcggtgtcttcagcatcagctctcacccaaggctggcacgtagagcagagccctttcatgcta

SEQ ID NO: 332430 - DNA, 122 bp, Homo sapiens
ttttatgtagcaattcacagagggatggcctaagtgaacatgagtgaagtattttcaacgcgagagtcacaggctcctgaagtcagcacagccgcggagggcacccttccctgcccatccct

SEQ ID NO: 332431 - DNA, 122 bp, Homo sapiens
ctgagtatggtgaggtattaactaacactaagtttcacaacgggcagcttctagctggttcgttgaagctggatctcggccacgcaaggatcattggacaagaaatcagttgagctggaata

SEQ ID NO: 332432 - DNA, 122 bp, Homo sapiens
gctgacccggtgcggggccgcgttctcagcgcgggcactagggggcggcagaggcggaggcgccagcgccgaggagaggcttccaccctcgagaagtttttccgcgcacccgcccgggccag

SEQ ID NO: 332433 - DNA, 122 bp, Homo sapiens
tagaaagaaaggtgggcgccccgtgtctcgggacaaggcgaggagggtgcgagcccgggtcggaccccaggtatagccgtgggtggcattaccggaaaaacaaatttaataaagagcggcgc

SEQ ID NO: 332434 - DNA, 122 bp, Homo sapiens
ttcataaaaggagtcaggcagctctgccgggtccctggctcagcactgtggaaacagcgacggggggaagacgttacagccccgagatactgccggcttgattttggctccattctctttct

SEQ ID NO: 332435 - DNA, 122 bp, Homo sapiens
aagcgcgcaagttggaagtcgggttgaagccagcatagcggagcaggggtcaggcctctgcgtggccggagtgggagagcgcttctgagaacaagatggggcaggaccgaaggggcgtgagg

SEQ ID NO: 332436 - DNA, 122 bp, Homo sapiens
atccgcccgcctcagactcccaaagtgctgggattagaggcgtgagccaccgcgcccagccggaatttgaacttttaaagatattctggggctgggtgcagtggctcaaagggcggctaatc

SEQ ID NO: 332437 - DNA, 122 bp, Homo sapiens
cctgctcagccagtgcctgcagcgccagtgcggcaatgaggtccagcgtctggcggcgctcgtggttcatgaggcacacggtgctctcgttgaccacccggtgcagtgtcaccaggcaggcg

SEQ ID NO: 332438 - DNA, 122 bp, Homo sapiens
caggaagttccttctccatgtatatgacgaagttctggacaggagcccgctgccagaatacgaatactcttccccaaagacccctcctcatgcccctacacgctcttgccggtctagccttt

SEQ ID NO: 332439 - DNA, 122 bp, Homo sapiens
acatccccgcaggactctcgggctccacctcctgctcggcccagccgcattccccaaccacggcagggtctccccaagacagagcagccaaacaggcccacagcagggctgggggctgcaag

SEQ ID NO: 332440 - DNA, 122 bp, Homo sapiens
ccacaggcctggcatccctcccctcccagctctgtacacggaggagcccaaggccaatgccggggctacgagccccaggcaaggccgtgacccaaatggaggcttttaaacccgagctcaga

SEQ ID NO: 332441 - DNA, 122 bp, Homo sapiens
agtactaagagtgtttcagatatactagtttgtattgtctcttgggaaactaggattgggcgcgcagatacatcgccatctgctggtcagtttatctgtggtgaaactgcagctttcttgag

SEQ ID NO: 332442 - DNA, 122 bp, Homo sapiens
ccgactctgcccctacctcacctagtgtccatataagcgtgctgcacctccaacacagtgcgacttctctggccctcccctgcggaccagtgaacctcgcccgagaacttaataaaggaact

SEQ ID NO: 332443 - DNA, 122 bp, Homo sapiens
tcgcgaagcgcctgttggagcacagtccccagggacctggtgggcagcctgtggctcctccggctgcccaccaggaagtagatgacggggttggcgctgctgcttacggacgaggagaggcg

SEQ ID NO: 332444 - DNA, 122 bp, Homo sapiens
agtgaatgcatatgcatgagaagaattagaaagctggaatgagttgatcattccaggggccgcaaggactgcactgggcctgggactttggacaagggagaaatcacatgagtaggacgttc

SEQ ID NO: 332445 - DNA, 122 bp, Homo sapiens
gagcgagtggaaagatttgggcgagaacttgcgcgggagccggactgagcggtgcgagcgcgcaggcgcggccgacggggcgggctgctactccggaatctgctaatcccagtcggtgccgc

SEQ ID NO: 332446 - DNA, 122 bp, Homo sapiens
ccatgccagcccccaacgcagggcgcccggcgaagccacgggactggcgggaggagcacgcggggccggaggaaatcctgaagctgaccctcacctccgagcccccactcccaccccagccg

SEQ ID NO: 332447 - DNA, 122 bp, Homo sapiens
agcagaaaatccagattctagaaacagatgacatgcgccctgagatgacgccctaacatgcgccctgacacgcgcccagggatgacaggcatccttttgaagcatttacttgagaagaagtt

SEQ ID NO: 332448 - DNA, 122 bp, Homo sapiens
cctcgacccccggcatgtaagggtagagtcaaggagggtcttcttaagcgttcctcggcgcggtcctgaagagattaaaggcgtcaaatggaccgctccacacctgagctgccgccaagcta

SEQ ID NO: 332449 - DNA, 122 bp, Homo sapiens
actccagattccttgtctgagcctctttgcctcccctgctgcttttggatgtctcctgcccgccctctgcgtgtcccctccgcggtcgccaggaccaatcggctcggtcgcactggcttttg

SEQ ID NO: 332450 - DNA, 122 bp, Homo sapiens
atggagcagaaatggcagcaaataccacagtaaagagatttaccattggattgttagttccggcttttattctgtcaatgttgtggcttctaaacacatcagtaatctcctttgatccatgt

SEQ ID NO: 332451 - DNA, 122 bp, Homo sapiens
atccaacaccaagacgtgacaaggagacgacactgtggaatgctcgccaagaaccatgtccgggatgtttgccactcacacctgactggcaggcgagtctacccagtctgttcagcacacgg

SEQ ID NO: 332452 - DNA, 122 bp, Homo sapiens
tgattatgtagtccaaggtcatgtagccagcaagaagtcaggccgcgttagaaccatgtccgaagggctccaaacccttgttctacatccatagtctacagcgactacttcagagtccacct

SEQ ID NO: 332453 - DNA, 122 bp, Homo sapiens
atggactggcagcagcatcaagcttgctggagttggttagaaatgcagactctgaggcaccgccccaatccagttgaattggaatctgcatcttaacaagatctttggtgatttgtagggac

SEQ ID NO: 332454 - DNA, 122 bp, Homo sapiens
cggggcactcctgggcctcgaaggtgtttggggctgcgggggattgatttgtgccgaccccgcagtgtaggagacgcctgggcggccttgcgggttgcttcgatggttctcggggctgagat

SEQ ID NO: 332455 - DNA, 122 bp, Homo sapiens
ctccccattgggcacctaaacacacaaaaaagtccaagaggcacaaggacagaatgtagtcggagctcctcctccttctacggccagctaccgactgaaggctgctggccctggccgttgcc

SEQ ID NO: 332456 - DNA, 122 bp, Homo sapiens
gtatttgcgaattagatcccgtgcagctgggaacgacgagaagcggctctgcttgccaaacgatagggcactaactgcaattgctgagattcttaacagggtgttccaggaaacaaataaac

SEQ ID NO: 332457 - DNA, 122 bp, Homo sapiens
gagaagagactcatgggcaccaccgggcccaccatgcagacttcagggaaagagagcagccggaatgcgttttaaatcctgcctgagagcgtggatgctacaggactcctggcgtggggaac

SEQ ID NO: 332458 - DNA, 122 bp, Homo sapiens
ctgcagtgggggcaaggagcctgctgctggccgcagagcggttactacctggggagcaggcgtggggatgctgctctgccaatgcacgttctgcagggtgtgtccccgggctgcttcctgcc

SEQ ID NO: 332459 - DNA, 122 bp, Homo sapiens
gtatccaaacagtacactcacaaagcaaaataacttctaaaagcatataactactattaacggactttaaaatgctaatcatttcattggaagtgattttcctgagaataagatatattttt

SEQ ID NO: 332460 - DNA, 122 bp, Homo sapiens
ctttaaaaacaggaagtctgtgctataaggttgagaaatgtttgttttaacagcctaaggcgtcatggttgcagtttgcagtcagctgctatggaggactatagtttattcttcccagccaa

SEQ ID NO: 332461 - DNA, 122 bp, Homo sapiens
gcggtctcctgagaacttcaaaaaacaaaaacaaaaaaacccaaaggcccttttcagggccgctcacaaagtcgtttaaagagctgaaatgcgttgcgagaatgagtttggatgacagaaat

SEQ ID NO: 332462 - DNA, 122 bp, Homo sapiens
caggtgctatggtgtcttgtaccgagcgagggctgccactcagctgcggcagcgtgttgccgagtgacagtgcagccctctcacggcgaacccagggggtaccaagcagtgtcagacactct

SEQ ID NO: 332463 - DNA, 122 bp, Homo sapiens
agcgcgggacagcgacagggaatccggccgcacctgtgcctgcagtctcattgctcggaacggcgcgccactgtgacgtgtcaggccccgcccctgactctcctcatagtgcccccgcctcc

SEQ ID NO: 332464 - DNA, 122 bp, Homo sapiens
tacgtgtctatctgcaagtatttgtaaagcatatcaatgggcgtttatggccttcctgctcgagaaacctctaggtaatctagttctctatgtcggcaccggcagcgaagtcagaagaagtc

SEQ ID NO: 332465 - DNA, 122 bp, Homo sapiens
gctgcagagactggcaaggggccacctgtggcattgcctggggttggggatggctgttttcggagcgaggggggcactgtggaggtcttgatgtgaatcaccctggtgtccatgacctcaca

SEQ ID NO: 332466 - DNA, 122 bp, Homo sapiens
gccgccgaggggacgcctcgcgacggttcctgggagagctggcggcggccttgctctgcgcgctcttcgcgccgccctccccgcccgcccgcctcaggattgaggaagtgcgtctgggcccg

SEQ ID NO: 332467 - DNA, 122 bp, Homo sapiens
ttttgagggtaggagcaggacgggtgctttggagtcgctgcctcagtggggcctggtcaccgagagtgggccgggcaggggtctctttcctgtctctgtgtcttctcacctttgatgtccca

SEQ ID NO: 332468 - DNA, 122 bp, Homo sapiens
gacttcaggtggccctctgtgcctaggcttctccttggttatcttagttctcaggtttcccgtgggttccactgaggctcctaattgctccaaatccaggcatttacttgcctaaaggccac

SEQ ID NO: 332469 - DNA, 122 bp, Homo sapiens
gctggagttactggcaagctgcgcgctgtccgcctaattcacctaattcagggcaagaaccgctctctggcccctgcacctgggagaggtggggtgctggaccgagggcgaagtaacagcgt

SEQ ID NO: 332470 - DNA, 122 bp, Homo sapiens
cccgctgcggccccgtagtacgttcgctttctgtttccacgtctctctgcgtcggtgctccggctctgggctgcttacagtaaaccctgaccggagatgggcttccctcacttcccggagtc

SEQ ID NO: 332471 - DNA, 122 bp, Homo sapiens
agagaaggcccggacctaggctgagacttccccagcacctcacactcaggactggccctgcgcccagacaggacggggcctatggagtaagaccccacacagccggtccctctgtgggacga

SEQ ID NO: 332472 - DNA, 122 bp, Homo sapiens
aagcagagggaacagagaggaaagtgatggggcgcgcccaggacacacatggcgtcctcacgactctcctcaccgggacactccagctgaaactcaagggctgttgagaggacccatgcaag

SEQ ID NO: 332473 - DNA, 122 bp, Homo sapiens
ggccaggatttgatcctcaaaagagaagatgggatcccatcaagatgtccacatgcctaacgcctgttggtccaaaagagtctcattttgtagggggaagaaacttaattaccagcgcagga

SEQ ID NO: 332474 - DNA, 122 bp, Homo sapiens
agggacacagcacccccagcctacacggagagcgatcacggagggggaacgctcccctaacggtggaaagccaactaataggaagggatggtgcaactggaaactcaccccttagaagccat

SEQ ID NO: 332475 - DNA, 122 bp, Homo sapiens
tgcctttgttacttcattctttccttcgtttgtgtgttttgtccatttctttgtttaagacgccaagaacctgaacaccctccaccagtaacaacctgtcccgcaacaacttgtcatgtgct

SEQ ID NO: 332476 - DNA, 122 bp, Homo sapiens
ggatgtggagcaggaaatgaattcgaggcgagggtcgggaaatccatggaagggcggggccggctacctacccagagacgccgccatggcaacgccgctgtcttctacttccgggaacgaag

SEQ ID NO: 332477 - DNA, 122 bp, Homo sapiens
ctgcgcgttcgctgggcctcgggctggacaaagcagccggcagcggttgctctctgcggccgttccagggccttgggcaccacagagcctcttcgtcttttcccgcgggtcgggagcattgg

SEQ ID NO: 332478 - DNA, 122 bp, Homo sapiens
gaaatacaggaggaggctgttttacaatgagcatgagcatgtcagagcaaggttcagagacgcggagagatattaatatggagcctttgtttacatacagaagacaaggacgtcatgccaga

SEQ ID NO: 332479 - DNA, 122 bp, Homo sapiens
cgctggctggcgcggtcaggcctcacccaccgcggggcaggccgggcgcaggcgtctacacggacacatcccggagttgtcctgggctgccagcacagcccagcacctcgagggtttcacag

SEQ ID NO: 332480 - DNA, 122 bp, Homo sapiens
gcccctccctgaccccacaaatccctgaaaggaaaatgaaaatgtaaactttggacagcccgtactcaaaggctcacttccagaagtgtgcggacgcgacctcccagccaccagccctccta

SEQ ID NO: 332481 - DNA, 122 bp, Homo sapiens
acagatccaaactataccactgttatctggtgtctgacaaagaaaagccatgagcatcaccgtctcacggacttgccctgggaattcaaactgtggctccaccaagtcccagatatgtgacc

SEQ ID NO: 332482 - DNA, 122 bp, Homo sapiens
aatctgcaagatattcgcaaggatcacagaaaaagtcagggatagtggtttattatcctccgaccaactagctctggagagggatggatacaaacgtcccagaaagaggacactgaaagtaa

SEQ ID NO: 332483 - DNA, 122 bp, Homo sapiens
aggaggcggtgactggggtggagaaaggcagccgaggggagtggccccaataaacccacccgcccgcagggctttgcatgggtctgagtgaaggagcctttccaaatgtggatcagggcctg

SEQ ID NO: 332484 - DNA, 122 bp, Homo sapiens
cgatggttatgaatctttgcagctggtggacagtaacggggacttaagtgcgggaagcggcggggttggcggcaagcagagagtgaacgccggggcagcggcgcggagtcccgcccgacagc

SEQ ID NO: 332485 - DNA, 122 bp, Homo sapiens
agatgtagaccctagggttcagggaaacgaatgtttaaggtcacttgggtactaagtggccgaggcaggcaggattgaaacccgaacctgactctgtaagccacactcttaagaatccacct

SEQ ID NO: 332486 - DNA, 122 bp, Homo sapiens
gccaccacgcctggtctattaagaagtttgaatgtctgaagccttcatggttgcctcaaacgtagtcacgcctggggtcggtgagtgctgtgcgtctcctgcacacggggctgtcgggcgcc

SEQ ID NO: 332487 - DNA, 122 bp, Homo sapiens
ggccataaccccctggggccgagtggctggtacctgcagctctagtgttttcccagctagcggcgcccaccccggtcccgcacaggtgtgctccgactccggcttctgctgtggcgcttggt

SEQ ID NO: 332488 - DNA, 122 bp, Homo sapiens
gatgtttaaaaaagccaagtgatgtggtaacacctttctgtagagttcattccgctgtagcgtcacatagatttgggctggaatctgagccaagccctgtaacctggggaaagttacttacc

SEQ ID NO: 332489 - DNA, 122 bp, Homo sapiens
agacttcctggacccaagggacgccgggtcccctggaagcgcccatcgcattgaagaccacgtgtgccttgctggggtcccattcagacaagtcccgggtcgttcgctcatcgccctccacg

SEQ ID NO: 332490 - DNA, 122 bp, Homo sapiens
ggatgaatggatggatggagccccgtgcaaaccaaggtttcatcacgtgcctaacgactccgctgaaagtcccagggaagcagatgatttattattattattattattattattattattat

SEQ ID NO: 332491 - DNA, 122 bp, Homo sapiens
accttcttccatttgcaggcaagatatccttccacatattccgaaataatttgtatgtagcgctatgaaaacatgtatctgccatactgtatttggtaaacagctttactaaatgttgccta

SEQ ID NO: 332492 - DNA, 122 bp, Homo sapiens
agaaccgtgaagcctgctggcatggtcagagccaaagagcattgtcacttgtgagatcagcgcagaaacagagcggggccccgattggcccttcgaacttgggtggggccagagcattcctg

SEQ ID NO: 332493 - DNA, 122 bp, Homo sapiens
acaggctgaaggcgactgcagggtcctgccccttgcccagcctcaggactatggagggggcgagtgacgcgcaaggaacggagcaggggacaccgtgcgggctcaggagctccccagatgcc

SEQ ID NO: 332494 - DNA, 122 bp, Homo sapiens
cgccgaaaccttgggagggtgtgggggacctgcccccctggctcgggtctggggcggcggcgcttggacctggctggtggttggtttgtccactgtgtggtttgttttttgcttccagccaa

SEQ ID NO: 332495 - DNA, 122 bp, Homo sapiens
agcaggcccacagccggggtggttctgacccgctgggctccctccattcagaatgatccccgtaatgatgggattttaggccgcagagaagcagttaagcttcttttttccatccgctttgt

SEQ ID NO: 332496 - DNA, 122 bp, Homo sapiens
taaaatttgggggactcatatgatgggaaatttgagaaaaccgtctggtcacagcctggtcgtcagattctaacctttttgtttccgcctcagatgacaaaaccttgaagatacgggacgtg

SEQ ID NO: 332497 - DNA, 122 bp, Homo sapiens
aggccccagacctagacagccccacaagctgtgccatgccagagaccggagtgggagaggcggctcctggcatctgctctaggtcccagagacggacatgggcaaggcagcccgaggtgggg

SEQ ID NO: 332498 - DNA, 122 bp, Homo sapiens
tgatggcgatggagcaaagatgccactcaggtactacccagatgactccctggccatggccgagagacaatatctgcaccggcctcactttgtggttttgttgttgttgttgtttgtttttt

SEQ ID NO: 332499 - DNA, 122 bp, Homo sapiens
gtggcgctgcaggagtgagagggcacgcagcatctgcttcactgcagtttcgcaagggtacggggtcttttttcggcataggttcgaccaggtccacgtgatgttccgcataaatgtgattg

SEQ ID NO: 332500 - DNA, 122 bp, Homo sapiens
gtgtgtgtgtgtgtttgctgcactggaattttaaaagggcaagagcagagccaccttccgcgacttcactcatcagcctaatgtgtaaggcatggggttttgtggcttgcttttcgtccgtg

SEQ ID NO: 332501 - DNA, 122 bp, Homo sapiens
ccaacacttctggaacaatgaagacctcaaaaatcagcattcctttcaggccacccaagtcgtttgtaatagcttgtaacattcaaaagcactccctttttttcttttcttctttgattaaa

SEQ ID NO: 332502 - DNA, 122 bp, Homo sapiens
gaggctgggtgtgcgctgcggtgcgcgtgtgagtggatcttttaagacctttgtctgagccgggcagaggcacaagtgccacctgacgcttggggcagattcctcgtcctgttcttgcaaag

SEQ ID NO: 332503 - DNA, 122 bp, Homo sapiens
tgggtagacaaagtgagcagttacacattggaaatgactattgtcacaaagctctgcccccgggtttcacgctcgcattcctgacggctgtgaccccgacctttaggagaacgccccgcgcc

SEQ ID NO: 332504 - DNA, 122 bp, Homo sapiens
acttgcactctgtttgatatgcagtgattttttttttaaatcttttgttgccagttaaatcggagtgacagtgacagttcaaccctggctaaaaaatcactgtttgtgagaaactccaccga

SEQ ID NO: 332505 - DNA, 122 bp, Homo sapiens
gcagcttccacctctgtcccttcaacactttttattccctttacaatgggctagttcttccgctgcaaatacaaacatctacatgtgtatccattcatttagatgtgccacaatttgttgaa

SEQ ID NO: 332506 - DNA, 122 bp, Homo sapiens
cctgcctggccagctgcctaggcctcaggacggcagtcctaggggaagcccagagtcccacggcaccggggacagcatcggtgctggggttgaggggcccgacagccccagaccaggctccc

SEQ ID NO: 332507 - DNA, 122 bp, Homo sapiens
tcgtgaaacgaagctcagttgagtgtcacaaagggtcacaaagctaggtattcgacccaccgaattggagtccagggctatgggactccaaagtccacgttctttccactgtaatatttaaa

SEQ ID NO: 332508 - DNA, 122 bp, Homo sapiens
tgagctgccctttccacatcgctggtgagttacttaaacctcctgtgtgtttccccctttcgtatgtcaaaataataacataaaatcagaatgtaaatccagacgcattgttttgctgcgat

SEQ ID NO: 332509 - DNA, 122 bp, Homo sapiens
tcagctgctgctgagacagtgaccctggggacagcccaaataagagagaactttgccacccgcagggtcccagagtagcagaagcttcagggctgatgtgtgcctggtgaatcagcctggcc

SEQ ID NO: 332510 - DNA, 122 bp, Homo sapiens
ctcgcagggccctgggtgtctccaccagctcctcggggtccgctgtcctgctgaggtgcccgcaggaccctcagtgggatgggcaccagcccttttcagcgttccgccgaacaggggcccag

SEQ ID NO: 332511 - DNA, 122 bp, Homo sapiens
ctcccggtggcgcacttcccggcctctccacattctctgtcctgtaggagggttcctgcccgtctgagcggagcccctggaggtgggggaatggccttattctttgaacctcgcatccggcc

SEQ ID NO: 332512 - DNA, 122 bp, Homo sapiens
tccgctcccataacgccgtctgcggggcggggacaggggcggggacaggggcgggccgggcgtctagtttccctacgtcaccagggaagttctcactggacaaaagcgtggtctctggcgcg

SEQ ID NO: 332513 - DNA, 122 bp, Homo sapiens
acctatgagttattctcgacctgacctttttcctgagcaagttctgtggatttaacttagcggtcacactgccaacttcaaccgaactccactgccaccaactcagtccaggccaccagttc

SEQ ID NO: 332514 - DNA, 122 bp, Homo sapiens
aacgtgaccgacactctgctctttgaggaagaaaggcttgctacggagaggtcacacatccgggccctcctgaaggttggttctaggccattccttccaaacacaccacccagcacctccta

SEQ ID NO: 332515 - DNA, 122 bp, Homo sapiens
gcatttggagaagagagacatccagttgaactgctacttatctgcttatggccattctcacgtggtggctttttctgcaaaatcaaaaggtagctacagaaacctagccaaagaccacatct

SEQ ID NO: 332516 - DNA, 122 bp, Homo sapiens
aagaatgtcattataactaaaatagataaggtatgtgaacatgcttcataagctgaaaagcgccacacaaatgccaggttttgttctagtggccttgtctaatgtgtcgagacacaatctat

SEQ ID NO: 332517 - DNA, 122 bp, Homo sapiens
ctcgggcagcacaaaggcggcgcggtgcacgtcggagttgtagtacttcagctgcatctgcgccacctgctgctgtgtcagcggctgcaccggctcctggaagttcgtgctctggggaccgg

SEQ ID NO: 332518 - DNA, 122 bp, Homo sapiens
aatacaattaacacctgtagattcttcacctaaattcacttcttagcattttgccctactcgctctatcctttgtctgtatagagagattcctctctcctgcattatttgaaaggaaattgc

SEQ ID NO: 332519 - DNA, 122 bp, Homo sapiens
tactgccttcctgctgtgggctgatgcggtaagtgccacagcaccctccaccagcccagccgtggaaccaagcctcctgttcccaggtgggcacccgtgggtaacgggtaagccctagcggt

SEQ ID NO: 332520 - DNA, 122 bp, Homo sapiens
ctctggaacccaaccctgtcacttctaccagcagctgggtctgaagacctgggacaggggcgaggaggggagaacattgtgagattcggagacacagggagaaaagaattaatggccttcaa

SEQ ID NO: 332521 - DNA, 122 bp, Homo sapiens
tccacaaccccctgcagggctgggggtagccatggcttccgcggcgggcagtggcagcggcgactccagaggcggcagctctgtggggccctcgtccatgtcctccacctctgccttcacct

SEQ ID NO: 332522 - DNA, 122 bp, Homo sapiens
agcggcggcctccgccgttccctcccgcttttcttctgcacgggggcctggggctggtggcggcttcagactaatctaactccagaaaagagagaagaaaacagtgggatggagtctgcgcg

SEQ ID NO: 332523 - DNA, 122 bp, Homo sapiens
agcctctagtgcgcctgtgcctgcccccatggcctgccgggagttggagttccactcccgcgtacaaaagctagccagaggccaaaagccaaggagggaaaagaacaaaagggtgaaaaagt

SEQ ID NO: 332524 - DNA, 122 bp, Homo sapiens
ttccagtccgctcccggttcctggctccagctaggctcggcagaaataggagcgcgcaggcgcgacgtgcggctcgcagaacggcgagtagcggagcgggacccgctgtgagtgtggcggcc

SEQ ID NO: 332525 - DNA, 122 bp, Homo sapiens
acatacgttgtcatttcgcttgggagtggaattgctaggccctatagtaaagtacacaatcgtgttgcttaacaatgggggatatgttgtgaaaaatgcacccttaggcaaacatcagagag

SEQ ID NO: 332526 - DNA, 122 bp, Homo sapiens
agcaatgaacaacaaataccaattcctcaaagaaaaacccattcttacttttttccttggcgctctccaaagaaactaactgaacaacttatagaactgaggtgggtgagaggaacttagtg

SEQ ID NO: 332527 - DNA, 122 bp, Homo sapiens
agcggaggcctttaggtgtctatggaaagcctgtcgtacagcaaggtggcaataaaggatcgacccttaacagtggtaggaatgcaccttcgatccttctactcctattggctgctcctctg

SEQ ID NO: 332528 - DNA, 122 bp, Homo sapiens
cgagcccctcctgggtggaaactacccggaggcgccgagtggagcctgcttagcccgagccgacgccgccggcagcgccaccccccgcccgccctcctagtccccgggacgccccccaccca

SEQ ID NO: 332529 - DNA, 122 bp, Homo sapiens
ccgccggcgggggcgagcggcgccagggtggctctgggcggcggagtgccagtgtggtggcgccgtgctccactgccgggggcccgggcaggttgggcggagcacggacacccacccatcct

SEQ ID NO: 332530 - DNA, 122 bp, Homo sapiens
tgacatatcttaaatatgcaagccattttctaaaatagcttgaatagctttttcctacttcgttttcctcattttcttaatctatcaaaatattagtacaccaaagaccacagatatacagg

SEQ ID NO: 332531 - DNA, 122 bp, Homo sapiens
agggaagtgggcgatttggggttgaagatgaccgtggctgagagcttcatgccccctgtccggtgggcgatcatctcagccgtctctgcgtcatccgcacccacctcccagccgtccaggtg

SEQ ID NO: 332532 - DNA, 122 bp, Homo sapiens
ccattggcaatgtgggcagagtccggctgtcagctcgcagagcagggcttttcctccttgcgtcctctcccggtcctccagatctgctgtggccgcggttgggggagcgggatctggaagat

SEQ ID NO: 332533 - DNA, 122 bp, Homo sapiens
gaccagagaaagggagaggaaggcaagtcaggcggctgcgaacacctggccaggcagccccgccagctgcctcgctgcgcgatggcatcttgagttcgggccctcctatcggggccatatcc

SEQ ID NO: 332534 - DNA, 122 bp, Homo sapiens
gtgggctaaagtgctctggggccctcaataaacttcaaacatagtgcaggccacaaggaccgcaactactaggtgagtccaagtgcagaactgggcccagagccagtgagctggagaggcat

SEQ ID NO: 332535 - DNA, 122 bp, Homo sapiens
agcttcggagtcccagggccggcagcgttgctccacaggcagctggtattaactccgtgtcggcgtaactgacccactgttggacaaggacagccgcccggctgccccctgggccccccagg

SEQ ID NO: 332536 - DNA, 122 bp, Homo sapiens
ggggtttccagtgagtcactgcagcagctggcagaccagggaccaagagaacgccagccccggttttctccctgctatatttagaatgttgcggaaaatcccatcttctggtgtccccacct

SEQ ID NO: 332537 - DNA, 122 bp, Homo sapiens
taaaagaatggggcacacttcccttcagtcacatcaaagtaccagcgggagatcattgctcggcacggccccgtctcggcttgttcagagcacacctctaatcagaggagatgtggggaacc

SEQ ID NO: 332538 - DNA, 122 bp, Homo sapiens
tacttgttagagcgaaaccccaaccagccccgcctttcacagctggcgtccgtagccgggcggaggcacacgaccaggaaagacagacaccctggttggagaccgtcgctcgagactggcag

SEQ ID NO: 332539 - DNA, 122 bp, Homo sapiens
atctcgtggtgccgttttttaagctcgtcggaaaagcgcagtattcggttgggagtggtccgattttccaggtgccatccgtcacccctttctttgactcggaaagggaactccctgacccc

SEQ ID NO: 332540 - DNA, 122 bp, Homo sapiens
tggagaaataaccagccatggtatctggtctcattagaagctcatgagcagccactcaagcggttctttagttttgccttgctgtcctgtattattctcctagctggttcagtctccagttt

SEQ ID NO: 332541 - DNA, 122 bp, Homo sapiens
ggccaatctgcataacctaccactgccctttgccaccccatcagggatagacaagtaacccgtgcacttatgctctttctaccaggccagagaaagtcccttctgcagtcagatgagaagct

SEQ ID NO: 332542 - DNA, 122 bp, Homo sapiens
attttggaagactccttgatcttgtccatcagggagttaaatgcagaagcctgcagaagccgagctgaagcacagtgccagggagtactggggcctgtgcacccagagcacagcctgaaaga

SEQ ID NO: 332543 - DNA, 122 bp, Homo sapiens
tgccccccaggctcaccacgaagaaggacactgggtagaggacgccctttgtggccgtgccggccttccgggcccttccttgccaggggccgcctggtgaccccgcggaagtgccgggagcc

SEQ ID NO: 332544 - DNA, 122 bp, Homo sapiens
ctggcctctgaggggtgggctcctggcccctcccacactgagcccccggcacacgccacgcgttttggtcccacatctgcagatgtacccatgaaaccactccaaggccacttccactgatc

SEQ ID NO: 332545 - DNA, 122 bp, Homo sapiens
cagaacgctgctgattttccctctccccctttctcccagatgagcagcacactgtgggggcgccttccggatagctctccactggtgctgtgatcgccttccccgctggtctgtgtcccacc

SEQ ID NO: 332546 - DNA, 122 bp, Homo sapiens
cacgctaaattgggggattggaaatctcttgagtctgcgggtgctgagcggagagtgtaacgatgaaccagagacaggctcaaagtagagcagaagggcctgaagttaatcattgtgcagtc

SEQ ID NO: 332547 - DNA, 122 bp, Homo sapiens
cgtggggcgaaacaaggggggcgtgccgaggagacctgctacgataagaggctgaccctccgagccccgcgtctccgccgcctcccggacgccgcgctcccgctcgctcggctccgcttggc

SEQ ID NO: 332548 - DNA, 122 bp, Homo sapiens
ccggcgcggtgtgaggggggaggagatggcagcacccccactttctgcctcaccacttgccgagtcttgccgctgacattttctctggtacattttcgtatgacgccgagcagcatatggca

SEQ ID NO: 332549 - DNA, 122 bp, Homo sapiens
aattccgattcccctttgaaacagccctttcgatgagggaagaagccagctcggtttctgcgtgcgtgtttatgatctacctgtgagcgcggcgctctggaaggtcacccaggctgcggacg

SEQ ID NO: 332550 - DNA, 122 bp, Homo sapiens
actcccgccaaccgcgctttttgtgggcggtcggaaaccacagcctccgttggatatgttcggtgcatgttataaacaaccacttaaaccctccggatctgagcctcccgcagaggaatgca

SEQ ID NO: 332551 - DNA, 122 bp, Homo sapiens
cctttccgagtcaaagaaaagggtgacagacggcacctggaaaatcgggtcactcctacccgaatactgcgcttttccgacgggcttaaaaaacggcgaaccaggagattatatctcgcacc

SEQ ID NO: 332552 - DNA, 122 bp, Homo sapiens
gcagcctggaagactttccaggggtggtgtttgagggctccaattccattaaattctgtgcggtcatttctgtgtttagaaaggccagtggaaagtgactgatgttggtgactcattctcct

SEQ ID NO: 332553 - DNA, 122 bp, Homo sapiens
gctcgcgcggtggcgcgcagggccctgcagccagccgccccgcccgcgcccccggctccgcgcgcccctggccccaggcgccgtctccccactctgcgcgccctcggctgcggggtagcggg

SEQ ID NO: 332554 - DNA, 122 bp, Homo sapiens
acctgccgaggactacccgagggtgtgtggcagtgaccgggttaacctggagtgcatttgcgggacaggcagacaaggaaaaaccagttacagctcccagaatcgggcgatccattgtgggg

SEQ ID NO: 332555 - DNA, 122 bp, Homo sapiens
caggatgtctgcctcttaactctctcaccacactgccacttcctaacgcccacttcttaacgcccactgagcatcgggcttgggggacagacacatcagtacagcagtgagcgtgtccctca

SEQ ID NO: 332556 - DNA, 122 bp, Homo sapiens
ctctgccctgtgaaggcagcgatcccgcctggcagaaccgcagcgagacgggggtgcacacgcagctgaggctgcctctggtcccctcggcccccaacataccactcttcctcatgaccaga

SEQ ID NO: 332557 - DNA, 122 bp, Homo sapiens
actcgtctcagtaatctgagatagcagggtttggcgtccatagcaaccacggcgacaggacgcgctcgagcaagaaccaaaaagcgagaacaggtacaaggccaaactttctacattcacag

SEQ ID NO: 332558 - DNA, 122 bp, Homo sapiens
ttattaaagtaatctcttaagattttcctggaatgtgcttccacagcaactctgcctgttcgacctatcctatgcatgtgtcttttcttccataattaagctgttttcctctgttagctcac

SEQ ID NO: 332559 - DNA, 122 bp, Homo sapiens
taggatggctgtctaatagttaaagtaaaaagacacttttatttctttgttgatatgaatcgacatgctggggattttggcaaacgatgatcctttgaaaatcatccaaaaatatatacttc

SEQ ID NO: 332560 - DNA, 122 bp, Homo sapiens
tttcccctgggcagttctcctcctgcatcggtagccccgtcccgtctgtgcagcccccaccgtggtctttgggtcatctcgaagagctgcgttaaatccctgccctcagcgctgcacacacg

SEQ ID NO: 332561 - DNA, 122 bp, Homo sapiens
ctgggaggctttgcgcggcaggcctggctggtgggagggtttggtgccagaggcatccgtcgggtgaggagcaggacctcccacggtgaacatggtggccacgtccccgcagagcccagcct

SEQ ID NO: 332562 - DNA, 122 bp, Homo sapiens
gacactggcaccatgcttgtacggcctgcagaaccacaagccaaataaacctgttttcttcgataaattacccagcacagcctcaggtattcctttatatccatcacaaatggactgagata

SEQ ID NO: 332563 - DNA, 122 bp, Homo sapiens
ccatacggaacggaatgggaccgtggccccgaagcaacactccctcccagcaccatattacgcaaacaaaatgattcaggggaagaattcctccattaaaaagaatttgaggtgtccctgat

SEQ ID NO: 332564 - DNA, 122 bp, Homo sapiens
accctccttgctcccctgcaggcctgggaaccgccgagtaattcagggctgctaggctagcgctgcagtgcttgggtctccgaacccagccaatggaaacgaaggctttcccaaaaaaagca

SEQ ID NO: 332565 - DNA, 122 bp, Homo sapiens
cttgaactcctgacctcgtgatctgcccacctcggcctcccaaagtgctgagattacaggcgtgagccactgcgcccggccgacacggtcattcctataggacactgtgattagccactcct

SEQ ID NO: 332566 - DNA, 122 bp, Homo sapiens
cccctggcaacagtgacccagacctgaccttcaactctaactgtgcacagcttcctagcccggcccccaagcctgaagcctggtccctccagacactgcagaaagctggggctgactgtaat

SEQ ID NO: 332567 - DNA, 122 bp, Homo sapiens
acaaaaattataggaaaaatgcaaaacttcttggaaggccaggagtttttgcaaaagcttcgaaagaaaatttggctgaaggcagctgaattctctcagggtagacaacaagaaagtgtaag

SEQ ID NO: 332568 - DNA, 122 bp, Homo sapiens
agcaccagccgtcaggccctcgctgcccgcctgcggggtgtggagtggggagaacagccccgcctgaatccagtccgactacccgcccctactgatttgcctgggacgccgccggcccacat

SEQ ID NO: 332569 - DNA, 122 bp, Homo sapiens
gcagaggaacctcagcttaaatagtgtggagcggccactggtttccgcggctcgtagtcgcgcccgcgaggaaacgccagggaggcttcctgccccgcccagcggtggcccagggcacaggg

SEQ ID NO: 332570 - DNA, 122 bp, Homo sapiens
caagcccaagtgttcagggcgctcagctgtgggtggcccgtgtacaggaatgggatcgcacggtggtccagatcgtctgtgcacccatccttgccctgcctccctccttctagggggttggc

SEQ ID NO: 332571 - DNA, 122 bp, Homo sapiens
gcaaccccgtcccctggaggccctgaacggaggcttcaatctttctcgtattcttcgtaccgccctgcctgcctggcacaagtccatcgtatctttccggcagcttcgggaggaggtgctag

SEQ ID NO: 332572 - DNA, 122 bp, Homo sapiens
ggacggtgcctaagtggacctcagacatggctcagccataggacctgccacacaagcagccgtggacacaacgcccactaccacctcccacatggaaatgtatcctcaaaccgtttaatcaa

SEQ ID NO: 332573 - DNA, 122 bp, Homo sapiens
cagcggcccggagcggtgggggccgggctggcgggcacgagcgagggcagggcagggggccggccgaggccacttacggctttaaatatggatcgcaggctcgcgctcgcggcacagcctcc

SEQ ID NO: 332574 - DNA, 122 bp, Homo sapiens
ttcaaattccagaatataccacaggcacaaaacccttgtggtttacagaattctgaatctcgtagtttgaataatgggtgcaggccaaagcaactgtgcttttttgccatgtctgttttttt

SEQ ID NO: 332575 - DNA, 122 bp, Homo sapiens
gatccctcgtggttcgagaacagaatggcgttaaatcacactgccctgcctcaggacgagcgcctgccccattaccttcgagatggggatccttttgcttccaaactttcttgggaagcgga

SEQ ID NO: 332576 - DNA, 122 bp, Homo sapiens
gagcttctcctggacggctgggatattggttagcaggtcagtccactggctatcaatgcgcgacagctcagagcgcagcgtggctgtgtccaccttttttagtcgaaggagctgatttccag

SEQ ID NO: 332577 - DNA, 122 bp, Homo sapiens
attgaatacgcaggcagagagtggagaagagctgactccagagcctcatgacaaagtctgcggggttgcagaggctgtaatgataccctaagccattctacctgaggctgtacttgcagaaa

SEQ ID NO: 332578 - DNA, 122 bp, Homo sapiens
atcaaagtcggagaacgtgcctctgtttgcaggagaggtgggcaggcagcgagatccccgcgcaccgctcgctcgggctgcgggcaggcagcaatcagctaattgcctaatcggagtgggga

SEQ ID NO: 332579 - DNA, 122 bp, Homo sapiens
ggcggggccgactgtaggcagagcagggctatgggctgactgtgggcgtggtgagggtgccgtagagcatgctaatgaccagggcgtggtcatagcagggtagggtcttgggtgctcctggg

SEQ ID NO: 332580 - DNA, 122 bp, Homo sapiens
gcattaccacttatatagtaaaatatctttaagacaaaaataaaagttatttaaagaatacgctggccctgaaacatgagctgtgccttaaactacatatcctacctccatgagtgaatgaa

SEQ ID NO: 332581 - DNA, 122 bp, Homo sapiens
ctttgtgggccaggctggagtgcagaggcacaaatatggcttactggaggctcaacctctcggactcaagcgatcctctcaccccagccccctaagtacctgggactacaggtgtacaccac

SEQ ID NO: 332582 - DNA, 122 bp, Homo sapiens
caagttttagccacattagcttcttctataggaaactacttagaggggcatgtatcttttcggtattggaaaaagatgcgtggaaactttaattgctggtctcttctactcattgtgaccat

SEQ ID NO: 332583 - DNA, 122 bp, Homo sapiens
ctgcgcgttgagtcgtttcctgccggatgacccgacccttttttgcagtctcaggacgggcgctttggagccggccccaggcagcgtgtgtcggtcgcctagtctggagaactagtcctcga

SEQ ID NO: 332584 - DNA, 122 bp, Homo sapiens
tatcaactgtcaggtgtggcctgacaacatcccgatgtcccgtcgtagcaggattgcccccgctttggaggggaggaaaccaaggctcagagaggaaatgggcgctcctggtgtcccccgct

SEQ ID NO: 332585 - DNA, 122 bp, Homo sapiens
ctcctctctaggtctggtacatattcgaatgatcgcttacatgagaaaggtatttcttctcgaaagaatacagagagagcttttagagggatggggcaggcatctcaataccatttcctatt

SEQ ID NO: 332586 - DNA, 122 bp, Homo sapiens
acacatttattttcacatgctttatggttagttttcattcagctatcaatcaatcaattacgctgtgacatgatgtaatttcctaatcatactaatattcatgcttttatcactacccaacc

SEQ ID NO: 332587 - DNA, 122 bp, Homo sapiens
cacgtggcctccacgatgcatgaaacaccagcggcagccctgccagaggcacctggaccccgactgaagagaccagccttatgtgtgtctgatccggacctcccgtcagggccccacgctga

SEQ ID NO: 332588 - DNA, 122 bp, Homo sapiens
taaaaccacactaactgtagaactccacctcctcttcctgtctttctgctttattctctccgccgcaaacttagaagtgagacgtgcagtccccaaggagctgcagaaaagggctcttccgg

SEQ ID NO: 332589 - DNA, 122 bp, Homo sapiens
agggcgcgctgcagaagcacctcgcgctatacaggatccggcggaaggtcacggtggagccgcacccggagctgcgagtgtgggcggtgttgcccagttcccctgaggcctgcggggctgca

SEQ ID NO: 332590 - DNA, 122 bp, Homo sapiens
cctcaagctatctctccgctgcgggaaggcttcggactgtctgcctgctgaacttctgggcgtgaatcccagcccccgcgctgcgcaagtttgcagcgtccttgctctcaccggcgcctcgg

SEQ ID NO: 332591 - DNA, 122 bp, Homo sapiens
gtagatctccgccctctctcgggtggggctccgaggtctagctggtctgggggtcagtcccggcctctgtctcccaccgcgcccctcgctcccctggacaccgcctggtgtgtggggctcag

SEQ ID NO: 332592 - DNA, 122 bp, Homo sapiens
ctctcacatacaggaattagggcctagattgtaagctcttgcagcagtcacatttgttcccgggctttggtggttatttctaaatttttgaggtgctttgctatttcttgtgtgacctgata

SEQ ID NO: 332593 - DNA, 122 bp, Homo sapiens
ttccctaggtccaacggggtggacccaaggcccaggggcgtccccggaagtgacgtaggacgcgccctccattttgtggagcgccagagctgctaagtgcgtcagttgtggagtggcgtaga

SEQ ID NO: 332594 - DNA, 122 bp, Homo sapiens
agcgccactccaccgtcgagatcacagcttcaaacctcaactccttggagccttcgaaggcgcagttctgactactgagtatttcctggaaagaaaaagaagcccaaagcggtgaaatgatg

SEQ ID NO: 332595 - DNA, 122 bp, Homo sapiens
ccccgccaggaatggccgcctaaagaaacaggcatctcaacgctttattgctaagtgtgacggttagtggggagttcgactctgcagccaaaggaggtcaggaatcgttcaataacaatcgg

SEQ ID NO: 332596 - DNA, 122 bp, Homo sapiens
ttagagctcagctttgaagtttcacttcacgagcttggctcagtgaggtatgttactccccggtgaaaaagaaaatgaagagaatgttttatgttgaaagtgcttggtgacgaaaaggcagc

SEQ ID NO: 332597 - DNA, 122 bp, Homo sapiens
cctaccccccccatagggtcttccaggattttgttcccgggatcttgctgggataggtgccggcttcaaaagcgtggggcgctgaacctatggatcccccccgccttgcagaagccgtggaa

SEQ ID NO: 332598 - DNA, 122 bp, Homo sapiens
gccgaaggctggcctaaagacgggctccgtgtctggtggctgagtcggtgatcccggccccgctcaccgatggacacgcggcggtggaaccccgtgggccccctcgttgcgtggccgcaccc

SEQ ID NO: 332599 - DNA, 122 bp, Homo sapiens
atggcccggtttatggggagccctaatcttagttttttcgtttctagtccacagtgtctacgtaatgcctagcacatcataggcgcctaggagacacctgcgcatgaatgaacagtgtcttc

SEQ ID NO: 332600 - DNA, 122 bp, Homo sapiens
ccacgcatctgttggcggatgtgttagttatttctggagccgggtgtgttgtgctactcacgggctgcactaggagctggggatatcactgagtaagccacagcctcgggcacccaggagct

SEQ ID NO: 332601 - DNA, 122 bp, Homo sapiens
aaatagaggccctattccagggctgtttctcgcagactagccacagaaaatgcagcccagcgccacttcctttcagtagcaacacgtttccaacacgtttgttaagcgggaacggaagtgag

SEQ ID NO: 332602 - DNA, 122 bp, Homo sapiens
atcactgccaggagaatgtcctgtttattctagccaaaggcaggcaacagggagctggcccgtgaaccctctcttaaagcagttactttagaaagttgcaatgataaatcctttctctgtcc

SEQ ID NO: 332603 - DNA, 122 bp, Homo sapiens
gaatgaaagaacagccaacatgtattaaggtatggcttagaaactgtgctgagtcctctgcgtgcattttttcatgtaatcctcaatgcaatgcgaagttagaaatattacaatacccattt

SEQ ID NO: 332604 - DNA, 122 bp, Homo sapiens
ggggcggcagcgccgctgagggacagagtttgggcgggccgcctgcatgcctgtgccctgcgcccggccggcccggctgaggaggggccctcccttgtgtccggcccacggcccaggcttgg

SEQ ID NO: 332605 - DNA, 122 bp, Homo sapiens
gcccccaccccccgaacccctccccgtgcctgctcgtcctccctccagctcgcctgtctccgcctccttggagtcacatggcctgcccaaccccttacatactgggcccaagcctggcacca

SEQ ID NO: 332606 - DNA, 122 bp, Homo sapiens
gaatgatactattttgttggatcctctttttctgtgggtttttatcttttatttttcccccgtaaggaaactcaaataaagggaaatttgttctaagacttcagagaggcctcaaagaatgc

SEQ ID NO: 332607 - DNA, 122 bp, Homo sapiens
gacaccacaggccttcccctcttcgtgggcagcgtgaggaaccccaaccccagtgcaccgcgggagctcaaggaacagcaggattccccgggcaacaaggacttcctccagagcctgaaagg

SEQ ID NO: 332608 - DNA, 122 bp, Homo sapiens
aaatccccagacaaggcctttagcccttgtcttcaagtggccttccttgaaccagccacccgccctacctgtctctcctgggccctctgagggatcttcctccggcctctctggtggcgctg

SEQ ID NO: 332609 - DNA, 122 bp, Homo sapiens
tctcacgagatccgatgaggcggttcccccgactgttcctgtgatagtgaacgggtctcacgagatccgacgaggcggttcccctgactgttcctgtggtagtgaacgggtctcacgagatc

SEQ ID NO: 332610 - DNA, 122 bp, Homo sapiens
gggggcgccttggctgggcctggcgcgctccagccgggttaacgccgggccttcggagcgcgcggccagccctgggcactggtttcgttgggttgaatttagggaaaactaggtcatatgta

SEQ ID NO: 332611 - DNA, 122 bp, Homo sapiens
aggttgtgcaggaccagcgttccctgtgcaggcgccactgcgtttcctgcagattccgaccggcactgcaacggattccctgccggagctgaggtcaccaacaggccgtcgccatggagacc

SEQ ID NO: 332612 - DNA, 122 bp, Homo sapiens
aaacctcacttctgtcactctttctcctcgttttcccttatctcttatgctctggtgatacgaacctacttgcaattcccttaaagtcctgttctctcaagtctctggacttttgttgggat

SEQ ID NO: 332613 - DNA, 122 bp, Homo sapiens
agcaaccatttctcaattgttttctacttgattagcttgagtggctgacccagttgctgacgttcggagtagtattgcttgccatctgacaacacacaggaacaaactgttgcgtattccag

SEQ ID NO: 332614 - DNA, 122 bp, Homo sapiens
ccacccgggaccgtgcagtcggcagcgctcatggccacccaccaaccgctgtcgctgagccggacgactgccaccatcgcgcccattcttagcgtgccactctccggacagtttctgcagcc

SEQ ID NO: 332615 - DNA, 122 bp, Homo sapiens
cgggacaggggtccatgaagccacagcactgatgtccagttcgctgctggacagacccctcgtaggctctcacacctgctttgccccgacaccgtggcctcatgcggcaaacatgtcactgg

SEQ ID NO: 332616 - DNA, 122 bp, Homo sapiens
cagaaactgagcagcagcctggggtcaaagcgtcccctcatgctcctccccggccagcctcgggcttctctgctcagcttctcagggcacctgcagccgatgcggcccctctagccaaccat

SEQ ID NO: 332617 - DNA, 122 bp, Homo sapiens
attttacccaagtcccctccctttcaccccaccctaattttccccattctctcggtgacccgtaactgatcaaaagtccccccgcaccgcgctacgctctcgcgattcctcttagatcccaa

SEQ ID NO: 332618 - DNA, 122 bp, Homo sapiens
ctctaacccagtgcccacaaccaactaccgcccctcttccatgtgacttccttccactaacgaactacacttcccagcaggcctcgcgtaggaatccggccttcctagtctcccgagatgga

SEQ ID NO: 332619 - DNA, 122 bp, Homo sapiens
ctgcacgcttgctggctggtttgtttactgtcgtcagcatggagggccggggtcgtgtctcgtgccggctgccatcttcctgcacctgggagggtgctaggatgtcaagcctaggaaatggg

SEQ ID NO: 332620 - DNA, 122 bp, Homo sapiens
gagattgagaaaccctcctgtaagtgaaattttgccatgtttagggaaatgtggttaagtcgggatgttagggagaactttggaaagatgaatctaaagtgagataatgaagggccatattg

SEQ ID NO: 332621 - DNA, 122 bp, Homo sapiens
gagagtgaatggccgcgtcagccgcaaagaggcccagacagatggacgcaggcaggaagacggacaggagagagagagagacaacgtgcgcccgaggctgaagagctgggtcaagaagagat

SEQ ID NO: 332622 - DNA, 122 bp, Homo sapiens
ggagaaggttggggcccggggcgcgctgccaggcaggaacagatgcatccggaggctgcccggcccgagtgttagctcctcaaagagcagaggatacgaccatttaaatggaagacccaagg

SEQ ID NO: 332623 - DNA, 122 bp, Homo sapiens
gtccctgtaaatgctcctagaggtcacctgctgggggtgggcgtggagagtgaggctgagcgctcctccagggaggaggaaagagagtggcaagcagacagggactggctagggaagggcca

SEQ ID NO: 332624 - DNA, 122 bp, Homo sapiens
ctcaccctctgtttctcatgccttcctggcacagttgtcttccagctgttctctccaccccggccctcccgcaggctgccaccagatgcatctccacacactgccgttctgatcggatttcc

SEQ ID NO: 332625 - DNA, 122 bp, Homo sapiens
tgggggctccctagcagccgccggagcgttgtccaacacgtgagactcatgtgatgaagccgggggagggcgggcaggtcgctccttccctccccggcagtggccagacgtgcctggagtca

SEQ ID NO: 332626 - DNA, 122 bp, Homo sapiens
ctggggcctggtggggtgaattgtataacctttcttgtacctcaggggctgaatgcttcccggcctgcaacccccaaaatggattctgcgaggatgacaatgtttgcaggtaatagagtggc

SEQ ID NO: 332627 - DNA, 122 bp, Homo sapiens
tcagagccaaaggaggagatagttacttttgcttttgcagccttttccgggcggcttttccgcgcaggcgcccctggacctcccaggttgagaggtggagcgggccaaacctcagctgcctt

SEQ ID NO: 332628 - DNA, 122 bp, Homo sapiens
tttactcagtccctactcaagatgaagtcactctggtttgaacatctctgataatagaaccgctcagcaccccagctccattttccaaatcatccaatcaagccccagatcctaacacctcc

SEQ ID NO: 332629 - DNA, 122 bp, Homo sapiens
agcaaccatagcccacctgccccgcctcctcctcctcctcgctgaccctcgattggttgccgccaaaagctcccaccctcaaggtctcacaaaaatccaatgggagtagagagctgggataa

SEQ ID NO: 332630 - DNA, 122 bp, Homo sapiens
atgggaggttggcaggtgatgtgtaaggtccgacgcctcttaagtggaggagccagactacgaacagtcttgtggccatgcgcatctcaagtgaactacactggcaggtaaaatgccttggt

SEQ ID NO: 332631 - DNA, 122 bp, Homo sapiens
cttacagataaagagacagagtttaagaggtttagccacgctacggggctgctgggagcccggcagtctggccacaggaggtcggtttcacggaagggcaggatgtggcggcatctcctgaa

SEQ ID NO: 332632 - DNA, 122 bp, Homo sapiens
ctccacattcctgagagaactgcatggttatgaactcttactcgtgtgcactaaagtgcacgtgctgtgtgtgtactgaccctctgccctgtgggagccacgtgctgtggggagaacagacc

SEQ ID NO: 332633 - DNA, 122 bp, Homo sapiens
ctgcagcctatcagcgccgccggcttccgcgcggcattgtggggcttgtagttcttgtgccgcagggctttaaaggaaacgcccacgtttcttccgaccagggatttccgacccgagaacct

SEQ ID NO: 332634 - DNA, 122 bp, Homo sapiens
gtagctaggattacaggcgtccgccaccacacagcaatagattttatattttacatgctacgagggccattttacaaaccatgcctttgtgcaaattaggaaaaggcagacacagccccata

SEQ ID NO: 332635 - DNA, 122 bp, Homo sapiens
ccgctggcagcagaggttagaggcagagagcgcgcggatgctccgcgggcgaggctggttcgagagtgggaggagtgcagggcgccgccagggcggcagtgcgcgcgggccgaacagtcctg

SEQ ID NO: 332636 - DNA, 122 bp, Homo sapiens
ctttccagctcagcggtgtgtgaggtgtcgcggccccgccggcgattggctgttgagaggcgagtacgcggcggccgttggtcgctggcctcacggagcaaggcccccggcgggcggggagg

SEQ ID NO: 332637 - DNA, 122 bp, Homo sapiens
tgtagtgagcgctcagtagggcgggaaagctgctgccgctactgcggccttctgagaagacgcccattctctgatgtcaggactgcatcgccgagtcctgattgcaaatagcgaaatatata

SEQ ID NO: 332638 - DNA, 122 bp, Homo sapiens
tttccagctgcggcaacgtggcagccggtgctggacgaccgttagcattagtgtgaacaacgtccctgctttcaggagaaagttttaaaaaacagctgtgctgcctggtaattgacttctcc

SEQ ID NO: 332639 - DNA, 122 bp, Homo sapiens
cctctccaccatctacccgggcactttccgccacttgcaagccctggaggagctggacctcggtgacaaccggcacctgcgctcgctggagcccgacaccttccagggcctggagcggctgc

SEQ ID NO: 332640 - DNA, 122 bp, Homo sapiens
caaataaaatcttctctggaagatacattgctcctctttgagatggcagggaaaagggaccggaagttggggtaggaggctttattcttttggcagatcctctcagtcattatagatattgc

SEQ ID NO: 332641 - DNA, 122 bp, Homo sapiens
atatgagatgggaagaagcatcctttctattcttcctacccacagcttgtttacagagagcggtgtctggaagcttggctgtgcatcagggttatttccactcagtgaatggggaagcttgt

SEQ ID NO: 332642 - DNA, 122 bp, Homo sapiens
gcacttgttcgctccctcctgggctctggcagcgctgcatccccggggttgcttcgggttcgggcccaatagcagagtcagagccgagacgcatgtcccctgcaccggccaagggtgccgct

SEQ ID NO: 332643 - DNA, 122 bp, Homo sapiens
attttcgcgggaagccggatcctctccgttcccttggagtgagcaagcgggacagttctgcggaaagtttccgcccccaatcccccagccctgcgcccggactgaagcggcggcccccacct

SEQ ID NO: 332644 - DNA, 122 bp, Homo sapiens
ccctcagtccgagatcacgcgggcgcctcggctcttgtccacgccctggaccgcggggaccgcgagacccttgccacactgctggacgcctgcaaggccaagggtacggaggtcatcatcat

SEQ ID NO: 332645 - DNA, 122 bp, Homo sapiens
gggcgccatggacagagctgtaaagatctttcccgctttctatgaagagggcgggcagagcgtcagcccctagaaaactacatttcccagaatgccatacgcaggcgggagagggcatgaac

SEQ ID NO: 332646 - DNA, 122 bp, Homo sapiens
tgtcgtggtagcagctgtgtgagtggccctcagcgcccgagtcctggcgcacacgtaccacgcccaccctccagctctgcagccccccaagggccacctcccaggcgtgcgagccctgtgag

SEQ ID NO: 332647 - DNA, 122 bp, Homo sapiens
gccgagaacccctgctgccccgagacggtgtgcggtaagacgctgcagagcagaggtgcccggcatagggtgaggggggacagagccggtgcccaccaggggcctgtgggttgggcacagga

SEQ ID NO: 332648 - DNA, 122 bp, Homo sapiens
ggaatcctgcaggctgcttatgtcaaatagtttatcatcaagcactccatctttgctttgcgttacgagtgccaagatggcagctctatgatctgtctgcccttagcccatctgcttcattt

SEQ ID NO: 332649 - DNA, 122 bp, Homo sapiens
ggcgcccagtgaatcagccaaggatgcagtcaaccagctctttggccctggggccagcttcgaggcacagagacttctttccctaacattatcttgtccagaggtggctgaggacagggcta

SEQ ID NO: 332650 - DNA, 122 bp, Homo sapiens
aggacctgacctccaaaccgaagcttatactgccggctcacttcttgttaattgccgatacgcagctgaagtagctccctgacctctttggaggacggcgtcatttcagtaccaagtatcac

SEQ ID NO: 332651 - DNA, 122 bp, Homo sapiens
cccagaatgtggcccatctggggaatgttgcataccctcttgaaaagaacatcaattcttcggttgttgggtattctgtaagtatcactttgatcaaatgtttgatagtattgttcaagtct

SEQ ID NO: 332652 - DNA, 122 bp, Homo sapiens
cgctgcatgaatctagcgggtctgggcgatgctctctccggctctacccagtagcaactgcggtaaggacaggacgcagcgaaattgtaccagtgagtcagaggccaaaggaggaatcctgg

SEQ ID NO: 332653 - DNA, 122 bp, Homo sapiens
ggattccttattgcctgtcttctggataaaagccagtttatctggggtgggatgatatctcgtaggagttttgatttgccttcatctgatgacgaatgatgttgagcaccttttgatatacc

SEQ ID NO: 332654 - DNA, 122 bp, Homo sapiens
tccaaagcaccactgagtacttctagtgtgagtctaaccaatattcagtcagaaacctgccggtcacgtggagggggagaggtttgtgctccgtccctgtgtgctgtctctccctccatgct

SEQ ID NO: 332655 - DNA, 122 bp, Homo sapiens
actgggagttgtagtcgccgcgtcgccggtgcggccgccattgtccggcgttcggcgagtcgggtggtccctttggctggagtgcctctctggtctggggatcacctcaggcgctgtccttc

SEQ ID NO: 332656 - DNA, 122 bp, Homo sapiens
aactctaaagcctggaagagtgatgatgccttaagaaacatgtccctgcgtggtggctcacgcctttaatcccagcactttgggaggctgaggtgggtggatcacttgaggttgggagttcg

SEQ ID NO: 332657 - DNA, 122 bp, Homo sapiens
gcctcggttcccgcggccgcgactcccgccgaccggcccgcccctgtcccggcctccctgcgcgccctgccccccacaaccctttgccgtcgctcctcggccggtcccctctgcggcccctc

SEQ ID NO: 332658 - DNA, 122 bp, Homo sapiens
ggccattcactgtcgctccatgtttcccagcacagcccttctccctctcctctctccacccgatccactaaagagggagcccgaagtgcccagactggcacttaaagagtgaagaaaggcag

SEQ ID NO: 332659 - DNA, 122 bp, Homo sapiens
cctggcgctggcgttcggcggcgcgcccgcgccacctaggggcggggccaaggggaggggcgtatgcaaatatgtttatgttaaaattcgggttttgctttccccggatcaaggaaaaagtg

SEQ ID NO: 332660 - DNA, 122 bp, Homo sapiens
ttcttccctcacttggctcctcatgagccctaagaaacacacactgctcccaggattccacgtcagtatctaccctgtatacccatcaatagatcagacaatacctgctcaaggcagaaagg

SEQ ID NO: 332661 - DNA, 122 bp, Homo sapiens
tcaatgctgcattctttaggtgtcgggtcccacacagccaaggcttggggactctgtccacgcatgcctttttgagaggcaaacgtaacctttttggtctctgggtgactaacctctgtgat

SEQ ID NO: 332662 - DNA, 122 bp, Homo sapiens
gagaaaggaattgaaatcagggacagggttgagggctatgggggttaggggaatgagggtcgggtaagagggcaagtgtaaatgatcttgtccgtttttgagttaatgtgtaatgagacggg

SEQ ID NO: 332663 - DNA, 122 bp, Homo sapiens
gttctccaggtcatcagccggctgccagggaaagtttcctccccttttcaggcatgaacacggtgggctccgagggaacctgcatgggttgtgggagggggtgggggcttatccaaaacaca

SEQ ID NO: 332664 - DNA, 122 bp, Homo sapiens
cccgtgccaccccagccccttctgctccagcagctgcctcagcaactagcccgagccccgcgcccagttccgggaatggagccagcacagcagccagcccgacccagcccatccagctgagc

SEQ ID NO: 332665 - DNA, 122 bp, Homo sapiens
gtgattggccccaacccattgttggcttccagaggattccagatgtcccatggagtaggacggcggggaaaaccacctctacgagagagaggagcttttacctccagccatttccagtcctt

SEQ ID NO: 332666 - DNA, 122 bp, Homo sapiens
gtgtgccattagctacctgcttgcagttaccaggtagctacttgttccctgtccatgaagcggtaagtgcagaaagggagaataagcatttagaaattttatagcagttggcagaggagctt

SEQ ID NO: 332667 - DNA, 122 bp, Homo sapiens
ccctggggcccctggctcgcgtcacacccacatcgggttgggaaagtttcctctttccgccgtttggaattcagtgagattcccagcccagaggacttgataaattgaagcagtttcctagg

SEQ ID NO: 332668 - DNA, 122 bp, Homo sapiens
attcaagggcagggcctgctgtcccactgccatgctcatctgcatatgtatggtttcattcgtctcattttgaagaaagacgccacagagctgagataccaggtttgggttctgtgcctcct

SEQ ID NO: 332669 - DNA, 122 bp, Homo sapiens
gcgggcaaacccctcccggggcgggggaggtgtgagcttcacgaaggaggttgacaccaacgtggccaccggcgcccctccacgccgccaacgagtccccgggcgtgcgtgcccttggaggg

SEQ ID NO: 332670 - DNA, 122 bp, Homo sapiens
tcaaggcgtggtcaaaaccatttatacctcatttaacaaaattagtaagagtgctggctgcgtggagcatctatgagcaggacacccatggtccccccgtcatggagctcccattttatgga

SEQ ID NO: 332671 - DNA, 122 bp, Homo sapiens
tccctgcagggaggcacattaagtcagtctgtgatctgctgccaacatcctgactggagccgtttctacgcctaactaatcatgacgtttgtgaattgtgaagcttgttgcaattcacaatt

SEQ ID NO: 332672 - DNA, 122 bp, Homo sapiens
aagccacagctagcttggagacctcagtccctggaaggaggaaacagtgaggtttcctttcgcagtcaaagcacaatcctaaccttagaagaaaaacatgtgatctccagaagaagaggaga

SEQ ID NO: 332673 - DNA, 122 bp, Homo sapiens
tcatccctaagatcaagtttagttcccactaggatgatgggagtgttgggacagtggtgccgcacctcaggataccactttgcacggacattttcaaatgatgcaggactcacaagggaaaa

SEQ ID NO: 332674 - DNA, 122 bp, Homo sapiens
cttcgaccccgccggggcccgggtctggggaggaaccttcagatgcggcttccgcgcagccgtgtctgtaagattaagggattgggaggaagcgttacacttctgcagaaaaaggtagcaat

SEQ ID NO: 332675 - DNA, 122 bp, Homo sapiens
gccgctgccgccgccgccgccgccggtcccggagccagagaagaaacagcaaccggcgcgcgccaaaagtatcgtcacttcctgtattggcgcgtaatgatgatataatagccgacctccgg

SEQ ID NO: 332676 - DNA, 122 bp, Homo sapiens
agggctacgggaggtgatttgcagcccaggcagtggcagtactagtcctctcctacccaccgctccaacttctccttctagccccttgactcccctgggtgggcccattttcttacaggcag

SEQ ID NO: 332677 - DNA, 122 bp, Homo sapiens
caattgttgagtgcttactgtgtgcaggaaattgtgcttagtgattgatgtccatgatctcgcttcatcttcacaacgatccatgcagtcagcagcgttccccacgaggggcagcagcagtg

SEQ ID NO: 332678 - DNA, 122 bp, Homo sapiens
tccggccccagaatgccgcgcggctgcacacttccgtcgcccaggccccgccccgttccccgccccgccgcgccatgcccagccgagtagctttacggttctcccaccgcagcgcccgtggc

SEQ ID NO: 332679 - DNA, 122 bp, Homo sapiens
tgtctgcagatctgaggatccttgagctcttcatctgctgctcacacttttacttctccccgcctttctgattctttgcctaatttgggagtgggaagaaaatccagcctagggctcttctc

SEQ ID NO: 332680 - DNA, 122 bp, Homo sapiens
ggtcgacttcgtgacgtcaaagagcctgggccaatcagagcacaccggactgcgttttcccgaacgcccgcagcagggtcagaagggaggtggccggtctccgtcgtgacctctgacggttt

SEQ ID NO: 332681 - DNA, 122 bp, Homo sapiens
tttcggttcaggggcctgcggagcgggttggggcgggggaaacgatagttctgcagtctgcgcctttccacgccctccagccccgggggagataaggtcatgggagagtgggtggggacaca

SEQ ID NO: 332682 - DNA, 122 bp, Homo sapiens
ggatctgcattcattcattccacaagtatttactgagtgctcactctgtgtctggccctgcggtaagctgtggactaaccacaataagcaaatagatcaaatctctgctttccagaggccca

SEQ ID NO: 332683 - DNA, 122 bp, Homo sapiens
tatgaatagaaatgttcaggaagaagttgcctgtaaggttttgagttcagaaaggtgatacgggctggggaaatggatgtagcagtgatcactataaaactggtcactgagcttggaagaga

SEQ ID NO: 332684 - DNA, 122 bp, Homo sapiens
atttccttgagcacaaaaaaaaaaatgctaaaagtttaagtattaaacccatgtggttttcgaaacaaagaaagtcaagaaggaacaaagaaaagttttacgggccacatttaactctcctg

SEQ ID NO: 332685 - DNA, 122 bp, Homo sapiens
ttctccagccgttgtggggcccctggttagcagccaggggtagcggcgcccacagccttacggtgcccctgcctgtccttggagatgttgtgatgtgggcccccgatgacatgccagggagg

SEQ ID NO: 332686 - DNA, 122 bp, Homo sapiens
gtgacagcagaggcaggggaggctcggggcccagctgtcaggcgcaagggcagaggtcagcgcggggtctccccggagcaggagtgagcggcgagtgacaggtgcagccgcgccatccccaa

SEQ ID NO: 332687 - DNA, 122 bp, Homo sapiens
tgtccgcctcgctgtataggctcatcttgtccaggtccagatagtcatagtcggagaccccggagcccgcggcccgatggctctggggggattcagactctggggtctgcaccaggatgttg

SEQ ID NO: 332688 - DNA, 122 bp, Homo sapiens
gcagcgcttgttagaatgcagattcccggggttcgactggaatgagaccccggggagcagcgtttgcagcgggcccgccaggtgacctgcacctgggcaccgccatcggcttcgcaggggcc

SEQ ID NO: 332689 - DNA, 122 bp, Homo sapiens
ggagctgggcagcaactgagtccaaagaggttgttgggaggcagcagtcgggtctggagacgcagctgggaggaacagctgggcccggagaggctgaatggagtaaattcagggcctggaga

SEQ ID NO: 332690 - DNA, 122 bp, Homo sapiens
ttcccaaacccgcctctcccgcctcggagaccccctcctcctccctgccaccaaaggccacgcagcccccatctagccagtcctcacggaccctggaccaagacgcgcctcctggaggccga

SEQ ID NO: 332691 - DNA, 122 bp, Homo sapiens
gagatcggagttttctaaagtcagcggggtttgtctggggaccccgaatttacatacagacgatctccgcaaatagtgcaggggccgctttgaactcttaggaaaagatattccaaaaagtg

SEQ ID NO: 332692 - DNA, 122 bp, Homo sapiens
gtggggcgacggggagggggcggggcctgaactactgggaggacgtgcctgcgtgcaacgcgctggggggcggggcgctgcgagggggcggatctgtgcccatcgaagcggcccgaggcagc

SEQ ID NO: 332693 - DNA, 122 bp, Homo sapiens
tgcccggggtcagagaagtaaaaacccattatttatttatttttaagttacttccaacctcgctgcctcgagcttctgaatcgcctgggcaacctggaagccgcccatctaagggggtgagg

SEQ ID NO: 332694 - DNA, 122 bp, Homo sapiens
tgaccgtgagtgatctgcccacctcggcctcccgaggtgccgggattgcagacggagtctcgctcactcagtgctcaatcttgcccaggctggagtgcggtggcatgatctcagctcgctac

SEQ ID NO: 332695 - DNA, 122 bp, Homo sapiens
ctgtccccccgtggtctcctggcagtcacccaggtgaggccaagagggcctggtatctcccggcccactggattcacagccctcccctcccctcctccccccctccccactgctgcctgggt

SEQ ID NO: 332696 - DNA, 122 bp, Homo sapiens
gaggaagagtggagaacagggtccactcagatgacgagcagcctgcaggtgcccctgccccgaccacacacacatgcacacacaccatgcacacttatgcatgcacacacatacacaagcat

SEQ ID NO: 332697 - DNA, 122 bp, Homo sapiens
taacatatgaatgaaagaaaagttgtgaactcatggaatcgtacttacacctaaagccaccggatgtcgctgtcgtccacaaaatagctttttagaacaaaggcatcagccagtttctcaag

SEQ ID NO: 332698 - DNA, 122 bp, Homo sapiens
catagggagccaggctgcggcgcagctcctccacggtctggtcaatcttgactttgaattcgtcagcgtagggcgtaaggcgtcccttgagctcctccacgttctggtcgatcttggccttg

SEQ ID NO: 332699 - DNA, 122 bp, Homo sapiens
ccctagggccgagttgctgggccggggacccgagccgcgagctggggacttggaggcggccggcgcaggggccgcgagaggcttcgtcgccgctgcagctccgggggctcccaggggagcgt

SEQ ID NO: 332700 - DNA, 122 bp, Homo sapiens
ctggatgggaaggataggcttttccacagaaacttaggtgtttgcctccgaggcccactgcgcatgccctggagggctctgtgggttccgccttcagttttgcttttcacaggaggggcaaa

SEQ ID NO: 332701 - DNA, 122 bp, Homo sapiens
gtttggattatctaacctcatatatcacacaccctcgtttttacaataacccatgggttacgtaagtcaggcctaatgaatatgagaggagactacacacaggcctatagaccaggaggtag

SEQ ID NO: 332702 - DNA, 122 bp, Homo sapiens
agaggggcgcgctaaccaggtagggccctttggagtggccctggagagagaggccgatgccgtgagaccacctgcccttggccaggaccagccacccctcctggccgcctgccccgcctgcc

SEQ ID NO: 332703 - DNA, 122 bp, Homo sapiens
gagaatcagatcccctcgcacttgcctgcctgcccgtcgctccggcacgtcgccagcctgcggggcagcgccatcatcgagctcttccacagcagcattgctgaggtagcggcccgggtgtg

SEQ ID NO: 332704 - DNA, 122 bp, Homo sapiens
gggagagcggccatgaagcgaagccgcaaacgcttgtcagctgcctcccggcgccgcccgcgctgctcccattgtcaccgcctcatacgccggaagtggaactgcgcgcgccagggaggttg

SEQ ID NO: 332705 - DNA, 122 bp, Homo sapiens
ttaacagctctttcaaattccccagtcgatgagaagagcgaatttttcagactggcaatacgtaaggtagccactaccagcacctcaaaccagggccccagcggaggggtggagtgttccga

SEQ ID NO: 332706 - DNA, 122 bp, Homo sapiens
ctgtgttgactcgggcaggtcactgagcctcccttgcctgggtttccctcacccacaaaacgttgatgcgaacatctaaagcgcccggctggacacgcaaggctcggacagtggtcactccg

SEQ ID NO: 332707 - DNA, 122 bp, Homo sapiens
aggaactggaattttaaaagagaacttctacttactcggagctattataatttacttttacgcatgacacactgaagtactttcttcagactgaaacacttcaggtcccagaagctgtgaca

SEQ ID NO: 332708 - DNA, 122 bp, Homo sapiens
caggagtcgccggcattggggtaccaggaggacgcgagctgactacctgactccgggcggcgcaggacgcccgccgcgcgaggggcgggggctaagcgtatcgaggggcggtgctcgagggc

SEQ ID NO: 332709 - DNA, 122 bp, Homo sapiens
gcacctcgaaaccccgagaggcgctgggagctcgggcggcggaggtcggggtctttcatccgtcagggatggtgaagtttgaaaacaggctgcgggctgagaagctcggaggctgagccaac

SEQ ID NO: 332710 - DNA, 122 bp, Homo sapiens
ttttacttacctgtattctatttttctgtaactcagcagtttttctttcttcctccatgtcgccttcatgaagaaaagcaggatattgagaagttagaattaaaaaaggtgacatgagaatc

SEQ ID NO: 332711 - DNA, 122 bp, Homo sapiens
ccctgcctccgccttcatcacggcctggtttctctccctctcatctctgagaaactttcacggaagtgctctcccaaaagactccctgggatccgagagttggctttgacaccttcctcagc

SEQ ID NO: 332712 - DNA, 122 bp, Homo sapiens
gatcgatgaagtagcatagttttgtggtgcttcgtggcccaggtttgccacgaatagctgcgtgaccttgggctagccagttaacagacctctgtttcgtctgttaaatggagattttaata

SEQ ID NO: 332713 - DNA, 122 bp, Homo sapiens
agtcccggcctccagcttttgaaaccgtccccggggcaacagagtcccttgctcagatgtcgttcggtatctgggactgggaggggtcctggaccacacgcattctcactctgtgattttgc

SEQ ID NO: 332714 - DNA, 122 bp, Homo sapiens
tccctagggactttgaaaccaagggctaaccccctgctctcttccaggagagtgggataccgcccgggtgcctgacggtgccttggtgttcttgacaattgaatggtaccatcgggacatta

SEQ ID NO: 332715 - DNA, 122 bp, Homo sapiens
gtagagctgcgggacccgccaccaggggcgtagccatggtcggcgggctccgcccggaggcggtccctccgggttcctcacccggatgggtgaggctttccgatcactcctaggggcggggc

SEQ ID NO: 332716 - DNA, 122 bp, Homo sapiens
agcctccttcctgggctcctggacaccaggtgggtactcctgaggggcatggggatggggcgggggtgggtcagcaggaatgggaggagaggggcccgctgatatcctgagggagaggtggt

SEQ ID NO: 332717 - DNA, 122 bp, Homo sapiens
gaagaaggcggcggcggcgaaaggcgggggtgctgtgggggccgggccgtgtttacacagcggcgggcgggcgcggacgcggaacccggcgcggcggcggcacgatggtcatggcgtatttc

SEQ ID NO: 332718 - DNA, 122 bp, Homo sapiens
catgtggtactaccagctaggctttggtgttgctaggagcagacctggcactcatagccacgccctaatgttctcctgttgaacacaatttcacaaaagttcaacctcaaataaggccactc

SEQ ID NO: 332719 - DNA, 122 bp, Homo sapiens
gctccaccccatcccacgccaggctccaccccatcccacgccaggctccaccccatcccacgccaggctccacccaatcccacgccaggctccaccccccacgccaggctccacccccccac

SEQ ID NO: 332720 - DNA, 122 bp, Homo sapiens
atggattcgtcgctaccggagtgccgccatattggtaaaggcattagggcgaaggtggaacggaacttcctgttctcgcgggatctaaaggcgggactgccacgtccaagcaaaccgggaaa

SEQ ID NO: 332721 - DNA, 122 bp, Homo sapiens
ggattagtcatcaccaagaagacagcagattagccaaggaggtagttatgcggcatgctccggtgatcgccacaatgtgattgcagtactcttagaagcatcatatcatcccagatatgttc

SEQ ID NO: 332722 - DNA, 122 bp, Homo sapiens
agttgggaccaatagagacttgctctcgacccggtctaggaaaccacttattttgacttccgaggcctgtcaatctgaaggcaaaagaaagggaagaaacggagggctgagggttcaggctt

SEQ ID NO: 332723 - DNA, 122 bp, Homo sapiens
cggctattggctcctctggagcggagtggcaggcggggtttcaggtggggaccgggtggccggcgaggcccggccgcaggagcgcgccccgcctgcccgcgctgaccttcccggagtcgccg

SEQ ID NO: 332724 - DNA, 122 bp, Homo sapiens
tgctctttgcttgccaactgcgcaaaaccaggcagtggggcagatttggcctgagggtcacggtttgccaacccctgctcaagcctgctcactctcaacgctggctgcacgttgcaataatc

SEQ ID NO: 332725 - DNA, 122 bp, Homo sapiens
aacccaagtctaagctttgcggtggggcctgagaagggtgacggggctgtcagagaagggcgaccacagagaggaagagaaagaggaggagcagggtagttcccaaaattccttcccccact

SEQ ID NO: 332726 - DNA, 122 bp, Homo sapiens
tttggcagcacgtggtacaggagctccccggccgcctctcttttctgggcacccgcctcacgcctcctgatgcacatgtactgggcaaggccttggaggcggcgggccaagacttctccctg

SEQ ID NO: 332727 - DNA, 122 bp, Homo sapiens
ctacaaatttccaccttttctgcagtgcttactacagttgctattctcacaggactctttcgtatcacatatataaatgttttcatcagtagtttagtttgtagttcttaagtgggggatgg

SEQ ID NO: 332728 - DNA, 122 bp, Homo sapiens
cgtgggtggggtgggaggattcaaggagggtacgcgcctggccggactgggatgactctgcggcaggcctgggactccctcaggccgacccaggcttcccaagtccctcctggagccaaggg

SEQ ID NO: 332729 - DNA, 122 bp, Homo sapiens
tactatcatgtgagagccatgtattagcgatctttacaaatagattttgttcagaggcagcggtcttgggttatttagtctgcaatatttctgaaaatcaaaggctgaataaatttagcttc

SEQ ID NO: 332730 - DNA, 122 bp, Homo sapiens
acctggcacatggtgagggctctataaaaatatgttgtataagccatgtgcagtggctcacgcctataatcccagcactttgggaggctgaggaaggagaatcacttaaggccaggagtttg

SEQ ID NO: 332731 - DNA, 122 bp, Homo sapiens
tcagctaatgaatagctcgatgcagctgctgggaggttttgcaaagcgcattcagaatagcgagaatcagagcatggtttcttgcccaaaggccaggcatctgcgtggtcagatgggggagc

SEQ ID NO: 332732 - DNA, 122 bp, Homo sapiens
ctccagttccaacaaatctaagggccctggacagctagctcagcacgaaccacagtgctccgggctagacacaatccagtctgtcctctgagccccctgcactgccacccacctcacagagc

SEQ ID NO: 332733 - DNA, 122 bp, Homo sapiens
gcagaacaaggagagaggggtgtgttagctcctgacaaagcatgacctcctaaaaacacacgtctccaaatgcaacttgaaagtggaaagctcagccccacaggacgctgtgctggccctgg

SEQ ID NO: 332734 - DNA, 122 bp, Homo sapiens
cagcgatgggtctgccacagcggcaaacagcagtggtggatggcgagcgaaagctcagctcgagcagtaacaaacacggagcagcagtgtgtgcagttgcaagatttaatagagtgaaaaca

SEQ ID NO: 332735 - DNA, 122 bp, Homo sapiens
agtcaatgcctctctgccccaccctttgttcagtgtggctggtgccacgacaaatgtgtgcgatcggaggaatgcctgagcgggacatggactcaacagatctgtctgcctgcaatctacaa

SEQ ID NO: 332736 - DNA, 122 bp, Homo sapiens
tactgaaacaccaacaaaatggcaaaactagagactaaattagctagtgaggctagaaaacgctcagaagggagttgaatttttgggaaaagtcattcaatgcattagctgctggcaaatgg

SEQ ID NO: 332737 - DNA, 122 bp, Homo sapiens
ccccacgccaggctcggggagcccctccctctccacccgcttccccctcaaaccctggttcgtgtctccctctgcatagcccagggcccaggcaagcggaacccctacatccacgacagcgc

SEQ ID NO: 332738 - DNA, 122 bp, Homo sapiens
accttgtttgctgtcctcagggagtcggaggcgatgtccaggctcagggcaggcggtgggcgcgggggcagcaggctgggcagcctgggcgagctccccgccacggcggcgtctctgtgcgg

SEQ ID NO: 332739 - DNA, 122 bp, Homo sapiens
accaacctgcgagttgaccacttcccggtgccagggctctgacaccttgccaggcacttacggaaagataattgtaaaaatctaatagaattttaaatttccatgccttcgaacccagcagc

SEQ ID NO: 332740 - DNA, 122 bp, Homo sapiens
aggagatttactaccaaaaatcttaagtaaactcacccccatgcaagtttcttcttttttcgggcagcctgtgaattttcaacctcctttttggcttttacaaagttgtggcaggcaactgc

SEQ ID NO: 332741 - DNA, 122 bp, Homo sapiens
tctcttaacccacattttcaacctgaaacattttagacttagtagccacatgagcacacgcggtgaaatgagtggaaattgagagatgcttggaagccccgtggggacttactgtacctgtg

SEQ ID NO: 332742 - DNA, 122 bp, Homo sapiens
gcaggcacagtgtagggttacagtccatttatgggcgcagccgaaggcagatatcagtgtcgatggcattcgctcccagctattcttaggagcctctcaagagctccacgcagcccggctgg

SEQ ID NO: 332743 - DNA, 122 bp, Homo sapiens
tatgcatatccatcacctcaaatatttatttctttgtgttgggaatgttcaaaatctactcgtatagctatttgaaaatatacaataagttgtacattatagtcaccttgcagtactatctt

SEQ ID NO: 332744 - DNA, 122 bp, Homo sapiens
gagcaaaggaagcagggatgatttagggcctccgaggtgacacggaatcgggaggaatggcgccacgagaaagacgtctttctcattttgtgagcagagagcccatcgttcaggaagagcat

SEQ ID NO: 332745 - DNA, 122 bp, Homo sapiens
attcaggaatgaaaaggaacaaatgttcttttctgtcatgctccacaataaaaatcgaagcgaatgtttgccgcacattcacatgggcctgttggattataatggcactacccttgtcagag

SEQ ID NO: 332746 - DNA, 122 bp, Homo sapiens
tcccattctggaaaccatcggcaaaacctcagcagaccacggggccattactgtgggctccggtttccagccactgcacttccagacttttctcttcggagccagtgggaatttagcaaatg

SEQ ID NO: 332747 - DNA, 122 bp, Homo sapiens
agcacagccagaaaggcggaggaggagagcatctctggcagctccgccttacttttccaccgaagtactttaattcactaacacgtttcacgctgtcatgctgacccgaagccgggacgcag

SEQ ID NO: 332748 - DNA, 122 bp, Homo sapiens
cgcgccctgtcccgtgtgagtccctgtgaagacccccgagcttgagggtgcggggtgggccggtggccttcctctcctgattctcccggaatctccaaacttcagaactgctgtccagctca

SEQ ID NO: 332749 - DNA, 122 bp, Homo sapiens
gtttgcggacaaacacaagaaccaaaaacattagcctcaaggtgaagagaggaaccttggcgtccacaatgacacccagtttaggggtccccagagatgttcggtaagacatgcttccagaa

SEQ ID NO: 332750 - DNA, 122 bp, Homo sapiens
gggcaggaagagggagcagctcctccgtgggggacctttgagagcccaggagcaggatttcgagggacacctggtggggagcaaaaggtgctgagtctgtctttgaccttgagcccagcttg

SEQ ID NO: 332751 - DNA, 122 bp, Homo sapiens
gcgattttacctggcttctccagaagggtaaggcggccagttggacccggtccttgtgttcggagaacagagtcacccaggcctcgaacgcctgcgatggtcggcgtctcttccctaggtga

SEQ ID NO: 332752 - DNA, 122 bp, Homo sapiens
ttactgcccctcaggcgcggggcggcggtcgtcaactacagttcccatcatgccacgatccgcctggagtaattctccacgcctagtgagaacgaggagaatgccgggacccttccgcgcgc

SEQ ID NO: 332753 - DNA, 122 bp, Homo sapiens
tggtaagggtaagaagaaatatgtgcaatcattcactctaggtagaactatacattgttacggagctttgggggaatactcattatatattaacatttcaaatgcacataccctgtcccttt

SEQ ID NO: 332754 - DNA, 122 bp, Homo sapiens
gttcagctccgtgagttgaactcaatcgtcacaaagtgtttcctgggaatgctactgtctcgtttttatgtgcagttataaactctcgtgccataggcctcaaagcggtccaaatctcccct

SEQ ID NO: 332755 - DNA, 122 bp, Homo sapiens
agatgttgtatttgctcatattcaaacagccagaatataactgatatttgagaaggggaacgtctgggaggttaggagaatcagttcttggcctttttattttggaaataaagcaaatgtaa

SEQ ID NO: 332756 - DNA, 122 bp, Homo sapiens
tcagcgttgcagccagtgctgccatcccggggccgcaggaggtggacgtctgaggctgggcgccggacaagaggagggggcgtgcagcgggctggaggacgggacgtgggacggagcgagga

SEQ ID NO: 332757 - DNA, 122 bp, Homo sapiens
ttggaacagacggctgatggcctaaggaacctgtagccacgtcagctccaaagcagggaccggttcagtcatcagtgcagccaatgttcatgaaatccctactaagtgccaagggatactaa

SEQ ID NO: 332758 - DNA, 122 bp, Homo sapiens
agttctcatataattgtaaactagtttgatggttgattttatgtgtcagtttgactggaccgtaggatgtccacgtagctggttaaatgttctctgggtgtgcctgagaggttgttgctaga

SEQ ID NO: 332759 - DNA, 122 bp, Homo sapiens
cttctgggaaagagtagaggaaggagactgggatggttccagtcccagactgggtatgtacgtggctcctgctgctgatcattgtgacagagatgacagaagtagggctggagaggtgcaga

SEQ ID NO: 332760 - DNA, 122 bp, Homo sapiens
gtccattaaagtggaggagatatccttgctgatggcaaaaactgctttttctttttgggacggaatcttgctctgtcgctcgggttggagtgcagtggcgccatctcagctcaccaaaacct

SEQ ID NO: 332761 - DNA, 122 bp, Homo sapiens
tcgtctggaaactcctcagtttcgtgacctttgcaactctgcagctgctcttcctctgcacggcgctcttcccgttcttgccattcttgcctttgccgccacagctcctcgtcgcggcgctg

SEQ ID NO: 332762 - DNA, 122 bp, Homo sapiens
tcacccctcacacctgatccatcttcacacaagtccaaggtccccaggcacttgagatcacgccacacgcctggagtgacttctcttgagcaggtttggagtatgctcttactgctaactag

SEQ ID NO: 332763 - DNA, 122 bp, Homo sapiens
ctggaaacgacgcccctgctggctgcctgtctcaagctgcacggactcctggggacaggacggggacgagcaagtgcagaaaagccggctgcgtgtattttgggactccagaaaacaagggc

SEQ ID NO: 332764 - DNA, 122 bp, Homo sapiens
gtcgtatcccgcgggtggaggccggggtggcgccggccggggcgggggagcccaaaagaccggctgccgcctgctccccggaaaagggcactcgtctccgtgggtgtggcggagcgcgcggt

SEQ ID NO: 332765 - DNA, 122 bp, Homo sapiens
cgacccacacagaaccttcaaagtcaatccaatagcagcccgaagatgtctgggtgtacgcgtgtgctcaagtgtctgtgactgcgagcagagcgagcagagagctggagacgatgtgtgcg

SEQ ID NO: 332766 - DNA, 122 bp, Homo sapiens
attggtggaatcgagtaattactgatcagtattgtccaatcacggagggcagtttagagccggcccaatgagggcctccagggggcgggtcggactgccgcgggccggggagcgctctgggt

SEQ ID NO: 332767 - DNA, 122 bp, Homo sapiens
cagagccttgctgtatgctaagtctgctttagtcaggaatcttttggttgaaagtgacaacgaacccactgaaggaaaaaaaggggctaagagttcagggttctcatctttggtctcctttg

SEQ ID NO: 332768 - DNA, 122 bp, Homo sapiens
ccaggggcctcaaaggtaacgcacagccctgttctgagggtacagggaggccccaagctccgcctaactaccagggccttggagccaggctgccccatcacaagccccgccccccactgacc

SEQ ID NO: 332769 - DNA, 122 bp, Homo sapiens
cccttaatctatcaggcttccagctctaaagaatgtctctagtattgcggggtggggctgcgcttaaaaacgcagacgctttggttttagtaccagcaacgttaaaaatcttctatcttgta

SEQ ID NO: 332770 - DNA, 122 bp, Homo sapiens
gcattacgcaaatacgcaactccctggtacctgggataccagagatggctgaggaggcaccgtggcatcacgtatccccgagggatcactgtgacccctgtgtctaagcaaagactggcaac

SEQ ID NO: 332771 - DNA, 122 bp, Homo sapiens
tgatgcaaaggctctgaggtaggaacaattcagcaggcaagagataaagtcagagaggcacgcagaggccacatcacacaaggggtttgtaggccagacttttgtaagccagcataaggagt

SEQ ID NO: 332772 - DNA, 122 bp, Homo sapiens
gctctgttccgtctcgccccgaggttcacgccatcctcggagccccagcctttcacccagcgcctccaagctttggaccttgacttctgcaaaactagatggtcacagccatgaatgtctca

SEQ ID NO: 332773 - DNA, 122 bp, Homo sapiens
agcccgggagggtgagctgacgcagcaagtccgggaggggctgacgcgcccgcgtggactcgcacagcaagatcctggacgcccgggatgtggatcagcgcaagcaccaccttcgagaagtc

SEQ ID NO: 332774 - DNA, 122 bp, Homo sapiens
tccacctggcaagcctctctgggagggtttctggaaggatcctctcccctcctcacagtgcggttcctcccacaaaccggcctcatcacccccgctgcccatcgcccatgcccctcccagct

SEQ ID NO: 332775 - DNA, 122 bp, Homo sapiens
cgctgggaatgatgaagaagaacaattccgccaagcgggtgagtgcgcttgcctgccctgcggccgccgccgcctccgcgctctgacgacccccgctccgtcggcgccgcggcggcctggga

SEQ ID NO: 332776 - DNA, 122 bp, Homo sapiens
tggccggaagggggggggccggcgcgcggggccggtcgcctaggcaacgggctcgcgtggcgtccaggcttctcagaaagcccaaaatccgggagctttgggagggtagaggggcgacgcgg

SEQ ID NO: 332777 - DNA, 122 bp, Homo sapiens
tccggggaatgagaattcagccacagaggctgccgcgatcatagacctagatcccgacttcgaaccccagagccgtccccgctcctgcacctggccccttccccgaccagagatcgctaacc

SEQ ID NO: 332778 - DNA, 122 bp, Homo sapiens
catgatgttggtggacagtgcggccgagaaccccaggacattgaagctgatctcagtggccgtgcacagcgccagcccgcccatgactgggatgagggagaggttgaccagcagccctggcg

SEQ ID NO: 332779 - DNA, 122 bp, Homo sapiens
aggagagagaggagggggatgtggcccgagccccgcccggcgcgccccgccggaatgactcggcgctttccctcgttggggcgggtgcggaaaaatactaataccccaccctgttgcggatg

SEQ ID NO: 332780 - DNA, 122 bp, Homo sapiens
gcgccgcggggagctgggagcagggcgggggtggaagcactcacctgcgccaggttccggcggtgacacggacggctcccggagaatagtcgcacagcaacccggcggcagatccacgcgcg

SEQ ID NO: 332781 - DNA, 122 bp, Homo sapiens
cgggccccggggcctccgatgaccggactgccgccggctccagggctggccctgggaccccggcggttcatggggggtcctcaccccacatttactcagagcccttggcctccaacttttgc

SEQ ID NO: 332782 - DNA, 122 bp, Homo sapiens
cattagcactcacgttgatgttatttgtggagcccctgttcttggccagatgctgtgggtcgttcttttacatcttccttcaaaactgcctgggcagtgtttatttcctcattttgcagacg

SEQ ID NO: 332783 - DNA, 122 bp, Homo sapiens
tctgcctacacctcctggcacagtactcaattcccagcgcagaggaggaaccaggctgtgcggcttctccaacaatcagcgaagtaggaaatgtttcggagacactaattggctcgattgcc

SEQ ID NO: 332784 - DNA, 122 bp, Homo sapiens
acgtgatccattccgtgctggccccacagctccgcccctgtccacttccaaattagcccgcgttttctgagctaccagagttgtgcactgggtcagttagttgactgggtcgattagttggc

SEQ ID NO: 332785 - DNA, 122 bp, Homo sapiens
ctcaggatctctacagtcttgtgacacatgactgtacactgagttcttgaaaagacataccgtctctatttcactcatttctcatacaaaagatattttcgcatttgcttttcatttgagcc

SEQ ID NO: 332786 - DNA, 122 bp, Homo sapiens
gcgtcttgagagctctgatgtcccggggccatggctgcaggtgcaggacagagacaaggccgtgaccgaacactttgctggtccccttgaccatgggacacccggtgacgtgcctgaggatc

SEQ ID NO: 332787 - DNA, 122 bp, Homo sapiens
cggccggctgcaggggtactgagaccagtacccgggggccagcagcgacccggaaacactcggcccggaaatgatgtcaccatgaggcgggcccgaagagagggtggaccacggctgcgcgc

SEQ ID NO: 332788 - DNA, 122 bp, Homo sapiens
ttgaaattacacaatgatctgctttgatgtgggcccattcattgattccactgggtactgcgtgggttatttcagtctcaacactcaagctcttcagtctgggaaaatatcttgaattattt

SEQ ID NO: 332789 - DNA, 122 bp, Homo sapiens
ggagcggctgcggtggggccatgtggctggaagcagggcagtgagcagtgctcagcctgtcgcgagtgtgtaggaagagagctttgttgaaatataacttacatatcataaaatcacccact

SEQ ID NO: 332790 - DNA, 122 bp, Homo sapiens
gtggtatattttaatatagtgcaaatcaaaccacatacaaaaaaaaactggttctagacacggacagtcacaggctgatataagaaggtatgtgtttctaagtctggtaaaggaagtgggtt

SEQ ID NO: 332791 - DNA, 122 bp, Homo sapiens
gctttttccatcaagggccacaggctcaggtaataactcacaggtaccaagtgcaaacaacgtttccagacactgtgcaaatctttgcattaatcaactcatctcatttaattctcacaaca

SEQ ID NO: 332792 - DNA, 122 bp, Homo sapiens
gatctatctgtccatttttcccaaaccctcagtggctttgactattttggtgggatgttgcggctttaggaaatccgggcagatactccactaccctgcgtcccttatgactctgacctgtc

SEQ ID NO: 332793 - DNA, 122 bp, Homo sapiens
gtttactttgtcacaaacatcaagtagtatgtcaccttgaatgctcttgcaaggttatttcggtaaccaaagacatttttaataaagctaccctctccagtctatggggtggtttctataaa

SEQ ID NO: 332794 - DNA, 122 bp, Homo sapiens
cgaccaccgactgggtcatggtggtgcgccgccggctccgggagcttgctagcccgcggccgcttctgcattcccccagcaacggcgctctgctagagagctgccgtaagtcacgctactgc

SEQ ID NO: 332795 - DNA, 122 bp, Homo sapiens
catggtcaagtggcagaggtgggttaggtgcttttctgatcccagcttctcttctgcatgcgcgtgggaagccaaggaagaggaaaaaagagtgaattcgccctaggatagggaaggagtag

SEQ ID NO: 332796 - DNA, 122 bp, Homo sapiens
tcatggctataattaatactaagccactgggactctaacaagaaggaaggcttaaaaagacgccctcatttaggccaggtaggggctttggacagaacaaggtaagatgagggtctataagg

SEQ ID NO: 332797 - DNA, 122 bp, Homo sapiens
acaaaaactccccctccaaaggctgccctcccaggagaacgagctcctcgagaatccttccgtggttttgagtacaaacagccccgccgccctcaaagtggggaagcagcagatcattccga

SEQ ID NO: 332798 - DNA, 122 bp, Homo sapiens
cgtctgcagcctcgagagggaacagcacagacggcgtggaggcctccccggtgcaaactccggcagcccctaccacatccaccaagcccccccgagaacagtcagtggacggcccaggtgcc

SEQ ID NO: 332799 - DNA, 122 bp, Homo sapiens
agcctcccgctgaggcctgtcggtgggtgtgcttgggggtcagctctctgtaacagctttcggagcatgaatgttttataggatcagagcgggcgctgcgagaacacatactgccaagggag

SEQ ID NO: 332800 - DNA, 122 bp, Homo sapiens
gtgccttggttctcctccatgttgcttcttcagtaagctaactcaggcttacttacatgacggcccccagaagaaagaaaacaaaagcagcaagatctcttcagatctaggcttagaaatga

SEQ ID NO: 332801 - DNA, 122 bp, Homo sapiens
gccggaatgggcgcttccactcttggcccagcaggccagtgggcagggccgcgggaaggacgggcgctgcaggggctccgcgcgctcaaggtgctcgcgggctcccgggcccagccgggctg

SEQ ID NO: 332802 - DNA, 122 bp, Homo sapiens
tacaatctcttctgtttgtgtgttatttgcataataattgctacacaaaatcaaacctcacgcccagtcttttgcatttgacttttttctccagcgtcaaaaatatttcctatgtgcttcta

SEQ ID NO: 332803 - DNA, 122 bp, Homo sapiens
gtctgtgggctcagctaattagcagccacaggaagacttggggacagagcagctgagggccgccaccgcagagccttgccattagggcgatcaatgccctggctggagcagttaaggggagg

SEQ ID NO: 332804 - DNA, 122 bp, Homo sapiens
cgagacagacccgccgctgggaccgcgatccttttctagaggctgagtgagggggcagatcgtgggtggccgcgctctcgaggcccctccctgacctcgcccaacttcccagcctccagacc

SEQ ID NO: 332805 - DNA, 122 bp, Homo sapiens
ggtggggcctgctgaaccctggagctggtgtgagcagcacagccaggcaggggtgggggacgaggagcaaaggccttgagacctcaggggctgaggagcagggaaggaggacagaagtgagg

SEQ ID NO: 332806 - DNA, 122 bp, Homo sapiens
gcaccgagtccgaggtctacgacgacggcaccaacaccttcttctggtgagggcagtgggcggccgcggggcggcgagggtgccctcgacctgggggttccggcaccgctggcctgggggtc

SEQ ID NO: 332807 - DNA, 122 bp, Homo sapiens
acgaggtggaacagtttcatcccaaaaccatccccccaaccccaccctcatcccacagtacgtgggaaaattgtctcccatgaaactggtaccaaaatggttggggacggctgccttaaaac

SEQ ID NO: 332808 - DNA, 122 bp, Homo sapiens
aactttatatccttagtgcaggctgtggaagaacaggtgccatttgtgccatagattatacgtggaatttactaaaagctggggtaagaataattttttgtagcattatgttcaattgatct

SEQ ID NO: 332809 - DNA, 122 bp, Homo sapiens
acctcaggtgatccacctgcctccgcctcccaaagtgctgggattacaggcatgagccaccgcacccagcctgaaactattatattgaatagtgcagaatgtttgcattatttcagaaagtt

SEQ ID NO: 332810 - DNA, 122 bp, Homo sapiens
tatattgcagcactcaaaattcttttaaggagaagtttccactttccttatcgttgtatacgcttccctcttttaattacatgttgagtccttccctcatttaggcttgagaaaaatgtcct

SEQ ID NO: 332811 - DNA, 122 bp, Homo sapiens
ggcccgtccaggtccacgggtgaggggccgcggtgggggtgctcccagcccagcaggcagcgctggacagtgaccccggagcgggaaccagggctgcgctgggcactgaccgggccctggta

SEQ ID NO: 332812 - DNA, 122 bp, Homo sapiens
atccagtgtaaagcctggggagcacgtgtgagcgccttccccatggcacttcagggtctgcggggcggacacaggactggactaagcaacaggaggaggtgggggacggtacagccctctgg

SEQ ID NO: 332813 - DNA, 122 bp, Homo sapiens
gaatctgaatgcacttcattctgaagaaacagagcccagcctcagctgagtcacgcactccgatgcaaactccttctcccgaatttgccagtcaactcaatccatcctcccccagtgaagag

SEQ ID NO: 332814 - DNA, 122 bp, Homo sapiens
gatggtgtgtgtggggcggggggagggtggtggctgacatatgaagatagattaaacaaacgcagactctttagtctagaacgatgaaggctgggaagtgatgtgaccagagtgtataaaat

SEQ ID NO: 332815 - DNA, 122 bp, Homo sapiens
ttgttgcctctgtggaggaatttcactgcaatggggatggctaatgccatcactgggggtcggttgtaattctgaggaaatataagaaagccacaaataataagtgactcattattcattta

SEQ ID NO: 332816 - DNA, 122 bp, Homo sapiens
aaggcaccagcaaaacaggggtgaacatcgaatgggtggggcccttctgactgtcactcacggaacaaacacaggccgaggcctcatcacagggggacagcggtggggggagtgggactgaa

SEQ ID NO: 332817 - DNA, 122 bp, Homo sapiens
tgtcccacacgcccacccggatgcgcggtttgcccaggggttttgaccttcacgggctcccgtctgcacccggctgagcgaggaacttcaccaggagagcgcctggactccgaagcccgttc

SEQ ID NO: 332818 - DNA, 122 bp, Homo sapiens
gactgagccttccgcagagatgaggctggacaaaccccagtggcgagcccgggaatgaggcgcccaggaggctgcaggggcgggaatgctgagggtgaggggagagtgggcggcggggggtg

SEQ ID NO: 332819 - DNA, 122 bp, Homo sapiens
ccaccgccacagacacgagggcggtcccgcggcgccccgcctgggacgccggaaggccctcggcacccaccaagacctgcctcacgagcccctggtcccgccaccggggccccgaagcgacc

SEQ ID NO: 332820 - DNA, 122 bp, Homo sapiens
gccacgcccccatcctgtgcctataaaaacccccgagaccctagcgggcacagacacaagcggttggacatgaagaggaacacaccggcgggagaacacagaacacccaccctctctttagt

SEQ ID NO: 332821 - DNA, 122 bp, Homo sapiens
tgtgtccctccctccagcttgccacagcttgctcctgagcgactcctatatatggaaaagcgaaagtgcctgaaaaatcatgtgagaaaattggaggagtccatttcctaagaggggggtct

SEQ ID NO: 332822 - DNA, 122 bp, Homo sapiens
acttccagacaagctttagaaataaagtgccaggctccaagtggactttggtctggtctccgcatgtgccagtgtccgggccatggaccttccccgggaagggagagtttggggagaagata

SEQ ID NO: 332823 - DNA, 122 bp, Homo sapiens
ccgcaggaggctagggtacccggcggggggcgcgaggaggccggggaacatcatggtaggcgcgggcgggcgaaataacccttctttcagtggccggagggtaaacgcctcgcttcccgccc

SEQ ID NO: 332824 - DNA, 122 bp, Homo sapiens
caccctcgccgcccccacgaagttcagcgaattcccgccactttccctgcaatgaacatacggaacccatcaatcccagtgctggaggaatgactgacctggagcctaaagatggtctttat

SEQ ID NO: 332825 - DNA, 122 bp, Homo sapiens
tggaggctgcttttacctgaggtagaggagtattttaaggaaaaatgaaaccgttcatctcggaggtctcacaaccactttagagggtgtggaaagacaagaattaggaaaatatataaatg

SEQ ID NO: 332826 - DNA, 122 bp, Homo sapiens
tggctggtttctcacaccaccccagcacttaggaactgggtgagagagaatgcttctttccgcctgcccccccaccgcgcccccagatcccctcagtgatggaagggaagcagcctgtgttc

SEQ ID NO: 332827 - DNA, 122 bp, Homo sapiens
tgtcccttttacatcagctcatcttggctcctgatttcctgggtctgatatggaagattccgggattttattatttctaatcaacatcgccttcccaaaccccgccccttggcagccatagc

SEQ ID NO: 332828 - DNA, 122 bp, Homo sapiens
cccacatctatccctgcatctagaccctgagaatcagataaaagcctagtccccagaacacgcccccatccccctgcccatgtcactgggcagtgcacttcagaaagcccacgcccactctc

SEQ ID NO: 332829 - DNA, 122 bp, Homo sapiens
tcacacatgcactcactcctcacatgaaggtcacccacacgccgtccaccgagggcaggtcgcccacacgccgtccaccgagggcaggtcgcccactcgccgtccacagagggcaggtcgcc

SEQ ID NO: 332830 - DNA, 122 bp, Homo sapiens
gtgggcagcgctgatagattgttggcaaacagatagagtgtcatgaggcggccaaggtcacggaaggcatgcgggtgcacatgggccacgcggttctggtgcagtaggagacggtcgaggct

SEQ ID NO: 332831 - DNA, 122 bp, Homo sapiens
tcagggcggggtgggagcggcgggcaggacccacccccgggtgccgggggactcgggccgcggtcagcacagcctccagatgttcttcaaagcatgccccacccccttggctgcttgcggtt

SEQ ID NO: 332832 - DNA, 122 bp, Homo sapiens
cccgtgaggggtacgcgagctcaaggaaagaaagaggccgtgcagcttgggcggcttggacgacgtatctatccctgggctagcgggtcctgattactattcgtaggatcctccacattatc

SEQ ID NO: 332833 - DNA, 122 bp, Homo sapiens
ccacctctcaccacctcctctcccccggcccccgcggctcgcagaagcctggcttacccacgctcccggcatcggccgcctcagcgctccccgattccatccccgcggttcctcctctcccc

SEQ ID NO: 332834 - DNA, 122 bp, Homo sapiens
gcgctgcctcatccccacggtctccggagggttctcgagagggctggagccgacctcccacgagaagcccctggcaaatacagaaatcgcacagtgctgtcaacattgagagtagattcagg

SEQ ID NO: 332835 - DNA, 122 bp, Homo sapiens
ggctcccctgtggctggcgtgtggagacacgtgggcccttctccacgtgcccacgagggccgtagcaggctccaaggaggcccagccccggccagcctgtgtggaccccgccggcctgcggc

SEQ ID NO: 332836 - DNA, 122 bp, Homo sapiens
gttggttctcgttagagtgataaactggctaggggccatagtattggtcctgttaggtttcggtcatggaaaaaaaaattattttggggtcatcctggctctagatgttatgggcaaatttc

SEQ ID NO: 332837 - DNA, 122 bp, Homo sapiens
tagaagattctggaaataagatacagaagtaggcaagtgcatggtggaaagagagcttggcgtcctgaaacccctgggttgggaccactgactgactcaactgctgaatagggggactttgg

SEQ ID NO: 332838 - DNA, 122 bp, Homo sapiens
ataaataatctgtgctcttaggaacaaggtccaggagcagaatgcatgagctttatgcatcgagagtgactctgggaggtggagggatggaggtgggatggtgatcttcacagggcatcgct

SEQ ID NO: 332839 - DNA, 122 bp, Homo sapiens
tctctggttctggctcctggatgagaagaagtcaggcttgacttgggtgggcaccacccacgttattgcctggaagtggtgctagtccctcaacccccgcccgggacagggttgatgttact

SEQ ID NO: 332840 - DNA, 122 bp, Homo sapiens
aggtgagttttgtaggtctaggaagagtctagcactagaaacctaacctcagggagtaagcgttcttgaagttctgtgtcaggtcacaaattcattcttaggaatgtctagaaaccaaaacc

SEQ ID NO: 332841 - DNA, 122 bp, Homo sapiens
tggggccaggcggcgggagggatcatcttccgggagcgtggctaggggcggagcgactgccgcgcgatagtcagggagctgtgcgggtcctggttgcaagagaggtggggagaggggcctgg

SEQ ID NO: 332842 - DNA, 122 bp, Homo sapiens
ataacctcttttctttataaagtacccagtttcagtcatttctttatggcagtatgagaacggactaatacagaagtattagaaagcaagtggcgtggagacactggctcatgcttataata

SEQ ID NO: 332843 - DNA, 122 bp, Homo sapiens
tcaccaaatcagtgaccatcgttgtcctgtccttcttcctgtgttggctgcccaaccaggcgctcaccacctggagcatcctcatcaagttcaacgcggtgcccttcagccaggagtatttc

SEQ ID NO: 332844 - DNA, 122 bp, Homo sapiens
gcgctttgcgaaggagaggtgcgttgtttgggcggagcggttgtcccctctgttccgcctcgctaatccgctgtggcaggttcaccccggcagaaatcagggtagaaaaaggggctggggca

SEQ ID NO: 332845 - DNA, 122 bp, Homo sapiens
ttggaatctttcatgacaccaaatgttcattcattctctgccagactttacaactgtcctcggtgtgtttttaggttgtgtaactttacacaaagtggaagcaataatcagggcaagactta

SEQ ID NO: 332846 - DNA, 122 bp, Homo sapiens
aggccactaaatcaacgactttcatccgtctgctataactgtaataatttgagtcccagacgtctagagctttgccgacaccagagcagttaaagggcgtgccagaggccgagaggcggagc

SEQ ID NO: 332847 - DNA, 122 bp, Homo sapiens
aacagagccttatgaattacagcataacaaagcccagcatccaagatggttagggtataacgtgtcttcctctgcagctgttcagcttttttttttttttttttttttgaccacagaggttt

SEQ ID NO: 332848 - DNA, 122 bp, Homo sapiens
agcaaactgagacattcattgccttcctccagacgcttcctgccagctcaagctaggatgcgatcccgagctcattcccggggaacccagagtattaacaaacaccctaagtgataatgata

SEQ ID NO: 332849 - DNA, 122 bp, Homo sapiens
agtgtgaggggcatgagtatacacgagtgtgcgtgtctttccctctcccttatttgtctccgtatgagtctctccttgtaccctccccctgcctcgatgatattactcccccagacttggaa

SEQ ID NO: 332850 - DNA, 122 bp, Homo sapiens
acctgcgcgttggcggcggactctcagggctcgggtgcctctggcacagctggagctcagcgggagggagggagagagggcgggccggagggggctctgcgctgcgcggccggcaggaactc

SEQ ID NO: 332851 - DNA, 122 bp, Homo sapiens
tgatctcctgacctcaaatgatctgcatgccttggcctcccaaagtgcttggattacaggcgtgagccaccatgcccagaaggaatcaagaggttttaagaaggacagtgtttgagatgaat

SEQ ID NO: 332852 - DNA, 122 bp, Homo sapiens
gcctagggctaccagccaatccccgcctcgctccccttaatcccgcctaccgcgccgcagcgccgctctagatcacggactccccgccctccgcggtctattcaagcccgcggcctgtgccg

SEQ ID NO: 332853 - DNA, 122 bp, Homo sapiens
gcagcctggcctgccttcggagcctcaggtggcctctggttgtggatggtccccatgcagcgaggctgggtggtatcagatgtctgctggctcccacagctctggtgccgaggtccttggca

SEQ ID NO: 332854 - DNA, 122 bp, Homo sapiens
ggggcccccaggaggcggagggggaggcggctccgcgtcgccgccgccgctgcccggcttcggcaccccctggtcggtgcagaccgcgtcgccgccaccccagccccagcagccgccgccga

SEQ ID NO: 332855 - DNA, 122 bp, Homo sapiens
agagcagttgtcacctgcttctcagcagggtgctgtggtcgtcacggaaacaggcctgttcggtactgcaagaggtgccactcaaatcatcacagtaatgaagtgggggccgctgcggagac

SEQ ID NO: 332856 - DNA, 122 bp, Homo sapiens
ctgggaccggtagtgctgggcgtggcctcgggactacatatcccagtggcccccgtgcggcgactttagctgctgctgtctcagccgctccacagcgacggcagcggctgcggcttagtcgg

SEQ ID NO: 332857 - DNA, 122 bp, Homo sapiens
tattccttcatctaccatggctcagccgggaactctgaacctcaataacgaggtgagcgccgaggaacctatggggctgactttaagggtcctcaaaaccagctcttttgagacgcgtggtc

SEQ ID NO: 332858 - DNA, 122 bp, Homo sapiens
tccgccagcagccgggcctgtcaccgcagattaatggtctccctgacacccccgcccagccggtccagtgctgagccagccagagtcagacagagacacccagagatggagagactgctagt

SEQ ID NO: 332859 - DNA, 122 bp, Homo sapiens
attcagggctcagccggtagatgtgctgagaatcttcggtagacaactgtcgaagtacggcggacaaactttaaagatttccagaagttaaggaaagagatgcaaaagcagagaaaaggcga

SEQ ID NO: 332860 - DNA, 122 bp, Homo sapiens
accgactgccccacgcgaccccagagtgccaagggccggctccatgtctcttctccccggcgcctgcaagtcctgcgccccgtccccgctctcatgaagccgtgacagagccggccgtctcc

SEQ ID NO: 332861 - DNA, 122 bp, Homo sapiens
ggggggctgaggggggcttggtggtgtaaggagatggggctagccggggcaaggagcccgcggagatgatcttaagcaatctgagaggaggggtaagaaaaagctgcggaaaataaaggggc

SEQ ID NO: 332862 - DNA, 122 bp, Homo sapiens
tggcatcagattccagcaccaattacatggtaggtgtgctttctctgaccccctagatcccgtctttgaacataaacctccaatgtgttagtgttgtcctctctttcctgctattgctctgt

SEQ ID NO: 332863 - DNA, 122 bp, Homo sapiens
gggatgcagtatctcacaggtggcgccatgattgccgctgtcccaaaaccaggatgaaaacgaagtcgatttctcattggccaaacccaggcacagttccgcagtaagacacgtgtcaattg

SEQ ID NO: 332864 - DNA, 122 bp, Homo sapiens
agtctggggtggagttcaagaatttctttctaataaattcccaggtgttactgatgctgccggtcccaagaccacaccttgaggaccactgctcccaaggttcaagtaatggtcttttgaaa

SEQ ID NO: 332865 - DNA, 122 bp, Homo sapiens
ctccagcccggtctccgtgtccagtccgcagatgacaaagtagtcggcgaagcgactgggcgccgagccccctccgccgccgccgccactcatggcgccggggccgagaccggccgggcagt

SEQ ID NO: 332866 - DNA, 122 bp, Homo sapiens
cagctttaatacctgagctcgaaggccccgctgtgctcgccgacccccgtacctcgcggccgggcccttgggacccacagcatccttgtgaggcccggaggcctgtccagcccgactggaca

SEQ ID NO: 332867 - DNA, 122 bp, Homo sapiens
cggaaatcacttcctgggacttttcactgtgggctgcctcttccagcgtttttttggtggcgtttatttcatgatctgagcccctctggggaggtgaaccacctgggtgctcgattttagct

SEQ ID NO: 332868 - DNA, 122 bp, Homo sapiens
caccctaatactgcgctttgccgacgggcttaaaaaacggtgcaccacgagattacatcccgcacctggctcggagggtcctacgcccacggagtctcgctgattgctagcacagcagtctg

SEQ ID NO: 332869 - DNA, 122 bp, Homo sapiens
gtgcacaccgctcctaccgcaggagtagggcggactgacaggaagatgagtccctgcgcccggagctcaccagagcccggataagccgaagtcggcaaatggatgggacaggcaagtgtact

SEQ ID NO: 332870 - DNA, 122 bp, Homo sapiens
agcggttacttcgacagttctttaattgaaacaagcaacctgtctgggttgttcgagacccgcgggcgctctccagtccttttacctctctgggcggttcgagacccgcgggagctctccag

SEQ ID NO: 332871 - DNA, 122 bp, Homo sapiens
ggacgagacactgtgctccatggaagggccgggcttggccagacaggtcttggacttggccgttgctcctccttagcgggagagaaggtggggatgtgggctctggcgtgggagctgggggc

SEQ ID NO: 332872 - DNA, 122 bp, Homo sapiens
cgtgggaacacagcattctaggtgtgcactgcggggaacaagttgtcactcagccacaaacgggctctggggcaggtgccgcagggacggcgtacgattggttgacgcatagttctttcaaa

SEQ ID NO: 332873 - DNA, 122 bp, Homo sapiens
gcagtgtgggacccactgcccccagccaaccgcagggattcattgagcctattatgagggcggtgctggcagctgtttccgcccttttcctcggaacttcaggcaggtgtggctgctccacc

SEQ ID NO: 332874 - DNA, 122 bp, Homo sapiens
ggtggttcaggcgggagacacaggcttgggtcccctgctgtggggtccagagacctgggccgggctgtgtgcaagagctgacgggcactggtcaccgggggaacctagcaccccttggtcgg

SEQ ID NO: 332875 - DNA, 122 bp, Homo sapiens
gcgggggcgcgccatttcgcgcctccgggccgctcggctgccccaggggcgcctggcaaacgtggagtcgctcggttttggaggcatgctttccaaactttctaattcacagggtctttgca

SEQ ID NO: 332876 - DNA, 122 bp, Homo sapiens
ttattacacaccaggatgaggtaaagacacctggggtggccccagggccctccatgccatcggagctggcatctccagctagaaaatggccagttgttctgattcgtagctctcctagtcag

SEQ ID NO: 332877 - DNA, 122 bp, Homo sapiens
gatgggcggccgggcagagacgcccctcacttcctagatgtgatggcggccgggaagaggcgctcctcacttcctagatgggatggcggctgggcggagacgctcctcactttccagactgg

SEQ ID NO: 332878 - DNA, 122 bp, Homo sapiens
ctccgcagtccaccacacagccggccacagtgcgctctcttccaattttaacgaatggtacgtttaaaatcagaaacaaaacatcgaacaaaaccctatttaagagactgatcacacacgta

SEQ ID NO: 332879 - DNA, 122 bp, Homo sapiens
caccagaggactcctgccccaccgcaccctggacacctgcactagagaaccctgccccgtcgccccctagactatggcccaggaggatccttgccaccgacttcggaacaataaggcccctg

SEQ ID NO: 332880 - DNA, 122 bp, Homo sapiens
tctggatttcagcaccgacactcagatggcatgttggggtcatcaccgccccgcccggcccgtaggcccccggccacactacgaaggagaaggcaaaagatattttaaaagtttccaactct

SEQ ID NO: 332881 - DNA, 122 bp, Homo sapiens
tcgtgctgtcagcgagctggcgggcgggcagggcccgcaaccacggcaaccgagcgggggcgggctcaggccgagacagagcggcgaaccaatgactacccttccagcttaaaccggtccca

SEQ ID NO: 332882 - DNA, 122 bp, Homo sapiens
ttagcttgaaggaacctcacaaaaccaagcccggatcgctgtcagccactcactcagtgccgcatggagctcctcggacagcgcaacgtcaaatgtcttcgtatcctgagagctcgctcctt

SEQ ID NO: 332883 - DNA, 122 bp, Homo sapiens
gaggggctctgccatcccctcagccagatgggtgtcgtcttcctgaacatagaagggaaccgggatgccatgttctaacgcccgtgtgtttccacacatggccaggagttcgggcagggctg

SEQ ID NO: 332884 - DNA, 122 bp, Homo sapiens
ggtatgcaaggtccactcaccttgacctgactctctgtcatccccaacgaataggccaaacgagccctctcgggccccgccaagtattttgtttgttcgaaagtcttctccagggcgaagat

SEQ ID NO: 332885 - DNA, 122 bp, Homo sapiens
cccttctgtatcaaattccactttctggttgtgaatatctccctgtgagtctatgctaaccgtgccattgctcggcgtttatacttatccacatttgtatgataaatacacaatgaaatgac

SEQ ID NO: 332886 - DNA, 122 bp, Homo sapiens
cctggagtcacgaacgctgtcgtcctacgtgtccgtgagcgcgcagagcggggtggtgttcgcgcagcgcgccttcgaccacgagcagctgcgcaccttcgagctcacgctgcaggcccgcg

SEQ ID NO: 332887 - DNA, 122 bp, Homo sapiens
gctgaggtgtgagtgactgacatctgagaccccctgaacgtttgcattttggaactggagcgagctaacctgtaggaatctccggtgaaccaaagcgggatgatgtttccgtctgagtaggg

SEQ ID NO: 332888 - DNA, 122 bp, Homo sapiens
ggccggggtctggatggggtctcccgggccctcctccctggcagccccgtccgggaggcgcgggtgcagccagttcacacataaacggtgtggaacatcgcaggccacagggaaaggcgttt

SEQ ID NO: 332889 - DNA, 122 bp, Homo sapiens
cgggctgcagaatggctacgtgtactgccagtcccctgagtgcgtgcgctgcacccacaacgagggcctcaaccagaagctgtaccacaacctgcaggagtacgccaagcgctactcctggt

SEQ ID NO: 332890 - DNA, 122 bp, Homo sapiens
aaacttggcacttgagagcacaggcatatggctgacaaggccccaccctgccagcagccccgccccacctttcattcattgctcactgctgggacctttcaggtttctcattgtgaagcagt

SEQ ID NO: 332891 - DNA, 122 bp, Homo sapiens
tttcttttcttttttaatcccttaggtctcctcatttaccacatcccccaggttgaaccacgggaccttgacttcagtacctctcatggggctgtgagtgctactccgccagcccccaccct

SEQ ID NO: 332892 - DNA, 122 bp, Homo sapiens
ggcaaggcctggagaggaagagaccccagcagacgtgcagaaggagggaggaaaaccaggcggcctccccagatcccaaagactgaggcttggcaagaaggtgcatgaactcactgcactgc

SEQ ID NO: 332893 - DNA, 122 bp, Homo sapiens
acggcggctgagtgagaaccttggcggctgtggaggctgccgcggctgcgaaggaggcggcggcggtggcggaggaagaggagtggcggcagcggcggcggggacccgtgcggggtgagccg

SEQ ID NO: 332894 - DNA, 122 bp, Homo sapiens
tgacctctctctactctcaggcatgtcttttgtccttttcgtccatctatttctgtctgtcgctcactcgccccgctttctctgtctcaccttcatccactctgcaggcctgctccaccaca

SEQ ID NO: 332895 - DNA, 122 bp, Homo sapiens
ggaggagcattctctgagggcttccttcatttcacctcagaacttgtcactctcctgcctcgcccagacccatctatctccagctgaggccctgcctgcacacagaaagtggtcctttcaaa

SEQ ID NO: 332896 - DNA, 122 bp, Homo sapiens
tggccattagataaatacctttcaagtgtgagcttagacgtcaaccctaaaatacttaaccgtaatgctaattgtgatcattatgaatcccttcagtcacattagggggaaagtagttggct

SEQ ID NO: 332897 - DNA, 122 bp, Homo sapiens
aatcttccaaattgaagggcttttattttaaattccgattcccctttgaaacagccctttcgatgagggaagaagccagctcggtttctgcgtgcgtgtttatgatctacctgtgagcgcgg

SEQ ID NO: 332898 - DNA, 122 bp, Homo sapiens
tatctgggggcaggacctgcgcgagctccaggatgctgcacaccaccttgccctcggcggcgcccgccgccctgccagcccctcggggacgcccatcgtgcttgcagcaggcgggcagtgcc

SEQ ID NO: 332899 - DNA, 122 bp, Homo sapiens
gtgagactgcgaggttaggggtccgatggcgctcagcaggcgcagcgtgctccaccaccgcgaccagtggtggaatgtccacatccagctctgggcagcagtcggaccagctccacctccag

SEQ ID NO: 332900 - DNA, 122 bp, Homo sapiens
gtgtggtggcgcctgcagccgcagcagcctggctgatcaccggccaggcctgtgttttaccgtctgatagcctcacaccccggtcactcctctcctgtttggaaatttctttaactgttcgt

SEQ ID NO: 332901 - DNA, 122 bp, Homo sapiens
tggtcctgggggagccacgcagggttgtggcagcgctgcctgaaagtatgagactggattcgaatcctcatggttttccatgggaaatggtgatatgtgcagctgttgctgcattttttgct

SEQ ID NO: 332902 - DNA, 122 bp, Homo sapiens
gccggcctcccggctgtggtcaaatgagcctgactcctacctcgatatgactagcggccacgctgccgaaggacaagagcaacacagttgccaagacagtcgcagcccggctgaggctgtcg

SEQ ID NO: 332903 - DNA, 122 bp, Homo sapiens
gaccggctcagaccacgattcccagcaagcatcgcaaagactacaactcccgaaaggcatcgcgagaaataaattcgcagtggacttgtctattgagggcctactgggtcgcaatagcagtt

SEQ ID NO: 332904 - DNA, 122 bp, Homo sapiens
ctccgattggtcgacggcgagagagacgctcccgcacgccgccagctctgattggcccagcggtaggaaaggttaaaccaaaaatttttttacagccctagtgtgcgcctgtagctcggaaa

SEQ ID NO: 332905 - DNA, 122 bp, Homo sapiens
tttttacagaaaatgagcaataaagagattttgtaccgtcctgactggggagtcccaggccgcgtgggacggagtgcccctcggatgcaagcccgtctggcccagcctctgggcgcggtggt

SEQ ID NO: 332906 - DNA, 122 bp, Homo sapiens
tccagtcccccagacctcaagctgcatcttccaaatggttggtgtctttttaagagtccccgtgggctggctttcctggaagaagtccattaaattccctgcttctataagctgcaggagtc

SEQ ID NO: 332907 - DNA, 122 bp, Homo sapiens
tgcacacagtgatcctggagggtggggtgcatgtgtggcaatgggaggcctggcctgaggcgctgagctggtgggaacctgaatgcggaagagcctggccccacggtcccagctgcccgggt

SEQ ID NO: 332908 - DNA, 122 bp, Homo sapiens
gagagaaacggtctgcatttccagaaagaaatatactctcccaattttccttggagcatgcggccctcttggcttgtcttttgcttattccctcttcactgagaaatattttgctcccgtga

SEQ ID NO: 332909 - DNA, 122 bp, Homo sapiens
cccggggcgtggggagtaaggccccgggggtggggggccgggtgggccgggcgtgacgcgcggtcaaagtgcaatgatttttcagttcggttggctaaacagggtcagagctgagagcgaag

SEQ ID NO: 332910 - DNA, 122 bp, Homo sapiens
tccccgagtctctgggtccgagatccacgccgaggcagcgggacctggagacccttgacccgggagaggcccaggagccgttacccggtttcattttcagccaaaatccccgcaggttggtc

SEQ ID NO: 332911 - DNA, 122 bp, Homo sapiens
gctcccgcccgctcattggccctggcagcggtgacgtcacggggctagctgacagaaccccggcgccgggcgctcgggaggtattgtccgtccctccgggctttgtagaatcgtcgccggct

SEQ ID NO: 332912 - DNA, 122 bp, Homo sapiens
caaatattctatccccagggacctgggaaaggcagcacagtcagcatagcacacttcattcgtccacatcctccattctctggggataagagagctttgttaactgagaagtcagtgtatcc

SEQ ID NO: 332913 - DNA, 122 bp, Homo sapiens
gggtgcttgccctccacgtagcggttcagcacgcctaccccgtaggtgagcggcgaccggcgcaccttgatgaccgcggggtccaggccaaagaggacggcacccttgaggatggtgaggcc

SEQ ID NO: 332914 - DNA, 122 bp, Homo sapiens
cagtggcgtgttaaacaggaggggatcttttatgtctgtggcgttgggacaagcggagcgcggctgtggatcaccagaataaacaacgtgggccgattcaattacaatgcggcccggctttt

SEQ ID NO: 332915 - DNA, 122 bp, Homo sapiens
tgggggaggcctgagggagctcttactcatggcagaaggcaaagcgggagcaggtgtctacgtggcaggaacaggagcaagtgggtactgggacagcaatgccacacatttttaaacaacta

SEQ ID NO: 332916 - DNA, 122 bp, Homo sapiens
gagacccgggctcgggccgcgtgtacaggcgcgggaagctgatcggcaaggtgggaggcccgcgccccgagtccgcgacggggccggaccgggctgggctggggtcccggggcgcgcgggcg

SEQ ID NO: 332917 - DNA, 122 bp, Homo sapiens
ccacgactgggggtcgggccttcgtctgcagggcctgagagagcgcgcctacggcagcagcggggagctcatcaccagcctgcccatcagcatcccgctcagcaccgtgcagcccaacaagc

SEQ ID NO: 332918 - DNA, 122 bp, Homo sapiens
ggagccgtgtggctcgccactaacctctgccctgcagccgcgagggcgcgcgggaaatcccgagtgcatctggaatacgcagagtcagtaagaccatggctacgtcctcgatgtctaaggta

SEQ ID NO: 332919 - DNA, 122 bp, Homo sapiens
ggggcgacctgctgcttccgagtgttcctgggctgcgccttcttctcctacttgggcggccgcgccaagcgcagaggccgcgggcgctccggggccagaggcgccttcggctcgggccatgg

SEQ ID NO: 332920 - DNA, 122 bp, Homo sapiens
ttcaaataggtggtgtctcccaggctgctgagatcagttaatgagacggtaattgaaggccgccgtgcgccaacagaataatgcacgtcgattgggcagctccaagggacaacccactaccg

SEQ ID NO: 332921 - DNA, 122 bp, Homo sapiens
aggtcaacatcagcagtgagccgggccgaggcaggacccctgatgtggtgggatgagaagcgcctcacctctgctcttcctccaaggagcccacagccggaatctgatcatgaaaaaaagac

SEQ ID NO: 332922 - DNA, 122 bp, Homo sapiens
gtttggaggcttccaggtggtaccggctcccgatggccagtttgctttcctcattcccaacggggccttcgcgcacagcggccctgtcatccccgtctacaccagcaacagcggcacctccg

SEQ ID NO: 332923 - DNA, 122 bp, Homo sapiens
gttcttggtcagtttccggctggagatggtgggaaaatactcgggcttcccatccactgccgtggcaatgaacagcttgtcatccaggttgctgtaggagacgatcactccaaagactgagc

SEQ ID NO: 332924 - DNA, 122 bp, Homo sapiens
acgcggggatctctgagagctgagtgggggtgccgggttgccggcagccggggctgagggcgggtcctcagagccccccgaagtgggagggtcgggctggccgcggggccaatccaggcgca

SEQ ID NO: 332925 - DNA, 122 bp, Homo sapiens
ccgcgctgcagcccaaggagcagcaggatgtgggcagcccggacaaggccaggggtccgccggtgcccctgcaggtccaggtgacctaccatgcacaggctgggcagcccgggccaccagag

SEQ ID NO: 332926 - DNA, 122 bp, Homo sapiens
agtatggtgcactgttcacaaacttagaaaatgttaaatctcgccgggcgtggtagctcacgcctgtaatcccagcactttgggaggtcaaggcaggaggatcacctgaggtcaggagtttg

SEQ ID NO: 332927 - DNA, 122 bp, Homo sapiens
gaagaagcaaaaggccggggacggggagcagcctcaaagcgacttcaacccaaagggaagcgactccggacccacactgcgaggcctgtattcacctggggtggagtgtacggggattttaa

SEQ ID NO: 332928 - DNA, 122 bp, Homo sapiens
atattatctaattctcataacactacaacaatcttgaaaggcgggtatatatgatacaaacggtacaaatgaagaaactggctttcagagagaccaagtaacttgctcaaggccacacagct

SEQ ID NO: 332929 - DNA, 122 bp, Homo sapiens
ttccagcctgcggtgggaacggagagtctcaggggggcggggctgcctccgtctggccctcggctggctgcgaaacgtggactgggtgatgcctcaggagaaaccaccctagtagttccgct

SEQ ID NO: 332930 - DNA, 122 bp, Homo sapiens
ttaccgcaaagttacttttatttctccaccagagaaaccaaaggcatggaactgccattgcggtttaagatgtgtgtgttgtagtagatgtctccaaagcaaaggataaagggaatgtaccc

SEQ ID NO: 332931 - DNA, 122 bp, Homo sapiens
cctccctacagttgtggggggtggcccatgggtgtgaggagacaggggtcggagtgggggcgacactcctgcgatcagccccagtttaaagcctctgcaggtgctgacatactctacaactg

SEQ ID NO: 332932 - DNA, 122 bp, Homo sapiens
accagccagatttgggcaccggtgctgcccagcatgccccaggcttcagggtatgggagtcgccctgggcttgggtcaggctggggctctctcattcaccaggtgtggggaggggcttgagc

SEQ ID NO: 332933 - DNA, 122 bp, Homo sapiens
cgcggtgtgcgtggcggggcggtgcggggggcggccgtgtgcgaggcgcgagtgtgagcgcgcgcgggaggcgggcgggcgggctccggcaggcgagcggcgcccgcgggcgagccaggaag

SEQ ID NO: 332934 - DNA, 122 bp, Homo sapiens
ccatcgagctaaactcaaggttgcgaaccccaaccccggtgggaacacggtctgcagacacgctcccttaagtccctgtcgcacacaataaattgctttctgaatattccctttacaactgc

SEQ ID NO: 332935 - DNA, 122 bp, Homo sapiens
tgtatgtggtttctcagttaatacatagctaatagctcttatttttcttatgtttttaaccgcttaggtctatttggatgtaagggtgaaaattcatttgatggaaatacttgtgtatattt

SEQ ID NO: 332936 - DNA, 122 bp, Homo sapiens
tgagaatagtctgagcggatcaacattgtcctcagcctggcatttatctctcctcgccagcgaatgtcaatcaggaatcaaaaagccaaacagaggaggctttgaacggtgtcatcgggggt

SEQ ID NO: 332937 - DNA, 122 bp, Homo sapiens
ggaggaggactggtcattcagcagacatttactaccaagaccttccccggctgtgcggcgcggggctgggagccctgaactctgctgctgcctccagccacagaggggccttggaggcccct

SEQ ID NO: 332938 - DNA, 122 bp, Homo sapiens
gggagttgccaagtgtcggagcggcgccccgggccccccgagcgcccagccatcccggggcgagcctgggctgcgttaccttgcaggttctgcactcggatgtcgctaatctgcccgatgag

SEQ ID NO: 332939 - DNA, 122 bp, Homo sapiens
atcctagaggtccctggagtgaaggctcagacttactaagaggaaaaagtcttaactgtacggaatgagaagtcagagcttaggcagaaggaatcccatattcccagacagaacgcagaagg

SEQ ID NO: 332940 - DNA, 122 bp, Homo sapiens
ctcccctgggaccccgcggcctcccgcccacggcttttcccagccctgcccctcgccctccgctccagctggagcccaaacgttcccaggatccctaagcctccggccccagacaaacggga

SEQ ID NO: 332941 - DNA, 122 bp, Homo sapiens
ctctatgcggatatgaggaacgctgtgattttggtcagcagtcctgtgtggctggtgccacggtagaagggtgatctgagccacaggcttgcccgtgtccttgggccccacagctggcgacc

SEQ ID NO: 332942 - DNA, 122 bp, Homo sapiens
gctccatctctggctgtcccgacccaagcaccgcaggagtcacgacagaaatgttttcttcggcttctccaggtgaaatttccacaacacagaaagaacagaaagtagaagctgttaagctc

SEQ ID NO: 332943 - DNA, 122 bp, Homo sapiens
acactcttctcatttcgattaccatagattagatttgcctattcttgaatttcatataaacggaattataaagtattcactgtgtagtatttctttctcacacttcctgtttttgagatacg

SEQ ID NO: 332944 - DNA, 122 bp, Homo sapiens
ggcccggaggaaacgggggctgcgggttatcacaacactcccactctggctgtgagaaggcgggggtggggctgggggcccagagccagggcaccggctggacccctctgattaatgctggg

SEQ ID NO: 332945 - DNA, 122 bp, Homo sapiens
agggcgcaggaagctgcccagcacaggcagtggcactgacacggggtgaaagaccatgagcgctcctcgggacatctggcctttcacctgtgcatggttgggagggagacgggtttcttcct

SEQ ID NO: 332946 - DNA, 122 bp, Homo sapiens
gttttcctgaaggtggcagaccaaaaacactgccctgggggtgaggattcggccagaccccggggtctgggctcagctctaaggacaaggacggagctgacggagcttccaggtcaggcccg

SEQ ID NO: 332947 - DNA, 122 bp, Homo sapiens
ccacaggcaggcaagtctgagcttgttctctgggaattcgaggccctgcaggtcggagggcggggtggcgaggaaatggggccccaaatatatattttaaattgattgcttttcagatttca

SEQ ID NO: 332948 - DNA, 122 bp, Homo sapiens
aaagttatttatccaactcacttaattctccttaattacattattccagtaggatagccacgctgagctttgataaggtattataaaatgttccctgttttatttcctccccttcagtgttt

SEQ ID NO: 332949 - DNA, 122 bp, Homo sapiens
cagtcagcttttacgagagctgccagacagtgtctgttcacgttctccagataccaggggcgccctgacaaagttaaggtcaagttagtgtcttatcttgggtgactcaaaatcaccgcatc

SEQ ID NO: 332950 - DNA, 122 bp, Homo sapiens
ggctgggagcaggtgtgcgcccaactttaaaaccctcggtgcgcgccggagaggcgtcggcgtgaacctgggcacatcccgtctgtctttagctcgggggtggtgtgtgtgtgtgtgtgtgt

SEQ ID NO: 332951 - DNA, 122 bp, Homo sapiens
ggggggggggtccggcccgccccggcgcgcccccccgcctctgacctctccgccccgccgcgcggcgccgtgccagcttgccagcttatctggccccagagctccccggggcgcggggggag

SEQ ID NO: 332952 - DNA, 122 bp, Homo sapiens
tggccagcagcgcggtgtagtgcagcgtctcgcgcacggtgaggctgctcagcagggtgtcgctctgcaggagactcgggcgtcagtgtagcctaagcccccggggcgggcgggggggccag

SEQ ID NO: 332953 - DNA, 122 bp, Homo sapiens
cgcctgcgcacctgagtttattttctcaatgacactgaccactttctggagtgacctaaccgatttgttgtctgtggtctgtctgctccccctgggatgcgagcaccatgagacacggcctt

SEQ ID NO: 332954 - DNA, 122 bp, Homo sapiens
gcgcgcaggagaatctggagtggccggctttgtctccacccgcacagagaacagtgtcatcggcagtcaccatcggagcagagacgaccactgccactgctgccaccccttctcccctcccc

SEQ ID NO: 332955 - DNA, 122 bp, Homo sapiens
gagcaggttacttgtctttggttctgtcccttctgagatctttctctgtgtaaagcatgccgtctctcctcatctcacacggaaatcctgaacatccttcaaggctcacgttggagacgggt

SEQ ID NO: 332956 - DNA, 122 bp, Homo sapiens
aaaattaaggttcgtaaaaacagtttacagtgaaaacattcaaacacacagatggagaaccgcacagggagcacatgagccccccttattcagcctcagtaactacatctgacccatcctga

SEQ ID NO: 332957 - DNA, 122 bp, Homo sapiens
caggacactgacacacctcgcggaaccccacatctgaaactgaaaaacagtaccatttcccgtccccagaagtctggaaaggcagttggctgcacaccatggcccctgctcactcccttctt

SEQ ID NO: 332958 - DNA, 122 bp, Homo sapiens
ggtgcctcacgccgggaccctctagccctgcgtgccaggcagttctcagctctgagtaggcggcattttccggctcacatcccggcagagagcacacagacctgggaatggttatcggccga

SEQ ID NO: 332959 - DNA, 122 bp, Homo sapiens
ggtgccagccccagaaatgggttccaacagggtgactccagcctctccctctggcaaaggcggcggccagcagagggccgccgggagcttcttcagcaagttcaagttcaagttcacaagct

SEQ ID NO: 332960 - DNA, 122 bp, Homo sapiens
tgatcagggagaaggaggagaaaaaggtaaagattaggatcccatttattttgggaccctcgcccatttgtcacaaggctcttaaacattctctggtggtgtggccttatcagaagctgtaa

SEQ ID NO: 332961 - DNA, 122 bp, Homo sapiens
ggttaatgcttccagatcacctccctaaacaccacattgtgcactgaactctttttatcccgccttgaatcagaattgtgatcgccgtggggtgtgttctacatgactgataggctgcatta

SEQ ID NO: 332962 - DNA, 122 bp, Homo sapiens
gggaggctgaggcaggagaatggcatcaacctgggcggggagcttgcagtgagcggagatcgctccattgcactccagtgtgggcgacagagcgagactctgtctcaaaaaaaaaaaaaaaa

SEQ ID NO: 332963 - DNA, 122 bp, Homo sapiens
aaacattaagcacccaattgagcagaagacagttatcagactattttgcaaacaatgcctcgtgttagagatagcaaaaagcaaaagatttagcaccaagttacctgggttcaaattgtggc

SEQ ID NO: 332964 - DNA, 122 bp, Homo sapiens
ctgtaccgtgccaacccgcatggtgagtgggtccttaaacagaaccccacctaaaccctgcgagtctcaggagcagcctggatgcctcctcctctcccctgctggctctgtgtccatgtacc

SEQ ID NO: 332965 - DNA, 122 bp, Homo sapiens
catcgggtgctgtgggttcatccatgtctccccctccttctaggggcctcaatcccaggacgtcctcaaggataactggttcattagcagaaagggaaatggagacttagtgaggacacgga

SEQ ID NO: 332966 - DNA, 122 bp, Homo sapiens
gtaacactagggccttggaaattcctgtactgtgtctcatggatttggcactagccaaagcgaggcacccttactggcttacctcctcatggcagcctactctccttgagtgtatgagtagc

SEQ ID NO: 332967 - DNA, 122 bp, Homo sapiens
caccctcctctccccagtggctgcagctgactatgtattcctgaactggagccccagacccgccccctcactgccttgctataggagtcacctggagcctcggtctctcccagggccgatcc

SEQ ID NO: 332968 - DNA, 122 bp, Homo sapiens
gaagtcgcccctagaatccctggaggaagcacggcatttcggcctcagacttctagcctccggagccgtgagaggataaatatctgttgcattcaaccaccattttgtggtcatttgtttca

SEQ ID NO: 332969 - DNA, 122 bp, Homo sapiens
acagttgacagacattgtagtggaagtggatcacgggaaaacattttcctgtcatagaaacgttcttgctgcaatcagcccttacttcaggtatgatgatggtaggaacttctgttggtatc

SEQ ID NO: 332970 - DNA, 122 bp, Homo sapiens
ggaggcggagacaggagaactgcttgaacccgggcagcggagggtgccgtgagccgagatcgtgccattgcactccagcctgggtgacaaaagcgagactccatctcaaaaaaaaaaaaaaa

SEQ ID NO: 332971 - DNA, 122 bp, Homo sapiens
gtccctctcccttctccaaacgtccagatctttcccatcctttagggctctgctcaaagccggatagctgagtctgagaaagtgacccaacctctttgagccttagtttcccccctcccttg

SEQ ID NO: 332972 - DNA, 122 bp, Homo sapiens
agaagtagaaatcatagctggttcacactgaccaagatacttaagtgctgcaattgcacgcggagtgagttttttagtgcgtgcagatggtgagagataagatctatagcctctgcagcgga

SEQ ID NO: 332973 - DNA, 122 bp, Homo sapiens
agcccctatcccccccggctcttaggagccccatcacagggcggtgaggcccccgcgatgcggggagtcatatcacccccctctggatataacgattcacatcgcaggggggcgggcgcctc

SEQ ID NO: 332974 - DNA, 122 bp, Homo sapiens
gaaagggaaggcgcatgtgatgctgactaaaatggacaggtgtcaccttcaggtgggcagcgacactcggctgagacttgacccgcggggaggcggtggagcagcagggcagggtgctgttg

SEQ ID NO: 332975 - DNA, 122 bp, Homo sapiens
cactggatgaacaagaatcacagtttcgtgaacgggatattccatctcttccacctttaccgcccctcccacctcttccacctttggatagatatcgggatgatagatggagagaagaaaga

SEQ ID NO: 332976 - DNA, 122 bp, Homo sapiens
gagtggggcgcgggactctcggagagccgcgatgatggggggcgggggcaaccctgggcccgctcgccctgagacggggaagggccttggggctcccggatgccccctgccccgtcctgggg

SEQ ID NO: 332977 - DNA, 122 bp, Homo sapiens
cgtgggtgccttttgtaccgaaagaacttttggccgttttttcttgtattgttttcaagtcgctgcccgagtgtgtcctcagggcatcctggggaggagccggtgttgcggtttcggggcgc

SEQ ID NO: 332978 - DNA, 122 bp, Homo sapiens
tcgcatatccggggcggcctgggctcacccggaacagattttttcctccttggatgactccgtcatggacacctcagcccaggacaagcagagagcaaaccctggcagcgagaggctggagt

SEQ ID NO: 332979 - DNA, 122 bp, Homo sapiens
tccccagtttctgcccctgctatctccacccaggatccaccagaagatatgaagcaggaccgggacattcaggtgagttggtggctagggcttgggatgggggagttgggagggggacatct

SEQ ID NO: 332980 - DNA, 122 bp, Homo sapiens
gatctgccgctgggggtccattcagcagaaatgttggctcagaagcaaatatttactgcacgaggctggcatttgggtggggtgtcaggagtccagatagttggggttaacccccgccaaag

SEQ ID NO: 332981 - DNA, 122 bp, Homo sapiens
cagagctgcgctcagcgcgcagggctgggggttttgttcgctgtaatttccaagccgcggcgggcagagttggagcgggatatgtctattgagaacatttaaactccactttctcgggcttt

SEQ ID NO: 332982 - DNA, 122 bp, Homo sapiens
ccaggtccaggcccgcccccctcaaccccgccccctttcttctttccgcccccctcctcccgctggcaggccgcaagcagtaggtagcccctcagccattcccagccagttgccactaggag

SEQ ID NO: 332983 - DNA, 122 bp, Homo sapiens
ccacatgtcctgcagaagcatggcaggcgctgagcgtgggggacggctcagcaggcacctcggccatggtagatgccgagggccccaggacaagcatgcatgcacgccagaggggaactaga

SEQ ID NO: 332984 - DNA, 122 bp, Homo sapiens
ggagagagcacataaggttggagggaatgaggtgcttccagagtcaatgttaggaggactcggcagctacatagaggcagaagcccaaggcagaagaaagctacatggggtgggagatgaga

SEQ ID NO: 332985 - DNA, 122 bp, Homo sapiens
tgtttatcagtggctcattattaaagaaggtctctggactatagatttccactgtttttgcgataaaagattgaggtgaaaattctgtaggtaccttttgagtgataattgtttaattaatc

SEQ ID NO: 332986 - DNA, 122 bp, Homo sapiens
ggggcggaggaggagggaatgcaaaacagagcctcgtccccggaacccaagaagcagcaacgcccctcactataaattcggagctgcctcctcgccaatgattccagcgcctgacagccagg

SEQ ID NO: 332987 - DNA, 122 bp, Homo sapiens
agtgaagaaatgatcagtcatcacgaataggggggccagcccctccaccacccagggcagcgttccctgagctcgtctcttccagctgcccaaagatcaagggctgggtcaagtcggatgaa

SEQ ID NO: 332988 - DNA, 122 bp, Homo sapiens
acaagccccgaacctggtggatccacaccctcacttggccatgtaactctgcttcacgtacgtgtcctctgggacgaaatgatgagcgtgcctactttgcagaaccaattcaagaattaaac

SEQ ID NO: 332989 - DNA, 122 bp, Homo sapiens
tagcagtgttggcctgatcacaactgcaaagtaaatgcaggtatttatgaaaataaaacacgcaactctcacatcagctacttaagaaaatatttatatagtatatccctgggactcctgct

SEQ ID NO: 332990 - DNA, 122 bp, Homo sapiens
gaaatgttaccatcagcagtcacatatggtacttcccttaaaaggacacacatggccgggcgtggtggctcaagcctgtaatccaagcatttgggaggctgagacaggcagatcatgaggtc

SEQ ID NO: 332991 - DNA, 122 bp, Homo sapiens
ggggaggtgcctgcaggacccaacatactcaatgagcttccagcgcaatgtccgatcgctcggggccgactgccaagggaaaggatggaaagaagtattcctcgctcaacctgtttgatacg

SEQ ID NO: 332992 - DNA, 122 bp, Homo sapiens
ggccatggattccttgcggaaaatgctgatctcagtcgcaatgctgggcgcaggggctggcgtgggctacgcgctcctcgttatcgtgaccccgggagagcggcggaagcaggaaatgctaa

SEQ ID NO: 332993 - DNA, 122 bp, Homo sapiens
cgcctccggcggccgcgcccaggcgccccttcccctgtggggcaaccctagccggggacgcgtgaaccacctccgtagccgccccgccagcacccccagccgtgcgcccctgcaccacgcag

SEQ ID NO: 332994 - DNA, 122 bp, Homo sapiens
tctaacaagctgtgtttgtgcctcccccaggggggcttatataaggcataagctgtttcccgggctaatgtttgactttcttttgcggattaacgtcactggcagggagagtgctgtggacc

SEQ ID NO: 332995 - DNA, 122 bp, Homo sapiens
ggctcttaggctccatgagggcaggaatttttgtcgtcttgttcacagttgtattctcaacgcctaaaacagcgcttgcaatagtatgtgctggattaaaaattagctgactgaatgaatat

SEQ ID NO: 332996 - DNA, 122 bp, Homo sapiens
aggcagacgtcctggagttgctgctggagtttgtctacacgggctccctggtcatcgactcggccaacgccaagacactgctggaggcggccagcaagttccagttccacaccttctgcaaa

SEQ ID NO: 332997 - DNA, 122 bp, Homo sapiens
cgggagccgagggccgccgtgtgggactacctagcggggtgggtcagaagggcggcggggcgggccactaagtaaggcgaaagcccgggaggcgtggtgctgggcggggcgtcagggggcgg

SEQ ID NO: 332998 - DNA, 122 bp, Homo sapiens
aaccctgctggataggtgttgcatgcctcattagagacaggtagagcactggcctgtgatcgcattgccaggagtctcttggtgagctggcagataaactccctgactccaactcctggaga

SEQ ID NO: 332999 - DNA, 122 bp, Homo sapiens
caacccaccacatgaaacacgccagtcgtgtgccatctgagagggccgtgcgtcctcacacgagtcagtgatgcagcctgcggctccagctgctgctgggatgttcagagggtgtgtttcct

SEQ ID NO: 333000 - DNA, 122 bp, Homo sapiens
catgggcttaaggggactgaggacaggctgagcaggagtctctgctctggcacaagtgtccgagctgcatggtggctgagggcttagaagtttggagggcctgaccctccctggacaggagc

SEQ ID NO: 333001 - DNA, 122 bp, Homo sapiens
cgaagctcatgtcagccagcagaatggggatgtagaccggggctcgctctcgagcctgtccgcctcctgaacatgcctgtttgctgagcatatgattaagagaaagaaggaaagagggtcca

SEQ ID NO: 333002 - DNA, 122 bp, Homo sapiens
acagtgaccccacccaataaaatctttttatttgtcgtatctaaccaatctaacccctagcgcagagctagggggcgttcccaccggtgcgcgggcgagctgagccttccttacgtctgctg

SEQ ID NO: 333003 - DNA, 122 bp, Homo sapiens
gtccatcacaccaaggtctgtttctcacgtcaaggtcactgctccactcaaggcagcccccgctcacgaagctctggtcctgataccccgtccctctggctgtgccccaggccaggcagcgg

SEQ ID NO: 333004 - DNA, 122 bp, Homo sapiens
tagtatgaaacttcctccaggacaggactcgttaaaaaatagcagcttcactgctagaggcggctaacttgatttggagcaaagggtaaaaaacctacacagagcagtgtcagtaaaagcag

SEQ ID NO: 333005 - DNA, 122 bp, Homo sapiens
gccaaacgtatctagattaatataaacgtcctgcatgtgacaatttgcccccaccagaagcgattttttaacaagattgagcaatttacctgagaaaaacatttgacagagacagaaactgt

SEQ ID NO: 333006 - DNA, 122 bp, Homo sapiens
ttgttcttggccattgtcaggaattcaatacttgcgtgcagcttcttaaactccaggtgacgccgcatctttttttcaccttagattacagcatagacattttaccatgaatacatagtctc

SEQ ID NO: 333007 - DNA, 122 bp, Homo sapiens
cagtgctgcgtctagattctgcaggggaggtttgctgggaccttggctccacgcagccagcgaaatggtgaggctgaaaaatggggtctctagaatctgagttttggggaagggggcttggg

SEQ ID NO: 333008 - DNA, 122 bp, Homo sapiens
gatgcttttaacagggttgtgtaacgcctgtgtgtgcacggtctcttctgcagtgtccaccgaaggtggcccgtctgcgtgtccgctcccggcgtactccgcgctccctgttcccggcattc

SEQ ID NO: 333009 - DNA, 122 bp, Homo sapiens
gcggccttgtaatattttaatttctaggcaaagcttgtatcctccggatacaagaacagccgcccaggaggagcggaaactgacacacacccgtcaccccttgggctgtgactgccgagccc

SEQ ID NO: 333010 - DNA, 122 bp, Homo sapiens
caagggttccatgagccacataaaggcattttgcaaactacaacttgctatgctgatgttcggtggtgttcggcattttgcaaactacaacttgctatgctgatgttcagtggtgttctcat

SEQ ID NO: 333011 - DNA, 122 bp, Homo sapiens
gcccatgtgctactgacaagtgcctcagcttccccccggcccgggtcaggccgtgggagccgctattatctgcgttctctgccaaagactcgtgggggccatcacacctgccctgtgcagcg

SEQ ID NO: 333012 - DNA, 122 bp, Homo sapiens
cggtgtccggcccaagggcacttagctgagaggctggcgcctgcggaacctggtgccttccgtctcccgcgcccctggcccgcattttggagcctcgggaccccccggagccggacgggcca

SEQ ID NO: 333013 - DNA, 122 bp, Homo sapiens
tgccccctcagcccccggaggcagggtcctgcgaccagcaccccgcgggtcagttgccttcgtgccacctgggctccaagtcctcgccctgccggatgaagcaatggtctatttctttatgg

SEQ ID NO: 333014 - DNA, 122 bp, Homo sapiens
ttttgcaaggttgctgtccgtgcaggtagtccttcttagagcagcttcccaacaccatttcgcatgccgcatctcacatatccaccatatccaccatctttacggcttcccaacaccacttc

SEQ ID NO: 333015 - DNA, 122 bp, Homo sapiens
ctgagctccaccctaccacactggctccgctctcagtggcccgcagtgatccagatcacacgagtaaaagaccagctggactccagaggagagcttcgccccatcttccccttgtgggtctc

SEQ ID NO: 333016 - DNA, 122 bp, Homo sapiens
caatgtcatctctatcctcatcaaacagtccttgaactggatcctgaggaaaatggacagcgggtgctgcccgcaatgccagagaggactcttgcgatcacgcaggaacgtggtgatgccag

SEQ ID NO: 333017 - DNA, 122 bp, Homo sapiens
tccaacaggcagctgaggacctgtcattttggcctgcacatccaggagatgcctagttcccgggcttctagaggtgccccctagggcgaaaattcttccatttccctgcagcaggtgccttt

SEQ ID NO: 333018 - DNA, 122 bp, Homo sapiens
ggggaaatgttcatgtctccagtcttttggtgttgcccatttctaccctattggtcaaagcgtaatgtaactgatggatgccgaactgtcaatatttcagtttggtttggctcttggtaacc

SEQ ID NO: 333019 - DNA, 122 bp, Homo sapiens
cgccccatccaggtgcgccccgcgcccctcactgttccagtctctctgctcagcgtccttcgccaggtgcttcccgggcacttagcgcattgccctcgaggaacgcttatcgaattgaacat

SEQ ID NO: 333020 - DNA, 122 bp, Homo sapiens
gcacaggtaagatcaggggacccggcgcctgagctgccgaggaaggagtcgggggtgctgcgtgagactgagagttgggaggcaaagaaacaaaatcggatttcctcagagggccagaggaa

SEQ ID NO: 333021 - DNA, 122 bp, Homo sapiens
cctgggttaaggctgcttctaggaaaggcccataagggaggcaggagggacctgcggtggcgggggcaggggatgaggcagaggacatcctagaaatgtatcagagaactgcagataggaag

SEQ ID NO: 333022 - DNA, 122 bp, Homo sapiens
gcccacagggaggggagggaggtaggggcttgggaagtgcttaccttgctctgggcaggacggagagtccaatggccctgaaacagatgttgtttcttctgctgctgttgctggtactggaa

SEQ ID NO: 333023 - DNA, 122 bp, Homo sapiens
caagatggccgccttgggggggctctagcgcacagtggaatatggcggtgcttccggtcccgctgccctcagcgaagatggcggcagtggagaagcggcggcaagcggtaccaccgccggcc

SEQ ID NO: 333024 - DNA, 122 bp, Homo sapiens
agaaagagtcttaggaccagccactgctcaccgatgcttacacagagcaacaaaggaaaacggaagaacatgtctgctaatgtctgtgactgtccacagaggaaggaccctcacaatgccta

SEQ ID NO: 333025 - DNA, 122 bp, Homo sapiens
tcttcaggtccacagagaacagctgttcctcatcaaattcatgggtgaactggcccgaggcgccgtaagactggtagaaggcgggtccgtaggagcccatgtggtcagctgtgtttggcgag

SEQ ID NO: 333026 - DNA, 122 bp, Homo sapiens
gcgcttcagtgcgagtcataagactaggggcggggctctttcttgcttacagccaatctccgcgcttgaaagcggcgagaggggtggtgatgtagcggccggtgggcggggcgaccacgccc

SEQ ID NO: 333027 - DNA, 122 bp, Homo sapiens
gtgcattctgggccaggaggaggggcctggggaaggggggctgggatgccggcgagcccccggacccctccgccgccgcgtgttcctgtcccgggcactgttgtttttccggtctgctgagg

SEQ ID NO: 333028 - DNA, 122 bp, Homo sapiens
atctctcgtagtgttgattataccgcggaaggcgggaagagctgggaagtggcaacgaagcgaggcttgcaatgccagagccttcgaccagccttgcacaggggctcaacggccaggagtct

SEQ ID NO: 333029 - DNA, 122 bp, Homo sapiens
tgagctagggcggccaggcaggtaggatatggagccactgggacccgttttatccctccccgggccgcatactctgcaccacgcccaggaataacgtcttagggcctctgttgacttccctg

SEQ ID NO: 333030 - DNA, 122 bp, Homo sapiens
cattttaggtactgtttttattctcactagtgttaatcattttggcaattccagtatccacgtagatatctgcatggccctctgaattccttgacctccagtgatccttcatactactttag

SEQ ID NO: 333031 - DNA, 122 bp, Homo sapiens
agcgggggctgattcccccacccctgctgccaggctgtcccggcaggggtgggagagcctcgctcagggaagaaggtcccagctgccctcgccctcgcccgctcaggccacgtccttctcga

SEQ ID NO: 333032 - DNA, 122 bp, Homo sapiens
cactcaacacggccgctacatggagcatggttgcccgtgacacgccatgcggagacaggccgcagagacaggctgcagagacgctttccagcggctgttgggccactcttgaaggcactcat

SEQ ID NO: 333033 - DNA, 122 bp, Homo sapiens
tggcggttgctgctcggcatgtgacgtcccgggcgtttttctacacgcctcgcatccgcgcgtttcagagccacagcccctgcttacgctagagcagctgagggacagggaggctcagtaac

SEQ ID NO: 333034 - DNA, 122 bp, Homo sapiens
gtcgtggttaagagtataggcgtcagggccaagccgcgtgggtctccacgtgggctgagccgcttcctagcatcgtgactgcactcattccccagcccctgcgtcctcaggtgcaggatggg

SEQ ID NO: 333035 - DNA, 122 bp, Homo sapiens
tgtgtggacaccgccaagtagatcactttttctgtgaagttccagcacttctgcgattatcgtgtgttgatacccatgtcaatgagctgaccctcatgatcacaagctccatatttgttctc

SEQ ID NO: 333036 - DNA, 122 bp, Homo sapiens
aggactcgtctagagagatgaggctggcggggctgtgggcagggcatgtgggtgtggggacggtgtgggccatctctgagggcgcctcagagatggcagatagtgattacagcagctgtcct

SEQ ID NO: 333037 - DNA, 122 bp, Homo sapiens
tgctgtagaggtggacacatccccctgccaccctgattagaggaagccaggaagtaagggcggtttacttggaaactacaatgagaaccatgctgcagccccaagtggggaaggggagaagc

SEQ ID NO: 333038 - DNA, 122 bp, Homo sapiens
ggggcgcgggggcgcgggcgtgggtggagctggccgggctcaggggcctgggacacggggcggggccgcgcctctctcgctccgggtcccacgcgccccggcctcctcccggcactgtcccc

SEQ ID NO: 333039 - DNA, 122 bp, Homo sapiens
gcatcccctctccagaagcagttgcaacctcacagaccattcagagggaggcggggcctgcgatgccagctcatcagtgaatcagcatgtaagcaggtgagaagacagatgacaggtcactg

SEQ ID NO: 333040 - DNA, 122 bp, Homo sapiens
tgccctcttctcaggctcacagcatgccctggtttctccacctggacttaacagagtttccgccgttatctgggagatgaagaccagagggttttaggccctttgaaggaaggaacggttca

SEQ ID NO: 333041 - DNA, 122 bp, Homo sapiens
ccccgtcgctcgcacaactttttttccttccccgcctctcgcgagaggaaaagggcggggcgtcgccattttggcttccggttccccttgcggcctctgccacggtggttcgggaggcggcg

SEQ ID NO: 333042 - DNA, 122 bp, Homo sapiens
cagggtgtccaccggagaagccttcggggctggcacatgggacaaagtgtctgtcagcatcgtggggacccggggagagagccccccactgcccctggacaatctcggcaaggagttcactg

SEQ ID NO: 333043 - DNA, 122 bp, Homo sapiens
ggtcccttccttcgaagcagcctcagggtcagggatagggcgtggctttggtgatacaaccgcgatgtgaacgcctgagattttagtacttacagacggggggcacacagcacacctggagg

SEQ ID NO: 333044 - DNA, 122 bp, Homo sapiens
cagtccgggcctcagcacactctcttcactccccttcctccctccctgcctctcccaacccggttcaggatgactaatttcaaacgttatgttccgggggtttcaggagccgcccgctgctc

SEQ ID NO: 333045 - DNA, 122 bp, Homo sapiens
tgagcgagcgagccctgggcgagtgaattgtggctgtgggttgacggtggagacaccccccggagggaggcggagggaagggaggcgaggcctgcacctgcatgcttcccgcctcccactcc

SEQ ID NO: 333046 - DNA, 122 bp, Homo sapiens
ctggtaaaataggttatgggaaggggagaagaggcttgattagcaaaggtggcattgttacgtagatgaaacctccaacagagacaatggatggtaaacgtttctttttaaacttttaaagg

SEQ ID NO: 333047 - DNA, 122 bp, Homo sapiens
cctggtgcggagggggctcgctggattccaaggaccagggccagggcctccatggagtcccgttggaccctaaagctctgtccctccagcctttgtcctgatccctggcactgacccctgac

SEQ ID NO: 333048 - DNA, 122 bp, Homo sapiens
agtacctcatgctgtaagcgccggcgcccagttcctgcccgatgcccgagaggctggcgtcgaagtcgtgcaccagcccggactcgatcacctcgtccatcttgagcacccaggccatcttc

SEQ ID NO: 333049 - DNA, 122 bp, Homo sapiens
acctttgctccttacccagaatgtccagccactcttctggggccggggctggggcgggctcgggctccatggcagcaaggaactctcgggccagggccccaggctgctcagcctcctccgcc

SEQ ID NO: 333050 - DNA, 122 bp, Homo sapiens
catgggtcgtgattacggggaccaagactggtctgtcacgctcctcggcgtgatttacgccgtgcagtgatgctgtcagcgcatccttcacccgtgctgtccacctctcaaattaagacgca

SEQ ID NO: 333051 - DNA, 122 bp, Homo sapiens
ctgtgccattactaacctcaggggccgtggtccctgcacacatgctgtggcgtccacttacgaaggggtgcttcgtgtccatgtacctcctcaaaccctagtcccatctcaaattaagtgct

SEQ ID NO: 333052 - DNA, 122 bp, Homo sapiens
gtgcgcaatgccctcagaaggtactacctgaatgggcactggaccgtggactggcccggccggtacaaattttcgggcactactttcgactacagacggtcctataatgagcccgagaactt

SEQ ID NO: 333053 - DNA, 122 bp, Homo sapiens
aaaagaaaaaaaaaagttcctgggccccagaccagctctctctttgggttaaaaccccggcgtcccggagctgaggcgcacgtggctatgcttggggaggagagggcggggccggggaggag

SEQ ID NO: 333054 - DNA, 122 bp, Homo sapiens
gatagagtaagtaagccaatgcaataaaggcttttggcagggaattttctccattgatgacgtggggaagaggcacacagagagttctgtgagttggtgaagagtaacagaccaagttccag

SEQ ID NO: 333055 - DNA, 122 bp, Homo sapiens
ataatcccagacactcaggcacagtggcatttctagagagacaccaatgaccccattagtcgagaagctgtgggaaagcctgaaacaggtgagaaagcgatgaaattaggaaaatgaagttc

SEQ ID NO: 333056 - DNA, 122 bp, Homo sapiens
ctcgcgctctcgcagggcggcagcgaaggcgccgcgtcggggttggcgaaacagaaggggcgggggaagaaaggagggaaggaggcgggaggaagccgcgcgcttctccttttctgcaaagc

SEQ ID NO: 333057 - DNA, 122 bp, Homo sapiens
acttaaccatcaaccatccggctcctctttgagttcatttttgtgtgcctcctgtgcacacgtgcatattaatacattttgtatactttctctcctattaatctgccttttgtcagttgatt

SEQ ID NO: 333058 - DNA, 122 bp, Homo sapiens
taggcacctctcgccccttctctcatcagctttctcaggctatctagggcaaaggtcacgcgctgtcagcctgttgggggaccctggcttcctccctctggggttgccccagttggtagaat

SEQ ID NO: 333059 - DNA, 122 bp, Homo sapiens
ccgaggccgcttgcttttccttccgggctctacagtggcatcaatgtggaggggtcattccgggcactgcgcgcggcttcgaatcccgactgggattgttggcctgcagacatcccacgcat

SEQ ID NO: 333060 - DNA, 122 bp, Homo sapiens
tgagacgagcaaacattgctgcacacaaacaaatggatgggtcccacaagcataacgtttcgggagagaagccaaactcaggagtaatggctgcttccacagatggaaagctcagatgaggc

SEQ ID NO: 333061 - DNA, 122 bp, Homo sapiens
gacaacttctcctgtccccacatgcggctcccaacaaacaatttctcctgccctcacacgcggttcccaacgacaacttctgctccacaacatgacacccacggtgggagaagctgggggca

SEQ ID NO: 333062 - DNA, 122 bp, Homo sapiens
ttcggttaaccagcacccttgccaaacacatgaccgtgatttaaaacaacaagaaagcaacgacccaacacaatcttgacggctactgatgctaaagaccgctgctgaaagttctaaatggg

SEQ ID NO: 333063 - DNA, 122 bp, Homo sapiens
gccccctttcttcccagctcccccactccgtgggcgcccacactgcaccttcgccgggtgcgtgcgtcccgcctcggtgccctcactcggtcctcctgagccgacttccctttcatacccag

SEQ ID NO: 333064 - DNA, 122 bp, Homo sapiens
agaccagtaccatatccgacttcccctgactttgaaataattttcacctgcaatcaggtgcgcttccctagaacctctctcgctgttctttgcctttctccttcccccgccttgtatctccg

SEQ ID NO: 333065 - DNA, 122 bp, Homo sapiens
caggctggcaagtgaccaaaagagacccggggagcatctgggcttccaaggtcctcggtacggcccaaggcagcgaaggacgcgcggctccaggctgcgggagccaggacgaccgggggctc

SEQ ID NO: 333066 - DNA, 122 bp, Homo sapiens
ttgaggagtcactccggagaaagggcaaaagctgaaaccagcgctctctcctgtttgagacgaacccctccggtgctgcctcctattcatagtaaaagctgcttcacccttagtgcttcctc

SEQ ID NO: 333067 - DNA, 122 bp, Homo sapiens
tttccaggtgcgtctgtcacccctttctttgacttggaaagggaactccctgaccccttgcgcttcccaagtgacgcagtgccttgccctgcttcggctcgtgcacggtgcgcgcacccact

SEQ ID NO: 333068 - DNA, 122 bp, Homo sapiens
cgtggcagttgaaagagtggcgggagaagttgcaggtgagcgtccccggtcgcaggcctgcggattgggcagggcttccctcctgaacaccgctctgcagaatcttggtggctaaggtgtcc

SEQ ID NO: 333069 - DNA, 122 bp, Homo sapiens
gtatggtcagcacttatgttaggccctcaggaaaagttgacagaaccgatggatcactgccggtctgaaaaggaaatgaggaaaacaaattctcctaccttgaactattctgcaaactttaa

SEQ ID NO: 333070 - DNA, 122 bp, Homo sapiens
tgagccaccatgcctggccaggagcaggggttctgaagcctccggttttcttaccccaggcggaagtcacttttcaagaagatctccaagcagacctccgtgctgcacaccagccgcagctt

SEQ ID NO: 333071 - DNA, 122 bp, Homo sapiens
ctgggggagttgtgcaaagccccaggaggccggggcacggcgggagcaaagctcggtaggcgcagcgcggccgaggccacccgcgtccggatcggcgactcctttcagaaagaagatgacgc

SEQ ID NO: 333072 - DNA, 122 bp, Homo sapiens
atgattccttccagcagtgctggggaaatggctctgacagacactattattatggccagacgtttcctcctggaagagctgcaagaggtgagcctctctctctaggggaccaaactctcagt

SEQ ID NO: 333073 - DNA, 122 bp, Homo sapiens
ctgagaaagattaagctgcaggctccctgcccataaaacagggtgtgaaaggcatctcagcggctgccccaccatggctacctgggccctcctgctccttgcagccatgctcctgggcaacc

SEQ ID NO: 333074 - DNA, 122 bp, Homo sapiens
agctctttcaacaaaacaaccctgggttaatcccctccacctttaagttgctgtcttcatcggaggagaagctaaaagtgtgaaatatcaagttggttagactctgaagttcatttcgattc

SEQ ID NO: 333075 - DNA, 122 bp, Homo sapiens
tccccaaaactgacaggagcagagagaaacaaggcagaggcatgaagggaatgtcctctgcggcagatggtgcttccggaagagctcccacaatctgagctagaatgaacaggggctagatc

SEQ ID NO: 333076 - DNA, 122 bp, Homo sapiens
cagttgccagggatgtcttcagacttaagctctgaaaccatccttgcttgcagatgcttccgtggaaaagtgattttgttttaaatagcagtggaatgagttaacggcctaaattcaaatcg

SEQ ID NO: 333077 - DNA, 122 bp, Homo sapiens
tataataacaccaaatcgcatgttttaatgcccaccgtgaacaaagaagaccggaaccctcgcaactcgttttgacgttttctggtcggcggtaaaagctcggttcccggccctcccggaag

SEQ ID NO: 333078 - DNA, 122 bp, Homo sapiens
acggctggggctgcaggtgcgcgacaccgcaagggctcgggctgtgcgtgcgggacaccgcgatggctcaggctgtagcgtgcaatattgtgacggctcagactgagcacctgagaggcttt

SEQ ID NO: 333079 - DNA, 122 bp, Homo sapiens
gaggctccccgggaacactgggacacactccctgcccatgtggcctcagggtcccaggcacgacgagcgtccaaatgtgggacactccctgagggccagctgccagaggcctctcgggacgg

SEQ ID NO: 333080 - DNA, 122 bp, Homo sapiens
gcagccacgaggagccctagggcttgatgggaacgggaaaccttctaacctttcacgtcccggctccgcgggttccgtgggtcgcccgcgaaatctgatccgggatgcggcggcccaatcgg

SEQ ID NO: 333081 - DNA, 122 bp, Homo sapiens
ttctgttaagagaggagggcctagcccccagaggccccagtcctggtgatgacccaagcccggctcacctacaggaagccctaagacatggtccggcgaaggcagtccaaagcggaacctcc

SEQ ID NO: 333082 - DNA, 122 bp, Homo sapiens
cgcccgccagaggccggaggctgacagtgcctttcctatcctatgggtctattgtgggcccgcggagcccccatgggtgggtccatccccgggcccagtgagtcacttccccaggccccgga

SEQ ID NO: 333083 - DNA, 122 bp, Homo sapiens
ttgctccaagccacacggccgcatagggacagggactgggctacataacaagttcttcgacgctgtgatctaatcaaggaaaacctgggacgcagctaatagatgcgcatcgagtgtatcga

SEQ ID NO: 333084 - DNA, 122 bp, Homo sapiens
tctctcattccatacatgtcttgtccgtcgttccgctttccactaacattcgcagcagtccgcataaagtcttggtggcttcgctctgcatgatctcagcatgaactccagcagacagacaa

SEQ ID NO: 333085 - DNA, 122 bp, Homo sapiens
ctcctgtttgtcccaataaactccaatggaggaagaagctaaacaggttttggatggtttcggtctactgcatctagcttatcaaatctacagcctggtacttctggaacaggacttccctg

SEQ ID NO: 333086 - DNA, 122 bp, Homo sapiens
atattgttgtttgaaaatgtgtagcacgtcccccttcactctctcctgctctgctgttctcgtgatagttctcgcgagatcttgttatttgaaagtgtgtgacacgtcccccttcactctct

SEQ ID NO: 333087 - DNA, 122 bp, Homo sapiens
aggtcccacggggcagagtaggctagggtcagcacgcagttgcggtggccccggaactcccgggacatctgccccttgtccacactccagacccgagctgtccggtcataggagctgctgaa

SEQ ID NO: 333088 - DNA, 122 bp, Homo sapiens
cccttttgaacgattttaggatcctttgttcaggttctttgagagagaagtgaagatgggcgcaaagctgcttcaggacgttcgccaggaccttgcagatgtcgtccaggtgtgcgaaggaa

SEQ ID NO: 333089 - DNA, 122 bp, Homo sapiens
agaaaggtggatcccaacaacaggaaactacctaaatcaccgaccagttctggtgctgcccgcgaagggctgcctcgcccgccgccgccgccgcctccgccgctgccgccgccgccaaggag

SEQ ID NO: 333090 - DNA, 122 bp, Homo sapiens
cagatgctcaggtcaaaaactgaaagttgcttttgactcctctatttctgtttcaactctcgtctaatccaacagcaaatccccttgatgctacctttgaaatataactagaaaagaatgac

SEQ ID NO: 333091 - DNA, 122 bp, Homo sapiens
tcttcttactcgccaagctctccctgctccagccaaggctcctgggtctatgaactgtaacgtcaagagagaatactgtcaacaacagtaagcctgactgcagagagtaaacacaaggagaa

SEQ ID NO: 333092 - DNA, 122 bp, Homo sapiens
cctttggtctcacgcggcttatagaacctgcttagactgctaaggcaaggccctctcggccgctccactaacttttcttctggaatgcttagctcagagaagacagctaagcccctgaaagt

SEQ ID NO: 333093 - DNA, 122 bp, Homo sapiens
ccagctggggaacctgcgacatgtgatgtggggtctatggggcttgccaggcctagggaccgggatctgaacattctcccctagtttctcttcatcagcgtgggctgtacgttcagtgtata

SEQ ID NO: 333094 - DNA, 122 bp, Homo sapiens
ctcgatctcctgaccttgtgatccgcccgcctcggcctcccaaagtgctgggattacaggcgtgagccaccacgcccggccaatttttggtaatattaatacatctatggaaaccctattca

SEQ ID NO: 333095 - DNA, 122 bp, Homo sapiens
gagttccagtgggaaagaggcttcctgagtcacagtgagcccaggagacccggcggcggccgcaccgggacccggggtgtgtggagacccggcggccacacctggacccggggtgtgtggga

SEQ ID NO: 333096 - DNA, 122 bp, Homo sapiens
gcccacagcctccaaccagggcaaaggcatcttcctgctccggaaccaggaggaagttgccgccctgcaggccaagacccggagcatggaggacgaccccatccaccacaagacgccgttcc

SEQ ID NO: 333097 - DNA, 122 bp, Homo sapiens
agatgctctggagggcgccggctgccccagggcagaccatcctcacgctggccgcgtggacgcagggccacagcttcctccgcgaagccctctgcttgctcaacggcacctgcacagggagg

SEQ ID NO: 333098 - DNA, 122 bp, Homo sapiens
aaacaaagaccaccaggggctaagccttgcagatgaagtagcacttagttttttcttttgcgtttctattttttaggtatatcccagctgtggttgaccacacagcaggcttgccttgccag

SEQ ID NO: 333099 - DNA, 122 bp, Homo sapiens
gagagttacgattaatcatttattggcatgataatgaaccatgccatataaaaagagccacgttaatgtttaatgtcctcgagggtttgttggataatttcagttaagtgacttttaaaatc

SEQ ID NO: 333100 - DNA, 122 bp, Homo sapiens
cgggagaacatcaaggccagcaccggtgaggggctgcggggacgagggccgggggcgagccgcgttgggctggggtgaggccctggagggactggggctcccggatcacggcgcccttcccc

SEQ ID NO: 333101 - DNA, 122 bp, Homo sapiens
ctagcagcaacaagtgcccttgagacgagggctgggggttgaggtggggtgactgaggcgcggagaaccaggggtatccccctgggcaaattcactcgatttgcattttagagggccatcag

SEQ ID NO: 333102 - DNA, 122 bp, Homo sapiens
ttctgttccctttctgtattcatcacaggaaattttcaagttttatgaaaccagctagagcggagttttattaaccagctgagggcggactaaagacttaacagacctgggcgaagaagcag

SEQ ID NO: 333103 - DNA, 122 bp, Homo sapiens
agagcgttgaaagggcgggggcttagagattgtccaatcagggcgccgcttcctgagctccgaggccccgagggcgggacgtttcgtcctccctgccgcgcgtgccctgcctaccacgagcg

SEQ ID NO: 333104 - DNA, 122 bp, Homo sapiens
aggacctgccccccactctgcacaggtaccagcttctcccactcccttcccagctgcccacggtgggctggaagttcagatcaatagcagcaccctgcaaagcctttgaccaagaatgcagg

SEQ ID NO: 333105 - DNA, 122 bp, Homo sapiens
gaggcggaggggaggagggcttgcggggctggggcgttagctgcgtcccggctggaagcccgcgaagagaagtaggaggaaggcgccgccgtggccgcggccgcagtgctcgggcgcgacaa

SEQ ID NO: 333106 - DNA, 122 bp, Homo sapiens
aagatgataattatgaagaccgtggcagcaaaggaaattgcttgcgatggcatttctgaacgagcagggaacaggatttacctgcactggggacaccacagaggaaaagtggtgtctgctca

SEQ ID NO: 333107 - DNA, 122 bp, Homo sapiens
actctgtgctaggaacctgctagaccctgaggtctaaagatgaacaatatgtggtccccacgctcaaggagcttagagtctagcagaggaggcaggttacaggcccatcaaggaggagaggg

SEQ ID NO: 333108 - DNA, 122 bp, Homo sapiens
cagagtgtcatgttgcctgggttttgtccttcagtctaagtgatacacctcttagtgtggcggagaaaagggtgctgtatttcttcctgatggatacatgcttaaatggaaaagtagcatga

SEQ ID NO: 333109 - DNA, 122 bp, Homo sapiens
aataaaaggtcggaacatcataatcactgtcagactcaacttccatcattctcctccaggcgctatggagtctaatccaggcactttggaaggctgaggctggaggatcgattgaggccagg

SEQ ID NO: 333110 - DNA, 122 bp, Homo sapiens
ggctgcgcccgcccccgccccatcctcgtccgcgcggtgccgcgcctctccgccccactccggggactgcagctacccggaccttgcaagccacccttccgagcgcccccaacccgctcggg

SEQ ID NO: 333111 - DNA, 122 bp, Homo sapiens
aatcggccgtaacctatgggaccccgctcccttctacgggatctggacctaccatggctgcgtcggtccaatcccgggaaccctcgtttgttaccggctactcaggccttgagataaaccca

SEQ ID NO: 333112 - DNA, 122 bp, Homo sapiens
gcgcgcacgccgcccagcttcggggccgcagagggggcggggcgggacgtccggggagtgcgcacgcatcctgcccgcggcgcgcgcgcaggtcggtgcgtctgtcgggggcgcgctcgggt

SEQ ID NO: 333113 - DNA, 122 bp, Homo sapiens
ttatctttctgaatcttcaaggtcctaaagcattgcttagtaattttgtttctaaactcacgttacagcactgggcatgatctgtccaaggcagagactataagctactcttatagtactct

SEQ ID NO: 333114 - DNA, 122 bp, Homo sapiens
agtgagctgtgctcagcagtgcttggacacagagctgcaagctgcgctggggtggaggaccgtcacttacactctgcccaaggcagaggtcgcattgctgtatcacagtattttattcaggt

SEQ ID NO: 333115 - DNA, 122 bp, Homo sapiens
cgggtgtgaggcttcacagcggtccggtgaccaagtcgaggtaagggtgatgtcggctcgcggatagcagaggagttccgggtgatcttgcctaacgagcaggaaactgtgcatggtttctc

SEQ ID NO: 333116 - DNA, 122 bp, Homo sapiens
ggtgaaagggtgacatcacccaggattgctccacctctggggcaattatcgggagcagggcggccccagtcagacgcaggcagccccaaagcctgaacaggcagggccagacccaggtaaga

SEQ ID NO: 333117 - DNA, 122 bp, Homo sapiens
ctaaacccgggtgggcgcggggcggttagcggagacgtgggagaggccgagagcaaagctcgcgcccttcccggggtcagcgagcggggtgccaggagggtgcgcgccctgcatctgagccc

SEQ ID NO: 333118 - DNA, 122 bp, Homo sapiens
actgtcgttggaggaacaccgctgttttctagaggtcccacagccgtccttctgttcatgcggagtacgggccagcagcttcattttcctaagagcatgttaattccgtttctcatctggct

SEQ ID NO: 333119 - DNA, 122 bp, Homo sapiens
aaacccaagctctggccaaggctctccccgcgttttcttctcgtgacctggggaatgtcccgccccatcgctcacctggctcttgtcatctcgctcatcttgaagtgacccgtggacaatgc

SEQ ID NO: 333120 - DNA, 122 bp, Homo sapiens
atcaatgaggacttccggacagagtcaccccccagcccaagcagtgatgttgaggatgcccgagagcagcgggcacacaatgcccacctccgcggcccaccaccaaagctcatccctgtctc

SEQ ID NO: 333121 - DNA, 122 bp, Homo sapiens
gcaattccactcagcagtgctatttcagttctttctgattttcagaccgttgaggggaaacggctatttttagccctgccgagctttcagggaaaaaaagacttgacttccaaacagcagct

SEQ ID NO: 333122 - DNA, 122 bp, Homo sapiens
cgttcggtggccccagcctacagatcgcacacaagcccccgccccatccctcattggctccgctcggccagacccaccgcccgcccacttgaaaagtgatacaaccagggcgcttcagcccc

SEQ ID NO: 333123 - DNA, 122 bp, Homo sapiens
gcagattctcccaggccagtggatcccgagccaactcggccgggcgctggaggcaggtggcggtaagttgagtgctctgatccagggtttcgctcagagcggcggcgaaggagaaattcccc

SEQ ID NO: 333124 - DNA, 122 bp, Homo sapiens
ccagatgagcctcaagtccaggctaaaatcatggcctatttgcagcaagagcaggctaaccgaagcaagcacgaaaagctgagcacctttgggcttatgtgcaaaatggcagatcaaactct

SEQ ID NO: 333125 - DNA, 122 bp, Homo sapiens
aggggccaggagggcctgtgggccgcgggcaggaccggcccgccacagagcccctgcccacgtcccgttccgggctcagacccgacaagtgggagcgagatcaacatctggccccgccgcgg

SEQ ID NO: 333126 - DNA, 122 bp, Homo sapiens
cctccaggcctggcactcgccctcagcaaagatggcgcggacggtctcaggcgcctcacgcgacccacccgccgggctcctccggcgctgctcttagccccgcagacggctgccgagcggtg

SEQ ID NO: 333127 - DNA, 122 bp, Homo sapiens
ccggaggagctccgctcagtaacatggggccagccagactgagcgaggggagcgcagcggcgggtggggggcgggggcgggggtggggaggggggcggggctccgccgggcggggagggggc

SEQ ID NO: 333128 - DNA, 122 bp, Homo sapiens
cttcccttcgttaattagtccatcgcatttcaagtgctggatcctttttgtcccctactgcgtgcggtggcagcttccttgcggaagtggtgaccgtgagagaagaagatggcggcccctgt

SEQ ID NO: 333129 - DNA, 122 bp, Homo sapiens
agccacggggctcctctcccagcacggccccggccaccctggcccacactcaggctccttcgtagctcctgttgcctgctgaatggtcctgcccctgagctggcacttgaggcctgcaacca

SEQ ID NO: 333130 - DNA, 122 bp, Homo sapiens
ccacgctgcacgtgctcctggtggacggcttctcccagccctacctgcctctcccggaggcggccccgacccaggcccaggccgacttgctcaccgtctacctggtggtggcgttggcctcg

SEQ ID NO: 333131 - DNA, 122 bp, Homo sapiens
atgaaaaagtaaacacaggagaaaactaacatttgcacggtaggagatacatctataacacggataatagactcttactgagagattcttatcaaagcaaatttccatttcaatttaacaat

SEQ ID NO: 333132 - DNA, 122 bp, Homo sapiens
ctttccgaccgagcggggcacaggctgaggcggcgccagcacaactgccgccgcgcgccccgaggagacccgggcacgaggaaacaaggagaaatcaggactccttccccggaaccgaccgg

SEQ ID NO: 333133 - DNA, 122 bp, Homo sapiens
ttatttatctctcttttcagccatttgttgaatttttttccttaccctttcctatgcacacgcatacacaaatacacacacaaacacatacatatacacaaattactaagaagttaaagctt

SEQ ID NO: 333134 - DNA, 122 bp, Homo sapiens
tatatgattgggtttttttcccatcctttatttcttgcaatcctctcccaacttatgacccgaatgcattttattcccttctaagccaatatgaaaatcacttctatcagttgataacttgc

SEQ ID NO: 333135 - DNA, 122 bp, Homo sapiens
ggaccggcgccttaggctgcggggacagcagtggcgccggacgcggcggcagtgaggggccggtgaggcgctgggtggggcgggggttcccggatttcgcaaatggaaatgcaggactcctg

SEQ ID NO: 333136 - DNA, 122 bp, Homo sapiens
cgagggtgccgaggccggaaaatgagcgctgcccgaagggtggcccggagctgcaggtaacgcggtccagagctcaggccggagcgggccccgcacaccgtcccttccccgcagcgacccgc

SEQ ID NO: 333137 - DNA, 122 bp, Homo sapiens
tttacaaccctccctttcacccttggtttactagttaatgttgaataagctacttgtagacgaaggaagacaaaattattgattgctcagctttagttttgtagagagatatatattataaa

SEQ ID NO: 333138 - DNA, 122 bp, Homo sapiens
agagcctgggcccggaccagtcctgatatacccagggagggcggtggggtggagcagaaccgcccgaccacagctgattacaggctccttggggtgacctctaggcctgggcacctcaggca

SEQ ID NO: 333139 - DNA, 122 bp, Homo sapiens
ggagggcctggcagcaatgtgtgcctaagtttggcaatctcctccccatccctcactcaccgtcatcgccccgtttcctacttttcaggttgcccttacggtattttcttttgctgccacct

SEQ ID NO: 333140 - DNA, 122 bp, Homo sapiens
gtcccgcctctctaatcaggtctaagggaggggagcagctcatgccgaggaggaagtgtgcggaaacgggtaccctggaaacgggaggagcaggcaggaatccaacacccatcccagccccg

SEQ ID NO: 333141 - DNA, 122 bp, Homo sapiens
gccgcaataaagccaaaaaatatgcccctcctacctagcgggccaagtggcaagaacgtacgagaagtcaggaagttttgaaatggcagtgacaggagacgggggaaggcacgggaaggaat

SEQ ID NO: 333142 - DNA, 122 bp, Homo sapiens
gcccccgcctgcgcaccggcaccgacgcggagcgacccagcccagccagacccggcccggcgcggcctgatctaacccagccaggcaggtgggtgtccgccctgcgtcccgcgccgtctgcg

SEQ ID NO: 333143 - DNA, 122 bp, Homo sapiens
accaaaaaagagataatggtgagaagctactgcagcatccaagagatgattcttattgaccggattagagaggaggggaaataaaggaaggctcccagctttcttgtttatacaacctagag

SEQ ID NO: 333144 - DNA, 122 bp, Homo sapiens
acgagggtaagtcactcctctgctttgctctctactgcatatgtaatgcttaataggaggcgctccatgagcatttgtcaatgttaccagtgattccattccaggtgaccagatggatggtg

SEQ ID NO: 333145 - DNA, 122 bp, Homo sapiens
ggctgcagcccccggcgcgcgcagcctcctgcttcttggactttggtgaaattgtggctgcgggcccgcgctgcttccgatccacggcgccgctcaagcgaaggctcagggggtcccccgcc

SEQ ID NO: 333146 - DNA, 122 bp, Homo sapiens
ggcggagaaggagagaacagggctccctgtgtctgatctttaatccccaggaatcccgctcggccttttagggcccatgcacttgctgacacgacatacattcgccgcctatgtcgggggcg

SEQ ID NO: 333147 - DNA, 122 bp, Homo sapiens
ggctcgaagtggccagggccggaaggtccgcggggggcgagcgcgggtcgggggccgtcccggacccaccatgaacaccaagaagagaggtaggacccagctcggggctgcgaaagctcagg

SEQ ID NO: 333148 - DNA, 122 bp, Homo sapiens
aaaagagtgagtatacaaaaagcctgtaaaatacataacacactgcctccttatgggaggcgtcctgtgtctcacactctctggagaacagagaagatgtggttgtcagctatccacagatc

SEQ ID NO: 333149 - DNA, 122 bp, Homo sapiens
agcccaattccaagagtcccccacgtgaacctcccaataatatttgccagatgtgaaagccggagccccccctacaagaaaacattcagattttgcagtgatatcgggatcatcttgagggt

SEQ ID NO: 333150 - DNA, 122 bp, Homo sapiens
tcagctctatgttcattacctcaatagagactacttgtttctgtgtctgcagtctcatcgcgctttgcttgtgtgcatattaacagcaattattttattctactatatattattgttgccct

SEQ ID NO: 333151 - DNA, 122 bp, Homo sapiens
caaaatttgggaaatactacattgtgtatacctctttgtgagattcacaagaacctgtagcgtaataaagcctctgagaagacttgcagcaagaaacctctttaagctttgtttggtatatc

SEQ ID NO: 333152 - DNA, 122 bp, Homo sapiens
aggcagaagctggggtgtggaggaccacgatcctgaagaaccccgtcctctggaccctggcgcagcaggaggggagaagcccgcagaggcccggacgcccccctcaccggcccccgccactg

SEQ ID NO: 333153 - DNA, 122 bp, Homo sapiens
tccgccgggagcccggaaccgagcccaggagccggggacggtgcgccagtgccccctccgcgagccccaaccagtagacggttccctgtctcccgcgccccaatttcgattttcaaacgcaa

SEQ ID NO: 333154 - DNA, 122 bp, Homo sapiens
ctcctgctgcatttcatgagtccagcggagtctgttccaactgcaccccccaatcctggacgtgctgtgggctccaagcgatgctttggtcaccggctcttttcctctgtgtctcgactctt

SEQ ID NO: 333155 - DNA, 122 bp, Homo sapiens
atctatggcggtattagatgggctcaagccaccccgtagccccatgcctggccttggagccgggtgccctcgcaatggctgtgtcacctctgtgccccagggctcagtggcgcctctcatca

SEQ ID NO: 333156 - DNA, 122 bp, Homo sapiens
gtaaaggaattttagccctaagaaggtgtctgctaggtccccactgatgagcaccccagacggagtgatctcaggtcaaacgtccctttcagaagagaatgtggcaggaacaagaaagattt

SEQ ID NO: 333157 - DNA, 122 bp, Homo sapiens
tttactcacacagattcacccaacaaggtctatccagaaacatgactggggagcttgtcacggacgggaagccatttggctcatgagaaaaggggcatgttccacacgtgctctccaggcag

SEQ ID NO: 333158 - DNA, 122 bp, Homo sapiens
ggcccatgaggtcagagacagtatctccattgtaacgtggccgggcggtgtcaacacaaacgcccccaccctcccctggacgcgcgtaacccgctccccgcaccagccccctgcccacaact

SEQ ID NO: 333159 - DNA, 122 bp, Homo sapiens
gctttgaacaaggcaatctctctgaagctccttgaagcacagaaattatttgcatacgtacgtaatagaactgttgtttgagaaacaacagtctatgtcaattaaacgctggcctaacaggc

SEQ ID NO: 333160 - DNA, 122 bp, Homo sapiens
ctctcacccctgagctaagcagaataagaggggctggacgtgcaggactcagagtgggagcgaggagggctggggtgaggacagctttgtcacactctgtttttctgtcactcagccctggg

SEQ ID NO: 333161 - DNA, 122 bp, Homo sapiens
aagttgtctaaaagacattaagatggactgtttttgaagttgctctgacagtaacacatgcgcttttctggtttgtgctttgcagaagtgaaatttgtctgtcaaactccagcaattgctga

SEQ ID NO: 333162 - DNA, 122 bp, Homo sapiens
agcttacatttctttggaaactaaacatttaaaataaagattatttgctgtaacttaaaccgtgttttgatcactggaatttgcagcagttgtttcagggtatcatgggattctttttgttg

SEQ ID NO: 333163 - DNA, 122 bp, Homo sapiens
ctggacacataatgttactgtttcgttcttattagtcacatgtgtttggggctaccccatcgtaaccacatgagagtactgttggcaaaacaaaacaaacaggatgtttaatgacaagaaca

SEQ ID NO: 333164 - DNA, 122 bp, Homo sapiens
cccacgtggtggtgcttgttgccactgtcagggctctcaagatgcacgggggcggccccacggtgagtggtgggttgaagtatctgattatcggcagtgtgctgacggccaaaaggaagttg

SEQ ID NO: 333165 - DNA, 122 bp, Homo sapiens
ggtccgtgtgcaggggcgggagccactcactgcctccatgttggctgcagcacccccgcacggaacagaagcagatgctgggagaacgcgtgttcccactcatccaaacaatgcattcaaac

SEQ ID NO: 333166 - DNA, 122 bp, Homo sapiens
tgatacttcgggagccacagtaagggacattcatggtgatgggagtgagcagaaagccatcgagggagcccccaaaccaggcaccagcagccagcaaaagacacttcttgcggttcatcagg

SEQ ID NO: 333167 - DNA, 122 bp, Homo sapiens
aatggctcacgggacagaacagcgaagcagtgcccggcaagcggagcgcagcacccattgcgcctgcgcataacaggctctagtctccgggctgtgggaagccagcaacacctctcacgcat

SEQ ID NO: 333168 - DNA, 122 bp, Homo sapiens
cagcggacgcagttgcgcatgaagtcgacacagaggcttgtgtagtaagtagggtagtcacggaggtggctgacgtgtgcagatgacacgaaatccacagaacgcgccaggacccggcgtgc

SEQ ID NO: 333169 - DNA, 122 bp, Homo sapiens
gagcctgccaggcgggttcccgcgggcgcagccgagggtgcagctaggctccgggtcgcccgtgctgcccccagggtggtggaaaggccctggacattcttctgaaactagaaagtcaagtc

SEQ ID NO: 333170 - DNA, 122 bp, Homo sapiens
ctcccggtggttaaaggcccgggagacctggtggcgaatcctggggcgcgtccgctttggcggagcgctgggctccgctagccggactggttccccatctaactgatctaatcaatgactcc

SEQ ID NO: 333171 - DNA, 122 bp, Homo sapiens
cgggccctcgcagagctgggtggacctgtttgagggtcaggtcatcgtgcttgacatcaacgacaacacgcccaccttcccgtcgcccgtgctcacgctcacggtggaggagaatcggccgg

SEQ ID NO: 333172 - DNA, 122 bp, Homo sapiens
gtgtggcacttgctttgagcagcgagttcgatccggagtgaccaaggattttgtgtgcggcgtcactcgggcttaccgtgagacggcaggaacagccggccggagccccgcaggcggcccct

SEQ ID NO: 333173 - DNA, 122 bp, Homo sapiens
tcagacttcagtagctccaggaagtcggatgcagccgcaggccatccctaatcttagagtcgccgaggaaattctcccagactttcccagcctctcaccacacagaatgacactgagtgtta

SEQ ID NO: 333174 - DNA, 122 bp, Homo sapiens
gcttgccagagccccttcctctcttgtttcccatggaaacggcctcttcagaaggcagatcgggctgtctctttcctgtggaaatagaactgtcgtaaaggtgtagaagggagagaagttgg

SEQ ID NO: 333175 - DNA, 122 bp, Homo sapiens
gggcgccagggagggcccagcgaggtgggctcagccggcccctcactccccggcccccgccgcccccgggcccacggacgaaatccggtcccgcccgcacacgcaaactccgctgggactgc

SEQ ID NO: 333176 - DNA, 122 bp, Homo sapiens
cagagtctcaccctatcccctccccagctcagggcgacaggagcccagccacgtgcgtcccggggccgccatcacagcccctcagaagccgccttaacacggactaatcctgcagacctgga

SEQ ID NO: 333177 - DNA, 122 bp, Homo sapiens
cctgggggaagaacagtgatttagggtatgggtgacaagcaggttccatagattgtgagccggtaggaggtctgtctactagaagccagttatacatgggtgactaaagtgcagtcaagctc

SEQ ID NO: 333178 - DNA, 122 bp, Homo sapiens
ctgggttgggagcctgaggctcagtttccccactagaggtggcgctgagacccttttcgtcgctgtttttggcttgtggaatgaatttgtctgcccttttttgtcactcactgttgtgacag

SEQ ID NO: 333179 - DNA, 122 bp, Homo sapiens
cttctcactcccgacctgcccgccgcctgccgcccgcagccgctgccccgctggtgcgaacgctttcgacttgccaccgcgagcctcccgggctgccgagcatgcccagtccgctgcccgag

SEQ ID NO: 333180 - DNA, 122 bp, Homo sapiens
cagcggccccggcccagagcgctccacactcggagctagccagctgggacagagcaacagcgcagcgcgggcagccacagcctgcaccggccccgcggggacctgctgtgtgtgggtgtgaa

SEQ ID NO: 333181 - DNA, 122 bp, Homo sapiens
caggcctttttagcccccgagccaggatggcagcctcttctcctgacctcattatgtcagcgcccggattgtgtgctggggctgggctggggacaggatgttttctgcttctccaggacatt

SEQ ID NO: 333182 - DNA, 122 bp, Homo sapiens
ggtaatccgcccttctcggcctcctacagtgctaggattacaggcgtgagccaccgcgcccggtcgttttatttaaactctggctttgcgtgtggaagttgttacctgcctggaatgggctg

SEQ ID NO: 333183 - DNA, 122 bp, Homo sapiens
taggtgcaaggtttgtggagggcggcaaactgcactccatgtggcgcgaggctgcgcttgcggagatccgggttctggtgcctggcgccggcagccagtaggggcgcgcgtcctgcgcagtt

SEQ ID NO: 333184 - DNA, 122 bp, Homo sapiens
aatgcaacagagagcccaaggcaggcctggtctggggggaaaatcatgtgcagtatatgacgatttaataaagcagagaacagacaggaaaaataacacatctcagtttgacaggatgctac

SEQ ID NO: 333185 - DNA, 122 bp, Homo sapiens
catcctgtgtgtccagcagtgccagctgtgcccatgattgacggaggccttggaaccaggcgcctagtgtccagtccggtgaagcgctggaaggcgagagggggaagggctggaaggcggga

SEQ ID NO: 333186 - DNA, 122 bp, Homo sapiens
aagggcgcatctataaatgcccgtagttgagctgttaagaaggagaaggtggcggccgttcggcccctcacagcactcaagggcggaagggtccagccaccagcgcaggcactctcccagcc

SEQ ID NO: 333187 - DNA, 122 bp, Homo sapiens
gagcagacgttgtgggggggcccaaggggtgtcctcacccagacagatcgcctcccctcccgggacctccttggcctctctgtctgtaatgaagtacagtcacacagcattgcagagtggga

SEQ ID NO: 333188 - DNA, 122 bp, Homo sapiens
ccctcagcctgcgtcccctctgccgcctcaggccatgtcaccttattgcaggttcctctccgtcccctcggcccgagctctgcgtgccctaacccgccacctccgagcgtgactccttcgtc

SEQ ID NO: 333189 - DNA, 122 bp, Homo sapiens
aagccaagaggcaggcagtaacatggaactccccaggctcctgagacctggaccagccaacgccaggcctgggggtggatccacacggggatgcaggtcctgcctctggccacgaaggaggg

SEQ ID NO: 333190 - DNA, 122 bp, Homo sapiens
atgtaaagaatctaatccagcacctggatatacagcatggtaaatatatacaggcctccccgttcctccctatgactgtgattcttatctcttctgatggctactattttcaaagtcagcca

SEQ ID NO: 333191 - DNA, 122 bp, Homo sapiens
actcacctcatccccaggtgagtgggaaaatgcctgcaatgaaatgcaacggatgctgatcgttcgctccctgcgccaggaccgcgtggccttctgcgtgacctccttcatcatcaccaacc

SEQ ID NO: 333192 - DNA, 122 bp, Homo sapiens
accatcaaagtgctgttgccacggaagcagcggtacagtagtctgcgcttgcctattgagcgtcctttgcccgtcacagttacccttttcagtagccctcgttggaattttccttctggtgg

SEQ ID NO: 333193 - DNA, 122 bp, Homo sapiens
tcgcggggaaggggcggggaccctgagcgaaaggtgcggaggcggcctgccggggtggttcggcttcccgttgccgcctcgggcgctgtacccagagctcgaagaggagcagcgcggccgcg

SEQ ID NO: 333194 - DNA, 122 bp, Homo sapiens
tgaacggcaccgaggttcccgccgccgagccgcagcgctgtgcaagcccccgatgggcgacggacaccaggccccagcccaacgcgcttcctttggctcctcctgaactggggggggggcct

SEQ ID NO: 333195 - DNA, 122 bp, Homo sapiens
ctgcgcgtgagtgcatgcgtgtgagcttgtgcttgtgcctctgctgggcacgactgtgcgcgccggtgctcacctgtctctgcacgggcacatgcactcactgccttgtggaggcgcttcgg

SEQ ID NO: 333196 - DNA, 122 bp, Homo sapiens
ataagtgacaacagaactgggcaagccagaagagaccaggagtggaagtcctgccagactcgggagatcaataaaatgaatgggccaaggcaaggagtcaacaattatagacagaccatctt

SEQ ID NO: 333197 - DNA, 122 bp, Homo sapiens
ggttcaattttgccaagacagtcactgaaaagtaaaagcccattgttttctttacaactgcgtaccatgcacttacatttacaccttatgctgttatcactgaaccacaaccccaccctcca

SEQ ID NO: 333198 - DNA, 122 bp, Homo sapiens
atgccacatggtgcattaatatgagcatattgtgaaagatttccaaggaatacgcttgcacggtgtgatactgcatctgtgtttgtaatttgcatggtcaatgtcaaactgacttccaggaa

SEQ ID NO: 333199 - DNA, 122 bp, Homo sapiens
atggatgaagcaggcagcttgaagagggagacacgccagccagaaggaaaagaaagaagccggtgaagcaggaagagaagaaaacacgaaagggtaggaagatgagaaatggatgccaagga

SEQ ID NO: 333200 - DNA, 122 bp, Homo sapiens
ttacgcgcagctaacaaaatactctatgttgcagagctgtttcactttctccctttgagacgcaagccggcttgccgcctcctcaagtaaccaggcacaatgttctgatcccaaagtctcac

SEQ ID NO: 333201 - DNA, 122 bp, Homo sapiens
aaaatgtcagtgaggatgaggcttagtcaagtaatcaacgaaagagagctaataagcacacgtgggtaccactcagatgatgtaagaccagagagtcaagaaagacctggatcctggaacag

SEQ ID NO: 333202 - DNA, 122 bp, Homo sapiens
ccagtttcccgaacctcctggcaggcaggtggtgctgagggctgggcctgctgtccctcgcggctccatgcgcagggcagctgcatggtgcaggggcgcacggctgggggtgctggtggggc

SEQ ID NO: 333203 - DNA, 122 bp, Homo sapiens
ctaggccccacgtgcgggttctctggagtctcccaagctgagcatcaccggacccagacccgtcacagccatgctgagcttacccgtgagtgaccttcccgaggaaggcatggggctttctg

SEQ ID NO: 333204 - DNA, 122 bp, Homo sapiens
atggacgccgcggctacggagtctccacgccacgggaaggccctcctggccacctgtcctcggggcaccgtgggtcccagcccccagctgccctcccgccgcattggtccctgaagcgaggg

SEQ ID NO: 333205 - DNA, 122 bp, Homo sapiens
gaggcctgttgtgggtggggaggtgtcttccttctattattccagtctccctaagaacttcgtagacagttgagcaatactttctaagggctggtcggagtcaggaaagtcaggtaaggcgc

SEQ ID NO: 333206 - DNA, 122 bp, Homo sapiens
ctgtggccacactgtgggcacacctgaaatggaattctagccttagctgctccggggcctcggaaacaatgccctgaatttgttcctctgaggttggcgtcgacacggggctcatgccgtca

SEQ ID NO: 333207 - DNA, 122 bp, Homo sapiens
agagccactgccagtaaggggcatggcaccgctgaaggagaatgggctcctgcatggttccgtgtgggagctggggccctttttattaagaacccagattcatgggtgaaaattaatacagg

SEQ ID NO: 333208 - DNA, 122 bp, Homo sapiens
gtcagcttggagccatgccggctgtcaccagaggccgcccctcccacagctaagccttcccgggtgttgtgtcatgagcacacacagtccggagtctccgacaccactttgtttcccctgct

SEQ ID NO: 333209 - DNA, 122 bp, Homo sapiens
tttccccaccacagccccgctccagctttctgaggcctttgagtccacttgctgtgcagccgccatcgccgtttctgctctgtccttgttggtctctgcctctttaaggatggcttatcctg

SEQ ID NO: 333210 - DNA, 122 bp, Homo sapiens
ttgcaaatttcttctctatcttgatacctgctatatttaagggcctagagaagtgcctaacgcacaccaggtgtgctgaaaagatttgttggataaaaactgaatggatgagattttatgcc

SEQ ID NO: 333211 - DNA, 122 bp, Homo sapiens
gcggcgacctcagcctggcggaaagctccttgcctggaacgcagagggccttcgctgctgcggcccctggggactccttcgcgacggcttcccggggagggggctgaggcctggcagcgagg

SEQ ID NO: 333212 - DNA, 122 bp, Homo sapiens
tgcgcctgtggacggctgcggctgccctgaccacaccttcctggacgagaagggccgctgcgtacccctggccaagtgctcctgttaccaccgcggtctctacctggaggcgggggatgtgg

SEQ ID NO: 333213 - DNA, 122 bp, Homo sapiens
ggggagaaaagactttctgatccaatggcccatctaatgggctccaagctggaccctgcccggacaagacctaggactcccagcccttgggagggtgcagaacgggcttagccaatatgaag

SEQ ID NO: 333214 - DNA, 122 bp, Homo sapiens
ctcctaggcccccaaaggcagggtgggcacttacgaagcagctaagcatggagcaggagacgcgggcggtcaggctcatggtcgcgggcggtctgggccagcgcacatgtccccggagccgc

SEQ ID NO: 333215 - DNA, 122 bp, Homo sapiens
gcgggctcacccggagcgcaggcgtaacccgacggcgctcagcccccgcctgcgcctgcacggagcatgcgcacaaccagctccgccccgcgccgggctctagctgtttccctcaggcggcc

SEQ ID NO: 333216 - DNA, 122 bp, Homo sapiens
cccgccctcacccccatcctcccctcccctcccttctgcgcctcccccaaccccccgccccgcattaccatatggaggccgagtccctgcgaatcacagcagcagcgggaggtatttgaata

SEQ ID NO: 333217 - DNA, 122 bp, Homo sapiens
gccaattccccagttgagcgaggctgctcgcaacccctaacaccgcctgggtctcccagccgcctggtctccccacacccgcccgcccgaagggattttaggggcctgcgtgccgagaaagg

SEQ ID NO: 333218 - DNA, 122 bp, Homo sapiens
ctccttggacaaagtgatcctcctgcctcagcctcccgagtagctggcactacatgcacacgcctctatgctcagctaagttttaactagtgaattttgacagaggttctgtagaagatggt

SEQ ID NO: 333219 - DNA, 122 bp, Homo sapiens
cagccacatcagggtgacaaatcccgttatcatgctttctgtaattgtctccccaaaagacgcctattgagagcattgtctgggcttgtgtattagactgacaatcaagctccaggcagagg

SEQ ID NO: 333220 - DNA, 122 bp, Homo sapiens
cctggtgtctggctgtgggatccatgcccccaaccactgtcagatttgtggatttgtatacgtatctgcgtgtgattatatgtaggagttaacatcagcacttgtgcacatgccagagtggc

SEQ ID NO: 333221 - DNA, 122 bp, Homo sapiens
tggagtggtaggggagaccccagcccagtcagaccctagctcaaagcgccacttgacagacgcctggccccaagctccctggcgggtcctgccaccgggggaaggaaaggtggaggggaggt

SEQ ID NO: 333222 - DNA, 122 bp, Homo sapiens
cctgcttttgcccacggcgtgacacaggacttactggggttctcagggaacttttcccgccgccagttcccgggcgtggtgtgtgcaaaacgtgcattcaagcgctatgtgcaattgacaca

SEQ ID NO: 333223 - DNA, 122 bp, Homo sapiens
gtcatgcaggcaaggcagtccttgcaccctttgtccccaagcccatgctggcagcagccgcgcttatctgctcctgtctctagccttgctgtggctgcagccttggggatttccagcagggc

SEQ ID NO: 333224 - DNA, 122 bp, Homo sapiens
aaacttttgagcagaacacgagcctcggcaaacgagtcccgcagctcctcctgctgctcccgctggttcctgcggcttctgctcagacaccaacgccagacggcgatgcctctcgggtggtg

SEQ ID NO: 333225 - DNA, 122 bp, Homo sapiens
ggaaagccgggagtgctgttctgagatcaagcttcaacctttggccctgctgccaactcacgctcggccctcggtcacttcctgtctcccagcctcagttagcccttgtaatacagtaaaaa

SEQ ID NO: 333226 - DNA, 122 bp, Homo sapiens
ggcgtccttggaaacggccgcactgggccagcacacagcaagcagggagagtgggagccgcgtccacccaagccccaggtcctggccgcaaatcatcacttcatcttggcagctcattctgt

SEQ ID NO: 333227 - DNA, 122 bp, Homo sapiens
taaatatgtgttgacctttttaaaataaccttttttaaaaataataacctggtttaataccgccagaagtacttatcatatgccttaaccgcagtgagaaatctgagccaaagccttggaat

SEQ ID NO: 333228 - DNA, 122 bp, Homo sapiens
gcatgcatccactcaggtcactggacaagtgtttattgaaggtcccctgcagccgggtcccgtgctgggcactgcacacccacggacacagcctcccgtcctaagaccccaccccatcaggg

SEQ ID NO: 333229 - DNA, 122 bp, Homo sapiens
agcaagctgaggcccggcaggacttgaagatgcattcactaggtcccgagagccccgctccggaggccataccgcactcggcactccacatgtcataaagtgcagttgtgtttaatagataa

SEQ ID NO: 333230 - DNA, 122 bp, Homo sapiens
cagcgcgtcatgcttggtacccacgtatccagagcatgtcgttttgaggtatttgcccaccgttgtgaaatccgtgccacccgagagcaggtcctgatgtggggctttcagaagtgggacct

SEQ ID NO: 333231 - DNA, 122 bp, Homo sapiens
aagggcgtctgttatgctcctgcagtcgccgaggccttggatgtgcagccaggggaggagcgtcctgccggccccgcagggcccccaggactccagggtaaagtgtgggccggtggcgcaag

SEQ ID NO: 333232 - DNA, 122 bp, Homo sapiens
gcagaatgcttaataaacgtgatctccttttatcttcaaaagaacaatacaggccaggtgcggtggctcatgcctataattccagcactttgggaggccgaggcagatggattgcttgagct

SEQ ID NO: 333233 - DNA, 122 bp, Homo sapiens
tttagaatctgtgccctgcattgctgtaagcagctcacaaacagtggtgcatttaaccctcgcacaacatatgaagtgggtgccattattatcatcaccccaactttgcaggaatctgaagc

SEQ ID NO: 333234 - DNA, 122 bp, Homo sapiens
tgaggcaggtggtcacaggaggcccggcttcagtgcacaccacacccaccgaacttacgtcgaagggcagcacctccacagacgtgttgaagagcttgtcctccgggtgctcgatgttccca

SEQ ID NO: 333235 - DNA, 122 bp, Homo sapiens
ctggccaatcttggtgttgcagctgctctctgggcctcagtttgcttgaactaaatgtaacggggccaacttaggtgaactttgggaatccagccaacctgactttagggagagtatggagc

SEQ ID NO: 333236 - DNA, 122 bp, Homo sapiens
tcgactcagtagaatttttgttttcctgttgattaagaagagtcagaaagttaggactcccgggtatctaatttgggattgactgggataaatggtgatattcattgagattgagaatggag

SEQ ID NO: 333237 - DNA, 122 bp, Homo sapiens
gcttcccaaagtgataagccagcctggtgtctccccacgcacctggtgttcccttgcagccggattctcaaaggcattctaattcatgtatgccaccatcttgtgtatctggttatgcccag

SEQ ID NO: 333238 - DNA, 122 bp, Homo sapiens
atatcccagagggtgggttgtatgagagcatctggggatcacatccagccctgccgccctcgtggccttggacaagccccctttctgggcctcaatggccccatctgtgaaatggggagcac

SEQ ID NO: 333239 - DNA, 122 bp, Homo sapiens
acggaggaggaccccagaaccttcggaagcctgcaggtccttgagggtaccccagctcggcgttacctcccctgcccccagactccaccagctgagcgtcgcgttctgggattttgggctcc

SEQ ID NO: 333240 - DNA, 122 bp, Homo sapiens
agtcggcgctgcgcctgcgtgggaggatccggcggaaggggcggggtcaggtggcacttccgtggcttcgggcgggtgagtatggggagtgcgcgcggcgtccaggagtcgggactgggctc

SEQ ID NO: 333241 - DNA, 122 bp, Homo sapiens
cgtttccgtttggctctggaatttgccgacggaagcatatccagggcggcaaagggatgccggggctggaacggcgcggcggaggaggcgggaacggcgctgcggggggggcgggaacggtg

SEQ ID NO: 333242 - DNA, 122 bp, Homo sapiens
aaggcgtgcggcacccagcagccaccgcgcggcagggcccccggcgtgacgtcatttccgcgtcgtccggtttggccttcagcgcccaatcccaaaacgcgaagcgtagtcccaccctcgac

SEQ ID NO: 333243 - DNA, 122 bp, Homo sapiens
aacgcgagcgccctgtatctatggactgtgagcttggaaatgtttgtgctactggaaccgcggcactttaagccccgcacttctgtctgccccgcccgcagagctgcagttcgcccccgacc

SEQ ID NO: 333244 - DNA, 122 bp, Homo sapiens
gactgacatatgtgtgaatgggcttgacaagtgacagacacgtgactggtatgtgactgacgtgtgtgaatcgtgacagacgtgacaaacacgtgactgacacgtgatagatgtgtgtgaca

SEQ ID NO: 333245 - DNA, 122 bp, Homo sapiens
gccgtggagctcaaggcctttggggtcaggggcctggggcaggctgtcgccaggagaagccgagggaagcaatggcggtggcgggcgttcagggtggcagcgagctgcccctcggttcccag

SEQ ID NO: 333246 - DNA, 122 bp, Homo sapiens
aaagcaggtttacaaaatctgaaaagccaaatgccccagtggggaaaaaaccctccatttcggtaattccctggttaaaatcgaggaacaccctggacttcgaaggcaccacctgggtccca

SEQ ID NO: 333247 - DNA, 122 bp, Homo sapiens
gccagtgcgagactgaacttgtgcagccttagccaagacaaagcagtgtttttcagcagacggctgatgggacaggaattgaagaagagaattgactcgtatgaacaggacagggtgaaaat

SEQ ID NO: 333248 - DNA, 122 bp, Homo sapiens
gcagagtcagcctaggagagtctgacaggccctgggaccaatgggaatgctccagggccccgccctttgtgactctgccacctagacacaggccctccccaccctagactccatgaccaggt

SEQ ID NO: 333249 - DNA, 122 bp, Homo sapiens
gatgagtcaggttgattatggtcagaagatcttcttgcacctccaactcagggcctacaccgcggataaagaccaggaggtagttctcataggccacaaaagcctggtcgtccaaggcaaga

SEQ ID NO: 333250 - DNA, 122 bp, Homo sapiens
ccgcgtggggcccgcacctctgggcagcagcggcagccgagactcacggtcaagctaaggcgaagagtgggtgagtcccttgaatcgttctcactggccgtttgctcctcgagtccgcccgc

SEQ ID NO: 333251 - DNA, 122 bp, Homo sapiens
tggttccctcatcaggaagacattgctcttggcttggctgtcaccagttgggagaatttccgcaaccctaagcagcagcctatgtgttttaggcaggatgtgggttttagtctttctattta

SEQ ID NO: 333252 - DNA, 122 bp, Homo sapiens
gcagagtgactctgtgccacactcgctttgcctcagtttcctcaattgcaaaatggggatcgtgtctatagggcacttcaggggacatgcaagggactcttcctgaggcagcagcactctta

SEQ ID NO: 333253 - DNA, 122 bp, Homo sapiens
attcaggccgaatgttggacacagtgcatcgaccccaaaagcgatgtgtcagtccagggccggaggggagggtgcgcaggccgcggacgagggctacacagaaggattagtgggagcgaggc

SEQ ID NO: 333254 - DNA, 122 bp, Homo sapiens
agaagaagaacgtcatccagaggtcagccttccccacgccctgtgcccgctgtgcccacacgtcctcggatgaacttggattcaaacaacaggagcgttaaattctcaaaaatgatttcaat

SEQ ID NO: 333255 - DNA, 122 bp, Homo sapiens
agccaatgagtatcccgactgtatttccaggctttgtgttgtttactgggctctggacatcgctgattaaaagcgtgggggattggagtgtttatttcatatgaaatgtttttattgaaaaa

SEQ ID NO: 333256 - DNA, 122 bp, Homo sapiens
acgcggcagctgggcagggaagggatgggaagggatgggaagggaggcgatcgataactccggtgtgccgctgactgttggattggctcgaacttctcccgccaggcctaacctactcccgc

SEQ ID NO: 333257 - DNA, 122 bp, Homo sapiens
aaggagttcgtgaaaagaaaactggaccacagtgagttggaaattgtttctttccaactccgtttaggttttctcagagattaaatgttcctgtttcataaccttgagacttttttggattt

SEQ ID NO: 333258 - DNA, 122 bp, Homo sapiens
ttggagggctctggcatgggaagaggcctgcagggatcaagcctcatcttccctagggctcgactctattaatggcaagcttccgtgtttcccctgagaccttccactgctcctgacctcct

SEQ ID NO: 333259 - DNA, 122 bp, Homo sapiens
gaaggaggagctgcgggcggtgagccccgaggagggggcacgtgtgtacagccaggtcaccgtgcagcgctcgctgctggaggtgagccggaccgctggtccctgggtctgggtagggttgg

SEQ ID NO: 333260 - DNA, 122 bp, Homo sapiens
gggcctgggactggggcgggctcccactcctgcccggggtggtgctgcgttgtgggcacccgtgtccctcctccccctccaccctgcccagctccagacgtgtggctgaagcggccagctcg

SEQ ID NO: 333261 - DNA, 122 bp, Homo sapiens
aggaggaaaccaggggagaagctgctgcaccactcttcaccagggcacagggaagggagacggccactcacctctgagtgacggcactgcgccgctcttcaccaggacacagggaagggaga

SEQ ID NO: 333262 - DNA, 122 bp, Homo sapiens
attacagtctgaccccagggactctatgcatgtcaaacccaaaacactgctcccgaaaaccgccccagattccagatgtacagccgcagaaaggacagaactcctgaagtgcacctgcacgt

SEQ ID NO: 333263 - DNA, 122 bp, Homo sapiens
ccgcagccatgcctgactgggtggccttaacgccaggttctccctcagagagcaggaatgcggctgctagtcaaaatacatgtattttttaaagacctacaaatgtgtctacagttcagggc

SEQ ID NO: 333264 - DNA, 122 bp, Homo sapiens
cggtcggtgggctcctctaggcccagcttgggcctcctggcggcctctgcaggcccaaatcgtcccgaagtcggcctctccaggcccagcttgggcctcccggcggcctctgcaggcccaag

SEQ ID NO: 333265 - DNA, 122 bp, Homo sapiens
gcatgagcctctgcgcccagctggatgtcatcattttaataatttaccccaaatggccatcgtcatgggtgggatggtcccaagggtttacatggattgcagactcaaaaatctggatgaaa

SEQ ID NO: 333266 - DNA, 122 bp, Homo sapiens
atggagagaccagagatagaaatcgcagaagactattagggttgatgacaccttggattacggttggtcctaaaatttataatttcagctactaaagacctggttctagaggactgaaactt

SEQ ID NO: 333267 - DNA, 122 bp, Homo sapiens
tctgagggcagtgtctttgctgcgggtgtgacctggtgttggttgtccttgaggggaagtcgtttggtgccgcatcttcaccaaggacgctggttgtagtgtcccctgtgctggggcaagag

SEQ ID NO: 333268 - DNA, 122 bp, Homo sapiens
acctcagcctggggacgcagccagccaagctccagtgttgtcggtgtcacagccaccactcggaggtcctggggcccatcgatcactagccaggttaaagaggaggactcaggtgggtgtct

SEQ ID NO: 333269 - DNA, 122 bp, Homo sapiens
ttgttgttgcttgtgaaaatggcttacctgtccacttggatcagtcaattttccgtcgtccgtaaccagcgggcccctggtcaagtgctggctctgctgtccttgccttccatttcccctct

SEQ ID NO: 333270 - DNA, 122 bp, Homo sapiens
ctgtgctccctcaagccctggagaagccctgggctgggcccggcttcagaagctttagagcgctgccctctgcgctcccgtctagaggccgcaccgttcacgccccacgtctgcgcccaggc

SEQ ID NO: 333271 - DNA, 122 bp, Homo sapiens
cacccggcctggacggagagaggaggtgagaggggcgctgcgttggcctccatcgactgtcggcctttttcagaacgcctacttcgggtcaagcttgtgttagggaatgccagagaagggca

SEQ ID NO: 333272 - DNA, 122 bp, Homo sapiens
cgcgattacgctctctacggcctgcgaccgcagggccgttgcgggctggagacacggcgccgactggaaccggaggagctctaggccaaatggttgggccagccaggatcccaggacccttc

SEQ ID NO: 333273 - DNA, 122 bp, Homo sapiens
gagcaagtgtccctgggtaacctctaaaatgtggtggctgggatagcaaggatgaacactcgctgccaacttacactctattttcacgaggaaagcatgcgtttcattaggcagaatattac

SEQ ID NO: 333274 - DNA, 122 bp, Homo sapiens
gagcagccagcgtccccaactaacagcaaggctgggggctcaggaggaggctctggtcctcgcattccgaggccaccaactgcgaacatccacaccagtgagcaacgggcaactctggcacc

SEQ ID NO: 333275 - DNA, 122 bp, Homo sapiens
aatttcagcagataagcaatgtgaaattcctactgtaactccttatctgttgtaaactagcgtttagttttctataaagagcagggacctgttctcacttttcactcatttgatgggtaaga

SEQ ID NO: 333276 - DNA, 122 bp, Homo sapiens
tccaccccaccccaatacggtcctttccagctctggaggcccttcgtctccaagctgggccgcggcatccctccgctccattcccttccttcccagccccacaggcgtcgggtccaggtccc

SEQ ID NO: 333277 - DNA, 122 bp, Homo sapiens
ccgagttcctacccggccgcgctccaccgcctcgggccctccgagaccgcacacgccgcccgccagcccccagggtccaggatgaccacgccgaaccgctccccgccctccggccccttcta

SEQ ID NO: 333278 - DNA, 122 bp, Homo sapiens
cagaaattccagcgtccagcgacatgcagccatggcaagagctccgggcaggagaggcggcgtgtgctgctggagtaacctctggccagccacctgggaagacccttgccatcgtctgccat

SEQ ID NO: 333279 - DNA, 122 bp, Homo sapiens
aaaaaaaaaaaaaggaaagaaaggcccggtgagatgctttctcttaaacacggccctgcacgttgagttgctgcctcctgtggcctatttcacgtttatgcaaagtcgggcgcctgatgcgg

SEQ ID NO: 333280 - DNA, 122 bp, Homo sapiens
cagggtttggaggggcgcgagctgccgggggttggaggtcgaggtgagtcgcggggcgcgcgcgctcgcgggtggccgggacggggcggccggttaccatggccaccgcggggcgggcccgg

SEQ ID NO: 333281 - DNA, 122 bp, Homo sapiens
cccacacgcaggataactggcgagtgacgcggagtggctgcgagtccaagttatcactaacggatggggagcttgggctgggcacagtccagcgtactgaacccttcccccaccgtttcacc

SEQ ID NO: 333282 - DNA, 122 bp, Homo sapiens
ggagggacgccagtgcagcagcatcatcttcttgaagtacttcatggtgttgttcttgaccgtcacgaagcacacggtgttgatcatgctgttgctcatggcgatgcactcgaccacgtaga

SEQ ID NO: 333283 - DNA, 122 bp, Homo sapiens
agctccctgggccggccctgggcatttctgagacggccctcgcgctcagggacctctcctcgcagttccattgtctgttcttgcggagtcctgccacactgggagggccaccccctcctctt

SEQ ID NO: 333284 - DNA, 122 bp, Homo sapiens
tccaaaactcgacccgctggccccttccattgtcattgctacatgaggtccacgccactccgccgttcagcagccgccccgaaccagcgaagaaagctatcgatcgtaaaacaaaataaaca

SEQ ID NO: 333285 - DNA, 122 bp, Homo sapiens
actgggtccggggcagactgagcataactacgctgagccacgtcaccggccggtgagacgcgcggaggcattgatgggtcccctggttcccgctcagtctccgaaatgtgagctgccgcgga

SEQ ID NO: 333286 - DNA, 122 bp, Homo sapiens
ctacaagatatcctgtggtctgtgaagctagaacttcatttcctgtgccttttctaaccacggagcctaacttcaaatgacaacacttcaacataaaaaaaaaaattgaggcgatgttcaaa

SEQ ID NO: 333287 - DNA, 122 bp, Homo sapiens
gctgggcgctttgctggggagctgcccctggagggccacagaaatcgcccatcgatgccacgccctttgttccagaaacttagacatgcaaagttgatcatgaagggactgaactcagccac

SEQ ID NO: 333288 - DNA, 122 bp, Homo sapiens
cttttaatccctcctccccatcaatccgggcaaaagaagatatctaactccaggctgtttcgagtcctcccttgcaaggaaacactgtatcactcatggcactgctttttccatgtttccct

SEQ ID NO: 333289 - DNA, 122 bp, Homo sapiens
tccaaggacaggtcggggtggctggagctgcgcccggttgaagggagttgccagactcggcgactctggctcttggcagtttgcccggcattattcattcctttgtgttctcagggttcacc

SEQ ID NO: 333290 - DNA, 122 bp, Homo sapiens
aagccctttggaaagctctggtgctgccttggctgcaccatgaccccctccagctgtgtgcggccggctcgccgcccatggtgctgtggtcctggttgggcggtgaggttcagccctgaccg

SEQ ID NO: 333291 - DNA, 122 bp, Homo sapiens
acaaaggccgctacctggggaaaggtgaggagacaccagcgcagaaggagcctgtgtgggcggctttaggacatgggtgcacaatgggtagaggactggaacccccaaggctcttgaggagc

SEQ ID NO: 333292 - DNA, 122 bp, Homo sapiens
gagctgaagaaaagtggcctgcgaggttggcagctgaagctcagtattcatgggtggaaccgtaaacttcacccaacttaacattcactgtacagccccttcttcccgtgacaagagttttc

SEQ ID NO: 333293 - DNA, 122 bp, Homo sapiens
cagaccgctaagcagctttaaacatggtcagtaaggaggaaaatgggggggcggggggcgcggtgagaacagaaccactacaggaatatacaaagttattcgtttctgttgaaaaggactct

SEQ ID NO: 333294 - DNA, 122 bp, Homo sapiens
tatgagccacggctgtctcatttgtaaaacgtgctctgtgggattggtgaaatccgtcatcgagataaacggggtgggaatggaagcagagcacctagtgaattctcattccttccttgggt

SEQ ID NO: 333295 - DNA, 122 bp, Homo sapiens
cgtggagcgggatgagaagttgattaaggtgccagtggcagcgcggggcacgtgggggctcgggcggtgagggcaggagctgaacgctcgcattcacttcccttaggtcttggacaagctcc

SEQ ID NO: 333296 - DNA, 122 bp, Homo sapiens
ttgtatttattcttcaaaactctgccgtcttccctgaccttccggagccggtgtttgtggcgcctcctgctggtcactgggttcaggcagtttggagctgggtggaaggaacgggtagtata

SEQ ID NO: 333297 - DNA, 122 bp, Homo sapiens
actcgagtaagtttgcgagagcactacgcagtcagtcgggggcagcagcaagatgcgaagcgagccgtacagatcccgggctctccgaacgcaacttcgccctgcttgagcgaggtaggggg

SEQ ID NO: 333298 - DNA, 122 bp, Homo sapiens
tggtcaaagttgagtctactttccgtattgctgatgcctgtggccatagccatggaaggacgtggaagaagccgtggtcctgcccctgtgtaagatgaagacttgtgaaaccactgggtcat

SEQ ID NO: 333299 - DNA, 122 bp, Homo sapiens
tttctgtttggcataataattttctaggatggttctgttctaagtgccttcccacacaaccggctcattccagctggtcaccgtcagcacctctgggcgatcgtatggattaaaccagttcc

SEQ ID NO: 333300 - DNA, 122 bp, Homo sapiens
ggctgaggtccgtggaggatgggtgtcgtggggggctgggggccgtgggggatggagggccgtgccggctggctcccaggccatgctgaccggacactacattcctaacaagatccccgacg

SEQ ID NO: 333301 - DNA, 122 bp, Homo sapiens
cctagttactaccgcaggcaccagccacacccggggagatgtgtgctgttttgtgcaagacgctgcggtcacccagtccggaattctgctggtctacaccgagtgccgcaacaccaccacca

SEQ ID NO: 333302 - DNA, 122 bp, Homo sapiens
gtaggggtgagggtggcaagccgcaccccgcggaggaagccggcaggcccagacggcccgcgcacctcccagcgcccctggggccctcgagcacaatgccttgctgagcagcgcccaggaac

SEQ ID NO: 333303 - DNA, 122 bp, Homo sapiens
ctacagcttcccacatctcttatctgttagttgtcttatggctctaagcacaaacgagcccgtttatttcccacactccagaacttaacgtgcaccttgatccgaagagatctgcgcaaagt

SEQ ID NO: 333304 - DNA, 122 bp, Homo sapiens
aggtcccgggttctgtctggcggctctgcttctaatgcggagctggcggttttgcagcaacgcttttgccagtagcgcccactgagcggtttttcagttgctgcaccgttcttagcgcccaa

SEQ ID NO: 333305 - DNA, 122 bp, Homo sapiens
gcacgacttccacggcgctctcggatgacgtacaactgtcgcgagaggttgcaaagcgggcgcggcgccgggtgccttatgttcagtgcttgtctctgggatcgtacgggtctcctccggag

SEQ ID NO: 333306 - DNA, 122 bp, Homo sapiens
ccccaaccactgaggactgcatagtttgctatccaccaaataaaacaaaggacaaaacagcgatggagaaaaaaggaggaaaagtccccaaggtaacttcttaaattcaattctagaatttt

SEQ ID NO: 333307 - DNA, 122 bp, Homo sapiens
aacatcaagctccctttactgcagttgaacaaactgccctagattgggggaccaggaacccgccccaaactcgtgcaaggagctccgggcgcccacgcccacgtgagctaaccttgaaatta

SEQ ID NO: 333308 - DNA, 122 bp, Homo sapiens
gcgcgtgtgaggggagggcggcccagccgtttcgcgccgggaggtaggtggtgctgttgccgtgactgtcttcctcattggcgccgtgcagagaggcggaatgttcaactcctaactgcagc

SEQ ID NO: 333309 - DNA, 122 bp, Homo sapiens
ggctcctctccaccgctcctcctgtcgcgaggaatagcccgagccacccggccgagggaacgagaactaggcagggaaaacccggagcttccgtctcacgctgccctccttaaggcagagcc

SEQ ID NO: 333310 - DNA, 122 bp, Homo sapiens
cgcggccccaggtctccagccggcgggcactcacatcatctctgccatcaccgccgccgccgatgcccttcacgaccaccgccgccgccaccgccagctctcggcccctctgctgcagccgc

SEQ ID NO: 333311 - DNA, 122 bp, Homo sapiens
gcggggagaggcgcccacctccgtgtgctaatgcatttacctccaggccgcaggcctccgcggagctggcagccaggaacctccagaggctcccaacctagcccgtcctgcaagatgaagct

SEQ ID NO: 333312 - DNA, 122 bp, Homo sapiens
agcatctacttacgaaatgactcctgcggcctctccgaaatcccaggagcatccttgcagcgcgaggagaatggaccggggcctggactcatcagcagatctatccacagccagggaccact

SEQ ID NO: 333313 - DNA, 122 bp, Homo sapiens
tcccttttctgcaggagcacatgtccttgcgcaggaagaggctgttcagcgtgaccgccccgatcaagaagaagagctgcttcaccgcctgcctcacaagctcggggtccaggccgttctgg

SEQ ID NO: 333314 - DNA, 122 bp, Homo sapiens
tctccacctccaggaccaccaggcactacctctttccaggataccattagttcctaccttcgtcattgcaacagggtgcctcctgaccttcctctctgcagtcctaccctccacctcttccc

SEQ ID NO: 333315 - DNA, 122 bp, Homo sapiens
tcccgcggtccgcgaggactggccgggagctcgctcgccattgtcctgggcgtcccaaagcgggcggtccccgctccgctgctcccgcgcctggaggaagccttcccaaccccgcccctcag

SEQ ID NO: 333316 - DNA, 122 bp, Homo sapiens
cgccccagccaggttgcactccgatggtctccctgcccaaggaggagagaagacaagggacgccccgagagggtagacataggccacagccaccttgtctttgctcttaccctgtttcttcc

SEQ ID NO: 333317 - DNA, 122 bp, Homo sapiens
ctcctgtcaccgcggccgactggccaagggcaccagccctggagagggcacagggctcagcgtggccagctcggatgtgagctcattcccccgagaccaccagttctagttcctgcccctcc

SEQ ID NO: 333318 - DNA, 122 bp, Homo sapiens
actcccgcgggcgcccggctctcgctcctctggccagcgtgggcctcccaggccccctcgcggctctctccagagcaggagccccaccttgggccgcccctctcacacctgccgtgggtctg

SEQ ID NO: 333319 - DNA, 122 bp, Homo sapiens
tagcgtgctgactgatctatttgctgattaaattcttaacctgtacctatttgatgcttacgtcagttttgcgtctttgaaccctaattttgcagtgctttagtgaccaatttatttttttc

SEQ ID NO: 333320 - DNA, 122 bp, Homo sapiens
cggggacggggcagaagcctgcggctgctgcaaggccggggcacagcaggcagcagcacacggagggcagggcccccggccaggctgctacagaaagctcagggccccgagaggcctctccc

SEQ ID NO: 333321 - DNA, 122 bp, Homo sapiens
tcctaaatcccgagcgaaagcccaagctgaacatgaactctgcccggaggcgacgggctgcggcggagggggagagagaggaggacaggctgcgaccccgggctggggacgccagggcaggg

SEQ ID NO: 333322 - DNA, 122 bp, Homo sapiens
gcctggcaatacgccccgggctggaggtgggacctgagtcgggcctggctggcgctaaggcgctttttttccttcgcaccgggcccgagcctccagggcccgacagcttccgcggcgcagtg

SEQ ID NO: 333323 - DNA, 122 bp, Homo sapiens
gtttctggtggaggctgagatctgggagatgagctaagtgggaaggtgacctcttcacagcgacagaacagtccagaacagacccaggcattcaaagttctccccaaggctggacactgctc

SEQ ID NO: 333324 - DNA, 122 bp, Homo sapiens
aggagtaacttcctacagctctcggcatctttaccagagatgtgaccacagccctccagccgccgagggcgtgggaggaccacccaactctgggtctgcagaaggcactgcagacgagagcc

SEQ ID NO: 333325 - DNA, 122 bp, Homo sapiens
tgaatactctgaaaaacctgaagccaataagttagaccacttggataaaaaggaccaattcgtgcagagatagaaattgccaaaactgacccaaattaactggaaaacctgaagagaactgt

SEQ ID NO: 333326 - DNA, 122 bp, Homo sapiens
agtacgggtgcctgtcaggctcttgcggaagtccatgcgccattgggagggcctcggccgcggctctgtgcccttgctgctgagggccacttcctgggtcattcctggaccgggagccgggc

SEQ ID NO: 333327 - DNA, 122 bp, Homo sapiens
tgttctgcaatcagggccaggacactgcagtcagcagccctcacaggtccaactgcagaccgctgtcaagcaaccccatgaccatatatgaaatcccaattacctgtacttatccatcgcta

SEQ ID NO: 333328 - DNA, 122 bp, Homo sapiens
ccagtgcctcgaaagctatttcttgcctccggtacttcccttttaaccatgaagttttcacgctagaggctactcaacgcacacacaggcccgcccagactgtggagcgggacctgtttaga

SEQ ID NO: 333329 - DNA, 122 bp, Homo sapiens
cgtctgatgccttttccaatagacggggcacccaggaggagtcagtggaaacacatgtaccgtggaaacagatcaggtcttgcgctgaaattcggatacctctgaattactgcccatcgtca

SEQ ID NO: 333330 - DNA, 122 bp, Homo sapiens
gtgaaggctgtgtccaatgagcagctgcatgaggatacaggcagacccctggggaaaccacgccagggagcccttggggctgggagtgcccagtagaacctgagtatgggagaaagattttc

SEQ ID NO: 333331 - DNA, 122 bp, Homo sapiens
actgaggtggctcatatatcagagcactgccttctgcggacattaaaattcactttgtttcgtgtccctaatactgcccagcccttgggaagcacgaagctgacattgtattaggcaattca

SEQ ID NO: 333332 - DNA, 122 bp, Homo sapiens
ttgacgctagagggcgctcggtgcccggcgagggaggcggcccaggccggcgggggagcgcgcgcctctgcacttgcacccagctctccgctgcctcctgccctgtctgctccccagctcag

SEQ ID NO: 333333 - DNA, 122 bp, Homo sapiens
gggggcaggggagaggccgcgggtccagaaaccgttactggatgggccggtgggatgtggcgcgggccgggtggggcgcgacagtctgagccgagacccgcgtgggcttaagggtgcgcgag

SEQ ID NO: 333334 - DNA, 122 bp, Homo sapiens
gaggtgcaggaaggtcccgcggacggagcgggcctgccggcgttcagtggggtatgaaggcgtcccctccccttccccaggggtctccagggatccgcaaccctccggcacctggccggggt

SEQ ID NO: 333335 - DNA, 122 bp, Homo sapiens
tctataaatgatagaactcttctatagggaagctcacttttgtattgccgaagtcccactcgtggatttttaaaaatcttatgtgcttttcaagcttgccgtggggccccaggtcccatcct

SEQ ID NO: 333336 - DNA, 122 bp, Homo sapiens
aaagcctccgggggacgggaagtgcagggcagtattcagggtgaccttgtttagcttacccgtgtgctcttggtaggggaagggggcttgcatatgtggtgagatcttggtattggctccat

SEQ ID NO: 333337 - DNA, 122 bp, Homo sapiens
ctcaaagagacagaaggaggtgacaacgaggaaggaagataatcaagagagtataatgtccgggaatctaaatgaacactgaataaaatgtaaagcctttcctgcatattcatttattcatt

SEQ ID NO: 333338 - DNA, 122 bp, Homo sapiens
ctcagtacagaaatgattggccagtaagagtcttatgaaatgaatctgttagccagttgccgcatgtcacaagtctgaattcaggcctttcttgtagttagttccggggttagattggattg

SEQ ID NO: 333339 - DNA, 122 bp, Homo sapiens
ataaaggaaagaaaaacagaaacagttctaccaagtctctcaatgccgtggccttcacatcgacgctcaatgaacgttctcagaagggaatctcctctcctcccggcctcttcgcctgggcg

SEQ ID NO: 333340 - DNA, 122 bp, Homo sapiens
tcaccctgacgaatctctgaatcaatagctgctgcaactctctctcgcgttatgggtcggcgctgttgagctcggttttctcgatggccccctcccctccccattttctctgtcttaaagga

SEQ ID NO: 333341 - DNA, 122 bp, Homo sapiens
ggcgagcggcggggccggggcatcccagctcctgccaagcttggcggcgcgaggaggagtcgccgggcgcagcccccaatcacccaggaacgcggggacgcctgggccactgctccggccga

SEQ ID NO: 333342 - DNA, 122 bp, Homo sapiens
agggcccgtgggcagggcagaggcttgggcccctgggagacctggccctagagaaagaggcgcggtgctcacctttgccccggccttgcaggcctggatggctctgccgccagcctcttttc

SEQ ID NO: 333343 - DNA, 122 bp, Homo sapiens
ggcggggcaggatgggcaggagagcagagccgcggagtctgccgcgcgggtgaagagcggcgcgtaattcctgtggcggaattgttctgcgcctgcagcccctgtgttagcaggatctgaac

SEQ ID NO: 333344 - DNA, 122 bp, Homo sapiens
ttcactggggagtggaggtgtgggcaccggccctggaggctgccggagctgcaggttctccgcctgcagcttgtggatctatgggtgcaaagtgctgtcaaccccctggagtcctggggctc

SEQ ID NO: 333345 - DNA, 122 bp, Homo sapiens
gcagcccgccatgctccagctcccccaagatgggctcctgcgcgcctccctgaagggcaccgcccctgtgccgcagcaaccggtcccatccgcctaagggctgaggagtgcatgcgcatggc

SEQ ID NO: 333346 - DNA, 122 bp, Homo sapiens
acccccttctgagccgggtcaacttgaacccgcttcttcggcgcggacacccagcttccccggagttctctgggttgaggagaggtctcgcactgtacgcgtctctcactcccaaccttagg

SEQ ID NO: 333347 - DNA, 122 bp, Homo sapiens
aggaattcctgcacactacaggaagacaagctacaggaaaaatgtgtcatctacactacccgggagagaaaaactattgttatcagccataatgatctccggagggagggagagaaagaggg

SEQ ID NO: 333348 - DNA, 122 bp, Homo sapiens
cagtgcagcactgtggacccgcggcactccacaaccgctgcccagagtccccgcccttttcgaggaatcaagcaatggaagcatgtgggatgggaccacagcgagcaactgaccaatgagag

SEQ ID NO: 333349 - DNA, 122 bp, Homo sapiens
ggtccccagtgcagccgctttgaaacaaaaccacttggtaacaggagcgcaggactatggcgaaaccgccaggaaagcttcctaaagagctcaaacaaaacaaaacaaaccttggaaagctc

SEQ ID NO: 333350 - DNA, 122 bp, Homo sapiens
ctaaaagagaagagccttggaccacatcctttcctacaatgggcagtcaacgaactttgccgttcaaccaagttacaaaagaaggctctttaatcccttctttggcccttaaaagcggcagc

SEQ ID NO: 333351 - DNA, 122 bp, Homo sapiens
gggtggcatgtggatggtgcgtggcctgtggacggcgggtggcatgaggacggcaagtggcgtgaagatggtgggtggcctgtggatggtgcatggcctgtggacggtgggtggcatgagga

SEQ ID NO: 333352 - DNA, 122 bp, Homo sapiens
tacgtggacgacacagagttcgtgcggttcgacagcgactccgtgagtccgaggatggagcggcgggcgccgtgggtggagcaggaggggctggagtattgggaccaggagacacggaacgc

SEQ ID NO: 333353 - DNA, 122 bp, Homo sapiens
gctcatattagtcatagaatccataccattaaaaagaatgaattaaaatgatttactctacggtttcattggttaagtgggtaccaatctaatatattgtaaattgcatgagtttctttatt

SEQ ID NO: 333354 - DNA, 122 bp, Homo sapiens
ccaacagctgctgcagctgcaggtgttccagctgcagcaggagaagcggcaattgcaggacgacttcgcacagctgctgcaggagcgcgaacagctggagcggcgctgcgccaccttggagc

SEQ ID NO: 333355 - DNA, 122 bp, Homo sapiens
tggaataaccacagagaccggccctgcacagatagcagaaagggaaggggatgtgttgcccggcccacctcggctcacgcaagacgctcggacacttggagacctggactgaagcagcctcc

SEQ ID NO: 333356 - DNA, 122 bp, Homo sapiens
gggaaccccagcagtgccggcccaccggcactgtgggctcctgcgcagcctgagcctccccgacgagtgccgtcccctgctcctcggcgccggatcccattgaccgcccaagggctgaggag

SEQ ID NO: 333357 - DNA, 122 bp, Homo sapiens
tcctgaaaggcgtagtgcagcgcggtgatccactggcagtcgccgttcaccagcacatcgcgctcctctcggaagcacgcggtctgcaaagcaacgaggggtgtcagtctgtgttcactggg

SEQ ID NO: 333358 - DNA, 122 bp, Homo sapiens
ttctcccattctccgtagttatcagcgtttcgctgtctagttttctctgtctctcgggctcgctctctctctctttctctctctctgtcctgcccgggctctctcgcggccgcccctcccgt

SEQ ID NO: 333359 - DNA, 122 bp, Homo sapiens
ttgcgctttcattaatccgtttgaaatattctatttttaatgttgtgtggggagtgatgacgctggtactttttgtcccagatgttaacaaaattacaaataattattggtacgtctcaacg

SEQ ID NO: 333360 - DNA, 122 bp, Homo sapiens
cctgccggtttagctgaagcttccctttcggggagttacctaactacctcccgaagccgtcgttctgctgcttggttaattcctcttatcgggggggaattttctttgttcgtttgtttttc

SEQ ID NO: 333361 - DNA, 122 bp, Homo sapiens
gtgattactggcgtgagccaccgcgcccggccaatgtcttcattttctaattggggaatccgttgagggcgcagctcggccttaaaaacctgtacttgcgattctaagaccagcgcgggttt

SEQ ID NO: 333362 - DNA, 122 bp, Homo sapiens
cagctccaagccaagaactgcccaggaaggcaaaggacaccaggagccgggggagggcaccggacagaccctccctcagcgcctcgagcgggagccaacctgggactcagacatttccaccg

SEQ ID NO: 333363 - DNA, 122 bp, Homo sapiens
gcagaccctgccgtctgggggtcctggggcggccacggggccggcgaccccagagcaaggcggagcctagtacaggccagagagctggttttgctttcttcacagacatgacctgacagtga

SEQ ID NO: 333364 - DNA, 122 bp, Homo sapiens
ggaagtggtcattcgcagcacggggagctgtcagaagtgcagggaggccattcgggagcccggggcagccaggacgggggaggtcaagagtctgcggcctgggtccatccacccgggctgtc

SEQ ID NO: 333365 - DNA, 122 bp, Homo sapiens
cagcctcatcttgtgttggtaataacaatagcttgtgtgtcctgcccatttactaagtgccgggcactgttctctcctagaacaaaccgtagttagactcctctgagtcctcatcttgacta

SEQ ID NO: 333366 - DNA, 122 bp, Homo sapiens
cccgcgccttcatggacacgctcgtgtgtggtgtgccgtgatgcttgctgtgcagcaggccggctggtggagagctttcgctggcaccgagctcttctccttggtgtggccgtcggctccat

SEQ ID NO: 333367 - DNA, 122 bp, Homo sapiens
ctccttttcttagacaggaatcgcccggggatgagctcaacacatactccaccatgctaacgcctagtcccccactctccgatcgtggggacagtacagaattgacctcactgttcacatgg

SEQ ID NO: 333368 - DNA, 122 bp, Homo sapiens
cgcgggggctccactggcggcgcgggcctggctgcaggaaatgccagcagatggtccccccgcgcgaggcggagcgagggcgcggcggagggaggaggcccagggagcccggaggcgggagg

SEQ ID NO: 333369 - DNA, 122 bp, Homo sapiens
ggtgatccacctgtctcgccctcccaaagtgttaggattacaggcgtgagccaccggccccgggatcaaggccttattttaaagatggtgattgtgtctgtgacgttataaaagtagccaaa

SEQ ID NO: 333370 - DNA, 122 bp, Homo sapiens
cagccaggcctctgcaattatgccttcaatgccagaactaactcacccaaactgaacaatcgatcacaaaatgtgccttcaggtctcaaggttcttgctaaatcttactcaaccgacatttt

SEQ ID NO: 333371 - DNA, 122 bp, Homo sapiens
aagcccggcacaggctgggtctgcagatggcgtccgagtgcacagtggccagtgtgattccgcagtcttgggctgttcggccaagcgcccaccggacgtgggacgctggagggtcagcagcg

SEQ ID NO: 333372 - DNA, 122 bp, Homo sapiens
cttcctgtgaacaggctagtttcaaataaaggcttgcagggatcttaccgagcaaagcaacgtttatgaaaaggaacagggaagttgcatggagtgtgattcttccttccacaggaacagtt

SEQ ID NO: 333373 - DNA, 122 bp, Homo sapiens
tacataaaattaagttaagtaatagtttattttttgaaaattcttatactgcagagctttcgttcttacttgctgtgacagtgacagaatactgttgactaccagagcccttctccccctga

SEQ ID NO: 333374 - DNA, 122 bp, Homo sapiens
tcatgaccctggcctccagggcgcacagtggtcatggggagacctgagctgccgagtggccggccgacctcgtggcgcaacggtagcgcgtctgactccagatcagaaggttgcgtgttcaa

SEQ ID NO: 333375 - DNA, 122 bp, Homo sapiens
ttgtttaggaaaatagtcaccaaatgagataaatatttaaagttttctaaaaattgcacccgtctcttgtcactgtgtttcccaccggccttaaatgtcctgcctgttagactgtacctgtg

SEQ ID NO: 333376 - DNA, 122 bp, Homo sapiens
atttcattttcatgaactccagtgttaattaataaaatctcaaggttctcccccctctttcgcctcacatttcttcagagaaatgaagagttccaactcatagcccaagtgctcaggtttta

SEQ ID NO: 333377 - DNA, 122 bp, Homo sapiens
tacagcaagggctacggccgccccagatagtgagtgcagcgagatggggcaggaggaaggcggggtgctgggcctggggctcacaggcagtgccacacacaatgtccggccgccctccgttc

SEQ ID NO: 333378 - DNA, 122 bp, Homo sapiens
agagactgacgtgaggtggcacgagagcccagttgccaatgacggagctgcgagatacggcgagagccaacgggagcggagtgagaggttctccgaccaattgggactaagtgagaggagat

SEQ ID NO: 333379 - DNA, 122 bp, Homo sapiens
actgcatagtcggggtatctcccatatacccaaggagatgggtttctctaacagcacccacgtcagtcctaaatcttcttactctcctggattagaagactgtgtttcccaggccacatctg

SEQ ID NO: 333380 - DNA, 122 bp, Homo sapiens
gccgagacccgccccgggggctccacgcggactccggcttcagtgctcggcgctgccgcacggctgcaagcctagcaattttgggctgaacaacaaaagcgagagagagggaagttgggggg

SEQ ID NO: 333381 - DNA, 122 bp, Homo sapiens
ccgcagcagtaccttgtcctgtgatgtcagcggcatctcctttcaggtcctccttggggacgccgcctgccgcagccacccgcccccttggtgctcagttctggttctgttaattcgcccca

SEQ ID NO: 333382 - DNA, 122 bp, Homo sapiens
tctagccttgtctggctcttgaatccctgcctaacttgatttcttccacatctacatctgcgtctacatcctctgacattgctaatctctctttctataagagccgttgccaacagattggc

SEQ ID NO: 333383 - DNA, 122 bp, Homo sapiens
ggtcagtggatagaagaagagttgcctgtgagcaattcgaggctgagcctgaactgtgtgcgtgtgtgaagttcagattcacaccacgtgagtgatgcaggaacataaagtcatgcaggaac

SEQ ID NO: 333384 - DNA, 122 bp, Homo sapiens
tggtgctgccgggcggccccggctggtgtgacctgtgcggacgagaggtgctgcggcaggcgctgcgctgcactagtaagtgtgaaggcaggggaggggcgtgcggggagaccgcagtctgg

SEQ ID NO: 333385 - DNA, 122 bp, Homo sapiens
acgtgaaccgggtctcaattttcaaatcagaaaagaatctggcaaaggaggcaaggccagcgacccacggcggcagccacacacctggctcagggctcccgtgagaccacgccacgcaggtg

SEQ ID NO: 333386 - DNA, 122 bp, Homo sapiens
cctgcagaggagccactaagtcaggtgggtgtctgggccaagggactcccaggacaggggcggtggccagtggcggaggcagcagctgtggctggcaagaagctggtttcccccagaagaag

SEQ ID NO: 333387 - DNA, 122 bp, Homo sapiens
tctagatacttctccccctcccactcaggggtggattgttgacaaggccgcgggcagtcacgtgatcttacatcatcccacctcctttccctgaaatctctggcccggatgcgtccctcttt

SEQ ID NO: 333388 - DNA, 122 bp, Homo sapiens
gggggcaggatcggagaggaaacagaaagccagagtgagggtgacacccacagatgctgacggggcccagtgatgctgggggacaggacccgactcaggagcacaccctaacagtcgggtgc

SEQ ID NO: 333389 - DNA, 122 bp, Homo sapiens
atgcaggccacctggcgcccttacggatttaacgggccggcttccgaccccctcctgcggcgcgaccactgttcctcgcctgtgtcccccagaggggaaactgaggcttgggggcggtgcag

SEQ ID NO: 333390 - DNA, 122 bp, Homo sapiens
ttttaatccaaacagcaatcctgggtggctctggtggaatgaggtatttaatcacctcaccggtgatccttgttgggtctttcttgttgagtaaatacttggcagccttagtcattagcttg

SEQ ID NO: 333391 - DNA, 122 bp, Homo sapiens
ccggtgggcaggctcagaggtattcctgtagaaagtgcagcaacgtgacttcatagtgctcgcccgactcggggcagcgaatactgtgtctctcgttggggtagatctgcggggagacagga

SEQ ID NO: 333392 - DNA, 122 bp, Homo sapiens
ctttttcccgccctggcggggtcagcactgaggggtgctcctggtccagctctccaggctcgggggttccttgcctaggcgcccaagccccctgcctgggccgctgcggcttgcatagagcg

SEQ ID NO: 333393 - DNA, 122 bp, Homo sapiens
gagaaagtttcatccttctcatctatccttatcagtcaatatacaaatgctggcccggcgcggctcacgcctataatcccagcactttgggaggccaagaagggtggatcacttgaggtcag

SEQ ID NO: 333394 - DNA, 122 bp, Homo sapiens
caccccatgaaggccagttgggcatcttccccgtgccccctgaccctgggcttaagaaagcgatgcaaagggacagggaggaggccaggatcagggtgcggggggacggtcagagctgtctt

SEQ ID NO: 333395 - DNA, 122 bp, Homo sapiens
tgtggggagagccagccctccccttccagctgttcccagatgtcattctgcccgcccaggcgcctggttcctgagctccgcagcattccactgttcctaagctactggtttttgttgacttt

SEQ ID NO: 333396 - DNA, 122 bp, Homo sapiens
tgctttcactaaatgttaaaatataagccctttaccacactgttacaagggctttataaacgttatagtattagagccttcgcagcatctgacataatttctccacttctggtctcgaaccc

SEQ ID NO: 333397 - DNA, 122 bp, Homo sapiens
tccccggaagtctccctttatggagggttggggttgggcgctccgcagtcctcccagggccgctctgaccggccgctctgtaacttctcgcctcctcttcgccgtccctcccacagcggctg

SEQ ID NO: 333398 - DNA, 122 bp, Homo sapiens
cagacccccaccccatcccagctcagaatcgcggacttccaagagccctgcacagaagcccgcggctggcagctgcaatcactgactccggctgtccccggaacatccctagaaagtgtgag

SEQ ID NO: 333399 - DNA, 122 bp, Homo sapiens
ccagtagagcgggtcagatgttgccaacctctgcagagtagcaataagcagtaaacgccacgctctgcacagcctcccagtgctgggcctggtcgccacgcggagccttgggctgggacagg

SEQ ID NO: 333400 - DNA, 122 bp, Homo sapiens
tatgcgggttttcctttgtcttcgtggggatgtgagtgctttacttctccttcctactgccgcctcccgataggtttcgcgcccctcgtccccctcgccctccgcccctaatgtatctgtac

SEQ ID NO: 333401 - DNA, 122 bp, Homo sapiens
gccggggcggcgggggccaaaagccacaaaaagccgctgtggcagggcaaaaagtcgtggcggcgggggcaaaaagccgcaaaaagccgtggcttcgggggcaaaaagccgcggcggcggag

SEQ ID NO: 333402 - DNA, 122 bp, Homo sapiens
ctatctgcacccgttgctggaagggccgcctctgcatattgcattgataaaggtagccttcgcttgtcttactaaaagcctatttttaattcttttgaagtgaatccccagtgtttagggca

SEQ ID NO: 333403 - DNA, 122 bp, Homo sapiens
tacgtgtgtgtgtgtgtgtgtggcagaggggggtgtggtcatggggtattgacatgaatacgcaaggggcaggaagcatctgaaatcagagctaacttgggaggcacagaacacggggtgcc

SEQ ID NO: 333404 - DNA, 122 bp, Homo sapiens
cacattcaaggtacctaggttacacactctttatgaaaatctaactaatgcctgatgatccgaagtggaacagtttcttttctttttttttttttttagacggagtttctctcttattgccc

SEQ ID NO: 333405 - DNA, 122 bp, Homo sapiens
cgcctcacatgccgtcctggctccctcctccctccatggaggcctctgtgggtagagactcggctcctcctctggacctgggccctccatggaaaggcacagggctcccactgggtggccct

SEQ ID NO: 333406 - DNA, 122 bp, Homo sapiens
aggcgtttcctgggcgatcctggtgcaaagcgaaggcgcgcgggaagcgcagtctggctgcggcccagcccgggggcacccgcggtgccctgaccttggacaagtcctgggtctcggggggc

SEQ ID NO: 333407 - DNA, 122 bp, Homo sapiens
cagggaaaatgttgcctcaggtttaaaataatctgcccaagcaccccagcgcgggagaaacgttctcactcgctctctgctcgctgcgggcgctccccgccctctgctgccagaaccttggg

SEQ ID NO: 333408 - DNA, 122 bp, Homo sapiens
ggcctccccgtcagctggcagcagcggcccctcagcagcctggagtgctggcctgccagccggtctgcctgtcctgcgccatggcctccctgtgcgtctgtgaagtcagtgtgagctgctcc

SEQ ID NO: 333409 - DNA, 122 bp, Homo sapiens
gcggcgattaccgcatcttctttgctgactttggtaaccgggtgtccagggaggagcgatcgggagtggccaagcagttgcctggactcagcttctgactctgcagctgggagtcagatgca

SEQ ID NO: 333410 - DNA, 122 bp, Homo sapiens
tgggagacgggtatatggcaggctatgctggatctgaatacccaagggccagatgatgaacgctttacctcccacgtgagggaccttgtgttagggtctccgcctccgagtgtcttcggctc

SEQ ID NO: 333411 - DNA, 122 bp, Homo sapiens
agaaaaacacacattgatgagggtccgtcagagaagcagaggagctgaaagatctcccaacggccaaagcgggagccatctgagcaacaaaataaagtaatattggattataacccaaagta

SEQ ID NO: 333412 - DNA, 122 bp, Homo sapiens
aacgcatgggttcacgggaccctgtgggtggaggcccagctggatgtggcccctgggtggcggcatcctcagctctgccggtggctgggggactgtgcgtggaaggtcggtgagggacccca

SEQ ID NO: 333413 - DNA, 122 bp, Homo sapiens
tcaactttaaccgggtcggcgccctcgggagaaaatgcagcctgacgggtcgggtgagcgcgctcggccccgccccggcccggcccggccccgcccccggccccacccccgggccttcgcgg

SEQ ID NO: 333414 - DNA, 122 bp, Homo sapiens
atcctccaaactagactctctttcttcctacatacaaattggccggttcttttgtaagctcgttattgtcttattagcaccctgacaaatgcagtcaacaataaccaaaatcaacttcaaat

SEQ ID NO: 333415 - DNA, 122 bp, Homo sapiens
gttacaggcttgtggggggtcatcaactgagccctgcctgttcgctcaataaacgttggtcgctccttactccttaccactgagtctcagggcgaaagagtggcgcctgtctctttaaatta

SEQ ID NO: 333416 - DNA, 122 bp, Homo sapiens
ttgtgaaagattctagaacctaagtcctttctaggctaggcaattctaggctacacaattcgtagtctctgtaaataccatttgataactgaaataaacctataaagtgggattaaatgtta

SEQ ID NO: 333417 - DNA, 122 bp, Homo sapiens
cagtgtagccggggttacacacgcagcgcccattctcacagcgccccctctgactgcaaccgcgagggcagctcctcatgccacagtcgtcaccagtgtagcctgggtcacacacgcagcgc

SEQ ID NO: 333418 - DNA, 122 bp, Homo sapiens
caccaagaacacatcttggcgaggtttctctagggtgcatgcccaggaggaagtgtggctcgtggggcaggtggacgtacatctgttcctggaactcccccaactgcaggcccgagaacacg

SEQ ID NO: 333419 - DNA, 122 bp, Homo sapiens
ccccatactctctgtctggtgcaggcatgggcccggcacccccaaactccggcccccacacggttcagggccccccacgcaagactcacctccagcggccacccccactcctgtcgcgctgt

SEQ ID NO: 333420 - DNA, 122 bp, Homo sapiens
cagacctggcaacctgtcctctgaagtgtggcctccaccaggaggggccatggacttctgcggacacaggcagactctgggtaaatatgccagggcccaagaccctcacatctccccgtcca

SEQ ID NO: 333421 - DNA, 122 bp, Homo sapiens
aaaagaatgagatcatgtcctctgcagcacatggatggagcgaaaggccatcatcctaagcgaactaacaccagaacagaaaaccaaatactgcaagttctcatttataagtgggagttaaa

SEQ ID NO: 333422 - DNA, 122 bp, Homo sapiens
agataaagtatccaggggacatttcaccagcagccactgggactttaactgtaacaatgacgctatacttagataagcaagagctgatttcacacaagttcttacttcttctctctctgaca

SEQ ID NO: 333423 - DNA, 122 bp, Homo sapiens
tccgctccatttctgcccggcagttccagcccctgggtctgcgcccaggatgacaccccacgtgggcctctccaggccgctcggctgcccagatgcagcttcttcctgccctcagcctcgcc

SEQ ID NO: 333424 - DNA, 122 bp, Homo sapiens
cagctacaggcgggcgactgcggggggcccctgaggcggcgggggccatggctggggtcgcgtgcttgggaaaagctgccgacgcagatgaatggtgcgacagcggcctgggctccctgggt

SEQ ID NO: 333425 - DNA, 122 bp, Homo sapiens
gcaggcacgcgccgccacgcctgactggttttggtggagacggggtttcgctgtgttggccgggccggtctccagcccctaaccgccagtgatccgccaacctcggcctcccgaggtgccgg

SEQ ID NO: 333426 - DNA, 122 bp, Homo sapiens
caggcccttgggggctgcccctgtccctgcacagcgagtggggggctggagtttgcaggacgtgctggggcgcggcctcctggcgagcctcccggaggcggtgcaccgtgcagcccttgagc

SEQ ID NO: 333427 - DNA, 122 bp, Homo sapiens
cagcttgaggccgaagcagcccttggacaagcccttcttgttggctcctttgtatttgcgcgcgttggggtgctcttgcagaaggcgagcccacgctgcccgcgacttggtgtccacgcgca

SEQ ID NO: 333428 - DNA, 122 bp, Homo sapiens
gcagagccggaagcggacgctgaaaactggcggctccttaatggttccggcggcagggaccgcagcgacgccctcaccggaagtcccgcctctgccgtgggcctgcgagaatcgaggcactc

SEQ ID NO: 333429 - DNA, 122 bp, Homo sapiens
gctcgcgcgcctctgagaggctgtccgcgcgcgcgcgtgtgtgcgtgagtgtggatttgccgggactggagctggaaagttcaaactaaacgtgttgctctcgccgagtgccgaggccgcgg

SEQ ID NO: 333430 - DNA, 122 bp, Homo sapiens
aggtgcatcaaattaaagttatgtatgtaacacaactttatagtaagtcctccccaagtacgaatgaatgtatgttgagtaaacatccccaaaagatcccattaagatgtaaacatgaaaga

SEQ ID NO: 333431 - DNA, 122 bp, Homo sapiens
aggccccgcccactcccgcccagccccaaaggagccccgcccactcgaaagctcaccctacggcctgtctgctgggccaagatcttggcgatggagttgaagttagttttgctgccgaagag

SEQ ID NO: 333432 - DNA, 122 bp, Homo sapiens
cgtttcctggcatctcctcagttgtgttgtctgagaaattggctggcctcagatcagactcggagatataaaaataagtatgattccttttattataaagagagaaataaatggacatttaa

SEQ ID NO: 333433 - DNA, 122 bp, Homo sapiens
cgggcccagatagtcactagctggcaacatttagggaattctaacatcaaattcctctaacgataaactgttaaaacatcatctctagacccagtcttaactttcctcttactggctactcc

SEQ ID NO: 333434 - DNA, 122 bp, Homo sapiens
cccacctggggagcggggcgccgcggtaggggcactggagcgcacgatgcaccccgccaacgagtcctttctgcagacggggttcctgttttcatgcaaatgcctttgttagcgcaccggga

SEQ ID NO: 333435 - DNA, 122 bp, Homo sapiens
gtcagtcctccgccccctttgttgctgtcagtcagaacgcggattgttttcccagggttccggcagtgtggaccctggaccagcagcctcagcatcacctggaaacttgctagaaaagcaca

SEQ ID NO: 333436 - DNA, 122 bp, Homo sapiens
atctggtctttattcacagtgtcagccggtgccctggacatgtctttgttgtgtgtgtgacgcaccgtctcacctgagttttctgccactggatcatgtgggtctggttggcagaccagtat

SEQ ID NO: 333437 - DNA, 122 bp, Homo sapiens
aagtgacggggggtgggattgaatgaaaagtgcaaaacacaggctcgcagcgctggagcccggggccgcggagccgggccggggcagcgccgtctccgcctcggggccgccgggggcgccct

SEQ ID NO: 333438 - DNA, 122 bp, Homo sapiens
ctcaagctagcttcgggataaattcactttttttttgtaccagacctcactcatgcttatcggattctgcacacagcaaacaactaacctgctttttggttacagaatcaatgaaaagacag

SEQ ID NO: 333439 - DNA, 122 bp, Homo sapiens
cgggcgcagtggctcacgcttgtaatcccagcactctgggaggctgaggcaggcggatcacgaggtcagaagatcgagaccacggtgaaaccccatctctactagaaaaaaaaaaatacaaa

SEQ ID NO: 333440 - DNA, 122 bp, Homo sapiens
gagcacaagtcagggtcaaggtcatgaaagccagacagaggaacagcctcagactggaggcggcgaaggagctgaatggctaaatgccgtgtggggacctcagagaggacaggagtggaaaa

SEQ ID NO: 333441 - DNA, 122 bp, Homo sapiens
ccccagggcccagtgcgagcggagacagcggtggcagcgcctctcaggcggtttccagagcgggccgtggctcccgggaacggcttcccgcaggtgattctgtgcacactggcctctacctg

SEQ ID NO: 333442 - DNA, 122 bp, Homo sapiens
gcggcgtccactgcaaggatgcactgtctggctccctctggaggcgggagcacgaaggagcgaccacggagcccttgagcctgtggatggtggcctcggcggccggcaggccatgctggagt

SEQ ID NO: 333443 - DNA, 122 bp, Homo sapiens
tgagaccagccttggcaacacagagagactccatctctacaaacaataaaaaaaattagccgggcatcgtgatgtgtgcctgtggtcccagttacttgggaggcagaggtgggaggatcact

SEQ ID NO: 333444 - DNA, 122 bp, Homo sapiens
cttgtccttcatcctgggattctaggtcaagttcttagctcctggctcctcttcaaggcccggctgggtctcctcctcccactccgcccctctgtcccctcccacagagttcaccacacagg

SEQ ID NO: 333445 - DNA, 122 bp, Homo sapiens
agccctcgactcggtgctcgtcctcccgacctgcgacgccaccggctctccgattctgcgcgagccctactggcagtcgacttctaacttggctcgggcatccatcgctctggcctgaactc

SEQ ID NO: 333446 - DNA, 122 bp, Homo sapiens
ggctcggagcgcaagccgctgggggcattgaactgggctgggggcgcaggggacaaagcccgaactaaaaaccttgcagcatggagcgctcggacaccagccctgcacgcggtggaaggaga

SEQ ID NO: 333447 - DNA, 122 bp, Homo sapiens
gacaagaacgcccatcatgaattgctccccacaaagaaaacatatttctaggaacttggccgttttcccctgtcccgagtggggttcccgattccgtgccgctttgagggaagctgctctgt

SEQ ID NO: 333448 - DNA, 122 bp, Homo sapiens
tccatggcagccggactgcagccggggccccgcactcgcagccggcgcgaaagttccccgcgagccgcccagcccacatctgggggcagctggagccgcccgcagctgcagcaccgcagggc

SEQ ID NO: 333449 - DNA, 122 bp, Homo sapiens
tgcgtcgggctgctgctctgctgactgggccgctgccttttcattcaagagaggccgaagcggtgattgggtcctgtggaagggaccgggagattattggcggagacgggaagaaagagggc

SEQ ID NO: 333450 - DNA, 122 bp, Homo sapiens
aatttcaaaaggtactctcctaaaccaagagaactgtggggaaatcaacatagtaaataccgaagtataaaaccagatgagaaggccacgtagagatttctgggttgaggatgaagtaaagc

SEQ ID NO: 333451 - DNA, 122 bp, Homo sapiens
aatttgtcatcgcttcagggattacattcttggggcttaacccttttccacctggaggtgcgtcctggggcatcagcctgctcgggaggaggggcctgactccctgttccccgattctcatc

SEQ ID NO: 333452 - DNA, 122 bp, Homo sapiens
ggtgacagacagaagggtgacagcacccggtggcgccaagggatctggcgggggccaggccggagggaggggctgggggatgtcagggccacggagcgcaaagcgcaaaggcccgggcgccg

SEQ ID NO: 333453 - DNA, 122 bp, Homo sapiens
gtggcctgggctcctccttggcttgacccagcttagactttctcaaaccgaagtcattctcgctggctcctggcgactctcatcctgtccgctgtcaccctttcgtgattgacctgaaatca

SEQ ID NO: 333454 - DNA, 122 bp, Homo sapiens
aggctgaccactctcacagggctccgggacagatccaagtccctaggtgccggacggtgtcggctcatggatcagagcttcctgcccgggtgctgatgtgggtaattcactctgactctcag

SEQ ID NO: 333455 - DNA, 122 bp, Homo sapiens
ggcccggaaacccgtgggcggggtcactgagcagcaggggattgggggttgggcgccaggcgcgtgcgcgtctctgaaacggggacttgggagcgcgcgctgcccctcacttggctgcaact

SEQ ID NO: 333456 - DNA, 122 bp, Homo sapiens
taattaccatgctttgacctaaccgtacaagaacattttcctccgtctcatgtccaaggacggatgtgggcactgttcctcatccggctgcctcctgtccctcacagagcgccactcggccc

SEQ ID NO: 333457 - DNA, 122 bp, Homo sapiens
tccaaagccgcgcggcaatcagtgtggtgggaagaacagggcacttgaccacctgacgcacgaactgggagggctcccactctgtctccacgccacacgtagcttctctatacagatgctgg

SEQ ID NO: 333458 - DNA, 122 bp, Homo sapiens
tgggcctcggggacctggcaccgcgggaaaggagtcggacgccgaagctcacacgccgtgcgatcccgtttttaaaagtccagaacccacaaatctacacagagagaaagtggatttgcagc

SEQ ID NO: 333459 - DNA, 122 bp, Homo sapiens
acggtctacttacattgagctgtctccaagttcttcatagagatgcgcacctggcggaggcggcggcggcggcgggggcgctgccactggtgcaggagccggcactgctggtttagccgcgg

SEQ ID NO: 333460 - DNA, 122 bp, Homo sapiens
gtagaggaatcccggtgcccaagtaccagattctaccggggcctctctccgcaacccgcccgagcccccagccccaggaaggagggctatttacaatttatgggtttagcgaccctcctcac

SEQ ID NO: 333461 - DNA, 122 bp, Homo sapiens
ggctgcaactcgcgagggtcggctttccctgggtctccgccctacgggagacagtgaaggcgggagcaaggccccaaccgagaaccccaccccaaacccgggggccaggagccctttacacc

SEQ ID NO: 333462 - DNA, 122 bp, Homo sapiens
gactgagcagtctggaccttgcatggcttctggggcaaaaataaatctgaaccaaactgacggcatttgaagcctttcagccagttgcttctgagccagaccagctgtaagctgaaacctca

SEQ ID NO: 333463 - DNA, 122 bp, Homo sapiens
tgagctcagaggtggagtgagcaattctagagtacaaatagaccgactcataacacaacccgatatccttcaaaaacattgtgagtccacaaaacagtgggaaaataaatctctaagtcaga

SEQ ID NO: 333464 - DNA, 122 bp, Homo sapiens
aaatcacagcccttcagctgccacggtgagaacgcagcactcgggttaggaagcggatctcgcaagctccgagcgtcagctgccgggtacggtctttggcgttagcgcttctcccatcccat

SEQ ID NO: 333465 - DNA, 122 bp, Homo sapiens
acagttcagattctgactagagggcattatttatgccaggattaaaagcagctggtggctcgctgggtacctcctacaaggcctttagtccaggcatgaaggcagttcagatttaagagtct

SEQ ID NO: 333466 - DNA, 122 bp, Homo sapiens
taaggtatgtgtagtaggcattgccttttctctttgggaacaaaactcaggaggattgcccgttgatgaacaaggctaacctgctgattctttgaagcaaagaactgcagatggtcctttta

SEQ ID NO: 333467 - DNA, 122 bp, Homo sapiens
gacctgtaccagcccccgggagccgtgcggggccaacaatgaggagcagaatgcaaggggcggcctcgctcccctggccaccgcgggggtcgcggcctcccattacatagcgcgtgtctcga

SEQ ID NO: 333468 - DNA, 122 bp, Homo sapiens
ttacaagattgccccctagtccctcagagacatattaggtggattaataatgctaggagccggcatcttaaaatactttctagttgtcacttttagagagggttctgccttgcatgcaaatc

SEQ ID NO: 333469 - DNA, 122 bp, Homo sapiens
agctaagatcagaaagatagaacaaaagtgaaaaatgtgaatttgttttacaaatcttgccggtatctggatacacaacgaatgactcatccaggggcctatttttgcacaggaccacaaag

SEQ ID NO: 333470 - DNA, 122 bp, Homo sapiens
ggaatgggactgacactccccacataggatttctctgtgagcaaccacaggcattatcagcgttcaggatcacatcacaaaacacagcctgatcatcttgccttctctttttcctcctctca

SEQ ID NO: 333471 - DNA, 122 bp, Homo sapiens
aacgctttacatttattaattcagaaatacagaggctgtcataagaacatccatatgccccgtgaacatgtggacaagtgacaccagtttttagtctggagagattttcattgaaagacaca

SEQ ID NO: 333472 - DNA, 122 bp, Homo sapiens
ccatctacagggcgctgcctctcccctcaggacacgttgtgcccaaagggattttaggggcgcttacctggagccattgccactaggtgagctgtccacaggaccctgagtggttcggggag

SEQ ID NO: 333473 - DNA, 122 bp, Homo sapiens
aacgttccacgagggcgtcccagaggcatctgcagcctccgctctcctgttctgctctggcgcccaccagcccctgaccgagtccagagggtcaccgaagacgccccccagtgctcgaacgc

SEQ ID NO: 333474 - DNA, 122 bp, Homo sapiens
atgagtgcggaatattcacactgcattttccctgttgtggacattccgcattcttcccggcgtggatgctccgcaccctcccccggcgtggacgctccccatttttcctggtgtggacactc

SEQ ID NO: 333475 - DNA, 122 bp, Homo sapiens
tcagaattgtttgttttgattttggttttccccgtttattcatctttggttcgtatttctcgatcttacaagttcgtaggtttgagaaagaacaggaaaaggtgacttctcacaaataacag

SEQ ID NO: 333476 - DNA, 122 bp, Homo sapiens
gggcgatataaaggaaccagcccaggggcttcctacagccagagggacgagctagcccgacgatggcccaggggacattgatccgtgtgaccccagagcagcccacccatgccgtgtgtgtg

SEQ ID NO: 333477 - DNA, 122 bp, Homo sapiens
cacatacacatcacagatatgcaccatgctcacaaatgcacatacacaccacacatacaacgtacacacaggcaccacgcacatacacacacaccatgcatacacacatatacccacatata

SEQ ID NO: 333478 - DNA, 122 bp, Homo sapiens
tgtacgacggggagccctgaagcactttaggaagcagagagcctgatgcacgctgggaaacggagtccactcactcagtctattagctgtgtatgcctcccagagctcggtgcgctctggga

SEQ ID NO: 333479 - DNA, 122 bp, Homo sapiens
caggccccactcaccgtggacttcttggtgagcatctctttagccatgacgtccatgagccgttccttctcctcatgatagcgccgctgctgctccagtattgtctccatcttcccttagtc

SEQ ID NO: 333480 - DNA, 122 bp, Homo sapiens
ctctgtacctagggtcaccgtaaggctcgggtctcatcgggtttctgtacatgctctagacgtgcagcgtcatgctaccgacactccaagtagccggccttgctggcactcctggctttctc

SEQ ID NO: 333481 - DNA, 122 bp, Homo sapiens
ctcggccacagctctgcgctccacgagctgctcctgcccggtccccgcaggactcgaacccgcgacacctctgccgcgccctagccctcgcgccccgccggagtcaccccctgacactgcca

SEQ ID NO: 333482 - DNA, 122 bp, Homo sapiens
tgagatctagttgtttaaagtgtgtagcacctcctgccttgctctcgttactgcgctggccgtgtgacatgacttgctccccctccaccttctgccatgattgtaagtttcttgaggacacc

SEQ ID NO: 333483 - DNA, 122 bp, Homo sapiens
gcaccgcctccggtgcgtgggcgggagacataagcctagccaagcccatacagcccggctcgggtggctatggagaggcgtactgcagagacacctggacgcgcactgtgacaggcgccatt

SEQ ID NO: 333484 - DNA, 122 bp, Homo sapiens
gagttcggcgagtaaggacaaaagggccgcccgtccgtgtggatgccgggctcagggctgcgctctgggagcctggctcgcgtcccctccgcggacgcccggtaccccgcagcccgagctcg

SEQ ID NO: 333485 - DNA, 122 bp, Homo sapiens
tgaggccagtcgctcatggctgtgggtggaatgctgacctcaggccaggagccaacctttcgctaaaccctgccctggtagtgtccgcccgtgatttaatcccccaaatgataaaatcatac

SEQ ID NO: 333486 - DNA, 122 bp, Homo sapiens
gcggtgccggccggccaatccgagtgcgcgcccgccgagcccacgcccacccggaactcgcgctggcccgcaagcgccgcgctcagccgctgttcccacccacgcctctccctccatacctc

SEQ ID NO: 333487 - DNA, 122 bp, Homo sapiens
catccctgccgagtctgctgggctgaaacacaagcctgggttcttcacctctgacccttacgagccttccagtgcattaatttcaagtgtggaacctgggccaacgctgctaaggccatatc

SEQ ID NO: 333488 - DNA, 122 bp, Homo sapiens
gggaggaagtgtcagtagctgggcaggccttcttggcaagcattcctccctgggttgtggcgggggctcccggcctgctgtgtggcagctgcaggctcctggggacctgaaggaaaagctta

SEQ ID NO: 333489 - DNA, 122 bp, Homo sapiens
agcacccaccacatccattaacaaagactctcagggtgcggggtccgagtccccggcatccgctgggggaggctgcgggctccggagcgggagcgcagagacccgaaggagggtgaggagga

SEQ ID NO: 333490 - DNA, 122 bp, Homo sapiens
gctgcagggcggcctccagctcggacagcttggcgttggcatccttaaccaccaaatccccgtgcagctcggcatctgtgatggcggcctccagggaagccctctggtcaacatgagcctgg

SEQ ID NO: 333491 - DNA, 122 bp, Homo sapiens
caaatgggagcccgaggtgattggagggtcaaggggatgtgacgcgtcccgcgccgccgccgccgccgctgccaggactctcagtgccggttttaatgggcagctccctcttcgccgccccc

SEQ ID NO: 333492 - DNA, 122 bp, Homo sapiens
aattggagaattgggcaactccaccatcagaatagattcagagcaactggcgctgtcatgcgtcagagaggatttatggacagaagaaagtaagtgacataaagaaaacagaagtgagatac

SEQ ID NO: 333493 - DNA, 122 bp, Homo sapiens
ctggcttctgttcagattagttggtgccagcgacttactcaggttaaatagctgaagtatcgtctctgcataagtatagttttgtgttatgctttgtggtcatttccctgcaaatttaaaaa

SEQ ID NO: 333494 - DNA, 122 bp, Homo sapiens
gacacagcactttccctaataggggattagttgtgaaaacaagcaatgaaagaatgtttacgttttgacccagttggaatcatagtcctcactcagtaccagagttgatccttactgtccat

SEQ ID NO: 333495 - DNA, 122 bp, Homo sapiens
agtacagccctggtgaggaaaacaatactaccattcatagctctagacgtagatttcaatcgacttaagcgggcacaatgaaacttggtcattcactggttacccatattgtgttctcaaat

SEQ ID NO: 333496 - DNA, 122 bp, Homo sapiens
gtgtcaaatgaatgaacaccaatatgtacagttagcttagggggaggggtgacttggtctcgtttagagtatacacatgcacagagctatggaatgcaaataagaacatttgcacccaaact

SEQ ID NO: 333497 - DNA, 122 bp, Homo sapiens
tcagaggcagggcctgggagccccagggaagcctccacagccagccacagacacagtaagcgtccttgttcacgacacagggcacacagtgctcggtgagccgggtcaggatcagatgctgg

SEQ ID NO: 333498 - DNA, 122 bp, Homo sapiens
attgtttccaaacaattatggctacgtcaggcagtaagacatggccgtcatttccccctgcggatggacatactggggcacagcctcagtggctcgtgttcactcagccaaaagtagctgcc

SEQ ID NO: 333499 - DNA, 122 bp, Homo sapiens
ttccatagagccatcccactagaggtcacagatcacaaaaaccctacagaaacaggaaaccgaacttcctgagtacgctacaaaacacagaaacctgtttcctctacacatctcaaactggc

SEQ ID NO: 333500 - DNA, 122 bp, Homo sapiens
cacttaagtctttgggattaattaccacgttctggtccctcagactggagtattacttatcggagctgcgtctgacaccggcccgacacctcgtaaaatagggaactgcgcctctctgcctc

SEQ ID NO: 333501 - DNA, 122 bp, Homo sapiens
tgaggggagggggtggtggtcacagaatgaccaggtgaaaaatgacagccgtgtggcaaccgtgccccacagtgacctcagcagggctcctcacacctgcctagtgctgcactgccctgtct

SEQ ID NO: 333502 - DNA, 122 bp, Homo sapiens
ctggttttccaaaaaggcaggaaccatacacaccaatcaccagggaccagacaaaaagcacgaaaagtgaatcacaggagagggaaccagagggaaccactggttcccaaacaccagaccag

SEQ ID NO: 333503 - DNA, 122 bp, Homo sapiens
cgttcccggtctcgatctcgatcccgatcccgatccctgtcccgctctctgtctctgtctcgatcccggtctcgatcccgctcccgatctcggtctctgtcccggttcctctcatggctgcg

SEQ ID NO: 333504 - DNA, 122 bp, Homo sapiens
acctaaagcaaaaaggtcggggccagtacccacttcagaacgattttaatccgaaatggacgcagatctctagaccctctcggagcgacgggactgggaacgtcttagggccacgccgcgag

SEQ ID NO: 333505 - DNA, 122 bp, Homo sapiens
gtcacgtgttgttgttgggccgggaaagctgcttccgggtcaatgcaggacactgggctccggcggccagagtgggggactaggtgaagcggcgccgggccggggctggccgggaccaggcc

SEQ ID NO: 333506 - DNA, 122 bp, Homo sapiens
gagggtgtgggtagatggttctatgtaaaggttgacctgagaattaaatggcatagcacacgggtgagtgtctttataggccctgagtaaacatcaatttaatttggtttctgtttagattt

SEQ ID NO: 333507 - DNA, 122 bp, Homo sapiens
gttgggagaaggggagtacaggtgtcactctctgaggttcgtaactcagggcaagtggctcggggcttccagcagcttcagacttgtgccaggaaaatcagcaagtggagacgatgccacag

SEQ ID NO: 333508 - DNA, 122 bp, Homo sapiens
ttgctgtctgagggcgtctggctgtggagctgaaggaggcgctgctgaggagttcctggacgtgctcctgacgctcactgcaagtcgtatgacaattggtcgctaaccgagagaaccttcct

SEQ ID NO: 333509 - DNA, 122 bp, Homo sapiens
ggggccgcgccgcatgtcagcccggagccgccgcgctccgccgcacgcggcgcccggccccgccccggcccgccccggcccgccccccgtagtccccgccccctgccccgcccccgccgccc

SEQ ID NO: 333510 - DNA, 122 bp, Homo sapiens
tctttacctctgtggctgagatgccgctccgcctcctcgggtgcttccttccctgagcgccgccagcaacttctctgagggaaatagcagctgcctggcccgcttggcacagccacgtgcaa

SEQ ID NO: 333511 - DNA, 122 bp, Homo sapiens
gtttggtgatgtggtcaaatactattgttctggtgaattggttttgtatcttaggaagaccggatggctagactttgtagatgtgtagaatcatttagaatgaaccacagccacagtgccca

SEQ ID NO: 333512 - DNA, 122 bp, Homo sapiens
tctacagtccctagcacagggctaggctccccaggggacagcccaagcttggcccggcggcgctccaggagccctcgtttccaggctggcatctgggacaggcgctcccgttctgctttctc

SEQ ID NO: 333513 - DNA, 122 bp, Homo sapiens
tcgggcccgggcggggcgcagcagctgctggaagggcagcgagccgagggccgggcaagacgacatgccagggctgcgacgcgaatgcccaggacccctgccgccttttctggggcccgagt

SEQ ID NO: 333514 - DNA, 122 bp, Homo sapiens
ctgcgcttttttatcaccatacactcctttgtatcacactgctgtgactttcctgcataccggggaaggcatagaaaataccaaaactattagccaaacgtttttttgtctcaaggcgtttc

SEQ ID NO: 333515 - DNA, 122 bp, Homo sapiens
ccactcaagattgggtctgtggatttactcacactgctgtgtatagcaggactgctcccgcggcatggcagcatccgattgtgcagacaccaaggctgatgtaaccactgcagatgttctgc

SEQ ID NO: 333516 - DNA, 122 bp, Homo sapiens
ttacccagcgccctcccgtagctctccggagagcatgtgaccaggccgttagcagcgccgcgagtgcccggcaatggcagggatggtgcctcaaatatccctggaagctctggtgtcacttg

SEQ ID NO: 333517 - DNA, 122 bp, Homo sapiens
atctaactaagtcagaacaccccacgtctagcccatatatctatttattaccgaattcaccgggaaagacaagctgagttatcacttagctgaaaaaacctgagaggcatttatgtgcatga

SEQ ID NO: 333518 - DNA, 122 bp, Homo sapiens
gcaggaggaggctgcagtgagctgagctcgcgccactgcactccagcctgggtgacagagcgagactccgtctgaaaaaaaatcaaaaaccgctcagggaaaggcctgacactgatggagcg

SEQ ID NO: 333519 - DNA, 122 bp, Homo sapiens
gcccccagcccccagtcccagcccagcgggctaacaagggtccggcctcagagagggtctcggggatcccagaggtgggaaagtctccggaggcgcaggccccgctctccaccttcaccagg

SEQ ID NO: 333520 - DNA, 122 bp, Homo sapiens
tctggcgacccgagaggctctctcttgcctggacgttgattaaccagcaaagtgtacagacggtgaagcgctcccctcctggggtatcaaactttagatccactgaggacaaaggaggatgg

SEQ ID NO: 333521 - DNA, 122 bp, Homo sapiens
ggaaggggggaggacgcctgtggatcgaggtgtcccctggggtccctggcaccctcctttcgcccctcgttccctggactggggtgtctgtccgccagcgtcgcagctggggtggtgacaga

SEQ ID NO: 333522 - DNA, 122 bp, Homo sapiens
ccttcctttcgcagctgcaccaggtgcagtgccccgtgtgccagcagatgatgcccgccgcgcacatcaactcgcacctggaccgctgtctgctgctccacccggcggggcacgcggagccc

SEQ ID NO: 333523 - DNA, 122 bp, Homo sapiens
tggagggaaagattccagaacactcagatgtggccatttgtcccctccagagtgcccacacgctatgatgtccaagacagccaaggagactgagggaaggcaaagctgctgggagggcaaag

SEQ ID NO: 333524 - DNA, 122 bp, Homo sapiens
ctcgcccaccctaccaggctctgggccacctctggcctgagatcttcactacaggctcctcgtcccaggtcagagtgagggctcagcggactagaactcgggtctctggtgcaggtcccgcg

SEQ ID NO: 333525 - DNA, 122 bp, Homo sapiens
cctgtactgcctgcagacagatggcaaccacttgcttgccacaggttcctccttctatagcgttgtacggctgtgggaccggcaccaaagggcctgcccgcacaccttcccgctgacgtcga

SEQ ID NO: 333526 - DNA, 122 bp, Homo sapiens
cgggctcacctttcatcgctgcgatcacaaaatacatcatttaagccgcggtgcggagagcgcagggagagcggatggtccgaccccggagccccctctgccgccgccgcgccgccgccgcc

SEQ ID NO: 333527 - DNA, 122 bp, Homo sapiens
taagaggtaccccctggaatgggggcacagccagttccagacttgagtgaagccagatctcggtgccttccagaccctgactgaaagatcaagggagtaggcatgaaataaacttgaggttt

SEQ ID NO: 333528 - DNA, 122 bp, Homo sapiens
tccccggacccgtgggaccccggctgctgaggcggggactgccaaagcctttaatgccagcgagaaggcgaacttgggtttccaagaaagagagactttcactaactttgaaggaggtgtgg

SEQ ID NO: 333529 - DNA, 122 bp, Homo sapiens
cggtgccctgggccgggtagacagtcactgaggcgcgagcagaacggggagtggttccagcgcccaaagtggactggagccgggaagggctcaccagtcgcgtttcccaaagaaatcccgca

SEQ ID NO: 333530 - DNA, 122 bp, Homo sapiens
ttgacaggagcaattccgggtcacaaaggctgacaccacaaagctagtccgtagcgggttcgaccacaggcgcccacactctttgacgcctcaatggcacagccaagtgcgcgggaagtggg

SEQ ID NO: 333531 - DNA, 122 bp, Homo sapiens
taagaggttgttgatgaatttgaggtttttaaggccactaccaaggtaatggaaatgggacgagaatggaagagccattatgtaagagaccagtcacggctgtgtggagaacgaaatcaaga

SEQ ID NO: 333532 - DNA, 122 bp, Homo sapiens
gacaaactattctaaacttatttcttcaactcaaaaagagagaggaataaaatctttctgcggaatttctggttagaacttaaaggaactatatgatacatgttgtaacactgaggcacata

SEQ ID NO: 333533 - DNA, 122 bp, Homo sapiens
aggcaggtgccccccaaacaggaaagccgaggatgacttcactttccgaccctgcagagccgagtttcacccacgagtgaagactccgccagccttgcccctcgggcctctccctcaactca

SEQ ID NO: 333534 - DNA, 122 bp, Homo sapiens
agccccttccagcagcgtcagcagatcccagtggttacgttggtgagcgacgtccgccggcgctagcccagcctggtcccgcagctctcgggctgcccccagccccagcagtagctgggcta

SEQ ID NO: 333535 - DNA, 122 bp, Homo sapiens
cctgtagtcctaggatgtggctcaagagcttacatgcatgcagggccggtagtcctaggacgtggcttaggagcttacactcaggtagggcctagtcccaggacgtgggtcaggagcttaca

SEQ ID NO: 333536 - DNA, 122 bp, Homo sapiens
ccgtggttcccggctcccagcggagggaatgagtggtgggccggtgggccggggcgccggcgccctcctgtcgggctaacaaagtcattgggaggcagggtcgatccgcttgtaactttttt

SEQ ID NO: 333537 - DNA, 122 bp, Homo sapiens
ctttgtttcatcttagttaacttaaagcaacctagccaccgatggctacagcagattcagcggcaggggcagataaaatctgcagccggctggacctgcatagcgtgtgggtccccccaggg

SEQ ID NO: 333538 - DNA, 122 bp, Homo sapiens
ccgagctgcagcccagggtggaagccgcaagggctgggcagagttccaggcaagagggaccgagaggcgtgagcagtgctccgcagcgcttgtcagagaaatggagcagcggctcctttgtg

SEQ ID NO: 333539 - DNA, 122 bp, Homo sapiens
aggagtcgctaccagcgcccagtgcgctctgtcagtccgcaaactccttgccgcccgccccgggctgggcaccaaataccaggctaccatggtctacaagactctcttcgctctttgcatct

SEQ ID NO: 333540 - DNA, 122 bp, Homo sapiens
gcattttcaacttggcctaaaagttggagttcaccacactgcaggcgctaggaactctgccgctcggtcaccaacctgagcctctggctagtccgaagaacgcgaaaagccaggcccaaggc

SEQ ID NO: 333541 - DNA, 122 bp, Homo sapiens
ctccaggcgaggggatgccctgcagcatccagccgtcaaaacctcctgtagaaacgggagcgagcatcaagcctgtgtgtgtgcatgcttgggcggagtctacccggaggagaaagaggctt

SEQ ID NO: 333542 - DNA, 122 bp, Homo sapiens
ccggccaatcgccgccgactgagaggcgactattggaggaagcgggatgggcggtgcccgcgccgggccgctaggggtgcggggttggggaggaggccgctagtctacgcctgtggagccga

SEQ ID NO: 333543 - DNA, 122 bp, Homo sapiens
gcatgtgcatggggggggtgtgggtgttggtggcaaccatcgtgatcacagctgagccctcgcggagtccaggagcccactcggatttggaggtgagcccacatgggggcggccgagccaca

SEQ ID NO: 333544 - DNA, 122 bp, Homo sapiens
aagccccaattaggaaggacagagtagtatcccctgaactccatccttacccctcgagagcgcacacctggctaccccgcacccccacctctgctcccgcggtctggcagaccctcagtccc

SEQ ID NO: 333545 - DNA, 122 bp, Homo sapiens
ccccaggctagacatagtgctggaagtctgaggaaacgggaccagccggcaggagttctgcggggccttcgtgctgcggtgaggacctgggcctgtgtggattggccacgcctctggtccca

SEQ ID NO: 333546 - DNA, 122 bp, Homo sapiens
gcaggaccgtacgtccttctcctagtagccacgccgggtcactcagccttactggcccggcgggaaacgctaacacccaagcaggacagttcctagcccgtcgagcacttgtcggcttctcc

SEQ ID NO: 333547 - DNA, 122 bp, Homo sapiens
cctgccccggctcccgctcctgctgctcctgcttctgctgcagccccccgccctctccgccgtgttcacggtgggggtcctgggcccctgggcttgcgaccccatcttctctcgggctcgcc

SEQ ID NO: 333548 - DNA, 122 bp, Homo sapiens
cggaggaggaggctgtggcgccggcgacagctacggcagcggcagccaccgcggcggctgcggcggcggcatctccgcctccactcccgcccgggactgccccccactgtctccccgcccct

SEQ ID NO: 333549 - DNA, 122 bp, Homo sapiens
ccccctcccctttacacttcctctgtggagcccacttgttgctcaggcaaggcgcatgcgcggcaggacgcccagattcctcccagccggcccctcctccgcgcctccgccctcccctcccc

SEQ ID NO: 333550 - DNA, 122 bp, Homo sapiens
ctaggagggccccagaaatgaagccgaagcattggcggatgagactaacgagatctgtgacgactcgtatctgttcaagtggaacagaagccagaaggccctacagtgccgggtagctggcg

SEQ ID NO: 333551 - DNA, 122 bp, Homo sapiens
gcagcactgcctcgtgctcacacaagcatgcacgtactcacagacacgcaatttgatgttcggatacctgcctcctgtggttccagcagaatccctcagtgacacaaggtgtccctgccagc

SEQ ID NO: 333552 - DNA, 122 bp, Homo sapiens
agctctccaaactaggacttgctcagcagaggccgccagcccggagctggatccagagcccggccttggggaccccagctcccacctgcgccctgccttccagatcaggtcaaaaggggccc

SEQ ID NO: 333553 - DNA, 122 bp, Homo sapiens
gcttcaccccgagtggacatcccgggaccgtgggagagtgtggtgtccaccggctcacctcgcccatcctcccggcagcagccagaaggcaggggtcacgctcacacccgaggtgcagagta

SEQ ID NO: 333554 - DNA, 122 bp, Homo sapiens
cgcttggaggaatgggcaggaaagctgatctgttcaggtcccctggttgtgcaggagaaacgtgctgtgttcggtcggctgtgtcctgacgggcgtgagtgtaccgttgccaaagaaggacc

SEQ ID NO: 333555 - DNA, 122 bp, Homo sapiens
actgagtgctgctccatgccagatacatgctgaactcattcattcaatcctcacatcacacgaacggtcactaatagtatccccacttcctagagaagaaaactgcagttcagagagggtaa

SEQ ID NO: 333556 - DNA, 122 bp, Homo sapiens
atcttgaatgtgtctaactgtagaacagggctcaatgtgtcgtcatcttgagtgtggcgacggagccgcaaaaggtgcatgggactcagttcccacctccaccctggctccatcaatggcgt

SEQ ID NO: 333557 - DNA, 122 bp, Homo sapiens
gccacaccttggtgtactggtgggtgttgtagcctcggccgcagcacatggtgtcacagccgtccgcgccgggcgacgtgcggttgcagagacggccctgcgtgcccacgctgcccgtggcc

SEQ ID NO: 333558 - DNA, 122 bp, Homo sapiens
agggccatttttagcctcccttccacaacaggatgttgacattatctctagatgaggatacgcagtcacagagctgaacatagcacaatttttgcagctctcctttgtggcattccttgcat

SEQ ID NO: 333559 - DNA, 122 bp, Homo sapiens
gtatgcagccgaggtgcacaacatggagcaggtggtgatgatccccagccttctgcgggacgtgcagctgagtgggcctgggggccaggcccaggctgaggcccctgatctctacacctact

SEQ ID NO: 333560 - DNA, 122 bp, Homo sapiens
ggagctgcgcccccaccggctccgagggtgtagccgccagcgcctgggacgccccctccccgcaaagtgtccccgaattgcactctctggtcccggagctgcatctgagacagccgggcgcc

SEQ ID NO: 333561 - DNA, 122 bp, Homo sapiens
gcacacggtgaaccttaatcggtgtgtctgttttgcgctaaagtttagccgttagagagacgggactctgctgtttccgccgccagtccccattacaaaaccactccccctctgccccaaga

SEQ ID NO: 333562 - DNA, 122 bp, Homo sapiens
aatccgtaaccaagacaacagggcgcgattccaatcaagatggccgccagcgcctctagacgccctctacgaggccgtccccggaagtggcgttacgcgcagcttccggttccgcctgttcc

SEQ ID NO: 333563 - DNA, 122 bp, Homo sapiens
ccacagagatgcttaggatgtgatccatgaatcgcaaatcccagctagtgctcacaaagacggacatttctccccaagaccattccagtgccccagaggtccacagacatccaggaagatgc

SEQ ID NO: 333564 - DNA, 122 bp, Homo sapiens
gccaagtagagaaccctcaccagggtcctgggacccgtccacccctacacctagctagcccggagcctctcagctccgcgtccccacatcctccggatgcccagcggttgctgagataccgc

SEQ ID NO: 333565 - DNA, 122 bp, Homo sapiens
gtagtcagtaaataacctggaatgagtgactggaacaataaactaggtaaatgatagatgcgggccagaatgaacacattcctagtgaataacccagacaatgattcatgttccctcacctg

SEQ ID NO: 333566 - DNA, 122 bp, Homo sapiens
agggctctctccgacttggaaagtgcagggatcccaagaatatcacccgtccaggggggccgcgcggtgcccccggccctccacccccggcccccggcgggcgcgggagcgcggccgcaggt

SEQ ID NO: 333567 - DNA, 122 bp, Homo sapiens
ccagctcccctagttgatctacccttgcccaagccctggcccagggaggacaaatgctaccgtgtgctccttggagctttagaaaggcccacagtaagacaaataagtgatgtttggccggt

SEQ ID NO: 333568 - DNA, 122 bp, Homo sapiens
gcagaccccgccccctgctttgtgtgcggcgcgcggattggccgacgcgcgcgggggccgcgtcagcgcccgcgagcccattcatctgtgcacttgggcgttggaccccgcatcttattagc

SEQ ID NO: 333569 - DNA, 122 bp, Homo sapiens
acacagtctagagataatctaaagtgtgtgggaggacaaccataggctgtatgcaaatgccgtgccattttatataacaaacttgaacatcctcagatttcggtatccacagggtgtcctgg

SEQ ID NO: 333570 - DNA, 122 bp, Homo sapiens
cagctggtctgctgaggtctcagccaaagagtggccacctccaggaagcccgggctgtgtcgggacggaagggaggagtgtcccatctggagctgcctctgaactaagcgtcgccttatgcc

SEQ ID NO: 333571 - DNA, 122 bp, Homo sapiens
cctggagttatttactaagtacagagggagagacagtaactttgtaaccctgggagacctcgccaagcaatcatgggcaacatcgccaggataaggcacctctacgtcacacacctctggat

SEQ ID NO: 333572 - DNA, 122 bp, Homo sapiens
tccagctcacaccatcgggatcaccgccagcatcagcagcatcatcaagccatcttcctgcgttgtggcagcttgggcccccactggccatgcaggagccaggagatcaaatcatgaatggg

SEQ ID NO: 333573 - DNA, 122 bp, Homo sapiens
tacagacctccccttaaggggagcagcagggaggctggacccttccccagagcacaatgccggaggtcccacccaaggctgcccaagcccaaagacaggcctcctatccatcgaggcccgga

SEQ ID NO: 333574 - DNA, 122 bp, Homo sapiens
ggaccgaaggcttctggaggcccttgcgaggcgtcaacgtcatgatcatgggtgcagggccggcccatgccatgtattttgcctgctatgaaaacatgaaaaggactttaaatgacgttttc

SEQ ID NO: 333575 - DNA, 122 bp, Homo sapiens
gcttcctcctagagtttagaacttagttccttgaggaaacctgatggagtgtgaccgagccgctccttctctgtgctccggcagcacttcttgcgcacctctgaaataaccgacacatctgc

SEQ ID NO: 333576 - DNA, 122 bp, Homo sapiens
cgtccagacggtttccatttccccggataaccacggaaaacatgaatcaggagggccccgcgctggcccagctgcagtgtgggggcacacgccggtgagtcacaggctgtgctgccagcgct

SEQ ID NO: 333577 - DNA, 122 bp, Homo sapiens
cccgctgcccctcacctgcgtgcgcggaggagccccgagattgtaggcggcgccgccacccggggccagcaccacctgaggggccaggacctcctgctccgccaggagccggtgtccggcgg

SEQ ID NO: 333578 - DNA, 122 bp, Homo sapiens
aatggcatcttacatggcattaaaataattggaatcattctatagcaatctttttgctttcggaatgttctagatcttattccccgctagagttgtagcgttttcctaatactattagttga

SEQ ID NO: 333579 - DNA, 122 bp, Homo sapiens
cgcgccctgcggtggtgctgtgcggctacgcagcgctgcgggacgcgttagtgctacaggcggatgcggtctccggccgcgggtccatggcagtcttcgaacgcttcacacgcggaaacagt

SEQ ID NO: 333580 - DNA, 122 bp, Homo sapiens
cagcagcggcggcgttggctgcggcggcggcggcggcggcagcaggagccggagcgacggcggcggcatccccgagactctccgcactatccttacccgtgacagccactgacgtcctccgc

SEQ ID NO: 333581 - DNA, 122 bp, Homo sapiens
actcacttccgcctcctccggtttaagcaccgccttttcgggggttgaagccggaagtggcgcacagccctagcagcaacaacagttttccacgtgcgcgtagggcgccgggatcacgtggg

SEQ ID NO: 333582 - DNA, 122 bp, Homo sapiens
ggcagggcccgcctgtagatcagggtcaggaactggctcagggccctggctgcctgctcccggctgagcaggtgcagctggccatctgcactgtggatgtggagcaggcggctaccaaggaa

SEQ ID NO: 333583 - DNA, 122 bp, Homo sapiens
agcgtttcgtctttcttgcattcacaaagaatagcgtcaacaaatgttgagttgtatttgcgagtttccccaacaaaggacgggtctctagttctaggtgatggtggtattatcagtcacct

SEQ ID NO: 333584 - DNA, 122 bp, Homo sapiens
gggcgcgaaccctgagctgtaaatccctttccagaatgatgaggattccaacctccagcacgacaaaagcaaaacacactcgctctgagaaaccgaggaacgagccagacgactggaggcag

SEQ ID NO: 333585 - DNA, 122 bp, Homo sapiens
gggcccttgtggtataggcacccgagggaatctcccggtctgtgggtggtgaagaccatgcgaaaagtgtagtatccgggccggaatgctccgttcctcatggcacagtccctcatggcttc

SEQ ID NO: 333586 - DNA, 122 bp, Homo sapiens
catccatgcggcgctggaacacctgggaagcaagtgggggcaccatcagcctctggctcccggggcaacagaccctgccctgcacagacccctgggcttcccaatgccacccaccagccagc

SEQ ID NO: 333587 - DNA, 122 bp, Homo sapiens
gcaagcgaagaagccaaaatagagtctgcctggccctctcagctaagggagagtcaatcacgttaaacacaaggtagggtatcacattggaattacaggcatgagccactgcacccagccga

SEQ ID NO: 333588 - DNA, 122 bp, Homo sapiens
agatggccgccgcggagtcgccccagagggctccgaaaaggcgggggtggggctgcccggcgcaggggctgggggcggggtgtgcatgcggattgattgggtgggtgttgctgtgattagtc

SEQ ID NO: 333589 - DNA, 122 bp, Homo sapiens
gctgctctgcgtggagaacaacaaggagggcagcttccggcggcgcggccggcgctcccacgaccctgagcccttcaccccggagatgaaagacttgatcaatggctacatccggacggtgg

SEQ ID NO: 333590 - DNA, 122 bp, Homo sapiens
gtctggctccagcgcccaggttcttaatcactgggttctctgcactgagggataaagagccgtgagtttaacaggtggagacgagggctatgaatgaactccaggtagaagaagcagcagca

SEQ ID NO: 333591 - DNA, 122 bp, Homo sapiens
aatggaaatcagaaaagtgcaaacccgcgacgcctacactttctaacttttccctgctggcggttgtgtctgacccgactgtaaaagaaaagctagatgtggatgtgccatataaaagtccc

SEQ ID NO: 333592 - DNA, 122 bp, Homo sapiens
tgggggacgcggggacattctttccccccctccccgcatccactgccccctgtcctgtcccggacctggacctgctctccaacatgtgcactgtgtggcttcattggcaagaaactcctgca

SEQ ID NO: 333593 - DNA, 122 bp, Homo sapiens
aatcgggaacggggatgtagaggaagggcccgagcgggcggttcccagtaataaggcgggcgctggttggctggggctcctgtatgtctcttgatgattggctggtgcctgcccagaaggtt

SEQ ID NO: 333594 - DNA, 122 bp, Homo sapiens
attcctgtgctacgtaaatcgtggagaaactcagagtccccagaacacttactctgatcgcgctactttctctacgttgtatttcttttccccagttttgtcccagacacaagttatatttg

SEQ ID NO: 333595 - DNA, 122 bp, Homo sapiens
aacttgctgcttagtttattaagaaagcacacagtgaaaccacaaatgctgaaatatgatcgagaggccatttcaatatgaaaatcttgggattaagttatagaaaatgaaggggcaattca

SEQ ID NO: 333596 - DNA, 122 bp, Homo sapiens
ctcaggggctccaccacaaacactgcttcaatgggtgaccaggagggaccaccacgaatgcggggaacaagcaccctctcctgttagctgagcgagcccccaggtgacctccaagccaactg

SEQ ID NO: 333597 - DNA, 122 bp, Homo sapiens
gatccgcacagagacgcagacacgcgcgcgctcgcgcttcccggagaggtcggcgcgtctcgctgaagctgttctggtcaagtggagttgtcagggctttgttttgtttttgttttgtcttt

SEQ ID NO: 333598 - DNA, 122 bp, Homo sapiens
cgcgagacgagaccaaccttcgggacaggggagagcggggctactgaacgcaggggattccgctgagcctccagcccctgagcgtccaccttcggcccagctgggggacgcggtctcgggaa

SEQ ID NO: 333599 - DNA, 122 bp, Homo sapiens
gaagagctgcagtagtcaattttcttctcacagttgaagccggagtagcccacggggcagcggcagctgtaccctccatcggggctgtctgagcaccgacccccgttaaagcaagggccgtc

SEQ ID NO: 333600 - DNA, 122 bp, Homo sapiens
cactagactgaattcctgagagtggagaggatgtgtcttgtttccactcccagcactgtccggtccaaccagcgagaagtgattgctggttttgggagactccttgctctccttccttcttc

SEQ ID NO: 333601 - DNA, 122 bp, Homo sapiens
tcgcattaacctaaggcggggcgtggaaatccgtacgtttccaaaagcggatttagaggccgagcctctgtaactacccctcttgtcccagcactgcttctgcctccccacctctccgcccc

SEQ ID NO: 333602 - DNA, 122 bp, Homo sapiens
gggctgcgacccccgactttggccggcttctccctgcggagaaggaggcagcgccgggaccgggctgttagccacgtgctgggtggccttgggcagattgcctcctgtctctgggcctcaga

SEQ ID NO: 333603 - DNA, 122 bp, Homo sapiens
cacgggacaaaggaagggagcttctgttcctctgtcctttccctgttggctggggttggacgcccacaatctaagctgatcccggttggctaaaacttaaaacttttttaaaatagggtaaa

SEQ ID NO: 333604 - DNA, 122 bp, Homo sapiens
agttttcctcctttaggccaactacagcgcagaggagcgctttctcctgctgggtttctccgactggccttccctgcagccggtcctcttcgcccttgtcctcctgtgctacctcctgacct

SEQ ID NO: 333605 - DNA, 122 bp, Homo sapiens
ccaccaacaacccgaaaatctgcaccaggatttccaagggaatgcggtctccccagcccgcgtcgggcccttcctcgggcgtgggcgtgggtgccggtgcgggtgcgggcgcggccgccgcc

SEQ ID NO: 333606 - DNA, 122 bp, Homo sapiens
gggccgggcgcgtagtaggtgcgcgggcgcgggcgcgggcgcgcagccgagcgtggccggcggcttctggcgagcttgcggtgtctttccggccgtctctgctggaccctgatcttggcctt

SEQ ID NO: 333607 - DNA, 122 bp, Homo sapiens
aacacagtttataatcatgtaaatacataattctgataaggatttgtttatatctggctacgtcactaggctgtaagctcgttgagggtaagtttgttgatgactgcattggtgattactgt

SEQ ID NO: 333608 - DNA, 122 bp, Homo sapiens
gatggttgtactgcagaactgcgtacatgcactaaaagccattgaactctatattaacatcgggtagatgtcaaggtatctaaattatacctcaataaacaggtaactttcctgttgctccc

SEQ ID NO: 333609 - DNA, 122 bp, Homo sapiens
gtggctcatgcctgtaatcccagcactttgggaggccaaggcaggaggatcacttgagcccgggacttcaagaccagcctggcaacatgaggaaaccccatcactacaaaatactcaaaaat

SEQ ID NO: 333610 - DNA, 122 bp, Homo sapiens
cgccaaccagtgggctttgcacactgcaccactccagggctgatgtcatggcgcgaagcccggcggtgctgccctcctaggccccgggaaggccggccggcaggggcgggggcaggagtcgc

SEQ ID NO: 333611 - DNA, 122 bp, Homo sapiens
ggcggcgggcgggagcagtgcgcccatggcggccctgggggacgaggtgctggacggttacgtgttcccggcgtgccccccctgctcgtaccggtacccataccccgcggccaccaagggca

SEQ ID NO: 333612 - DNA, 122 bp, Homo sapiens
ggaacaagatgccaacttggctaagcagttctggatctcggcgtcgatgtatccccctagcgaatctcagctggtgctgcgcagagacagcagtcagcgtctgccggtggcgcggcccagga

SEQ ID NO: 333613 - DNA, 122 bp, Homo sapiens
tggttggtcattgcatcctatcttgggatcgattcattttctccagaacttgggaagttacgagtaactctgcaagtccagctctggcaatcagaatgtctaagtaaattcagcttaaaagc

SEQ ID NO: 333614 - DNA, 122 bp, Homo sapiens
gtttaggcttcagaaacaaaatataatcctagtcttttaaggtatctcagttcagaatcgcggagatgctttctcatgctgcctgttcttttggacttgccttcgtttgcctgtcaaaccaa

SEQ ID NO: 333615 - DNA, 122 bp, Homo sapiens
ttttcatttttagcgggaggagcagtccttgcgttaagcggtgtgaggccctttaaggcgcggccacactcagcatggcggcctcagtcggccttccaagcatggcgcggggaggaggggtg

SEQ ID NO: 333616 - DNA, 122 bp, Homo sapiens
atatgggatgtgctgtgggcctcctaggtgggaataccccataaggctcaaagagcaggtcgtatttgagaggagtattgaaaggtgaaaggaatgtcatgtacttaaaaccaatggaagct

SEQ ID NO: 333617 - DNA, 122 bp, Homo sapiens
aatgccactctctaatgccacagaaattttgatctcagctgtccgatgcaaatttgtgtacgattttgtatgcattaccaagctacgaaataagtcagtgtgttaggatgtgtgaacacatg

SEQ ID NO: 333618 - DNA, 122 bp, Homo sapiens
cagtgctactcatcaccgcagtgcagctaactggacggcccaccggaggcgtggactcctcgggaacaggcagcttgctatgagcccccggccaggtcagtgcatctctctggccctgtttt

SEQ ID NO: 333619 - DNA, 122 bp, Homo sapiens
cggggagagcacgggccccccctcgcagcagccgccgcccccgtcctcgtcctccctccgcggacaccaagtgcgtcaccacggagaccattccctcgagcatcacgggaagtgtagtctac

SEQ ID NO: 333620 - DNA, 122 bp, Homo sapiens
atggagatctaggaggaaaagaacatgactagcaagcatggcacagcagggcatcgcggccgcactgccatcagccacagagaactgtcgaagccacggccaacccacttccggggcctgag

SEQ ID NO: 333621 - DNA, 122 bp, Homo sapiens
agaagggaggtagtcgccctccgtcgtggcctggcgtggattccgagcgttggtgtctggcggtttccgaccgttggtgtctggcacgcgccaccccgatgtaccaggtaaagccctatcac

SEQ ID NO: 333622 - DNA, 122 bp, Homo sapiens
tttttaaaaaatcattgaggttctcctcctgttggctcaagggacttttctgctttttatcgtttactgcagaccttcactctaatctggttttcccagtttcacaacctgttggcttctat

SEQ ID NO: 333623 - DNA, 122 bp, Homo sapiens
gcacccacctgttggtcgcactcggggcatgatttggtggccatcttcactttcttggctcgagttgcagacatgctcctctcccttagcggcggcagcagcgacggctcgggctcctcccc

SEQ ID NO: 333624 - DNA, 122 bp, Homo sapiens
acccccatgacaaggatctcggcaaaagttaagcaaaatgcgccctgctacttctgtcaccggtgagccaggtgagggcttaattaatccagtactcaataattaaccgagtactacccagt

SEQ ID NO: 333625 - DNA, 122 bp, Homo sapiens
actgcctcttggggaggtagccgcaaactctcgcaggtggcagtgacaccagtacttctccggggggttgttcgagtggaggaatactcttacgtgaaagtgctcagtacaccactgcggca

SEQ ID NO: 333626 - DNA, 122 bp, Homo sapiens
cccagttccctaaagattgctcacacagatggatgtggctttcacaacattaatgggactcgaaagaaaaaaaaagcaataataattagcaaaacagtaagtacgtattagttgaggtttca

SEQ ID NO: 333627 - DNA, 122 bp, Homo sapiens
ttcccgcacgcacgtggccctgtggccacgcatgaattcctgtacaggatttttccggagcgtagtcaggtaaggagtagagagcggtggagactggaggattgtcagcttagtggcaaagc

SEQ ID NO: 333628 - DNA, 122 bp, Homo sapiens
gcctcactccctgaacccgaggcaccggctccgcctcctcccctcacagtcctcatgtgtcgtcagtcccgctccgaggagcacctcatttctgttgcccatcaccactcctcttagctcca

SEQ ID NO: 333629 - DNA, 122 bp, Homo sapiens
tggagagcagagcaccaagatcgttctggcaggaacagccagtgggaggttccagctgagcgctccccagaggtgagctgatccccagccacagcacacaggaccaggctgcgagaacaggt

SEQ ID NO: 333630 - DNA, 122 bp, Homo sapiens
acggcggggacgcgcagctctgggaggcgcatttccgcggcatcgggcgcgcctaccgcgcgctgggcaagcaggacgacttcgccatccgcgtgctcaccgagaacttcacgctgcccttc

SEQ ID NO: 333631 - DNA, 122 bp, Homo sapiens
gcaggggagcatgggaagatgtaagttttgtcttccaaggagcccattcatttggggtatcgtgaaaagtgacttaagaggatgtgggggatgggaatccctcttcctgctccactcccgcc

SEQ ID NO: 333632 - DNA, 122 bp, Homo sapiens
gaagaccttggcaaaattctgagacgagtggaagaaatatgcctctaaaaatgactgttccgttttgaacaaggaaatcctacatttttgtaaagggaggaatgttctgtaatggcagcaaa

SEQ ID NO: 333633 - DNA, 122 bp, Homo sapiens
actagtggaggcaggctcctggctggctccctcaccaggtagatagttcaggctggcccacgtggatcactctgccccttcccatggctgagggctgccccctctaaatatagcccagtggg

SEQ ID NO: 333634 - DNA, 122 bp, Homo sapiens
ggggcggctctgcgctggccgggggcgcgggcggcggcgccggcaggaaggtgagtggagcgccctgccgcggccgggcccctgcgcccaccccccaccctgcgcccctgtcccctgccctc

SEQ ID NO: 333635 - DNA, 122 bp, Homo sapiens
ccaccatttttctccactggcccagacacaggattagctgacccctccctttgagggagccgcaggtactcagagttgctcttcctctcttggtggagcagttagagccacttggggatgga

SEQ ID NO: 333636 - DNA, 122 bp, Homo sapiens
aggcttaggactgaagccttgcttcagtttggaaatctggtgagaaacctaccttctgcacgcaaagagccttggaccaggagcctcgtggtccagatggaagtgagaagcaacaccaggct

SEQ ID NO: 333637 - DNA, 122 bp, Homo sapiens
ggaagctggagatcaagtgaagctagcgctctttctcctcaccttaagtttgtctctgggcgagtgtgagagtgtgtgtgtgtgtgcgtgtgtgagtgtgtgtgcagaatgtctctttgtgg

SEQ ID NO: 333638 - DNA, 122 bp, Homo sapiens
gggtaaatatgtctataaggttttattaagaattgggtttaggccaggcgccgtggctcacgcctgtaatcccagcactttgggaggccgaggcgggcagatcacgaggttaggagatcgag

SEQ ID NO: 333639 - DNA, 122 bp, Homo sapiens
aaaacctgcccgataacaataatccattagaaaactggcaatatcctctgatctattgcccgcaaagccatgacttgatggagagtttcattccctgggctcagttctccagaagaaaatca

SEQ ID NO: 333640 - DNA, 122 bp, Homo sapiens
gggggtgggggaggacccgagtctataacggcgtccagctccggtcaggggtagccgaggcggggagatttcccggccatataggctctgggtgatcgccccccaggtccccttgcgtcccc

SEQ ID NO: 333641 - DNA, 122 bp, Homo sapiens
aaactctaatgtaaactatggactttgggtgataatggatcgatgtttgatcataacaaacgttatcactcaaatgaggatgtcaatacagaggttgtgcatgtgtgaggaaggggtacata

SEQ ID NO: 333642 - DNA, 122 bp, Homo sapiens
atagcgcggctggttgcttcttgcgcctgcttggttgctagggaagctggggttaccatgcgccagcccttccgggtcaggccggccgggagcccggcgttcccagcgtgctccggcgccag

SEQ ID NO: 333643 - DNA, 122 bp, Homo sapiens
cagaagtgggcaaatccactttttgtgtggtctgggccaaatacatgactccctgcatcacgtagaggctgtgctggtccaaagaaggctcaaaagagggcagtttgcgcacacaacgtgtc

SEQ ID NO: 333644 - DNA, 122 bp, Homo sapiens
cgctggagctggctgtacttaggtggcccgagtccaggatgacgctgccccggttactatcggagtcaatgtcagtcaggtgcaggtcagagccgctggccaccttgatggggatggggttg

SEQ ID NO: 333645 - DNA, 122 bp, Homo sapiens
cgctgacccgccgcctccgtctgcctcctcccgggctctgggcccagcgcgcccagatgccgggcaggacccctccgcccgctgctggaacaccaatagcagcgttggagcctctgggccgg

SEQ ID NO: 333646 - DNA, 122 bp, Homo sapiens
aagcaactatagctgctctctggaagcgcagatctgttttaaaagtcctgagcaatttctcgcaccagacgctggaagggaagtttgcgaatcagaagttcagcggacttctgataacgtct

SEQ ID NO: 333647 - DNA, 122 bp, Homo sapiens
accccaagcaatcccagctccttgaaaggttttttctttttgtaccgacactatcattcccgcccttcgtccccaactcctttagtcccctaaggagtgaggggggtacacatttctgctcg

SEQ ID NO: 333648 - DNA, 122 bp, Homo sapiens
aagctttgagaccaagaaatgtgagcatattgggcatctagaagttctcccagatagtagcgtagatctccatttttctgggttgtttgttgttgttgtttgttgttgtcattttctgcact

SEQ ID NO: 333649 - DNA, 122 bp, Homo sapiens
cagaaactcggatcgtcctggggtggctgctcttgttacgcaacgtcagaaactctcctgcgtgggcaccaggctcagaagagtccggcttgtggtggcagggccaagctttggctcattgt

SEQ ID NO: 333650 - DNA, 122 bp, Homo sapiens
gttaggagctcaggggggacacttttcctggggagggctgctaagagggtgccggggaggcgcctccatccctgattttgtggggaggagggggcgagggccccggagaagcagggaaggtt

SEQ ID NO: 333651 - DNA, 122 bp, Homo sapiens
tctttctgagacctaacgagaggctctggaaggggcttggcccaatctttccggggctcccggctgccgtagcgtccctgatagtggttgttatctgactttcatccgcggtgggcggaaaa

SEQ ID NO: 333652 - DNA, 122 bp, Homo sapiens
tggtctgcctgagtgacctccatttgctctgtcatctcaggactagaagccatcagccagcgtacgccctcagaaaactctcttcccttctcgcgggtccgcctggctcccggaggcggcgg

SEQ ID NO: 333653 - DNA, 122 bp, Homo sapiens
tgaaggggaaactcagagagataagtcacttccccaaggtcagacagggtaaaagtggaccggatctgtttggtcctgagcccaaacatttcgaatggacataaggctgacaaaggaacagt

SEQ ID NO: 333654 - DNA, 122 bp, Homo sapiens
gtggggcccgcgggcccggggctgggcaggcggcctgcgtgggcctggcggggtgggcggcgcagctccccagcgcccgccgaggcggggccgccccgcggccatggcgcggccgcgcggcc

SEQ ID NO: 333655 - DNA, 122 bp, Homo sapiens
tcacaggggtgggggtggggtggagcggggtacctgggacagcccagggctttggcataccgcacggcctgctccagtccctctcggaaggccgcctgtctcccggggacggcccccagccc

SEQ ID NO: 333656 - DNA, 122 bp, Homo sapiens
ccaataaggagagggaggggcgggacgccgcgggaagcgcgagagcaccaaggcgaggaccgcaggcaggagtagcagagaccagagtcttctgagactattgggatgctgtgggcgttgtc

SEQ ID NO: 333657 - DNA, 122 bp, Homo sapiens
ggtaactggagaccgaggcgcgctgcgtacttgctgcgttttctgtttcatcctcacagccgtagaagaaaccgaggcacagagcagttaaggagcaagagataaacagagcagaagcggaa

SEQ ID NO: 333658 - DNA, 122 bp, Homo sapiens
gtgtagacaacctcagaagaaaatccctttcttgcgcaaaaagctcacacatttgcaccacggaagaaaaaggcaagcatttccactccaaaaagtgttccaatttcagcccctgtggcatg

SEQ ID NO: 333659 - DNA, 122 bp, Homo sapiens
catccttttggccagggacacagattaccaggtaactggcagccccatctagaattacatcgttggtctgggaaagatgaacattttcttttaaaaaggattctaccattcttagaaaaaag

SEQ ID NO: 333660 - DNA, 122 bp, Homo sapiens
tgtttgaacactgctttacgttcagctgcagtaccctgcttctctgatcttttatattcccgagcagatgtctttcattaatttatggatttatcatcttttcttttttttttcttttttct

SEQ ID NO: 333661 - DNA, 122 bp, Homo sapiens
cccaagtgatcatgctgcactgagctatgatcgtgccactgcactccagactgtgcaacacggtgagaccccatctctaaaacaaacaacaagaaaaaaagaaatgagattgaaaaataaga

SEQ ID NO: 333662 - DNA, 122 bp, Homo sapiens
ttggtccaggccaacaaaggccttactccctggagccacctcaaacctcagcacccaaagcggcccgttatttccatgttgcaaatgagagaaaacaggctgggagaagcacctcacgaggt

SEQ ID NO: 333663 - DNA, 122 bp, Homo sapiens
caacttttaaatctcgcgcacaagtgggctgggctgcgcggtccccgccgcgcgtcacctcgccgcctgccgcccccggcctacctcgcctcaccccgccccgctgcctgcccgcgccccac

SEQ ID NO: 333664 - DNA, 122 bp, Homo sapiens
aaggcggggcaaaaacttggaacagctaccacaaagcgaacgcctatctgtttggaatttcgcaaataaggaacgtttaaatgacgtagttcacatcctttgagtgctggctttctcttaaa

SEQ ID NO: 333665 - DNA, 122 bp, Homo sapiens
ggtgatccgcctgcctcggcctcccaaaatgctgggattacaggcataagccaccgtgtccggccttcaaatcttgttttaatcagttttactgctgggcacttatacctagattgtatcaa

SEQ ID NO: 333666 - DNA, 122 bp, Homo sapiens
tttggatgtgaagccttcctttttctgcccttctcctccccacagctatagtgttagtggcggatgaaacacgattggatgcagatttaatgttcagaaatcagtatgcaaatgttggatat

SEQ ID NO: 333667 - DNA, 122 bp, Homo sapiens
caagagctcagtggggacaccacctccacccgctcggaaatgaactcggccagactggagcggaacaaggccgcccgcactgtcacagccaccaccagcaccaggaccaagggagccgccat

SEQ ID NO: 333668 - DNA, 122 bp, Homo sapiens
aaatcaattacgcataaatcaacaaccagatataaccactgtggacattttgacatttctcgagtctgtttcttctgcatttatatgtccttctttcagtcattgttagtctgaccattttc

SEQ ID NO: 333669 - DNA, 122 bp, Homo sapiens
agtgttaaaaaggaaaacataaagtcaacaccagctcctccctgccggtgaaaattggcacgaatgagtttactttctggctgccggccctcacaaaaccgttacccaaaaaaagttcacca

SEQ ID NO: 333670 - DNA, 122 bp, Homo sapiens
gttaagcttggtcagggtgtggaattccctggccttaaattaaaagcatttattttagaccgaatggtagatgttttaaactttaaaagaaaaaaaaatatgaagacctatatacaacttga

SEQ ID NO: 333671 - DNA, 122 bp, Homo sapiens
cacacatgtgtctaagaaggtgtttgtgttaaacatacatgacgtagtcatttctgcactcgttgcctgtgcaagtttagaagctatgttgagtggaaggagagaagttctgctcattattc

SEQ ID NO: 333672 - DNA, 122 bp, Homo sapiens
acatacctaaatttaaaaatactttattgctaaaaaatgctgattatcaatctgagccttcggtgagtcgtactctttttgctggtggagggtcttgcctcgaggttgatggttgctgactg

SEQ ID NO: 333673 - DNA, 122 bp, Homo sapiens
ctggaggaacaccctgcgagtgtccacaatccacaggaattgccctctctacttactcctcgatggcaatctgccagtacagttacgggctgacaggggtccagatgatctgaccagaataa

SEQ ID NO: 333674 - DNA, 122 bp, Homo sapiens
accccaccccacggccgcgcctcccacgccctcgtaacagcgagagaaaacttgaagccgcggggaacccggatcccgatcccgatcccgatcccgatcccaaccccaaccccagccccggc

SEQ ID NO: 333675 - DNA, 122 bp, Homo sapiens
tgccaacagaagttcaaagatgctccgataatgtgatttgtaaacacgaagtcccagcagcggcggctgctgcagcttcttggctctctcactcaatcccctacaccttctggggcctccca

SEQ ID NO: 333676 - DNA, 122 bp, Homo sapiens
gtggctatgaaggacagcctagatatgaccattacacttatcaccctcaggagccctcctcgtaaggggaccctgggcctgaactccaaaacctgggtttcactttgcatggggaccagtgt

SEQ ID NO: 333677 - DNA, 122 bp, Homo sapiens
ctagagtgtcaggaggtgagggcctgaagctacaggcagaatcccagtgtctgtgtgggccgtgggcttgctctggacactctggggacaggatgcaaggccgtcatcagattctcaaaggg

SEQ ID NO: 333678 - DNA, 122 bp, Homo sapiens
gagaggagcgggacctgtggctctacaactgagtccttaaacagggcatctccaggaaggcggggcttcaaccttgagacagcttcggtttctaacttggagccggactttcggagttgggg

SEQ ID NO: 333679 - DNA, 122 bp, Homo sapiens
gagccgagggatggcagccaggaggctgctttctcagggcagggcgtgtagattttgtcccgtactgttgggaatgcccaggaaagcttattaaaacgtttcttctggctggcagtgacccc

SEQ ID NO: 333680 - DNA, 122 bp, Homo sapiens
gcggcggagaaactttctcctccgcgccgcccgcttctcacgctcggccccgcacgcgcccgcgggtccgcgccgcctgagtttctccaactaaggcagcaactctcggccggcgcggcccc

SEQ ID NO: 333681 - DNA, 122 bp, Homo sapiens
ttcaaatctgcttaatgtccctttggaaaagttttctctcgtctctctctaaaagacaaccgcactttcccaaagctgtgctcttaagagttggtaaagtgacaatttggtttatccaataa

SEQ ID NO: 333682 - DNA, 122 bp, Homo sapiens
aaaagagcaacaaatatttataaatccatcactgaggtggcgctgaaacagctgacggagcgaagcctgacccagtcgggtcccgggccctccacgggggtctgcgtcctcccgctgcctcc

SEQ ID NO: 333683 - DNA, 122 bp, Homo sapiens
tggccctgcagctgggtccctccagggctgccctctcgcgctgccgggtcctgaagggcccgcctgcagcccagcagttcgcgttcgcctacccgcgcgcgacctacctactcacgcggcca

SEQ ID NO: 333684 - DNA, 122 bp, Homo sapiens
gaagtcgcgtcaacctgaggctctgggatcagacccaccggactcacgcgggctctgccacgtgttgcccgcagtctcggcccgttccctccgctttggtaacgggcactgactgtccgata

SEQ ID NO: 333685 - DNA, 122 bp, Homo sapiens
agcagcggaagttcctagcgcagcgtgggggtgctctgtgcacagataagttgcgggccgcgggaaacaggaccctggggggccccctagagcctcgcggagcggcttgcagaggagcctcg

SEQ ID NO: 333686 - DNA, 122 bp, Homo sapiens
tcttctcggccagcgacccttcattcattccctagatcctgcagggtggtgctgggatggcgccacctgggtgaacaactgacccaccctctaggtgctgtcagtcctgcggggccagaaga

SEQ ID NO: 333687 - DNA, 122 bp, Homo sapiens
gggtgcatggaggctccggggtgcggggaggccaggcgatggcgagggcagggtcagggccgaggcggggccggtcaatggcgggttcagggtcgcggccggggcgggacgaggcgcgcggg

SEQ ID NO: 333688 - DNA, 122 bp, Homo sapiens
aaaagagcaaatactttcttataaagccaaggtgaaagggaagtgcacactataaataaacgaatacaagcaatttggttcccaaagatctttctagtaaatggttctgtgctagaaagtaa

SEQ ID NO: 333689 - DNA, 122 bp, Homo sapiens
tgctgataatgccaaataccagaggagtcagggtaagagtgaaatgtgccaacagagcagcgaggaaagtaagaaccctggacctgttcaaatgggagagacctctgagcttcctgcgattg

SEQ ID NO: 333690 - DNA, 122 bp, Homo sapiens
gcgatccacctacctaagcctcccaaagtgttgtaattacatgcctgagccactgcaccccggctcattatcccatttcactgagggtgcaagaggtcaagtcagttgcccaagctcacaca

SEQ ID NO: 333691 - DNA, 122 bp, Homo sapiens
ctagctactagtctcatgggtctacttccagattcatatcttcctgagccactgtggcatcggctcatgaagttacacagctggcttcacatttcctcattgctttttgcaccaagagagtt

SEQ ID NO: 333692 - DNA, 122 bp, Homo sapiens
cttgggatctggcctagcactgagtgcagaggaagagaagcttctgagatcgagaggcagcggctacaggaggaggaagaaagcaaggcggggaaaaccaaagttcaggagagcatttgcag

SEQ ID NO: 333693 - DNA, 122 bp, Homo sapiens
ggacccgaaagagacccgaggtgacttcgggctgggcaggacacccccgggagttgccagcggctctcagcgggcgcctctaggaccccttgtcactgcgagcagcgcctgctctggggagg

SEQ ID NO: 333694 - DNA, 122 bp, Homo sapiens
gccggcaatgccatagaggcggtcccgggggcgggccttcttgggtcacgtggacggcctcgccccgcccccgtcgaggcgccgcgcacgtctggagctctggctcgtgcagtagcgtcacg

SEQ ID NO: 333695 - DNA, 122 bp, Homo sapiens
ctggcctgatagtccaagacctctcaataggactgtttggctatgaatgacagtgctgcccgctttcagcctttcaaatcaaattatgatgactgatgggaccccattaagtcttgtgggtc

SEQ ID NO: 333696 - DNA, 122 bp, Homo sapiens
cgcagggggctccgcaggcacgcagggggttccgcaggcacgcagggggctccgctggcacgcagggggctctgctggcacagccaccagagattgtctttttcatgttcccagtcattttg

SEQ ID NO: 333697 - DNA, 122 bp, Homo sapiens
gggcacctgcatggagtggctccgcagacacctggagaacgggaaggagacgctgcagcgcgcgggtaccaggggccatggggagcctgctcgatctcctgtagatctcccgggctggcctc

SEQ ID NO: 333698 - DNA, 122 bp, Homo sapiens
gcctgatcaccgttagaggagagagctgcctgccctgcagctcatcagtgcaaagccgcccggtctggggctctcatgcccccctcactatggcctgtgcccatccgcagcccatcagtgca

SEQ ID NO: 333699 - DNA, 122 bp, Homo sapiens
cgtcccttcgtccagctccaagccgggcggtaatggggtccaggaaggctaaaggggacacgcccagccaccgagggaggggtctcacccttggagacccacttcgcggcggccgcacaggt

SEQ ID NO: 333700 - DNA, 122 bp, Homo sapiens
cagggctgagtcacgtggcttggttgcctacgcgctggtgggccgtgggaagatggcggacggaaagggagacgccgccgctgtcgccggggctggggctgaggctccggcggtagcgggag

SEQ ID NO: 333701 - DNA, 122 bp, Homo sapiens
ggcctttggtttctaaagaattgttttcatttaatgagtttgtcttgttctgtaagaggccgttggcataaaacaatgcttaacttattttattaaggacaatgaaaaagatgctgattgtc

SEQ ID NO: 333702 - DNA, 122 bp, Homo sapiens
aaccggttgcaactgctagctcgggcagcctgcttttattctcttatctggccccacccacgtcctgctgattggtagagccgagtggtctgttttgacagtgcgctgattggtgcgtttac

SEQ ID NO: 333703 - DNA, 122 bp, Homo sapiens
tgcaggggctggacaacttgaagttccctggacgctagacctggaatgagcaaagtgacccggccccggcagcatcaccagactccttccctgcaaacgcagctcccagatttggccctatt

SEQ ID NO: 333704 - DNA, 122 bp, Homo sapiens
caaacgcccgagaaaccctagctcccgacctcagctgtttcttacctcactcagctcggccgaggagtcgtttccatatttcatggcaactccggaattcatgatgcacttttcagagctgg

SEQ ID NO: 333705 - DNA, 122 bp, Homo sapiens
tcttctccgcgggctagtgtcgccggattccctcagccagaagttgacttaaagaggccacgatcccggtgccagcttgcgcaatgcctgtgaccaagcagccgggcatcctgctggcacag

SEQ ID NO: 333706 - DNA, 122 bp, Homo sapiens
ccaatctgctaagaaaggggccaggcaggcaagagctctggtagcagcaagcaagaaccccgttctctccttagcctgttctgcaggaagaaacctttgacaaggtcaatagctgggcctct

SEQ ID NO: 333707 - DNA, 122 bp, Homo sapiens
acgtcgccatgacagagctcaggggcgggactggaacagcagagtctcccattggtcagtcggtgatatatccggccaatggtgagcgccgttactagaagggctccaggatggaggccgac

SEQ ID NO: 333708 - DNA, 122 bp, Homo sapiens
aaagggcacaaggagaagccctggaggatgggaaagaagccacttggagaagagctgaggcgccccaactgagctttcagctgaacacagccacaggcagctgaactgcacaattaaccaac

SEQ ID NO: 333709 - DNA, 122 bp, Homo sapiens
atgttatgatgcctgggaggtgctttataataatttgtgaagggagaatggctagaggagcgaaggccaccagttaatggttggggctgggtaagggctcattatgccatcctgtcttcttt

SEQ ID NO: 333710 - DNA, 122 bp, Homo sapiens
tagagggggttgttagcggctgttgggagaacgggtcacggaaacagtcccttccaaagccggggccatcgtggggtgggcgagtccgccctcccaggccgggggcgcggaccagaggggac

SEQ ID NO: 333711 - DNA, 122 bp, Homo sapiens
acgaaggcgaaaagagtgaggaggcattgcccaggcccctggtacctgccgcggagggagcgaagccggccttgtgcggtcttcccgcgcccctcctctccatctaaccgtggaaccgccct

SEQ ID NO: 333712 - DNA, 122 bp, Homo sapiens
cctctgactaatattggctgttgccaggaaaacccaacttggatttcagctattactttccgtgcaaccctggtgctgactattcaaggggacagctcttcaagatcttcctgtatacagta

SEQ ID NO: 333713 - DNA, 122 bp, Homo sapiens
acctgcaagttaggtcgtttccaattctgctttcttcaacattgagttgttggccaggtgcggtggctcatgcctgtaatcccagcactttgggaggccgaggtgggcggatcacttgaggt

SEQ ID NO: 333714 - DNA, 122 bp, Homo sapiens
gctttcctcttctttccagctcccagggtgcgtttcctctccaacccggggaagttcttccgtggactttgctgactcctctgaccttcctaggcacttgcccggggcttctcaaccctctt

SEQ ID NO: 333715 - DNA, 122 bp, Homo sapiens
caagaacttttccaacgggaattgatcagggctcacctttcatgactgagtctccttgggcgtccttgctgacctcgtagaccctttaattaatgtgcagagcaacacacgaagggcatggc

SEQ ID NO: 333716 - DNA, 122 bp, Homo sapiens
actggggaggactggagtggtagccagagctgtgtgtaattacagtggaaggtaaaattccgtaaaagctgcaaatatgttgtaaaccaaatgataaggaatcacagataacagagtaaaat

SEQ ID NO: 333717 - DNA, 122 bp, Homo sapiens
ttagcaccagacacctgctcctcgctgcgctctgcgaagttactgtccggcatcttccaccgaaaagctctaagcactcacgcagccggcaaacaagcggaatcatccagcaaggcaaacgc

SEQ ID NO: 333718 - DNA, 122 bp, Homo sapiens
agctcatgggaggaggagcagcgagagagagcccacaggggctgccagcagagcgcactgcggggctttggggctgccagggcaagggacagtatggagagtctgcatgcgtggaatcagga

SEQ ID NO: 333719 - DNA, 122 bp, Homo sapiens
ccgcgggccaagaaactggagaaactcggagtgtactccgcctgcaaggtacgcgctcgccgctctcggaccgcggatgggtgctaggggcccagcccgcgggacccccctccccctcccgc

SEQ ID NO: 333720 - DNA, 122 bp, Homo sapiens
aattattactagggagggggccggaacctcgggacgtgggtatataagacggtgcctgagcgcagagcggctgctgctgctgtgatccaggaccagggcgcaccggctcagcctctcacttg

SEQ ID NO: 333721 - DNA, 122 bp, Homo sapiens
aaagtctttggtgggcatgcagcttttctaaatactttgctaatcttcacagagattattcggttactcagctgggggctttccttatgcacaagtcgctgagctgggtaattcatgaacag

SEQ ID NO: 333722 - DNA, 122 bp, Homo sapiens
tgccgtacacaagagccagttcagaaccaacgcgctgtcccgaaggagtagcaacggtaacgggcccagggccctaaacccaagctgtgccccaaccagaggcactatcccctattctacag

SEQ ID NO: 333723 - DNA, 122 bp, Homo sapiens
gtctgtgcctgggacagggcatggcctgtgtgggccgcaccaaggaatgtaccatcgtcccgtccaaccactacggacccatcccggggatccccgtgggcaccatgtggcggttccgagtc

SEQ ID NO: 333724 - DNA, 122 bp, Homo sapiens
ttggggggacaatggggacgcctccccgaggaatcgcggcccgcccgtgctacctcgtaccgcgtccctagcccagctcagggacttggcgtttcccctgcggtttcgcaaccctggggttt

SEQ ID NO: 333725 - DNA, 122 bp, Homo sapiens
gggcacaaggccagagtgacctggcgaaggcgccggggctggcggggctggcggggctggcggggcggcgggggagcccggagtccctgggggcaggcggtcgtcagggaggggtctgttga

SEQ ID NO: 333726 - DNA, 122 bp, Homo sapiens
ttcccagggacacgtaaaaggttttcgtttcagcatctccagcttcccaaatggctaagtcgccttgagatggacaatggtggaaacttactgagctttccacctcaaatttgaaagtcccc

SEQ ID NO: 333727 - DNA, 122 bp, Homo sapiens
tagaatagttgtgcttttttctcttcagtgccctctagagtcatgggctttgtctagcaccgcttttgaagagcgaattaatttggttgtctaggacgctttcatccttttcacaaggactg

SEQ ID NO: 333728 - DNA, 122 bp, Homo sapiens
aggcacatggcaggcactgggtgtgcagcaatgaaccggacagtccctaatttcacggaacgtaccttctagaaggcaaggcagacaatcgttttacaacaaagatgaaagacatacaacat

SEQ ID NO: 333729 - DNA, 122 bp, Homo sapiens
ccgtgaaacgcgcagcccgcgcaggcgcccgcagctcccagctcccgggacggccccgaacgagctcatcgttgacgcgtccaggaagaaacgatcccgtttccagcaaaccccggacggtg

SEQ ID NO: 333730 - DNA, 122 bp, Homo sapiens
agacctcaggagggctattggtccaggacccacacctgctttcttcatgtttcctgatcccgccctgggtctgcagtcacacatttctggaaacttctctggggtccaagactaggaggttc

SEQ ID NO: 333731 - DNA, 122 bp, Homo sapiens
gagcggcgggtccccggaaataggagagccgaggttaggaggtggctgagacggcagaggcgtcgaggccgccctaactcctgcctaggatgggcagaggccgctaacagagaaaagcaacg

SEQ ID NO: 333732 - DNA, 122 bp, Homo sapiens
aaggtgaacccgccctccacacctccacgctctaaggtgaacccgccctccactcctccacgctctaaggtgaacccgcactccacacctccacgctctaaggtgaacccaccctccacacc

SEQ ID NO: 333733 - DNA, 122 bp, Homo sapiens
cttgctagcccgcggccgcttctgcattcccccagcaacggcgctctgctagagagctgccgtaagtcacgctactgccgcaagcctctgccgtcgctaagcacgtctgtaggttcaggcta

SEQ ID NO: 333734 - DNA, 122 bp, Homo sapiens
attaagatcccaaaccagtaaacactaattatgacttggttacacagaaacagcttcctgcggatcaagagctttaattacagcctagatctattatcttagcactgtctaacctactctca

SEQ ID NO: 333735 - DNA, 122 bp, Homo sapiens
tcgggtaagtctccatctctgtctgtctctgtctctgtctctgtctctgtctgtttttcacgcactcagcaaggcctcctgccctgagagaggctccgcccactaccccccactttccccat

SEQ ID NO: 333736 - DNA, 122 bp, Homo sapiens
tcggggggcggcgggggatcccacgtggaagcagcgtcctggagctgggtggggctgcggcgcggactacaaatcccaggggcgtggggcgggagaggcggaaggggcgtcctggggcgggg

SEQ ID NO: 333737 - DNA, 122 bp, Homo sapiens
ggtgcgtgggggtgagcagatgctggagccggagcgagcgcttttggtcgccggtaggagcgaactccatgcaggccctgcggctgtgtctaggggatgcccgcgacccctgaagacccaca

SEQ ID NO: 333738 - DNA, 122 bp, Homo sapiens
cgtgcagcaccagcccgatgttgttctgggggcaggcggtggggggccctggtcagctcccggtcccctgggatggagctgggtccctgccgcccccccgccccagcactcacgtccagcag

SEQ ID NO: 333739 - DNA, 122 bp, Homo sapiens
cgcgctgcctgcccagctgagccgacgagagcagagcgaagagctggaggccggcctgggcggttaccttgatgatcctgcggggcagcccggccatcttgtcagaacccgagttcggcctc

SEQ ID NO: 333740 - DNA, 122 bp, Homo sapiens
tttgtggtgctagggaaaaaacatattcatcatggcatgggagaatcagaccttcaactccggcttcatcctcctgggaatcttcaatcacagccccacccgcaccttcctcttctttctgg

SEQ ID NO: 333741 - DNA, 122 bp, Homo sapiens
gccgcgggagcggtcgcccggctctcggcctcaccgtgtaggggcccagcccggccccgccgcagccactccgcactctgcggcgttccccgccgctcctgtccggagtcccgaggcgcggg

SEQ ID NO: 333742 - DNA, 122 bp, Homo sapiens
cccagcgtccccaggggctcccggcccaccccgtccgttctggagcgagagttcactccccgggctgactgctccaagccccctttattagaagcattccttgtggaaaaacaggaaacact

SEQ ID NO: 333743 - DNA, 122 bp, Homo sapiens
cctgccccggactcacttggagctgacgccattttaggcctcagtccaccagcacccaggcgcttattgagacagcgtgttgttccacaccgcctcacgttgtctgttggcgcgctctgctc

SEQ ID NO: 333744 - DNA, 122 bp, Homo sapiens
gcagctagtgtgtcaactcagcgtttctcctctcgtccctggtgaggtgtagcggcggcacgcggctggagatcccctgtggcctccagtttaggaagggtccagcatcccaagggaggggt

SEQ ID NO: 333745 - DNA, 122 bp, Homo sapiens
gatccgcgcccccagcctccggcttggaaataactctggcttaaacttcttctaagccaccgctgctcctcggcgcttcgaaaagtttcccgcaaagcgaaagaactaactttctcttttga

SEQ ID NO: 333746 - DNA, 122 bp, Homo sapiens
gcgctgaggccccgccccgtgtccgcctgcaggagccgccgccgggtcccgctcgtctgccgcctcagcctcagccccaacctcagccgccgccgttgcgcttgctcccgggcggtcctggc

SEQ ID NO: 333747 - DNA, 122 bp, Homo sapiens
gggcctgtgcacctagcgactcaagtctaaggcaggccattttcttgagcccaggagtttcgggttgcagtgagctgtgatcgcaccactgcactccagctagttattagagaaccacagtt

SEQ ID NO: 333748 - DNA, 122 bp, Homo sapiens
tgcggacggagtggatggggtgcaccgcctcagacccgcttcctggggtcgcgaacttcccgggccccaaggtccctgccacctcttccaaatgctggaggactacgcacttctacaagtga

SEQ ID NO: 333749 - DNA, 122 bp, Homo sapiens
tctgctgtgtttaagcagtaggtggtgacctcactcctccctggcctgagcactccgtcccgcatcccagggggaggccctagggaaatctctgaagctgaggacagggtggactctccttt

SEQ ID NO: 333750 - DNA, 122 bp, Homo sapiens
acatgctgttttaatatcctcagaccaggcatgtctgcacacctggaccttcatagtgaccgctgtgcttaacagacggttggaatgggcaagggtgcaggtggtggcactggcagtggctc

SEQ ID NO: 333751 - DNA, 122 bp, Homo sapiens
gtctgctcactcggaggtgggatcccaggccttgcctggacccatgggctaggagagggtcgcggcaggctgggaggagagtgaggccttgggggagtggatggggtgccccacgaagagtc

SEQ ID NO: 333752 - DNA, 122 bp, Homo sapiens
gatgggggaggaggagaagctgcaagttaacaggcaatctgagttatctttctttattaacgctgtagaggagtacttcagatttctcgaggctgtattgaggtccgcaaaactcactttgc

SEQ ID NO: 333753 - DNA, 122 bp, Homo sapiens
caagcgtcctcataccgaggcagagagctgtactggcgctgggcctgctgggagctctcgcgctcctcctgccgctgccgctgcatctgcacctccacggacaccgagtgtcgcccgctctg

SEQ ID NO: 333754 - DNA, 122 bp, Homo sapiens
cccagctctgggatgttgttgcctgggcgggactagaggcccgggaggagtctgcgcagccgcagaagggcttgcagtggcgcctgccgggcgctgagggccgcgggagccgccgggttagc

SEQ ID NO: 333755 - DNA, 122 bp, Homo sapiens
tgctgtgagggcacaataacgaatgtttactttgcccttgcactcttcacatctgggaaccgcaaaggagcgcggtggtcggactgtcagcctcgccttctattctttgatttccagtaact

SEQ ID NO: 333756 - DNA, 122 bp, Homo sapiens
ggccccagggtaaagggaatccaggcagtggagcagcgccaaaggtgcacagccaggcggcgccctcgactcttcctgggtgtgagggggtgcgccagggctgcgcgagctggccactctgt

SEQ ID NO: 333757 - DNA, 122 bp, Homo sapiens
ctttgagagagggactcactttttttggaggtgaagaaactactatctcaacagcggtcacggccaaaggatactacaggaaccaaggagaaggcctgaggccagttgggaaccattgattt

SEQ ID NO: 333758 - DNA, 122 bp, Homo sapiens
ggctgcctctgatggagctgacgctgatgcccgctctctgcaggttgtgaaatactggcccgagaaggggaagtccgggtttctcgtgtggcgctaccttctgcggagggacgatgatgagc

SEQ ID NO: 333759 - DNA, 122 bp, Homo sapiens
catgaagggaggttttgcgaccccgtgtagtgtgactgggctggcttagtgagtgttcgccgcccctgccttcaggtggcagtcggctctgggaggagaggaccggcattttcgaacccggt

SEQ ID NO: 333760 - DNA, 122 bp, Homo sapiens
gagcgcgtggaaacagcaagggcgcccgagcgggagaggttccctcggtgagggggtccgcgcagcggcggaccccgcaccccggcccccaacggcgcctaggaagttgtcactcctctcat

SEQ ID NO: 333761 - DNA, 122 bp, Homo sapiens
accacggagccgggcctccagagcagcaaggtcaccaggtggcggtgctggcgcagcaggcggagcgccgggtgcgcggggtcgcgcctctggccctcgaaggtgatgaagatgggtctgcg

SEQ ID NO: 333762 - DNA, 122 bp, Homo sapiens
attttcaggcagtgcgttggatagcaacaacttcggaggtccccagattgcagagggagacgtggacgtgagtggagcggggcggtccccagcacactagaggaagtcgtgctacccccgcg

SEQ ID NO: 333763 - DNA, 122 bp, Homo sapiens
aaaaaagtgcttaatgtgggcccagacccaaggtgagcgtgggactgagggcgcccttcccggctactacccagctgctggcggcgccagggaggcctgcccgaggccagacggtggccact

SEQ ID NO: 333764 - DNA, 122 bp, Homo sapiens
agcaacgagccccacccgggtcttgccagctggacgttcttgtggggcagcgttgagcagcggttaggagtgccgtggactttggattcaaacagccccagctcttctgcttgctagctggg

SEQ ID NO: 333765 - DNA, 122 bp, Homo sapiens
ctcactcagcccattttaaacccagcagcctggggagaatgaatccttatgaaatcaatgcggtggcttcagtttcctgtggatggcttccagaaatgctccagacattgctgaatgctcta

SEQ ID NO: 333766 - DNA, 122 bp, Homo sapiens
tgagacctggcagcgaggctcgaggcagacagacgctcatgcagggcagagggcaggacccgtgttggagcctggggaagtgaaaggataatgaggaagacggagtgtggtcacgagggggc

SEQ ID NO: 333767 - DNA, 122 bp, Homo sapiens
aagtgaaaaaaaaattttcaaggtgacaaacccagggaggggtagggcaaactggaataccggcaagtctgactcaagtgtcagatcaggtcatcctatataacctcagacatgccccaaac

SEQ ID NO: 333768 - DNA, 122 bp, Homo sapiens
gcatgttcctcgaacaggggctcctgctcctcgctttgtgaggacagccagtggcctccacgctggctccagccctgctgaggtcgtgggtgctggtgagagtggtctggtagcaccggagg

SEQ ID NO: 333769 - DNA, 122 bp, Homo sapiens
atggatataccatgtttcactcgtctgttcaccagtggacgggcatttgggttatttccacgctttggccatgatgagtaacgctgctatgaacactcgtgtaccagtttctgtgtgaacat

SEQ ID NO: 333770 - DNA, 122 bp, Homo sapiens
aaggcctctaagtcagaatcccgcccaggcaaaatgacatggcagccaactgtggagcctcggttggcctcggatagctggtccccccttcattcacaccacatatctgaggaccagatatg

SEQ ID NO: 333771 - DNA, 122 bp, Homo sapiens
atgtcctataaatggacatcagaccgactatggctttttgggttcttccccccacagcatcgtgtttttcagctccacccacgtggttttgggtattaatcctatggtagaactagctagat

SEQ ID NO: 333772 - DNA, 122 bp, Homo sapiens
gcactggaggagcaggtcaggcagggcccgtcagcccaggggcaccccaggactcaagcccgcagccgaccctgctctgctaggcctcactgcagctgtgggaaggggaagcatggagccct

SEQ ID NO: 333773 - DNA, 122 bp, Homo sapiens
gaggggaggttccctgagatctctgtctttgagtttggagtttgtctctgagacagatttcggaggggtctttcagtatttgtgtggagatctttcttaggattgagtttccttttatgctt

SEQ ID NO: 333774 - DNA, 122 bp, Homo sapiens
ttctttctacacggatttactttcatggagtctggggttctactggccatggcctttgatcgttttgtggccatctgttacccactgagatacactaccatccttaccaatgcccgaattgc

SEQ ID NO: 333775 - DNA, 122 bp, Homo sapiens
cactctggaagctgagccggcggcgggaggagctagggctggagcctctccagcctcccgcgaaggtaaagccgactccgggcactgggctctggggctctgccttactcccttcccacgcc

SEQ ID NO: 333776 - DNA, 122 bp, Homo sapiens
actgggagaggtctaaaacgaaatgcgaggggcggggtaacagggggcgtggttccggggcgctggcactactcccggctccaggacccggttccccgtctatgtcccaaagtccaccccgc

SEQ ID NO: 333777 - DNA, 122 bp, Homo sapiens
ctccggctccaccccggcgcgcctcacccggaccggtctcaggagcgatacgggcttcagcgtggcgaaatgcaccaatacgactcgctacgcactgagaagggggccccacgcgcgccccg

SEQ ID NO: 333778 - DNA, 122 bp, Homo sapiens
gatggggtcggcggggtgcgcggggtgcgcgccttgcacctgcgggtacgagtaggagagcgccgggtgctggcccgccagcgcagccgccgccgccgccgcggagtagccgtagaccgggt

SEQ ID NO: 333779 - DNA, 122 bp, Homo sapiens
ctcctgggcctcaaactgcaatgcacctttcagtgcaataggagctatccaatctccagccgcgtccatccgcccactcgagcccacctgtttgcggaccacagagcggcagcacatcccta

SEQ ID NO: 333780 - DNA, 122 bp, Homo sapiens
aagttgcacctacaaagcttctggcacaggagacaatggtctggagatgtgccaggggcccgccccacgcgtggctggcagggttcacccaccggctggcccgtcccgaagcaacacgtgcc

SEQ ID NO: 333781 - DNA, 122 bp, Homo sapiens
ttttagttttctgtttctgcttttcccaagctttttctgtccataaaaccaaccgcgggccgggtgcagtggctcacacctataatcccagcactttgggaggccaaggtgggcagatcacg

SEQ ID NO: 333782 - DNA, 122 bp, Homo sapiens
ctagtggggaggtccgactgaccaaggctgggtatgtggagggaaagggcgggagagacacgtcgaggagggctccgcacccaggcccgcacgcacacccgccacccttacctggcacagcg

SEQ ID NO: 333783 - DNA, 122 bp, Homo sapiens
cttagggggctgttgggggatcgatgacgtcagggaggccacggggctttgtagtgccaacgactagtaggtttattttgagaaaggagttgagctgcagcaacagaaaagaaggatctggc

SEQ ID NO: 333784 - DNA, 122 bp, Homo sapiens
aaggccccacacttctgcccggtgtgcctgcgggccttcccctacctctccgacctggagcgccacagcatctcgcactcagagctgaagccgcaccagtgcaaggtttgcggcaagacctt

SEQ ID NO: 333785 - DNA, 122 bp, Homo sapiens
ctccgtgtcactcctgcgcctgcatagggtgccttcccggtaagatcctgagagtttgcacgggccggtccgggctcccggctctgcccacctgatgtcactcgaggactgcccctcccggc

SEQ ID NO: 333786 - DNA, 122 bp, Homo sapiens
tgccctctaccaggcccacagccaaggccaacgcaggagactaggggtcgacccccacagcgaggacggctccatccaccttcctggccatcagcctccggctgctcagagaggacgctcgc

SEQ ID NO: 333787 - DNA, 122 bp, Homo sapiens
tcttcaaccgcatgaggcagacagccccagagcggccgtccatgccccccaccgggaatgcgttcccttcccagggtgattccttgctgggaaaagaatgcagccatatttctcctactcgt

SEQ ID NO: 333788 - DNA, 122 bp, Homo sapiens
tcatagttgttgatcagaaacacaagctgctccttccttgaggagaactcagctgccactcggaggacaaaattctccacctccacctgaaaaggcagagaggaagaggtgacaccagaaag

SEQ ID NO: 333789 - DNA, 122 bp, Homo sapiens
ctcaaatagcacacccctcctccatctccccttccctctctccagccccccaggcagaggcgacggtcaagggtataacatacaagattcaggtattttacttcaggcctcgaaatgatgtc

SEQ ID NO: 333790 - DNA, 122 bp, Homo sapiens
atcttgctcaagctgcacaacaaagcagggctaggattaaacctcgttctgcccagatgccgagccgggagtacaccggactctgggaggagcgttggcgtggaaagccaggtcactccgat

SEQ ID NO: 333791 - DNA, 122 bp, Homo sapiens
cgggggcggagcggggcggggcccgggccgggcgaggtctcacccgccccacgcccctcccgcagaatccagaaggtgtccaagatcacgccgcccgtgctcatcttccaggacacgaaata

SEQ ID NO: 333792 - DNA, 122 bp, Homo sapiens
aattgaatatgttctcctagccactgctctaccccagctcccagctcttctgaagtgtcacggttcatttcaacagcacgagtaaggcagtttccaggccctgtgcataatgagccatgtgg

SEQ ID NO: 333793 - DNA, 122 bp, Homo sapiens
gtggtgttttaaggcagaggagatatcattaaggtccaagagatcaaactgcagatcccacgctggttcttctgggaggtcggagaagacatggatcgcagtgagagagaggcccttggagt

SEQ ID NO: 333794 - DNA, 122 bp, Homo sapiens
gggactagggcaaggctcaaggcccaggccatgtaaggcacaggccaggcaaggtgcttccgccgctcttaacggggatttgacccggagaagagagttctgtcgcctgcggcccgcgcacc

SEQ ID NO: 333795 - DNA, 122 bp, Homo sapiens
gccagaggagagaggaaaggtcactctgggtttggccttggctcatgccctctacccttccgcagcaggctgactcctcaccgtaccacctagactcctcccccagaatcctatgtttcccc

SEQ ID NO: 333796 - DNA, 122 bp, Homo sapiens
gaaagacccccaccacatcgggggagcagtcctccaaggactggccagtctccagatgcccgtgcacacaggaacactgccttatgcacgggagtcccagaagaaggggtgatttctttccc

SEQ ID NO: 333797 - DNA, 122 bp, Homo sapiens
caggcacagggccagtgaccagcaaagtcagggagactgtgaccgggaaacatgcccaggcgctgaacagcacttccaggttgccacagcctttgggcggttcttggcatgtggcaccctgg

SEQ ID NO: 333798 - DNA, 122 bp, Homo sapiens
cccggcgccgcccattggagtgggcccgaccacgtgacgggggccggctgtcactggccacgccgctactctgacgtcaccgcgcccgccggggatcattggtcgaccgaggggcacgtgac

SEQ ID NO: 333799 - DNA, 122 bp, Homo sapiens
gtgcgcccagggccggggagcggccgcgcaggtgcctgccctttgcgcctgcgcccagctcgccctgcctagccaggtgcgccccgccccctgcctgcccggccaccttcgggagccgcttc

SEQ ID NO: 333800 - DNA, 122 bp, Homo sapiens
cgccatgacacagctgactacgcccttggtcacaggggacctgagatcctccacgatttacgggaccggcgccacctcgggctcgaaccaccctctcgatagggccgccgctaagtaatcgg

SEQ ID NO: 333801 - DNA, 122 bp, Homo sapiens
ccttgggtggtcgatgggactgggcaccgtggagcgggggcagtgctccttggggaggctcgggctgcacaggagcccagggaggcgggggaaggctcaggcatggcgggctgcagtcccga

SEQ ID NO: 333802 - DNA, 122 bp, Homo sapiens
tgactcagaacatgacatctgtcttcatgtgaaagaatgggtagaactgatgtggcgctacgaattatctgtagggcaaaggactggaagttaaatgaagatagattttaattcaaaacaag

SEQ ID NO: 333803 - DNA, 122 bp, Homo sapiens
gagagccgccctgggctctgcgctgcatgtgcagaagtgcaaaacaaagtacattgcgctcgttctcttcctcctctctctgctttcgctccagtccctaaacccaactcctcggttgccct

SEQ ID NO: 333804 - DNA, 122 bp, Homo sapiens
attttaagcagattcaagtagatttgaggttcttttttaaaaaacttatttcctccaaggcggtagctgctactgctactccatcttccctcttcaaaccctgtgtttgggaaatagacaaa

SEQ ID NO: 333805 - DNA, 122 bp, Homo sapiens
ctgagcaccatgtaggttcaaggcggggtcggggcaatggaccaggttgtctgggtgattcggatgacacccttgatgatgaaccagagctccacccccaggttctcaacgggggctgtgct

SEQ ID NO: 333806 - DNA, 122 bp, Homo sapiens
gcagcgagaggctggagtgcgggacctgctacaagccgagcacctctcggccagcgccctcgccaggactctcccgctcaggccccctgcgcagtctctgttactgtcacttccggaggttc

SEQ ID NO: 333807 - DNA, 122 bp, Homo sapiens
ggcctgagcaggcagatggctgcacaccgcggggacccggtgtaaaacggaaaccaaccccgaatctccaggcggcgacagcatggcactaaccccagcacgaggccctgggagcgcatgga

SEQ ID NO: 333808 - DNA, 122 bp, Homo sapiens
gggcgccgcactaactaggccgcctctcttttcttgctccagtgacaggctcagacgcatcgggaccggacccgcagcttgcggtcaccatgggcttcacggggttcggtgagtgactgccc

SEQ ID NO: 333809 - DNA, 122 bp, Homo sapiens
aaatgaatgcatgctgcccaaatacccagttgagcagaaaattagtctgggataaaaaaacgtttaagaggatggcatgaactttttcaaagagacagccatttttgaaagcaactactgcg

SEQ ID NO: 333810 - DNA, 122 bp, Homo sapiens
ggtgaccctggcatgctgctgagctctgctcctagggggacagccacaccctcagggacccgaagtcttggccagtttgttctatagatagaactggccaagttctatagtttgtttgttct

SEQ ID NO: 333811 - DNA, 122 bp, Homo sapiens
ggcacaggctcaggatgtgatgaggatgaagaatgctctcctcccttcctccaccagccccggcctttcctaattgagactcatcgagccgtagccggctcctcagtacagtgacttgcaca

SEQ ID NO: 333812 - DNA, 122 bp, Homo sapiens
ggcagcacaggaagactcctttctaaaataaacaaaactcagaaacttggctgggcacggcggctcacatgtataatctcagcactttggaagaccaagacgggaggatcacttgaggccag

SEQ ID NO: 333813 - DNA, 122 bp, Homo sapiens
ggatataagggtagttctttatctacttaatgagactttttttttaactacccttacctgcgccagtggcagaatgtttgtctggtcacaggtcaagtcaggccagcactacctgccatcca

SEQ ID NO: 333814 - DNA, 122 bp, Homo sapiens
actgaagccccgtctgatcgtctgatcgtgacagcgcacgagactaaacgtggactcagacgccttctgcaaaacacctgacccgtgagcacaagtcagggtcaaggtcatgaaagccagac

SEQ ID NO: 333815 - DNA, 122 bp, Homo sapiens
tttgaggccaactgaaatgaaaagaaaacagtgcgggattgggtcattactctcttctgacgtgtgctgtaattctaaggaaaacattagtagcctatttttagcaagtaccttcatccact

SEQ ID NO: 333816 - DNA, 122 bp, Homo sapiens
cactcggaaatccagcggtagagtttcgaaaacttccgaacggttcccggaatacgctctcggccctctaaccgaagagttccgaatattcccgagcgttgagcgaattttcggcggaagca

SEQ ID NO: 333817 - DNA, 122 bp, Homo sapiens
cagagtccgcagaaggaggcgccgcggggcctcgggagccgagggtgagagccggatctgcggcggcggcggagcggcggccctgcccgggttgtgcggggcgggagatgggagcctcccgg

SEQ ID NO: 333818 - DNA, 122 bp, Homo sapiens
tgcaacatgtaaggtttccattttttgctttggagataatgttgataagagtggcagacacgtggtctcgtctgttttgcgtctttgcttctgatgaatcatattctggagctccatctaag

SEQ ID NO: 333819 - DNA, 122 bp, Homo sapiens
gtccagccagaaccctggccagtgcaagaagacagctggtgagggccagtccagggcccccgccaggcatgggagggcagtgtgtagttctgaggatggtctgtggcctgagacccccgggg

SEQ ID NO: 333820 - DNA, 122 bp, Homo sapiens
gccacgggacccccgctccgcagctggggaccctgtgaagttggccctgggaggtgagtgcgatcgggggcgccgcacaggtgctgggattccccaggtcgcccatttcccctatggccaaa

SEQ ID NO: 333821 - DNA, 122 bp, Homo sapiens
atagctatcaaaaaccttaataattacaagaaatccatagcacctagaatttaagtaaatcgagccaagtcctgtggctacttagcagtaggagctgggttcagacccatctcctagcgctc

SEQ ID NO: 333822 - DNA, 122 bp, Homo sapiens
taattttttcagtcctgcagctaaccctgggttttcctgatttactttttagggggcagacgccagtatttctgaccaacagctccagtcgcctgtgtacatggaaattataacttactttt

SEQ ID NO: 333823 - DNA, 122 bp, Homo sapiens
tatctaatctattagtcctaatctcccatttatgctttggcactcattccctcctgctttcggtatcttaatatctatcattccttcactcttccctcaggttccctacatagtttatctct

SEQ ID NO: 333824 - DNA, 122 bp, Homo sapiens
gaagatggaaggcagctttctttatagacactttattaaaactgctacagcctgctccggcgtgcgctgggatgtggtgaacccagccgacgacgctatctttcaatggttactttgtgttt

SEQ ID NO: 333825 - DNA, 122 bp, Homo sapiens
ttgtcctagggcatttaaacacatgttgtttcaggagtcagtgaccttcgaggatgtggccgtctacttctctgagaacgaatggatcggcctgggccctgctcagagagccctgtacaggg

SEQ ID NO: 333826 - DNA, 122 bp, Homo sapiens
aggatctctcttccggcttatgttccttgcctcccagtctattagtctcattatgtaccccgacctagtgtcgatccagccatgtaagcacacagtaatagcactccataagtgtgaatgaa

SEQ ID NO: 333827 - DNA, 122 bp, Homo sapiens
cctcccaaagtaaaagccctcagtctgtctcagcaatccattctccagaggtaaccactgcgaatagttctgatacgtttccctccagacgttttccttgctggtgcaaacatatatatgtg

SEQ ID NO: 333828 - DNA, 122 bp, Homo sapiens
ggggggggaagagggtctggctctcagtccccgcctcgcggggggtgcctcccccctctgcgatgggggtcctaagagccagtggaggaactaggggatggctctcaatccctgcctcgcgg

SEQ ID NO: 333829 - DNA, 122 bp, Homo sapiens
gtgtcatgttcaacacagggatctgagatgaggggctcccagaggcttgggcaagtccagcggggggcatcgggaagaccctctctggtgctggtgttctgggacgggagccctgcaggggg

SEQ ID NO: 333830 - DNA, 122 bp, Homo sapiens
tcacgagaagagagctagctggcatcactcaatctcctttcttcatgatttgaacacacacgcagtgtttgagactgcggcagccattctgcatccttgagaaagatacagctataaagtca

SEQ ID NO: 333831 - DNA, 122 bp, Homo sapiens
aaaagcatctgacacataggaggtactcaacaagtacttattgactgtctgaataaataacgcagtggctcacgcctgtaatctcagcactttgggaggccgcagcgggcagatcacgaggt

SEQ ID NO: 333832 - DNA, 122 bp, Homo sapiens
gtctccggcgagaggcgcctccgctttctcatcctccctccggtctgctgagcggcgcggcggcgcttccaccccgcacagccgctggaaacgggccactttctgcgggtcctgcagacggc

SEQ ID NO: 333833 - DNA, 122 bp, Homo sapiens
cgaagtcgccgccaatgttgacgaactcggtgtcgaaggcgagtggttggtgccgcggcccggggccagcgtccgagcccaccaagctgcgcgtgcgcgccgccgagaaggccgagcgcggc

SEQ ID NO: 333834 - DNA, 122 bp, Homo sapiens
tggccagggacggtggccagataacagggcagcctgggatgcacagagcggctaagaagacgctggcacttgcacagggtattctgctgccaccttgatgcagctgagcttggtttggaaga

SEQ ID NO: 333835 - DNA, 122 bp, Homo sapiens
catccttttgtactctcaatttttcacctttgaattttactctcagcctaaaaatatggccgtggcttcttatttcctgcctaaacagacgttttttaaccttacagttccatcagattacc

SEQ ID NO: 333836 - DNA, 122 bp, Homo sapiens
tacccgggccctccaggaccttctccctgagtcggctgtagggaggactccgaggaagctcggcgcggtgcgctgggcctcctggcgccgggaggagcgcgcgaggcaggcggggcgggcgc

SEQ ID NO: 333837 - DNA, 122 bp, Homo sapiens
caaggacaagagtcaacacaatgacacgggccaggatcctgggtcttcttcctgcttcttcggtgggggatggagttggttgttcattcctccttcactcctaaacagtccacaggagtgaa

SEQ ID NO: 333838 - DNA, 122 bp, Homo sapiens
gggggatgcgcagcccctcgcaccgactgcgggaaggagagtgtgggtggccggcgcgcccggtccagctgccggcctctcgggagaacaatgcgtctgtcacacagtgactgatagggcag

SEQ ID NO: 333839 - DNA, 122 bp, Homo sapiens
tgacctttccaaaatgatggtgaacgtaatacgcaccacactctgaccttctcaagatggcgctgagctgacaaactcgcgtcgcaaactcacgcaaactcagtgtcgctgtcgaagacact

SEQ ID NO: 333840 - DNA, 122 bp, Homo sapiens
gtaaagcggcccctgggcttccctccaaaactcctttcctccagggtctccgttcctccccgcgacgctaggcgctgcgcttcgtttcacagactcacttcccacgccagggcgagggcggt

SEQ ID NO: 333841 - DNA, 122 bp, Homo sapiens
catcaaactacaaagttgactcagaagggcttcttgccaaataggctttgaagaagcattcggaaatccagcccaatcccctctgcagttctttctgctttttggctgatgtaagcttctcc

SEQ ID NO: 333842 - DNA, 122 bp, Homo sapiens
aatcgctgctcccgccatttcctggggcttggaggaggggttaaaggagcggactgtaggcgtcacatttcccgcctgcgcgcttttcagtctcagtgtccgctggaggtgggggcaggggt

SEQ ID NO: 333843 - DNA, 122 bp, Homo sapiens
gcggccccgcttacctcctcttttcctcttcctgggtcttttcaggctgcggcttctgcccgtccagggccacttctcccgggacagtcaggtttgggagactccggattttgtttttgtaa

SEQ ID NO: 333844 - DNA, 122 bp, Homo sapiens
cttgtcgatgattggctggtctctgaccaatcacggacagcgattgatatttctaatcgtcgtgatccacctccccaggaccttggagccacgtttacaaataggaatagggtacgtgggag

SEQ ID NO: 333845 - DNA, 122 bp, Homo sapiens
atcgccgtcttggaagatctaagtccgggatggaacaaaacccactccgggcggggggagcgcgccacctggcggcggatcctgctaaggcagcgccgcccggagaccagaaacgttggatt

SEQ ID NO: 333846 - DNA, 122 bp, Homo sapiens
tcccgctgcagctaaaacaccagtcaggcccccacaaggaaacccagagcaagcaaacaccgaggaagaagtcgctccctcaaaggcagcgtctgggggctggtaggaggctcccggctgcc

SEQ ID NO: 333847 - DNA, 122 bp, Homo sapiens
ctccttgggcccaggagcgggcaagccgggagcgcgctccgaaaagtttaggcgccccggcgcatggccgccccagccctggaccagtccccaccgcccacagtccccaacggcgccggccc

SEQ ID NO: 333848 - DNA, 122 bp, Homo sapiens
attgccatctgctggaatatcattgccacatactggttatgatgaaatactacttgttaccgccatatgccagacagttgttagagtaaatggacaaatctatgatggtacgttatggacaa

SEQ ID NO: 333849 - DNA, 122 bp, Homo sapiens
ttgtgtatatatgctaggtttgtgtgcatatactgtataacattcacactataatgaaatcgtctgaagatgcatttctcagaatgtatccccataattaagtgatgcatgactgtatgtta

SEQ ID NO: 333850 - DNA, 122 bp, Homo sapiens
ccgctcccctacaggcccggtccacttgttggtgcgcggatggggacagagggggcgccccgctcacccctgcgagtctagcgcccagcctgcgagcctctggctaagcgcccagccccacg

SEQ ID NO: 333851 - DNA, 122 bp, Homo sapiens
aatggaacagcgtcctccactgccatgaattgtcctctggtcaccggtagtagagacagtcgcacagtcatctgggaaacttggcctggctccatctgcctagacttatcagtgtcctggta

SEQ ID NO: 333852 - DNA, 122 bp, Homo sapiens
agaccctcgctcacccagatgcctttatggaggggttgcctcctgcaaggaatcccttatcgtggctgcaattcctgtcctgcctttctctaatagccccatggctttgtgtccttgcaatt

SEQ ID NO: 333853 - DNA, 122 bp, Homo sapiens
gtggacgtggccaagactccttgctctgatcagggcagaatcagttgagtgttgaagctgcgctcccttgaggtagaaaattggttaattttgcaccccctgggcggggtggcggcgcgggc

SEQ ID NO: 333854 - DNA, 122 bp, Homo sapiens
caggctggagtacagtggtgtgatcatagttcaccgcagcctcaaattcccagtgtcggccgggcacggtggctcacgcctgtaattccagctctttggaaggccgagacaggcggatcacg

SEQ ID NO: 333855 - DNA, 122 bp, Homo sapiens
ggcccggggcgcctgcgctctgggagccctcggcgttttggtgggagggggtcttgctggcgcagtggaaggccggctgcggggggaggcgatcgctgccaccctgtctaagaagaaacggc

SEQ ID NO: 333856 - DNA, 122 bp, Homo sapiens
gtagtggtgatctggcacgttgtaattgagactgaggaggtgaatgacttacatggaggtcgatggagctgaagagggtctctaggaaatgtcatagtcaagaggtttgtatgcagaatgtg

SEQ ID NO: 333857 - DNA, 122 bp, Homo sapiens
gggaagagggggaaccacctctcgaaaaccccggccgtcgccctcccaggccgggagagtcggccccgcgcgcccccaaaagctccccagcggccggccctctctacgtcatccgcaccctc

SEQ ID NO: 333858 - DNA, 122 bp, Homo sapiens
gaggtgctgtggttccaattaacgcacacagccatgtcctgccggtttcagttcaggttgcgccctatttaggtctccgggtttcggtgtggaaacaccactccacaagcagcctccacgct

SEQ ID NO: 333859 - DNA, 122 bp, Homo sapiens
tgtgaagagcacctctgcctggccgcgatcccgtctgggaactgaggagtgtctctgccccgccgccaccccatctgggaggtgaggagcatctctaactggccgccccgtctgggaagtga

SEQ ID NO: 333860 - DNA, 122 bp, Homo sapiens
ccttgtgcgccctttggttcatggaatcaaaactgttttgacatgttggccagtgcccttcggtgtcactgaagctcagcccgcggacggcggtgtgtcagtgtgcaccgggaggcctgggc

SEQ ID NO: 333861 - DNA, 122 bp, Homo sapiens
ccctcaaggtgagggctgggcaggtgggaggcttctctcagatgccccaggtgtggcctccgggccctgggcctccttcccactccctctccacatggcttggtgcatcttgctctgtgtgc

SEQ ID NO: 333862 - DNA, 122 bp, Homo sapiens
ggcccagccagcaccgcgcgttgcgttcccgctaccgccgggctgggaagggcgggaccacgcgtgctgcactggccctcagtacctagcccgcggtaggaggtccgccccaaccctggcta

SEQ ID NO: 333863 - DNA, 122 bp, Homo sapiens
cctaatcaaccgcagcgagcgggaggcgcaaggcgttgtggggagtgtagtttttcgcgtcgcggcgcttacaaccgtagactgcggagagttgcggccgtccggagaggtctcggtgcccg

SEQ ID NO: 333864 - DNA, 122 bp, Homo sapiens
gaggccgcccgcggccccagagtcggcattaggggttcgcgtccacccggcaaggcctcccgtgagcccagagcagggacctaagaggatgcgagaaaccctccagcagaaaaaaccccgca

SEQ ID NO: 333865 - DNA, 122 bp, Homo sapiens
tttcacatgtcagcagttccttgccattgctgagtagcctcccactgtatggatgtaccacggtttgctcatccattcatcaccagtgaggatttgagttgctttcagttttgggctaaagc

SEQ ID NO: 333866 - DNA, 122 bp, Homo sapiens
accgtcaaccaagattaatagttgcccggctccggggcagggagatgagcccagatactgcggcggcggcgctcgcttcgcgcgagccaacccggcacgggctgggcgcaccacctgccgct

SEQ ID NO: 333867 - DNA, 122 bp, Homo sapiens
caggtaccacaaaaaataaaaaaggaagtgttctgatccttgactgggtcttgttgccagcgtttggtcttatcctctgcagtgaataatttgtgataaaactggcaagataatgtatgctt

SEQ ID NO: 333868 - DNA, 122 bp, Homo sapiens
aaagtggggtgggtggcggagggctgtggcgggggcttggagctgctgagagccgagaggcgcagagcgcaagctggcaggctgggctgctatcccggcgcgcagatgccccgccgccagtc

SEQ ID NO: 333869 - DNA, 122 bp, Homo sapiens
gcagagggggcggtggatgcacactgcaggcattccagagggagcggccccggcagctgacggacacacacggggccaggggagatgcggtgaacgaacggccaggccctcgggcccctaag

SEQ ID NO: 333870 - DNA, 122 bp, Homo sapiens
agtaagaaaaactgggtgtcccagtaagattttcaatgggaacgtctttcccattgaagacgtggttgggtttcattttttcaccttccctccccctgtttctttttatgggctggtttgga

SEQ ID NO: 333871 - DNA, 122 bp, Homo sapiens
ggagttgcaagtgggaggatcacctgagcccttgaggtcaaggccgaaataagccaaaatcgcctcactgcactccagcacaggcaacagagaccctgtctcaaaaaaaagaacttttagga

SEQ ID NO: 333872 - DNA, 122 bp, Homo sapiens
cctcctgcctcagcttcctaaagcactgagactgcagacattagtcacctctcctggttacgggattgctttttaattttctttatttttgagatggagttccactcgtattgcccagactg

SEQ ID NO: 333873 - DNA, 122 bp, Homo sapiens
agggcgttctggcatctgctgcctcggggccgagccctgcgggaggcattctgaggctggcgcccccggaccgcatctcagcatgtgctcagagggaaagtccgcgggcctgaggtcagagc

SEQ ID NO: 333874 - DNA, 122 bp, Homo sapiens
cataatacatccgccttggcctcccaaagtgccaggattacaggcgtgagtcactgcacccggcctccatcatttcttgactgggttattggtataaattcccaacgagtcttctaacttac

SEQ ID NO: 333875 - DNA, 122 bp, Homo sapiens
tctttggggaggggtctggacccatcatcctggacgaccttcggtgtcggggaaacgagacggccttacgattctgcccagctcggccctggggccagcatgactgtcaccaccgcgaggac

SEQ ID NO: 333876 - DNA, 122 bp, Homo sapiens
gcgcctggacccccatcctcgccgccctcttccggagaggaggctccggacataagttcccgtgccctctgaatatctaggtgtggaaactcaattccaacagtcacaaagattattcctaa

SEQ ID NO: 333877 - DNA, 122 bp, Homo sapiens
aacccaagaaagaggagaaaagtggaaaaactcacacctcttgctttgttctcacagaatcgcaaatgctgggaacaaactcccaaccacaaaactgactggcatttgatcagaaacatgtc

SEQ ID NO: 333878 - DNA, 122 bp, Homo sapiens
acagcatccccttaaagaggctccggctgcggtggaagcaggtccaggacagctctgagccgtctgcagagagcctcccgccggccctgcactgtggtcccacacagacacagtccttcgtg

SEQ ID NO: 333879 - DNA, 122 bp, Homo sapiens
ccgctctgccccttctaggatgcggccaagcccctggaggtgctgttgctggagaagaaccgctcgctgcagtccgagaacgccgcgctgcgcatctccaacagcgacctgagcggtaggtt

SEQ ID NO: 333880 - DNA, 122 bp, Homo sapiens
ggacaggcctgagaatcagagaaaccttctctggggctgcaaggacctgagctcagcttccgccccagccagggaagcggcaggggaaagcaccggctccaggccagcgtgggccgctctct

SEQ ID NO: 333881 - DNA, 122 bp, Homo sapiens
cgaagccgaacgctgggctctggattctcctccagagcgctccgccggcctaagcacggccgccccacccccggcccgccaggcgcagtcggccccgccccctggagctccgttcccccggc

SEQ ID NO: 333882 - DNA, 122 bp, Homo sapiens
gagtgcacaaatttgtgctaggataggatttcaggggaaaggttaggtagtgtagggagacggagatttgagcagccatggagtatagccaaggaaggatcctggatatctggaaaagtgaa

SEQ ID NO: 333883 - DNA, 122 bp, Homo sapiens
ggctaaatctcttcttttcctcgaggctccatttcgttggattctggtggactttaaagacgtgtgcaacaaaaaagcacgatggataatagattccgggagcaagcacaggcggaagcctc

SEQ ID NO: 333884 - DNA, 122 bp, Homo sapiens
tctgctttcctcttctggccactgaaagaagcggacacgcaggattccagagagccaagacgagagaagcccaggaggaaaaagaggcccgccaagcagccactccagcaggcggcgccctc

SEQ ID NO: 333885 - DNA, 122 bp, Homo sapiens
agaacatccaggatttcagcctcagtgctaagacaaccatgtctctccctgacacatgctcgctgctgagaattctaggaaaagcagagggctgtgcaggcgcccctgcccctaggctagga

SEQ ID NO: 333886 - DNA, 122 bp, Homo sapiens
taagcccatcggaaaagcgcagtatttgggtgggagtgactcgattttccaggtgccgtccgtcacccctttctttgaccccttgcgcttcccaagtgaggcaatgccttgccctgcttcgg

SEQ ID NO: 333887 - DNA, 122 bp, Homo sapiens
agagaactgctttccagtatgcgccctgagctcggactttgcgcttgcagactgaggcgccggcctgcatgggaagacagaagctcagaattccttcctgcacaagtggcaggtggagtgca

SEQ ID NO: 333888 - DNA, 122 bp, Homo sapiens
ctgggaaagtccctgaaagagagcagttgtccatgcctctactatggcaccaccacacctcgcccatgcttttatataatcttgttttcaatgacaccacattccagcaacattagggaatc

SEQ ID NO: 333889 - DNA, 122 bp, Homo sapiens
gaggcagcacaaaacagtgatccctaagacaggtttaacagatgagatgagctctaccatcgctctatcttactgcctagagaaagagttttcagcccatgcacaaggataaggaatccaca

SEQ ID NO: 333890 - DNA, 122 bp, Homo sapiens
ctacaggaggccgcccgagctcgggagctggagctggaagcctgttcccaggagctgcagcgacaccgccaggaagctgagcagctgcgggagaaagctgggcagttggatgctgaggcggc

SEQ ID NO: 333891 - DNA, 122 bp, Homo sapiens
tttaggtaaactggtcttcagtggccttcgaccctgccccccagctttcagtaatggaatcggttgcccagagtccacaggcctttcagcttgaaaattttggattctgggaaattcgaatc

SEQ ID NO: 333892 - DNA, 122 bp, Homo sapiens
ggccggcactactgggaggtagaggtgggcgggcggcggggctgggcggtgggtgctgcccgtgaatcaacccatcataaggaaaaggtgggccctgggggttcctccgtgggcagcgggga

SEQ ID NO: 333893 - DNA, 122 bp, Homo sapiens
gactgtccaccgcccgccgctggcgtctccacgcagccttccggagctcccattggccggcgtcaacagcgcgcgccgtgattagctagtatttcccggcctcggccaaattcgaagggatt

SEQ ID NO: 333894 - DNA, 122 bp, Homo sapiens
cgccccgaaactcagggctcagagttagtcaggagggcgccggccagggaaggcgacctacggctccacaaggccgccctgattctgccccacgggggcccccccagccccggggtacgccc

SEQ ID NO: 333895 - DNA, 122 bp, Homo sapiens
cgcttggccaatcctgcggagaggggcacccagataaacgtaacaaagctaccattttctcgactaaaggtcacattgtaatctcccaaggaagttagtgagaaaacctcaaattatacgga

SEQ ID NO: 333896 - DNA, 122 bp, Homo sapiens
gatattagagcgccttgaagcctatggtagaaaaggaaatatcttcccataaaacctagacggaagcaatctcagaaactactgtgtgatggctgcattccacacacacggtggaacatttc

SEQ ID NO: 333897 - DNA, 122 bp, Homo sapiens
ctgcactccagtctgggcaacagaatgagatgccatctcaaaaaaaaaaaaaatgctatgcgatacaaaaatgatgtacttgtcaatagtccagtgagtcaggggaaccctttctctttatt

SEQ ID NO: 333898 - DNA, 122 bp, Homo sapiens
caaccaatttggaaagcaagaaccaggagataacaaagagattcttcctgggctcaagtacgtgtcttcttgaaatccaataggaggcgcctgtgtacctttcctcagtctccagaggccct

SEQ ID NO: 333899 - DNA, 122 bp, Homo sapiens
cctggccaacatggtgataccccgtctctactaaaaatacacaaaaacactggccaggtgcggtggccggcgcctgtaatcccagctactcaggaggctgaggcagaagaatggcttgaacc

SEQ ID NO: 333900 - DNA, 122 bp, Homo sapiens
cctgggggaaggcacagatggagagaccttccccagaccctgtggtgacttagcgcggagcgtggcactgagcccaccatggcgtctttcccatcaggtgattaactgcctggtttcacatc

SEQ ID NO: 333901 - DNA, 122 bp, Homo sapiens
agtgaggggttgaggcgaggcaccgtgcggaccccgggtgcgggggagcggggctggcagcgcccgccgccgtcccgggcagggcgcgggcgggggctcacctgtgtggtccccggcctcct

SEQ ID NO: 333902 - DNA, 122 bp, Homo sapiens
gacacacaccgcgtagccatacaaaagaacaaaattatgtgctttgcagcaacatggatgcggctggtggccattatcctaagcggattaactcaggaacagaaaaccaaataccacacatt

SEQ ID NO: 333903 - DNA, 122 bp, Homo sapiens
cagttataccgttccatgaacccgagggccaggaagaaccgctctcacatacccttggtccgtaagcgtcggttccagttacgccgttgcatgaacccgagggccaggaagaaccgctctca

SEQ ID NO: 333904 - DNA, 122 bp, Homo sapiens
gaggagagaaggaagagaggaggaggaggggaagaggcggggaggcagcccctgcccactcgaggtggttcgtcagagtcgctgttgcatagatctggttactaaggtactggaatagctga

SEQ ID NO: 333905 - DNA, 122 bp, Homo sapiens
ggccaaggggatgtttgaatgtcagatactgcatgaggcacattagtgtacagtaatttgcgcataattcatattcataattcacagtgaggaaatctgaaagttgctaccagctactaata

SEQ ID NO: 333906 - DNA, 122 bp, Homo sapiens
tctgttcaatcatttcaattccctgcagtgtgaaatatgaacttgccaacaaatggccagcgtgctgtgcctcgcagcagggggggaagtgccacagctgtgccagagactggaaaactcaa

SEQ ID NO: 333907 - DNA, 122 bp, Homo sapiens
actgtataaataagtcctgagatggagaggggaaaagaacttctgccacatctgggcccacgagaatcatgagtgcaggtgcctgtttctagatggaagagcaactaggttatccaaaatgg

SEQ ID NO: 333908 - DNA, 122 bp, Homo sapiens
ttaggaggccaccggaagcctggcctgctaggggccttgtgatttcgcaggccccgagaacgtggtgtgcaggtgcgggccgcctgggggagccatgtttaaagtgcggtgaggctcctgga

SEQ ID NO: 333909 - DNA, 122 bp, Homo sapiens
cttttctttggcgttcctgaaaccttgcctgccccatgcccggagaaatccgttgcacaccgtctcttggagccctgcttgcagcctctgtggccctcttcagggtgagccagccaggggat

SEQ ID NO: 333910 - DNA, 122 bp, Homo sapiens
agaaacggcaggcgctcgcgagggggcgctgaggtcggggcggggcttaagggacagaggcgcatgcgttctgccgggggctcgcccttcaccaggaatgacggtttctcttgcacatgcgc

SEQ ID NO: 333911 - DNA, 122 bp, Homo sapiens
gtctgagccggtgcccgtgtctgtccgtgtctgtaggctcgggcgacatggacgggttgccgaaggtaaggaggctgcgctcttgccgggggtgggatccggggggggtggcggggaggggg

SEQ ID NO: 333912 - DNA, 122 bp, Homo sapiens
ctacttgacgtgtcggtgcggcgaatttatttcactttgcctaaggaacggggtgtgctgcggcacccattgcctagggaaaaaacccggatgtaaagtgagtgaaactaaactagagtgaa

SEQ ID NO: 333913 - DNA, 122 bp, Homo sapiens
atatctttggcaaatacgtatccgactatactgtgaagaaatattgacgtgaaaaaagaacgcggagatctgataaagcaacaattcagctcacggcgaggtcctctgcaggaggcggttgg

SEQ ID NO: 333914 - DNA, 122 bp, Homo sapiens
accttggcctttggtgagggttgttggggccctgcagtccctggggttcacctcaagtctcgagtgtcaaagccgtgaaggggagcaccagggccaagggacccagagttcacgggtccaat

SEQ ID NO: 333915 - DNA, 122 bp, Homo sapiens
cgctcgggcggcggcagagtctctggggcactcggggcgggcggcagcaggtgggacccgcggcccgacccgcgctagggccgcccaccccctcggaccccggccgggtctctccacagcct

SEQ ID NO: 333916 - DNA, 122 bp, Homo sapiens
ttctgagggaggacgggctccaagggctgggcatggcggcaccgctggttcaccctctctcgtcttcctccacaggtgtgcttcccgcacagctgcagccatggggtctgaggaccacggcg

SEQ ID NO: 333917 - DNA, 122 bp, Homo sapiens
aagtgcttctataaattcttaggtttagagatgataccatctgggtacctttgcttgaaccgtgcaaccacatctgggtctagtaggtggatcccatccagttggtttccaagggtgatcct

SEQ ID NO: 333918 - DNA, 122 bp, Homo sapiens
tggctgctgcccggtgcattgctgtagcctcataatggtccttagcatctggattagccccgccttccagtaacatgacagcgatctggaaagatggagaagaaagaagaaaacaatgcaga

SEQ ID NO: 333919 - DNA, 122 bp, Homo sapiens
ggggcaggggcaggagcgcgatcgcgcgcggggcccccggggtgtgattagcaggcgccgcgagccgggaggaccccccagcccgccctggcagccagcaccctctccacacccgcccagag

SEQ ID NO: 333920 - DNA, 122 bp, Homo sapiens
tttgcactaaaatagagatcaacaagcaatgattctgtgtcgtgcacgcacgcagaaacgcgatgacgtcagggttgcttggtaacagaagggcagaaagccacttgtggattgaaaaagca

SEQ ID NO: 333921 - DNA, 122 bp, Homo sapiens
ctcagggcccacatcctgtgcctctctcccttatcattctgatcctgccagtttctgccacgcctctgtctgaactttgctccgtgctccaggcttgttttcctctggacctgggaaccact

SEQ ID NO: 333922 - DNA, 122 bp, Homo sapiens
tggggcaagaaaatagctgtatggcataaagtctacttgagggaaaagaacaacccggcacggttacgttcaatcagacactaaacagagtgcacgcccacccaggggacactgaggtcgct

SEQ ID NO: 333923 - DNA, 122 bp, Homo sapiens
tacaggcgtgagccaccacacccagtcacagatatcttttgatatctcaagaactatggacggaattaaagaattccaagaccaattaaagaatttcaagtgagacaattcattttcttatg

SEQ ID NO: 333924 - DNA, 122 bp, Homo sapiens
gggtgcagtcctggatcagggccggagctgtcacttcttcctcttcttgttgtccgggggcgcctcgttcttcttgcccagaatctttagaaggctcttggacatgtagtagggccggtcca

SEQ ID NO: 333925 - DNA, 122 bp, Homo sapiens
gcagcggcggcgcctccacttcctcatcgggcactaacttacttttctcctcctcggccacggagttcagcttcaatgtgcccttcatcccagtcacccaggcctccgcttctccggcctcc

SEQ ID NO: 333926 - DNA, 122 bp, Homo sapiens
accccaatgggagtgattggcagcggccgcacgccaggaaacagccctcggctcaggacccgcgctccattttggatcactcctggaggaactgaaaaagcaaaggggagaaagacaccgca

SEQ ID NO: 333927 - DNA, 122 bp, Homo sapiens
acgacatgagtagatcctgatcagttacacatcacttcagggagaaaccgctaaagcagccgacactttttgtagaaaatcctacatgtttctctaaggttattaaaatatttctggagagg

SEQ ID NO: 333928 - DNA, 122 bp, Homo sapiens
caggccggggctgccgaacgtgcgaggctcgggggctgggcctgcgccgcagaggccgggcgcaggagagaccgccgcggaaatcaccgccgggccatcttgcccaaagttttccaacggcc

SEQ ID NO: 333929 - DNA, 122 bp, Homo sapiens
atatggtttgaaaagccggcgggaaatccgagtttcgcgggaggaccttggcgcgtaaaccgtatcccttcattcattgtcagcagcagcttcctggagccatttttcagctgccggccgca

SEQ ID NO: 333930 - DNA, 122 bp, Homo sapiens
aagctcaactagaaatggaagtaaaggcttctggcgctaccggcagggggcggttaaggacggcaggtgttaccagggaagctaaaagtacagcttttgctgacgttaagtcagatacgcct

SEQ ID NO: 333931 - DNA, 122 bp, Homo sapiens
tgtggaggggcagggctgggggtggagccgggtcgccagggcgtcggtagggaagacccccgcccctcgcccccccaccgaacctctacactggctggctggacactaagatggctgccgtt

SEQ ID NO: 333932 - DNA, 122 bp, Homo sapiens
agggcttctcttggacgagagggtccttccccaagtgcaggggaaatgtatcccaaagcccggccacacaacacaggggctgacacagagaccccaagctagaccttgacctccgccgcccc

SEQ ID NO: 333933 - DNA, 122 bp, Homo sapiens
tgctacatggaaaacacaatttaggctccagacgaaatgaagggcgcggctgagctgacccgagaggggagattgtgccgggtctgaggtgccactgggtccctggacgtgggagaggaaac

SEQ ID NO: 333934 - DNA, 122 bp, Homo sapiens
ccgccccgctgatgtgtgtccgtgttgtgcccgtgttgtcccgtgttaagtgtttgtgtccggccccgccccctcctcctccttccccccacagacggcttcacctcggagggagagatcct

SEQ ID NO: 333935 - DNA, 122 bp, Homo sapiens
aaatcagggagaaaagattttcccttattggtctccttttctagaacttaccacgtacttcgtgcatattaatacgtgactcccattggcagctgctccaatcctggtccacagtgagctga

SEQ ID NO: 333936 - DNA, 122 bp, Homo sapiens
atccttctaagaatgtcactgagaatacattttttaaaaactgggttggtaagagttatacgtcttgagataacttggattatgatggagggtcatgaagccagcagtgagaaccaacaatg

SEQ ID NO: 333937 - DNA, 122 bp, Homo sapiens
taagtttggcctaaaggtttctctgtacatcatgaactataacgtaaatggaatagtatacggactctagtctactcttgtgccagtcactgagtttggccaatcgaagatggccaatgatt

SEQ ID NO: 333938 - DNA, 122 bp, Homo sapiens
cgtaatcatttatgattaattttattcatttccattaacttaagctaagttcttttagcacgtttagattacagaacgaaagctgtgttaactagtattacaggacttttcacgtttttcca

SEQ ID NO: 333939 - DNA, 122 bp, Homo sapiens
caagaatttaatatatacttgttaaacgaacgaatgaatgcatgtatacataaaatgttacggaatgtttaacgtattccggggataatgaaagtgggtggatttctgagagaaggggtcag

SEQ ID NO: 333940 - DNA, 122 bp, Homo sapiens
ttacatctccaaaaagcatttgcgagatgccaagatttctcaaatgggcccctcccccgtcgtgagcctctttcctccccctaccaattctgggaagtcattagttggacgcggctgggatg

SEQ ID NO: 333941 - DNA, 122 bp, Homo sapiens
caccatagcaggagacatctgtctagtgtgtttctagagtaggggtaggaggtggggaaccgctcaattcctacaggaggggcactctcaacactgggtgtcaggcaggaagggggtgagag

SEQ ID NO: 333942 - DNA, 122 bp, Homo sapiens
tctctcccctcctccttcatccctctctttctgtgcttctccagcaaatttccccaggttcgtatccagcctacatcacgaactatttttggaaccttgggcaagtgactgcacccctgtga

SEQ ID NO: 333943 - DNA, 122 bp, Homo sapiens
gggtgctgtgggagcatatattgcacctacctggggctcaagagttactgcctgaggaagcggcctttgagtgtccatctggagaagggagacattcaggtagtgatggttgtgggggatag

SEQ ID NO: 333944 - DNA, 122 bp, Homo sapiens
gctgtttggtctcgggccccaggctgctacaagcattcacattgttcttcaagtgatggccgttgctgaaatggttaccaggcggagcagctcgcctccagggcaggctctgtgggtggtct

SEQ ID NO: 333945 - DNA, 122 bp, Homo sapiens
aggtgtgcttaaggttttcttagagaacgttattcgagacgccgtcacctatacggagcacgccaagcgcaaaactgtcacagccatggatgtagtatatgccctaaaacgtcaggggcgca

SEQ ID NO: 333946 - DNA, 122 bp, Homo sapiens
cagcagtaacaggcagtggcccgccttcacccagttcttgtactcggcgcagttgaggcgcgccgctagctccgacagcaccatgtctcccacttggaaccaggaggttgcggggcgtggcg

SEQ ID NO: 333947 - DNA, 122 bp, Homo sapiens
tcactttggtctgtttcatccctctgccgcagctgggccctggtcctgatgctgaggacccgaagcgggcacacctgcgccgggcaagaatgaacccagccaatgaggagcccgcatgcggg

SEQ ID NO: 333948 - DNA, 122 bp, Homo sapiens
cattccctaaccgtggtgagtgcgggctgttgacagcacgcccgcctccttttcagagcacggccttggctgacaggagccacacatcctggctgtgctcttcctcactgcctgggagtcac

SEQ ID NO: 333949 - DNA, 122 bp, Homo sapiens
tgacgtcgcgggcgctgcccagcctgacggacagcaagggctccctggtggtggtgtcctcgctgctcggtgcgtgcacccggccccggctctgcgggacggggagtggggagctcgatgcg

SEQ ID NO: 333950 - DNA, 122 bp, Homo sapiens
ctactcacacccgagaatgctgggagcttaaagtgcctgcccaggacacccagacacccccggacatcagggcttaccttggccttccgcagcacatgccctcggcagggggagctgcccgg

SEQ ID NO: 333951 - DNA, 122 bp, Homo sapiens
ggcatcctggctgctgtgtgtggcgcacgcggcccaggcctgagcgaggtgttcaggaggcgggagatcactcaggctgattctgcagggtgttctccttttgttcctgttagaactctctc

SEQ ID NO: 333952 - DNA, 122 bp, Homo sapiens
ctttgtcactgaccagggtgcctgcgctggcagtcccagcctcgtggccgccgcgcgccgcgccttcccctgcaaggatgcggccctctgcgcctacgcggtcacctacacagcggtgagct

SEQ ID NO: 333953 - DNA, 122 bp, Homo sapiens
cctctgtctggatggcctttgggagatgagctcgcacctcacttggtgccacagaggtggcgacctgccctgcaagagaccgcctctcagcagggctgattcttccccatcggtaggaattc

SEQ ID NO: 333954 - DNA, 122 bp, Homo sapiens
agcatccgtcggcagaaccttctcatcttcccaaacggagactctgccccaggaagcactcgctccgcatttgctcccagcccccaggcctccattccactttgtctctgtgcgctgggctc

SEQ ID NO: 333955 - DNA, 122 bp, Homo sapiens
gattggcggctgcgctggcagccggacccccgggcgtcctgtctcttccctgcgcagtgacggtgccctggcctggagccctctctgggcagctctgcacccgcagcgtcgtgtctctccca

SEQ ID NO: 333956 - DNA, 122 bp, Homo sapiens
gctgtgtggctgatcggactggccactcgctattgcacaccttatatggaagggtaaggccgcccccgtccacctgagacaggacacgtagtgctggggcttatggtgacagtggggaatgg

SEQ ID NO: 333957 - DNA, 122 bp, Homo sapiens
cacatggtactaggactatacaggtacttatgggggaagtggaaagatacatgggtgactcgtacagcagtaggaattcctacagagtaagagatagtgtgcacgtgtcttctcagcagctc

SEQ ID NO: 333958 - DNA, 122 bp, Homo sapiens
tagctttctggtctctagggcagctagataaacggaaagtctcctgggaggaataaaggacgcttagccggcccttatattccagatttggaacttcgaaaagagtacgtactgattttcca

SEQ ID NO: 333959 - DNA, 122 bp, Homo sapiens
tgcaacaccctgcagcgttcagacttgtcatggatgactctaacagggcaggtgttaccacgtcaactggtccaaaaaacaaaataccgggtgcacatcccttgaagtttcgggtgtgttta

SEQ ID NO: 333960 - DNA, 122 bp, Homo sapiens
ctgtccagaaatgcgccctgaagactccaaatgacacgaaaacatgcccggtacgagatgcggccgagccagttggggtacacggctgtctgtgcagtctgctcacatgtgcacgcacgcca

SEQ ID NO: 333961 - DNA, 122 bp, Homo sapiens
gggataattagagaggagttgggctgagccgagtcctctttcagcagcagcagccggagccgccgccgcagcccggtggggcaaccctgactcggaccgctcgggagagccccaggagaggc

SEQ ID NO: 333962 - DNA, 122 bp, Homo sapiens
atgatgcagttgggggtagaaaatggggataaatctctaatttctcagatttccagaaatcgggattttccctaagtacccctggccttgagctaaatcccgtcactgtcttgggctgtgtg

SEQ ID NO: 333963 - DNA, 122 bp, Homo sapiens
gcggccggcggagtgctgggaacgggaggcttggactgggggcccgggcgaggcgcggcccgcggcgggtggaactgggcgggtgagcagcagccccggccccttccgtcgctcggagcgtt

SEQ ID NO: 333964 - DNA, 122 bp, Homo sapiens
atggaggagggggcttcgcggtaaccacaccccttcctaatgagttaatttccatatttgcgcctcccgcatctagcgccctctttttttttttttttttttttttttttttgcctgacgcc

SEQ ID NO: 333965 - DNA, 122 bp, Homo sapiens
ctgctttgtgtcagtgatcacctcattgatcatggaaggaagctaatggggttaccagtacggaacaggcacacatacaaaggtccagggcagataagtgattcaccgtaccacaagtaaca

SEQ ID NO: 333966 - DNA, 122 bp, Homo sapiens
gtcaaccacgaccaggagaggcagcgctggagcctcaatcacgtcgacggaaaacaagtgcgctccctactgcagtcaccaggaggcgctagtcccgcctgtctcccggcacgggtcctcgt

SEQ ID NO: 333967 - DNA, 122 bp, Homo sapiens
agagtttcctgaataatcacctcttgaaatacacaaaactcttctagtttcctggttgaccgacccagggcttgacgactccttttgagccacctgacaattcagtccagcacagcaactga

SEQ ID NO: 333968 - DNA, 122 bp, Homo sapiens
ccgccgcgggccggggctggcgctggcacgaacgcgctctgcatgctaagtgctcgcgcccgttcccgccgcccggaggctcatttgtcacccgctgctgactcagcacttctgcagaaggc

SEQ ID NO: 333969 - DNA, 122 bp, Homo sapiens
gatcaccaacatgaacaacaattatgagccccgcagtggcaagttcacctgcaaggtgcccggtctctactacttcacctaccacgccagctctcgagggaacctgtgcgtgaacctcatgc

SEQ ID NO: 333970 - DNA, 122 bp, Homo sapiens
ctcaccccccgcaacaggcctgagagccaggtggtatttgataccagttttacagaggtgcgagctgaaggtggacgctgagaagcaaactgccctaggtcattggcttctaagaagtggag

SEQ ID NO: 333971 - DNA, 122 bp, Homo sapiens
ccctgtacgtctgtgattggacggcggcggccactgatgttcaagcgacaggtcctggcccgggagccaatctgcaggtgttgaggcccaggctccgagagcgggccgaggaggcgtggata

SEQ ID NO: 333972 - DNA, 122 bp, Homo sapiens
cgctgagaccaagagcgtaaattccttctggctattaattaaaagcagcctctcccttcgcgccagtgtactcgccataaattaatagcggtcttcttaatcaaatcttatctcctcctcga

SEQ ID NO: 333973 - DNA, 122 bp, Homo sapiens
gtggaattaagttagtaggtgatgcgggccgagcaaagaccctccgtgctctaagaagcacgaccgaaatgcggcgacccctctttaatgaacgcccctcactagagagtccccgaagccca

SEQ ID NO: 333974 - DNA, 122 bp, Homo sapiens
cagctcagtgtgggtcagctgtatctaagaaagagtcattaggccgggcacagtggctcacgcctgtaatcccagcactttgggaggcggaggtgggtggatcacttgaggccaggagttcg

SEQ ID NO: 333975 - DNA, 122 bp, Homo sapiens
ctttgccaagaacattttttttcagcttgactttgaactcactcaaggtggagcagtatgcgaagaggttatggtcacaggatttgagacagatctggatttaaatcctggcatggccatgg

SEQ ID NO: 333976 - DNA, 122 bp, Homo sapiens
cctatcggggtcacagggacgctaagattgctacctggactttcgttgaccatgctgtcccgggtggtactttccgccgccgccacagcgggtaaggggtatagaccctgctctggactatc

SEQ ID NO: 333977 - DNA, 122 bp, Homo sapiens
tcgtcctggtgaaccgggccggatggtcaccatgagagcctggtttggaaacattccccacgcccaggtatggggctctcaaaaatctctgcccagcaggagcacagggctgccatccacga

SEQ ID NO: 333978 - DNA, 122 bp, Homo sapiens
cttgcctgccctgatgcccaaatctgggaggcatgaaatggggttacagtctaattcactcgataattcacagactaccaacatctataggttcctcttcatcgttcattcttcattcattt

SEQ ID NO: 333979 - DNA, 122 bp, Homo sapiens
gatatagtgagacccacatctctacacacacacacacacacacacacacacacacacacacgaagaagaacataaacacatcaaatgtgagccattttgctgacttgggcatacaataaatc

SEQ ID NO: 333980 - DNA, 122 bp, Homo sapiens
atcttttttttttgttcggagacacagtctcgctctatcccccaggatggagtgtagcagcgcaatctcggctcactgcaacctctgcctcctgggttcaagtgattctcacgcctcagcct

SEQ ID NO: 333981 - DNA, 122 bp, Homo sapiens
cacaagcccaaactgagggacagcctaaaacctcctacccagcccttctcagaactgttacgtcctcacaaaaacgggagagtctgagacaccgttccagcccagaggagacagaggagaca

SEQ ID NO: 333982 - DNA, 122 bp, Homo sapiens
cgtgatctgcccgccttagcctcccaaagtgctgggattacaggcatgagcctccgcccccggccttaaataattcttaaaggaagtaaagttaactttgaaagaactatcaggatttggat

SEQ ID NO: 333983 - DNA, 122 bp, Homo sapiens
ccatcgttccgcactgtgaatctgctccaatacctgcagagacaggtccagctcccactacgagggcccaccgaccaacacggtacaccgagggtgaaaaagccacgaccaggcccacctgg

SEQ ID NO: 333984 - DNA, 122 bp, Homo sapiens
tctttaaggcaacaggaagttcagcactcgcctgagaaaccgaggcagccttggagccggcgatgccacccctagcttaggctgcaagtacccctgaacctaaacccggccacggggctgcg

SEQ ID NO: 333985 - DNA, 122 bp, Homo sapiens
cagcctccggctggtccctggtacctggcaggtacatgttgatcagcaggggctgggaggcgccgctctgtctcatcgccgccggggactgggcggtgggagatgggggggacggggaaggg

SEQ ID NO: 333986 - DNA, 122 bp, Homo sapiens
acggatgggcgcggggctgcaggtgcatctcggggcggatttctttctcagcgctcggagcgcagggcgcccggcgtgtgcgctccctgccggaggcgcggggctggcgcgcagggctcgcc

SEQ ID NO: 333987 - DNA, 122 bp, Homo sapiens
gtatgttagagaatgaaagcgtaaagaattatttcaaaccactttggttttcactgaaaacgatggagttatcttcaactgagataggaattccgaggaaggaactggtagatgaggggatt

SEQ ID NO: 333988 - DNA, 122 bp, Homo sapiens
atttcagggccacacatagatattcatcatagaactgccatgatactcccatgtttggctcgcaggaggaaattttgctttcacctcaaaaactcagtggcttaccaaacctacttcatggg

SEQ ID NO: 333989 - DNA, 122 bp, Homo sapiens
tggtgtgaacttgggcaaattactttagcttgatgcctcagtttttccagctctaaaatgcgaatagtaattgggtgattatgagaactaaatgagttcttacatgtgaagtgcaaagtaaa

SEQ ID NO: 333990 - DNA, 122 bp, Homo sapiens
tggaggaggaagaggagggggaggcggaggagtgtccaggcgtgccacgagaacgcagagcgcagcaatggatataaatacaaatacagcagcaccagcctgtcttcttggctccgggcagg

SEQ ID NO: 333991 - DNA, 122 bp, Homo sapiens
gcaggcgtgcaagggctccgacggcggctccctgcccgggctgccgctttaaatagccctcgcatcacatgaggagacgtggcccacgcccccggctcccgaaataggaagccccaggctag

SEQ ID NO: 333992 - DNA, 122 bp, Homo sapiens
tccgatgtcctcatttactgcaattgtcttcggcgagatctcagagccagggccaggaggcgggggcggggcagaggagggagcaggagggaagtcctttccgctgctccaggtcccagcta

SEQ ID NO: 333993 - DNA, 122 bp, Homo sapiens
caagagggactgtgtcaagggcagtgctacccccagtgggcaggagagccgcacagcccccggagaagcccgcaaggcggccacactgccagagatgagcgcaggtgaggagagtagcagct

SEQ ID NO: 333994 - DNA, 122 bp, Homo sapiens
atccacccacctcggcctcccaaagtgctgggattacaggcctgagtcaccgcgccggcccgtcctttgtcttgacgctgtgaacactcgaccaagtgctgcgtcttatctttgggccgcat

SEQ ID NO: 333995 - DNA, 122 bp, Homo sapiens
tgggtgacccggccgttccctggcagcactggaaacagcctggaaaagagccagcggggacgggaatggcgtggtgactttcacagtattttattgaacgttcagaaccctggatatattcc

SEQ ID NO: 333996 - DNA, 122 bp, Homo sapiens
aaactggaacatcctctggccaagtcagctgatccgcccgcgagctaagtagatgttaggcgccttgctgtgtgccttgtttttttttgttatttttctttttttattttttaaaaagagag

SEQ ID NO: 333997 - DNA, 122 bp, Homo sapiens
tgggcggggcccgggggtcgctgcagtgttagtgctcccgtggaggcgtgagcaggtgggcggggcccgggggtcgctgcagtgttagtgctctccgtggaggcgtgagcaggtgggcgggg

SEQ ID NO: 333998 - DNA, 122 bp, Homo sapiens
gcgcccagcgcgggcacggagcctcccaccgccagcaacctgcggccccggagaaggcagcgagcgcagtgacagcgcctcaccgccaccagctcctggaccaccatggccaagaaccgcag

SEQ ID NO: 333999 - DNA, 122 bp, Homo sapiens
tgtttgcagagttagtcttgtcagggaagaatttatctactatacaattcagaatgagagcgactgcttctgtctaaaagagatgggatttcccccacatgccaggccttgccctcagcatt

SEQ ID NO: 334000 - DNA, 122 bp, Homo sapiens
actccaggccaccaagcccttcccctcactgccccagaagagttttaatctttaggacaacgcaatcagaaccagatgttcccccaaacaggggccgggccaaggcgcgccctacacacagc

SEQ ID NO: 334001 - DNA, 122 bp, Homo sapiens
ttaaacctaaaacaaaaagctcttcaaagttgtctttatccgaatagtccgggatggaaacggacaactggttgaaaagcctgttccaaagaagaaatgagaacttttgcgcactcgccaca

SEQ ID NO: 334002 - DNA, 122 bp, Homo sapiens
caaaaccttagtcatcccactgagattccacactcaaagccaatttctctcacagggcatcgaatgctagttaaagatataaaatcacgcttatcacaattaactcccttgcctttatgatg

SEQ ID NO: 334003 - DNA, 122 bp, Homo sapiens
tgcgccgggcaggcgggacatggaggtggtggacgagacggaggcgctgcagcgcttcttcgaaggtgagagaccgcgggctggcggcggcgaccctctggcgctgggaacccccggctgat

SEQ ID NO: 334004 - DNA, 122 bp, Homo sapiens
ggcggaagtcctggttgaagatggtgtagataacagggttcagtgagctgttgcagtagccgatccagaagaagaactggaagaggccatggggcaccttgcagtgcttcgggcagatggct

SEQ ID NO: 334005 - DNA, 122 bp, Homo sapiens
tctttaggacctttctacacatctcccctgcctgggaccctgccctgaaccctgtgctaccgcaggatcgtcactcagatctcagcctgaatgtcctgtctcagacaggactcccctgactg

SEQ ID NO: 334006 - DNA, 122 bp, Homo sapiens
cgcgcggcttccccactgtgccagcgaagcagaaccccgggaccaagcccctggccagcccgcagactgccaacctcagcacctgctggatcccggggccgcccgctcccgctcaggtccca

SEQ ID NO: 334007 - DNA, 122 bp, Homo sapiens
aacattattttatgaaaagggtagttgttagggggacgttttaaggtttttaactttaggcggacaagtcactacagatcagctgaaattgctttcggtcctgactactcctgtgcggggtt

SEQ ID NO: 334008 - DNA, 122 bp, Homo sapiens
aggggccggcagggggcgcccgagcccgtctctggagcacaaagacccccggcccctgcgcgacccggacgagctcgcattcagccaacgactcctgtgagaaacattccagcaagcactcg

SEQ ID NO: 334009 - DNA, 122 bp, Homo sapiens
atttaaccccccagcctcccacccatagagacaccctgggtctgggtgaaatctggggaccgttacaaagcgacctggatgtcaaccaggcttggaaactgctggtccaggtgccctccagc

SEQ ID NO: 334010 - DNA, 122 bp, Homo sapiens
gatacagattggcatagaagaatgtaaagaatcattaaaggaagcagggcctaggagacacgtgaaacaatgacattatccagagtcagatgaggctgcagtccagggttgaaattatcaca

SEQ ID NO: 334011 - DNA, 122 bp, Homo sapiens
agagacaagcgaccacatggctgcccaaggaggtgcctgctgggacacaggcactaaatacgaggtgttctggaaaatccacgaccccctactccattgagggagacaaataaagagcataa

SEQ ID NO: 334012 - DNA, 122 bp, Homo sapiens
aaacgtctccaaaactaaggcaacagttttaccaaatgtttcgcctgtgtttaatgtgggcgttcatctttatagctctgttatagtagcctctctaagtcttgaaatcaaatggtgaaaag

SEQ ID NO: 334013 - DNA, 122 bp, Homo sapiens
cagccaatagctgggctggctgtgccccagcccacctatgttatagattatacccatgttcggcagttcctgagctcttgtcccatgtcccagaacaaggatacactaacaattgaaggatg

SEQ ID NO: 334014 - DNA, 122 bp, Homo sapiens
cggggcggggcggactgggagaggccaggccaggcccgggtataaaggctgtggagggggcggccgccgcgggcgcagaaaggcgcgccgctagctgctgtctctcctcacctcccgggccg

SEQ ID NO: 334015 - DNA, 122 bp, Homo sapiens
cccagatgattgagtatacacacatgacatcctgactttgttcacaagagtttctaatgtcgatactcttcacagagtcttcaccaagtaatcttcaagaactgagaaactttattaacatc

SEQ ID NO: 334016 - DNA, 122 bp, Homo sapiens
agtccgacctcctgggcttggaacagcttggacaaacaccagagcactcagcctgcaccacgtggggcgggcggcatttgcagtctcacctccgcagtgtgtgccgccagaagcgatgagcg

SEQ ID NO: 334017 - DNA, 122 bp, Homo sapiens
ttctggaggcctttctttttttcccactctccctctttttcccctttctcagctaaaaaacgttggctgaggtcacaacaaacaatggccaagcttgtgtcactgagcagatgcctcccacc

SEQ ID NO: 334018 - DNA, 122 bp, Homo sapiens
gtgatctaagaccgccggaagcgcttcttctcaatcaagctatgcaacaggaagtcattacgatcccgttgtaacctctaaatatgtccccgttctgcacagcatcccgataaccgttttgt

SEQ ID NO: 334019 - DNA, 122 bp, Homo sapiens
caaccccagctaaaaaccagtcagcctctcaggtgcagagagtgggttggggggcagcggcgcagatggaaaataactggctcaggtttcaccccagtgctgaatcctgtccatcagcagtg

SEQ ID NO: 334020 - DNA, 122 bp, Homo sapiens
tgggacctgcgctccggaggcccgcgagcgccgcctggaggctacgcagggcatggggaccgcacacaggctttgtcaactgccgggttccaggcagtgcagagccctgggacctgcgctgg

SEQ ID NO: 334021 - DNA, 122 bp, Homo sapiens
gagagccaaccccggcgctggaactacgcaagtctgcctttgcacaaagccgcagagacgcgcgagtcaggagtgtggctctgcccccataaaacctcgttcatggacgctggaattccagc

SEQ ID NO: 334022 - DNA, 122 bp, Homo sapiens
gggggctgcctcccgagtcctcctagggttctcccatcaggaggcatctgtgcatctacacggggcccgactccggaacctccagccttcccacgtgctcccccatcctaagttggtcagca

SEQ ID NO: 334023 - DNA, 122 bp, Homo sapiens
tcgattcccgccccctcggcagggggcggggcaggaagcagccacatccggttccagattcggctctcagaggcttccggcgccgagaccgagatccccgtcggctcggtgtatcctcgctg

SEQ ID NO: 334024 - DNA, 122 bp, Homo sapiens
catttgttgtgtttcttcagaagagtctctcccctcataaaatactttacttgggcttctcgctaagtcgggactcctcttccatgctgtgtgtcatgatgtaagagcttcatggtgtgact

SEQ ID NO: 334025 - DNA, 122 bp, Homo sapiens
aacccgggctgtgtctttgtcagtttcacctctgtaaccctaaactaatgcagaaaacaacggaggaggctgcggaggggaaagaggagagggagggcgagaaaatggcacgagaggaggtg

SEQ ID NO: 334026 - DNA, 122 bp, Homo sapiens
gtgaccagaaagagattggagcgagagcttcaggaggctgcagcggttcccaccacccctcggaggggaaggcctccaaagacacgccggcgagccgatgaagaggaggagaacgaggccaa

SEQ ID NO: 334027 - DNA, 122 bp, Homo sapiens
gataaacatcttttctctcatcagcctccaggatgagaagatggtgtggtgggtgctgtgcggtgcactggtgcaaagtcccagaggccaagattcagtccaagctctgctatgactgcttg

SEQ ID NO: 334028 - DNA, 122 bp, Homo sapiens
tgatgggcgatcctgcccttgacaacacaatgtcagccttgctcagtgtccagctggttccgtatgtattatcataatgcgctgcctgggtggaccctggctgattttctctcctgatgcaa

SEQ ID NO: 334029 - DNA, 122 bp, Homo sapiens
ttgtgtttggaaaacatcaagagggaagaccacatttgggggactacaggaaccaaaatacggagtttgaatgtttttcctaagcacaatggaacctgtggaagatttttagcaggtgagta

SEQ ID NO: 334030 - DNA, 122 bp, Homo sapiens
gctggtcatggaaagctttctcactccgggcttggctgttgggggccgaccacagctccacggggtccgtagtgagttctgtaaagaccaggcccgctgccaaggccaccaccgggatgaca

SEQ ID NO: 334031 - DNA, 122 bp, Homo sapiens
agactcatgaggacatcaggccgcaggtagacatcatgccttaggtagatacgtaggctccgggtggacattagacccaaggctccaggtagacattagacccaaggctccaggtagacatt

SEQ ID NO: 334032 - DNA, 122 bp, Homo sapiens
ttagcttattttttttaattgctgtaaacaaatcacggcttcatcacttaataacatctccgtggccagtcatatccaaattctttggtttcttcatttacgaaatgtcgcttcaacattaa

SEQ ID NO: 334033 - DNA, 122 bp, Homo sapiens
atgaaaaacccaagaccgggtagcgcagcccctccgcgcacgcgtaacacgaggagacaccgcccacacgccagacgcgctgtgattggccccagctaccctcggaccgagattcctattgg

SEQ ID NO: 334034 - DNA, 122 bp, Homo sapiens
gctggttccttggcttggggcagcagaactccaatccacacgtggccctctccctgtgtgcgtgtctgtgtccaaatttccccttttggataaagacatcggtcaggtggactaggacccac

SEQ ID NO: 334035 - DNA, 122 bp, Homo sapiens
cactgggccacgagtggaggctgcgcccctccaggtacgagaggggcttccaggtagctccgcgcggcctggggccgaggggaaggagatgagggatgggctcgtgcccgcgcagggtggga

SEQ ID NO: 334036 - DNA, 122 bp, Homo sapiens
ttctatctgggcccctaggtgattggattgtggctgcccacagcgagagaggattttccccgctcagtcactcacatgccaatcccttccagaaacaccctcgcaggcacacccagaaataa

SEQ ID NO: 334037 - DNA, 122 bp, Homo sapiens
aaatcaatcagaatgacaatgtgcaaaatgccaggatttttaaaagataaacagatgccccgaggaatggaaacacaacacttgtttttctaggatagtttttcaagcctttttaacacgtt

SEQ ID NO: 334038 - DNA, 122 bp, Homo sapiens
cccgcagtggctcatccgtgagacatgtggctgcacactgagatcctgcagtggctcatccgtgagacatgtggctgcacactgagatcccggtggctcatccatgagacatgtggctgcac

SEQ ID NO: 334039 - DNA, 122 bp, Homo sapiens
aacaaaattaaaattaagaacttttgttcatagaaggaccgtgtgaacagcgagacgcggcgtcccccaggaggtgtggctgctgcatgtgtaactgacagtgtgaagagctcccacaaatc

SEQ ID NO: 334040 - DNA, 122 bp, Homo sapiens
ccgggcgcctggtacaggtagccctgcgggtaggacatggtgggcgcggggcgcggggcccgcgtcacgccgagcagcgggcagggcgcgcggcgccctccatccacgcccggccggggcgc

SEQ ID NO: 334041 - DNA, 122 bp, Homo sapiens
ccacatgctgctcggcctgaaaaggcagtggggagccggaggggaggcagagatcgcgagcgaggcaccagcctgcagccggcccccagcacatcctcagccgcacagacactcggcgaggt

SEQ ID NO: 334042 - DNA, 122 bp, Homo sapiens
gcctcacgggccccaaggatcccaggccccagggcgggtagcccccggcactggccgaaacgaaatgcagggaaaggtccgagtcgcctcccgcctcacttggctagtcgaccccccgcgcc

SEQ ID NO: 334043 - DNA, 122 bp, Homo sapiens
agaaatctcctatgcatctttcctgtaggacagtcatccaacctgttacaatatagacaacgctctcctagagtgacccacgtcaaccatgaaccagtttattctcacagtggattacaatg

SEQ ID NO: 334044 - DNA, 122 bp, Homo sapiens
gggtcctgcgcaaggccccagtgccccggctaaacctttgccgcaggatcccggagccggcgtccttcaaggagcacagagggccccgtagcacgccccttgcccagcgccaccgaccctta

SEQ ID NO: 334045 - DNA, 122 bp, Homo sapiens
gctcacatgagcgaagggacatgaacatgctctgccatctcccaataggacataagtccacgctggagcgctgagcatcagactcaagaaaagcttgcgtggatattgcagacccaccaaca

SEQ ID NO: 334046 - DNA, 122 bp, Homo sapiens
ccaaaattcacgcaaaattcctttgagctgcaaataagtgagtctgcacagcctggcacacgatttatattaggatctgcccatgatgcggatattggtagcaacacactgcagaattacca

SEQ ID NO: 334047 - DNA, 122 bp, Homo sapiens
acctttattaggaaaaactctggatcttcacaccactattttattggctaacgttacaaccgaggttgttttgtggtaggcagatgaaagagtggaggaggtgtggggagagcaggtccctc

SEQ ID NO: 334048 - DNA, 122 bp, Homo sapiens
cccaggactttacccagcacccagagcccaggaggacgctaaaggggtgactcactggagcgacacagcagcacccgtggtgtgggcgtcaggggcgtcaggggcagctgcgggtgggcgcc

SEQ ID NO: 334049 - DNA, 122 bp, Homo sapiens
actgtatataactaaattggttctgtttctctggaaaccctgcctaatacatcttctgtgcgtacttttctttttaaaagatagcaccacttgccctggagttgtggtcagggaaagggcag

SEQ ID NO: 334050 - DNA, 122 bp, Homo sapiens
tttcaaggtatgactccatttgtcttcatatcccgcactgagtggttaaaaagaaaacagcgatcaacatgcactaaaatggatagctctccaaggcacaacgttgaatgaaaactacaact

SEQ ID NO: 334051 - DNA, 122 bp, Homo sapiens
ttcttcttttgtctgaaagctagttgtttaaagagcatcactgtactcctagtttctttccgaatccctgcaaatctggatttgtaaaattttcttctattggttgctgtgccaagagccaa

SEQ ID NO: 334052 - DNA, 122 bp, Homo sapiens
tgactccatcccccatcagacagtgactccattaccccattagacagtgactccatcccccgtcagacagtgactccatcccccgtcagacagtgactccatcccccgtcaggcagtgactc

SEQ ID NO: 334053 - DNA, 122 bp, Homo sapiens
cgtagttccacccctcagccccagtgtttgttatttttcgggttcagcttgcttttgccccgtctccgtcgacgcaatcgccaccagtcaatggggtggtcgttttgagggacaagtggtaa

SEQ ID NO: 334054 - DNA, 122 bp, Homo sapiens
tggtaagaggggatttagcgtcccaattgctgcaaattgacacagttgcggacgtgcaagcgcagaagaaatttgtccttcctcaccccacagaacagaaacaactgtacacttctgctttt

SEQ ID NO: 334055 - DNA, 122 bp, Homo sapiens
aacagcgggacaggaagagctggaggaggaggccacaggaggcgggaggaggaggcccaacgttctttaactctttgtagtccagtcacaagcacaggagtcccagatctggctgccttgtg

SEQ ID NO: 334056 - DNA, 122 bp, Homo sapiens
attatcagaagctcataatttcccccctgtagacttcgtggtaggactttggcatgtctacggctcaggtggtggcggttacttcgtggtaagacttcggcgtgtctatggctcaggtggtg

SEQ ID NO: 334057 - DNA, 122 bp, Homo sapiens
ttctctcagtggtagtaatgaagaaaatcctaatcatgagattcactaaatagttgccagcgtggtaagccaagttctcggcggcatatgctgttaaacactgttagtgggctgcagtcctt

SEQ ID NO: 334058 - DNA, 122 bp, Homo sapiens
tacctataaaatgcagtaagcatgtgttacagaaagaggttctggtgggagagaaaggtgcgtgtgagacaggagaattgtcttaagcatataaaacatgtatgattccagaattttagtat

SEQ ID NO: 334059 - DNA, 122 bp, Homo sapiens
ccagggcaggctgctggaagacccgggcctttccacactttgagttcagttgagccccgacgccgtgtgcctcaaccgtaacctcaaaccgggcctggtttcgctgggcctccaggctccca

SEQ ID NO: 334060 - DNA, 122 bp, Homo sapiens
gtccagggtatcctgacctttctcatgaagcttctaccgcgctctgatgctggcagtcaccgccaaaaagtgaaactactaatactttgcagttgacgttaaaaacaacctggtaaagtaga

SEQ ID NO: 334061 - DNA, 122 bp, Homo sapiens
cccaaattcaacataagcgaggtttgcgggctgtcagcaaggtacagacctacttcaaatcggggcgcagagcgttgggggtgggggaaggcgcaagctccccggccaatcagacacgagca

SEQ ID NO: 334062 - DNA, 122 bp, Homo sapiens
gaacagctcaagcctctgcactcacctccgcactctgattgcactttcttttttttgagacggagtcttgctctgtcacccaggctggagtgcaatggcgcaatctgcactcactgcaacct

SEQ ID NO: 334063 - DNA, 122 bp, Homo sapiens
ctgggaacagaaccttcccggactgtgcacttttaaccctgcaggttctcagctgtctgccgtcagaaggaaagcattcacactccagttcccaggagactgcagccaggacgcttgggttt

SEQ ID NO: 334064 - DNA, 122 bp, Homo sapiens
gtgagaacactgttttggctgcgtcccgggccatatgcagcgtatggtggccaatgaaaccgggcctggctcattctgttgcttgtcttggcagtcggttccgtggcttgtattaccagctc

SEQ ID NO: 334065 - DNA, 122 bp, Homo sapiens
tcttgaacccaaccacatgacagctgctgggaatttcccccagaggagagtgttgtgacacgagcaggcagagcagctctgatccaagactttgctcctggcatccctgaataccctgacta

SEQ ID NO: 334066 - DNA, 122 bp, Homo sapiens
gcagtggtgcggtcctcaggcttttctgcctgtctttcccccttccttctcacctgacagcgagggagagggaagcctcttagggctggaagccaccacgctggccctctccttccccgaac

SEQ ID NO: 334067 - DNA, 122 bp, Homo sapiens
ttcttctcccgtccttgaaaggtacaagttgcttaaccaagaagaaggtgagtactacaacgtacccattccggaaggggacgaggaaggaaacatggaactcaggcagaaattcgaggtga

SEQ ID NO: 334068 - DNA, 122 bp, Homo sapiens
gtctccccaatgctgagcccccaaggagcgttccataaatgttaagtggctggccgcggacgaagaggctcagaccgcgcgagttcttatcattactaaaattccctctaacgggaaaaacc

SEQ ID NO: 334069 - DNA, 122 bp, Homo sapiens
tgctgatcttaacaattttgaagaatactggtcatgcactctgcagaatgtccctcaattcgggtttgtctgatttttttttcttataattagactgggttatgagatttggaaggaaagta

SEQ ID NO: 334070 - DNA, 122 bp, Homo sapiens
aatctcctctccttgagcagaagagggaagggagcctgctctgtaggtgaacagctcctccgcagaggcatcctgttttcttagtgcaatcactaattcgcattgcaaaatgctttattaca

SEQ ID NO: 334071 - DNA, 122 bp, Homo sapiens
ctgggcgggccgaggccacaccctgaaactacctgcgtgggccgggccggagtgtgagagcggagctgcagccggagaaagaggaagagggagagagagcgcgccagggcgagggcaccgcc

SEQ ID NO: 334072 - DNA, 122 bp, Homo sapiens
atctagttccagtctccagaaattagcatggcaatttcttcctgcaacatgctgttttcacgcaagagatcttcttctttcttatgactaagagaaagctaagtaaacaaagggaactttta

SEQ ID NO: 334073 - DNA, 122 bp, Homo sapiens
ttccggttcggctccgagcagctgccggcgcggcggtgacggcggccgggacgatgcctgcgcgcagtcgccaccgcccccgcctccactccggctccccgccccgggctccgcccccgccg

SEQ ID NO: 334074 - DNA, 122 bp, Homo sapiens
gaccttcacggtgagtgttacagcttttaaagtggcgcgtctggagttgctcatttctcacggtgggttacataatctacactggcctaagaagtgaagttgcagacctttgcagtgcgtgt

SEQ ID NO: 334075 - DNA, 122 bp, Homo sapiens
cttcagtctgacagcccgtgtggaggtgaatccttcccactggaagtggcatcctttccccgccaaacctccatgtgactgagcctaggagacacctagattgcagacttgcaaaagactga

SEQ ID NO: 334076 - DNA, 122 bp, Homo sapiens
tggaagtcagcttccaggagcacaaaacagatcttttcccaaataggtacaggctgccctcgaggaatagctgtaggacacaggaatataagctattctgtcattttgacacctctgtcatt

SEQ ID NO: 334077 - DNA, 122 bp, Homo sapiens
cgccttctctggaaggctccctcatcctctgtcgtagtccagggctccctcctagacctgcggccccggcactgcggccattccttggtgccccgcccgccctccaccaccgagcacgtcct

SEQ ID NO: 334078 - DNA, 122 bp, Homo sapiens
ttcacatcttcatagtgcgcctttgtgttttcctgggtatctaaccattgcacgtgtgcccgggacttcagcgataagtgtttcggtgttcctgcgtgcggatttgtgctctccggggaggt

SEQ ID NO: 334079 - DNA, 122 bp, Homo sapiens
cgcccctttggcatcgtttgaatgagggtctgcgtgggaggaaccccgcgccgggagacgcgcgctcaggccccgagtcgccggggtttcgaggttccacaagccccgccccgatggagcgc

SEQ ID NO: 334080 - DNA, 122 bp, Homo sapiens
gccactgccgccacaggtgcctcacagtgccctctgtcctcgctctgggaatcaaaaccccggttgggaactgaggcttccgaactgcttccaaccctggacacgaaggcccccaccggccg

SEQ ID NO: 334081 - DNA, 122 bp, Homo sapiens
ttataagcagacatttccttcccggagcatcggactttgggacttgcagggtgagggctgcgcctttggctgggggtctgggctctcaggagtcctctactgctcgatttttagatttttat

SEQ ID NO: 334082 - DNA, 122 bp, Homo sapiens
tcacagcaagtcggttcccaggtagaagttttcaggaatgaggcagggaagtaaggatttcgtctagggttctctctaaagactgagatcttctggtgcaaaatgcgaagtcattctctgag

SEQ ID NO: 334083 - DNA, 122 bp, Homo sapiens
agtccagtgtgacattttggggattgagttaggtgaaagctagtgtttgggaagatggctcgggaaactgcttacactagagggaatcttgagagcgttctttgaaaaggaatcagaattta

SEQ ID NO: 334084 - DNA, 122 bp, Homo sapiens
tggccgggcacgccacgcccaccagacacagggcagggagggggaccaccttcagaggggcgcagctcggaaaaggtccctctcccagggagccattgcaggaggcacctcacaagatgagg

SEQ ID NO: 334085 - DNA, 122 bp, Homo sapiens
acctttcccgcgggattcggcaagcgcggccgcggagacccgggggtggaggacgtctttcgccctcagggcagcccggatgacagctaatgcgcctgggcaaggcgttctcaactgcgatt

SEQ ID NO: 334086 - DNA, 122 bp, Homo sapiens
tttccctgatttaaacccaggcagcctggagtgcagctcatactccatacctgggatttccgcctcgccgctctccgactgcttccagacatgcaggggccctgggtgctgctcctgctggg

SEQ ID NO: 334087 - DNA, 122 bp, Homo sapiens
tggtacaagggttgggagacagggccatggggagaggagccgccgctgccgctgctgcctcggggacgctgcctccccgtgggcccagtccctgccttatacccaggtccagggagggcggg

SEQ ID NO: 334088 - DNA, 122 bp, Homo sapiens
gggccgggctagcgggctactgggctgcggagaccagagcccggctccactgaagaaacccgccggctgctggggcagggcggcgaaaggtcagtcggccgagaggagtccgtggagccacc

SEQ ID NO: 334089 - DNA, 122 bp, Homo sapiens
gggagttgtagttcatcaagcggaccgaggaggcgaggctgcgctgagcatcctgggaatcgtagtgctcgctacacggtgccctctgcgcaggcgcacaccgagagccacttccggaacaa

SEQ ID NO: 334090 - DNA, 122 bp, Homo sapiens
gtggtgccagcccaggagccaagcacagccaggagatgaaacccatccctgtggtctgcacgtccatgccagggccgagcccccagctgggatgccctgggagggtgcagggtgggctctgg

SEQ ID NO: 334091 - DNA, 122 bp, Homo sapiens
ctggcttccgagggtccccgccctccaccggaggcctgttaccacggcaaccagtgagggcggaagtggctcagaagaccggttctccctaatcaggtgactctcccgcctcctgcacgtga

SEQ ID NO: 334092 - DNA, 122 bp, Homo sapiens
cccgaatttcctggagctccagagaccccacgtcaagaattcctagtgtatataaaagcccgtttgagctctaacatccatgattaacagtctctgggttgggtaactctgttggcttaaat

SEQ ID NO: 334093 - DNA, 122 bp, Homo sapiens
gcccctcgagccggatgcagaggtagcagcagctgaagttgatgtcggcacagttctcctcgaggaaggcggcctccaggcggaaggcgccctgcagctgcccctgcggcgtccgtgacgcc

SEQ ID NO: 334094 - DNA, 122 bp, Homo sapiens
atgagctgtaacactcactgcgaaggtctgcagcttcactcctgagcccagttgagaccacgaggccaccgggaggaatgaacaactccagacacgctgccttaagagctgtaacactcacc

SEQ ID NO: 334095 - DNA, 122 bp, Homo sapiens
gtgttttggaggatgggcattagtaacctttctgtagggctgcatcaccagccagtgccccgagctcagctgctggcaccaggtactgctgagcgccctgagaggcagcaagccagctgctt

SEQ ID NO: 334096 - DNA, 122 bp, Homo sapiens
tccggttcagtttaatgatgtcgtccagagacatgtccattttgtcggccatggcgggcgcggaatcgggcatcggctcgagcccgcgcgtcagcacgccggcacgtcacttccggcgccgc

SEQ ID NO: 334097 - DNA, 122 bp, Homo sapiens
ccagcaggccggggtcactgcagtccccacgtcgaagcggaaaaggtctgctcagctcaccgcaccccacttcttccagacccgtccgtcttcacagcaacgcgccgggtctcaccacggcg

SEQ ID NO: 334098 - DNA, 122 bp, Homo sapiens
gaaaagaagtgcaaacactttaatcttccacctgcagtgactagctttgagaccttgagccgacgcttaaccccagagccggtttcctcatcgctcacgtggggctaatatattactacctt

SEQ ID NO: 334099 - DNA, 122 bp, Homo sapiens
cgcgcaggcctccctgtgccagccggctgtcgacccaggttaggaagcccgaggtcggggcgttaccccaagggccctcccgcttcccctccgagggcagagaggcgtccgcgcccggacgc

SEQ ID NO: 334100 - DNA, 122 bp, Homo sapiens
ggcgcccccgcccggcgccgctgcgtcgcgcccccagcccgacccccggcgacactgccccggcgcgccccatccccgcagccccgcagaagagccagacctgcctttcagggcggagccct

SEQ ID NO: 334101 - DNA, 122 bp, Homo sapiens
caaaagaagcccctttccagaactatccacaccccacacacaattaaagcatcctccacccgagcaccctgctcactcaccaagggtccagggcgccctgtgtatcccatggggccaggggg

SEQ ID NO: 334102 - DNA, 122 bp, Homo sapiens
aaacgcttccaactgcctcccagcacacaaccaagggagaaaactattctgtcaaagagacggtgccaaaaggcaaaaacaaaggtaaggatgatcgctggggaaagaagctgaaaaggaaa

SEQ ID NO: 334103 - DNA, 122 bp, Homo sapiens
gggcgagatgccggaggggctgggggacgggcctctggtggcctgtgccagcaacggtcacgcacccgggagcagcgggcacctgtcgggcgctgactcggagagccaggaggagaacacgc

SEQ ID NO: 334104 - DNA, 122 bp, Homo sapiens
gggcctcgggtttggcggcccggaggagcgggctgcggattacctgcagcagcggggagccgccgagctcctccccgcccgcccccacaccccacccccaccgctgcactaaccccggctca

SEQ ID NO: 334105 - DNA, 122 bp, Homo sapiens
aataataaaaggtaaaaaacgtttcacagcgcgattttctcatgcctttacctctgatgacgagggggacgggcacgtggagagggtacgccaagacacaaagtccacgtcaggactgcgta

SEQ ID NO: 334106 - DNA, 122 bp, Homo sapiens
caactgcaagtggataatagatctgggtaagggaatggagagagatgacaacagaaatatcgacaggccagattctgaaaggctataggttatatctaggaatttacatttcatcctgaaat

SEQ ID NO: 334107 - DNA, 122 bp, Homo sapiens
taggagcgggtggggtcgggaggagctcggggaccagaaaacgctctgtttgggtgggtgcgtgcgtgggcatagtggtttggaaggagcgtgatgaggggagaagggccggggcggggctg

SEQ ID NO: 334108 - DNA, 122 bp, Homo sapiens
accttgtgatctgcccacctcagcctcccaaagtgctgggattacaggcatgagccaccacgctggccaagtatatgcttataaaaaaaaagtaaaatagtatgaagacatatcatgtagct

SEQ ID NO: 334109 - DNA, 122 bp, Homo sapiens
ttgagccttaccccttactggaggctgcaggaccctctacacacagacagctgtccagcacggaaggtgggctgaggcccagggtgaacatgccagctaatgggacatcaccccagagattc

SEQ ID NO: 334110 - DNA, 122 bp, Homo sapiens
agtagccttggcaagtgctctcattttcttcctttttaggtttccccactgcgagcccttcgagaacaatgtcatgttgatcgatggcagtgactcacaccagatctttccatgcctcctct

SEQ ID NO: 334111 - DNA, 122 bp, Homo sapiens
aataggttttgtacagagtccacattaaaatagatgtctgataaatatggtataggtactcggaaagaaatactctccctgaacttcactgatgaaaaaggtagatgtttttctgtctctgg

SEQ ID NO: 334112 - DNA, 122 bp, Homo sapiens
ccgtcacgtgaccgcccaccgtcggcccggcgctcccctccgcccgaagctagcaagcggcgcggccaatgagaaaggcgcatgcctggcccccgccggcctgcagtctagccgtagtgcgc

SEQ ID NO: 334113 - DNA, 122 bp, Homo sapiens
gtgcaagaatcgcaggtgccgggcacgagcaggggccaaggctcaggcccctcccggctgcgcttgctcccgcccacccctgaacctggaggggcccaggataggggctggggagctggctg

SEQ ID NO: 334114 - DNA, 122 bp, Homo sapiens
gctctcctgacgcgccgggcgggaccctgaggagccagctggcgcaggctatgggctgggcggcggttgagacagcggcggtatcgggaggggtaggtgagggtcgcgaggctgcgtgagca

SEQ ID NO: 334115 - DNA, 122 bp, Homo sapiens
ttccctcccagtgggtggtgaaagttgttctttagctcattatctcccccttcagccttccgataaaggaagatgatgaagttaaaagaagcagggaggctcagcccctctgtagaaaaggt

SEQ ID NO: 334116 - DNA, 122 bp, Homo sapiens
gagggggcctagcagaagcaacggcgtttccaagcttggggcaacagttttgtgttccagcggatatagtgcacagatttaaaagcctgtggatcctggaggagctgctcggcgagacggct

SEQ ID NO: 334117 - DNA, 122 bp, Homo sapiens
cattgctgaccaagacttcctggaaagctaattggccctaacaaaagccagatactgtcccggggcaccaccccactttcatgccctacaatcaccctccacttcaacaccttaactgctga

SEQ ID NO: 334118 - DNA, 122 bp, Homo sapiens
ccacttggttgattggctgacatggctctgaaaggcactgggagttgctgtatcaccacacgcagcctggagagctgtgccgtcaaagtggtggggtggcctctgccagctctccctgtgcc

SEQ ID NO: 334119 - DNA, 122 bp, Homo sapiens
ttgctccaggggagccccagagttggtggctggctaacccaaggccccagcggcagcctccgcccggccagctcgccatggcacggggtccacagaccctggtgcaggtgtgggtgggcggc

SEQ ID NO: 334120 - DNA, 122 bp, Homo sapiens
gcccttcctgccctgtagtaatgactgaggagcctcccagctgagctttatcacagggcccggaaatgactccacctgagggctggagctttcttcacttaaagcagtatagcttcttttta

SEQ ID NO: 334121 - DNA, 122 bp, Homo sapiens
cagctcccactcactctgaagataaatttcagagtcctccatcaaacttaaagaacttctcgccaattccctccggtccacacgaccccagctgtctctctccactcatccctgagatctta

SEQ ID NO: 334122 - DNA, 122 bp, Homo sapiens
taagaagtccctgccaggcgagctgtcagagccccggcactgggagtggtggtcaacttgcgggttggtaaaaagagtttaccgacaataggtttgaaaaaggaaagtttggccgggcatag

SEQ ID NO: 334123 - DNA, 122 bp, Homo sapiens
agtggagtctggggggtgacgtccccaaactgggctgccactctgtgacagccaaagccacgcagcctcgcaggcagaagctggggtgtggaggaccacgatcctgaagaaccccgtcctct

SEQ ID NO: 334124 - DNA, 122 bp, Homo sapiens
ctccttgtgagtcacctgggacaagtctgatgaagaagggcgagggcacacactacacttcgcaagggtagcgatggccgtttcgaggagcatcaatgccagagaacactagcatgatctga

SEQ ID NO: 334125 - DNA, 122 bp, Homo sapiens
gcgcaggtggcgtcagcgctgccccacctccaggaaggaacctgggctgcgtgtggctggcggtctcctagcgactagagcggcagggatctggaacctcagaagctggagaggtggcacaa

SEQ ID NO: 334126 - DNA, 122 bp, Homo sapiens
gcagtccttagtggtaactccagtctgcttctcagcagttcctctcattcctgtaatcgccgtctgcccagcagaaccccgactctgagcccatgctttgaccccctctgcggccactatac

SEQ ID NO: 334127 - DNA, 122 bp, Homo sapiens
acgggagggggcgcgtcgcgcttgcgcaggtcccggggccggagggaggcggaggcgtagcggtccaactgctgaagtccccatgtgacagtgagcggggtccccgctccaggagacgctcg

SEQ ID NO: 334128 - DNA, 122 bp, Homo sapiens
ctgggggagccacccgggtcctcacctggagatgtggctctctgtggcgacgtgccctgacgtgggaacacatgttctaactggagatgactttaactgcctgaagtcgaaaaaggttgtgt

SEQ ID NO: 334129 - DNA, 122 bp, Homo sapiens
cttgagcgtatttattttagcactttctcaacctcgcttttatccaacttatcaaaacaacgtatttcattaacactttaggatgagccatacaaaagtgttacctatgagagagttgcttt

SEQ ID NO: 334130 - DNA, 122 bp, Homo sapiens
gtagtggcagtaacctcaggcttcgaaagtcagagatgcctgcagatccataccatgtcacgatctgtgaaatatggggagaagaaagctctagctgaatggatttgtgtgtcaggagagaa

SEQ ID NO: 334131 - DNA, 122 bp, Homo sapiens
aagctcatattatatacaaatcctcggccctcagcattctaaagcaagagcacgtcattacgtgcatctttggcttttgtttgccgtatacatgagatatttttccacttcaagtcatctac

SEQ ID NO: 334132 - DNA, 122 bp, Homo sapiens
ctctgacttttggccatatgtttgactcaacagtttaaaccccctcagcagtctttctgtcgttgccctccacactgcgagactctggagggcgatctggaggtctggaagataaccgattc

SEQ ID NO: 334133 - DNA, 122 bp, Homo sapiens
caggtgttccaggtgagcaagtcagtttcggtttccttctgaaagacctctttctgaattcgctgcatgctcctcgtgtgtttgttttctgctgcagtggggtcatttacgctggccagtcc

SEQ ID NO: 334134 - DNA, 122 bp, Homo sapiens
agccgctgcaggccccactcctgcctcccaggggactgtccaggcccagctctcacctcacggcgacttcccagggcccatttcctgcctgcctcccggcagccctgacaggctgagctcct

SEQ ID NO: 334135 - DNA, 122 bp, Homo sapiens
gagcctggcgccggcggggcccaggcctgtgtgatgtgcagcctgggcagccccgggtgccgcacccgcgccggaggggcggggaagggcagagccgtccaggaactctacagcgccgccgc

SEQ ID NO: 334136 - DNA, 122 bp, Homo sapiens
gggcttttcatgatcttccctccagtaggagaccacaattgagtctaaagtcagatccaccgttgtctatgggtaggcagggttgattcaaacttaatccttgtttgtattcttttggatta

SEQ ID NO: 334137 - DNA, 122 bp, Homo sapiens
cccctccgttctggccgcgggcagcagaggagctcggggcgggcaaagctcgaggggacacggggcgagcccagaccctgcctgggagccctccccgccggagaccaaagggcagaaacgca

SEQ ID NO: 334138 - DNA, 122 bp, Homo sapiens
cggaggcgcgcgcgaccggcggctctttggcgcggattagggggtctcggcgaggtgaggcgccaggcagcgctgggcgggcgggcgggtggcggagcgcgagcccctctagcgggactagg

SEQ ID NO: 334139 - DNA, 122 bp, Homo sapiens
atctgcgccgcccggtgcctccgcccatggaacgcgcggagtggcgccgccgcggctacgcgccgctgctctatctgcagtcacactgcgacgtgccagcggaccgggaccgctacgtgcgc

SEQ ID NO: 334140 - DNA, 122 bp, Homo sapiens
cggctttggataataaaatgctatttattatgagcatgattgccgggagtctaaatgactcgaaagatatgactgaaaagctaaggtgcatgtggtactgcatacatcacatctcaactcac

SEQ ID NO: 334141 - DNA, 122 bp, Homo sapiens
ccccaaacatcctgggttaggtatcagtacagggggaggaaatgttcccagaagcctcctcgccccacccctgccgccccccacgctgctgtgggagcctcagctccgagggcggctacgag

SEQ ID NO: 334142 - DNA, 122 bp, Homo sapiens
ttcactcaggtcccaggtgagactccacgcggagaaccacgcgccccgcgccgctgcgggcgcacacatgcacccaacagacggtgaagactctccacctggcaagaaatcctcctctcctc

SEQ ID NO: 334143 - DNA, 122 bp, Homo sapiens
tgagctggatgcacccaggactcgctgtccagtgtccagacaggctccacagcccccgggcgtcactcctgctggctgccctcactgccaggcactcacgtggtgtcactcctgctggccac

SEQ ID NO: 334144 - DNA, 122 bp, Homo sapiens
gcaccccagtcctctgcctgcaccagctctcctgggggggagggggaaggggggagcccacgcaggtctctgaaccacgcctcaggctgcagcagccgcattactcatactcagcggacaaa

SEQ ID NO: 334145 - DNA, 122 bp, Homo sapiens
tccaccatctctagattgtttcttccaaccagaatttacgagaggcgttgctctctgcctcgttaaggttactaaaacatcctgctgggaagctgctcttgttggcagccctgggttatgtc

SEQ ID NO: 334146 - DNA, 122 bp, Homo sapiens
gggctcaattgtgaacatactaatagtgaggaattggaaaaccaagtactggtgagggttcggctgctgactggcgaaatcacttgctgaatgtgaggcccaacatcctctaaaaataataa

SEQ ID NO: 334147 - DNA, 122 bp, Homo sapiens
ccctgccaatgtaggacccaagacttttactctgtgacattccatttgtccttggctgtacggaataaaagccctttgacgatggcggcctccaatatcataatccgtatgggtgcggccat

SEQ ID NO: 334148 - DNA, 122 bp, Homo sapiens
gtatagttgaccacacagaaacaggcacttaggtctccgtccctctagccatttctcaaccgtctcgaccggcgagttttcgttgaggcgagggagcgctcgctcccacaggttcgagggct

SEQ ID NO: 334149 - DNA, 122 bp, Homo sapiens
accggcggaccccctgcgccaggcgaaccggctcccgatcagggtcctgaagatgctgagcgctcacaccggtcacctcctgcacccggagtacctgcagccgctgtcctccactcccgtca

SEQ ID NO: 334150 - DNA, 122 bp, Homo sapiens
gtatccctggggttgcagctctctgtaagtttgctgtggctgaaccaggcaaggcataggcggatttctacagaaattatgattccacgaaagattttgagaagaggaaggctggtatcttt

SEQ ID NO: 334151 - DNA, 122 bp, Homo sapiens
actacccagctgtaagcagagaggtgtagatccaagtctcctgccggcagggtgatttagcgcagttgtcaataatctgtacaacacgtaacaataaagttattgatgttgaggaaaagact

SEQ ID NO: 334152 - DNA, 122 bp, Homo sapiens
acccaccctagtttgtctatctgcaaaatgggtccagtgtaaatacctaaatttcagagccgttataaggataaattagttaatacgtggaaatcacttaacacattgcctggcatcaaatt

SEQ ID NO: 334153 - DNA, 122 bp, Homo sapiens
agcaggcgggcgcgcggcaccggctttccccttgtcctcaggagacgctgcctgcaattccgaaattaagtctccaccaaacacatctgtggtttttaaatatagcagggaactattaccca

SEQ ID NO: 334154 - DNA, 122 bp, Homo sapiens
cgctcctcttttttggcactcggcatttccggctgagtttgcctttcactaattccccagcggtgacagtgctgggagttgaatcctccgcagggtgacacacactgcacgacaataataca

SEQ ID NO: 334155 - DNA, 122 bp, Homo sapiens
ccttgctcaagtttggacttgacttttgaattaagaaccttgaactctcaggaaagttcccggagtggtgaatttgcaaagtggatgacaggagagagatggacagccagaatatccagttg

SEQ ID NO: 334156 - DNA, 122 bp, Homo sapiens
cagatccaggtgtccaggcgccggtccttgggggtgaggcggccgctgcaggagcacgtgcgatttatggactttggtgagcgccaggccacgagccacagcttacctgccccctcctctgc

SEQ ID NO: 334157 - DNA, 122 bp, Homo sapiens
ctgtggcctgtggaggggccaacaggtagagaagcaaatacacacagtgcgtgtttgcggcgggggcttccatagacgtgcagacggcaggtcctggggtgcttcgtgggctcagggttcac

SEQ ID NO: 334158 - DNA, 122 bp, Homo sapiens
aaggccaggacggaagagacagccatggtgaacacaacagcaactgtggtctggtagaggcggcaggtggcagctgtgggacaaccaaggcaaggcaagggacagagggcacagagggtcag

SEQ ID NO: 334159 - DNA, 122 bp, Homo sapiens
tacgctaggggacggtgctttctctgtcccagttgcgtgcggcggggctggggcccaggccgccccaaatctcccccactagagtgaccaccgcacagttgtccccgctgggcgcgctcctc

SEQ ID NO: 334160 - DNA, 122 bp, Homo sapiens
ctccagctgtgaaacactttagaagatatatcattaccaacacggttctccagcctggtacgcagagtaaggaatgcataacttggatctaatgataagtgaataccagaaaaacccaaatt

SEQ ID NO: 334161 - DNA, 122 bp, Homo sapiens
gtatctggccaatggctctcgctacagcttcctgagggctggctggttggctcccatgtccgtccgtcaggcgcacgcggcggagcggcggcggcggcggcggcgttgggggcggtagctgg

SEQ ID NO: 334162 - DNA, 122 bp, Homo sapiens
ggggacacagagccacggatcccaggacataactgtctaaggcctcctaagccagggcgacggcccagggaagaatctctcacatggttcccagcggaattagggcatgctcgagccccatg

SEQ ID NO: 334163 - DNA, 122 bp, Homo sapiens
cgaaagccggaggggcctgtgttttcctgcggggttggggggcggggggtgcccgccccgcgccgccccgcccagccccagcccgctcactcccggccaatccttccgtatctcaatgcgag

SEQ ID NO: 334164 - DNA, 122 bp, Homo sapiens
cgggcttctgggaggcgacggccggcaccgccaggacctgtcgccgcgggccttggggctcgggctcgcagagcccccggaagccccaaaatgaggaacagagggaaacttttctcctgttc

SEQ ID NO: 334165 - DNA, 122 bp, Homo sapiens
cgcggcccgcctgcagctgaaacagcagctgcgcgcccagcgccgccagcacggccgccgcgatgcccagcagggtcattgcagccagcacccggccgccgtaagaacgggccatggcgggg

SEQ ID NO: 334166 - DNA, 122 bp, Homo sapiens
gcggggtcagggcggagctcaggttgactctgcagcagagaactacaattcccatggggccgcgcggcagaaagaaaggggcgggacgggagggggcgcgtcgcgcttgcgcaggtcccggg

SEQ ID NO: 334167 - DNA, 122 bp, Homo sapiens
tagaagtctatcataggattgttataagggttaaataagacattgcttatgaaccttatacgtagtggcttgctattattcttgtattaacaaggttgtcctggcatttcttcctactgtta

SEQ ID NO: 334168 - DNA, 122 bp, Homo sapiens
aaaacgttgcccagtgacttcagtgagtgccactgacccgggcgcctccgccccggcgtccggcagcagcaccgattgcgcaggaggcaccttgcaaacaacctttcctgatccgcgctgca

SEQ ID NO: 334169 - DNA, 122 bp, Homo sapiens
ccacccctctgggtggtcccctggaaagtatccaaaatgcataacaaatgaaaccaaggacggggtccagttcaaccccttagtgagagggaagactggagacagacaatcccccttgctgg

SEQ ID NO: 334170 - DNA, 122 bp, Homo sapiens
atagtattctgggttggaaaaggaatctggcaatggatgtgctcactagaagcacaggctcgagaatggttattagggctatatttccttgagccagcagtattgcataaaagaatattcat

SEQ ID NO: 334171 - DNA, 122 bp, Homo sapiens
gggaacaaaggcacgagtgagaggcgggagggtcccgccgccaatctcagcagacagccccgaagagcagttcagcagatgccctggaaagttaatccttggtagaagcctgggcagagctt

SEQ ID NO: 334172 - DNA, 122 bp, Homo sapiens
cctctcgttgcagccagaatagggtcgcgccacgctctaacgttgagcccaggcccttcgcggcaagaccctgctccgggcccactcggcctccgtctgtgtttgttccctggccttcgggc

SEQ ID NO: 334173 - DNA, 122 bp, Homo sapiens
gggtgtgcgtgtgcgtgttcgggttcggttctgtgtgtgcaccgcgggcctgctcagagtcgggaccaccgggctgcgtgtgggccgccaggtcaggccctcgcccaggatgggccctaagc

SEQ ID NO: 334174 - DNA, 122 bp, Homo sapiens
ttctgaaagagttacaaaatcagcacttattatcaaagggccgttgggagcaaggcatttcggcgtatctggaaatgtgtggcgatctgtaaacgctcctgaggagagctggaatcccaagt

SEQ ID NO: 334175 - DNA, 122 bp, Homo sapiens
gttgagagttgtgtaccgttcgtgtacatgtttctttgccactttgccccagggtgaagccgaatttgcccgcattatgaccctggtagatcccaacgggcaaggcaccgtcaccttccaat

SEQ ID NO: 334176 - DNA, 122 bp, Homo sapiens
taaaataacgacaatcataataacgataaaataatgaaatgttaaataaatcactatcaacgatgaaaagaagtttcaatattttactacttggaaatgggcactttaccgttttagtgaag

SEQ ID NO: 334177 - DNA, 122 bp, Homo sapiens
tgtacttggccatggcatgtctttgtcatggagcatccattaacacctgaaagcccagggcgtgggaaaaaacacctaagacgagggttgttgtgaggatcaaatggaagaaggtgagcttt

SEQ ID NO: 334178 - DNA, 122 bp, Homo sapiens
ggccctgaggtggcaaaactgctcaaagcgggaccttctgagccagcctcccggctcgagcggcaccaagcccaggtgcctcctagcggacagcagggttaacaggtgggcgccgatgctga

SEQ ID NO: 334179 - DNA, 122 bp, Homo sapiens
ggttcatctcactagggagtgccagagagtgggctcaggtcagtgggtgcgcgcactgtgcgcgagccgaagcagggcgaggcattgcctcacttgggaagcgcaaggggtcagggagttcc

SEQ ID NO: 334180 - DNA, 122 bp, Homo sapiens
agcgccaggcgggaggcgggcctaacggaggctctgtgggcagggagcaggctaccggggcgcggggggccggggccgctcgctcccgccgggacccgcccgggccacctcaggcgatggag

SEQ ID NO: 334181 - DNA, 122 bp, Homo sapiens
agttgaatgtaaaggattctgacacgttagcatctacaacaaaacgcattgaaattcccacgtcgtattgccaggaaacaaagaaaacatgccagccccatccaaaaaaagtacacagaact

SEQ ID NO: 334182 - DNA, 122 bp, Homo sapiens
cagaaaaacaatcctgggaatatgacaaaacaaggtttttaacactccctcaaagcatcacgctagttcatcagtaatggatccaaaacaagaagaaatacccaagaaacacactgtagtca

SEQ ID NO: 334183 - DNA, 122 bp, Homo sapiens
ggaggaccgcaggacctctttctttcttgccacttgggatgatacaaccaggactccatgcgataaccccatgtggtttggttgtgacttcagtattgagaaacctcaacaaactgttaagg

SEQ ID NO: 334184 - DNA, 122 bp, Homo sapiens
gacccacccctgcagctcagccacgcctcctagggaggtgggcagccttgcaggagcccgcgcgaggctgcagtaccgccctccgccacatgagggcagcacggcctacccgtgcagcagcg

SEQ ID NO: 334185 - DNA, 122 bp, Homo sapiens
ttgaaatcagactttggagccacaaagaaccattccaattctgggtcgtccgcttacacacggtgaacggagcacatttcttctctgagccttggttcctttcctgtaaatggagtataacc

SEQ ID NO: 334186 - DNA, 122 bp, Homo sapiens
aatggatgcaggaggaatgtctgaggtgcaatccttatcctttagcaaaggtgtcctctgcgtcttctttaacccatctcttggacctccagaaagacagctgaggatggcaaggggagtct

SEQ ID NO: 334187 - DNA, 122 bp, Homo sapiens
aatccggccgccccctcactggcccggggttgggtccacacttagccgctccagggagtgcgcgggtgagcgcgcgcggactccttgtctttctacctcacattcgggcggccagagctcag

SEQ ID NO: 334188 - DNA, 122 bp, Homo sapiens
acctccgcgcctccctcctttaaacactattggtcctctcgggcatctgttcttccgtaacgccccttctcctaggagacagttgtccggccccgccccagcatccccgcggctccctgcgc

SEQ ID NO: 334189 - DNA, 122 bp, Homo sapiens
tcacccagagagagcggactcgggaagccagccagaaagtgaaattgcacccgaacctaccgacctgccgggcggggggaaaggaggaggaggagtctccccaatcctagcgccccgcttct

SEQ ID NO: 334190 - DNA, 122 bp, Homo sapiens
actgtgggctccacggtgggcggacgcgaggccgagcggatggagaccgggggcggggcgcggacttgcacctcctcgccctggccgggcaggctgcacccggctgcccacccccaacaccc

SEQ ID NO: 334191 - DNA, 122 bp, Homo sapiens
cagtcagtgtttgattagaatagagaaatcacatgtaatttgaacaaggaaagattaatacgaagaattgctagctataacagggttttggagcaataaggattggctagtaaaaagtaaag

SEQ ID NO: 334192 - DNA, 122 bp, Homo sapiens
cccctgctcgcctccgcagaggccttttgtcccgcgggctctcccagcggccccgcgctgcgtggccgttttgtgaagggcacaatccgatgttctgaggagaccacccagcttcctctccc

SEQ ID NO: 334193 - DNA, 122 bp, Homo sapiens
gttgatgtctgcgcgctcctccctctaggggtcatcactctggaccctcagaccgccagccggagcctggttctctcggaagacaggaagtcagtgaggtacacccggcagaagaagagcct

SEQ ID NO: 334194 - DNA, 122 bp, Homo sapiens
cagcctcagagcccccacagcctctgcccaacactgccgtgtgctcccctgtctcctgggcgagttccttcaaacccttgaaagccctcacctaagccgggcacagtggctcacacctgtta

SEQ ID NO: 334195 - DNA, 122 bp, Homo sapiens
tgacagggggccgtcctgggaaagcgcccacgtggcgcagaattagaggcggagcctacacggtgacgcaagggccggaaggagggaccctgtgtctggagaagcgggagatgggggcctgg

SEQ ID NO: 334196 - DNA, 122 bp, Homo sapiens
ggcggggtaggggcgacggggacgggggcggggtaggggcagccctttcccaggcggtagcgggggcggtggttctgttgtcctgttgcccttttaagctgcggcttgacaggggccgcgcc

SEQ ID NO: 334197 - DNA, 122 bp, Homo sapiens
ctgttccccaaatagggcctctccttctcccgccgcccaggcccctgcgtgggctggacgcgtcagccccacacattagcctcgctgcggcgcccagactctgctttgcctccccgtcccgg

SEQ ID NO: 334198 - DNA, 122 bp, Homo sapiens
taggacatgttaaatctatacctgagggacatattcatcaacatccaggatgagagaaaccggaggaaaaatggcctggttccttcaacaaatattaggttggtgcaaacataattgcggtt

SEQ ID NO: 334199 - DNA, 122 bp, Homo sapiens
cacagctgtcttcattttacaagtgcaaaaaccgaggtcctgcggggtgactgccccagacgccgctggtgacgggctgcgccgaggtcgagacgccaggcttcaggtacacgtaccagaaa

SEQ ID NO: 334200 - DNA, 122 bp, Homo sapiens
gcaacaagaggttaaataactcggctaagctcacatggctggtaagaaatggcgacacagcgcgcagaccccaggacccgaaggctaagctcacatggctggtaagaaatggcgacacagcg

SEQ ID NO: 334201 - DNA, 122 bp, Homo sapiens
gaaaccaaggcccagggcacttggggcaaggcgttcagggggctttcggtccggaagcagcgtcggggcgggaattcgaaccctgggttcccacactggcccgtggcagggcccccaagcct

SEQ ID NO: 334202 - DNA, 122 bp, Homo sapiens
gccaccgacacggagaagggcgagctgcggagcgcggggtgcggacggccacgcccctcccgccacggccaccccgagcccaggctgccagggcggcatccccagcaggagacccgcgcagc

SEQ ID NO: 334203 - DNA, 122 bp, Homo sapiens
tccgctcaccccgactgcaacgtctggaaatccctccaaagccagcagccccggagggctcgggtccctggtatccacggcgtcgagtcttccagccggagagaaaaactcacctaggaccg

SEQ ID NO: 334204 - DNA, 122 bp, Homo sapiens
tatttgacccctagctctcccttggaaataccaagcctggaactctggagaaggcgccgccgctcgtgtagttctgaaaggctctctttgtcctgaggaatgcctgttgcaatgaagcttgg

SEQ ID NO: 334205 - DNA, 122 bp, Homo sapiens
gaagatcaaattcgtgatatctctatatctaatctttaaaaatcagaatgctaatgctgacgcaaataaaattttcatttattagcattcatgcagtcacaattgtttcctttgattccttt

SEQ ID NO: 334206 - DNA, 122 bp, Homo sapiens
ctcctcatctttctgcccaagagccccaggggtcagcactgaccactctgacacaggccccgtccaagccacgctgaggacagaccgaatgataccatgattggggctggatgttcacttct

SEQ ID NO: 334207 - DNA, 122 bp, Homo sapiens
cagaatccccaaccttcaaacctttgcacctgctgtttcctgaccttgaatgcctctcctcgaataccacaatcccccttgcaggctaccttcttattcttcaggtctccatggagatgtcc

SEQ ID NO: 334208 - DNA, 122 bp, Homo sapiens
gaccggcatgccgggattgggagattaggatttgatttcattttggggcgggcggtggctcgtgctgggtcacgtggtcgtgcccaagcgctcctcctgttgccccacctgtggttgctgtg

SEQ ID NO: 334209 - DNA, 122 bp, Homo sapiens
ctgccgctgcctcttctctgcaggtacacttgctgaaggaccagttggctgctgaggctgcggcgcggctggaggcccaggctcgcgtgcatcagcttttgctgcagaacaaggacatgctc

SEQ ID NO: 334210 - DNA, 122 bp, Homo sapiens
gagaggcaggggagagagaatggcatctcgcgtggagggctgtcgtttgaactctcccagcgcgagagaccctgccccgcccccttcctggagcgttgactcccttctcgtctcgaggcctg

SEQ ID NO: 334211 - DNA, 122 bp, Homo sapiens
aaaagaaagccaaatgttttagcaacttcccccgtcaatatttactccgaagtggggatgcgccagcggcctattgttctcttccgggaagggagggagccgaggtgcgagacaagctttta

SEQ ID NO: 334212 - DNA, 122 bp, Homo sapiens
tagaagagtgctctgagggcatgtcacggggagaccatgtggacacacgtgcggcagggccgtgagtgtgagagtaagagatgagtgtgatcgtgtgtgagcgaatgtgagggtgagagtgt

SEQ ID NO: 334213 - DNA, 122 bp, Homo sapiens
gacaccgggaaggggcggggcgaacgggccaagctggctctgagtcgcaggccttgctggcgtcgcccctgctgccggccgggaatgatgatgcgttgaagcgaggctcttccaggaggggg

SEQ ID NO: 334214 - DNA, 122 bp, Homo sapiens
tcgagtcagtgacactgctcaacgcacccatctcagctttcatcatcagtcctccacccccgccccacaacagcctaccctgcctccggctgggtttctgggcagaggccgaggcttagctc

SEQ ID NO: 334215 - DNA, 122 bp, Homo sapiens
ctcgcctccccgctcgggctggggggcttgctccctgatccgagttgtctccatcagttccgtggccgtctggaacgggcaggagcctttggggaaaccagctcccacccgcttgggtttga

SEQ ID NO: 334216 - DNA, 122 bp, Homo sapiens
tcacccccgtcttggggacatcaggtctgtgagcacccataccccagccaggcactgtggcgccccactcgccctcccgcactccctcctagagatgccctcttatatccccggagttcgca

SEQ ID NO: 334217 - DNA, 122 bp, Homo sapiens
taccctcctgggaagccacgcaggacccgtcttcgggagcccgagagcctccttcccgggcgccagtcttaataaactttgtatgtgtgtgatggagcctcgctcttttgcccaggctcact

SEQ ID NO: 334218 - DNA, 122 bp, Homo sapiens
tcccgcacggccgcgcccctgtgcacctggcccccgcccccgagacgtcccattggccggcgccctagcctggtcccgcccaagtggaccccgcccccgccccgaggcaccccattggccgg

SEQ ID NO: 334219 - DNA, 122 bp, Homo sapiens
gcaaaagttcttatggagaaccatgacacataaccgtgccagcttctcatgccgggagaccgcagcgcctctccacacaagtggggccttccttctgcacttttattctgcagttgggctcc

SEQ ID NO: 334220 - DNA, 122 bp, Homo sapiens
gtccagaccccgggtcttgcgtttcccgcagacagcatcgcggctgggaggacacgtagccgcttcttccctaagcggaggtctgaactccggcttgtaccacttccccgtgggtgctgtcc

SEQ ID NO: 334221 - DNA, 122 bp, Homo sapiens
cccatgtcccctccctgtgtaaggttaccaggttttgagaaggacacagagcctgtctcccggtcaccttcaccaagtctgccctgactccctctcagaagctcagaaagaggccactgggc

SEQ ID NO: 334222 - DNA, 122 bp, Homo sapiens
ggggaacaggagactggagtgaggggtgtgtgtcatgttcctctcccttctagaggtctgcgtggggccctcctccccatgtccacactcctggtctccctgtttaagaagaattgggaagg

SEQ ID NO: 334223 - DNA, 122 bp, Homo sapiens
agaaaatggactcctcaaagactggatatttcatgtctgtagtcccaggacctggccctgcgtcaggcacattgtaggtgttgaaaatgcacctgaggaattctgagttgcgcggaactgtg

SEQ ID NO: 334224 - DNA, 122 bp, Homo sapiens
ctaaggagggatggaaatggagctttacctcccttgctacaaaaagtaaagacagatggacgaggcatactcccaccctcagagagcttccaagtctacaatgagccctatccattagtagg

SEQ ID NO: 334225 - DNA, 122 bp, Homo sapiens
cccagcccccaccattgaccccagccccaggagtctgggtcaggtggaccggggcaggggcgtgtgaccgagagaagaggggcagacagactaatgctagggtcaggggtccattctctcct

SEQ ID NO: 334226 - DNA, 122 bp, Homo sapiens
attgcagcccccacccagcgcagtcacctgccgcctcggggactggcagcaagactatcgcgttgtatgtcatcatgtcaagacagtgcccgagcaagggaatttatctaacacccttgcct

SEQ ID NO: 334227 - DNA, 122 bp, Homo sapiens
gtgagaggatctgggactgaaattttactcatctagctacctaaactgtggcaaaataatcgggtctgtacggaggcaaacaaccagttagagaaattagaatcttgatcctgttttaaact

SEQ ID NO: 334228 - DNA, 122 bp, Homo sapiens
ggccaggggctggcggagaaagcaaggcagcaggaaattgccggctccattcccattaggcggatctggggagaaatcaggaaaaaaataactgtataaggctgacactgtaaacatcctag

SEQ ID NO: 334229 - DNA, 122 bp, Homo sapiens
taaatcaccccgtggcccatccactcctccctggagctcctccacccgtgtcatgtgcttcgtctccacacatgtgtgtgtgcatgtttatcttgcaaagcacttaataaaataagatcaat

SEQ ID NO: 334230 - DNA, 122 bp, Homo sapiens
ctggggacctgggtggactcctagctctactgtctgttcccaggttctgccacgttgggtcgctcgccttgcctgcgtggacctcgatgcttacctctgtcaaatgggcgtgctctttccct

SEQ ID NO: 334231 - DNA, 122 bp, Homo sapiens
gctgaccaggtaggtgccgttgttgaagtcagtcacctttcctgaagcacctgccatcagcgctggggaagacatcctggccctcaggaaatccccgccatattgcttcctgcgtcccaagt

SEQ ID NO: 334232 - DNA, 122 bp, Homo sapiens
ccccctgttcaaggtctgtcaccgtagggggcgggggggcgcgtggagccgctgggggttcggcccaccccgcgaaccgagctcccggccctgtgcgccctcagctctgccgcgggcgttgg

SEQ ID NO: 334233 - DNA, 122 bp, Homo sapiens
catgagccaccacgcccagcctaataatctattttaataattaaaaaatagtgtctctctcgttctttttcctgtgtgtttttattgataaatttcaatgctttgagcaaataaaacatttc

SEQ ID NO: 334234 - DNA, 122 bp, Homo sapiens
gaggaagacagtagcttccatccagcctaagcagaaaacccgcaaaactcatgacttccgcgttgacctgggagtgcacctgccagtacgtggctttccactttgagaatgaatgacagtca

SEQ ID NO: 334235 - DNA, 122 bp, Homo sapiens
acaagcacctaggggggccaagagcgaccggggtcggcaggtaaggaagaccgcggcgagcggcagggggcgccagcgcccgcgttcgggcgcttcacgtcagccgcagaatgtcctgcagg

SEQ ID NO: 334236 - DNA, 122 bp, Homo sapiens
tgccagttttggggatgagccactgcttcgagcattcatgtcaacccccgaccatgaagacgagactcctggcctgtgtgtgcttgtcgcatgatgcatgtgctgtgctcaacctcccttct

SEQ ID NO: 334237 - DNA, 122 bp, Homo sapiens
cccaggagacccctctcggatactctgcagaagtcagagtgacgatattagcaagcacaccgcagccatgcgaacccttcctggctcagctcccgacaaaagaaatcaagcccccagtcaaa

SEQ ID NO: 334238 - DNA, 122 bp, Homo sapiens
atcagtaaacacttgtcattttccgtagaccagggcggggtgacgggtgatcccagtcctcgcagtgaactctggggcgcagaattcaaaacgcttgcggtcgccgagcgcagccccgccct

SEQ ID NO: 334239 - DNA, 122 bp, Homo sapiens
tctggccccatcctccagctcccgccgtgttgctcagagcagctcacggtgggcacgcggcgactctgaggaatgggcgttcccacagctccccggcttccgtgacggccacgaccggctct

SEQ ID NO: 334240 - DNA, 122 bp, Homo sapiens
atgtgctggccgtgtatgatagtagagtttagccgttacctgagccagatgaggaatcttcgcaaactcttcatctccgatggctgtcgttacctgctaagctctgacagccaagaacagtt

SEQ ID NO: 334241 - DNA, 122 bp, Homo sapiens
cttgggcggacgctcgcgcagtcaccctcaccgtccggcagccaggcctccatttccctccggtcacaccggcttaacttgctgctcccggaatacgctcagcatattcacactttctacct

SEQ ID NO: 334242 - DNA, 122 bp, Homo sapiens
gcccccgtctctgagaaacgcagcaggggtgaccgaggcccatgcactgcccgtgcggagcgttttgggggtgtaggtggccggtggcgcccacgggccctcttgagtaaggcggctccgcc

SEQ ID NO: 334243 - DNA, 122 bp, Homo sapiens
ggcaacagccccttgccctgcacagacccctgggcttcccaatgccacccaccagccagccgcccccatcagtctccatgtcccaaaacacgttcaggggccgctcccggttgccgttgagg

SEQ ID NO: 334244 - DNA, 122 bp, Homo sapiens
tacgtggaacctagcaaccacttttaaagttgcatttgctgatgtccctccctgtccattcgccctacaagactaagtatctttaagaatcaaactaacgggctttcatcagtttttcccac

SEQ ID NO: 334245 - DNA, 122 bp, Homo sapiens
gctctggtctaggcacgaaggacactgcagggtcggggcagacagacatccctgcccacacggacctcccagtctgaaggggagaagaacaagaagccagagtatctcgaagggtgacagtg

SEQ ID NO: 334246 - DNA, 122 bp, Homo sapiens
tggcctgctcccaggcaggaaacacagattagaggaagtatcaagttggaaggcagcagccgtggatgttaaagctggaggaacctcttaaggaatggctgtcagctccctcgtttggtgtg

SEQ ID NO: 334247 - DNA, 122 bp, Homo sapiens
gaggccaaggcgggtggatcacctgaggccaggagtatgatgagactagcctggccaacacggtgaaaccccatctctactaaaaatacaaaaattagctgggcatggtgggtacctgtaat

SEQ ID NO: 334248 - DNA, 122 bp, Homo sapiens
agacctccccgcagcaggtggcctccgcacggctccgcccccgggtcgccgtaaccctctcggtgccagagcgggtaaatgacagcttagccctgaaggactcttcccccgtctaatcactt

SEQ ID NO: 334249 - DNA, 122 bp, Homo sapiens
tcattctggggaatgcttatttggagtaaattttgtgtggctgttttttttcctccttctcggcaaacccagcggccccatggaaagaggaaaccaaacagaagttggaaactttctcctcc

SEQ ID NO: 334250 - DNA, 122 bp, Homo sapiens
acacaggcctagtgcttctggaatctcaggttatcatgtctggcctcattgcccctgagacgggtgaaaacctctctttggaggagggcatagccagaaacctcattaatccccagatgtac

SEQ ID NO: 334251 - DNA, 122 bp, Homo sapiens
cgccaggccacactgcacgcttccacatcctcagagggcccgggacttgggtcctggccccgccccctgcggacccggcactctgtcagttccgtccccggtcctgggaaccgctctttacc

SEQ ID NO: 334252 - DNA, 122 bp, Homo sapiens
tgccctcaactccacaatttactgccaagctgcacaagacagggatacaaaaggagccggcggagacactgttagcggatcccttcactccagaggccagttttatcccaacacaaggattc

SEQ ID NO: 334253 - DNA, 122 bp, Homo sapiens
tcgctgctctcctcacaggcccaggtgggtggggcaagccgctctccgtaattggttctacgccagcgtcgtcgcgcgcgccacctcccgccaccgagcctcccgccacctctagccaatca

SEQ ID NO: 334254 - DNA, 122 bp, Homo sapiens
gcgatctggcgccacggagcctgtctgggggcgcccggagagtcgtgggctgggggagggcgcctgattcccccccccacagatgcccccggccgacgcgtctcgctgcgcgctcagcccgg

SEQ ID NO: 334255 - DNA, 122 bp, Homo sapiens
gcacccacggcgaaagcactctttctaaaccacgccccggatgtcccgcctccagcggctcggaggtcttcacttattggcctccccaaaccaacatggcggccccctacaaacttcaagcg

SEQ ID NO: 334256 - DNA, 122 bp, Homo sapiens
aagtaccacgcagcactcaaggtggacctgctgcagggtgctggcaacagcgcggccggccgcggcgccatcgccgacacctttcgctccatctctacccgggagctggtgcacctggagga

SEQ ID NO: 334257 - DNA, 122 bp, Homo sapiens
acttcctttctgaagctctctccagagacagcctcgtcgaatccactccttccccttccccgcgttatttaattacccaacagatctgctttgctcgtctgcagacacctggctggctttca

SEQ ID NO: 334258 - DNA, 122 bp, Homo sapiens
gtgatgggtggatgtcaccctgccccttgtgattgactcctgagagttcggagggtaccacgcccaccattgacttaagccgctgtcttttcttgtgtttgtggccatcattgccccagctg

SEQ ID NO: 334259 - DNA, 122 bp, Homo sapiens
ctctgtctacgcagctgtgtatagcgtggcccaggccctgcacaacactcttcagtgcaacgcctcaggctgccccgcgcaggaccccgtgaagccctggcaggtgagcccgggagatgggg

SEQ ID NO: 334260 - DNA, 122 bp, Homo sapiens
cccggcactagtcccactagcagtgcttcggcttcatcctgctcctcttagctcggtttgcgcccttccatcccttagaccccagcaggcccagacctcctccccttacttggcgcagaagt

SEQ ID NO: 334261 - DNA, 122 bp, Homo sapiens
ggccatttatacccctccccctgggcccaccagcccaactcgccgctgccggcctgacctcgctcccagccctgctgcccagattctaggtgaggcccagcccggcccgccgaggccggggg

SEQ ID NO: 334262 - DNA, 122 bp, Homo sapiens
tggccccgcggcggagctggcggctgggggaggacgtgtggagggacgctccggccgcggcgcccgctccgcgtagttgggactccgaaacgcaagagccccgggcggggcggagctggggc

SEQ ID NO: 334263 - DNA, 122 bp, Homo sapiens
cccatttacaccccaaatgggggcattaattacacagactgccatatccccaacaacatgcgatactgcaacagcagcgtgccagacctggagcactgccatacgtgacagccagaggccca

SEQ ID NO: 334264 - DNA, 122 bp, Homo sapiens
caggccgttttccttaagagcccaatcccggacacgcacacgccacaccagctcgtgtctcgtggtcctaaacttaggcactcggccttatctggttgcaagaaactgaggagtttttcgtg

SEQ ID NO: 334265 - DNA, 122 bp, Homo sapiens
cagagttaaaagtgggggacagcgggggatggagaggacgagaactcaaagaggtcaagccggagaagcccctcgcatatacagatactgcgccatctgtcaccgacggcgacaccgacatc

SEQ ID NO: 334266 - DNA, 122 bp, Homo sapiens
ccaacgggcccggatcaggccactgccatctttcttgcgggcgggggcggtgcgaacgggcgcgacctcacggaggggacgccggcgccaccatctctcctccgggcggaagcggtcgcggg

SEQ ID NO: 334267 - DNA, 122 bp, Homo sapiens
gtacaatcttttatgttatgctgtattaagatttcttttttttgtcatattgtttagctccgaaaaaaagaaaacaaagcaattaaaaagattgacaggtatggtttgtgagagacctattt

SEQ ID NO: 334268 - DNA, 122 bp, Homo sapiens
cggcaaaggtgcctcttctccctcctggagagcccaacatgcttgaagttaacctgaggccgcctctcgggcccggcgaaacagagcgcgggcccgacgaaacagagcgcgggcccgacgaa

SEQ ID NO: 334269 - DNA, 122 bp, Homo sapiens
gcgaacatgttgctcccttttaagtgtcaagcaacgggttcacccaaaacttttctgcaccgaggacccgcacgcccggggtcccacctgcccctctctgcctgcctcccaccggcgcctgg

SEQ ID NO: 334270 - DNA, 122 bp, Homo sapiens
cgacatctgcagaaacgccctcgtaatgggaacagttacctcgaaaagttctagaaatgccggtggagagggcaggtgaacacacagctgcagtcagacgctcggcatgatcagacccaaag

SEQ ID NO: 334271 - DNA, 122 bp, Homo sapiens
ggaagagggtctcgttctaactgtgccgggccgggaacgggttaagatgcggccaaatgtcggtccctcctccttcccacccctcagccccggcgcccactcgcgacggcagccgcggaacc

SEQ ID NO: 334272 - DNA, 122 bp, Homo sapiens
tagagagcgcgggactagagtgcagagctccgggacgtggatcggagccggcgcgatgggcggagagcaggaggaggagcggttcgacggcatgttgctggccatggctcagcagcacgagg

SEQ ID NO: 334273 - DNA, 122 bp, Homo sapiens
ccagaggaacccgcgggtgcaaactccgggagcggcttgcagggtgacggcggcggcccccgctccccggtacctgatgatgtcgtcgctgtggccccggtagaacttctgcctgtgctccc

SEQ ID NO: 334274 - DNA, 122 bp, Homo sapiens
tgctactggggaagagtcctcatgtctgtagagcgtctacaaacattaactcatttaatccgcatggcaccctgcaaagtagggcgttatctggctttacagatacgtaaaactaggatgaa

SEQ ID NO: 334275 - DNA, 122 bp, Homo sapiens
ccccactcgcctgacctctgagaaagcagaatccgggacatgaagcaaccacagccgctccgcccggccacaagcgccccggactccgtgcctgcccgcagcccccttcctgcagcgttcac

SEQ ID NO: 334276 - DNA, 122 bp, Homo sapiens
cctgaaccctgcttccagccatggccaggggccacggaacccggcaggggtgtctgaggccgccctgtcagctggccggtccaagcctgtggctggagctggtgtgtgtttatctaataaag

SEQ ID NO: 334277 - DNA, 122 bp, Homo sapiens
gtgcaaactggatgtgtccagctcccgccgccagcctttcctttgggggcttgtcaccatcgacactgcccttggctagccctggaggagcccctcacagcaaaagcctggccactggcatc

SEQ ID NO: 334278 - DNA, 122 bp, Homo sapiens
gccggccgctcgggctgagggccgggctatgcagctgtggggacccgggggctgcgggcgcgcgtccctgcggcggcgtccccggggcccgcgtcccgtgcgcccccgcgcccgctgcgggc

SEQ ID NO: 334279 - DNA, 122 bp, Homo sapiens
gtcttaagagcacgacttctcttcttttaaatttgttattgcgggtcctgcggcccagaacgcggtctgtccttggcgaatgctccacgagagcttaaaagaacgtgaacctgcacgtattc

SEQ ID NO: 334280 - DNA, 122 bp, Homo sapiens
aaagtgcctggcccacagcagtgcctgacccagccgcgaaggctgtccttacgtcatcctcgtgccctctattggcgatgtcgtatcagcaacacccaggggacgcatgcatcgcccacctc

SEQ ID NO: 334281 - DNA, 122 bp, Homo sapiens
tagagacttttctaagaaagttggaaggacggggcagagttagggaccctgttaaaggagcgtaagggttgtcactctaagacccttgtggaattttcaggatggaaagtgatcttcgattt

SEQ ID NO: 334282 - DNA, 122 bp, Homo sapiens
agcaagccccgcaagatggggctgaggacccattacttagtctcacctgcattcagtgggcgcttcttggcttctccctcttgcacttcactcctcacatcttgatcccaaagccagcccag

SEQ ID NO: 334283 - DNA, 122 bp, Homo sapiens
ccccaggatcacccacaggaggccccaggtgggcaccctgggcctgcccctcctcccatccgctgcaggctggccctcaagtccctcatagtggtgtcagtgtcccctgcaggaaccatggc

SEQ ID NO: 334284 - DNA, 122 bp, Homo sapiens
tttaacaaatattttcaagtacctgctatgtgtgaagcactgtgctaagtttaagcactgcgaggaatacagaaatgaaaaagaaatgaatcttactttagagaaactgtcagtctagaaaa

SEQ ID NO: 334285 - DNA, 122 bp, Homo sapiens
agaaaccaaggatgttagtgctctgacaaaagcagctgattttgtgaaagcttttattctcggctttcaggtggaggtgagtaattccatgatatctaaaatggggactttaaaaatattca

SEQ ID NO: 334286 - DNA, 122 bp, Homo sapiens
catcgacctcctcctctgggtagggctggctgaagttgaagttgggcttctcctcgcatgcgctctcagccagctcgctggaaaattcgcttcccaccgacagggaccgctcgatattccgg

SEQ ID NO: 334287 - DNA, 122 bp, Homo sapiens
ttgggagattctggaaccaggacgaccttgcccctagcctgctttagaagcccccggaaacgccccggccccgacccggacctgagccacctgggggcctaagggaagctgaatgcccagtg

SEQ ID NO: 334288 - DNA, 122 bp, Homo sapiens
atggagtgggcctgggcgcagtgccgagagtccatgactcggtagcactgggtgaccgcccgccgtggtcaggtcctggtattcccgatacaggttgtgggtgccgctcagggagtcacagc

SEQ ID NO: 334289 - DNA, 122 bp, Homo sapiens
cggcttggtggatgtgtatgcatgagttctgcaccgaatgggcgcaaaaagcgccccagccggtccacccgctcctcgatcttccagatcagcaagcccccgctgcagagcggagattggga

SEQ ID NO: 334290 - DNA, 122 bp, Homo sapiens
gttctcatggagataaatggcctggaaggaagcctcctgggactgtgttccctgcacggtcggctgcgggtggggacaggccaggttttctctcctcgtcaggctgcaatgcttcccgctgt

SEQ ID NO: 334291 - DNA, 122 bp, Homo sapiens
gcaaggggcaaggtgggggcgtggggcggagctgcctcccataggctcactggcgggtcccgtcacgtggcaggggcggggcgtgagccgagaggacaggactggaaggtggctagggatgt

SEQ ID NO: 334292 - DNA, 122 bp, Homo sapiens
gttcttggagccctgcattctgggtgggctgggaggccccttgcgtgtgcaccccagccccgggttgagaggccactgtgtgcctgtgtgtgcaacagcctccgtccagccttgcaccctgg

SEQ ID NO: 334293 - DNA, 122 bp, Homo sapiens
aggcgccaccgaccggttgcccctggatgtcttcaacaactacttcagcctgggctttgacgcccacgtcaccctggagttccacgagtctcgagaggccaacccagagaaattcaacagcc

SEQ ID NO: 334294 - DNA, 122 bp, Homo sapiens
acctccagctgttgctccacaggcctcagaagtgaggtctctttcatttttcttccttcacgtcaaggcttgactcactctgtctgctgggcttctctgcacttggcatttcctttttctct

SEQ ID NO: 334295 - DNA, 122 bp, Homo sapiens
tttcagcctactttgtttagaagagtgaaaccttctgtcttgccgtgggcctggtgaaaacgcgacagataggggaacttggatacgtccagtctccctccctatttaaatgctgatggtgt

SEQ ID NO: 334296 - DNA, 122 bp, Homo sapiens
ctgctggcttacgaccttttccagggcggggaggggctgtcctcatctctgtgaccccagcgcccagcccaaggcctggcacagagtaagtgctcaaccacattttggtgaatgagtgaatg

SEQ ID NO: 334297 - DNA, 122 bp, Homo sapiens
atcctgtcagtaagtagcctcggtagatgagaaccacggttgtgttcacggaggccctcccgtgtgccaggcactgtggtcacaacagtagagacaaagcattcctggtaggaagcccgcag

SEQ ID NO: 334298 - DNA, 122 bp, Homo sapiens
cagccccatttcctcccgatcgttggagcggaggggaaggaggatccccgggactcacctcgagcctgttgtcaacattagccccgggtttcccagcaccaactccagcgctcgggctctcc

SEQ ID NO: 334299 - DNA, 122 bp, Homo sapiens
ggaaagaggcagagcttccgctagtctttcatcttcaaaggaaatcaagcttctaaaaagcgggccctgccgaattggctaatagctactccttttctccactaggggagcgttcgcaaggg

SEQ ID NO: 334300 - DNA, 122 bp, Homo sapiens
aggcacctgccacgccccagagctggcccttctgcagagcaacactgagctgcacagggtcgaatgttcagagagaagctccttggatctgccatttctaactatatgagtgagaagaaaga

SEQ ID NO: 334301 - DNA, 122 bp, Homo sapiens
tcccgccctcacgcggcccgtgcgcaaagcggaccgggccggcgacgcgaatctccgccccgccccatctgacagcaaattttcccattggtcgagagacccggcgcggcacggcaaccggc

SEQ ID NO: 334302 - DNA, 122 bp, Homo sapiens
tttttcccctgctgggggccgaggcccggccaggagcagagtccggctgcctggggcgggcggcgcgtgtctgcagctgctccgggtagcccgctaggcgcgccgtccccagccccgccgcc

SEQ ID NO: 334303 - DNA, 122 bp, Homo sapiens
ctccctgggcgcccttttcaggtactgcgcctggaccacactcgtcctacaccggcctcgcgagacaccatcactcgtgactgggtgagaggggctaagcggctcacctgcgctgcacagct

SEQ ID NO: 334304 - DNA, 122 bp, Homo sapiens
caatcaccgcacccatctcattgatcggcacaaaaacagaccaattgacagccttagtcccgccccctacgcaagaacggccagacaagttagacagagagcgcacgacgaaggcactggga

SEQ ID NO: 334305 - DNA, 122 bp, Homo sapiens
ggcagctcagccgtttggcccatctcagcagcttcttggacctagtacagtggactcctccgccagcctcatttgttgttgcccagtgaaacggacagagtggaatggggcctacccagggc

SEQ ID NO: 334306 - DNA, 122 bp, Homo sapiens
atgggctgctgcgtggaagtttgagaccctgttgctgaatcctcgggcctgacggtctatcgctgaagacaagacttccaaagaatcacagtaaacgttaacctaagccatcagaagccatt

SEQ ID NO: 334307 - DNA, 122 bp, Homo sapiens
tttctgttaccttccaggacatcttatctctattttcctaatatcaaattcatgaggcaccgagaatttaacaaattaaactacaattacgttttgaatacttactgaaaactattacaatt

SEQ ID NO: 334308 - DNA, 122 bp, Homo sapiens
catcccttaggtgtataccttcccttttgcttagggcaacagttaagataaactaatacacgtatatgattttaagagttaaaaactcatcacccataatcaataaggatgctaaggaatgg

SEQ ID NO: 334309 - DNA, 122 bp, Homo sapiens
tcacagttctgggagtcagaagttcaaaatcagggtgtcgcaggggcgcactccctccagcggctccagggcaggatcgtccctgccccggatggcttctgtgactccgggggtccctcagc

SEQ ID NO: 334310 - DNA, 122 bp, Homo sapiens
caggcaaggagtggccatgggtggggagaaaggggacttctttttctccctttcctcattcgaggtacttactgagtctcttcttggtgcccaagcactgaacgtgacatctcttagtggga

SEQ ID NO: 334311 - DNA, 122 bp, Homo sapiens
aaggaaagggttttgcaaaagactacaataataatctgcggcaacagcgcggcatagacgcgtgggagagccagtgcagctccccgccccactgcgggaggaagaaaaacaaataatagaaa

SEQ ID NO: 334312 - DNA, 122 bp, Homo sapiens
gctgtcctacaagggcgccgtggcacaggtgctgtggcacctgttcagcattgccgcccgcggcctggccttcgcgctcttcgccagcgtctacaagctctattttggcatcttcatcgtgg

SEQ ID NO: 334313 - DNA, 122 bp, Homo sapiens
cttctccaagctgtgcaaagactgtggcatcatggatggcaagacagtcacctccacggacgtggacatcgtgttcagcaaagtcaagtgaggagccaaaaatatggaggtgggggtgagaa

SEQ ID NO: 334314 - DNA, 122 bp, Homo sapiens
atgcacacccctggcacccaggcgcctatgtgcgaggacaggagggcactggctgagggccgctgcgtgctgggggccatgccaatggggcacctgatctggctgccaacgacccatcagct

SEQ ID NO: 334315 - DNA, 122 bp, Homo sapiens
tctcatacacgacaatttcatcgctgtcggagcgcagcagggagcgtgtggagttgcactcggagatggaggagagggagagcagcgtcagggaggcagaggggtctcctagcaacagcatg

SEQ ID NO: 334316 - DNA, 122 bp, Homo sapiens
tctcagcggtagcaatttaaagaggacagacacacccacacacatgctggactccactgtcgttacaactttcttggtcacagaagcgcttacctgctttcccagggctgtccacaggaagg

SEQ ID NO: 334317 - DNA, 122 bp, Homo sapiens
ggggcttggaccctttcgtggcacgaaaaggagagagactgctgttcatcttaaaagtctcgaaggaggcaaaaacccaggcggaagtcatggctgactctgatcctgcatcttctcattct

SEQ ID NO: 334318 - DNA, 122 bp, Homo sapiens
ggcgtgaggttgatctgaagccttactagatgacttccccgtcctttgtggctgtgtgtgcgcgcgtgtgtgcacagtgcagggcccgggggacagcctgccctttacaattatcccatcgt

SEQ ID NO: 334319 - DNA, 122 bp, Homo sapiens
accaattaaagctttaaagcagagctatgcatggaatcactgggctccggaccgttttaccgaggcatttttggaagcccttccggttcaagtcctagtaaacaacgctcacaagtcagacc

SEQ ID NO: 334320 - DNA, 122 bp, Homo sapiens
cctcgcgcaggtgggaagggggcgcaccgcgttctctgcgtagccggagctcccttcgcccgcccgcctgccccgcgccgccacctgcctgcagcgctctcggcccccaccggggggcgctt

SEQ ID NO: 334321 - DNA, 122 bp, Homo sapiens
gcctggactcggaattcctgccccgcgggtctgcattttcacagcggcaggtgtgagtgccgcgcagctggagaccagaagcctgaggcagctcggccctccccagcccaaagtgccgttat

SEQ ID NO: 334322 - DNA, 122 bp, Homo sapiens
gcaccgaggaagatcagcccctccccttgtgctccagggttcccagcggctgcctgatggcgaagaggagggccaccctgggatccagcgtgacgcccaaatttccttcacatccctgcaat

SEQ ID NO: 334323 - DNA, 122 bp, Homo sapiens
ccctcgtcgctcgtgagctgcaaacagtggaaagttgggaacctcagtcgctggcccaggcggagagcagcggcggcggcgagggcagcgggattcgggccgcggcgccgcaggctcagagc

SEQ ID NO: 334324 - DNA, 122 bp, Homo sapiens
ttacaggcgcccgccactacgatcggagaatgttttgtatttttagtagagacagggtttcgccatgttggacaggctggtctcaaacacctgacctcatgtgatccacccacctcggcctc

SEQ ID NO: 334325 - DNA, 122 bp, Homo sapiens
caccccaggatactgcaggacatgttgccactggggggagacagcattgttcatgtgcaacgcttccagaaaatgctgcatcagctactccttcctgccgaagcctgacctaccacagctca

SEQ ID NO: 334326 - DNA, 122 bp, Homo sapiens
ccgtccccacccgcggtgtgtgatccttagacgtgagtctgcatccgccgctgcaggggtcgactggggtcagagttctgggacgaggactgggagtggtgggaggaggaagcagaagcctt

SEQ ID NO: 334327 - DNA, 122 bp, Homo sapiens
ctgaacatgtctagaccctagacatgtagactctttgtggctggggagggggttagcgtccgctcatgcgtggcctcacactccgcgtgcctcctgctccgaccccgaggagaaactcccgt

SEQ ID NO: 334328 - DNA, 122 bp, Homo sapiens
ctgccaatcactgcagacgaagatgctcacgtaatctttgcagtcgcgccgttctgccagcgccatgtagcggccgtccctggtgaaggtgattcctgtgggaagaggcaaatgcactgaaa

SEQ ID NO: 334329 - DNA, 122 bp, Homo sapiens
ccctacttccaatattgagctgactgtttctgttgtatttaccctttgcaatagccatctcgctattttcttaacttacaaaacatcacttagccttctgcctgtagaaatagccctgtata

SEQ ID NO: 334330 - DNA, 122 bp, Homo sapiens
gctgagcgactcgctgccccgggaccgctggggtggtgtgcgtcaggggctccctcacaccgtccttgaacagtaccgtggaccacaaaagagcaaggctgtcctaaggaaagactttgcct

SEQ ID NO: 334331 - DNA, 122 bp, Homo sapiens
tccattacctggcacaggtgtgccccggcagaggcgctaagttgatctttttcttgaggacgaagggcaccattttggatgtcgatcctctatgctctactgtgatatagtgatgccccaag

SEQ ID NO: 334332 - DNA, 122 bp, Homo sapiens
cccacctaagtgactcacacccagtgccctagggctccttagacacagagcccagagagacggggggagggaggctgggtctctgtgaggccaggggttccagaaccccctcccccagtggc

SEQ ID NO: 334333 - DNA, 122 bp, Homo sapiens
atgggatgattgctcacatgggttcccgcagccccacccctgccctgacatctgctgatccgacaactccaagtggcttggcttcaaccaggaacaaatggctgctgcttacaggccaactg

SEQ ID NO: 334334 - DNA, 122 bp, Homo sapiens
gccatgcaggctccctcccatcagtgccactgcccccaagtcagaacagtaccacggtgacgccatgacatccaccccgtccccaggagccgcatgggtcatgcacacaggagatgggcagt

SEQ ID NO: 334335 - DNA, 122 bp, Homo sapiens
ttaacaaactcattaggaatgtgattgccttgcgggaccagcaagctgccgaagaggtaacgtattttaataggacacagccttgaaatggaatggagccgactttggcatcactgtctctg

SEQ ID NO: 334336 - DNA, 122 bp, Homo sapiens
agatgaggctaatgtacaactaggatgagaactactggataaacccactgtgagaagaaacgaaagacctaggtttggggaccaggagtttacaagggggtttaacaggggaggggaggcat

SEQ ID NO: 334337 - DNA, 122 bp, Homo sapiens
accacccctttcaatggcaacaacttgacaacccagaagttatcagcctttttctagaaacgtctgtatagtctgccccttaatttgcatgtaattaaaggtcaatgtaaatatgactgcag

SEQ ID NO: 334338 - DNA, 122 bp, Homo sapiens
ccagaacgacccccctgcctgagtgtcgtcccggcaggattcacacaaggacacaggttacgaggttggtgccaggccagggcacctgggtcctggcatcaagtacccaggagcagaggctc

SEQ ID NO: 334339 - DNA, 122 bp, Homo sapiens
gggggctgcaggcgtggacgctgccgggtaagccttgagcgccgggggctgccgctcggccgcctggttggcccagttctgctcagtcatcagcaggtggtggtggccgttgtagagcttgg

SEQ ID NO: 334340 - DNA, 122 bp, Homo sapiens
ccgttcgctgcacagcctcgccctgcgcccgccaccgccctgcggatcggtcctctcgcccgccacctccagttgacccggatctgtccagggagggtgaaggaagaaaggccttctcctgg

SEQ ID NO: 334341 - DNA, 122 bp, Homo sapiens
cgagatatctatagcatatcaatattttcaaaacacattattcttttctttagatataaacgcaatagcatgacacctaacagttagtcccacaaagctgcaaggacaataaagatgtatac

SEQ ID NO: 334342 - DNA, 122 bp, Homo sapiens
gctggctagaagagcttctaccacctattgaaatggctgggacccctgaccagggagcaccgtgggagcatagccctggccagtccaggtgaccaccctctcagagctgtgctttcattctg

SEQ ID NO: 334343 - DNA, 122 bp, Homo sapiens
taagatccactgagataacacaatccttttcctccagatgaaagcaatagacccagggagcgaaaacagcctgtttaggggctgaagacagaacccagccttctgatactgcttactccact

SEQ ID NO: 334344 - DNA, 122 bp, Homo sapiens
tcactttttagataaggctctgaagccccaggtctagtttcaatccactaatgcggccagcggcgagcaggaggagggaggattggtccggcgggggcggggccagagcagggctcagaggc

SEQ ID NO: 334345 - DNA, 122 bp, Homo sapiens
gaccagctgggggctcaggcctgcgatcccagcgctttcagagaccgaggtgggaggatccgttgaggccaggagtttgagaccagctcggacaacacagtgagaccctacctctaaaaaaa

SEQ ID NO: 334346 - DNA, 122 bp, Homo sapiens
ggtcgcggctgaagccgggcctgggcattctcgggacagccagagtgggccaggggaccacgtcccatccccagaggccggccctccgtcggagggtttccagcctccaggaaaggagcggg

SEQ ID NO: 334347 - DNA, 122 bp, Homo sapiens
gaaaactattagtcttaagatttttaactacatttacttgcttgatgagtcctcaagcttcggctgtgcatagactagtcagctgccggtgtgtgactagagcagggcttgttgtctcctca

SEQ ID NO: 334348 - DNA, 122 bp, Homo sapiens
ctttcgcttcacggcagccaatcgcttccgccagagaaagaaaggcgccgaaatgaaacccgcctccgttcgccttcggaactgtcgtcacttccgtcctcagacttggaggggcggggatg

SEQ ID NO: 334349 - DNA, 122 bp, Homo sapiens
tcagtcagagtacaccccaagtgcttgggagtgaggacgctgcctggtgggcccaggctccgctgtgcctggggaacttggggctcgccccacctcgagccaaggggccgtggagagtcctt

SEQ ID NO: 334350 - DNA, 122 bp, Homo sapiens
cacatggctatgtggacacagggccaagagcactagagtctccctacagcccggctctgtcggggctcatcctatggctgctgtgcccagggaggccttgcacccccatccgttgccgtgtt

SEQ ID NO: 334351 - DNA, 122 bp, Homo sapiens
cacccccgtccggcgcaagacttcccttggccaaaagaggcgtttaattagttctggggccgcggagagccagcgtggccgacaaagcccggctccccaggtaacccgggttccctgcggac

SEQ ID NO: 334352 - DNA, 122 bp, Homo sapiens
ctataatcccagctacttgggaggctgaggtgggaggatcacatgagcccaagaagcagacgtagcagtgagccatgatggcaccacgcctgagtgacagagtaagaccctgtctcaaaaaa

SEQ ID NO: 334353 - DNA, 122 bp, Homo sapiens
cagtggctgccagactggacaaggcgaggaacatttctatctggacagtcgtaaggaaggcgccggcccagaatccacaaatgctacgtgtcccttctgtctccctatcccgcatcagctct

SEQ ID NO: 334354 - DNA, 122 bp, Homo sapiens
tgcagaggctgtgttgtaggcctgaggggtgctggggacaaggccctagccaagtagggccgtcaatcctgctggcaggtgccaagagcagaaagggcttcttcatgcccagcggcaggggc

SEQ ID NO: 334355 - DNA, 122 bp, Homo sapiens
taaccaggctcactcgcctcgtgaggcccggggtgtgctaatgggagcgagaagcctggccgcagaggcaggagcccccgttcacttccagagaagaaagcagcgtgcgcactatgccctct

SEQ ID NO: 334356 - DNA, 122 bp, Homo sapiens
gtgcaggtcggcgctgagtccagccgcagtgacacgcacctcttttcctttcctccactccgcctccccggccggcctacagactgctccttcccgatgagccagcgcagcttccccgcctc

SEQ ID NO: 334357 - DNA, 122 bp, Homo sapiens
ttagccaggccgcagctcgaccctgcctctggcctcgcgcaccccagaacccgccgaccccggtcccccaagaccccagctcacaccaacaggtgttccccgggaggctccccgcgcaggac

SEQ ID NO: 334358 - DNA, 122 bp, Homo sapiens
ttgcagaggcgcccgcagaaaaagcacagaaagcagcagcctagtccagaaatggcgacgcgcggagtctctgcctctccgcaaaaggggccggggcggccacgggcgaggggcccgggccg

SEQ ID NO: 334359 - DNA, 122 bp, Homo sapiens
aagccaagctacctcacgccggcatcccttctgccaccagctccctgtccccagggctgacgccctttgttccaaagccggatgggacccggctgctcccaaacgtcatgttctgcctcccc

SEQ ID NO: 334360 - DNA, 122 bp, Homo sapiens
cattcatgttgaggaataatgaaagcaggagaagtagggtccaggtcagactgtaggcttcggagtggttgatggaaaactgttgcttctatgacagtgatgatcaagaagtgcttcaggct

SEQ ID NO: 334361 - DNA, 122 bp, Homo sapiens
gctggagtatgaaaaggaggaagccgaaggtattaagcggaagggaaaggagaacaggaccgggatcttttgcatcccgtctggatgatcacgcttgggggattgattcatggatggattga

SEQ ID NO: 334362 - DNA, 122 bp, Homo sapiens
agtggcatatatggggacttctagtggcactcaccgtgtcaagtatcagtggctccactgcggacttcttccacacctgtgtcactgagacaattgaccagtgagttccacaagcacccatt

SEQ ID NO: 334363 - DNA, 122 bp, Homo sapiens
ggatgcaaggcaagttgcaaaatcagggaatgagaaatagtgtaggtgagggtgtgtgtgcgtgcaggtatcttaagaccaaggtaggatggtgtaggttggtgtattagtccgttttcacg

SEQ ID NO: 334364 - DNA, 122 bp, Homo sapiens
agcaagggaagttggatgagaatttgaatccaaagcgtgccatgggaccacaattgcacacgatcaatgagtctcacaaactgaccacggcttatctgaggcagtttagggttgtgcaagag

SEQ ID NO: 334365 - DNA, 122 bp, Homo sapiens
gctgctggcggaggtgctaagcccctccctgccagggctggcggggctggctggtggctccgactgtggggccctctgagcccacgcccacccgaaacttgtgctggcccgcaagcgcaatg

SEQ ID NO: 334366 - DNA, 122 bp, Homo sapiens
gtccctgaatgccttaacccggaattctgctcaaggagcatgcgcagagcgtgggacgcgcgtgcaaccatttctgaagagggcaaaacacccgaacttcgtcttaaagaaacagaaataaa

SEQ ID NO: 334367 - DNA, 122 bp, Homo sapiens
agtctcccacctgagatacgatcactccttttctttcccgtacagacatctctgtgggagcgatgctttcacataaagcgcttaatctccaatggtaaagtttccaacactaagtcgagacg

SEQ ID NO: 334368 - DNA, 122 bp, Homo sapiens
cgagtcagctgggtatgtgtgcttgtgggtatcaggtgcatggctgtgcgtacatgtgtgcgtaagagtcggtgcatttgtgtttcagcgcggctaaggccctgactgagatgctgtgtgtg

SEQ ID NO: 334369 - DNA, 122 bp, Homo sapiens
ccggttggaacccgggagtgggaagcccgtgcagaattcgtcccaccgtcggcaaacaggcgcggcccagcactcaattattcatgaggcttgcagatgaggggcccgccccagtctcagac

SEQ ID NO: 334370 - DNA, 122 bp, Homo sapiens
cggaggaggctgtctcgctgtggagggtgggcccggcctccggggtctcctttcagagtccgtttcaaatggcgtgggcagaactcctgagtgtgtgcaggtggacggcggccaggtgcccc

SEQ ID NO: 334371 - DNA, 122 bp, Homo sapiens
cctcggattggggaccgtttgaggtcactgaccttgaagagcagaacgtggagcttcccgcgcgccaccagcagcccgtggttggcctccagccgctgcacctgggctgcgcggcgcaccgc

SEQ ID NO: 334372 - DNA, 122 bp, Homo sapiens
gaagttcaaagtgaggaggcctcagatggaaatgaggaacttaggaactggagaaaaggtcgcttttgctatgccttagcaaagaacttgcctgcattgtgctcctgccctagagatctatg

SEQ ID NO: 334373 - DNA, 122 bp, Homo sapiens
gtgaaccagtggggagtgcgaccaatcaatgggctcctggctgggtggtgggacggccggcgtccgactcctcccatgtagtgatcggtttaggtaggtcggcctggtccccggcggaggtt

SEQ ID NO: 334374 - DNA, 122 bp, Homo sapiens
cttgcacacccgcagattctcctaggagtcacattctctcttcagatagactctgggtgccgacactcccaaacatgctcttgaggagcagtctctgtgataagctgatcttccagacaatc

SEQ ID NO: 334375 - DNA, 122 bp, Homo sapiens
gcgtggacatttgcctcccttttataatagctgtattcaaatgaggtatcctggaagcctcgttctgataggatgagagcagactctgtactacaacacggattggataatagtctccaact

SEQ ID NO: 334376 - DNA, 122 bp, Homo sapiens
cttgactccaagtttagaggcaagaaataggaatgggatttgaaactcaagagtttcctgcgaccacaagagaaaacctagagaggtcttcgtctatagagaagtatctctgatgaatggtc

SEQ ID NO: 334377 - DNA, 122 bp, Homo sapiens
cactgcactccagcctgggcaacattgagcactgagagaacgagattccgtctgcaattccggcacctcgggaggccgaggctggcggatcactcgcggttaggagctggagaccagcccgg

SEQ ID NO: 334378 - DNA, 122 bp, Homo sapiens
gcagagtaagcacacagaacaacccacaaacctggtcacagagtgactcatgcagacagacgcccagctcaaattcagtaaaaaatgatacacatttataaaaatgattacatgtgttcaca

SEQ ID NO: 334379 - DNA, 122 bp, Homo sapiens
ttcgttaacccctcagagtaaagttgggggactgggagaaaactcagttccgttgtatggcggtgtcgtggaatgaggctccccgggactggtaaactttcaggcaaggactcaaccttgta

SEQ ID NO: 334380 - DNA, 122 bp, Homo sapiens
gctctgaggctgggcccttttttagggttctttgtttttcatttttgtgtgtgggctctccgtgctttgaagttccagccagcaacaaagagaaaaacttgctctggtgtttttagtttggc

SEQ ID NO: 334381 - DNA, 122 bp, Homo sapiens
gaaaggcaggtaatcaaacaaggccgccgcagtacgcggcgctgggaaggggaaggggggcgcttcgggcttgaatagggtcctccgggtgggctggaccgtaatccccagtggagtgcgca

SEQ ID NO: 334382 - DNA, 122 bp, Homo sapiens
cttgggggaattggggccggtgttcattgacatcagtgatgttgaccatgactgtggtcacgtcactgagggaagaggagctcttccggctgcactcaatggacaggaagtacttggggctt

SEQ ID NO: 334383 - DNA, 122 bp, Homo sapiens
gtgtgaagccgccgctgggcgcctcaccgtgatgttgcagtggagcctgagctgccgcggcggctcctggttcttgtggaaaatagaggacaacaacttcagcttggccttgaaccctgaca

SEQ ID NO: 334384 - DNA, 122 bp, Homo sapiens
tccccgcggcccccgccctcagccctccttccttgatggccagcccgctaggcgccctctcgcccccaatacccccagcgggacccctagactggactcctctgaggcccgacccgtctctc

SEQ ID NO: 334385 - DNA, 122 bp, Homo sapiens
gccgcagtggccactgccatcgtcaggcccgagggcccaccggcccctccacgggagttccgcagccgccgccttaccggaacccaagagaccacctgtacgcggagaacgctggggcgcgg

SEQ ID NO: 334386 - DNA, 122 bp, Homo sapiens
atcttatatgacataagaattaatctgacctgctttctactgttatgccattaaaaacaccgctgaaagttatagcctacagtaatacgtcactctaaataaacaaggtaggaaatagctta

SEQ ID NO: 334387 - DNA, 122 bp, Homo sapiens
gggaagggagggactaggacactgtttagaaggggtaattacactaaatacactgaccttcgctgaaaaatagaagggacaggtggctacagaagccagctcttaccccttttgccgtcccc

SEQ ID NO: 334388 - DNA, 122 bp, Homo sapiens
cgtgccccgtctcacctggtgtctctggctttagcattggacgagccagtgcccgatgaccgttatcacgccatctactttgcgatgctgctggctggcgtgggcttcctgctgccatacaa

SEQ ID NO: 334389 - DNA, 122 bp, Homo sapiens
gaccaggtccactcccgcctcttctctccgagaactgaagtgcgcacctagtccgcgcgccgccttcaaatagccggcctccgccctctggccaatcaccgccaacgctccctggcggcgcg

SEQ ID NO: 334390 - DNA, 122 bp, Homo sapiens
acccgttcccaccctgtctgggttttcgggtgttcaccattgaggtgggagccacatctgcgccccgtgacctggcgaacctcattgaacacttctgcccgacccccgcagcagcagcgcga

SEQ ID NO: 334391 - DNA, 122 bp, Homo sapiens
agggagcaacccagctatgctttcctgtaagctctgtcagttttccaaagcttgttaacacgctcatataaaaggaaataggacgaacttcaaggaatttacaactggtcttaaacttcaaa

SEQ ID NO: 334392 - DNA, 122 bp, Homo sapiens
tggctgggctctggggcaggccggcgtggccaaggctgccgtggggagcggccgactccgcggtggccagcttgttgttcttcatgttgtcaatatcctctgccaggggtgggtcttggcgg

SEQ ID NO: 334393 - DNA, 122 bp, Homo sapiens
cacttttctctgcaaccctggaagaactgtgtttccagctaccgcacgcgcaactcacatcgcaagggaccgaggcggtacactctgagcgtaaacagagaacacctgcagctctggaatcg

SEQ ID NO: 334394 - DNA, 122 bp, Homo sapiens
aagtctagaaggtggctacgagatattattattttaattattcgctccaagccaacaaagcgagcaaaacggattaaagctgttgcagaggaatcttctttcactcaacttaagtccagaca

SEQ ID NO: 334395 - DNA, 122 bp, Homo sapiens
agtctctctccttgtaacctgttctgcagacctgaggaagagggtgggaggctgctggtgcgccaagtgggggcagacccggagttgacatttcaggggcttgcagcccatgcagcctctgc

SEQ ID NO: 334396 - DNA, 122 bp, Homo sapiens
gttgggaattactaatgtagacagtgattccttatcatcacacacgttttttaaaaactgcggacaggccgaaagaggaggagccgccacaaagcccgccacgtcttcctaaattggtttac

SEQ ID NO: 334397 - DNA, 122 bp, Homo sapiens
ctccaccttcgtgggtcgcgccggataaggtgggctttgggcggggtgctgctgcagcggcgcttcctggtggtcagggcgccatggcgctgtcctggctgcagcgcgtcgagcttgcgctc

SEQ ID NO: 334398 - DNA, 122 bp, Homo sapiens
ctcccttcagttgccactggcgacaccactactcgcccacgcttcttactggaggaggcccgaccctccgtagaatccccgcagagccggcctgtaaccccggcgttgtctgccccagcggg

SEQ ID NO: 334399 - DNA, 122 bp, Homo sapiens
tagttcagagaatttctgtacaccctgtacccagctcccccaatagtaacatctcacatacggtgatgaaaatcgggcatgaacccgaatgcagtgctcttaactaagccctgggccttatc

SEQ ID NO: 334400 - DNA, 122 bp, Homo sapiens
gcctccccaaaatcacgcaaaacttggtttgctaagaattgtcagctcttctaaaggaggcgcttcacgcatctcagtctgtgaaatgggacccaggacccaggtagaggtgcgttctcggc

SEQ ID NO: 334401 - DNA, 122 bp, Homo sapiens
cgcgtggccttgtgggagctgtagtacgctccctgtgcccactttcctgggccggggtagcgctctagggcagaagggtaaactcaggtaaggaacggggttcttttccttccagtttttct

SEQ ID NO: 334402 - DNA, 122 bp, Homo sapiens
gaaggtgttctgtgcggtgcttggcacccagtcagcactcagcaaatgtccccttccttccgacacctgcccttgccaccagctggaccaaaattggccacctgcctaaacttgcaatggtt

SEQ ID NO: 334403 - DNA, 122 bp, Homo sapiens
aggcacacggcgtcaactctgccaggtgtataggcttcccacgtgccaggcagcgaggcacgccacgcacaccgcgtcaactcacttgaccctcggggcgaccccacgagactggcaccatt

SEQ ID NO: 334404 - DNA, 122 bp, Homo sapiens
agtggaaccagagacacctgggggtgaccagcagcccctggatatgcccacaggtatgaacgtacctggggtggtggtaggcagggaatacgggggactttgagaagctggcatggattgcc

SEQ ID NO: 334405 - DNA, 122 bp, Homo sapiens
ttccagctggctgcacgctcggatatgggggtgggcgtcttcacccccaccattgaggcccgcacagcccagtccagtaagtgtctcccaagtccgctgcctgttacacctgggctgggaca

SEQ ID NO: 334406 - DNA, 122 bp, Homo sapiens
aactttagagatttgtatgtggcccatgtcagtgacagatggaacagtaagttcaatagacgtcatgtctgccgctcccaggctatgcttcctttaatgtagtgaccttctgggagcattgt

SEQ ID NO: 334407 - DNA, 122 bp, Homo sapiens
aaagggctttgcaacaagatggcgaggaggcaccgacacacacaacaagggaaggagccgcgctgcccccggccgccgcccccgctactacaccggggccacagccaaagcccggaccggag

SEQ ID NO: 334408 - DNA, 122 bp, Homo sapiens
tttccaaacacaataacctcaaacagtggtctctaagcactttcctatgctcttccaaaacgtgacctcccctcttactcacacatcccctacacacggaaaaggaccactatccgtccagc

SEQ ID NO: 334409 - DNA, 122 bp, Homo sapiens
accctcggaccgagattcctattggtcccaggtgtcgagcatgcgcactttggtcgtgggcgcgtgtgtggaatgggaggaggtcgcgctgtccatgggcgtccttggcctgcgccacccag

SEQ ID NO: 334410 - DNA, 122 bp, Homo sapiens
cccggaggcagtgtggccagggcagccttggttcacaggctggctcctgctcagatgggacgggctgcggctgtcactaaggctgagcagaaaatggtaaggccccccaggagacggcagtg

SEQ ID NO: 334411 - DNA, 122 bp, Homo sapiens
tcattgtagaatgctttgaatgaatccgaggactccttagctctcagaagactcattaaacgagcctagcagcgggtgaagattaggcgctgagaaagtgatagcacctgggttagcacccg

SEQ ID NO: 334412 - DNA, 122 bp, Homo sapiens
ccgggagtattccgcctgttccatgccatcgagagcggttgtactatgttcattgcgctgcgcaatatgtgcttaataaattcttgacgggtgaatgaatctggtcccttcggtgaatgacg

SEQ ID NO: 334413 - DNA, 122 bp, Homo sapiens
gaatgccatataggcgagtgacgtcaggccgtttgttgtcattggcggctcccaagatggcgtccatcatggaagggccgctgagcaaatggactaacgtgatgaagggctggcagtaccgt

SEQ ID NO: 334414 - DNA, 122 bp, Homo sapiens
catatcctggagccggggtcccctgcctgggagacggggcacatccagggttaatgcccacggggtggagccttcactgtccaggctttcttgccgggctctgcctgccttttattttccct

SEQ ID NO: 334415 - DNA, 122 bp, Homo sapiens
cggccgcggctaggggactggccagatccagacccttgtcggccgtggcccgaagactgacgggagccagacccatgctgaccatagcgggaagacgaacgtgagctagatccgtgtcgttc

SEQ ID NO: 334416 - DNA, 122 bp, Homo sapiens
cgaggtggggggcttgggacacagaacagtgagttattagcttctttccagcctgcacctcgggcacctctggcaaaaagacctgccagttcctttcggcccctggagcctctctcctctgc

SEQ ID NO: 334417 - DNA, 122 bp, Homo sapiens
ttagccaggatggtctcaatctcctgacctcgtgatctgctggtctcaatctcctgacctcgtgatctgcccgtctcagcctcccaaagtgctgggattacaggcttgagccatcgtgcctg

SEQ ID NO: 334418 - DNA, 122 bp, Homo sapiens
ggagggctccggagcacatgctgagcggagcggctggggctgcgcggcgtggcggagcagcgctcgctccctcgctcactcgctcgctcgcagggacacacgcaggggctgacagctgtgct

SEQ ID NO: 334419 - DNA, 122 bp, Homo sapiens
gacaacaaaaatcataagaataatatgtaaaagcaagtatgaagcctttgtatttgcttgcgacttgcagtttgaatagcaaaatgatctttcacatcaggctcagtgtgttaaatccagcc

SEQ ID NO: 334420 - DNA, 122 bp, Homo sapiens
cccggagatcgagtgtttgatcttcccttgctccaggatcctgaattctttaaacacactcgcacgcgctcgcacacaaacacacacacacacacacacacacacacacacgcacacgcagc

SEQ ID NO: 334421 - DNA, 122 bp, Homo sapiens
cgcaggccctccgggttagagaccgtcgggggcgtgtcttgagctggggacgcgactcctcggcgggggtgcacctgagaggccgggaccagcgaggccgcgccccggtggcaggtgacccc

SEQ ID NO: 334422 - DNA, 122 bp, Homo sapiens
gagcgcctgcgcaagaggacgcctgcgcaagaggacgccgtcagcttggcgtcagcgcgccgggctctggcccgccccctgtgacaccagccccgccccaccccgccccgcatacccgtgcg

SEQ ID NO: 334423 - DNA, 122 bp, Homo sapiens
ttgggcgccccaggctcgcgcccaatgcggggcccaggagggcgcagtttgaaaggtgaccgggctggggctgtcggagacccgctctgcggggtggcccttctagccgctaggcccacgac

SEQ ID NO: 334424 - DNA, 122 bp, Homo sapiens
agcaggagaaatccttcgtgggaagcagcagcccctaagctgcctcatctacgtaggaatcgccctatccgtgatgtcaccgacagcgcctttcccggtccccatctgctcttccgcccgac

SEQ ID NO: 334425 - DNA, 122 bp, Homo sapiens
gtcggcaacagacttgagtttggatcctagtctgtttatttccaaagcgctgttatttatcgggagcaaccctaggagaatgcctagacacacacccaaaaaagcagccaggcagcagaacg

SEQ ID NO: 334426 - DNA, 122 bp, Homo sapiens
tacacagaaggccaagcaaactgcaggctccgccctcttccccgcccaagtcacaacccacgccccttgcccccgcgtctcctaccaggcctggcagagctcctcgcagagcggctgtgcct

SEQ ID NO: 334427 - DNA, 122 bp, Homo sapiens
cgccccctattagcattcacagtacatctagttgtgagtgcgacccccgggggacgcattcgtgtccagggcgtacgaaaaatagggcgagcgtgcgcaagcatggtgcaggtagtgaacat

SEQ ID NO: 334428 - DNA, 122 bp, Homo sapiens
ggaagaaactcaatgggccaaggttagagttccactgtaacatctatcttctgtgcagttcgaattcttccaaagtgtgtgctttgtccagcttgctctgggcctgggaattagatgctcct

SEQ ID NO: 334429 - DNA, 122 bp, Homo sapiens
tttgtaagctcataatactgcacaaataattggtggaaaacaccatcataaaacattttacgacatgagcatacaagaccattgtcagggtgaggcagcacagaattacaagaagaagatcg

SEQ ID NO: 334430 - DNA, 122 bp, Homo sapiens
ggtcttggagaggggaggagacaggagcgagtcccgggactggcagctgaaaggggttcgcgtgtggttgcctgttgcagcgcttatttatccggcgctttagagtttccgaagagctgttt

SEQ ID NO: 334431 - DNA, 122 bp, Homo sapiens
ctcccgcgcctcccccatcccaaaccccagcagcgtcgctgcctctcccggaaacaagcccgctgagcaaaggcggaggaaaaccttgggccttccgctctgattggtctccccccgccgag

SEQ ID NO: 334432 - DNA, 122 bp, Homo sapiens
tgtctctgttgcacattgggctgactgtgcttgcagactgtgaagtgggaaatatctgaacgaacacttctgtatttacagaaaatgacaacgatgacaatgaagatgttcaagttgaggtg

SEQ ID NO: 334433 - DNA, 122 bp, Homo sapiens
aaaatgtactaatactttgaatccgccaagcagacacgatctgggtttgaccgttctctccgggtaaaggtgaaggctgaccacgggggccgctctccctccaggccccagccacgccctct

SEQ ID NO: 334434 - DNA, 122 bp, Homo sapiens
tggccggcagcctctgagacggcccagggcctccgtcctcctggaattctctttcctgagcgccactggacctggtgactccactccgatgcctggaggacagcaaaggcagcagagatggc

SEQ ID NO: 334435 - DNA, 122 bp, Homo sapiens
agggagggagcctgggagagacgcaggtgtggcgctcgcctgtgctggcggggtggcagccggggcgtggcaccctcggagtctcgactctgcccacttctcaggcagaaaactgaggtggt

SEQ ID NO: 334436 - DNA, 122 bp, Homo sapiens
cctgtacctagactttttacttaatattttggcactgcccttgtggtagggaatttgcagcgctctagttgttaaactggaaggacattcattctgcaacttgtacctcttgcttgatctgg

SEQ ID NO: 334437 - DNA, 122 bp, Homo sapiens
ccgcgcgcccgacgtcccgtgtcacagcgcctcggggcccttgcgcgcccactgttccggcgagcgcagctctcccacgggccacgtcctcccaaccctgcttgccctgctccgcacctttg

SEQ ID NO: 334438 - DNA, 122 bp, Homo sapiens
cagtgaactggggcaagactaaactatttcaatagcagtggcaggtgtggagccaaaccccgtccttctatgatacagggtgttgaagctcagcgctaccatgtgagtgtcgtcgggtggga

SEQ ID NO: 334439 - DNA, 122 bp, Homo sapiens
cacgttctggggcctcgtcggcatcgccgggccctggttcgtgccgaagggacccaaccgcgggtaaggaaagcgcgcaggccctgcagacctctccaccccggccccctggcccggctcgc

SEQ ID NO: 334440 - DNA, 122 bp, Homo sapiens
gagagcctggcccgtgtttgctggtgatgtcctgaaagaggcccaggtcctccaggaacacgcagggctgcataaagcacacctcctcacattgtcttagagacgatgggctttctaagtgt

SEQ ID NO: 334441 - DNA, 122 bp, Homo sapiens
ttggattctttaagtaggcccatccctcttctcttagtccagagctcttacttatttctacgcattatggccgtatgaaggctgtttgtaaacctgcaaaatacaataccaggtatcctgca

SEQ ID NO: 334442 - DNA, 122 bp, Homo sapiens
agcctcagcgtggacccgggactcctgcatcctcccgtcctgccccgcctgggcacaccacggccgagagcctcctgttggcatcagcctctccccagcaccgactgtgcgctcccgctccc

SEQ ID NO: 334443 - DNA, 122 bp, Homo sapiens
gtcaggggctcagaagggacgtctgtgggagaggggtcagcacggtatccagaccccgcccggggtgaggttggtactgaactgactgaggggcatggaacccccaccctccaccctggtaa

SEQ ID NO: 334444 - DNA, 122 bp, Homo sapiens
cataagccatagagtatgactttggttagaatcctttaccatgtgtggcttccctttgcacgtacataccatcaacctatcaatgtttggggagaccagaaacaagactcgctcccaccccg

SEQ ID NO: 334445 - DNA, 122 bp, Homo sapiens
ccgtcttctggaacatctcctgggcacgctgggtcacccaggacgggctctccttgaggccgctttcgtgagccatcctgcatgggggacagaggccggggtagcagtgggcgcttgggcag

SEQ ID NO: 334446 - DNA, 122 bp, Homo sapiens
ccccagtttttgcagtgcaaagccagagcgccacctgctggtagccctcaggtgtaggttcgaagctgctggggccccctggggtttgggacacaggagaatttcaggctgtgagtggagac

SEQ ID NO: 334447 - DNA, 122 bp, Homo sapiens
tcacgtgtcactgaggagccaatggctgacgcactacggcaggaagggatgctgcagttccgtctgcagttgacgaggctgttggtacacagcccagcccggcaccactcaaaaagtctcag

SEQ ID NO: 334448 - DNA, 122 bp, Homo sapiens
tacaatctatattatctcatatatagatttcttcctcactttatttgctcacttctgtcacgcatttaaaatgtcacagagaccaaaatagagtggctttctggtggaactcatggcagtca

SEQ ID NO: 334449 - DNA, 122 bp, Homo sapiens
tttgcggaggtcaacgccgactacatcacctggctgtggcacgaggatgagagccgggagcgtgtatactcaaacacgaagaagattgggagatgcatcagcaccaaggcggtgggcagtga

SEQ ID NO: 334450 - DNA, 122 bp, Homo sapiens
cggtcctcatggtgctgggggtggtgccaggcccggcgtttgcctggaacacagagcatgcgagaaggagcagaggacgtgggtgccagggaaggaccctggcgtcagagccagggcctgga

SEQ ID NO: 334451 - DNA, 122 bp, Homo sapiens
gggcgggggcacccgggcaggggtgccagatacagtattgtatctggcaacctcccggggcgctcagtgtggttttcccacccgggagtctggaagggtctcccgcagcccgcaggagacgc

SEQ ID NO: 334452 - DNA, 122 bp, Homo sapiens
ggtaattttctgagcccgcctggactcacagcctcatctcaaaatgtggagttcgttgctcgacgtaaggctctaaatctggtctgattgctgagatgctgcttcctccaagacggaaccat

SEQ ID NO: 334453 - DNA, 122 bp, Homo sapiens
gttattcccagccttagcgaagcctgagagcttgctggttagctcctcactggttttgaacgctgagtgagttgctctgatcgaaggaggcagggtgctcacacaaacctttcctacaattt

SEQ ID NO: 334454 - DNA, 122 bp, Homo sapiens
tgcgggcaggggaagaatgtcataaggtacattatcacaaggttacagagcacagtgtcacgaggttgattgatcagttagggtaagcctgttacaatgacagaatgttgcaaggttggcta

SEQ ID NO: 334455 - DNA, 122 bp, Homo sapiens
actctcattgtcagctctagaccctaaagattctcctctcctttgggggtcagcctccttcgtggggtgcctggcagtgctgggctcagctctgcctcacaatacccacgtgccacccccag

SEQ ID NO: 334456 - DNA, 122 bp, Homo sapiens
aggaggatcttggagagtgggaaaggacagggagcctccttccccaggaggtctgcagcccgtaagtcctgcttgccttctaggctgggttcctggaggcaaggagtaggttctggtcattc

SEQ ID NO: 334457 - DNA, 122 bp, Homo sapiens
ggttctttctaaaagctttcagtactgtttatagtttgtgctacccagttcccatggtaacgtgtttgttcccatggagaaacaaagtgaacacctaaccagagctgaacttgaagatataa

SEQ ID NO: 334458 - DNA, 122 bp, Homo sapiens
ggctcctcgagagggcgccagggagcagatgcatgcggacacctttcggccctctgcagccgccgtagctcctccctcacgccccgccccccccccccctcccggcagaaacctggaagtgg

SEQ ID NO: 334459 - DNA, 122 bp, Homo sapiens
gggcattggggaaagaggaaggagggcaggacatggggataaagcggtttcttaactgcgcgtgcgcccctggcaaagctgactaaggcgcctgaagtgacgtcattgcctgcatcacaaca

SEQ ID NO: 334460 - DNA, 122 bp, Homo sapiens
tgatcgggcggagcaagccgggcgggagaggcccacccaggcccgaggaagggagcccagcggggggcagtttccattgtccctcctgcccgctgcccccacgggcctgccacccccgctgc

SEQ ID NO: 334461 - DNA, 122 bp, Homo sapiens
gcgcgggccgaggctccctgctccgcgccggggctgcactgctgaggaccaggcagacgccgcgactgagccggaaagttcaatccttcaactccggccggaccctcctcgccgacctccct

SEQ ID NO: 334462 - DNA, 122 bp, Homo sapiens
gtgaaaattgagggtgccgctgggaaggtccgagaatgggttttcatggccccaaagtgtcgagggagggtgggggcgttccatctcccgcctccatttccacttcgccacctgcaccccgc

SEQ ID NO: 334463 - DNA, 122 bp, Homo sapiens
cccctctactcgtgtgcagggccctggcccctcccggggaacaaggctgggattaataagcggcctggctctctcccctaatgggctccagctgcacaaacattcccagaattcagagccgg

SEQ ID NO: 334464 - DNA, 122 bp, Homo sapiens
aaatcgctatttaaaaatatacaaataaggcccaagcataaaatctaactctggggctggcggtggagggaaggtgagggagggggctctggcacacgtccctcgtgtgtgcttgcgcgacg

SEQ ID NO: 334465 - DNA, 122 bp, Homo sapiens
ctcggtgaaaaaaaactttccttcccctcccgcccccccggggcagtagatatttacaaccgtaacagagaaaatggaaaagcaaaagccctttgcattgttcgtaccaccgagatcaagca

SEQ ID NO: 334466 - DNA, 122 bp, Homo sapiens
ggggagactttcaaaggcatctgtcatgactgtaggggaggaagcttggaggattttttgcgttaataaagacatcttacaaggggacttgcatttagggccccagagtttcttcaaagtgg

SEQ ID NO: 334467 - DNA, 122 bp, Homo sapiens
ccagtctcctcccaaccactcctttcctatttcatttccactccccacctttagtagctgcggtctctttaagtgcgcactttcggtgtaatgataggcgattgggccaataaagcgtttcg

SEQ ID NO: 334468 - DNA, 122 bp, Homo sapiens
caaggtgcctccagacctgcgtgaagcccagcttgatgcggcgttgcttgaaggtgcgggcgaattgctccagctcctccagatcactgggctcctcggggtgggatggtggctccaagcat

SEQ ID NO: 334469 - DNA, 122 bp, Homo sapiens
ggcctcggctctttctgcgagcgggcgcgcgggcgagcggttgtgcttgtgcttgtggcgcgtggtgcgggtttcggcggcggctgaggaagaagcgcgggcggcgccttcgggaggcgagc

SEQ ID NO: 334470 - DNA, 122 bp, Homo sapiens
cccgtccgtactggtgttattaccagattccccgaccaactccagcagcggcaggacagccggccgcttcccgagaggctccggctcgtacccgtccagctcctcttcgggcgacatgatgg

SEQ ID NO: 334471 - DNA, 122 bp, Homo sapiens
gtttccccctttcttgcctttgtctggttcatcatagagagagcgcggaccgtgtgcgggcggtcttgacgaaagaaccgagagatggatgcgctaaggtctaaagatacctttctccctcg

SEQ ID NO: 334472 - DNA, 122 bp, Homo sapiens
ttggtcccacctcacctggtgactagtgcagaccactctgttcttgcctgtttcaggcagcggaggaggagaaagagatggacctcccggactcggcctcgagggtcttctgcggccgcatc

SEQ ID NO: 334473 - DNA, 122 bp, Homo sapiens
ggtcaggagaccttgtcgctgccttcacagagttgggcaacgctcccggtcctggtcagccgcgggacgcaggcgcaaatgcaggcttgggatgggggaggtgcggccggcgcccacgtggc

SEQ ID NO: 334474 - DNA, 122 bp, Homo sapiens
ctctccagggcaaagacctgggcaaggcaggatggacagggcctggtcaacccagagccccgtgaacagaccaccaactatgccacaccaagctggtcagacccaccagatgctggaccccg

SEQ ID NO: 334475 - DNA, 122 bp, Homo sapiens
ccctcttgctccccagctgcgggcaaccaccattagcaaatgacattagaattacacagacggccccgccctggttccccctgcctccatggcagagtccgcacacaactggcccagaccct

SEQ ID NO: 334476 - DNA, 122 bp, Homo sapiens
tcatccacttcaggttgtgaacgacccggtcttgcctgaacctgctttatctatttgctgcgaaaccccactgagacaccccagtttcattttcaatgaacccttggtaataacagcagcaa

SEQ ID NO: 334477 - DNA, 122 bp, Homo sapiens
gcaaagtgcagcagagcagagtgagggctgcagcccgggtgcgcggtgggcggcggcctgcgggtgtggtgggcgtcccgggtgcgcggtgggcggcggcccgggggtgtggtgggcggtgt

SEQ ID NO: 334478 - DNA, 122 bp, Homo sapiens
ggtgagtgggtcccccgagctctgtgaccttatgctccacactaactctggcagagcctccgtttcctcataggtaagatggaaataattacaccctctggatggtgtgactgaagattaaa

SEQ ID NO: 334479 - DNA, 122 bp, Homo sapiens
atcttcgctgtggcagacgtttctatttatccacttgcgctcgccgagtggcgtcaccagcggtactgtaatgacgattgcagcaggaggatgacagcttagaaagaagagggcaatggggc

SEQ ID NO: 334480 - DNA, 122 bp, Homo sapiens
atattaaatatgtatacatgtttgaggcattataccatgtagagagagatgggagagctgcgctttgggtaaaaacagttcctatttttgtgcctgttgtttatgccacagtaaataatgat

SEQ ID NO: 334481 - DNA, 122 bp, Homo sapiens
ctaactgaggggccaacatcaggaataaggcacaggtgtggggacagtcagaggaggcagcggcggcggggggagaggggtctctgggtcatggctgcaggcgccaaccctgggctcagatg

SEQ ID NO: 334482 - DNA, 122 bp, Homo sapiens
agttccaaactccccctccccacccccaggaatacttatctctgtggagagttagttagtcggtgggtaaagacagtgaggcccccaccatgtgcccagcacagaagaacacaagaccttct

SEQ ID NO: 334483 - DNA, 122 bp, Homo sapiens
tgggtgagcctcaggaaattccttctgttcaccccttgtaatcgtggaggggtggtttcacgtggctctatctcacactcacaacctcagagtagcgtgggggtggggaggccggacaccca

SEQ ID NO: 334484 - DNA, 122 bp, Homo sapiens
gttgcgggggatctgcccaatgaacagcttgatggcatcgtggtccttcatgggaatggtcgacgggttccccgggctgtggcttaatccgttcatgtgcccggcactgcccgggctgctgc

SEQ ID NO: 334485 - DNA, 122 bp, Homo sapiens
gggggatgccccccctatcctgtcctgggcagctgctgtcctggtcacagggtctgaaaccggagcccctgagtgggggtggggcggcagctctggcctggactgggggcgggtcctgcgcc

SEQ ID NO: 334486 - DNA, 122 bp, Homo sapiens
tgtaacataaatttttaatcatcattggcttgaaaacatccaactcaaaatggccattgccgcctccaacggttactgccacacaaaaccccatgacttgggctgcaacgatggccattgct

SEQ ID NO: 334487 - DNA, 122 bp, Homo sapiens
gggcgctggggcagggacctggcgggggattccaggtgccctcctgccccgtgaagcagccggtaggaacggcccgggccccacaggtccggcggaaagggtgtccaggaaaaggtcttggg

SEQ ID NO: 334488 - DNA, 122 bp, Homo sapiens
agagtagtgtagtttctcccgccgtgggcacccggccccttgctaccccgcaaaatctcgcgaccatttactctggccatccgaaggcgcgtgcctgggttgcactcccgtgtccggccctc

SEQ ID NO: 334489 - DNA, 122 bp, Homo sapiens
aatatagacagaaatatgaatgaatgcaaacactgttaaccactggttaaccactgatgtcgcttccagacttgggttctctatggttcagtgtgggttgctaggattgagatagccagtat

SEQ ID NO: 334490 - DNA, 122 bp, Homo sapiens
agaacaccgctgcaggtcgatttgcaatttacataacaagctgtttacacttcactgggccgatggagggaggaggcagggaagagcaggaggcgacaggctggtgggggagggggcagcgg

SEQ ID NO: 334491 - DNA, 122 bp, Homo sapiens
ccgccccctgcaccccccaccctcatcccctccccctccgccccctcccccctgcgccgccggctcccgatctgattcctgatccttgattccttgatccttggtcccgccatgggagcctg

SEQ ID NO: 334492 - DNA, 122 bp, Homo sapiens
tccagcctctgccacgtgccagccgggtgatcgcagggcacgtgcttttgccacgtttgtcgtctcacggggctgctgggaggatgaagtgggggtgacgccggcccctctgtgctcccact

SEQ ID NO: 334493 - DNA, 122 bp, Homo sapiens
ggccccaccgtctggagagagagctgtcccggcccccaccatccggagagagaggtgtcccggcccccaccatctggagagagagctgtcccggcccccaccgtctggagagaggtgtcccg

SEQ ID NO: 334494 - DNA, 122 bp, Homo sapiens
actgtaatagtttgctcatctgccttccccattagcttgagaattccttgaggacatttacgcaaaagagatgtttactgagtttctactgtgcactgttttagatgctggcattgtaacaa

SEQ ID NO: 334495 - DNA, 122 bp, Homo sapiens
caaacactatccccttgacatcagcccatttctattgtgtcttattaggtcctcgggctacgaggacctagtgaaaaacgtggctgccctactactttgctaagaacaagaaccacacagtc

SEQ ID NO: 334496 - DNA, 122 bp, Homo sapiens
ctgagcatgtcagagcccccggggcgatggaggctgtccaggtcatggtaacgtctagcacgatgcagacagataagggctctcgaggcttccatacccagccccgtgtgagcccagtcccc

SEQ ID NO: 334497 - DNA, 122 bp, Homo sapiens
gagcaaatcgctctagtttttcagtgattgtgctggattttgaaattaaagccagcggggcgaacgtacctgcctgagcttcaagagatgtggcgggctggtggacttgtgggcttgtgagc

SEQ ID NO: 334498 - DNA, 122 bp, Homo sapiens
cagatgaggccaggctcctgccactttggagtgcataagaaagaaggtccctccttcatccgctgaccttccctgagccctgggctgacctctggggcacttctcccaagacatcttaaaac

SEQ ID NO: 334499 - DNA, 122 bp, Homo sapiens
acgacaacgtccgtttctcagctctggggaccgtagcgtggttatgtgagttcacgttagcggaaggcgggtgagtgaagggcttacagaaaatctctgtactgcctttgccattcctctgt

SEQ ID NO: 334500 - DNA, 122 bp, Homo sapiens
ctgggaccacaggcaggcaccatggcgccctgctagtttttttctttttactttttgtagcgatggggtccaactttattgcctaggctggtctcgaactcctgacctcaagcaatcttctc

SEQ ID NO: 334501 - DNA, 122 bp, Homo sapiens
agctcttggatgtgagaagacacacgcacaacgttagaagctggcaacacacacagcaagcgtgtgtgcggcgcccaggctgaggcgagccctgatgcgcaggggcgctcggcagtcctacc

SEQ ID NO: 334502 - DNA, 122 bp, Homo sapiens
gagctgttaccccagcagacttctcagcacttcccgcagaggcttcatgcatagaaggaacgggtactaaccacaggggctcttgtgacctcaagtggaaagttttaagcagcattgcaagc

SEQ ID NO: 334503 - DNA, 122 bp, Homo sapiens
agaccgggtcctcgtcgttgagcagtttggtgagctcgggcagggcgcgagtggccagctcggcatcgtcctggtagttgatgagatgcacaatggccgacttgagcagctgggacggctcg

SEQ ID NO: 334504 - DNA, 122 bp, Homo sapiens
aatcaggcgcggagttggagaggagggcgtggcctccggcatttggcgggccctttgtctcgctcctgccagagttttagttgcctgtctctgctattctgcgtcctccacctcgggagccc

SEQ ID NO: 334505 - DNA, 122 bp, Homo sapiens
atatctgacccccacttcccctcatggcctgaaacaatctctcaagttaaattttaaaagcgccctggccaaggagaaagtccattcagatggttagaggccttagaacattatttttggtt

SEQ ID NO: 334506 - DNA, 122 bp, Homo sapiens
ctgtttctgttttcttctagattactttccctttggatatgttagactctgtacccccaacgtaagcagttttcttttatgttcatgttcaaatgagatgtcagtaacatctctactagtat

SEQ ID NO: 334507 - DNA, 122 bp, Homo sapiens
ctgccgccgttgctgagacccagcgggcgatgggtgagttgaccccggcgtcctggggggcgccgcggcccctctatccccgcgctgcccgccctcccgcgctgcgcttggcgccccccgcc

SEQ ID NO: 334508 - DNA, 122 bp, Homo sapiens
ctggggctgactcctggggccaaggtggagacccctggtcttcagggggccctgccaggacgccccgcattcatgttgggcggggcctgccacctgctatcagatctcgggtggggctgcca

SEQ ID NO: 334509 - DNA, 122 bp, Homo sapiens
tgatacacacacatttactggtttatggtaggaaaactgctctggctgggtactggcactcgcctttgtgattcaggcatgaaaccatgaggtgcccagctggaattcagaagaagtacatt

SEQ ID NO: 334510 - DNA, 122 bp, Homo sapiens
gacctcgtgattcgcccaccttggcctcccaaagtgctgggattacaggcatgagccacacgtccagcccgtgagccactgcgcctgacctgtatttactctttaaactatatattgctttg

SEQ ID NO: 334511 - DNA, 122 bp, Homo sapiens
gggtggctgccgggcggaggggcttctcacttctcagacggggcggttgccgggcagagacgctcctcacctcccagatggggtcgcggccgggcagaggcgctcctcacatcccagatggg

SEQ ID NO: 334512 - DNA, 122 bp, Homo sapiens
gctgcccaaggtatgaagcagatgagggaccagcactcagtctaacatgtaaacatcatacgtaataaaggttgtgtttcaaaccttacctggatatattatttaattaacaaattaatcta

SEQ ID NO: 334513 - DNA, 122 bp, Homo sapiens
ccaaactccagagtccgtctccgccggagaccggcagcgacgctgaccggccacttccgacgcaagaaccggaagccatggcctgacttccggcaccgccccgctcccccgcgcggtgtttc

SEQ ID NO: 334514 - DNA, 122 bp, Homo sapiens
cagcgctgggcgctggggaggctgcgccgcagcacccggttggtcaggaccaagtgggcccgaggcggacgtgagaagggtcgggccaagatggcggtgcaggtggtgcaggcggtgcaggc

SEQ ID NO: 334515 - DNA, 122 bp, Homo sapiens
ctgagagaagcccgccggctcttacctgtgagctgtatgccaaggagaagaagcaccgcacgagtagagctcttgccatacatgagggaaacccagccttggccccagagaccggacggggc

SEQ ID NO: 334516 - DNA, 122 bp, Homo sapiens
atgcagcttacattcaggttggcaggcagcagtcacttttcagtttttcaaaggggtaggcgggttggggagttctttgaatataccttcctgtccttcccgctcatattttagactataca

SEQ ID NO: 334517 - DNA, 122 bp, Homo sapiens
catatttaaaaaaaatcatcacagagttgggatggctggaagtagagaggttatataatacggtgaccaatggataaatctcctctgaccactgtcttatgggcaataagtaaggtatatta

SEQ ID NO: 334518 - DNA, 122 bp, Homo sapiens
acagcggacggcccctcccagctgtttctgaagacccagaggaggatgtttcaccacagccgcattcccgtgagctttacaaagaataacctgttggccaggacagcccgagtgcccggggc

SEQ ID NO: 334519 - DNA, 122 bp, Homo sapiens
aaactccctcagggcccaccagccccgtgagccggaggcgggagggagaaggatcggaagcgcattcgcttctccagcaggcacggcgtggcactcgaggctccaaaagccgcagcccagct

SEQ ID NO: 334520 - DNA, 122 bp, Homo sapiens
actcacactgccttgatggccattcgattggattcctcccaaatttcctaaaaagggagccgcgaagggcgctgggcagtgtggccgccaacttccaccccggcaagcccctctgtcctatg

SEQ ID NO: 334521 - DNA, 122 bp, Homo sapiens
gaccagaggacagagaagggactccctggctggggacgggtggcagggtctggaagtgagcggcagagctggcccccagcctgcctggtcctctggggtactttctgctgggacccaattta

SEQ ID NO: 334522 - DNA, 122 bp, Homo sapiens
gacaatcagacagaaaactgttcgtatttcttgcgctttgtcttttagaatgtggcacatcgaatagagttaccagttgccctgatctgactgatttcgtataaatgtctttgctttggcaa

SEQ ID NO: 334523 - DNA, 122 bp, Homo sapiens
cgagactccgtctcaaaaaaacaaaaacaaaaactttatacagggaaacgtgcccaagtgcgagtgcgcagctcaatgaatttcttccagctaaacacatcggatcaggagcaggcattccc

SEQ ID NO: 334524 - DNA, 122 bp, Homo sapiens
gattagcagacggaggtgggacccgaaccccggctgaagctgaaactgaagctgaagaggcgccaggggcagagccaccctgtcactaccatttgggcagatctcagaaaggaagcggggca

SEQ ID NO: 334525 - DNA, 122 bp, Homo sapiens
ggctgggctgggggggtcccggctctgggcccatgcagaggctgtggcccccaggacgggcgggtagttaaggcaaagtgggcgggcaggacaggcgaagctgagtgcggagctaggaacga

SEQ ID NO: 334526 - DNA, 122 bp, Homo sapiens
ttggacacagtacgcagtagactaaataaatacttgttgaatgactgactgacggaatgacggctgtgtggggagtggattgggtcgtgaggcagaggctgcggtggaaactcaggcaggag

SEQ ID NO: 334527 - DNA, 122 bp, Homo sapiens
gatcacgaagggcacgggcatgagaaggcgacagaggaggtcctcggctcgccctgggcgcggagcgaggactctggtcagaggtaattatgtcaccgcgttttctcgccgtgacagccgaa

SEQ ID NO: 334528 - DNA, 122 bp, Homo sapiens
ggttctgaggccgagtggtgaagggctgggggtgcccccatggcttatttctgacagcagcgatgggctgagggcagtctttctgtgaggatggggcaggactctgtacccaggcacaggca

SEQ ID NO: 334529 - DNA, 122 bp, Homo sapiens
aatatgtattattccactaaccattctaataatgtattgtcacaggaggcaccacgtgcacgctcagttagagacactcttcatgagactgtggaagaggaggcaggaggaagcagagattt

SEQ ID NO: 334530 - DNA, 122 bp, Homo sapiens
catgtggactgagtggtaatgtatcagcctggagcaggtgtctacaggcgtctggcgcctcgttaccacattgagaagctggggtgcaggatgcagccagtggctttatctcaggctcttat

SEQ ID NO: 334531 - DNA, 122 bp, Homo sapiens
agatggattacagtgacatgaataacatggagtagcatctatgggaagtcaccgctgaatcgcatttattcattcaacaagctttactaatactctggtaccaggccctaggaatacaacat

SEQ ID NO: 334532 - DNA, 122 bp, Homo sapiens
agaagatagaatccatgaagaggctaataatgaatcctctgaccacagaaaatcagtgatcgactgcaagatcacaatttatcagtatcataacaaagaggtataataaagtttttctaaaa

SEQ ID NO: 334533 - DNA, 122 bp, Homo sapiens
caagctcatccactcgtacacgcatggaatgtaacaagctccacactttggctcctgcctcgcacacgtatgtaatgtaacaagctccacactttggctcctgcctcgcacaagtatgtaat

SEQ ID NO: 334534 - DNA, 122 bp, Homo sapiens
cccccgagtcccaaacaggaggagtcactggaacttggaaacgcgtcctgaactccaggtcgcgccaatcagatcagagaaagaactatgggctccgcccctccagccgcggtcatcacaga

SEQ ID NO: 334535 - DNA, 122 bp, Homo sapiens
tgatgttcaatgtacttgatgctattcatcaagaacttatgtgccaagtattgttttaggcggtttatataaagcttagtaacaaacaagacttggaggtgatatgattattaatcgtattt

SEQ ID NO: 334536 - DNA, 122 bp, Homo sapiens
gcaccccgtaccccgcagcctgtccgtccatccgccccgcttcacttcgctgtcccctgtcggggttcgagtcgcagcctccagcctcaacccgcacctcccgccctgcagctcaactctcg

SEQ ID NO: 334537 - DNA, 122 bp, Homo sapiens
accacctctttatctgccaggatggccacaggggatctaacctattgttaaatgtctacccgacctgggaaggaggttcaccccatctcggttacttgctccactgtctcacccgtaaacaa

SEQ ID NO: 334538 - DNA, 122 bp, Homo sapiens
ggggggttctgcagagaggtgcgtgtggcactgccctgtgtgcagaggcagagtgtcaggcgatgaggggggctgggctgcggtcggacaccaggccccaggcccggccctgcctggccctg

SEQ ID NO: 334539 - DNA, 122 bp, Homo sapiens
gttggtcggatcagttaaagcctccttttccggagttctgttacgatatatgactctctacgccagttccctagtagggactcatgactgactgtctccctggcaatgacagaaactccaat

SEQ ID NO: 334540 - DNA, 122 bp, Homo sapiens
ggtggtgttggcagcatctgagtggctctgtaggccgcagcatctcccggcacccgagcccgagatgaagcagcacgtgccagcagcatcgcgtagtgtgttctgtcctgagcctcatgcag

SEQ ID NO: 334541 - DNA, 122 bp, Homo sapiens
accccttgcacttcccaggtgaggcaatgcctcgccctgcttcggcttgcgcacggtgggcgtgcccactggcctgtgcccactgtctggccctccctggtgagatgaacccagtacctcag

SEQ ID NO: 334542 - DNA, 122 bp, Homo sapiens
cctcccgcccgccactcaccagcgcggccgggctgagagtgggggcggggcggaaggaggcgagagggaaaaggccatccgcgcgactgcccgattaaaaacagtcctgatcgtcttccctg

SEQ ID NO: 334543 - DNA, 122 bp, Homo sapiens
agcaggaaatgttgtctataaaagatagtgtccacccatgtcaactttcagttctgttgtcggcctaaattggcaactctctgcttctgcaatagtggccttgctttcattttggaagaaag

SEQ ID NO: 334544 - DNA, 122 bp, Homo sapiens
caacagccgccacgaacacagaagacagccgcacaacggcttccggcccaaaaacaaaggcggtgccaaaaatcaagaggcttccttggggatgaagacccccgaggccccggcccattctg

SEQ ID NO: 334545 - DNA, 122 bp, Homo sapiens
caggaatcgctggctgtccttttgcagacactgcaggggcctccttgggggtcctgcaggcggccaccacgtttgtctcatcgtcagttcgccctcctcctcatggcctgtgggagtacagg

SEQ ID NO: 334546 - DNA, 122 bp, Homo sapiens
agggggttgagggagtcccaggaggggcttatttgagggcctttgccacttgctcataggcgagctcgatctcctcatcatctggacaggtggaagcgaattcttcccgggcgtaggcattg

SEQ ID NO: 334547 - DNA, 122 bp, Homo sapiens
tcaatcatcaaacaccctccattcagaggtccttgcccccattagctcccactagccccacgggcctagaaagctgtctgtctctcagtcctgcctgataatcaaagttaacttcaaagacc

SEQ ID NO: 334548 - DNA, 122 bp, Homo sapiens
atcctcagtgagagggtgaggccaccggggctgctgtgtccgcagatgtggtgccacctccgagggcctccaagggtgcatgtgagccacagtcaccaccacagtgcgccgacgaccgccac

SEQ ID NO: 334549 - DNA, 122 bp, Homo sapiens
gtgcctatggacgtggctgtgtgtgcggagagctggctgattcaggccagtgttctgggacgaagagaagcccacaccccaggccatggcccctcttgactccacctcctgggggcccaggg

SEQ ID NO: 334550 - DNA, 122 bp, Homo sapiens
ccatgatggagttctcatcaactgggcacggtaatacaggagaagtgattcacacagggacgttgcaaatacatgaaagtcatcacactggagatttttgcttcccagaaatcaagaaagat

SEQ ID NO: 334551 - DNA, 122 bp, Homo sapiens
gactaggatgtgaactacacaaatgcaaagtgaaatatggaaaaacagaaacaaggaagtcgaagaaaaagttagtttggggaaagaagagtggtttagtactagccctgttaaatttgaga

SEQ ID NO: 334552 - DNA, 122 bp, Homo sapiens
gcagctcgcagtcagcatccatgttttcaccccagctgggtgctgcagtcattgttctggcgaaggagggcgagggggcggctcgtgggcgttgcgacgccgggctgtctgctccactcggc

SEQ ID NO: 334553 - DNA, 122 bp, Homo sapiens
cgtgggtgcatgcaccgtgtgcgagctgaagcagggcgaggcattgcctcactccggaagcgcagggggtcagggagttccctttcctagtcaaagaaaggggtgacagacggcacctggaa

SEQ ID NO: 334554 - DNA, 122 bp, Homo sapiens
aggtgcagacaacaggagcacaccgccccttcctcgccgccacgtgctggcggctcccggcgaccaccgatgacctcacggccgccccagtctttagaaaaagggactgcatctcccagcat

SEQ ID NO: 334555 - DNA, 122 bp, Homo sapiens
ctcctcccccgcctccggcacagaccgcgactctccggagccactgctcaaggccgaccccgatcacaaggagctggactccaagagcccggacgagatcattctggaggagagcgactccg

SEQ ID NO: 334556 - DNA, 122 bp, Homo sapiens
tgcaactaggacatattggttattcccaaagctcccaaccaacattctctcatcttctgacgtcttttcttctctctctttctgctaccttttcagaccttaaaagattccattagtgactt

SEQ ID NO: 334557 - DNA, 122 bp, Homo sapiens
gcggggcagaaagcctagtcctgcacgcagtaccaacaatgcggagtcagcgggttgtttcgactttgttctgtttcctgaggggttctgaataagggccacccccttcctcctctgtgccg

SEQ ID NO: 334558 - DNA, 122 bp, Homo sapiens
cttttcttgatgaatttgagggcctgtttgaccttggagaccttcagtaactccatgccacgccactcgttaggggtgaagccacacacctctgggatcatgtcccacacaaatttagtgag

SEQ ID NO: 334559 - DNA, 122 bp, Homo sapiens
gaatgagggaaggaaccgagcaggcctgctttgttgtgttgtagttgggtcgcttgacagcgccgtgtgtgaggcaggagggcatgtgggcaagctgggacatcatcacagcctccctccca

SEQ ID NO: 334560 - DNA, 122 bp, Homo sapiens
ggggctgccctgtagggacagaggttggcacagcggtcactcccagggcagagggtgggccgagctgacctctgtccatgtggccctcgcaccccgtgggtcccacctttggctttggagat

SEQ ID NO: 334561 - DNA, 122 bp, Homo sapiens
gttgtcaaggaatccaagaaatatttttgagaaggaagaagaagaaagaacagatggtcacgagggtcaaatgctacacccatgtgttagccagatctggcaccagaagacagctgtgtccc

SEQ ID NO: 334562 - DNA, 122 bp, Homo sapiens
ccagcggggtggagagagataagggaccagtaacgtccagcgtttgtccgtggtattgagcgttctgtgggtcaaattctcaaagcactcctgcgaaataggcctgcccattttgcagaagg

SEQ ID NO: 334563 - DNA, 122 bp, Homo sapiens
ctgtgtgggcgtgatgcggaggaagtcctgcgggagctcaccgatgtacacctgcggggccggggaccagagaggccagtgagtcagggtgggggcacaaagcagcccgacagcagctgccc

SEQ ID NO: 334564 - DNA, 122 bp, Homo sapiens
gttccctcgtcccccgggatatggatagctcgggtagagacatgcagctgcgggtgatcccggctgaggtgaagttcctggacacgatggccgggagggtgtaccgcctcccgattactgtg

SEQ ID NO: 334565 - DNA, 122 bp, Homo sapiens
ggcttatgattataagaccacgcccgtctattgtgtttctgtccggagctgtggagttagcgtcagaataattcgtagacggctccagtgtttggggggcctgtgcctgtgggggaaaaata

SEQ ID NO: 334566 - DNA, 122 bp, Homo sapiens
ttagggagtggtgatgggtgcgctgtccatggggccgagggcgctgcagagacctggagccgcggggctcactacctgggcgtggaggagcggcaggttcgcgcaagctagagcgacaaggg

SEQ ID NO: 334567 - DNA, 122 bp, Homo sapiens
tggaggccacttaactatttcaaaaaatattcaccaaaataggtgtctctctgactgcaacggtttgagtcctcctcagccctcatatcctaggcttcggactgttgggaaagtcttatctt

SEQ ID NO: 334568 - DNA, 122 bp, Homo sapiens
ctagacatcatattccccatccatcgccccgtccagtggaccagggatgaagcggggatgcgctaggcatcccggtttgtcaccagggggcgtgcgaggccctcagcttggcgggcggtgag

SEQ ID NO: 334569 - DNA, 122 bp, Homo sapiens
tcatagcttactgcctcctggaactcctggctcaatcgatcctcctggataagcctcctccgggtactataggtgtgcaccaccaagctcagctaattattttttagagatggttgtctcta

SEQ ID NO: 334570 - DNA, 122 bp, Homo sapiens
gcggcggaggagggggaggcggcggcggctgcagcatccagagctggccgtggcggccggcgcgccccgcgcacaaaagcacccagccccaggggagggcgatgaacacaccacatcccggg

SEQ ID NO: 334571 - DNA, 122 bp, Homo sapiens
tgggagctcctggtgggtcagtcactgtgccgggacacccccgagcctggcatgactctgcggccaggcgtttgactcaccgtcctcacgggacttctggatgaaggcctccacaccgctct

SEQ ID NO: 334572 - DNA, 122 bp, Homo sapiens
aaaaaaaaaaaaaaagtatatttggggccaggcagctcacacgtgtaatcccagcagtttcggaggccaaggtgggcagatcaattgagcccaggagtccaagaccagcctgggcaacctga

SEQ ID NO: 334573 - DNA, 122 bp, Homo sapiens
tggccggcagctgcagcacaggctgcagggggcgggcagcgccgaatctagcggggcaggcgagcggagcagcagcgttctccagccccggccgcggcccctgagaggcgcgcactcgggct

SEQ ID NO: 334574 - DNA, 122 bp, Homo sapiens
ggaccgggccattgggattttgcaaatatcactaggctacctgaggtgggtaacttgaaccgtggcctctaggttttctggagactttgctctgtgcataggtcttaaatagtgaacatact

SEQ ID NO: 334575 - DNA, 122 bp, Homo sapiens
cccttgtcttgatggaaagggcttggcgtcccccccactcccaaccacctgagagcctcgcgctggaaggactttggtaattatttgtttcagttgagctgttttcagtctaggctaggctg

SEQ ID NO: 334576 - DNA, 122 bp, Homo sapiens
cagatcagatagttaatcttgcatttcagttgttccaggtacctttaaatattctttatacgcatcactactttgacaatattgtagttgatccaccactagattttgccattaatgcatta

SEQ ID NO: 334577 - DNA, 122 bp, Homo sapiens
gccatcattggaggggctttcactgccaaattgtggaccagcccggcaaggtcaaaggttcgagaccgcgggagaccaaggtaatgatgatgtcatgagaaatctcaagtacatggttattg

SEQ ID NO: 334578 - DNA, 122 bp, Homo sapiens
gaaagtaattatgtggtttgtaagccaggatgaaagggaacggagagttcaattcaggaacgtgcaggactaaacagaagctcctcaaataccaacagcaaaatggtaaaatggaaagatgc

SEQ ID NO: 334579 - DNA, 122 bp, Homo sapiens
gcccgggaagcgtttggtgaaactttaaagaaagcccaggtgactcctcctggggagcagcgcttcgcaaacacctcaggcctgcgtctgccactcccacactgcctgccccctttggccac

SEQ ID NO: 334580 - DNA, 122 bp, Homo sapiens
tgttaccgcttgagaagactcaacctgcggagaagataccattttgattgggtgagggggcgggtagcaggatggccctagaccctgcctatggccgtttcctcgtgatataaatttcttgg

SEQ ID NO: 334581 - DNA, 122 bp, Homo sapiens
ccgggaccgcctcccacgcaaaacgtgagacaaacaaaaggaaaggcggaaacgcagaaacgcagaggtagccagtggatgaggcatgcgcagagcccacgctcaaagcctggcgctgttgg

SEQ ID NO: 334582 - DNA, 122 bp, Homo sapiens
tcaactgaagttatagtcccgggagctggcagggccccgggtcttctcaggctgaggtcgcggggcagaatggtccgaagctcaccggggtcacagtcggaccgaggcgggtgtgcgcctcg

SEQ ID NO: 334583 - DNA, 122 bp, Homo sapiens
cggtgacggatgggagtgtgcgccggccagggcctcaggcctttggaggtatggagttcccgggggtgaagagagggatgaggccagactctggcttggagtcgagagaaaggggtagcggc

SEQ ID NO: 334584 - DNA, 122 bp, Homo sapiens
cttctcatttggcatgtcttagtctgcattgtctcatgacttttccttcctttactaattcgttcattcattcattcattcattcaacaaactgtgccaagcaccagagcaatgctgggcag

SEQ ID NO: 334585 - DNA, 122 bp, Homo sapiens
ggtgagcaccttctcgccggtccgggcatcatcctccgtctggaaccggagcatgggctgcgcctggttctctgccagccacagggccttgagattgaggtgggtgagcgcgaacggcagac

SEQ ID NO: 334586 - DNA, 122 bp, Homo sapiens
aaccctacgatcttcatgaattgagagaatttacgaaattggtactatacaattgacggccggactaacaaaaaagattgggaggttatgtttgggagtggtgaaaaaacgaggtagaaaag

SEQ ID NO: 334587 - DNA, 122 bp, Homo sapiens
gcccttctgggcaccccaagccgaaggcgcctggaagtgaaaggggacgagcagggggcgcggagctgggggtgggagctggcacctctaggagcagctcccacacttgcctccctggctgg

SEQ ID NO: 334588 - DNA, 122 bp, Homo sapiens
cacggagagggaggccacaggctccttcagcagtcgccgagcagagtcctgggccgggagcgcgggggagggagcgagcggaactgcgcctaggaggccgagggaggaggcgctccgcagac

SEQ ID NO: 334589 - DNA, 122 bp, Homo sapiens
tggactaatgtgaccagagtcggctgtgtttggaaataaacttccaacgctccagactagcgaagcgtcgttaaaaaaccgaaggtaccctgagtggtttttagaaactgaaattctgcagc

SEQ ID NO: 334590 - DNA, 122 bp, Homo sapiens
tttttgcgagtgacctaaggccacctctcgggggagctgggggttgccttcccacgtctgcgcgtctgcaccccatgcccgggcctggaagtcagactcgggggcggtgctgcagcaccagg

SEQ ID NO: 334591 - DNA, 122 bp, Homo sapiens
aaaatcatgaaataagaacatcactaaaaccattaatttgacttactcttaaaacacacgcgcgcacgcgagcgcgctcgcacacacacacactggcgtgcgcgcgcttttttaaggggcct

SEQ ID NO: 334592 - DNA, 122 bp, Homo sapiens
taggcatttagctctcccacaggccttgactttgagtcctgtctctctttcctgtggcaccgtactgctgagtgacagctctgcccaagagcttgttttcctgggagacatatcccctgtaa

SEQ ID NO: 334593 - DNA, 122 bp, Homo sapiens
ggaggaaagaggcaccaggtgaggctggggagggaggagaagggggcaaggagggcgtgccgggaagtgcggactcctacaggcaaaggaaaagtaccggaggctttagaaatgaaagcgat

SEQ ID NO: 334594 - DNA, 122 bp, Homo sapiens
aacattacagtaatttctgttacaggtccatgggcgcaggtccctgagcccacagcttcgcgggggtctggccgagcatgcgtcacaacctacgcggccaagagcagtgcgcacgcgcaacc

SEQ ID NO: 334595 - DNA, 122 bp, Homo sapiens
ccagatgagcccgccctgcggcactgccagcacttgggacgccagactcccttcaggcggcgggccccaagggcactgcgacagctcagcacccaccacagatcagcaacaggacaacccga

SEQ ID NO: 334596 - DNA, 122 bp, Homo sapiens
cattttgtttctggcttttcttcatagttcaaagtcagccaactacctgcccttagcaagcgtggagagaaccccccgcaccacctcagcaaagggcttgtgtgtggaggagctgccaccca

SEQ ID NO: 334597 - DNA, 122 bp, Homo sapiens
agtcacgcctccagtctgttagcatttagagttgctgaactttcgcattggtcaggggcgcgggcagcttgctgaccttttctgggagtcgtggcggacggagtggagccgtctgtctcgtc

SEQ ID NO: 334598 - DNA, 122 bp, Homo sapiens
agaattacaaaagtctgcacaagaattcaagcaattatctcgataccatctgcacctgagcgcagtgcatagacgaggccccacctgctgctgcggaaaggggcaaagaatagaaaaacaac

SEQ ID NO: 334599 - DNA, 122 bp, Homo sapiens
gtcttgaactcgtgacctcaggtgatccgcccgcctcagcctcccaaagtgttgggattacggacgtgagccaccgcgccgagctgacaggttcctcttaaagccctgagtcccagggaagg

SEQ ID NO: 334600 - DNA, 122 bp, Homo sapiens
ttgttttctcacggcacaggggcggcttccggggcgcggcgtgctgggggttgtagtccgcgctctgcctcctacttccattacagaaggcgatgggccgagagctgaggaactacaactcc

SEQ ID NO: 334601 - DNA, 122 bp, Homo sapiens
tttgttaacactgaagctctttccgaaacgtttgcccaaggccccaaacagaaactttgccgccgcttgggcaggtgcagccacacctggagacgggccatggcgctgtgtcagggttaggg

SEQ ID NO: 334602 - DNA, 122 bp, Homo sapiens
agtttgtgtgcggccgccaacacgttttctgcgcagtgtgtggccgttaccggggccaggcgaaatgtgatttgtttatcctgtcagaggggaaccctgggctgccaaaaataactgtttgc

SEQ ID NO: 334603 - DNA, 122 bp, Homo sapiens
tgtggaactggggcattccacccccaacccgtccaggccccctccccggctgcatggaagcgaggaaaatagttccatctggggagaattactgtttacataacccaaaggggaaagaacgc

SEQ ID NO: 334604 - DNA, 122 bp, Homo sapiens
gacagccatgaggcctcacctggaatccgggggagccagcagggccttgttcacctctctcgccagcgggaccctgcacagagagaacactacagtcacggggaggccgaggagacgagggg

SEQ ID NO: 334605 - DNA, 122 bp, Homo sapiens
ccttcagctccaaggagagggcgtgggggtcatcggggtggcaggggaagatttggtattcggcgagatgggccaatgaaatttgagaaagactttgactttgaaagtgcaaatgcacaatt

SEQ ID NO: 334606 - DNA, 122 bp, Homo sapiens
tgtgaagaaactcaaacaacacagtatccgccatgccccctcctcgcacgcctaaagatgcgcccagcgcttccagctctcattggccaggcttggtaagccacgcctcttgcgtcatggcg

SEQ ID NO: 334607 - DNA, 122 bp, Homo sapiens
tttcagactcctttagtataatatttgcttttgcacaggaaacaaagaccatttctcacacgacgttgaaaaaataattaaacaaatttgctgtagtttttctctttttccagtaagttttc

SEQ ID NO: 334608 - DNA, 122 bp, Homo sapiens
ttcgccgcaccacaagcctcaacgcggcatgcgccaggtgccccaggcttcccccggctgcgccttccttgctgtgagtgccacagcagccggtgctcctccaggccatggctgcaaaaagg

SEQ ID NO: 334609 - DNA, 122 bp, Homo sapiens
agaagaggtccgcaaggcaagggggaagaaaagggtcccctagttgaggatagtcaggagcgtcaatgtgcttgtacatagagtgctgtagctgtgtgttccaataaattattttgtaggga

SEQ ID NO: 334610 - DNA, 122 bp, Homo sapiens
acgcgaacccagcgtgggagacgaggagccggttcaaaccggtggcgcgagccagccgcgcgacccccatctcgggcgttcccccggcaactcgcccgtttccatggcctcggacccccgcg

SEQ ID NO: 334611 - DNA, 122 bp, Homo sapiens
ccctccgcagccactggtccgggtgctaagtccctcattgcccggggcagcagggctggccggctgctccgagtgcggggcccgccaagcccatgcccgcccggaactccagctggcctgca

SEQ ID NO: 334612 - DNA, 122 bp, Homo sapiens
tgaataattgaagtggaggggaggaggaagaagaggagaaggaggaagaggagccgcccgcgcagggtcctccccacgccgcacccccctccgccgcccggaagtcgctccccgcctccctc

SEQ ID NO: 334613 - DNA, 122 bp, Homo sapiens
gggaagtccaagaatgaggcaacagcagagtcagtgtccggtgatctatccctctttctacgtgtcctcacttgacagaaggggaaaacaggtttcctcaagcctcttttataaggtcacta

SEQ ID NO: 334614 - DNA, 122 bp, Homo sapiens
gacttaaacaaaaatctgagggcctacaatgtgccactaatgacaggtgctgaggaaatccggggagttgataaccagctaatcagctagctagctatccacgccatgaggcggcaaaatgt

SEQ ID NO: 334615 - DNA, 122 bp, Homo sapiens
ttgtcccatgcatatttgtatatacacgacctccatctgctttttcccttgacaaaatggcggcaatattttatatcatcttaaatcccttgctcaatcctttgatttacactttcaggaat

SEQ ID NO: 334616 - DNA, 122 bp, Homo sapiens
ttttgaaaccactagcaacagctctcattagatttatcttctggccccacattttagcctcgtgtaatagtctcatagaaggagggcaggggaaggagctctaaggaaaaactagtacagca

SEQ ID NO: 334617 - DNA, 122 bp, Homo sapiens
ggccactgccgacgagccgccgcccaagaacgggcgcgccggcgctccggcgggagcgggcggccacagcaaccaccggcaccacgctcaccacgcgcacccgcgcgcgtccgcctccgcgc

SEQ ID NO: 334618 - DNA, 122 bp, Homo sapiens
ctacactccagcccggatgacagacaaaaaaaaaaaaaaagcatggagtggctgtggctgcggctgagcagaggtaatacacgtctggaaaacccaacagaggacgagacagcaggttgatc

SEQ ID NO: 334619 - DNA, 122 bp, Homo sapiens
ctataactcacttccctgtggctccaacgcctcaaagtataaccacgcccagccaacgcccggggcacgcctgccagcgccccagggcactcacagacactccttaacacctgcacgtgccc

SEQ ID NO: 334620 - DNA, 122 bp, Homo sapiens
acataggcttggggcagaggggaacttggtgcatgttgcctcccaacataggagtgctggcggccttttcaggcagcccctgagattttctctggggagctcagcacttctcatccagagaa

SEQ ID NO: 334621 - DNA, 122 bp, Homo sapiens
agaggagcagatctcagagcagccaactgaagcaaacggacacaagcgaggagggctccccgcgggagaatccccgagaggcagagggcgagctccccgagagcggtggccccgcagccccc

SEQ ID NO: 334622 - DNA, 122 bp, Homo sapiens
ctacatctgcatgactaaaagcaatgtcaggacaagcataatgcagtctgctttgctccacgggattggcattgggactgccacagaggctggcactgatttctgtgtccaaggggaataga

SEQ ID NO: 334623 - DNA, 122 bp, Homo sapiens
cgaactcctggcctcaagtgatctgcccgcctcggcctcccaaagtgctgcaattgtaggcgtgagccaccaggccagcctcaatttccgtttggggctctttactgctacggaacattcag

SEQ ID NO: 334624 - DNA, 122 bp, Homo sapiens
tccctgagactctcggaggaaatcggggccgttgtggaagcctccacggctttgcgcacacggcaaagtccctcccggcgcgggccccatctcccttcggttggggttaccaaaacatttgt

SEQ ID NO: 334625 - DNA, 122 bp, Homo sapiens
aacgtccttttggcgtgtctgtaatgcctgcgtgttcaccgttcgcattgttactgtgagcgacccacgcaccagctccacacggggctccctaggtgcagcctccggtgtgtgttaaaacc

SEQ ID NO: 334626 - DNA, 122 bp, Homo sapiens
caggtctggcactcagaggttaggccgggcgcagggagggtgcgggctccgcagcgagcgcgccgggcggcctctaggagccgggtcagcgagtctgggctctgagcgagcggcgccggccc

SEQ ID NO: 334627 - DNA, 122 bp, Homo sapiens
tgacctcgtgatctgcctgcctcggcctcccaaagtgctgggattacaggcatgagccaccgcgccctttaaattggctaatttttgtcagccacatatggttttgttttcttgtgtggatg

SEQ ID NO: 334628 - DNA, 122 bp, Homo sapiens
taatgttacgatacaagctctgcttgtagaatataaacctgacaacaagtaaatgaacagcgtttcgttatctctttaaaacctggctgacaatactgcacactgtgtacccttaatataaa

SEQ ID NO: 334629 - DNA, 122 bp, Homo sapiens
tgtcactaccaggctcctcttccctgggatgctgcagtccctgaagcagaagttgggcctcgcggtttccctgagcatcgtccgtgtgaagactcccgggccctctggacccggccttctcc

SEQ ID NO: 334630 - DNA, 122 bp, Homo sapiens
gcaacagcttgccgcccttctaggaacactcgctcatgctcacagcctatccctgagtgtcgttttgattctgacccctgcatccagaccatagatgagattagacgtcaaatcaggatcag

SEQ ID NO: 334631 - DNA, 122 bp, Homo sapiens
ggagacgatccggtcggagccaggcgcttgagagaggtgcgcagtgcccgagacccctggcgatggggaggcggtgaccggagcgggcctggccaagggctgaggggctggctcgggaggca

SEQ ID NO: 334632 - DNA, 122 bp, Homo sapiens
cctgagcccctcaagcttcgcctctgagtcccgcagctgcagcctggacctggtgttctgcgtcttaaatgtcccccgctgaaggctgtgcatcatcatcaggagataaaaacgccatcact

SEQ ID NO: 334633 - DNA, 122 bp, Homo sapiens
gtgttgaaattaagtcatgaaacacaaagcgctgaaccagattcttaatttggacttaatcgcatttattatagtgcaaaacaaatacattcttcccagaccagagcaacattgaatagcat

SEQ ID NO: 334634 - DNA, 122 bp, Homo sapiens
cccagatcccccgccagtccctggtacttaccgggaaagacttaatactccaaatcacgacgtttctctccggcacatacttggcgctgcccacactggtcttgaatctgggggagtcggca

SEQ ID NO: 334635 - DNA, 122 bp, Homo sapiens
aagaattttcattcctacacttgtgaaaagcaatcccatcagtgctctcctgtcttcacacgggtctggtgaaatggcacataccataagcgtgtagggggaaagaagtaggaagaagagag

SEQ ID NO: 334636 - DNA, 122 bp, Homo sapiens
ccttcaggcccagtctcaggtaagaaaagacaaactcgcctttttctctcagcatgagctcgaagtattctctctgtgctcctttcagccagggctgtctgtgtcctgtcagaatattttga

SEQ ID NO: 334637 - DNA, 122 bp, Homo sapiens
ctgtagaaatcctcactcccagtctcttcctccctctggtgaattattttccttatcttacgtagcctggagaagagtgaagggctaaatctggcagaacctgtgaataatttcttagtgtg

SEQ ID NO: 334638 - DNA, 122 bp, Homo sapiens
gcccgcggcgcagctgccgtcgctgccgcagctgtccagggaggatcgccaaaacggcgacgaataaacaacttaccttgcggagaagagctacgactgcgatgcggtgtacggttgttttt

SEQ ID NO: 334639 - DNA, 122 bp, Homo sapiens
tcctttcaagtatgggtccctaggggaattgctttgagaaactccactcaaccataaagacgggtttaacttttctagagcggtgacattggagaaatagcttcagtttgtggagacgttct

SEQ ID NO: 334640 - DNA, 122 bp, Homo sapiens
ttgtgtccagtttcaggaagctctagaacaacgtttattaggaacagtttaatctgctatcgtagttaggaagaggcactttaacctgcacatgctaaaagctggcagttatcagcaagcat

SEQ ID NO: 334641 - DNA, 122 bp, Homo sapiens
aaaacagagagtcaggcttcacgctccagagggcaggagcaggtctgggtgagctgcaagcgggcggcagcagagcatggccctggggaggagggccggcagcagtgacgatgacaaagacg

SEQ ID NO: 334642 - DNA, 122 bp, Homo sapiens
tggacgctgcacctctgatcatgtcacgcttcaagaacgtgaacactgcacctctgaccacgtcacgccccgagaacgtggacgctgcacctctgaccacatcatgctctgagaacgtggac

SEQ ID NO: 334643 - DNA, 122 bp, Homo sapiens
gaacacattcattcattccttacaactgaatagcactggagcgctgcatgctggcggactcggcactaaggacacagagataaagacacaggtgctcccctcatgtggcatgcagccttgca

SEQ ID NO: 334644 - DNA, 122 bp, Homo sapiens
agatggaataaaatgtagcaggggcgggtctatgcgaagaccatctgccagcaggaagcccggagcaggaggagggaagaggccaggggggtgaggtggccccgccagtgtgcaggcctcca

SEQ ID NO: 334645 - DNA, 122 bp, Homo sapiens
gatccgccccctaaatgggagagggtggcctgaactagagtaaccgcagggagggtggagcgctgatcatttcaaggatcttcaggaactgaaatgatcagaacttgggaatgactgcatgt

SEQ ID NO: 334646 - DNA, 122 bp, Homo sapiens
ggtgtatttataggggaagaagcaggcgctacattttggggagggagggggaagaggcctcgtggcaggcagcagcagcagtgaaggtggctacagaattgctaatggagtgggccatgcca

SEQ ID NO: 334647 - DNA, 122 bp, Homo sapiens
ggctggggaggggctgtccagcctagggctcatggtgcttctgggttcctagctggcagccgcccacacagatggggcctcagagaggacgcccctgctccaggcccccggggggccgcacc

SEQ ID NO: 334648 - DNA, 122 bp, Homo sapiens
tctgctgcccgtgtccttctgaagtctgaaaccagctctcctctttataggcagccctggcggatggggaaatggaatctgggggtgaggagggaaatttttaagcgtagtgatgctgtcat

SEQ ID NO: 334649 - DNA, 122 bp, Homo sapiens
acccctatgcccggtcccggaccgacatcctggagccgcctgtgcagcctgatgccccctcgtggctgctcccagggctgcacctgccaggacctaatgttcttaggtccctctggccagaa

SEQ ID NO: 334650 - DNA, 122 bp, Homo sapiens
gcgaaagctgggccgccacgtgcgggcgctggtgcttgagctgtgctgtaacgacgagagcggcgaggatgtcgaggttccctatgtccgatacaccatccgctgaccccgtctgctcctct

SEQ ID NO: 334651 - DNA, 122 bp, Homo sapiens
tgtggctcagggagcttgtcatcctattggaagtacatgtcaaaattgggttctcaccctcgtttgtatgactccaaagttagagctctatctgtgtcactcatggtcaaaaaccttgtttc

SEQ ID NO: 334652 - DNA, 122 bp, Homo sapiens
gcgggtttctatgggactttgcaaagcccagggaatccgggaggcagcctggcagctgcgcgggcgggcggacaatggcaaggaggagacgccaggcccgcgccgtttccctccgtgcagcc

SEQ ID NO: 334653 - DNA, 122 bp, Homo sapiens
taagtcacattcaggagggtcttttattcctgaagctaactttaaattggagccacgtgccgggctcttgcctgttgaggagtgacttctggtcaacccaattagcagagtgcatggagtgc

SEQ ID NO: 334654 - DNA, 122 bp, Homo sapiens
tgcatttttgccagtcctttgtgggccagcagaggcctgtgaagaatttaaatccttaaccgtgcatactaatgcctggaggcttccagaagccccgtccagctgcgtctcacccggagccc

SEQ ID NO: 334655 - DNA, 122 bp, Homo sapiens
taattaggtcagaacaaacagtgattcattgacattgaggaccttaggggagggttcctgcgggagtgggacctggctctctgaggagaggagcttgataaagctgattctgcaagtgttgg

SEQ ID NO: 334656 - DNA, 122 bp, Homo sapiens
cccgggctgccagcaggctttacaaatttaaaactttcagtgtaggaacccagcctccgtcgtccttcccctccaaagttaagagatctgctctaagggttcctgaggggtggtctggggcc

SEQ ID NO: 334657 - DNA, 122 bp, Homo sapiens
ccctgcgatattggtagtcatatcagcctctcctctccatggatattaggaagaatatcccgggatgggtgtacacctcctgctgtatggggagtcatattgtcctctcccttcctggctac

SEQ ID NO: 334658 - DNA, 122 bp, Homo sapiens
gagtgactaacccatccagcgggctgggagacccgggacagctttctgaaatgtaatcagcgttggctgggcacggtgcggagcacttgtaatcccagctattcaggaggctgaggtgggag

SEQ ID NO: 334659 - DNA, 122 bp, Homo sapiens
accagggagggttgtccctttaaagcgctggggaaagcgccgtggccccacgattttaaacggcggaactggggtgcctcctggtggaatcagcgggcatcgcaactcgcgcggattcttcc

SEQ ID NO: 334660 - DNA, 122 bp, Homo sapiens
ccaagccctggacctcctgtgtgcacctgtctccccgccccccgacctggctcattccttcgctcttccgagggatgcaacccacgccaccctagggagaaagggaagcaggggacagtgct

SEQ ID NO: 334661 - DNA, 122 bp, Homo sapiens
ccaccggggccgtgggcacccccacagcccgaagcagaaccctctgagcattccagagaccgctgctcgggggcctgcccaggctgaccaacgggcgctcctgaccaccaccctggcgggaa

SEQ ID NO: 334662 - DNA, 122 bp, Homo sapiens
tcccgcttccgtccggcttgcggcccctcgccttgcccggctacaggaaggactcgcctgcgcctcctgactggagccttccacctgggagttctgagtgcgcctaaggcctggcgctgagg

SEQ ID NO: 334663 - DNA, 122 bp, Homo sapiens
ttaaagttaaccctcaaaccaccatggccagtgaatgcagaataagcccgctgagagtttcgtctatttctatggcattatgctggaaattataaagaaaagggatgaaaaaaactggagac

SEQ ID NO: 334664 - DNA, 122 bp, Homo sapiens
tttgtggaaggctccatctacttgaagtaaggagttcctttctctaattcctacaaagtacgcccttgggatggcagtagctcacctacccaccacacctctgtgtcctcagcatctggata

SEQ ID NO: 334665 - DNA, 122 bp, Homo sapiens
ttgcagttcttacgcaggcatgaagccaaaaccagtttacaaattaaccaccaagaaaaccggtagagcacagatgatgacgatagagctgttttgtccaatgtgagcgctactggccaccc

SEQ ID NO: 334666 - DNA, 122 bp, Homo sapiens
agcccctgccgtccccttcccacacctgttctcttcctgggcctgcagctcaccgggcgccgttccccagccgcttcttacgcagccgggaaaccacaacgagatttggtcttcgagagcat

SEQ ID NO: 334667 - DNA, 122 bp, Homo sapiens
ccgctgttccgtgggacgtgcaggagagcagcaaaaggcaggagtggccagtggcacccgcgcccccgccccttccccaggccggacactcgcggggacgcagagccgccggagcccaggat

SEQ ID NO: 334668 - DNA, 122 bp, Homo sapiens
ggcttgtagaagacctttccacagagagtgggaattccgttgcagcagccaaggcttcttcgggatttagaaggagagcgcgcgagaacctgagggagccagtaagagtcgagcagggactg

SEQ ID NO: 334669 - DNA, 122 bp, Homo sapiens
acctacagctcccgaggtgcgaggctgagtcgttcctgccgtggggaccgggggtcgagccgcccggtccggaccccgccggactccccgccaggcccactggggctggcatctcggctgcg

SEQ ID NO: 334670 - DNA, 122 bp, Homo sapiens
gaaaattaccccctgattaaataaagcctattaagctccaggcaccgctctgttgtctttcgtgttcgggcggcggcagacctgcgcatccctctcctccttcagcctctgtcccgcggtga

SEQ ID NO: 334671 - DNA, 122 bp, Homo sapiens
ctctccacctccttgctcactccttgcctgcgatcaatctggcctcttagagctattgaccgggctgcctgaaagtcattgcccaaattccatctcctctcaaatccattttccctgcctca

SEQ ID NO: 334672 - DNA, 122 bp, Homo sapiens
ctgtcagttgtaaccaagattgttgtattcgaggagaaagacacttgcctggaaaacacacggaaagttttttgagtatgggggagccctgcaccaccccattatgatttgaggtctctcct

SEQ ID NO: 334673 - DNA, 122 bp, Homo sapiens
ttctcctttttgattccccacccccgccactcccaatccacctgcttgaaggtgtcaacgcgactagaaacggttaacagtgaccagcagcagagagagaaacaaacatccctgacaaccca

SEQ ID NO: 334674 - DNA, 122 bp, Homo sapiens
cttgtttctcttggagctgacaaatttcctctatacgttgtctgtcctgagtggccaaaacgtggtcacatgtgcatttcagttgcccctgaaataagagaaagctttctagaacccattag

SEQ ID NO: 334675 - DNA, 122 bp, Homo sapiens
ggaatctgagctgtgcctcagaagatgagactttccacggatggagaaggagtggggttgcggcgggagagacaaggctattccaggatgcaaaaacagcaggatatcataggatgctttcc

SEQ ID NO: 334676 - DNA, 122 bp, Homo sapiens
cctgtcttccccttcgtggtttctccagccccaccctcacaccgtcctcctcgatctgcgcggcttcctgcctccatgccactccagactgcaccggcatggcactgactgcccacccctcc

SEQ ID NO: 334677 - DNA, 122 bp, Homo sapiens
gaccggtaggccagaacagggtgggtgctgggagaggcgggggctgtgcacacacacacacgtacatctgatttattcgtggtagttgcttgtgtccgtgggagcagcctagcctgcatgtt

SEQ ID NO: 334678 - DNA, 122 bp, Homo sapiens
ctggcggaagctggggctcatcacgggtgcctggagtgtggtgcttaatccgctggtgaccggttacttgggaaggggtcctggcctgaagacagtgtgtgcggcaagaacgcaagggggca

SEQ ID NO: 334679 - DNA, 122 bp, Homo sapiens
catgactggcacagtgccagcacagggccagggcccacagggtctctgtgaaggcctccacgaggtgagggccagaagcagccaggaagccctccatcaaactcctcctcccagcacctacc

SEQ ID NO: 334680 - DNA, 122 bp, Homo sapiens
cacccagaatactggactagaccaagggtgccaggtgcttgtcactgctccaccactcaacggctgtgacctcaggagaatctctccaagtcctggtgcttgttaattcatctgtgagtcat

SEQ ID NO: 334681 - DNA, 122 bp, Homo sapiens
cagtgcttcccacccatcaggcactgctctgcctcctcaaatcctcctacttcacgatgtcggtgctggtattaccctcagttcgtagaataaataagcaagcacagagaggtgaagccatc

SEQ ID NO: 334682 - DNA, 122 bp, Homo sapiens
gaaggggcgggggaggacgcggagggcagcccaaaacgggggagtccaaccacaggtccacgcccggcacgcaggcgcagggactcctccggggcccgggggcgggtccaatccccgggccc

SEQ ID NO: 334683 - DNA, 122 bp, Homo sapiens
tcggtcactcagaagggtctgggctccgtgcccttatgctctctgtgtccggctggcagacggtcatgcagacgtctccctgcgtttctcagtcttggctgtcaggggagggagcatggttg

SEQ ID NO: 334684 - DNA, 122 bp, Homo sapiens
ttatagtgtctcaatggacactgcaaagaactacataaaagaagtctgtctcaagcagttcgtatttgagtcagtggtcagatggggcagttgcgctcagctgcagtccctgactccggaaa

SEQ ID NO: 334685 - DNA, 122 bp, Homo sapiens
tgcttgggtgggagcgggggctttgggctccctgaggattctgggggcatccggggctgccgctagaagggccgtccgggcctgcctgtgcctctgctgactcgggcttggagctcagctgc

SEQ ID NO: 334686 - DNA, 122 bp, Homo sapiens
ggcaggaaagagggctataagggcagcggcccaggcgggcgggatccaggcgggccatggcggatgtccccggggcacagcgagcggttcctggtgacggcccagagccccgggaccccctg

SEQ ID NO: 334687 - DNA, 122 bp, Homo sapiens
gtattaattccatctgtgggtgttggagaaagctacacaacggagttccttggcttttgacgggggaagtgttgagaaatgaagggaagggcatccaggccaggcagaaccatgccagcaaa

SEQ ID NO: 334688 - DNA, 122 bp, Homo sapiens
ttccgggatcccggataacccccaaaagggagagcggcgtggcagggagggaaagaagtccggatgggccctctcagaacacaatgtccaatagctgagcggcccagggaccgccagaaaca

SEQ ID NO: 334689 - DNA, 122 bp, Homo sapiens
gacaactgcagatgttggaggggagttcgaatcccaggcttcccggcccgcagactgccccggctggccccaggacctgtttgttctcctgcaaaatagggttaataatcactgcctggctc

SEQ ID NO: 334690 - DNA, 122 bp, Homo sapiens
atgagcaccaagtcccccttttcttctggtttcttaagaaaaaaaaatcagttttaaatccgaagctggcatttgtgtagtcctggctgccccttgcagtgaccgctgcccggtgttgattc

SEQ ID NO: 334691 - DNA, 122 bp, Homo sapiens
tgcaccagattgctacatggggatgagaggaaataagagggtgaacagatctcctgctaccgcacatgccacttttgaattcccagctggtgtttgaaggctgtgcaaggtgttggattgca

SEQ ID NO: 334692 - DNA, 122 bp, Homo sapiens
ccaggagaggcaaaaacaaattcttcacaggcagtgaaatgccttctaagtgcattgtggcgtgatggtcaatctcatttcatttattttcctggtctactggcaagtgtgaggccaggaaa

SEQ ID NO: 334693 - DNA, 122 bp, Homo sapiens
cattggctcctcctaccaaatgtgcgagcccaggacagaggctgcacaagaagacaggcccgggcttgtcttcaacccttcccaacagacaatgcagtttgccatatgggtcccaagtgcca

SEQ ID NO: 334694 - DNA, 122 bp, Homo sapiens
tgatgggtgaatatctctgcttccctgcagaattctatccggcacaacctctctttgaaccgttactttatcaaagtcccacgttcccaggaggagcctgggaaggggtccttttggcgaat

SEQ ID NO: 334695 - DNA, 122 bp, Homo sapiens
gcggctggctggccaggggctcttccaacttccagcgggagcaggtgcacaggtcaggcccgccccgcccctaatgccttctacccccattacccacccccgccccgcccgccagtcctcca

SEQ ID NO: 334696 - DNA, 122 bp, Homo sapiens
tcaaataaatcggccagggtgatttattgctgtactctgtcagcatcatttgggtaacaccgtgctctctgaggatagcagagagaagtccttatggctgttagcaaagtagaagtgtcagc

SEQ ID NO: 334697 - DNA, 122 bp, Homo sapiens
gctggggccccagagccaggcggggtggagggtcgtcgggagagccgcctgtctccatctcgggaggatgaggggggtgggcgtggtggtggtggggctgagggggcggggcgtggtggtgg

SEQ ID NO: 334698 - DNA, 122 bp, Homo sapiens
gggttcacgccattatcctaactcagccggagtagctggcactacaggtatccgccaccacgcccggctaattttttgtatttttagtagagatggggcttcaccgtgttagccaggatggt

SEQ ID NO: 334699 - DNA, 122 bp, Homo sapiens
aatcagcggggaaagaagaccctgttgagtttgactctagtctggcatggtgaagagacacgagaggtgtagaataagtgggaggcccccagcgcccccccatccccgcgagggggcagggc

SEQ ID NO: 334700 - DNA, 122 bp, Homo sapiens
ccctgtcaccgcggtgaagggggatctcgccgtccacttggggttggtatggcttgacagcgacgaagagcctcccgggcacggcactgtagagcttccgcttgggccccgggtactcgaag

SEQ ID NO: 334701 - DNA, 122 bp, Homo sapiens
actggagaagatgagcgaagactgctcctggtgagcctgtgcatagggaagcggcagcatcggatgtcagccccctgcggccccagctggagatggatatgagactagtcaagatgtgaatg

SEQ ID NO: 334702 - DNA, 122 bp, Homo sapiens
cccggagcccgccgcggatcacgggaatttcgcgcctattttttgttggctgggtgttctcgccagtgattgggtcccggcaaggcgtgccggtgcgctcggctgcggctgctccgtcgacc

SEQ ID NO: 334703 - DNA, 122 bp, Homo sapiens
gtgaacgccctctccaggttcttgtgtctgaataccgctatttgtggatccttctgtaggcgtctctgtgttttcggtctgtgtgtcctcctctctgtgtgctagtctttaggtgtatctat

SEQ ID NO: 334704 - DNA, 122 bp, Homo sapiens
cggcggcaccggcaccagcgcagtttcccctctccccagccctgactctacgcgcacatgcgcattgcgcccgcagccctggaccatttgtcaggactactcgtgagacggagaaaaaaaaa

SEQ ID NO: 334705 - DNA, 122 bp, Homo sapiens
gcgggggtggctgcccgggaggcggacgcgggtgcggcgggggacgcgggggtggctgcccgggactggctcttctggaagcaattcgtgggaaacccacttggatgccacttatgaccccc

SEQ ID NO: 334706 - DNA, 122 bp, Homo sapiens
gcttttggaagcggcagaaacatagctcctgagagcgcgggacttggacacggacctcggcgggcgggactgggcggggcggggcatcagaactcaggtgttttttatttacgcgtcagggc

SEQ ID NO: 334707 - DNA, 122 bp, Homo sapiens
aaaatatcaagtagtgagagacccaggtttataactgtactaggtacacagagggtgctgcgttcagtctggactttcacaaagcagtaatattccagggagcatagaaccaataataccac

SEQ ID NO: 334708 - DNA, 122 bp, Homo sapiens
atcttggtcacgttgtagccgaggttctggcacatggagatgcggatggggtcgcagcgccgctcttcctcgtccccgaagccccgcgccggccccaggagcagcagcaactgcaggagcaa

SEQ ID NO: 334709 - DNA, 122 bp, Homo sapiens
gacccgcggccgcacctggggggctcgtgcagcctccgccgctggccgcccctgcccacccgccaggccaagtcctccgggccacccatgccgcatgccccagaccagccgggcgcccgcag

SEQ ID NO: 334710 - DNA, 122 bp, Homo sapiens
gtgttgctggtccccagaccactatttaaatatcaaggctcagctgggcaccgtggctcacgcctgtaatcccaacattttgggtgaccaaggcgggaggattatttgagcccaggagttcc

SEQ ID NO: 334711 - DNA, 122 bp, Homo sapiens
gccttggtacagaagacggcaaaggtattggggatcacacagaaactgcatgccgcctcccggcctcagagttccagaaaggtggagcggatgaatcagactatcaaaaagagtattattgt

SEQ ID NO: 334712 - DNA, 122 bp, Homo sapiens
ccgataccgagagccagccaactctagctaaaaacgaaactcaagccaggcggggtggcgcgcgcctgtagttccagatactcaggaaggtgaaggggtaggatcccttgagtccaggagtt

SEQ ID NO: 334713 - DNA, 122 bp, Homo sapiens
ttctgtcacccagactggattgcagtggcatgatctcatctcactataaactccaccttccgggctcaaacaattctcctgccttgtctttccaagcagatgggattacaggcatgtgctac

SEQ ID NO: 334714 - DNA, 122 bp, Homo sapiens
aggcagtgtgcctggtgcactggattacgctgcgttctcttccgcactctacggggagagcgatctgtgatgctgagcttctgtaatcactcatcccatcagaatgcaataaaagcggaagt

SEQ ID NO: 334715 - DNA, 122 bp, Homo sapiens
tccgctccattaagaacagtgacgcacctgctacttcccttcacagacacaggagaaagccgcctccgctggaggcccggtgtggttccgcctcggcgaggcgcgagacaggcgctgctgct

SEQ ID NO: 334716 - DNA, 122 bp, Homo sapiens
ccgagcctgcagctgtggacagacctgtcctcacagccacctcatggcgtcagagggtcccgaggctcacctggcagtagcccactccctggttatggtgcccatatgccagcagcacattg

SEQ ID NO: 334717 - DNA, 122 bp, Homo sapiens
gcagggaggggccaagcttacgcgaggcgtggcatcccgcccctcgctgcattgtacttccgggctcacatttctgcatccggagtatgagaaccctcaaccaggctgaccggatccggaag

SEQ ID NO: 334718 - DNA, 122 bp, Homo sapiens
gaactccactgccgctgcctccgccccagagacacgttgcaggccagagcggccggggcgcggggcatcacgggacggcctcacctggcctcttggaggactcccgaagcccgaggccgcca

SEQ ID NO: 334719 - DNA, 122 bp, Homo sapiens
tttgaggtccacatttagcagcacaggaagtcagccccacctctgagcttttcagttatacgagccgatgaagtctctttttgcttaagcctctttggattggatttactgcctactgcaac

SEQ ID NO: 334720 - DNA, 122 bp, Homo sapiens
actgggattgggctgagtgactgtttaatcactgccctcttggcagagatgtttctagggcgttccctggtgcacttctcatcggtggctgcctggtgaagcgggaaagttcctcagcctct

SEQ ID NO: 334721 - DNA, 122 bp, Homo sapiens
ggagcgggcacctggtggcaggaacacgcgtccggcagaccccaccttctaccttccccacgagggggtatagcagcgcctcacgttttgaaccatttagaacacttcaaaacatgaattgc

SEQ ID NO: 334722 - DNA, 122 bp, Homo sapiens
caggacgttctcaccccccgccccctacactcgcaaactcgcaggcacagcctccgtcatcgccccacccgaatctcagaatcggaacttggccgctcactcggcgcccggggccggctgcg

SEQ ID NO: 334723 - DNA, 122 bp, Homo sapiens
ttaacagagaaaaagagttttctcttacttaacggacctacagcagcaatttagagtctacgcacaaatcaacaaatctttgttttgcttacagcctatctgggtaccgaagcctgcctgcc

SEQ ID NO: 334724 - DNA, 122 bp, Homo sapiens
cgcgtcccgcccatttcggcctctgactggtgaatgtcttcggcttatggcagaggagcccgcctcattggctctcaggctccagagcagcaggtctccggcgcccaccccgcctcccccag

SEQ ID NO: 334725 - DNA, 122 bp, Homo sapiens
gagtctgcgccttacaggtcgaggcagtcgtggggaagggcctggcaggattgacctggccgcctcccagcaaaggcaaaggagccctggaaggaaccacagagcccaggaagcactgtgcc

SEQ ID NO: 334726 - DNA, 122 bp, Homo sapiens
aaatacgtgttttcaatgtaaaataacacagttatggagtttgggatatagccatggtaacgacagaacataccctggtgttttaagattagggaaagtcggataacatcaaaacaattcta

SEQ ID NO: 334727 - DNA, 122 bp, Homo sapiens
cagatccataaatatagttccttctatgttaagtggctttatttctaagaacccagccctcggtcctgggggtgcttcccagcccgctgctggaattcctgatcgtggcagtctgctgaaac

SEQ ID NO: 334728 - DNA, 122 bp, Homo sapiens
catctcttctttcaaaaacttttccgcaagtcagattagacagggccctcagttccatttcgtttgttttccatccaagcacacttaagtgcatgcataaatgggacactaaacagaaattg

SEQ ID NO: 334729 - DNA, 122 bp, Homo sapiens
gagaatggctgcatagtccgtttagatcccagagcccacaggcggccaggaagagctacgcgcagggtgcttactcagccccaggggaaggacctggaagagtgctgtcccgactcctggtg

SEQ ID NO: 334730 - DNA, 122 bp, Homo sapiens
taaggcgcccaggttcctcccccttatccctgcagggctggtgccttgcggcaccgcccacgctcggattggtccgaggtgagattcgcccttgtgccctcgtaggccttcggaacagcgga

SEQ ID NO: 334731 - DNA, 122 bp, Homo sapiens
ggtgacccatctatttcacatggaaacgttaactgtcagcataggttgtcttgttttcctcggtctgttttcctcagggaaaaattcttctgcttggaggcttataagattagcagctagta

SEQ ID NO: 334732 - DNA, 122 bp, Homo sapiens
tccaccaactcagatctttgaagcaatgccttaagggcactggggcattaggctgctcagcgggcagatgagcaaacggaggctcagaaagcggaagtgactttcctgttagcacgcagcta

SEQ ID NO: 334733 - DNA, 122 bp, Homo sapiens
gcggcttccacgtgttgtcgtgacacccagcgtgtgcttcggtttccgcgctgccggaaccgcttcttgctgtgtctagtgcctttttacacttaaggaaacgggttgagggggttccgtta

SEQ ID NO: 334734 - DNA, 122 bp, Homo sapiens
actgaaacagaggagggctggggctttgtttgggattggttggaatcagcatgacatcagcggatgactggtttttccagtgtgagacatttcataattcattatctaatggaaagcccttc

SEQ ID NO: 334735 - DNA, 122 bp, Homo sapiens
tctcgagccctactgccttcctacaccttgccccgccggagaaagcggggactcctgcggcgcctggtccctgaaaagtcgagcatgtgcctgacagctcccggcaaccctggcctggctta

SEQ ID NO: 334736 - DNA, 122 bp, Homo sapiens
cgcgggggcgcgggctcacctggcggtaatgcagcgtgagcggccgcaggtagggtgaggcggcgcagcggcccacggacgccccctcgatgcgctccatggcggcgcccggacaggcgggg

SEQ ID NO: 334737 - DNA, 122 bp, Homo sapiens
ctggaaacgtacagcctcaggagcagccagtggcttgggacctggggtggtgtgtgtctgcggagcttcttgggctgccccatttcctagcggcccccacctccccacttcccgctcagagt

SEQ ID NO: 334738 - DNA, 122 bp, Homo sapiens
ccttcgctctttctcctcccccctccccccgcctccgcccctccctgtcgccttccttcccgacacccgcccagactcacgcccggacacacaccctcgctcgttcgctcacgctgcctcgc

SEQ ID NO: 334739 - DNA, 122 bp, Homo sapiens
tgcttctttgaccacttgaaaaatgaacaggctcctccaaggaggtttgtttataggaaacgaaggaattattgctgagtagttgctggcctatttacagtactcaggcctcctcttgggcc

SEQ ID NO: 334740 - DNA, 122 bp, Homo sapiens
tattttcacctgaaggattcgagttaaaaaaaaaaaaatctttcctaagataaaggtgggcgggagggaggagcgcatgtcttgtggtaacagcagttactcccggctttgtgtacatcctt

SEQ ID NO: 334741 - DNA, 122 bp, Homo sapiens
tgtaggacttctgaaaagacagaactagctttgttgcgtttcacgaaggacagatcagttcgtctgtataggctataagcaggtaagtagtgcactctattggtgaaggatttctgttgttt

SEQ ID NO: 334742 - DNA, 122 bp, Homo sapiens
ccatcgtttggctgcacactaagcaccacgaagtatttatggttgcagatcaggtgcaaacggggcttagagagaaaggtaagggagcttcctgcgtccgccgagctccggcgtttacctta

SEQ ID NO: 334743 - DNA, 122 bp, Homo sapiens
gtttgtttctggcatgttcaaggtgtttttctgttttacagaggtcctcaaagagggcagcgggctgttcccagatctcctggtgagggagacggaggccgtcatccacaagcaccgctcgg

SEQ ID NO: 334744 - DNA, 122 bp, Homo sapiens
cagcatcctggtgcaaagccctgcagccgtcagctgatgaacaagggcagtaaatacagccgtgaggggccccaccagtaccatgtggcagtggtttggggccactttctctagaagccagg

SEQ ID NO: 334745 - DNA, 122 bp, Homo sapiens
tccttccgtacgatgacccaagatggcggagccgtgattgaaaacccagattcaagatggcgacttcctgcttccccgatagcgtcgcgcgtggccaccgaggccacgcctacttccggcta

SEQ ID NO: 334746 - DNA, 122 bp, Homo sapiens
ttacctgcatgggagggccccactggacaggctcctggtgagggtgtctaccgccacccccgcctgcctgggctgagtcatccaggcgcagcgtcgatgtggggagggcctgtccctggggc

SEQ ID NO: 334747 - DNA, 122 bp, Homo sapiens
gcctcggcgggaggggtggggggagagttgggaaggggataggcggagggccgtcactagcgcacagcatgctgggtagcgaacgcagcctcacgcttaatcgccaaatagagtccggcctc

SEQ ID NO: 334748 - DNA, 122 bp, Homo sapiens
ctcagccaatccctcctcctgagtggtctgtgctggggattagcacccaggaacagtaggcggggctggggctgacttcacaactcccttgggtctcatgttgcaatgaccctcatgggagg

SEQ ID NO: 334749 - DNA, 122 bp, Homo sapiens
ccgcgctgcccggcccgtgtagtccttaccgtgcaggccgttggggatgctgcggtggtgcggcggcgccgacaagtcgtccagggaccgacgtgtggctcctgccttgccgtcgggggcct

SEQ ID NO: 334750 - DNA, 122 bp, Homo sapiens
gtcttcccagtaccctgggagggagggtactctgcatcactggggagcaaactgaggctccgagaggggaagtaacatggccacagacacacagtggatgcagactatgctggtccaggcac

SEQ ID NO: 334751 - DNA, 122 bp, Homo sapiens
gagtggaaagagaagcctgctttaaactggacagatgaaactagaacagactcttggagacggctggcaggaagtgaagctcaccttacctgggcttacctcactgggtcaaatcagaattt

SEQ ID NO: 334752 - DNA, 122 bp, Homo sapiens
agctgggattacaggcgcctgccacgatgcttggctaatttttcgtatttttagtagagacggggtttcactatgttggccaggctggtctcgaactcctgacctcaggtgatccacccacc

SEQ ID NO: 334753 - DNA, 122 bp, Homo sapiens
ttcgaatcatttttgcagagctatttcctcattattttcatgggtatatgaatcctgcaccgaagctgaagcaggaatgattccagtaaaaccaaaacaaaagaagatattttgttctttct

SEQ ID NO: 334754 - DNA, 122 bp, Homo sapiens
ttaaacacggaaaaggtacgttaagggcaccgggccagaagtaacctggcagcggggcgccggggaaggaggtgggggagtgccaggttaactaagtcccggcacaccctactgcaccttcc

SEQ ID NO: 334755 - DNA, 122 bp, Homo sapiens
cccgcccctgcctgtcctgattggataattctctcctcagtgacgggctcgtcgagaacacgcgtggctgaccctctagccgggcagccgcggatctgggagaactcactccagtccaggga

SEQ ID NO: 334756 - DNA, 122 bp, Homo sapiens
ccttttctccccgcggcattggggcgacgcagggcccccggcttagtgaccttggggcggcgctcacctccaaaggccagggtggtgggctgggcagaactcactgcctctttgccccagtt

SEQ ID NO: 334757 - DNA, 122 bp, Homo sapiens
aggggcagggcctggccccctcgcacccagcctgggacttacccggagacacagaaacggcgtctcattgcaggaccctcatcgcaggcgagactccccaaacctgcggtcgttagcttcaa

SEQ ID NO: 334758 - DNA, 122 bp, Homo sapiens
tttttttttgagacggagtctcggtctattgcccaggttggagtgcagtggcgtgatctccgctcactgcaagctccgccttctgggttcaggccattctcctgcctcagcctcccgagtag

SEQ ID NO: 334759 - DNA, 122 bp, Homo sapiens
ttgttagctgttatcattagttagatctctactgtgttcaagatctggttctaggaaccccggggaacatgaaataataacaaagctggtcttcagcctcgccggccagggtgctccatttg

SEQ ID NO: 334760 - DNA, 122 bp, Homo sapiens
ggctcagcctaggcctcagctcagccatgaaacctgttcaccttgtatcccaggaagggccgggtcatccctggttaggcctggccagcctggctcagcccccagtgcccagatccttcctg

SEQ ID NO: 334761 - DNA, 122 bp, Homo sapiens
tcctgctctcatctaggagctgtgggctctgtgcaatgcacgtccataactgcatgtcctcgggacctggaggacaggccgcatctaacggagcaccccccggccggagtccactgtgggca

SEQ ID NO: 334762 - DNA, 122 bp, Homo sapiens
agggggattctttctctcgccttcagctcagcagtgaaagaggggaagacaaaaatctggcgagcgagctgcccgggccgagactggccacttcaaacagcccttcaaacaaaaggagacga

SEQ ID NO: 334763 - DNA, 122 bp, Homo sapiens
aaggccaccgagcgcccgggccaggagccagagggccccggggccacccctgccggggaacgtgatgaccagagtccagacagtgtcccagagaggccgcggcccgcagaccggaggctctg

SEQ ID NO: 334764 - DNA, 122 bp, Homo sapiens
caaggtggtggtcaagtcaggccgcagctacgtgggcattgggctcccgggcctgagcttcggcagtgagggtgacagcgatggcaagctctgccgcccttggggtgtgagtgtagacaagg

SEQ ID NO: 334765 - DNA, 122 bp, Homo sapiens
caggcaggagcggcaggtggttgcccatgttgtgcgcagcgtcctgctgatctccttcgccggccatgtctgtttacccgcaaaggaggctgggacagggcggtgccgaagactccgaggga

SEQ ID NO: 334766 - DNA, 122 bp, Homo sapiens
ggtggcacagccagcacccagcagcacagccgctgcgtacacggccacacccagtccctccgccagcgccacccaggcggcaaaggccaggatcaccaggaggcctgagaagtaggtcatct

SEQ ID NO: 334767 - DNA, 122 bp, Homo sapiens
ccggtgcccaacaggccagagcttctggcacaagccaaggccatctactgcctgctgttccggggcctcctccgtggggcagctccagcaggcgagtgtcttgccttctctgtccttccatc

SEQ ID NO: 334768 - DNA, 122 bp, Homo sapiens
cctgccagtcccgcggtgacctttatctttcggtgagtgaaatcggtcgttcgtgtttttcgtgggtcttccaaccacaggccgcctgagatggttctagtccctttgagtatacagaccct

SEQ ID NO: 334769 - DNA, 122 bp, Homo sapiens
cctcagaaagccggcaagtgctgctgctgcagatgccactgcggcctggctgctgagggacgagagaccaggatgatttcgaggttggccttagaggaaacagatcatgggaatttctgtgg

SEQ ID NO: 334770 - DNA, 122 bp, Homo sapiens
ggcccggcggggagcggggcgatttcgaaaggaaggactgcagcgcccctcggggcttctcggggagcccaggtaacctcacctgaccgccagacccaagcaggcggagggggagccgggag

SEQ ID NO: 334771 - DNA, 122 bp, Homo sapiens
gggagacacagtcagaccccggctctaaaaaaataaaaataacaaagataacaaaacgttcgcttgtcggctttaaagctaaagcgcaaatctggagactgtttattgccgatggttacgtg

SEQ ID NO: 334772 - DNA, 122 bp, Homo sapiens
gataggaggcggcccctccctgctctgagagcccatgccacttccacacaggccgagggccggcacccacggtgagctggctcatgctcccaccacgtcccgaggcacctccaggagactgg

SEQ ID NO: 334773 - DNA, 122 bp, Homo sapiens
cggcacagtgaggtttgttatgctggaagcttaaaccaacaaaagccagggaggactggacgctgtctgaaagtgaggacaggaattgttaattgctcataacatcctgtgtctaccaagag

SEQ ID NO: 334774 - DNA, 122 bp, Homo sapiens
aatgggagccccacccgcgagggcctcatagtcctggactctagggtcgggctgcagggacgcaagcaggcgcccctcatgcagggtgttggatttccggcggagagggcaggtgaggcccg

SEQ ID NO: 334775 - DNA, 122 bp, Homo sapiens
agctctacgcccgccgccagtcacggatggagaaatatgtcatcgagtcttcaagccacacgccagagctggcccgctgcccatcacctaccatgtccctgccttcctcctggaaatacccc

SEQ ID NO: 334776 - DNA, 122 bp, Homo sapiens
aaaacagctcttcgccagtctggatggctctcttggcaaaaatacctatcctgtgatcaccgttaaccatcataactgcaaagagacacactggtgtcagtgagcatgaagacgggccacgg

SEQ ID NO: 334777 - DNA, 122 bp, Homo sapiens
ctggcctggcattggtgcacaatggacagattgtgtggctgtctccaccacaggaggagtcgcctatgacccagggcagcagtcatcgagaggctgacctcacagcaaccccagaacaggac

SEQ ID NO: 334778 - DNA, 122 bp, Homo sapiens
ccgcagccaatcccgagccagagtttccgcgcgaccactcccagtttggtttcgtaggcgcggggccgctctccgagggcgccctcagagcccgcgattgatataaatatgtaatctgtatt

SEQ ID NO: 334779 - DNA, 122 bp, Homo sapiens
ctattgccttactacttccctatcttagttcattttctaccactgtaacaatacccaagacggggtaatttataaaaacagaatagtttcttatagttctagaggctgagaagttcaaggtc

SEQ ID NO: 334780 - DNA, 122 bp, Homo sapiens
attcaagatataagttatgtttgagataggagaggcaatcagatcttggagggggtggtccgcggggagtcatttgtatccctaatatttcaaagctggtagtcagaatatgggtgtgtgta

SEQ ID NO: 334781 - DNA, 122 bp, Homo sapiens
ggtctgcctgggagacctgtgttctagaatcggccctgctcctgacttgccccactcaggcggtcctcccccgaggtgctgtctgcatggggttgaataagatgaaccctgaggccctgctg

SEQ ID NO: 334782 - DNA, 122 bp, Homo sapiens
accccaggatgggcatcttggcgccgttgttgagcaggagacggcttgccatggctgctgcgctccccagacccccgcccagtacggtgcggccttggccgcggcgcgtacctttaaatagc

SEQ ID NO: 334783 - DNA, 122 bp, Homo sapiens
tactcgggagtctgaaacaggagaattgcttgaacccaggaggcagaggttgcagtgaaccgagatcacgcgactgcactctggcctggacaacagtgagactccgtctaaaaaaaaaatgc

SEQ ID NO: 334784 - DNA, 122 bp, Homo sapiens
agggtgggagaggctcgatttttccagtagacggccaaggagcgcgggggtcgaaaggaccgggaggaggaaacaggttagggaaactgcaggtcgatggcacagagcgtactggtgaaaaa

SEQ ID NO: 334785 - DNA, 122 bp, Homo sapiens
tgctgtctcccacaagaatgatgatgtcaggggcatcaggaaaggtaagggccgggaaaccgggcccttggagaaccctgcccaggggaggcccagcctactcacaggatccgacactccag

SEQ ID NO: 334786 - DNA, 122 bp, Homo sapiens
gacactcctgtctcatggttctaaccagaggggacttgcatatccattcacctaaagctccgttaagaaaggtgaggagccccgggccagacccacaggaagtgtccccaggttgcatttgg

SEQ ID NO: 334787 - DNA, 122 bp, Homo sapiens
ccttcctgcatgtatttgattcatcctacatagctctctttatgtcctctgggttgcaagcgagaaaaaaaaacctgcaaagaaaaactgataaaatatacttggttaatttggatgaggga

SEQ ID NO: 334788 - DNA, 122 bp, Homo sapiens
cattcaaggtcctcgttcctttttccctatatctagaattaaacaggtttccccgtttagcgcacatttcacgttcgctgaaggctttggggagagggggaaacagagcttatgactgcccc

SEQ ID NO: 334789 - DNA, 122 bp, Homo sapiens
gatgcaacagagtggtctggcggcaaagttctcctgctgttttcaacggttccatccacccgtggctccccgtctctccatccggctctccagtctcacatggacccggctctccccgctcc

SEQ ID NO: 334790 - DNA, 122 bp, Homo sapiens
aaaccattcaacagggttaaaatccttagaccacagaggatttggtggacaagtcagagacgcgttccgcagagctgaagcctttcttcaagaagcctacaagaaaggaactatggagaacc

SEQ ID NO: 334791 - DNA, 122 bp, Homo sapiens
gggaagtctccctcacttgtcccctgcaacaggggctgagccacaaccgactgtggatctcggcagcgacagtgaggagggagtctgcagcgagcaggggaggagaaggggaggaccaggat

SEQ ID NO: 334792 - DNA, 122 bp, Homo sapiens
aaccacctggaaagtggcaaaatctgtaaaatataaaatctgagtggtctcaggagcaaacgctgtgtccagagcctcatgtccggaggtccagcccggcctcctggctgagccttcccacc

SEQ ID NO: 334793 - DNA, 122 bp, Homo sapiens
ggactcgctggcgtagggatgctgcgctcaagggtgcgacgccaactgggctcgcgcaggcgcgcgccgtcgagcgggagcgggacacctgggctcctccttggcccctccccgcacaagtc

SEQ ID NO: 334794 - DNA, 122 bp, Homo sapiens
cgctgtgctccgcgacggcgcatgcccgcttttgcgcaggcgcggggactacggcgcaggcgcggagactattgcgcaggcaagcgcgtacgcagaagcgtgcgcgcgcccgttcaacgtcc

SEQ ID NO: 334795 - DNA, 122 bp, Homo sapiens
ccaaccccagattcccagcgcccttcctcggggacacgctcttccgggaggggtgcgcctcggatcaccccccccaccacaggcccccaaaggatccccgggctagaggtgcctcgcggggc

SEQ ID NO: 334796 - DNA, 122 bp, Homo sapiens
tctgacatggccccttgtattttacctcagaatctcacctactccataactaaaagcctccgctggtactgaggttggtggttgtgacactgaaataatagagcatttgcaccctagttccc

SEQ ID NO: 334797 - DNA, 122 bp, Homo sapiens
gagacggcagcggggaggatcccgcctctcccagctcgtcagaatccaggcccaacgggacggttccccagacactgacttcggggttccagcgtgcagcaccaagtcacgtgggcgccgtg

SEQ ID NO: 334798 - DNA, 122 bp, Homo sapiens
atcttcagaaacaagatctgtcacccgtagagcttagagtccaaatagacacctatgaggcgagcacaaggggcggtgtgaggcagctgcaggggcctgaccaggggccggggttggctgtg

SEQ ID NO: 334799 - DNA, 122 bp, Homo sapiens
ggcaacaagtagctcccaccgacccgcgctccccatacatcatgccgtctgaagctcccacggcatcctggtcagtcaccaaatgtcccgctgaggccagtgccaaccccatgaagagaagg

SEQ ID NO: 334800 - DNA, 122 bp, Homo sapiens
ggaatcactcttcttccatggcctctacgattctcacctatgacaaaatatagagacaggcgcagcctatctcaagaatattggacttcacagtagaggcacagtggtctaaaacaaacatc

SEQ ID NO: 334801 - DNA, 122 bp, Homo sapiens
catatctaaggactgtgggggtccatatcttgggaccatggggggtctatatgtcaggaccgtgggggtctatatctaaggaccgtggggttctgtatctcaggaccgtgggggtctgtatc

SEQ ID NO: 334802 - DNA, 122 bp, Homo sapiens
ctgttctggacctgctgaaccctctggggcaccaggctcggttcctagtgcacagaagggcgtcactaactatgtgatgcggaccgcagggcaccggggttaaggctgaatctgccaggtcc

SEQ ID NO: 334803 - DNA, 122 bp, Homo sapiens
gcgttagcatccgaaaaatcgggtgggtggggcgttgcagaaagggtctgcagttggccccgaattcggaggaaggaaagtccctggaagggaccgcagtcccagcccccagtcctggggac

SEQ ID NO: 334804 - DNA, 122 bp, Homo sapiens
tcgtccgcaggaggctctcgtcgtccgcttcgatgccgaaggccacgaagggccccgtggcgatgtccccccagtacccgcgcgctgccacgcgctccccacgctggaaaaggagggagaga

SEQ ID NO: 334805 - DNA, 122 bp, Homo sapiens
ttaaatagtcacacatgtggctagtggctcctctgtgagacagcaccgctctagagcattcgatcttgttgccatccatccctttctggtaaccctgtgctcttagctttggtgacacagca

SEQ ID NO: 334806 - DNA, 122 bp, Homo sapiens
gatgtacctgactttctgagtgcactctcttaatcctcacaactctggagggaagcagggcggtttccatgataggccttctgcagttgacggaattgtacccaaataggttacatgatttg

SEQ ID NO: 334807 - DNA, 122 bp, Homo sapiens
cacaaagcagtgtgcaaaagttcatgggagtccaaagagtataaataaaacttacccttacgaagtagaataaagataagcatttcataccaatacaaatcattttcatctttatgacagtc

SEQ ID NO: 334808 - DNA, 122 bp, Homo sapiens
gccaggcgctgaggagcgggcccgtggtgacggccacacgggtagggggctggcgaacagcggggttgtggttgaggctgggccaccaaagcggcgtttgacagtgctcaggccatcttcct

SEQ ID NO: 334809 - DNA, 122 bp, Homo sapiens
gacaagcaaggggctgggttcagtcttgctgaatggactcaggagcccatgatgtatgtccggaaggcagaagagaggtgcagaaatcccccagggccaggctggccacaatcagctgctgg

SEQ ID NO: 334810 - DNA, 122 bp, Homo sapiens
gccgcactgcgggcgggggaggggcgcgtcagccggggtttcccagcattacgtgggaaccgagcccgggtaactgcgggtcacctgcgccagccggctcggaccccgccccgccgggcccg

SEQ ID NO: 334811 - DNA, 122 bp, Homo sapiens
ctgcctcccctcacccctccctgcagtgttttgtagcctcaagatcagtgagggaatcttcgggcccccagcatgcaggaccgaagcccccgagacagctgtccctcagtcccaaggtcccc

SEQ ID NO: 334812 - DNA, 122 bp, Homo sapiens
ggacctggcgaaaaagagcagcgaatcggaactgagcgtgggggcagtccggggagatcgcgccggtccttctagaaggcttccctcctctgaaacccgctgcagtccacagccccccaggt

SEQ ID NO: 334813 - DNA, 122 bp, Homo sapiens
gatagcggcttgaataagggcagtggcaaggaaaatgggctaggggttagggaagggggccgactggctgtgcacccaaatgctaaaaacggtccagaaaggaatgtgttcagctatttttc

SEQ ID NO: 334814 - DNA, 122 bp, Homo sapiens
tcgcggaccctgtagagtcggtctctgttgctctttttgcctgaggagtcttccatcctacgtcgagctctgactcccgtgctgtcgagagggagtccccggggacacctcggcacgcagcg

SEQ ID NO: 334815 - DNA, 122 bp, Homo sapiens
gggttccgcacctggtcgaagaggtagacggtcacgtccccgtggaaggagaccatcttgcgcttcctctccagctcgctgtcctctggctcgtcggccccgcgcggagacttgagcagccc

SEQ ID NO: 334816 - DNA, 122 bp, Homo sapiens
tcaggcatggcagactgcaggtcccgagccctgccccgtgggaaggcagccaaggcccggcgagaaatcaagtgcagcgcctgtggaccggcactgctgggggactcagtacaccctccgca

SEQ ID NO: 334817 - DNA, 122 bp, Homo sapiens
cccagcactcgcgggtccctggctgggggcagcccctccccagctgccgcgccggggtttcgggtgccttccctggtgtagaagctgccaacccaacgttgtgcatacggtctggggtggcc

SEQ ID NO: 334818 - DNA, 122 bp, Homo sapiens
ggaaagaaccttataaaccagggctttacagagggtgtggcaaatatgtgctgtgtgacacgggctaagtcctctaggagattaggtgctgctgtaaggtggtaaacagaaactaaagctgg

SEQ ID NO: 334819 - DNA, 122 bp, Homo sapiens
caaaatatggatctacttccgagaggacttaatattactattactccataacaaagagggcgccacagaaagtcacgccacgccgcccttgctggcagcccttcgggccgtgggcaggatgc

SEQ ID NO: 334820 - DNA, 122 bp, Homo sapiens
gttctgggactgggtacggtgctggaaggggtactaggcaggatgaaacgacggggcccacgacgctccaaaaggaagccttctggacatatttcctgcctaagtgctcgctctggggtggc

SEQ ID NO: 334821 - DNA, 122 bp, Homo sapiens
tcaaatggtttttatgtggtgtggccccagatacaagccaaccatttcacctgtggtgagcggaaggcgcagctatctataacacctgagaaaaaaagaacctgctgtactagctgtcagct

SEQ ID NO: 334822 - DNA, 122 bp, Homo sapiens
gcgggccgaggaaggacctggtgttttgatgaccgctgtcctgtctagcagatacttgcacggtttacagaaattcggtccctgggtcgtgtcaggaaactggaaaaaaggtgactgaatga

SEQ ID NO: 334823 - DNA, 122 bp, Homo sapiens
ggctcggagctgccgcgccggcccttgccccccgccgcacaggagcgggacgccgagccgcgtccgccgcacggggagctgcagtacctggggcagatccaacacatcctccgctgcggcgt

SEQ ID NO: 334824 - DNA, 122 bp, Homo sapiens
ggggcccgcccttcccacccggggcgtgtcacgtgtactggtggtggggggcgggggcggcgaggtgagggagagtgcgggttcagacagacagaggcaaggggagcctggaaggggcacag

SEQ ID NO: 334825 - DNA, 122 bp, Homo sapiens
agcaggaatcggccccccacgtcattcttgcacacgcgggccacgcgagagtacacggtgcgtccacagtcgtgctccactgcgttctcccgcaggaagaagtatgcaaacagcccaatatc

SEQ ID NO: 334826 - DNA, 122 bp, Homo sapiens
ggccgtcgtccttcgtaacggtcagagtgaagaccccccggcggacccccatcatgcccacggccaacatcaagctcccaccaggcctgccctcccacctgcctcgctgggcaccgggtgcc

SEQ ID NO: 334827 - DNA, 122 bp, Homo sapiens
catcccggtgcaggaaaatcaaactcctatttttcaaacccaataaaggccagcattgtacgtctgcgtaaacagagaggccagacgggcagggtggcgggaggaccagtggcccgccctct

SEQ ID NO: 334828 - DNA, 122 bp, Homo sapiens
cttcctgagtgaggggctgtgaggatggaggtggaggaggcatctggggcgggtggtggccgggcccagcagatggcgcctccctggctgagctgcccgcaccgccagttccctcatttcca

SEQ ID NO: 334829 - DNA, 122 bp, Homo sapiens
ctcccctccgtcccccatattcacgtgtctctctggcgatctgggaatctgtgtccctcacgttagtctctgtcgggttttctttttttttccttggaagaggagatgaagggaagtgaaag

SEQ ID NO: 334830 - DNA, 122 bp, Homo sapiens
aatcccacctaaacctgtgcccccaagaccctcgttttcacccagctgaacgaacagggccggggcccccatttgctcccacttgtcggtaacattctatggtagggccctccctgccgccc

SEQ ID NO: 334831 - DNA, 122 bp, Homo sapiens
cggggagtcgcgcttcaccttcgcccctcatttgacccatggactcattaatggaagaaccgaggcaagcaagttcacgggaagaaatgcgccctcccaactggaggccaccagctgcccac

SEQ ID NO: 334832 - DNA, 122 bp, Homo sapiens
agcaggtcagctgtctgagcaagacagtattgaacccaagccaccactgtgaagggcgcccggaggatctttctggcgcagaacagctccggcaagcgacagccaatccaagatctttgctc

SEQ ID NO: 334833 - DNA, 122 bp, Homo sapiens
gaaaacccaaagagaagtgagggatcatgtcttaggaacctgcatccttccatcctgcttcgacttctcaactaaattcttaagtcctggagtgcaggtatcaccgaaatttgccccatgcc

SEQ ID NO: 334834 - DNA, 122 bp, Homo sapiens
ttggtgagtcataagccctcatttcagaaggggccctgccccgtgccctggaggaaggaacgctacagagagaggccaagaggaatctggacaggccttgctgggtttagatcacacccttt

SEQ ID NO: 334835 - DNA, 122 bp, Homo sapiens
taagtaaatatgctatttttgatgaagatatgttttagattaagatatttttacttggaacgctttagtgttagatccaagtttgccacccttctggtttcttggttaatattttcaattaa

SEQ ID NO: 334836 - DNA, 122 bp, Homo sapiens
accacatattcgacacccggaagtgcgaaacgcgggtaacgcagtgggaggtgaaaccgacgagggtgcaggcagcaccaggcggcgaaccaggcccgctgggtggtggctggaggctgcgg

SEQ ID NO: 334837 - DNA, 122 bp, Homo sapiens
acagtgtggccaccgtgaaggaagcagcttaggccccagaagtctccaggattgctgtaccgagatgaccagggtgtgatctctcaccctaaggagctgaatttggcttttctgtgggaaag

SEQ ID NO: 334838 - DNA, 122 bp, Homo sapiens
cctcatcagcacatcagccagaggctccttggagaacagaaggggctcagaaccctgcagcggcgtccactgcacacacaggaagaactcaagtgctcataggcagtgagtcatttccttag

SEQ ID NO: 334839 - DNA, 122 bp, Homo sapiens
acgggcgggattaaggagtttgggggagacgagggacgcttggagatccctctaagtcagcggaacgcagggccgggctccagggaactacagctcccagcatgccccggggcccgcaaccg

SEQ ID NO: 334840 - DNA, 122 bp, Homo sapiens
ctcgccaatcactgtcgcttccagcgctgactggccagggagcagccaatcggggcgtggcgtggacccctcccgtggcgcgctctgggggtgcgcgaggcggggccgtggcggctggaggt

SEQ ID NO: 334841 - DNA, 122 bp, Homo sapiens
gctccactcgactccggattggtcgagcttagagagccgagtgacgtcagcgggggagaacgcctgatttgtgtggtgggcgcgggcggtggggggaagcgcagtgcgcaggcgcaactgcc

SEQ ID NO: 334842 - DNA, 122 bp, Homo sapiens
tgcgtgtggccggggggctccgaggagcaggcgggggcgccggggcttttgctgagttggcggggttggccatggccgctgcccgcccagcgcgggggccggagctcccgctcctggggctg

SEQ ID NO: 334843 - DNA, 122 bp, Homo sapiens
cccctttgattctcaaaagtgaccacctgtggataataaattgcatggtcatcctatgtacgaacccacttagaatacccttctgtctgttcaccttcaaatcctaccctgttcaaggatca

SEQ ID NO: 334844 - DNA, 122 bp, Homo sapiens
gagtaaatcagcattagatgtaacagcggaagctcagtcagagggagcggggagggagggcgcatgaaagcctgccattggcgagcttaccaaaggcatctgccagtgggacttcaatggaa

SEQ ID NO: 334845 - DNA, 122 bp, Homo sapiens
ttcctctgcagcgagcttgcaagcctgggctgtccaggaggtgaacattaaccttcccagcgctgacgcgggcgccgcccggggcttggaaattgtcagcaccgcggtagccgggctcgctc

SEQ ID NO: 334846 - DNA, 122 bp, Homo sapiens
acatctgtagtctcagctactgaggaggctgaggcaagagaatcacttgaacctgagaggcggaggttgccgtgagccgacattgcgccactgcactgcacagagtgagactccatctcaag

SEQ ID NO: 334847 - DNA, 122 bp, Homo sapiens
accctcccccacaccctaccaccactccctgttccggaaaaggaagtggagcacagtccccgtaggaccgtctaactctgagccagactaacagaaagaaagtgagaaggaaggagggacga

SEQ ID NO: 334848 - DNA, 122 bp, Homo sapiens
cggggaagcccggggcggggagcgcccctgaaggccgggcccagaggtcctgtggctgcgcgtgcacacacacacgtgcacacagtcacacgcgcacaaccagccagagctgcggcctggcg

SEQ ID NO: 334849 - DNA, 122 bp, Homo sapiens
gataactttatttatttagagacgaggtctcgctttgtcgcctacgctggtttcaaactccggggctcaggcgatgctcttgcctcagcctcctaaactgctgagattacaggtgtgagcca

SEQ ID NO: 334850 - DNA, 122 bp, Homo sapiens
ggcgcagcagcgggcaggccaggaagtggctacggtgcatggacatcaccagggcaccgccgtgtggggagctgagcagggtggcgagggcctgcaggacacgcaccgtgatgcccggcacc

SEQ ID NO: 334851 - DNA, 122 bp, Homo sapiens
taacgtcaaacaatgcaaccaaaaaccgcagaggggagcgaaaaggccagtggaaggggacgacaaataccaatttgagatgagactgcgatttagtctgcagcagcagcgtccagcgcgct

SEQ ID NO: 334852 - DNA, 122 bp, Homo sapiens
gttgaggctgcaatgagcaatgatcacgtcactgcactccatccggcctgggtgacacagcgagagaatctctaaaaaaataataaatcaaaaacacttaaaaataaaggccaggcacagtg

SEQ ID NO: 334853 - DNA, 122 bp, Homo sapiens
ctggcagccatgcacaccctctttatgcgagagcacaaccggctggccaccgagctgagacgcctgaatccccggtggaatggagacaaactgtacaatgaggctcggaagatcatgggggc

SEQ ID NO: 334854 - DNA, 122 bp, Homo sapiens
cctcttgcgtcgggctgctgctctgctgactgggccgctgccttttcattcaagagaggccgaagcggtgattgggtcctgtggaagggaccgggagattattggcggagacgggaagaaag

SEQ ID NO: 334855 - DNA, 122 bp, Homo sapiens
ataatcaatgcccagggcacactgattatcttgtgtattaaagccaccgtcccaagtactcgtcacccagtacgaccactgtttcctgaacaaacttttcttactcacgtgacagtcccgat

SEQ ID NO: 334856 - DNA, 122 bp, Homo sapiens
ataggcaactgggttcctgaagtcagccaagagttgattgcttatgtttttagagctgtgcgaagaagaaaaatgtaggcacaccactgctgtgcagtccacgggagtcttacagctgcagg

SEQ ID NO: 334857 - DNA, 122 bp, Homo sapiens
agcgggccttctctcgccccactcggcaccgccccgccccgccccgtcccgctccacggacgcgcccggacgctactggttcgcctttgcgcatgtgcaattgccctcgtaccgaactccgc

SEQ ID NO: 334858 - DNA, 122 bp, Homo sapiens
ggccggggtgcacgcgggggcgacagggtcgaggcacccggcccgggctccccactggcgcgcccgcagcggcgctctatttttagcaggcgctgtggcaatataaggaatgcgcggcgcgc

SEQ ID NO: 334859 - DNA, 122 bp, Homo sapiens
gggaggggccttgacggcagactctttccagcctggtggatgagctgaaggccagcaacccggacttcccagaggtcagcagtggaatttatgtgcaagaggttgcgccgaattcaccttct

SEQ ID NO: 334860 - DNA, 122 bp, Homo sapiens
acgtctgcacccaaacccagtcctcagaaccgcagacgtggccctgcgtggcttccggctcgtcgccacgccccctggccaatcacggcagaggactatccgccagccccgcccccgcctcg

SEQ ID NO: 334861 - DNA, 122 bp, Homo sapiens
gtgaatgctgatgggagcctggggacctcagcttctaaagcctgtttctgccgctcaccgcggggcctgcagggctgagcttcatctttctgtgcttcatttcactgtcagtggaaagagca

SEQ ID NO: 334862 - DNA, 122 bp, Homo sapiens
accaggccccacggactcctgccggaagacacctggaacctggcgatttcctcaccccaccgctggactccccaacagcccgcgcctctgcacgagcaccgtccgtctccttctcggctgta

SEQ ID NO: 334863 - DNA, 122 bp, Homo sapiens
taaatgttacgcgaggcaaatttattcacatggggcttcccaggccactttgtggtcagccgggagggacgtttttgccgtcccacgactccaacgggcagccgggctacgcaaacatggaa

SEQ ID NO: 334864 - DNA, 122 bp, Homo sapiens
ggagcttgtcttcagtccaccgcagctacagctgagaagctgcccttcccacagcaggggcgaggcccctgcaagtctgggcatccctgcatgtgtgcgtgcatgtacacacatgtgcatgt

SEQ ID NO: 334865 - DNA, 122 bp, Homo sapiens
ttcccctcacctagcagcagcttccccacctcccctaccagccccctcccactgactccccgacaggcacatgcgctggtgattgctccggctcatgcatgcacgtacacgcgcgcgcacac

SEQ ID NO: 334866 - DNA, 122 bp, Homo sapiens
tagctcatgttatccttcctatttgaaacactagttaacatcaaaatgacttttcaggtccgtggtggctctaatctttgtatgttggtaggttcctttctaggcagaacatccaaagacaa

SEQ ID NO: 334867 - DNA, 122 bp, Homo sapiens
agttatctacctcccctctctacttttctgtaagggccccaggctgtatgtcttttatatcgtcttcagatgactacaataaacacacactaattgggcacttcctgtgtccaagcactgta

SEQ ID NO: 334868 - DNA, 122 bp, Homo sapiens
cagggacccagtggagccgaggggccagtggtttttcccagctctgcatctttccagcaccgccccccaccccgcccctccccacccccgcccaaacaaatgtgcccgtcactggcgggtag

SEQ ID NO: 334869 - DNA, 122 bp, Homo sapiens
ccacgtcttggggactccgacagccccaaataagccctcggggactggggttgtgaaaagcgaggtcgtgaagacgccggcctcataccgaagggtaggacggtgaggtcagccccgtccca

SEQ ID NO: 334870 - DNA, 122 bp, Homo sapiens
agcgccatccacggaagccggcggcgcacacgcaggcgcctgtgatggggttacacagggcgccgttctggcactggcaccggttgctgcagtggggcccccagtggtcgctgtcgcagcct

SEQ ID NO: 334871 - DNA, 122 bp, Homo sapiens
ctcaaagtatgttcatctgagaatttgtctccataactatgtgactataaaaattctcatcgattttgttagttgatcaattgagggaaaaacatatgttacttgatataactggtgggtca

SEQ ID NO: 334872 - DNA, 122 bp, Homo sapiens
tgacagtttgtatggggaagccaggaggtaactgtttggcatgttcttgtttggaaacagcgggctctcccattgatagaacactaaagtataccaggcagcattgtgttctatatggcccc

SEQ ID NO: 334873 - DNA, 122 bp, Homo sapiens
cggggtaggcgagaagcaggcaagggcgcggagggaagaatcgggagggcggccagagcacggtaaatgccccagaagtttggcagattaggccaaccttgtccgctcgcctgggggccccg

SEQ ID NO: 334874 - DNA, 122 bp, Homo sapiens
agctaatataggatgaagatgggacaagttggtgtcgagagtaacacgccggctccttagcggaggtctgaagaacaatcgagttgaattaatttctaagagaccccatgacagattcttga

SEQ ID NO: 334875 - DNA, 122 bp, Homo sapiens
aggcataggaatgaccgcgagagtggctgctttcatagctccgcttgcgaaactcctgcccggcctttgacaccgccacggctttcagtaatctggaaaatccctagtttccaaaaatagtc

SEQ ID NO: 334876 - DNA, 122 bp, Homo sapiens
agccaatctagaaacctccatgtgttcctgggcttctcatatttatgccttgtcttgcctcgctgccccatcttactactgacttccctggggcagaaatctccaatatgactaatatctct

SEQ ID NO: 334877 - DNA, 122 bp, Homo sapiens
ctggctctcccgcagggcacttctggccctggacactgctccccctccagtcccctgctgcgaggcccctgatggcctggccgcatttccacagtgtcctccctgctctcctggcccaggtc

SEQ ID NO: 334878 - DNA, 122 bp, Homo sapiens
aactaggtgttactcatatccacactcccagtccccaacacggagtaggtgatggagaagcgtttgttgaattaatgaatagtgagcaagcgggtagttattgattggcaaggatgtttgga

SEQ ID NO: 334879 - DNA, 122 bp, Homo sapiens
acttcaggtgatccacccacctcagccttccaaagtgctgggattataggcgtgagccaccgcgcccagctctgcttgatacttaatgatgattttatccagctttgcatctgaggctccct

SEQ ID NO: 334880 - DNA, 122 bp, Homo sapiens
ggaaattctaacttatgatactattattactactatgaatcaccataataattacagtagcgaacacatgtgccaggtattgtaataactaatttctcaccattctgtaacgtatgacctgc

SEQ ID NO: 334881 - DNA, 122 bp, Homo sapiens
atggaaaccccattgcagttccagcgcggcttcttcccagagcagccgccgccgccgccgcgctcctcacacctgcattgccagcagcagcaacagagccaggacaagccgtgcccgccctt

SEQ ID NO: 334882 - DNA, 122 bp, Homo sapiens
aaggccggtgggcggtccagccggaggcccctactcgctatctgcgaggcagggtgaacgcgcagcctgggcctccatccccagcgcgcctgggcaccacctggggccggtcacgctgcctg

SEQ ID NO: 334883 - DNA, 122 bp, Homo sapiens
ttgtaggcgtgaccgaggacgctggtacccggacctggacttcgcagggtcttggaggggcgggcagtgggggatctccgctttgggtctcctggctgcaaagcgaggacaactatgagcct

SEQ ID NO: 334884 - DNA, 122 bp, Homo sapiens
ccaccaagtcctcatactccggattctcctctgcaccatacatctgagcattagaatcaccggccacctcattatactcatagtcctcaaccttggacttcacctctcacactcctctttcg

SEQ ID NO: 334885 - DNA, 122 bp, Homo sapiens
cacgtgggttttggccccatgcaggtcattgtggggaacctgcccactggcatgtgcttgcgtgggggagtcggggcatgtgcagaaaaggcatgtcacagctgaaggagggtgagagggtc

SEQ ID NO: 334886 - DNA, 122 bp, Homo sapiens
ccgtccccacccgcttcagaacccagcttctctcacccaggttgtaccacacgtccatctcgccgctgagcgtccgcacctcaatgatcgtctgccccaggaaatcgtcagattccctcttg

SEQ ID NO: 334887 - DNA, 122 bp, Homo sapiens
tccttgcaggggcagccaagcctggagccttccccaagagagttgaaggtggaggtggctcgtacttaggataagattcatagagtccaagaaggagcaaatgcgatcccctctgtgcaggt

SEQ ID NO: 334888 - DNA, 122 bp, Homo sapiens
gaggcagaacttgtctcaaaaaaaacaaaaaacaaaaaaccggccagtgtgtgaggggcgcgcgatttttaagatgtgagagagggaattgtgcgtcaccatcaccaccaggtgtcgcgaca

SEQ ID NO: 334889 - DNA, 122 bp, Homo sapiens
ggcggacggggggctggcagcggggagggggcgcaggtcacgtgccggcgggcgggtgggcgcgtacagtagggcgccctgctactgtactggggagtcagtgccctgttaccgggtctcgt

SEQ ID NO: 334890 - DNA, 122 bp, Homo sapiens
cagtctcccagttctctacatttggcgagtttaaaccacacaacaggacagctcacacctcgagagtgttctgcgcaaaatagaatggggaaaggtgagcctgagaacttgccaagctttgg

SEQ ID NO: 334891 - DNA, 122 bp, Homo sapiens
cctgtaatatttaacttattgattcagccttctttgctccaggctagaacctacagactacgtgatcaagacatcaggaagcttggggtgaaaaaaaaaaggtagttttgcagaggatttca

SEQ ID NO: 334892 - DNA, 122 bp, Homo sapiens
tcactgaaaataaaaaaacattcctcagagaaattaaaggtctaaataaatggagagatgcgagttggaaagctcgataatactgttaagatggcagttctcccccagtagatctataggtt

SEQ ID NO: 334893 - DNA, 122 bp, Homo sapiens
tgttttacagggtgtttgtttccatggctggcatagctaggacctcaccttcaggcccatcgccctttctctcaaaaggttttcagtttgctagaagccactttcctccctcactttactta

SEQ ID NO: 334894 - DNA, 122 bp, Homo sapiens
cccaccccgccacactaggctcccccgccccgccggtgcccagccagcggccccctcccccgcagcccgcccaggctcctgcagcggcgctcccgcagcctgagcccctccccctccgccag

SEQ ID NO: 334895 - DNA, 122 bp, Homo sapiens
cagatgaattacaattttcagtccggtattcgcagaagtcctgtgatgttttccccttctcggcaatttacacgcgcgcacacacgcgcgggcacaggcatgaatctctatccacgggaccg

SEQ ID NO: 334896 - DNA, 122 bp, Homo sapiens
gccatacctaaggtaagcaacgcttcccgcatcctcagactccaggcgtccaaattcgcacgcttgcaggcattctattgattcacacttgagtccttcaacaggtagcgccaattacatcc

SEQ ID NO: 334897 - DNA, 122 bp, Homo sapiens
gtgaaacttacccccggggttcgtcctagaggagcgtgagcggggaatgcccaggtcaaccgggctgtccgaattccgccccggctcagcctccggcctcagtccgggagagagatctgcct

SEQ ID NO: 334898 - DNA, 122 bp, Homo sapiens
ccagcccagcccgtttcttgcagattttagcttctcccttgcctgccgcctttcccgtttcggctcggtgaagctacctatgggttgctgttcatttaacaaacggtgatccggataaacat

SEQ ID NO: 334899 - DNA, 122 bp, Homo sapiens
agaaatcagacccttggtgacccagggctacatgtactcggcggaaaactggggttaaaccggacccttggttggttgaaaaattaaaataatttttaaaaagtgggcgtgaaataatccag

SEQ ID NO: 334900 - DNA, 122 bp, Homo sapiens
aaattccagtcaggctgaagatgactgctagaaaaccacaagccttccagttttctcaaacgacatggcactccagacagtatctgtatccttctcctaaataaaactcctgttttctggag

SEQ ID NO: 334901 - DNA, 122 bp, Homo sapiens
ccccggctcccatccgcgcttctccctccacacctccccgcaagcagagggagccggctccggcctcagcaagccccagagaggggcccccacagtgcagcagcgggctgaggggctcttcg

SEQ ID NO: 334902 - DNA, 122 bp, Homo sapiens
cgcccagattgagccggcgacgtggaggcagtgttcaaggattgattctgtagtaggacccggggcgattctgtgctgaggtagaggggcagagtcccaggccaaagttagaacctgcggat

SEQ ID NO: 334903 - DNA, 122 bp, Homo sapiens
gtttgctctacgcgcggacatcttttcttcctaagccttccctttcgctgaaaaggttgtcgcagaagggcggggaggcttgaaatcccgccgttccctcattctttctcttttctttctct

SEQ ID NO: 334904 - DNA, 122 bp, Homo sapiens
cccgcctcggctggggccgcgggcggcccggagctataaaaggcctgggtggggcgggcgcggcggcaggacagccgagttcaggtgagcggttgctcgtcgtcggggcggccggcagcggc

SEQ ID NO: 334905 - DNA, 122 bp, Homo sapiens
caaacccatcttgggactgggcccatttctgcaggtctccaggccccgcatgaaaggaaccggctgggtgggcgcggggcagcgcctggcgtgcgtccaggcccccaggcggggagggctca

SEQ ID NO: 334906 - DNA, 122 bp, Homo sapiens
atcaactcgccgagaggtgaggggccgcccccttgactgggcttctgctagagtcagctgcggcaatcggggcaacaaaattcaggcttaacgtcagcgtgggcatctttggacttcaggat

SEQ ID NO: 334907 - DNA, 122 bp, Homo sapiens
gccaccagcggaccatgcctcttcttgccaacaaacccatacaggacaaatttgtacttgcggccaggatccagggaggtgatgacggccgagcgctggggtccttccacgggcaccacctg

SEQ ID NO: 334908 - DNA, 122 bp, Homo sapiens
ccccctccccccttctatatacatgcacccctccctctcctcctccccatgcgccctccccggccagaaacttactagtgagcaagcgtgcaggctctcctgatgctggaaacttactccca

SEQ ID NO: 334909 - DNA, 122 bp, Homo sapiens
gatactgtgtcagtactgtagtgaggtctggaggtacctgaagcatgaaggcagcatgggcgggggccacagctggcagcacagttcacttgctctccacactgggtcagtggctgcgactt

SEQ ID NO: 334910 - DNA, 122 bp, Homo sapiens
cgggtggtcgcgggccatggagggtagcttttcggatggcggagcgctgccggaggggctcgcggaagaggccgagccgcagggcgccgcctggagcggggacagtggcactgtttcccaga

SEQ ID NO: 334911 - DNA, 122 bp, Homo sapiens
tttacgaaaaatgttttccatatccattgcctctacagttgtctatgtttctttggcacacgaggcacaatttagcgctaaaagcaccatcacaatctttcataaatattcctgtaagaatt

SEQ ID NO: 334912 - DNA, 122 bp, Homo sapiens
gcgcggcggctgagggcggggggaatgcgggcgcaccaatgggcgccagcgtcggcagcacgtgacacctcccccctgctcccattcatcaagggggggacggtgtcgtcctttcaattcat

SEQ ID NO: 334913 - DNA, 122 bp, Homo sapiens
tgaacactcctttagtgatgaccttgtgccaggcttgcactgcctctgggaatccaaacacgggaaaacagacctctccactccgctgggggagcttaaagagcagtaaaagtgaggccaaa

SEQ ID NO: 334914 - DNA, 122 bp, Homo sapiens
gaagtttttaatacaaaaattattttaagaaaataagcacaggctgggcgccgtggctcacgcctgtaatcccagcactttgggaggccgaggcgggtggatcacctgaggtcagaggttct

SEQ ID NO: 334915 - DNA, 122 bp, Homo sapiens
cacctcagtactgccctattttcctttgctccctttgcagccataatttttacatggttgcgttgttgtcatttcattttctactttttaaattgctacagagatctttgtatttattattt

SEQ ID NO: 334916 - DNA, 122 bp, Homo sapiens
ccaacacgtgcgcactgatggccggggccccagccagcctgctggagggtcttccccgcccgagggactgagggggctctaggagcatcacataaggcctaggtagatcaggcagccattgc

SEQ ID NO: 334917 - DNA, 122 bp, Homo sapiens
gctcacgcaacgatctcacgtgaccacgcgcttcccacacacgctcacgcaacgatctcacgtgaccacgcgcttcccacacacgctcacgcaaagatctcacgtgaccacgcgcttcccac

SEQ ID NO: 334918 - DNA, 122 bp, Homo sapiens
gcaagcgcggcagataaaggccagcaaggccggccggggctctgggtttaacccctaagtcgtgtcagggtgctattagagattgaggcctgtgctggcaccgaggcccgttccaggtgtgg

SEQ ID NO: 334919 - DNA, 122 bp, Homo sapiens
aagtgcttggtaaatgcagagtcctcctgggtgcaagggtgctacacatcactgggcgagcgcgctctctgggcgagactggacgggatgcagccgcagcaaatgagacagagcgctttctg

SEQ ID NO: 334920 - DNA, 122 bp, Homo sapiens
agccagcctgagccttgacatgggagaaacctccgccatacatctccgaagaaacggccgcgtgtctcaggggagcgcaaacacccgtacccaggaaacaggacagcttctgccactgtcgc

SEQ ID NO: 334921 - DNA, 122 bp, Homo sapiens
agcgcccaatcataggtgaaggaggtgtcaggcactgggctgggcggacccaggggctctcggagaatgtagtctgaaccgctcaggcctcttggtgggcggtgtctgggggaggggagcag

SEQ ID NO: 334922 - DNA, 122 bp, Homo sapiens
taatatagctcccaacaaccaatccctcattatacctttaactgcaaccaccagacacaacggctaggaataacagcagaggtaggaatgggagttagcgggattgcaacttccctatccta

SEQ ID NO: 334923 - DNA, 122 bp, Homo sapiens
agagacaggttttaaaaacaacatttggcaagaacatgtgcaaacgtgatcaatgagcatcgaggtacacgtatattttactacctttcctttcttactcagagtgcttttaaaaatcagca

SEQ ID NO: 334924 - DNA, 122 bp, Homo sapiens
ctggaccctggaccctggctcctgcttccaccacggagtccaaacagccttacctggggccggacactcaccaactgacgccattttggagtcctggtgtccgctgtgccggaccgcgcgag

SEQ ID NO: 334925 - DNA, 122 bp, Homo sapiens
aaatggcagtggaggagaccccgcgagtgtccaggcgcccagggcccctccgcattgtcacgggggccctcacaccccggcaggtgtcaccccctggacgggcttctgccgacgatcccttg

SEQ ID NO: 334926 - DNA, 122 bp, Homo sapiens
tgacggctccctgccctctgcctgcagctcggcaagatgtcggtgaaggagggcgcacagcgcaagtgggcagcgctgaaggagaagctggggccacaggattcggaccccacggaggccaa

SEQ ID NO: 334927 - DNA, 122 bp, Homo sapiens
ccacctggaaggtgggcgcttcccccagcgcccggcacagcccggaccccggtgtaaagtcgggcatctgcgcagtaaacatctggcctcggagctgtcctccgcgccttggctgccccagc

SEQ ID NO: 334928 - DNA, 122 bp, Homo sapiens
aaacaaggtatctgagaagctcatgaaaatgaggatgactccaaaaaccatggcttatctcgaccaagaagggcaagctcaagaagccagaaataaacaaagagaaatgagcaataatctta

SEQ ID NO: 334929 - DNA, 122 bp, Homo sapiens
atttcattttataggccaatttaacagaatagcttgttaaatcagaaatagctcattaatcggtgttccttcctgtctctgcctttccttctctctctatagctggtgtttgctttaaaaca

SEQ ID NO: 334930 - DNA, 122 bp, Homo sapiens
acaggtgtctgggcatgtggcatgggtggggtggccagcacgctacaggggcttcctatgcgcttgggatacacaggggctggaggcttcccaggagtttgtcttgaacatctggaggtttg

SEQ ID NO: 334931 - DNA, 122 bp, Homo sapiens
aatgaaagaagccacacagagcacagagctgtgaggtttgacctcccctgagacagaaaacgcaggtgaagcaaattcatttaacccaacatgtgttagagattaaaagagggctgctgggg

SEQ ID NO: 334932 - DNA, 122 bp, Homo sapiens
gccttcagcaggctctcgttgccacgtagcaggtcgctctggggcagggaccacaggaaccgggccaggcggtccaggttgcccccctgctgcagtgcctcgcacacgcaggcgacgtggtc

SEQ ID NO: 334933 - DNA, 122 bp, Homo sapiens
cacttcaggggtctcggggtcagagaacgaggctctcactgcgggggaaggcagcagaggcgtctcgccagacgtaagagctccaggccccagtccccgaaggctgtgccagctgtgggctg

SEQ ID NO: 334934 - DNA, 122 bp, Homo sapiens
gttgagacagttcagattcattgtctctcctactcctagatttctattaccccatggcaacgggcacctcatacccatagcctagcttttatgggaattcgtgtctttatttttggattgcc

SEQ ID NO: 334935 - DNA, 122 bp, Homo sapiens
tcttcgcccagagaagcagaagtcatcctggcgctgtccagcgggccgcagctgaaatcccgggaactaggcggggccacctgcaacctgcttttcccacagctttgctcttgtttgtgaag

SEQ ID NO: 334936 - DNA, 122 bp, Homo sapiens
ctgcttaattcgggacacagcagcacctgtacattcctcccttcctcctcgctctttagccgcgtgctgctaatgcttgtgtgttttctattgttacatgctttccctcgttgatgtgcatt

SEQ ID NO: 334937 - DNA, 122 bp, Homo sapiens
acagctctgtgaggtagacacttatgactcccattttacagatgacaaaactgaggctcacgaaggtggttaactagccaaggccactcgtctaggaagtgagaggccaaggttcaatccta

SEQ ID NO: 334938 - DNA, 122 bp, Homo sapiens
ttggtagggggcggggtcctagggagccccacccagcgcccgtggggattaaatattgcgcgtgctcagttctgttcagcggctgcaggctgctaagcggctccgggagctgatttggatag

SEQ ID NO: 334939 - DNA, 122 bp, Homo sapiens
ctggtccagctccccatcccgtttccggttcctttcccccaccccaaacccaacccccggcgctaaggacagtgggagtcgtagtctacattgtttagggaaggagattggcgtacccgcag

SEQ ID NO: 334940 - DNA, 122 bp, Homo sapiens
gacttcaccgtagtaactgggaggggactcttcccttgacgtcaaaggcggttttgcttccgttccgctggcgggaaaccgccaaccgaaagcggatttaaggcggcgtgtttttcgttctg

SEQ ID NO: 334941 - DNA, 122 bp, Homo sapiens
agcccgtcccggggccacgccctctctggcctcagtttccccgtctgtaaagtgacccggcgcttctgggctcgctctgccgtgaccctagcagaaggggcccgagacaggtcagggacgaa

SEQ ID NO: 334942 - DNA, 122 bp, Homo sapiens
gagggtggagtgagcggtcgaaatgctcatgcctactttacagatggacagactgaggatcggaaagactgaggtggcctgggggctgtcagggaggcagcgcctccccgctcctggcagca

SEQ ID NO: 334943 - DNA, 122 bp, Homo sapiens
aaggacgtcgtggagattgcttgcgctggggtgccacacttaggctgagctgcaggttttcgcacagtcgcgagttaacctctgcttgctccagaggcctcgtcctaatccacctcggctga

SEQ ID NO: 334944 - DNA, 122 bp, Homo sapiens
acccactcgctcactctcaaacggtagctgttcggtttatttgtccttttgcagtgtatgcggagccccactgtgtggcacgcacttgcttccggcagagatcctgcccttcaggagcaact

SEQ ID NO: 334945 - DNA, 122 bp, Homo sapiens
tctgccaataaatactaagactagcaggcccctctaaggctctgctctccactggggtaccgcaggacaggcccctcggcgggcgttccccgcaccctccctccgcgtcggccccggggaaa

SEQ ID NO: 334946 - DNA, 122 bp, Homo sapiens
gcagcccgttctgctcccgaatgccccggcttagtcagtctgggatgcggccctggacaccgggctttatgcagctctgaagtgatcccagcacacagcccgggtcaagctcagcgctcggc

SEQ ID NO: 334947 - DNA, 122 bp, Homo sapiens
gttctggaccaaacttggcggggggcgggggctggggacgcacggctgagactggagcggcgcgggccgcgcagggtcggggcctcggggggctctgaaggacccctgcatgagcgtggaaa

SEQ ID NO: 334948 - DNA, 122 bp, Homo sapiens
tggcggctgtcgaagcggctgcagagccggtaacggtggtggcggctgttgggccaaaggcgaaagacgaagaggaggaggaagaggagccgctgccaccgtgcgaggcggtgcgctgggcc

SEQ ID NO: 334949 - DNA, 122 bp, Homo sapiens
ccctatggggtgggaggtgactgcctgaattgtgtgatattaggctcagcaagatggcatcgtgtggcctatttgcaaatatccaagaagagccatgcaagtatgttcttactaaggtgtaa

SEQ ID NO: 334950 - DNA, 122 bp, Homo sapiens
cgccgccaccggccccggagacgcggggggtggggagcgaagcccggggagcccgcgcgccgacactcacctgtctccgcgaggaaagacagcaaagtccaaggccgccgccgctccccggc

SEQ ID NO: 334951 - DNA, 122 bp, Homo sapiens
ctgcttgctctggtgttcctttctgaccccctccagggctggggactggtagcagctgcccgtgtagtgttcgatgttggagaagatggaggtgcagatgtaccagatggccgtgcccacaa

SEQ ID NO: 334952 - DNA, 122 bp, Homo sapiens
ggtgggggaagcaagggaagaactggaaggaagtgtgactttgcgctatatgtgagaattcgcctttttagggaagacccctcaaaatcaagagacttatctgtcagcctccagattaatag

SEQ ID NO: 334953 - DNA, 122 bp, Homo sapiens
gccccgagggccctgctttgcctccgacaccaccttgcactgctcagacggtgagggcgccgcctccacctggggcatgccttcgcccagcaccctcaagaaagagctgggccgcaatggtg

SEQ ID NO: 334954 - DNA, 122 bp, Homo sapiens
gccccctctgcgaagtcctgggaagggaagactcgccagccccatcctacctcaacgcagcggcaacataccggaggccccacgtcgatacggtatccatctgctccaaacctcccgccagc

SEQ ID NO: 334955 - DNA, 122 bp, Homo sapiens
tctgatgtcctgtggtggaggctaatggctgcccttgtaaaggcaacttcggaaagctagcggtgcctcgcaaacattcctagctgtgtgctctgggttcaaagcccagccccagctgtcac

SEQ ID NO: 334956 - DNA, 122 bp, Homo sapiens
ccttctgcttttccgattcctctgccacctgcccgtgggttgcatgtgagtgggtccgagcggggttgtttgtgagagctcctggaatcccaccgcgatctgcactcttgctttttcgcctt

SEQ ID NO: 334957 - DNA, 122 bp, Homo sapiens
ggtcgggaacagatatgtcgccggcgacaccattatctcccgggcgaacggcgacgtctccgcagccaggcagagcccaggctgccgtgtaattggaccattcagaagtaaattatctgcag

SEQ ID NO: 334958 - DNA, 122 bp, Homo sapiens
acaagcacttccgcttcgggaccgactctttggcaccgcagcctaaagggctgcaggggtcggttctgcgcacgctcagtggcgcctttgagaccccgtccgccaatagtcaacatggggcc

SEQ ID NO: 334959 - DNA, 122 bp, Homo sapiens
tggtattcctatattaatggtcaaattatagagatcaaatagaaagcttttcaagaaagacggactggactttgctgagactgtgttctttgatgagaatctaatcttctgttcttaaactg

SEQ ID NO: 334960 - DNA, 122 bp, Homo sapiens
tgactgctgagcacttgcatcacttccagtgtcttgctgttggaaacactcagcctcacacgttttgcccgggcctgtgcctggctccatctgcctctggcatttctccccactttctgagt

SEQ ID NO: 334961 - DNA, 122 bp, Homo sapiens
agtcgtttcttgtgcttagacacacctctttctcgatttcgaatgttttcaaggaaaggacgttaaaatcctgccttgcccttttgtatgtgtggctaatcatggagtccaagaaggaaaaa

SEQ ID NO: 334962 - DNA, 122 bp, Homo sapiens
gccgctccccctcacgcaggaagccgggactctgggcgcagctctcccggaccacggccacgtcctggctccagctacggaggcagaaagaagccacagaaacctaaaggacaggaggggaa

SEQ ID NO: 334963 - DNA, 122 bp, Homo sapiens
ttaagcttctacagactttaacagtttcgtgtcagcctcaacgtttatctactttctgaccggtatccctgccatgattttcataggaaagagagtcagaagggacctttccaattttgtca

SEQ ID NO: 334964 - DNA, 122 bp, Homo sapiens
tgtaccttggagggggctggggttggcgtgcacctcggtggggtccgggcgcttggataacgttcttggtgggtaggggtcgcggggaatctctgcgggcccgggactgcggggacttggtc

SEQ ID NO: 334965 - DNA, 122 bp, Homo sapiens
ggtcgaggtcaaggaaagttcgcaccgagatcccctctaatttattcaaaggtttggcggcggcgcgtaattttttccccctcttccgcctacacccgctgcgtctcctggtgtctcgttcc

SEQ ID NO: 334966 - DNA, 122 bp, Homo sapiens
acaaatgcaggctttgaacattgcaaaatgaggcttcgaatggcatgaagctttctagaccggaaggaaagtctttctcatgggcgatgcagggccctcatgggactcacccagctggaagg

SEQ ID NO: 334967 - DNA, 122 bp, Homo sapiens
gagacaggagtaaggaacaaggaggaagtctgcacatgcgcagacggggctgccaaagaccggttcccggggccctgccggggcgatccatcaacttccagactccgtttcccacaagtctc

SEQ ID NO: 334968 - DNA, 122 bp, Homo sapiens
gaggggggagggcacagagcagcagttctgcagggctctcagaggcctgccctgagcccccgcctcctccttctcagcctccccttctccagcctccacaccgggagattccagaagcttct

SEQ ID NO: 334969 - DNA, 122 bp, Homo sapiens
gtgcaggacgtcatctgcttgctctgccatcagcctcacatcctgagggcagggaccatgcgggggttgtccatctctgtatccccagtgccagcactgcacctcgccccaagcagttgtcc

SEQ ID NO: 334970 - DNA, 122 bp, Homo sapiens
cttggcaccaccctcactcgcctgcaggatccgggctcgcactgccgccgccgccaatagcgccgccatggctctcggccgccctagctccgcaccccgcgcctctactgcccagaagcact

SEQ ID NO: 334971 - DNA, 122 bp, Homo sapiens
cagctagtagggagtggagggaggattccttcccctgtggcccatcttcagcctatgctccgagtccctgctgcttcgcttctggagatgggcctcacgctgggactgcttgggcaggaaga

SEQ ID NO: 334972 - DNA, 122 bp, Homo sapiens
gtcagaaattagagccctagggcagaacttacaaaaaccttttagctacttccttctccccggcctcggaaatgaaaaagccaaaaggtcacccagcgcatccgccacccagtcagccccaa

SEQ ID NO: 334973 - DNA, 122 bp, Homo sapiens
acccactcactgggcgggggcacaggctctggaatgggcactctccttatcagcaagatccgagaagaataccctgatcgcatcatgaataccttcagtgtggtgccttcacccaaagtgtc

SEQ ID NO: 334974 - DNA, 122 bp, Homo sapiens
acttccctccacgcaggcagatttggcccttctggccccttgctactccggagtgtggtccgcggaccggcagcatcagcatcacctggaagcttgttagcatcgctgaggccccactccag

SEQ ID NO: 334975 - DNA, 122 bp, Homo sapiens
ccgccgcggttaccacggcgacgcgcgcgcacgcgcacacacgccctcagggatgtggggcgcggcagccgcccctgcccagctcccctgctcagctcccctgctcagctccccggttgcgc

SEQ ID NO: 334976 - DNA, 122 bp, Homo sapiens
ccgcccagcctgtgtggaaaggaggcccacgggcactaggggagccgaattctacaatcccgctggggcggccggggcgggagagaaaggtggtgctgcagtggtggccctggggggccatt

SEQ ID NO: 334977 - DNA, 122 bp, Homo sapiens
gccttccaggctccagcaatcctccagcctcagcctcccaaatagctgggactataggcccgcaccaccatatatggctaatttgttgttgttgttgttgagacagggtttccctatattac

SEQ ID NO: 334978 - DNA, 122 bp, Homo sapiens
ccgcggcggccgcaccatgagcgacatccgccactcgctgctgcgccgcgatgcgctgagcgccgccaaggaggtgttgtaccacctggacatctacttcagcagccagctgcagagcgcgc

SEQ ID NO: 334979 - DNA, 122 bp, Homo sapiens
gtcccatagccccggtcccccgcagcgggcaccgtgtgtggggcgagtgtgtgcgtgtgtcgagagtgtggggcctctgaagtcagtcccgcaggttcatgtcatgaccttgggcagctgaa

SEQ ID NO: 334980 - DNA, 122 bp, Homo sapiens
tacgcacgcacttccacaaagtctaaacactcccgagcttgtgtccgggaggctttagtacggaaagttagaagccctggagttcaacaggtgttcaggagggtcccggagaggagtttcgt

SEQ ID NO: 334981 - DNA, 122 bp, Homo sapiens
gatggacgtacaaaataaaggagaaagtgcggaaatgagaaagactaagggacaaaaagacgcaagacctaagaacagagaatgggaaactaagggaccaagagtgagagactggggacaga

SEQ ID NO: 334982 - DNA, 122 bp, Homo sapiens
agtcccgggtgacccgcgcccgcctccggtcctcgtgtccccaagcccggctcgggggcgcgtccgtgggctagctcaggacctgccatcgtgaactgtttgcacagtagcgatgtgtgctt

SEQ ID NO: 334983 - DNA, 122 bp, Homo sapiens
ggagggaaccgccgcgggagacaggccccaagtgcctgggtttggggttcagggaccctccgcgggcaggaacccagggcagcgtgagacacacctgccctgtaggtgggtgactggggggc

SEQ ID NO: 334984 - DNA, 122 bp, Homo sapiens
aaatgcgaggagagcttggagccgggatcccgggatcagatcactggggtcttctgtggccgagctccctctggtcctcgaacgctgcccagcgacctctcgccctgtttgcgccagctctg

SEQ ID NO: 334985 - DNA, 122 bp, Homo sapiens
tgtattctgtgagtgtccaggtctccgtactttcaggcctgtactcttgccactcagccacgctgcctcacctgatcttgctatgttttttgtaattaaaaccaaccacgtatttgtcaaaa

SEQ ID NO: 334986 - DNA, 122 bp, Homo sapiens
gtgcacacttaccccgcccccacaacacacacgcggtcacgcaccacagacgggcacacgcgctcagcacagccacagtcgcgtgcaaccaggagtgcacaccgcacccacatcacaccgca

SEQ ID NO: 334987 - DNA, 122 bp, Homo sapiens
ggggacggagctcggcgtgcttgctgctggagggtgatggccctgcaaggctgtgggctccgacctcaccgggagtcgacagcgagaggttcgccgaagagcgaggttctgggcgagcgctg

SEQ ID NO: 334988 - DNA, 122 bp, Homo sapiens
agcaagggagccgtgacaggtgacagtgcgcatggccaatcagacgcgagtgtggcctcccggcgtcccgcccactccggcgcctgcgtcattttgggcaccatggcaacgaagtaaacaag

SEQ ID NO: 334989 - DNA, 122 bp, Homo sapiens
tgcccttcagttttctgggaaaagattgggaggagtcagtttgagggggcagatagaacacgttcccctcagttttggagaaaaagtgggatgggtgcccctcagcctgaatgaaaagtgga

SEQ ID NO: 334990 - DNA, 122 bp, Homo sapiens
tggttggcagcgtcacgccttcatgtatgtttttccaccaaattgggatcatgcaatatacgttgtatttatcccttttatctgatattttaacatgcacacttttaatgtgggcactcttg

SEQ ID NO: 334991 - DNA, 122 bp, Homo sapiens
tgttacagcagaagtcaaatcggtctcctgaaatgcagctggtgccgctcagcaatgcatcgccttgtcagggtcctgcagcaacggtgcttacctgttacagtcgtgatggaagcttttgt

SEQ ID NO: 334992 - DNA, 122 bp, Homo sapiens
atcaataaaagatggggtccacattacaatgggctgtgactctccacctcagcattgcatcgtatcatcattttcgctacgaatttatttttcaacaataagctttaacttaatttggggga

SEQ ID NO: 334993 - DNA, 122 bp, Homo sapiens
gtcaggccacttcagccgccgtgggcttcccgcgctgtaagatggggataaacagcagcccgctgggtcatccttcgcggggctaggatgctatgcgccccaccagcttgggttctcctccc

SEQ ID NO: 334994 - DNA, 122 bp, Homo sapiens
ttcacaccccgtggggacttggcgttctacggcacacagagttgtcggcatagatccccacgttctctggaatagcaagttcaccttggtcattagagcatctgctgttggggtagcaggcc

SEQ ID NO: 334995 - DNA, 122 bp, Homo sapiens
gacataccacgtgtccaggaggactcgaccctcatcaccagcagctgctgctgagaggagcggagccggctgggaggcagggacctcagtggccaaggcgggtggtgtgttctctgagtggg

SEQ ID NO: 334996 - DNA, 122 bp, Homo sapiens
ataccccacctacttccaaagagaattttgaaggtgactcacaatgaaaaccacatatgccgcaagatcacgaaaatagaaatagaaaatcaagtccatggagatgaagaaaggaaacccac

SEQ ID NO: 334997 - DNA, 122 bp, Homo sapiens
atcgtggggggcgggggcagcagaggagacactattgttgatgaggagcggcggcggcggcggcggcggctgcaccacctcgttgctgcctgccccggcccggtctccccctgcaccccgga

SEQ ID NO: 334998 - DNA, 122 bp, Homo sapiens
tgggggttgggcggggtcggagggcttccgaagggctgaccgcatctcttagataacaagcgggaacaacgcgggacccactaggagcaggcgtttgtcccggccttggaagcggtgctggg

SEQ ID NO: 334999 - DNA, 122 bp, Homo sapiens
agttgcagttgaagtcagctggcggaggccagacctcagcagcgcgagctggagcacagccgagcccaaggcgctttccccggtgggtggggacaagtgggcgagtagccgccgcgactcgg

SEQ ID NO: 335000 - DNA, 122 bp, Homo sapiens
tctcctcctgccccactgcgcaaatgttggtggcgggctggagtgggtggtaccgggatccgaggggctctgccttgcagtcccgcagcgcggggctccggggagctgcggggcaggtgcca

SEQ ID NO: 335001 - DNA, 122 bp, Homo sapiens
ggaggaagagagagagagacagagagacagactcacagactgggaggaccggagactcgacgcgaggagagacagtgaaaataagtgaacaaacatagagacacgggtccaagttataagag

SEQ ID NO: 335002 - DNA, 122 bp, Homo sapiens
cctcagtcacctgccgcccggctgctcagcaggggtgtttgtgaggccctgggggtgccccggaaggggcaccccaccgcccctgttgggaaccagagcagaatctgtgggcttgtcgcctg

SEQ ID NO: 335003 - DNA, 122 bp, Homo sapiens
gttacgttctggggagtgctcgacagcccccacacagcgacaggtcccacaacccgttcacgaatacacaggcccacccaggactccccaggtgcaagaagaaaacccacgtcagaaagagg

SEQ ID NO: 335004 - DNA, 122 bp, Homo sapiens
aggatcggacgacccccagaactgtttgccaacaaagacatgcagggggcggagcctgagcgtcagataccgtgagcggcgtgcagagggcggagcctaggagtcagataccgcgagaagta

SEQ ID NO: 335005 - DNA, 122 bp, Homo sapiens
gccgccgccgctgcgcctcgggcagccccagcgagcggcaactcccgggctggcgcggctcgctttctggctccttccgcgcggcgagctcagccccgctcgatttttcctcttctgttcca

SEQ ID NO: 335006 - DNA, 122 bp, Homo sapiens
cagcactctggagccccggaatgtgcgggccgtcatgaagcgggtggtggaggataccaccgccatcgacgtgcaggtgctgcccaggctggccggggtagccctgacgcaggctgggggta

SEQ ID NO: 335007 - DNA, 122 bp, Homo sapiens
cctcagccagctccacaacgccctgaatgacgtcaaagacatccagcagtcgctggcagacgtcagcaaggactggaggcagagcatcaacaccattgagagcctcaaggacgtcaaagacg

SEQ ID NO: 335008 - DNA, 122 bp, Homo sapiens
attgcatccagattaagggagttgtggaggggcggggcttctccatcccccgcggagcagcgtctcctccgccaagccctgaacacccagctcatggcttccgaggtcctggctggtccgag

SEQ ID NO: 335009 - DNA, 122 bp, Homo sapiens
cttttccgcggccgcgcatttcagtgttcggcaggagctaggacggtgccccgagagaggcgttcaccactccagtatttcctttatctcccactcctcgctgtctgatccgagtcgcgcgt

SEQ ID NO: 335010 - DNA, 122 bp, Homo sapiens
ccgggagctcacggcgttccaagcggcacttatcccgcgttgatgcccaggcaccccgcgcgccctgtttcaccaggcccagtcactccagctccagcagcactgagagctcacgaacgcca

SEQ ID NO: 335011 - DNA, 122 bp, Homo sapiens
catgcgggcgccaaggtggccctgggggtgacgcgaacatcagggagtcaccagggcactcgtccgtgtggcgcactcattgctcgaaatgttccagtctacaaatggtccgaagatggtga

SEQ ID NO: 335012 - DNA, 122 bp, Homo sapiens
ccgccccctccgcctcccgggcctcttcctcctgccggtgagggagtgcttggcagattgcgcgagggggagcgagcgagcgggcgctgccaggagcccgcagccctggcgcccgccgccgc

SEQ ID NO: 335013 - DNA, 122 bp, Homo sapiens
aggtgggggcgtggcctccattgaggggcgtggccctggtatgtggggcgtaacagggcacgagggggcgtagcttcgatggccggacgtgcaggctgcggatccccgtaggcgagcgagcg

SEQ ID NO: 335014 - DNA, 122 bp, Homo sapiens
cagccacagccagtacggtatctctgcctttgcccatgtcctgccttctttctccctggtcggtatctcctcacctcaaccagcttggccagctccttggtcattggggttgcacccaccca

SEQ ID NO: 335015 - DNA, 122 bp, Homo sapiens
ttcctggggtagcagcacccgtgtggttagccctgtaatgggctcacattatgaggcttccgtgggtaggccctgttcagagagctttgcgtgctctcatcctggggagtcagggttaggtt

SEQ ID NO: 335016 - DNA, 122 bp, Homo sapiens
tgggctacacacacacgtacccacacgcacacacgtacatcacgtacgcacacgcacacccggacccacacacacctgcactgtcttttgatgctcaggcacagaccctgtgtaggtgtagc

SEQ ID NO: 335017 - DNA, 122 bp, Homo sapiens
gctcacttccgggcagaggaacgcctcacttccgaagttttacttccggtaagccctgagcgccgccatggcagcctggactaggaagagccagggcaacagaacaggctggccccggcagg

SEQ ID NO: 335018 - DNA, 122 bp, Homo sapiens
aaccacaaaatagagtctttggttgtacaaacatcactagttacagtctcgccgaggtctcggctggggtggggcagttagttagtcacaggccagaactcctgtggggtctctttaaaatg

SEQ ID NO: 335019 - DNA, 122 bp, Homo sapiens
ttagagctctgtccttttctcatatacttggagtcatgtagtgtctctctcaatccacaacgttctgagatgggttggctctttatgatttttctatcccaaacaacagaatgaatacagag

SEQ ID NO: 335020 - DNA, 122 bp, Homo sapiens
ttaggacagggcctgggcgcgcgctggcaatccccacatccctgtcgcaggtatcagctgcgtgttgaatacacgggagcaaagtagaccttgcgggcgagactcctcccagcatggacggt

SEQ ID NO: 335021 - DNA, 122 bp, Homo sapiens
ggactagagggacccttgactttgctggcggagaagcgctttcctcagagacgggtgtcgcggtccagctcccttccgttccgttttattctgttgctccataataaggcctagcggggttt

SEQ ID NO: 335022 - DNA, 122 bp, Homo sapiens
ctgaggaaagaaagggaaggcaaccgggcagcccaggccccgccccgccgctcccccacccgtgcgcttataaagcacaggaaccagagctggccactcagtggtttcttggtgacactgga

SEQ ID NO: 335023 - DNA, 122 bp, Homo sapiens
aacacctcttgtgagttgcatccaaatacacgagacacagtcttaacattggacaggatccgtccatgagagctctatctccactgcaaacagtgttcccataagataggcacagcctcacc

SEQ ID NO: 335024 - DNA, 122 bp, Homo sapiens
ggtgggtctgaagctccgtgatcagccgcagaaatatttctcaactttgctcaacacaagcgcacttaccccacccctagataagaaaaacaagccaagcctttttagaatgttatctgaaa

SEQ ID NO: 335025 - DNA, 122 bp, Homo sapiens
ctttccttttccaggcaccatgcaaaatagttttcacacattgcttcccttaagtctacacgggaatcccacaacactaacactcccattttgtagatgagaggaggttatgctactttgac

SEQ ID NO: 335026 - DNA, 122 bp, Homo sapiens
acgtgacaggggctgcaagttgcaagatgttcatgggctgttttgataatagagagaacacgtgcatctgcaatttatctgtgtgaaaaagataaggaagtagaatttgttggtgaaaaata

SEQ ID NO: 335027 - DNA, 122 bp, Homo sapiens
ccagattaagaacaaaactctgattagtacaatgcatgctagctattattacatcagagacgtcatgtggattgggtaaaataatgaatgtgatggccattgcaaacatcaggcatttaata

SEQ ID NO: 335028 - DNA, 122 bp, Homo sapiens
tggaagaagaggtgcatggaagcataggcttggagcgtggcgagtgccaggtagctgctgcgactcttgaaggtgacgggatcggccacgatggcacgcaggccaaagcgagcattgagctc

SEQ ID NO: 335029 - DNA, 122 bp, Homo sapiens
tatgctggcggggggtgctcttcatgcatgtgcgtgaatggccagggtgggcagagctgccggatgggttgggggtcaggaggggccctcctgaagccaaagtttatctttggaggtttccg

SEQ ID NO: 335030 - DNA, 122 bp, Homo sapiens
tgcaggcgccgcccgcggggacacgcccacccgccgggaccgttagctggggatccgccccgcccctcccgccaggccccgcccccagggaacgcccatccaggccccgcccagtcaagttc

SEQ ID NO: 335031 - DNA, 122 bp, Homo sapiens
ggcctagagcaggctctcttccctgtgcccctgggccccggccggggtcccccgggtgcgcgccctgagcccctctccaggccccgcgctgactcacccccactcgtggggcccggctgcgc

SEQ ID NO: 335032 - DNA, 122 bp, Homo sapiens
cttaagtgccagcattagaatttgcaaaattgtcagcagccgctcagaagaaaaccccggcggtgtcagtgggccaccgttttgagaaatgctgaaatgtgtctagggaaaaccttaagacc

SEQ ID NO: 335033 - DNA, 122 bp, Homo sapiens
aggttaagcaatttgcacaaggtcctacaggaagtaagttgcaaggctggtagtgagactcgggcagttggctccggagtctttgctcctaaccactatccacactatctctcatcaaataa

SEQ ID NO: 335034 - DNA, 122 bp, Homo sapiens
gccctgaaacccccctacacacagtcactgaggaaagtcctgactccaggatgtgggtgccggagcccacccccgagacccctgtcttcaacatctgctgatttttgttggcgtttctcttt

SEQ ID NO: 335035 - DNA, 122 bp, Homo sapiens
ctcctctacagtgttggtagtttgttgctggtctacttcgtccgccatgtttccagaagacgtaaatattttaaaatttatttatttatttattgagatggtgtttcactcttgtcacccag

SEQ ID NO: 335036 - DNA, 122 bp, Homo sapiens
gccttgctgcccgccttctgtccacacacagctctgcaaggagagtgtcttcattctttccgccatcttgattctttgtcactgaccgagactcagccggtaggtccgcagagcggtcttcc

SEQ ID NO: 335037 - DNA, 122 bp, Homo sapiens
tcgcagcctgagtgggggctctgcaggctctgggtgtctgcagccagcgccgatgtttgccgtccacaggggagaagccgttccagtgtgagtttgagggctgcgaccggcgcttcgccaac

SEQ ID NO: 335038 - DNA, 122 bp, Homo sapiens
ggtggcagatcgccacaaagtggtcgaaggccatggtccccaaaagcaaattgtcagtgacgacaaacacaatagaaaagtacatctgtgtgatgcagctctcataagagatggattggctg

SEQ ID NO: 335039 - DNA, 122 bp, Homo sapiens
ggcgttccactggggcaaatgcctacccgggagcactctcaggatccgcattgctcaagccggagtcccccacagggatgctctacagagcatgcataagctgcctaaggggctacctcgac

SEQ ID NO: 335040 - DNA, 122 bp, Homo sapiens
gcggccacgtcccggcctgcggccctagcagcctgggggccacagcggcccctccggggacgcagctcggactctgccaggcctccgcccgtggccggcggcatcttccccctcctctgggt

SEQ ID NO: 335041 - DNA, 122 bp, Homo sapiens
tcgttcctgtcctggcttatgcagtatttccatgggtgcagtggagtggaagggagacggcgattttacatctgggtccctctgcgtctcatgtcacctaggacgtggactggacccctgcg

SEQ ID NO: 335042 - DNA, 122 bp, Homo sapiens
aaaccgtgcacccaaccccagctcctccggccggcgttatctggggacactgaatggccccgccagccaaagaccttggtccgggccccgggtgcccaccctcctcagcctcaccctcccta

SEQ ID NO: 335043 - DNA, 122 bp, Homo sapiens
ggcgggcctgagggagaggatgcttaaggtcagtacctgtggaggtttccatttgtctcccgctgccaccactgccgccgccgccgccggctcggacccccctccttgctggccattgacct

SEQ ID NO: 335044 - DNA, 122 bp, Homo sapiens
gtgtcctcacacacacgcccaaacaccgcttggaattccacctccagaccccagggaaggcgggggcacactggcctacatgagtctttcaaagtcctctgccagaatactaagcaatgaaa

SEQ ID NO: 335045 - DNA, 122 bp, Homo sapiens
gaaagaattgtgtggtgcacaaagggccaatgattccgtgatgtaatctacgcaatgcaacgtccatgaagagccttaaaccacagggctgaacctccaagctggtgactttatccacgtgc

SEQ ID NO: 335046 - DNA, 122 bp, Homo sapiens
tctttgtaacgttgcattttcacatttgtgtggcaggacaagcatggggcaagagggacgcgttaactgaaagttgctgaagacaggctcctgtcggccaggtgtgggcggccgccgtccag

SEQ ID NO: 335047 - DNA, 122 bp, Homo sapiens
ggactcggagctgtgggactggagcgcgcaccggcagacttgcgcgcaggttggagttggcgcacacccgcgccagccggggagcggcgtttacgcactggtaccgcgagcgctcaaagcat

SEQ ID NO: 335048 - DNA, 122 bp, Homo sapiens
agagacagaaggtcctctctgttattccaatattcctgtagtttcaggaatttccttgctcgctcacctttttgcttttgccaaagttgttccctctacttagcacaccatttcctgtcccc

SEQ ID NO: 335049 - DNA, 122 bp, Homo sapiens
ccccttccgcccggcctcagagctgacagctggggctggccagagccaagcaagaggcatcgagaaagggggatgctaaggggtggggggtgggaagggatgtcaatgcaaccaagaagtga

SEQ ID NO: 335050 - DNA, 122 bp, Homo sapiens
aagccggggccggggctgcggggcgaggtgagagcgggcgggcttgggagccggcaggtgcgggccgagggcgggcacagcggccggcggagctgaggcgcgcggcggggaaagctcggccg

SEQ ID NO: 335051 - DNA, 122 bp, Homo sapiens
cctgatgaggggttatcagcatcttcttttacagataggcaagattaattagttaacccccggccggaggtgatggctcacacctgtaatcccagcactttgggaggccgagatgggtggat

SEQ ID NO: 335052 - DNA, 122 bp, Homo sapiens
ccccatggacccctcacatttggtttttccttataaaataactgtcctcacagcctgcttcgcccgcccccagctccctcttcccttccccaggcacctgagccacctggggccatctcggc

SEQ ID NO: 335053 - DNA, 122 bp, Homo sapiens
ggtttattggccctacaataatagtgcccagttcacagggtggtttgggggattacacgacgtaatgtgtgttaaagggcttagcacagattcagctccagaggaacatagtaaatgttgat

SEQ ID NO: 335054 - DNA, 122 bp, Homo sapiens
gagagatgtgaggggaaggcttcgggtaggggtatagggccgataggggacgaccagggccgagagctcatggacttggacccggaatgccattgccttccctgtgggtatgtctcaggggc

SEQ ID NO: 335055 - DNA, 122 bp, Homo sapiens
ggttggcactcatggctgccgggctctgtcaggcctgggccgacggagggcggagctgggcgcagggcgggcgcggccccaggtacccgggagggaggcttgggggaccggggctcggagcg

SEQ ID NO: 335056 - DNA, 122 bp, Homo sapiens
ttaggatcctcccaccacttcctttgttttgtagggagtagtgggactcctgacgccttccgttctgctgctaggttcggcctccgaggtgccctgggcacttggacccaccactttacttc

SEQ ID NO: 335057 - DNA, 122 bp, Homo sapiens
ccccagtgaagctgttgctaacttgctggttctcttagcacaaacaccagcccaggatgccgaaactgcacccaagtcagctcacagcctccccctggaggtggcctctcctctgcctggtt

SEQ ID NO: 335058 - DNA, 122 bp, Homo sapiens
tgaacgcccagtggggcatcctcagcaagtgcctgacctacagcaaggcggtggccgacccgttcacgtactctctgctccgccggccgttccgccaagtcctggccggcatggtgcaccgg

SEQ ID NO: 335059 - DNA, 122 bp, Homo sapiens
agtggctgcttccaagttgcatatggactagttgcttgtggcagggagagacatgggttccgaaatccagtctgttctttggaggggcctgaccatggctgtgactccacggtgctattcta

SEQ ID NO: 335060 - DNA, 122 bp, Homo sapiens
ctgccagcttcaaaagggctcagagcacagccacgccccttgtccagcccagcagtgactcgcatgtcctctcagcaggacagcaggagtccacctcgttccctgaagagtggccagccctc

SEQ ID NO: 335061 - DNA, 122 bp, Homo sapiens
cccgagagctgtccccgcgggacgggactagcgagggccggggagatggagcgcaggcggcgtctgggttcgaagcactttccggctgaaccacctgctgctgaggctgagccctgagaggc

SEQ ID NO: 335062 - DNA, 122 bp, Homo sapiens
gcttatattttaattataatagcccagcctgtactgccagacaactcaccttccactattcgtccatatttgccaaatactgcttcaagagctttctcatttgtttccgtattaagcccacc

SEQ ID NO: 335063 - DNA, 122 bp, Homo sapiens
catctaaactttgtccttggagtcactactgaggtggctgatagtctttctgggggcatacgcttccttgaaacccaaatgaaatgatgttgggcaagatgctgtttgccataggtataggg

SEQ ID NO: 335064 - DNA, 122 bp, Homo sapiens
cggggggcttcaaggcccagagctcagaggctcgcaaacaataaactcagaaacgtggcgcgcacccgcagggcctgacacagcctctggagtggcccctgggcctgtctggctgcagggtt

SEQ ID NO: 335065 - DNA, 122 bp, Homo sapiens
ccccacagggctctgcagagtgtgggacacggacagttgctcaacccacagcagggtaagcgcagggctgagcattggcagtgatctgccgtggctgtggcttccggcacgtggccagagat

SEQ ID NO: 335066 - DNA, 122 bp, Homo sapiens
cgggcggaggcagcaggcggcccgcgggcccggctcccccagtcccggccccggcagccccgccagctccgctcgccgccgccgccgccatcttgttgtgcagtgaaacctccggggccgcg

SEQ ID NO: 335067 - DNA, 122 bp, Homo sapiens
agtgagaagaagttccatgttatcacattatcacccatgttccttaagatttgtctgacacgtcactgtagaatataatccttttttaaaattgaaataaagttcaaaaagtttaattctga

SEQ ID NO: 335068 - DNA, 122 bp, Homo sapiens
cctaagtggctgcacccccggaagcccaagggccgaggtcctggagctgccgctctagggcggtcccctcgggatttcttccaggaaggaaagcaaaacacaacaaaacaaatccagactcc

SEQ ID NO: 335069 - DNA, 122 bp, Homo sapiens
catctggcgggcaccgaggtctgggaacaggcctggaggcagctcggttcgtggagagagcgggctgcccgtgggccccaccctgtagggccccccagtagatctgctcccttggttcgggt

SEQ ID NO: 335070 - DNA, 122 bp, Homo sapiens
ttatttgtaaaatcaggaccagcacaggccccaggtgtggctggctgatgtcccgccctccgtctggacctgccggcctctgccagccgcctttgtctccccgaatactctttgctgaagaa

SEQ ID NO: 335071 - DNA, 122 bp, Homo sapiens
tttgtgaaatgacaataacattcaatctccttcaacctcattactatggattaaatgagacggtgtctggggacatgcttggagaatgtattgtacaactgcttaggaattttcttctgccc

SEQ ID NO: 335072 - DNA, 122 bp, Homo sapiens
tccttacaatgcctgacagtaaagttaatcttcccactggcatcctttatacactgtgcacgtggtcaggtcttcttttgatgacaaaggagaaaaaatatatatctttgaccctgtttctg

SEQ ID NO: 335073 - DNA, 122 bp, Homo sapiens
gcatgctcgctctgtgtgttcctaatcatattaattatctatccggtggctgcaacacaccgcctgccattggccgcacatctcgccgtcgtaccccggcagtgcggcggtcactctgcagc

SEQ ID NO: 335074 - DNA, 122 bp, Homo sapiens
ttaaggatagatgaagggttgagagcctgtgcctcatttctgagttctcagctgctatgccgtggaaatcctgtttactttctgcatctgctcctgcaagactctggagccagtcttgaggt

SEQ ID NO: 335075 - DNA, 122 bp, Homo sapiens
tggggaagcctcactgaagggaagatcagggcgcacctgggggaggttctggaagctgtccggtacctgcacaactgcaggatagcacacctggacctaaaggttggtgaggccccgggcag

SEQ ID NO: 335076 - DNA, 122 bp, Homo sapiens
ccatccgctaggccccatccagccgaagtccagcccgttccgtgccccgcctcagcgcagcgtacttttggttcaggcagcgctgcagccccgccttcgtgctagcctccaccgctgaggcc

SEQ ID NO: 335077 - DNA, 122 bp, Homo sapiens
ccctcccacacaaacgcacaaccctaaacccccaccgcccgcccttcgctccaaggcccccggggccagcaaccagggcgtccctggcacttcagaccaaagctgcaggcccgcagaaggcc

SEQ ID NO: 335078 - DNA, 122 bp, Homo sapiens
cttgggaattgcattcgggtgtgtttatcgcggacaccctggtgcaacttttactaaagccgtccgctcccactcccacctcccaaacttttatgatctgagtaagcggttctggcactgat

SEQ ID NO: 335079 - DNA, 122 bp, Homo sapiens
tcatgaagcagaggacctgggcttaaaactcattcagtatcaggaaaagagcgccgagcacgggcctattatgccaaagcttctgaaaggggcaccacgttttttgctctatggggcagatg

SEQ ID NO: 335080 - DNA, 122 bp, Homo sapiens
ggcgggactggcggcggctgcccgggggagcggctgcgaaccaatgagggcaagagaggacgcggctgcgactgcccccagcccggcctcacatcactcagggacagagggacagagacagg

SEQ ID NO: 335081 - DNA, 122 bp, Homo sapiens
gccgcggttaccacggcgacgcgcgcgcacgcgcacacacgccctcagggatgtggggcgcggcagccgcccctgcccagctcccctgctcagctcccctgctcagctccccggttgcgctc

SEQ ID NO: 335082 - DNA, 122 bp, Homo sapiens
agtgtggcttcccattttatttaacaggtcgaaatgttactatcatcatttcaggccaggcgcggtggctcatgcctgtaatcccagcactttgggaggccgaggcaggaggatcacaaggt

SEQ ID NO: 335083 - DNA, 122 bp, Homo sapiens
gggccttcgggcagatcacgtggtcaggctgttagcgcagttgctaggcaaccacagctgcgggcgtggtctgcgcggggttgccctcctgttctggtttatcaggggatccccaaagaaag

SEQ ID NO: 335084 - DNA, 122 bp, Homo sapiens
ggcagcaaaggaagcatcagatgacagtctattccttaagagctcaaagcagtactctggcggccttagccccattattgcaccatttcatatctttttgttattcttctccaaagacctga

SEQ ID NO: 335085 - DNA, 122 bp, Homo sapiens
gaaggcgggggtggcagggctgccaggcctgcacacagggctgcattgaccaagcagccccggggacttgctgggagccaggattgcacatgggctgaggaagaaaaaagggcctgtagggc

SEQ ID NO: 335086 - DNA, 122 bp, Homo sapiens
ataaaactgtaaaaaatgttcagtaaaactacttctcagtctttccaatatattttccaacgtatttccaaactggtaagaatttaaataaacaattcaaataatttcacttcaacaaaagt

SEQ ID NO: 335087 - DNA, 122 bp, Homo sapiens
aggatacccagaggcagaaaagaacattgagtgaaatatacataactgtctgaatcactgcgttcttgggagagttagagcaaccgtcaaagccccccaagtatccatttttattggttttg

SEQ ID NO: 335088 - DNA, 122 bp, Homo sapiens
caacaactaattgttcctcctatggaaagttgatgcagatgctaaaacagacttttaagacgataaaaagattttgaaacttattttgtagacgtcaataagtctgcattatgattataaat

SEQ ID NO: 335089 - DNA, 122 bp, Homo sapiens
atgcgcctgcgggggcgtggctggggacctgggcctgggccaggaggggcctttccctctcgccagccctcttttcttcctttgtgatttcaattgaatggggagaagctcaaaggcagggg

SEQ ID NO: 335090 - DNA, 122 bp, Homo sapiens
ctgtgtaggccacagcgtcattgcacgccggggtccttgcccgctccctctctctgccaccgctcaaagcctgggagaacgcttttgaaagcgaatcaggaaattacttatcaatctgaagc

SEQ ID NO: 335091 - DNA, 122 bp, Homo sapiens
gtgggaagtgttgagtatatttaaggaaatacacatggtagtcattcattgagtattcatcggatcgtgaactgatttgatcaccatttcctaaatgacacactcttgtttaattcagcact

SEQ ID NO: 335092 - DNA, 122 bp, Homo sapiens
agctcagctcacagttataataattcttctcactgatactgttacagcaggtagctcctccggcttgagcaggacaggagagcgcttcccacccacaaccaggaatgtcaggcgacccctca

SEQ ID NO: 335093 - DNA, 122 bp, Homo sapiens
ttccctctttctgtttctagttcaccttgggttaaaagtgcaaagatttggctgagagctcgtctggaggaggctttgactcaagagtctcttaccataacctgctgttgattgacattttc

SEQ ID NO: 335094 - DNA, 122 bp, Homo sapiens
tgtctctcggggagagaattcggggcacgcccaccgggaggggaggcctgaaatgatgggcggggcttgaataacagacccgccctcttccaggctggccacgcctccacacgtggttccct

SEQ ID NO: 335095 - DNA, 122 bp, Homo sapiens
aggcggcagcagagggcccatcacagtccaggggtcagaaggacagagcaggcatcactccgtcccagtgtggcagtgcccccagcctagcccccacgggtgtcttggggtacagaggtggg

SEQ ID NO: 335096 - DNA, 122 bp, Homo sapiens
agaactattcccctggaaatgatcctgacacagataaccctactggcttctgcttgggctcgccttgggctccggagggccttagcctgccagctgggagctggaaaagattctctctgggc

SEQ ID NO: 335097 - DNA, 122 bp, Homo sapiens
tcccaaggacctgagtgcctcctcccccagctgccagaccagggcgctttatccagctggcgccctccctcgggccccctcactgggacagaagaaaattcaccacgaagtgagcagtctcg

SEQ ID NO: 335098 - DNA, 122 bp, Homo sapiens
aacaggccctggcaccgcgggacccgctccagcagcctcggcggaggcctggggaaggcgcggctctagtgtcccagtaacaacagccagggagagggctccgctgcccccttctccttgcg

SEQ ID NO: 335099 - DNA, 122 bp, Homo sapiens
aaggctggtgtccgcgccgagggatcggcgatcccaggtccggggaaactccgcgagcgacgcgctcgcccgcggccttccttgtcgctctcggatgttcccgattaatgggctccaagtga

SEQ ID NO: 335100 - DNA, 122 bp, Homo sapiens
cccactcggagaagatccattctctggctcttggcatcccaggcacacggcttcctcaggcgggctcctcccacagtgagcgagcgagctagtgacgagtgacagaaggactcctttcactg

SEQ ID NO: 335101 - DNA, 122 bp, Homo sapiens
cctttctgcaggatctatcgggagggggcggggggagccagagatagggcccactctacccgtgcttgcccagacaggccatacccctggcagggacgaggaaagggagctgggggtggggc

SEQ ID NO: 335102 - DNA, 122 bp, Homo sapiens
ttcccagatctgaggcttttacggaggaggtttctgatttgtaacagtagagaggaaactcgttttaccccggggttcttagctgctgtccagggcacccactggaagtactttgaagatgc

SEQ ID NO: 335103 - DNA, 122 bp, Homo sapiens
aggagaaagagaacaggggagaaatgaccgaccgccatagctcagagaccccagcgagaccgggactggtcctgcaccgaatgtatacagccagtcccaagcagaggaaaggaagcacacct

SEQ ID NO: 335104 - DNA, 122 bp, Homo sapiens
agtctagtttggggaagtagaggccgccgcggagtagcaacctggggtgtggagtgggggcgagtgccgggaagcagtggaaattccttcccctctttctttcccgtccttgcccagctttg

SEQ ID NO: 335105 - DNA, 122 bp, Homo sapiens
cagcggggactacagaacccagaaggttttgtctccagccgcagggatgctgagccaatccgcgctgagaaaagggtcgtttccgctttgggaccaatgggtcggggagggacttccggtat

SEQ ID NO: 335106 - DNA, 122 bp, Homo sapiens
caatgtaaggcatgtacttttggcatggtacagcttctctgaccttggaatcagattggacgttaccaccttcatttcctgttccatgttaattttcacacagtacttgttttttttttttt

SEQ ID NO: 335107 - DNA, 122 bp, Homo sapiens
ggatgctcgaatcttgggaggctccgagaattgatgggactctggagctttgggaggctccgggtggagactggacacccgacgactcttgggaagctccgggcggagactggacactcgac

SEQ ID NO: 335108 - DNA, 122 bp, Homo sapiens
gtagaaagagcagaaacgagggccatcggaggctgcagcctgaaagtggcgggaagtgggcgggcttaggaggggcttagggagaacccaggggtgctgggcttccatgtaaaagtgatgtt

SEQ ID NO: 335109 - DNA, 122 bp, Homo sapiens
cagtttatctgacagtcctttctacagggatgatgcacatagtgacctgacagttcccatcggtatcccaccatatctcttccattccttgcaaaagggcagctacaccttgagtccttttc

SEQ ID NO: 335110 - DNA, 122 bp, Homo sapiens
ccctgtagtcccagtcacactgcagtagaagctaaattccttccccaatagatgctgcatcgaaaaggaaatactgtacctcagagaggccgggacaggaattgggtagacatggactgtct

SEQ ID NO: 335111 - DNA, 122 bp, Homo sapiens
ccaaatgtcagaaagatctcagtgactgtctttaacgaacagggttgtttatgattcacccggagtcgcctcgccaggcttctcagtatacccaggccgtcctgagcccagcctggccctgc

SEQ ID NO: 335112 - DNA, 122 bp, Homo sapiens
tcccttccttcgttccttgcgaggagcgactagaacccgagttctctgagcacaccgtgccgtcagctggcccgtcacgcactcgactccgccactcccctacttgtttttctgagacttgg

SEQ ID NO: 335113 - DNA, 122 bp, Homo sapiens
acagtgttacccttaaattcacatatgcgcactgaaccagtcacctcatttttcggtaaacgaaaccacctaaagattaggtggtttcttggtgcaacatcgggtttgagactgcagaaaac

SEQ ID NO: 335114 - DNA, 122 bp, Homo sapiens
gcaggatggttaagcggggcgggtgtgagacagtctggctccgcatctgaatccaggctccgccccatattaacagcggaacctctttgtgcctcagttcctcaactgtcaaatgagaataa

SEQ ID NO: 335115 - DNA, 122 bp, Homo sapiens
ccacgcatgcgccaggtcgaagcggcgggcggggcgtctgattatagtgtggggagcctgcgattggggtggggcgcctgcgattaggttgggaagcctgcgtttagggtggggcacctgcg

SEQ ID NO: 335116 - DNA, 122 bp, Homo sapiens
accagcccctggctggtggttactgtccgaacggcgtggtgtggtcgctgactctctgggcgtgcagctccgcagccctgccggctcggttcggttcgtgagcggccggggtcaggctgggt

SEQ ID NO: 335117 - DNA, 122 bp, Homo sapiens
cagataccaacaattctcatgaataacaactgataaaacctttcagcgcgttacagattccggtgggtgacctcaggtttgcctgaacagtacctgctcctcaggtgttcagtgattttcaa

SEQ ID NO: 335118 - DNA, 122 bp, Homo sapiens
ctcggcaaaccaggtcatgaaggggagaagctcatgtctgtcttgcagcctgatttcccacggaaaggccccatgtttacagttctggggtttcccagcaaagagtaacactccagttggaa

SEQ ID NO: 335119 - DNA, 122 bp, Homo sapiens
gccgcgggcgcgtcaggtgaagactgggcgccgcaggcgccttaggtgaagattggggatcgcgggcgcgtcaggtggggacgatgggccacgggcgagtcaggtgaagaccgggggcggcg

SEQ ID NO: 335120 - DNA, 122 bp, Homo sapiens
cgccagccccccctcccaaccccttcctgcccggggcgggggaacgttttcgtttttccgcggacgctccgaatgggggagttgaggtgagcccccacccagcccacttctaccgtgctccg

SEQ ID NO: 335121 - DNA, 122 bp, Homo sapiens
agaaagtgggaggagagagtctgaaatgcaccttggaaatctgctccagagcgaaggcggcgtcgcagtagctgggccggtgcagatagtcccggtccggcgcggcagcacggcgcagcccc

SEQ ID NO: 335122 - DNA, 122 bp, Homo sapiens
ttgcccgggggcgcgccgacgtgcggcggggcaaggtgatcgacaggcggcgctgcggcacgtcctcgcgcgagctcgccaaaggggttcctgcaccgccttccgcagccagctggcttcgc

SEQ ID NO: 335123 - DNA, 122 bp, Homo sapiens
caaattgaattcctacagtgtgtgctgtatgagtgtgcctgtcagaggctcccctaacagcgtttgaaggaggtagctgtgcttaatgtaagatttttagtcctcaattacccacacaaata

SEQ ID NO: 335124 - DNA, 122 bp, Homo sapiens
aggccttggggcccaagggtatgcagaaggacccaggctcctgctgaggctctcctctcccgggacaggcggtggagggcagcgtcctggtcagctcctcctctgaccattccttgaccgtc

SEQ ID NO: 335125 - DNA, 122 bp, Homo sapiens
agaggtgaatagaagtagctctggcctcatggagtcctcatttcatcagtggggcagacacgtggacaggtaactttccatgtggtgttttttgttttgttttgttttgagagggagtcttg

SEQ ID NO: 335126 - DNA, 122 bp, Homo sapiens
tcctgttagagatgaggatgccccgcccttcggccccagagcaaaggatttccccgcttccggcgtggcccaaagaatcaagacccggtcagcaatggagcccagaacctctggcccccgcc

SEQ ID NO: 335127 - DNA, 122 bp, Homo sapiens
cgacgagtcttggaatgctctaggcggagatgggactctccagtctccggaggctccgggcggagactggacaccggagtcttgggaggctcctggcggagatgggacagtggagtctcgaa

SEQ ID NO: 335128 - DNA, 122 bp, Homo sapiens
catttctgtgcctttagcaaacttcctgtgttgctcttaaaaagggatcatccaccttcccggaccacaaggttaaggtaaccccgctaggtaaccctgataggcctgctgcggggcagacc

SEQ ID NO: 335129 - DNA, 122 bp, Homo sapiens
agcatgtgatcctctcaacgttccaggggtctcgtaacatgccgggcctgtctgcagccacgctggcctctctgggtgggacttcctctcggagaggcagcggagacacctccatctccatc

SEQ ID NO: 335130 - DNA, 122 bp, Homo sapiens
agcgggggtgcaggctgcctttgggcacctggtgccccagccgtgggtgtgcctgtggggcgctgacccgaacgggaactccttccagtccagctcccggagctcctactacgggccatggg

SEQ ID NO: 335131 - DNA, 122 bp, Homo sapiens
cttccatgttgtgctggtcactacccaccaagggggatcagatgcaggcacgatgcaggacggtagtctctggacctgtgtcttggttatcatggagctggactgggcctggtgacagggcc

SEQ ID NO: 335132 - DNA, 122 bp, Homo sapiens
gggagaagaaactttatgatttgacctgctctgcctctgatattctggccaagcaaagaccgggcccttctaccattattgcaggtgtatggtggaaaatatttttccttttgggtgcaatt

SEQ ID NO: 335133 - DNA, 122 bp, Homo sapiens
gagcagccccgccatcaagacaaaacctcctctctactaaaaatgcaaaatatagctaggcgtggtggtacacacctgtagtctcagctacgtgggaggcggcagcaggagaatctcttgaa

SEQ ID NO: 335134 - DNA, 122 bp, Homo sapiens
ccttccaactccttaaagatccaagaaagaccttcacaatttacgagcacgccaggaaggcgggggcctgtgtactgactgcagaagagaacacccctctcaggaaacaaaggaggaagaag

SEQ ID NO: 335135 - DNA, 122 bp, Homo sapiens
ccactttccttcaagataggaaaccagatcccaaacgtgaggtctgcacggtcaaaaccgcgtcctggttcgcctgttccttcattccctctggacgggagctgcccacgagcaccatagac

SEQ ID NO: 335136 - DNA, 122 bp, Homo sapiens
ccgcacactcaccactgggagctccgtaatggcggcggcgggggcggagaacccggggggcgggcccgccgcagccagtcaccgccgccggcatctttcgaaccggctccgaaaaccgctga

SEQ ID NO: 335137 - DNA, 122 bp, Homo sapiens
tcaatcatcacgttagagaacagaaaggtgacaagagacaggggatgtctgggtgtgaaacgtgacctcatgtcgggacctagccaggactgctcaggtgagaagcaggttccccaaagtgg

SEQ ID NO: 335138 - DNA, 122 bp, Homo sapiens
cagagcccgaaagcgctcactccggttcccgcaccggtgcatctgtgtgctccccctccccgtaaggggtttgagctgcagggcgacctaactggcaagccgcacacctgttgcatgtcctt

SEQ ID NO: 335139 - DNA, 122 bp, Homo sapiens
ccgtaatcaaggtcaagttaccagaaacataaaactgaatctagggacagaatatttagtcgcaggaataaagtcaaggacataaaagtaagagtcaattttgctaaatcaaggtttgaatt

SEQ ID NO: 335140 - DNA, 122 bp, Homo sapiens
cttgctgtcacagtggaccatcagtctttccccgacctgagcctcatgaataaagccaagcgcacgaaaggaaccattgatgatgctgtcagagcaattcataaagctatcctggagcagaa

SEQ ID NO: 335141 - DNA, 122 bp, Homo sapiens
gggcacagtaggacacagtgactgcccaggtgtccacacacctgtaggcctctgagccagcgtccagggtacaggtgcgggtggtggggatgaaggcctgaccagggagggagaagcaggtt

SEQ ID NO: 335142 - DNA, 122 bp, Homo sapiens
caagggagggccgggtgccctcgccaccggctcattcctgctccggttttgcccgatgcgcgtccaggaggttctggcaggacgcactgcccctctgccccggccaaggaggatgcggatac

SEQ ID NO: 335143 - DNA, 122 bp, Homo sapiens
aaattactttttgattgggttccgtggctgtaattcttacttgaaggagagtgacatgttcgcatcttgaagcaactcagtggtctgggagagattttgtattaattttaacatttttgaaa

SEQ ID NO: 335144 - DNA, 122 bp, Homo sapiens
ctttacgggaagtttcctgtccataaaagccctccctgcacacgcccctgctggctagcacgtggctgctaatgggtacttcccttggttttctgcagttggaatccagcatgtgtgatcag

SEQ ID NO: 335145 - DNA, 122 bp, Homo sapiens
tccggcggccaggctagggcgggggcgagcgcccagttgagcctgctggggctggaggagcgagaagggttctcttcacatttcagagcgaaccagacggacagtaaggtttggaggaaggg

SEQ ID NO: 335146 - DNA, 122 bp, Homo sapiens
catgtggaagctgaaacctggacaggggaagtgacccctggcggagggtcgggcgggacgcgggggcgggtcctggccgcagccctgcccagagagtgcgggcggaagacggggagagcgag

SEQ ID NO: 335147 - DNA, 122 bp, Homo sapiens
acggattggtactttgaaaacagaaagatgaattaattgaaacttactttcacaaattatcgttaggaatgctcacagcagcttaatttcacagcctgagcttccaaatgctatgtctgaag

SEQ ID NO: 335148 - DNA, 122 bp, Homo sapiens
agtgcctggccggcgcttgaagactcaataaagagttgctggtgagtcccctcgctgggccgggcccagcacacgggggccgcaggccctttgttccacaggagctgggatgggaaagttgg

SEQ ID NO: 335149 - DNA, 122 bp, Homo sapiens
ctgcagtaccagaggacgtccgcggccgccgagcagcgcagcgagagccccgggcggatccgccacctggtacactccgtgcagaagctcttcaccaagtcgcactcgctggagggctcctc

SEQ ID NO: 335150 - DNA, 122 bp, Homo sapiens
aagccagaaaggggacaagctaaggagaagaggaaccacctttgcactggcggacttcagcgtgtctcacgcatgccgaatgtttacatgtgttccccacttggtatccatagcaactggca

SEQ ID NO: 335151 - DNA, 122 bp, Homo sapiens
gcactccatcctgggtgacagagcgagactctatctcaaaaaaaaaaaaaaaagaaaagtcggcaagaaaaggaagttacgtggatgcagctagaggccattatcctaagcaaattcaggca

SEQ ID NO: 335152 - DNA, 122 bp, Homo sapiens
gtccccagcacccccgccccgcccccgcgcggtccccaccgtcgcgctcccctccctcctcgccctcgctccgcgcctcctgttggcagagatggcctcgaaggcctcttccaatttgaatg

SEQ ID NO: 335153 - DNA, 122 bp, Homo sapiens
tgtgtgtgcatgtgtggccgagtgtgagggcacatgtgactgaatgggtgatggcgagcacgcctgtgaatgtgtgaatctgagtgtctatgggagcatgacagtgtgagagtttgtgactg

SEQ ID NO: 335154 - DNA, 122 bp, Homo sapiens
cccacgtccacacctgatccaggcgacacccacgtccacacctgatccaggcgacacccacgtccacacctgatccaggcgacacccacacccacacctgatccaggcgacacccacaccca

SEQ ID NO: 335155 - DNA, 122 bp, Homo sapiens
gcgtctgggtttgtgttgaccgttttggcggtgagctcacatgtcttgtgcatttgtagacgcattacgcggtccaggacaccaaaggcttccacacagaggaggatatcggcggacttcac

SEQ ID NO: 335156 - DNA, 122 bp, Homo sapiens
atttagcacccactgtgcccacattgagtaagcagcttgtcagataaagatcacaggacacgatgagaatggggtcttgcagcatagaagggaaagtaaaactcaaagatgactcgctccag

SEQ ID NO: 335157 - DNA, 122 bp, Homo sapiens
ttcagttcttgctgtgcagaccgattaaaaaatgaattaccttcagcgttacaagaccaacgctgaatatcgttaaagtctttctttcttgaagtataacattttaaatactacttacactg

SEQ ID NO: 335158 - DNA, 122 bp, Homo sapiens
aacacaaacggcgcagcagaggtcacctccacgagcaaaagtgcctccccactgggcaggcgcggggcccagcggacccggggcatcccagttttgtgccaatggagtgcctcagcccttgg

SEQ ID NO: 335159 - DNA, 122 bp, Homo sapiens
catcctctcgcaatccaccccaacccgggtggggtgcaggtagcttcacctgggagtcgccgataggaaggagggaggggacccagacgtgcctctgccctgcctgtggtctgccgctggta

SEQ ID NO: 335160 - DNA, 122 bp, Homo sapiens
gctccttgctgtgagatgtgtgtgagcgagatactggaggtctctggtgatagaaaagcacgctggccaatggcaagaaccaaaaggaggggaaactcaattttttggcaaacaatttgaat

SEQ ID NO: 335161 - DNA, 122 bp, Homo sapiens
gccgagccatccccgcccacacatgctgcccggcagtcgcaccagcgccactggcatcatcgaaagcgacagccacacttggttggcagcaaaagcatttgctgtttcctgcctgaggctgg

SEQ ID NO: 335162 - DNA, 122 bp, Homo sapiens
agctgggggctgggagacccactccagctgacctctccctcagacttctcctgacctgctcgcaccgctttgatgtacagccctttgttccaggactttggggtttcctcggatctctgttt

SEQ ID NO: 335163 - DNA, 122 bp, Homo sapiens
ctgtgccctggctgacgccctcctcacccgggcgctcggcgcgcttcctggcagaggccacgcggttgaccctcgccagcccattcgcggctcttggactttgtctctggactgggcagctc

SEQ ID NO: 335164 - DNA, 122 bp, Homo sapiens
gctttgggcctgaaggagaggcagcaggcgccatcagcacctgagttaccaccaggcactcgagaggacgacgggctgggacactttgtcgtacgacccacgcgcctgggccccattaggag

SEQ ID NO: 335165 - DNA, 122 bp, Homo sapiens
ctgaggggagaggcagacgctgtatttgagctgccactgggtacaaggcagacttccacacgtgggaagccttagaaatggtctcccctggccgggcacggtggagcacgcctgtaatcccg

SEQ ID NO: 335166 - DNA, 122 bp, Homo sapiens
ccgaggcagaggacgcccctgagctctgcttcatcatttacaattccctcggtgaacacacgtttcctgggtccctgtgggtaacacacggcttgccctggtcatcctgtatccagtgactg

SEQ ID NO: 335167 - DNA, 122 bp, Homo sapiens
gagggggcctccaccactggacagaaatgtagaaaaacaggaaggcagaagatgagcaaacggacagtcaggagcacagaaagacaagtagaaatatgcacaggtgggcatgctgctcagct

SEQ ID NO: 335168 - DNA, 122 bp, Homo sapiens
gggttgggttgtcctgcttggctgcggagggagtggaacctcgatattggtggtgtccatcgtgggcagcggactaataaaggccatggcgccagcagaaatcctgaacgggaaggagatct

SEQ ID NO: 335169 - DNA, 122 bp, Homo sapiens
ggatggaagccagcatgaggagtcagggagagggttcctccccacccacccgacgcaggacgctctcagctgcccccggccctttcgcttcgggcctccagggttctctccgctccctggac

SEQ ID NO: 335170 - DNA, 122 bp, Homo sapiens
atccctgacgcctctgtccctgtttctttgtcgctcccagcctgtctgtcgtcgttttggcgcccccgcctccccgcggtgcggggttgcacaccgatcctgggcttcgctcgatttgccgc

SEQ ID NO: 335171 - DNA, 122 bp, Homo sapiens
gccttgccttcgaggggctggtcctcggggggtggatgcagctttgcggggctggctccacgtcgcgccgcggcggtttgggctggggagcagccctgcagggaggcgccgccgggtgggcc

SEQ ID NO: 335172 - DNA, 122 bp, Homo sapiens
tgggaactttgtccggaaaggtaagtgacaagtcccactggatagggtagaaggggagcccgagggctactattgtcaagaaaatgaccaccaaaatctgtccatgcacattcgttcctagg

SEQ ID NO: 335173 - DNA, 122 bp, Homo sapiens
ccactcaggccgtccagctgccgcgcggtccagcgctgacccgagcccgggaggcagctgcgctctaaggtttgcgctcctgtttgcgaggtgtcttcatataacaaatgcgagcaataaca

SEQ ID NO: 335174 - DNA, 122 bp, Homo sapiens
gcggaaagcgtgctgcgcgaacttggaggcgtcgccgtaggggaagaactgaggggggtgcggtgggttggggcgcagcgacagccccgcccaccccgcccccatctcagggaacctcccct

SEQ ID NO: 335175 - DNA, 122 bp, Homo sapiens
tgctcatcattgaatcccccagcaaagtgcctagaacataatagtgcttatgcttgacaccggttatttttcatcaaacctgattccttctgtcctgaacacatagccaggcaattttccag

SEQ ID NO: 335176 - DNA, 122 bp, Homo sapiens
cgttgcagtgtcactttcgctgggctctggggcagaacaactacgcatttccagacttggcgagatcgggacctagtgtcaaaagaagggtagtgaaccgcccactcagtacggcgcggcgc

SEQ ID NO: 335177 - DNA, 122 bp, Homo sapiens
tctcaaactcctgacctcaagtgatctgcccatcttgtcctccccaagtgggattacaggcgtgagtcactgcacctggcctcaacttcactttggtaatatttttcttctacagagtggtc

SEQ ID NO: 335178 - DNA, 122 bp, Homo sapiens
taatcagtaaaaggaatcagggtattttgctggaaggatggctgccgaggcctaccacgccggtcctcccagcggacgcgcggcccgggccccctccccacagcaggccggcgcgcgacgcg

SEQ ID NO: 335179 - DNA, 122 bp, Homo sapiens
tggtttatttgcaaatcaaacataaagcctgaaaggaaacattacttttcattaaatagacggccagccgaatgaacagagaaggtgagtgaatttattctgctgcagcagcccagggcttg

SEQ ID NO: 335180 - DNA, 122 bp, Homo sapiens
ggggcggactcggctgggcggactcagcggggcgggcgcaggcgcagggcgggtcctttgcgtccggccctctttcccctgaccataaaagcagccgctggctgctgggccctaccaagcct

SEQ ID NO: 335181 - DNA, 122 bp, Homo sapiens
aatcagaagagggtatgtgcttcccattgtgtacgacaggtatgtgcttcccattgcgtacgaccaattaaagcttatttctgattgacacttggacagccaaccagaaggcctggtaatcc

SEQ ID NO: 335182 - DNA, 122 bp, Homo sapiens
ctggctccctactagacagggagtgtagaggggtgtgtacaagcagacaaagaaggtttgcgacaagtgcagggacaatctagctcagcattcatctacacactggggagtttacaaatgct

SEQ ID NO: 335183 - DNA, 122 bp, Homo sapiens
catccaggcagggggaagttcagacaactcagagcagaaccatagcagttcccagctgcccgggcctcagagggcctctagcacagggaacttaaccttctggggtcctgcgtgcactacgg

SEQ ID NO: 335184 - DNA, 122 bp, Homo sapiens
caggaagaccttttcagtgccccctccggagccatacaaacgagctgcgcctttcccagccgagagcccaaccgccaccagcagcgtcagctgtaacaaagcgcctaaagcaactgggaact

SEQ ID NO: 335185 - DNA, 122 bp, Homo sapiens
tccacaagagacacaatggcgctcctgtggctctgatatgtaacccccacccccagactccggtgacccaaaacatgcgagtaaaccctttaattgctggaggttctcagccggtgccccgg

SEQ ID NO: 335186 - DNA, 122 bp, Homo sapiens
ccggggcttcaaagacgaccaaggcacagatcctgggtttgaagatctccagaggtggggcggggggccggtcggatgcgagggcaactcgctgtaacaatgcaacgcgctgggaaagattt

SEQ ID NO: 335187 - DNA, 122 bp, Homo sapiens
actaaacaaagctaaacaggcttccttctaggaagccttctcagagccttgattattctacgggtactgcaacttcccaagaggggctgggcgacggcacgaagaggtccccggaaagatct

SEQ ID NO: 335188 - DNA, 122 bp, Homo sapiens
ctccccaagctccagcagctgggtaggcatcaggcagggccacgctcatgcttttgtccccgtggggtatgggagtcggggagtcgtagtgggtgtctgtgtgctcaacgtcacatgcttga

SEQ ID NO: 335189 - DNA, 122 bp, Homo sapiens
ggggggggaggtcttactaggttgcccaggctgctctcgaactcctggcctcaagcgatccgcctgcctcggcctcccccagtgctggggttataagcgtgagccaccgcgcccggccttaa

SEQ ID NO: 335190 - DNA, 122 bp, Homo sapiens
taccctaataaactacctggagcaagtccttcttcagaaacaaatcaccacgtcagcgctcggagggtgaagcccctactactttctacttttggttgtgatgctggaggcccttacaattt

SEQ ID NO: 335191 - DNA, 122 bp, Homo sapiens
tgacctcaagtcatccacccgcctcggcttcccaaagtgctgggattacaggcccgcgcccggccggagttgaatttcttactgtggattgctggcaaagttgacaaaccactgctctaaga

SEQ ID NO: 335192 - DNA, 122 bp, Homo sapiens
aactccaaactccacatgcatatatgacattctctgctcagtcttctattgaatctttcccggaacctattcttttcatggtctctctctgtcttcccaaccagaaacctctgatttatttg

SEQ ID NO: 335193 - DNA, 122 bp, Homo sapiens
tcagggtccaggccacaaatagatggcatttgagggccctccagctacagtacatgaggacgacttcctggcacggggccgggctgaggtggggtcagacacgggccggaggacgctgacca

SEQ ID NO: 335194 - DNA, 122 bp, Homo sapiens
cgtgagcgcacagagcggggtggtggtcgcgcagcgtgccttcgaccacgagcagctgtgcgccttcgagctcacgatgcaggcccacgaccagggctcgcccgcgctcagcgccaacatga

SEQ ID NO: 335195 - DNA, 122 bp, Homo sapiens
gtagccctgttcctgtctgccctccccgcccccacagaaatagagatgagaaggggcaggcgaagaactaggagtgtctgcgagaccatcccaggaccctgagccccccaactctctgcatc

SEQ ID NO: 335196 - DNA, 122 bp, Homo sapiens
ctttctggaagtgacgccaacttcaggggcaaggccctggttctggggtcagcaccattccgtggttcctgaagagatggtagactatggaacgtaggcgttatgatttctgacctatgtaa

SEQ ID NO: 335197 - DNA, 122 bp, Homo sapiens
caagacacacctgtatgaaacaacaactaagaagagctgacatttgctgagcttttactacgtttcatactctgttataagtagtctgcatggattatctcctttcattcatacaacaactt

SEQ ID NO: 335198 - DNA, 122 bp, Homo sapiens
ggctgctgttcctgcagggattgagttttgaatcccctaaatcccgcagactcaggatttcgtcttcatgacattcccctactagagaagcatgggtccacacaaagcccccaaaattcgaa

SEQ ID NO: 335199 - DNA, 122 bp, Homo sapiens
cgcgtcctctcgggggcggcggaggcgcgtacagtcgccgccgccgccgccgccgcaccacgttccccacccggggctgcgtcaccgggagacacgttcccagccagcatgggtcggcgccc

SEQ ID NO: 335200 - DNA, 122 bp, Homo sapiens
aggaagaggggtgactgcggggcttgttgcgctgaagatttacaatgtacttcttgcaggcggctcagcaaccccctctgtggctgtgggtgtctggtgtgacagagcggagaaaagctctc

SEQ ID NO: 335201 - DNA, 122 bp, Homo sapiens
tagcacagcccccgggccagtggttctcagtaaggtggagggaatgagtaggtgaacaaacgagtgagtttttcgcctcactccctggcactcggcaccgagggctccgacaggctggtggc

SEQ ID NO: 335202 - DNA, 122 bp, Homo sapiens
taataaagaaactcttaaagggtcaaaagcaactagaagaaatgagctgaaacgggaaatcggaaaagagaagagtaagtttgtttctgggttgaatggagtgtctagtgctaactctacga

SEQ ID NO: 335203 - DNA, 122 bp, Homo sapiens
tagttaggaggtccggagggctgttgggggcgggggttggagcttcaccaaggtccttcccgtcttatggggcaagagggggagttcgaagaccagccgcatgccggggggttgcagggggc

SEQ ID NO: 335204 - DNA, 122 bp, Homo sapiens
ggccggggaacggtgggagggtgagctgcaggtgggggagtcacggtgcgagggcagccccgggtcgcggctgttccgcgctaatccccttctccccactcgccctgacctctcgtccccac

SEQ ID NO: 335205 - DNA, 122 bp, Homo sapiens
cggcggcgcggggagacggctgcacttaccaaacagggtcagggccattgtaaaggcgctcgccgccgcccgcgagtccaggcgctcctcccaggcgggctagggatcacctcatcagcccg

SEQ ID NO: 335206 - DNA, 122 bp, Homo sapiens
atggtgaggtgatctgaatacatattggtaagacagcagtgaaaacagcttccctgtcctcgttcaggttgaaggaaatcccgtcaatagacctgggtcctagggcctgagattgccctttt

SEQ ID NO: 335207 - DNA, 122 bp, Homo sapiens
ggggcgggcagaccctgggccccgggtctacgctttctggtcgccacacttcctgaagcacggcaacacccacaacatccagctcagggaagcccctgcagccccagaaacagcctatgtgc

SEQ ID NO: 335208 - DNA, 122 bp, Homo sapiens
ttggtcaacaaatatttgcattgcatatgttacctgccattagtcatttagtaactgtctcgggtagtagatcaactgtccacatatggcagtgtcagtgttcaaagtaactcttattttac

SEQ ID NO: 335209 - DNA, 122 bp, Homo sapiens
cctcgggtggcccaacggcctggccctggacctgcaggaggggaagctctactggggagacgccaagacagacaagatcgaggtgaggctcctgtggacatgtttgatccaggaggccaggc

SEQ ID NO: 335210 - DNA, 122 bp, Homo sapiens
ttgcagtgatgatgcacgtcctcctgggccagtccacggggtgcgcctgtacacactgggcgtgtgcggatacaagggcatgaatgcaggttggtcgcttgtcttcacacaggcatacgtgg

SEQ ID NO: 335211 - DNA, 122 bp, Homo sapiens
acacacacaaaccatgcatacacacacaccatacacacttagaccatcactcagtgatatcggatttttttttttaacttgggttttaattaggtacataaatagcaacatgagaatgagga

SEQ ID NO: 335212 - DNA, 122 bp, Homo sapiens
aaagagatgtgcgctgagcgtccgttatgtggtggcgtcgctgtggtttcttaaccagaacgcaaaatcctgtgaccaggattatcaccggctcgtttcatacatgagacgggggaagccaa

SEQ ID NO: 335213 - DNA, 122 bp, Homo sapiens
gtgaattacccatagcgccgtcacacgtgatagaaatgagcagcagccgctgctctgccacgccctcagcacaagtgaaacctatcgtcagcgcgtcaccaccctcgcgggccgtggcgggt

SEQ ID NO: 335214 - DNA, 122 bp, Homo sapiens
gaatctggtgtggagcccaacctggatggactccatgaggtgacacctctccccacgatgcggctgtctctgtttcagctgatctaagcaccagacactgaactgatggcacacctgcccag

SEQ ID NO: 335215 - DNA, 122 bp, Homo sapiens
gccgcctcctcctccttcccctcctcctggcttcattcaccctcccagcagccgcgcagccgttcactcccggctcagggcagcgcctgccgcggctcctcgtctcctgccgcgggtgctgg

SEQ ID NO: 335216 - DNA, 122 bp, Homo sapiens
gaggcagccgggttccgatcaagtgctgcgaaacgacgcgtttgacagctgctctggagccgaggatcacaataagagaaggcgcgtgaggctccggcagcaaacaccagccaggcaggcag

SEQ ID NO: 335217 - DNA, 122 bp, Homo sapiens
tcaactcccttggccacttcagtggaaggaggagggactgggggggcgggggcgggggggcgatgctccacaaatcagcctcccagttagggctttgacgcacgccagacctcggaagccga

SEQ ID NO: 335218 - DNA, 122 bp, Homo sapiens
actcctgttttttctctcgtgagtgtgcaatcgggggacagtgttgagttgctggggtggcgtttttctgctcgtttcctggccccttcttccttcccttcaaccctatcaggggcttacta

SEQ ID NO: 335219 - DNA, 122 bp, Homo sapiens
aggcccaggaagccgagggaacgctgtggctgaaagggacctgggtccgctcagtcagcccgaggtggctgttgattgagggaggtcgcgccctcccagttaccttccctggtggttgtgcc

SEQ ID NO: 335220 - DNA, 122 bp, Homo sapiens
gctgttttaaagacttactggagctgccacgtctcgagcagataaatgtggagagccctccgaggaggaacggaaagaaatctatttgcgtgagccgttatggattccgggggagagttggc

SEQ ID NO: 335221 - DNA, 122 bp, Homo sapiens
tatggcttatgcattcttttaaggtcgatttacatgacctccggctacaactaagacagccgaggagggcactccagtcgtcagtcggccaaacccacaattaaaacagccctccccctagt

SEQ ID NO: 335222 - DNA, 122 bp, Homo sapiens
ttggccgcatgcttgtcagaggtgggccccgggaaacacactcgctgcccctccaacaagcgtccctcgctccccattggccccccggtccccgccccccaccgccccctcccgctccgcag

SEQ ID NO: 335223 - DNA, 122 bp, Homo sapiens
tcttggatggctgaggaatctggtgttcaaaaaattcccagggtgactgagtggggctcacgttatagagagctttgcctgcctgggcggagcttagatgtgacctgggattcttctagcac

SEQ ID NO: 335224 - DNA, 122 bp, Homo sapiens
tttgcttgttaaccccttctgaagaagagctgacagcaaccttttagtgcgagggccattcgtcctgctgcatcccagaaaactaatctgttactacttcagaattgctggttgatgttagg

SEQ ID NO: 335225 - DNA, 122 bp, Homo sapiens
tgacctcgtgatccacccgccttggcctcccaaagtgctgggaatacaggcgtgagccaccgcgcccaggaagaaattacttttaaaaaagaacaagcagctgggtgcggtggcttactcct

SEQ ID NO: 335226 - DNA, 122 bp, Homo sapiens
gtgagggaacccccagatcccaaagactcctgccccttccttcatcctgccctgcccccacggcccacatgcatctgtgtcaccaggttgtggtcctcagccggtgctgcatcagccgccgg

SEQ ID NO: 335227 - DNA, 122 bp, Homo sapiens
agtgaatgcgggaaatgagaggactcatgctactcatgggggttacctactcggaggctgcggaaggtaggctccaattaactttgacctcttcttttcatatcctttttgtgtgatgtcac

SEQ ID NO: 335228 - DNA, 122 bp, Homo sapiens
gtgggaggccggcggtgaagagcacttccggttggagcatagagcagctccgcggcgccgcgcccagaagggctccctcgggctcgtctaccagagagaggctccgcttggggccagagcgg

SEQ ID NO: 335229 - DNA, 122 bp, Homo sapiens
ttgtccaagcggcgttccggggcaaggcccgaggtgtgtcccgctgagcagtgggtcgtccgcgtctgggctgcgggcttccaggcgggcgcctgccgaggccctgtccccggatcccgagt

SEQ ID NO: 335230 - DNA, 122 bp, Homo sapiens
tctggatataggaggattctagtaagacgtttgggtgggggatatgttattacatttctacgttagtaagtctggcatatcagaagtcaaatacttccactttgtcaggcccccaaggtacc

SEQ ID NO: 335231 - DNA, 122 bp, Homo sapiens
tccctgtgacgattaagcgccagcatgctgcgtgaatatcctgtacaaaaacccagcaggcggccgtaattagatagaaaatcagacaagagccttctcattaactaccacaactaccccac

SEQ ID NO: 335232 - DNA, 122 bp, Homo sapiens
aagaggagcggggtgcggggacacagggttgctcaagaaagtgagctatgcgcagtgctccggaagagcttgtctcaaaccaggtcccaagtgagggcagaggcgtaacttcgtactgggca

SEQ ID NO: 335233 - DNA, 122 bp, Homo sapiens
agaattaactgtgtgtaactgtatatttgaggcaaggcaaggggacagatattttccttacgttattagttgtgcaacagaagccaattaagagattggagagatgaataacactagtgatg

SEQ ID NO: 335234 - DNA, 122 bp, Homo sapiens
gcggcggacacggccaccacgatgctgcgcgggttaaggaaccgggctgcgggacccccacgcctggccccgccccccaggcccgactccgccccgagccccgccccgcccccggacgcccg

SEQ ID NO: 335235 - DNA, 122 bp, Homo sapiens
agggaccgcgggggtgggggcgggggagggccggcgccccgggagccgccgggcttggtgcggaagaggttgctctttccgaggcggcccacctgctgtctgacaagttcgactagcaagac

SEQ ID NO: 335236 - DNA, 122 bp, Homo sapiens
gagttgtgtaggggattttgttccctccgaaactgagacccagggcgcccagtgggcacccgtgccttgactctgtcctttctgcagccgctggtccgagctgtctggcctcagtttccctc

SEQ ID NO: 335237 - DNA, 122 bp, Homo sapiens
tgggcccatccaatcactacacggtcaccagagcccccttgctcagggaggatcacaagccggatgagggaaggtgttctgtcggagggtccagggactggggccaagggctcgtattccca

SEQ ID NO: 335238 - DNA, 122 bp, Homo sapiens
aggcgcaccaggtaggccttgctgggctcctgcagggcgctagtggttgcgctctggaagcgcaggtccgggctgatggcctgggtgatctcgcgcaccaggcgctggaagtgcagcttgcg

SEQ ID NO: 335239 - DNA, 122 bp, Homo sapiens
tgttgctccctgttctatgtcctggccatcttcagccatgtccatggccgactctaaatccgcatagcagggccccttgaagcactgctggatctgccctctgctttcactggccctgcttc

SEQ ID NO: 335240 - DNA, 122 bp, Homo sapiens
ctgcttggattgagaccggcagacaggctacatctcaaagggcacctcgaggggcaagggcgttctgtagtcacaacacagtccgtggagtacaaagcacagcctccaccaggcagcattag

SEQ ID NO: 335241 - DNA, 122 bp, Homo sapiens
agcgtctacgccgaggtctcccggctgctcctcgccaccggccactggaagaggctgcggcgagacaaccccagattcaacctgatgctgggagagaggaatcggctgcccttcgggagact

SEQ ID NO: 335242 - DNA, 122 bp, Homo sapiens
gcagctgctctagaagcaaggaagactgaagccgggcaatgtttggccaatcacaagcaccgtttggtgaggtgagcatattcagatgatcattttaagtagcagttcctctaaaacttcca

SEQ ID NO: 335243 - DNA, 122 bp, Homo sapiens
gggggtggggcagctaacggatgtggcatggggcgggggaccaggccggaggcgggctgccgggaggggggattccctcgtgccccaagggcgaatctcaggtcggaggaaggggctgaggg

SEQ ID NO: 335244 - DNA, 122 bp, Homo sapiens
aagtggttacgtttctagagtgatcctgcaaggatactggttgaggtgactgggggaccccggaggaggcgcgggttaggaaggttctgagcgtggcctgggcgcaccaggcgggtgcgcgg

SEQ ID NO: 335245 - DNA, 122 bp, Homo sapiens
gtccctttaaaaggctgggcctggtggacggaacttcggtgcgacgctaaagtgtgcgcccgggaggatgagtacgctacacccggaagtgtcttcagggagaggaagccggcggcctcact

SEQ ID NO: 335246 - DNA, 122 bp, Homo sapiens
gcctgtgcccgggcaccccggagctgcaaactgcagagcccaggcaaccgctgggctgtgcgccccgccggcgccggtaggagccgcgctccccgcagcggttgcgctctacccggaggcgc

SEQ ID NO: 335247 - DNA, 122 bp, Homo sapiens
gggggcacctccgagcgctgcggcgggacgtcggggtccggggcgaagagagccagggcgcggaccgacgtctgctgcttttctgcggcattgctgcccgaacgaacgaacgaacgaacgaa

SEQ ID NO: 335248 - DNA, 122 bp, Homo sapiens
cacttctccctcagcctagtctccaagggtcacgagccacttccgcctccccctctcgggcgctccaatcagcgacctgtgtagctgtcacgtgggcctctggggcagaccctggagatcgg

SEQ ID NO: 335249 - DNA, 122 bp, Homo sapiens
gcctccaggccccagcctcggtcaaccccaccctgtccagcttgctcctcatcagctagacgagggagatagcaggatgcctctgcgggccctcattctgtagctgtcagaggccaggccag

SEQ ID NO: 335250 - DNA, 122 bp, Homo sapiens
catcctctcagcagggacagcaagataactagttggaagaagcaggcctccaagaagtagcgccatcctggcagcagccaagtgagccaggccccggcccggggtgctggggcttcttgcca

SEQ ID NO: 335251 - DNA, 122 bp, Homo sapiens
tggttaaaggttctcatctactctgcactttcactgacacaggaaagatgatatccgggccgggagatgggactctcagaaacgaacgagttaggacacacactaatggccagataaaatca

SEQ ID NO: 335252 - DNA, 122 bp, Homo sapiens
aggcaaacaaaataatgtgacaatttcgtatcttttgttatggagattatgccaaggatccgggaaacggatggatttcttaacagattccgccggcctgcctagacctagcctgtcctgag

SEQ ID NO: 335253 - DNA, 122 bp, Homo sapiens
tcacttccttggaagtgctttgaaggggaggatctggaggcgaggggcacgggatctcttcggcagagggtgaattccttggactgtctggagtcaaggtcaggaccctgaatgtgcatgaa

SEQ ID NO: 335254 - DNA, 122 bp, Homo sapiens
ggcaggttacccgcaggctgggagtgaggatgcgccacgggccaggccagggccactcaccggcaggagctggtagcccatcaggcctaggtgccgctccctcagggccctcgagcccagca

SEQ ID NO: 335255 - DNA, 122 bp, Homo sapiens
catcttgggttttctaagaaattggactattaatcttcctaaacagactaattcattatacgttttatacaggttggattttatggtatttaactgaaggttgctgtaaaatttatagagca

SEQ ID NO: 335256 - DNA, 122 bp, Homo sapiens
caccagtgctgatgcttggcgcaggctcataatctggcttgctgacccctcccataccctcgttcctcaggcctagccagggcctagcccgcggcaggactcattatgttgaaataaggaat

SEQ ID NO: 335257 - DNA, 122 bp, Homo sapiens
aatacaacatgatactttgaaagcctgggtcggagagcgtctcagggaagaaaagcaatacggattggcaagatcacctgaggaagtttcaaggcattctctcaggtcggggcaggtaagag

SEQ ID NO: 335258 - DNA, 122 bp, Homo sapiens
tgcggagcagacgggtcgctggtggattgtggggtccgcctggagtggggccccgatgatcgacaacagtcaccatacgcacctgcagaagcagcttgtggggacggtagggacacccatgc

SEQ ID NO: 335259 - DNA, 122 bp, Homo sapiens
ctgttgttatttctttaaatacatgttctactcctttgtctttcttgtctccttctataacgcctataattcaaagatttgctcatttgatgccatcctttaattccctacttctatgttct

SEQ ID NO: 335260 - DNA, 122 bp, Homo sapiens
aaagtaatatttatcattttattatagaactttgatcttacttcttgtgacttcattctgcgtagagcacactcccatccttgaattaaatgacaaagcattttatattaactgacaatgac

SEQ ID NO: 335261 - DNA, 122 bp, Homo sapiens
agcgacttccctggggccaccgtcccgggcctgcgcggcgccttgccgcactcccagcgccggaagcccctgtcgaaggcctggggccaccttgaaagccggaatttcagagcggaggcgag

SEQ ID NO: 335262 - DNA, 122 bp, Homo sapiens
caggtggggccgcacccagctgctggccaggacctgctgtgagctgcaggcagagcccctcgcagccgggcgccccgtcgaggtcctcgccgacctcttcgtcactgagggcaacttcgagg

SEQ ID NO: 335263 - DNA, 122 bp, Homo sapiens
gtacttaatacccctgccagttttccccgcgtcctgctgggttgaaagttccagagctgccgtctaggcctcgtgtttgtcagacacccacggctcctgcgaggtcgcagccatgagctggc

SEQ ID NO: 335264 - DNA, 122 bp, Homo sapiens
gcagtgagaccaaaccctgtttccttagggatggtattgctaattattacaaactcaatacgatcctattcagcgtaattaaacccaaatggaccatattataagtggaggagggaacacat

SEQ ID NO: 335265 - DNA, 122 bp, Homo sapiens
caggcttcaggtccccgcaccttttgtctgcaacacagggtcaagttttgttcttgtcatcgggccatgtcttccagtgtcatcagctcagcacttcatgttcagcatgtaatgacatttgt

SEQ ID NO: 335266 - DNA, 122 bp, Homo sapiens
gggctgatgtctcagcagtgaagggcggatttggtccagcagtgtgacctgggggttcggcgtgcttctgaggtaggctgaggcaatggtatagccaaggaggctaaatcagagggcgaggg

SEQ ID NO: 335267 - DNA, 122 bp, Homo sapiens
ggttgcagtgagccgagatcgcaccattgcattccagcctggtcaacaagagcgaaacttcgtctcaaaaagaaaaaaaaaaaggtttgagtaatgaaagaaggaatttataattctgttaa

SEQ ID NO: 335268 - DNA, 122 bp, Homo sapiens
gcggggcctgggggaggagccgagggaggaaaaggaggagggaaaggaagggggtgggggcgatcagagaagacagacacccctcaggacgtagtgggagtaggatggggggcgagggggac

SEQ ID NO: 335269 - DNA, 122 bp, Homo sapiens
tgaagatggctgcctctgcctttgctggtgcagtgagagcagcttcaggtcagtggagagcgacatactccatgcatgccttcacagaaggggaaactggtgcgggatggaatgggcgttta

SEQ ID NO: 335270 - DNA, 122 bp, Homo sapiens
tgtgatgaataggtcaactctgtcctcgcagccgtccctgagagggcgctgttcccaaatcgaagccccagaggcggagactgagacaccggcactctcccactggactgggtcagcatccc

SEQ ID NO: 335271 - DNA, 122 bp, Homo sapiens
aattatagctccctcacagaaaggactttacaattttgttaggaaaggaaaaagaaatctcgatgcataacacaattagagaagtataatatgcttcatgcagtgaggttccaactttaact

SEQ ID NO: 335272 - DNA, 122 bp, Homo sapiens
gggccggtgggctgagggccggtggacgggagcccgggggtggttgggccgcgttcaggccgccctcagcccgtggctggtagccaggagggacagtgcggtaagcgctgctgaggcatacc

SEQ ID NO: 335273 - DNA, 122 bp, Homo sapiens
agctattctctcagctcggcctcccaaagtgttgagattacaggcataagccaccacacccggcctgaacaagcattatagtgttgcttcctggcctgtgagcaggaaccttgtctgaggaa

SEQ ID NO: 335274 - DNA, 122 bp, Homo sapiens
gcatccttgctgctggggagaaggcagtgccctcagcactcccttaaggtaagtgcgcctcgggtgagcatgcacttaatgtgggtgtatgtcactcggctcggcccactacccaatactat

SEQ ID NO: 335275 - DNA, 122 bp, Homo sapiens
gagacaaaagcaaaaaggaacccaggtgactttatctggcagattcctccgggtctgtctcggatctataagacatttcggtcaggaccacccctctcatcagccccgagggcccggcaagc

SEQ ID NO: 335276 - DNA, 122 bp, Homo sapiens
tattattttccatatgtctgttttcttagttactagattattgttcccatgcgttcttcccgacaattttgcttttacaagtcccgacaattttgcttttacaagtcgtggtgagcagggca

SEQ ID NO: 335277 - DNA, 122 bp, Homo sapiens
gtcgcacacctgaatgacccatttatctctgactcactgcctcctcttccatccattactcgcccatgcctggcacaaggcccccttgctggccctcagctaagccaggcttagccctgatg

SEQ ID NO: 335278 - DNA, 122 bp, Homo sapiens
caggaggcatcttgttgcttggagggttggggaggtgatgcttaaacacataggccaactcggggccttgggcaccatgtggagcagtccaaactttgtgctggaaacacggggaggatact

SEQ ID NO: 335279 - DNA, 122 bp, Homo sapiens
ccatttgtggcgtctgattcacggctgctgccgctggtgggaagctgggagctgctgctgcgagagcaaatcagcttgggctaatgcatatgttaataacgctaatgttggagcatttggtg

SEQ ID NO: 335280 - DNA, 122 bp, Homo sapiens
acactcggccttggagctccacggtgggatttggggaacacagagacgtccacagtgaaacgactccatgaactcagctggcagcaataggagcttcagatcacaggtgaccaggagaatac

SEQ ID NO: 335281 - DNA, 122 bp, Homo sapiens
tagaacagttacgtccagaagcgtaccacccctgccgtcagcccggaggccacgggctgccggatgtggctcatcctgacttccgctttgaaggcgaggaccccagcgagcgtaagggcgca

SEQ ID NO: 335282 - DNA, 122 bp, Homo sapiens
accccccaacagccgggctcctggcggaggtagtgggtggagctaacgagacatctagtacggggctcacaggtaacagaactctgatcagatccgccccggctcccacacagctataaggt

SEQ ID NO: 335283 - DNA, 122 bp, Homo sapiens
tcgagcctggagaccccgcccccagcggctgggcgcccccggtatcttcggcaccccctacgctggagacctcggccccatcagctgcccgcccacccagcgatccaggcccctccagttga

SEQ ID NO: 335284 - DNA, 122 bp, Homo sapiens
ccacctccccccaggccaccgggagcgacacgtcgctggacgccagccccagcagctccgcgggcagcctgcagaccacgctcgaggacagcctgaccctgagcgacagcccccggcgtgcc

SEQ ID NO: 335285 - DNA, 122 bp, Homo sapiens
gcagagaccctggcgtcatctctaggcaaccatcccttttccagggaagctcatgacccacggctgtccagaagccagaatcttctcactgccccgtgtcgctcccgcaaggcctaccagag

SEQ ID NO: 335286 - DNA, 122 bp, Homo sapiens
tcctgaccgggagccacccctcccctatctttgcccgcaatgcttccaggcgcgagctggcggctctgcatacagcaggtgctccataaatgcaccgatgttatgaacaaagactcttttaa

SEQ ID NO: 335287 - DNA, 122 bp, Homo sapiens
caatcgggcagacacagggtggccacggccactagcggcaaggcggctgccccaagagcgcggtggcatggccaccaaagccactcaatcgagaaagaccgcggctctgtctacagctcgcg

SEQ ID NO: 335288 - DNA, 122 bp, Homo sapiens
ggagagacgccaactagagcaagctgctaaccacccctccctctctctcactgcactgggcggggggtgtccctgccaaccagacttaaccctctccagcctgtgttcctcccagacctgag

SEQ ID NO: 335289 - DNA, 122 bp, Homo sapiens
aaatgaagacagcagaaccatcccttaaaaaggttaccacaggctgggcatagtggctcacgcctgtaattccagcactttgggaggctgaggtgggtggattgcgaggtcaggagttcgag

SEQ ID NO: 335290 - DNA, 122 bp, Homo sapiens
ggggttttacatcttctgttcttcaatccactgcaaagacttttactttctagtgagccccgcaagcttaaatctggttttaggatagttatccaaattattactttttctgtgccctgctc

SEQ ID NO: 335291 - DNA, 122 bp, Homo sapiens
taggttctgcctctctcctgggaagccttgtctttcttcacactgatgctctggcttggccgtgtaatttcctctgaacaattgaatgtgaaaataagtgttacttctaggcagattcacta

SEQ ID NO: 335292 - DNA, 122 bp, Homo sapiens
aacatggtagacatcatctgtcccacagccctgcagggagacaaagctgttaaccggcaccgccccagctgtccatcttctcaaggggctgaccccggccgggcgcagtggctcacgcctgt

SEQ ID NO: 335293 - DNA, 122 bp, Homo sapiens
cgtcggcaaacaggcgcggcccagcactcaattattcatgaggcttgcagatgaggggcccgccccagtctcagaccggggcgaaactgacgcaattcagccgggagcgctcgggtaaaatg

SEQ ID NO: 335294 - DNA, 122 bp, Homo sapiens
ggggttgtgcgtaaaggagagctcctctcaggggtgggtgcgcccggcccgggggtgccacgtcttcacccagaaaacgaggccgagtctgcaggggccctgctgcatggatggaggtgtgg

SEQ ID NO: 335295 - DNA, 122 bp, Homo sapiens
aataccggtgcccgtctcacaaaatgcttcaaagattgcataagaatgcacagtcagagccgggcacatggagggctgtcaatgacggtggttccctttggactccaccatcttctcagcta

SEQ ID NO: 335296 - DNA, 122 bp, Homo sapiens
tttgtttgacagcagatcccaaagggtcccagtctcagctctagtctctcttactgaagtcggggacataacctgccagcgcagaggcctgctgagagacatggcttgtcaaaaccaacaag

SEQ ID NO: 335297 - DNA, 122 bp, Homo sapiens
agattgtcagatgtggcctgctttatggccatgaaccgaatgccctggaaggtctggcaacggaggaggcgtcttcactctccccgccagcatctttcatcagagcactgcgccccaaattc

SEQ ID NO: 335298 - DNA, 122 bp, Homo sapiens
ggtgcctgactgattcccggggaggctgtgggtcctcaggcagccgctgttctgtgtcggcgctaggcttggcctgggatgccccagagaagaggacagatggagcaggggcgggtatttag

SEQ ID NO: 335299 - DNA, 122 bp, Homo sapiens
accgaagagcagccgctgagctcatgaaaaacctgttcgcgcagaaaccgctctgtgccccgtggaggagctacgatgaattattaggtgaaagtaccacaagctccgtgatcattttgggc

SEQ ID NO: 335300 - DNA, 122 bp, Homo sapiens
gaattctcatctctgttctcctcctgctcaaatttggcagctctgcatgactgtcagtcacggcggttgggaatgttgctcccctccctcagcactgaaaacggtgaatagatgtattattg

SEQ ID NO: 335301 - DNA, 122 bp, Homo sapiens
ccagcccagccccacccacagatcccctgctcctgttgtgttctgttgtaaatcatttggcgagactgtattttagtaactgctgcctaacttccctgtgttctatttgagaggcgcctgtc

SEQ ID NO: 335302 - DNA, 122 bp, Homo sapiens
gcccgcctccccaggagccacaggctcaccaacgtgaaaggttctggcttttcttccccacgacccgtgggtcgcccagggtgagtttctcaccccctatctcaaacccgatctgaaagggt

SEQ ID NO: 335303 - DNA, 122 bp, Homo sapiens
cgggattctgcacctgaagctgcctacttgcaagccactgagccccggcctgtgtccacacgcaccttccccacagcctctgtccacagtggccgcacctgcctccggggtcctgcttcccc

SEQ ID NO: 335304 - DNA, 122 bp, Homo sapiens
gagcttggaatctcaaaaaaaaaaaaagcattcttgaacagtctccaggaagaacattcccgagaacaacaggcctaagaggaatttccttgggttcagaggtcctgtgttacatagctctg

SEQ ID NO: 335305 - DNA, 122 bp, Homo sapiens
atgtctcaatgtttggagccactctcacaacctagattgctctctccgttacaccttgcgcgtctctgacgactgagccgagatacttcttttgtctcctcccagccttgctcatcaacccc

SEQ ID NO: 335306 - DNA, 122 bp, Homo sapiens
tggagagtgagtgggtggatggaggggtgggtggatgcagatcttcccaggaggtgagaccgccagtacaaggagggcctcctcaaaggttttcattagaaatgaactccctcacatggtca

SEQ ID NO: 335307 - DNA, 122 bp, Homo sapiens
catgatgctaacctgaaggctgtgccaatgtgcaacaccttaagaaatgaacacatcactcgctctattagaaccttgccctggtcagactttttttctttttaaaaattgttcctcagcta

SEQ ID NO: 335308 - DNA, 122 bp, Homo sapiens
ctgtcatttactgactgtgaccttggagttttttaacctctctttgcctcaattttgccacgtgtaaaagaggaataattgcagaatctacctcatgaggtttttataagaatcagacaagt

SEQ ID NO: 335309 - DNA, 122 bp, Homo sapiens
agaggttcagaatattagcttcaggatcagctgggggtatggaattggctgaggatcaaacgtatgtaggtgaaaggataccaggatgttgctaaaggtgagggacagtttgggtttgggac

SEQ ID NO: 335310 - DNA, 122 bp, Homo sapiens
caatctctggcaaaatgaccaggataaccacagtagaggcataagcggcctttgtgccaacggacccattcagcttcactgatgtgtgggcagttgattgcagcctgcataggttggttttc

SEQ ID NO: 335311 - DNA, 122 bp, Homo sapiens
ttaggagattccaagggtttcaggagttgtgcacaaagaaatgggagcagagaacacacacgtatttactattacatcacagtacacaaaagggcagagttgaatagctgcaatagagatca

SEQ ID NO: 335312 - DNA, 122 bp, Homo sapiens
ttttttttttttttttgagatggagtctcgcactgtcgcccgggctggagtgtaatggtgcgatctccactcactgcagcctctgtgcaccaccccttcaggttcaagcgattctcctgccg

SEQ ID NO: 335313 - DNA, 122 bp, Homo sapiens
ccgattaaccggtcagtgggactcaaggccaagcccaccaagcccgtcacggaggtgctgcggcccgtggtggccagatacggcctggacctcagtggcctgctggtgaggctggtgagtgt

SEQ ID NO: 335314 - DNA, 122 bp, Homo sapiens
tgcatcagagtcctcccaggaatagtccaaaggagctgctcttgcccctttatacacaagcgccagcaaccaaaaccctccctcctggcaataaggcctcactatagttgccctcatgcttc

SEQ ID NO: 335315 - DNA, 122 bp, Homo sapiens
aaagtatagggagtccctaacacagagatgcggtgtattccaaaagttcacttgtaagtccgtttcccctcacagaaacactgccacaagctgcagggaaattcccaggccagcctacataa

SEQ ID NO: 335316 - DNA, 122 bp, Homo sapiens
catatatacgcacaaacgccgcataggtgggagggcggcggtttggaacattctgccatccggggttggaaagggtgttggacacgcctttcccatgtgcggtggcgtccgagggcagctcc

SEQ ID NO: 335317 - DNA, 122 bp, Homo sapiens
tacagggtacagtgttcgtcgctacttggtgtcaggcccactagaacaagggtccccaaccgccaggctgcggaccggtacctggcctattggaaccgggccacgcagcaggaagtgagcgg

SEQ ID NO: 335318 - DNA, 122 bp, Homo sapiens
ctgtctccctttgtgttcttctccacgacgttctctttgtctgactttctgctcctgccgcgtgcgcagaggggcgaggaggaagcatttgcgcatgcgcagaaggctcgctccacgccacg

SEQ ID NO: 335319 - DNA, 122 bp, Homo sapiens
gtcctccatcttcctacaaggtggtgtctgtttctttctctcactctggattaatgtttgcgttttccttcaccaaagccccaaggggagacatagcaccttgcccagggtctgagccctat

SEQ ID NO: 335320 - DNA, 122 bp, Homo sapiens
caggcactcgaatcggaagttaaatagcttatggactatttaatagaatataccaccacacgtatctaatcactcaaataccacgcttttaaaactcatgaatgttttaatcgctaaaaatg

SEQ ID NO: 335321 - DNA, 122 bp, Homo sapiens
cacaccaaattccacttggatttgggagatctcaggcaaagcacgaaggtgaagcgataccgttggcagagagtgagtcctctgaccgctcaccattcaagcaccctcacttctcgagcggg

SEQ ID NO: 335322 - DNA, 122 bp, Homo sapiens
accctctcccctcccaggaaatgaggcaacatcagaaaaccagacccagatcctcatttacggaagagagtatcgaggtgggggcctgtgggtgactgtgtcatagccctatggcactgtgg

SEQ ID NO: 335323 - DNA, 122 bp, Homo sapiens
gggaagtacagtcacctaataagttgccggcgcccgcgcccccattggccgtgcgcgtcacgtgcccgtccagcagaacaataacgcgtaaatcactccgcacgctattaatggtccgatgt

SEQ ID NO: 335324 - DNA, 122 bp, Homo sapiens
gagaggtcatctgcaaaaggaaggaagggatatcagggtttataaaggttctgaaagccacgatataatagcagtgcccttatgaacatgtgggctatccaaacatttcatttactgctaca

SEQ ID NO: 335325 - DNA, 122 bp, Homo sapiens
gggcggggagggtagttgctgggggtccctaggccgggccccaggacatctaggacatgccgggggctgtttgctacggcttcatcccggagctcctgctcggggttgccggctgcctctgc

SEQ ID NO: 335326 - DNA, 122 bp, Homo sapiens
tccgcgggcggctcccagtccccgggacatggggctggggtcctgggatcgcaggactagcggcacaccctacgggccgcacgctgagggtgggtggccccacgcagtccccgccgccgcgg

SEQ ID NO: 335327 - DNA, 122 bp, Homo sapiens
tccacagtacatcgacgccatcagcaacaagcagggcgagctggagaattacgtgtccgacggctacaagaccgcactgacagaggagcgcaggcgcttctgcttcctggtggagaagcagt

SEQ ID NO: 335328 - DNA, 122 bp, Homo sapiens
ctggaaacaggaacggaaacaggaaaggttcccttgtccccgtcgcagggcgtgtgacagcgggaatagctcgttttttcagaatcccactgctcaaacctctagggggagcctgctgacgg

SEQ ID NO: 335329 - DNA, 122 bp, Homo sapiens
ggctggtatggatgtctgctacacctcagccaggggctgcactgccaccctgggcaactgcgccaaggccatctttgaccttacagctctaagacctacagctacctgaccccccgaccttt

SEQ ID NO: 335330 - DNA, 122 bp, Homo sapiens
gggcggtgcgcgggaagggaccccggacccggaggtcgcggagagctgggcagtgttggccgctggcggagcgctggggcagcatgaagtgcctggtcacgggcggcaacgtgaagggtgag

SEQ ID NO: 335331 - DNA, 122 bp, Homo sapiens
gcattacaataaatatacaataagcatccacaaggcatgtgtgggagactgtgcttatgccgatggcacgggcaggagtaaggcaggcatcaggggaatgtggatgcacgggaggatgggga

SEQ ID NO: 335332 - DNA, 122 bp, Homo sapiens
ctgcaccgcacactgcagcagccgccctggcgccaccaccacaccgagcaggtgcacggccggttcctgccctacctgccctgcagccaggacttcttcacgctggcccctgggacgccgct

SEQ ID NO: 335333 - DNA, 122 bp, Homo sapiens
atttctgagagtgcaggctgctggcaaacacccctgctctagggagaagtaaaacttgcccgagcacatagtcaagtttcatgtttctacataatcatgtgatctggatagccagccagctt

SEQ ID NO: 335334 - DNA, 122 bp, Homo sapiens
gatccggatgagtccgtcctccgccccgggcgggctctcgctctcgctggccctcagcgccgcgcagccagcagcatccccaccgtgacgctcgcatcacacccgggcgccggccgccacca

SEQ ID NO: 335335 - DNA, 122 bp, Homo sapiens
agcaagagcggtccccacaccatctgtggctataatctctcaccaagactgtcagattgtcgggggcctctgcttctcaggtttataacactgctgccttagacatgtggtaaatgatttca

SEQ ID NO: 335336 - DNA, 122 bp, Homo sapiens
catccccgcaccccacatccccgcgtctgtgcccgcacctgaagacgcctcccacgtcgacgcctcctaggtctccacttcccacgtccctgcttgtggagcctgtgccccggccgacctgc

SEQ ID NO: 335337 - DNA, 122 bp, Homo sapiens
agccccattcttagccccgccccggccattctctaaaccgcacactcccgtcccgctccccgccccaccgacccttgggaacccagccgcagccccgcctctgcccgctggcgagagagcga

SEQ ID NO: 335338 - DNA, 122 bp, Homo sapiens
tgctccagctcactggccttcatctgcacatagttctgcaccagtgcagccagcaggaggcgcgcttcgtcctcactgagcgtggccgggtctgctgggctgctctccagggcagacctgtg

SEQ ID NO: 335339 - DNA, 122 bp, Homo sapiens
cagggttttagatccaggaagcattcaataaatgtttgctaaatataatcacaaacacatcggcgttactatatgattgaaattggagttttcctgagttacttgggacagtagctatggct

SEQ ID NO: 335340 - DNA, 122 bp, Homo sapiens
atgctgaactaaacaccagtcattgctgcaaatctcagagatgagctgattgcattgctacgcaaattacaggctttggaaaactatttgctaagaatccttctaacatacactgttagttg

SEQ ID NO: 335341 - DNA, 122 bp, Homo sapiens
tgcagcatctctgaggccgtctggggttttcggaaatttgcatttggtgtggaaagccggcgtggtgcgtttagcttgagcaggggcgccttggaggtctatttccaaggctgtgggcctgg

SEQ ID NO: 335342 - DNA, 122 bp, Homo sapiens
cttcctggcttggggctaacttgctatggtttattgacattttttcagctctctgagcctcggtttctttatctagaaaagtagacggctggacttgatgagttttaatttgcctttcaggt

SEQ ID NO: 335343 - DNA, 122 bp, Homo sapiens
aggacgcacccggctgtgtgcacatgtgcccagggcccgggacagcgccatggaagaggacgcacccggctgtgtgcacatgtgcccagggcccgggacagcgccacggaagaggacgcacc

SEQ ID NO: 335344 - DNA, 122 bp, Homo sapiens
acacgacagagatcagtattatccagagaggaaaggagcagtagcagtgcttctccaatccggcggttccgataaaccagcagcgctccaggagagagctgcaggcttctgagctcctcaaa

SEQ ID NO: 335345 - DNA, 122 bp, Homo sapiens
ctccctcctggttctgtaaccggcggactgcttgtggggaaatcttcccatcttcatctgcgctgacattattcaagcagggaatccctctcttgcctgcatgctgaggggaggctggaggc

SEQ ID NO: 335346 - DNA, 122 bp, Homo sapiens
gaggagggtacctcaacccactcaaagcccctggagaatggcaccgtcaaaattccacagcgcatcacccaacccccggacgagccagcccgtctctctctggggttgcacactgtccttgc

SEQ ID NO: 335347 - DNA, 122 bp, Homo sapiens
acattgcctactctgcgtggctgctgtgagcgtgaaatgggatcatgtgcggaacagccacgcatggtccgtgaaatgggatcatgtgcagaacagccacgcatggtccttggtgtgtgaca

SEQ ID NO: 335348 - DNA, 122 bp, Homo sapiens
ttgttgcctggcacaaagtgctcaataaacactgtggagcagatggatgtgtgaactatgcgattgtaggacaaagtgctccattgcccaccaccaccaaggccagccctgcaccctgaaca

SEQ ID NO: 335349 - DNA, 122 bp, Homo sapiens
gggcgggcccggctcagtgacctgtgctgctctgtatggtgccgtgtgtaagaataaacccgttggaatactcgtggtctcagttccttcccgtcccgccgccccggcccgacccactgcta

SEQ ID NO: 335350 - DNA, 122 bp, Homo sapiens
tacccggtcagcaagctgctggactgcgtcctgggccaggagataggcaccgtctataaccgggaaaaactgctggagatgctccgggtcaccgatccctacaacgacctcgttaaggagga

SEQ ID NO: 335351 - DNA, 122 bp, Homo sapiens
ccgggttggagcgtccagccctgcagcggatcatggtgcagcaggcggagagcttggaagcggagagcaacctgccccgggaggcgctggacacggaggagggcgaattcatggcttgcagc

SEQ ID NO: 335352 - DNA, 122 bp, Homo sapiens
gagccggggctggggaaggaggtataggtaaatagttttggtcccagggatcggccgtgacgtggggggataaactaattagtacctcagtagagagctctaaatcataataataatggtat

SEQ ID NO: 335353 - DNA, 122 bp, Homo sapiens
tacagcaagctgactttggaagaaatttagtttatagtttaaacaataatagcccttccccgaaactgtatcacctttgtaaagctagtgaaagaccaccaggttaagaggatgagaggagg

SEQ ID NO: 335354 - DNA, 122 bp, Homo sapiens
cctgggccccatcctcagggatttggctgtaattgggcttcagtgggctttggagaattacggcttgctgaatctccccaggtgagattaatgtgcaattcccttcctagaccacccgggcc

SEQ ID NO: 335355 - DNA, 122 bp, Homo sapiens
tagaactgaaacaatgtcattctttaaatacctcaattctaccttgcctatcataggatacggaataaatttatcaaccaaatgaatacgtgaatgaatgagtgttccagaatttagttggg

SEQ ID NO: 335356 - DNA, 122 bp, Homo sapiens
caggcgatggccctgctgctggtgctcctcgcctcttggggcctggggcagtgagggggccggcgggcgtgggccgagtggccgcgggcgccatggagggggtgctgtacaagtggaccaac

SEQ ID NO: 335357 - DNA, 122 bp, Homo sapiens
atttctgtcttgctcacagtatagaagctgttgaccgctccttgcttggctgtcacaatacgatgatcaaatggggccggaggagccgggatgtcaactagaaggtgagagaaacagaaggg

SEQ ID NO: 335358 - DNA, 122 bp, Homo sapiens
atgaaaggccccagctgggggctccttgccaccagtgctgtgtcttaagagctgccatcccggctgggtgagtgtctccttcctttctctgtctggagtaacccattgcgtctcccaccttt

SEQ ID NO: 335359 - DNA, 122 bp, Homo sapiens
tgctcacgaacggtcacatggaaacatttaaggtgtgagtgcggttagtacacgcacatacgtttgaggtgtgagtgcggttagtacacgcacagacgtttgaggtgtgcgtgcggttagtg

SEQ ID NO: 335360 - DNA, 122 bp, Homo sapiens
ctccaaggtgagcaaaaattatgacaaatcatttacaacaaccttatatcaatgtgtcctcgcggcctctcgtgtgctttccttttacgaacatctcggccttctaatcttgaatgctgtct

SEQ ID NO: 335361 - DNA, 122 bp, Homo sapiens
cgctgctgggcttcccacaaagccagtgaggttcatctgtccccaggaagtcatcagagacggtggctgaggagacaggcactgggggcctccgtggacccgctattggagtgaagtggcct

SEQ ID NO: 335362 - DNA, 122 bp, Homo sapiens
tggctccgccgcgaagttggtaggaatgagagtgaggagggcgggctggagacttcctcccgctcgcaaagaggaaaccactccactgtgaaggacgcgctgcaactccctagtcatccggg

SEQ ID NO: 335363 - DNA, 122 bp, Homo sapiens
cgtggctttgctctccctctcccccctcagctcgtctgtatttggagctccggaagctgccggcgactctcccctggagcagcgtgactgacaccggctcctattcagctgggaggagggag

SEQ ID NO: 335364 - DNA, 122 bp, Homo sapiens
tctggccacggggtgtggaagggagtcccctgagtcctcccaagtgacccggcgggcatgcgttttgggatgggggtcgttccagcctcgaagcagacggcggcgctgggtgccctggagga

SEQ ID NO: 335365 - DNA, 122 bp, Homo sapiens
aacacggaagaggctggacctcgaacaggggcggctgcctcactccctacctgagccagccgagggggccaaggactttagagctgtttcctccggcataagagagacacttgctttccagg

SEQ ID NO: 335366 - DNA, 122 bp, Homo sapiens
ccagacccgtcctgctgacaaactcaccaggccctggtgtccccaaaaccagttctgtttcgggggttgaggaaaacactggaggcggcggcagttgtcatagaaggtgtaggtccaggcca

SEQ ID NO: 335367 - DNA, 122 bp, Homo sapiens
acccccagtttacaggtaaggaaatggcggcttaagttcagaactgttcacatacataaccggcaagtggcagagccgtgttttggcatcagaagcgactccggagaggacgtgtcaaggct

SEQ ID NO: 335368 - DNA, 122 bp, Homo sapiens
ctccggttcgcggacccccacctccaccgggatccctgctttgacgcggcttcgcccccgcggctggtgaggaccctccacagcccgggacccgcctgagtccttacctctgcgtgagggtc

SEQ ID NO: 335369 - DNA, 122 bp, Homo sapiens
gctctctgcgccccctgggctgcagcaggcaggcaggacacagggtgcctggcttattcccggggaggctgtgggccctcaggcagccactgttctgtgtcaacactaggcttggcctggga

SEQ ID NO: 335370 - DNA, 122 bp, Homo sapiens
cagaggccccaggcccgggccccgcagccagtgtccgcttacagcggaccccaacgatcgcgagggacccctgactttcctagaaacttcccccaagtaggaagaagtttgacagagccaat

SEQ ID NO: 335371 - DNA, 122 bp, Homo sapiens
caaggcaggtctcacatggcagtgttccacatgcagcagctagctaagttctaggaagtccgcacctagaacacaaaactgccccagatcagaagccttcccagtgaagacagctactgtgg

SEQ ID NO: 335372 - DNA, 122 bp, Homo sapiens
gccctggcgctcagcccgaggccgggcgaaggcgggggccgcggccgcttccttggcctccgagtgcctggcgggcctccaggccccagacacacccctctcgaccccccgaggtttcctcc

SEQ ID NO: 335373 - DNA, 122 bp, Homo sapiens
tcaaaagttatttattaatatcggtatcttccacgtgagtgtctctggcagccagggtggcgctgaaaggttgggggtcctgtcgtgggcatacatggtggtccccagcccgccagacccga

SEQ ID NO: 335374 - DNA, 122 bp, Homo sapiens
ctcgcccagtcattggccttttgtgctgcaacttttcccgagcctttcggggagccacgccggccctgcgccgttgtcccgggaaactttgcgtcccagggccgcaccggaccgtggtgacc

SEQ ID NO: 335375 - DNA, 122 bp, Homo sapiens
gctcggtcccaagggcactgacctgcagggtgagctgttcaagttcagcgtggcgtacatcgtccaggagtacatggagaccgacctggcacgcctgctggagcagggcacgctggcagaag

SEQ ID NO: 335376 - DNA, 122 bp, Homo sapiens
agcaaaggaggccagaggctccggacgaccccagtggacttgcgaaacaagagaatcgagcgattggaggtttaccagacaccaatgctggatgtaaagcccctcaattcagattgagttag

SEQ ID NO: 335377 - DNA, 122 bp, Homo sapiens
tgagccggcttccccttcccacgcagctctgggatgcagcagccgctcgcatggaagtgccgcccagaggcatgcaggctgctgggcaccaccccctcatccagggaacgagtgtgtctcaa

SEQ ID NO: 335378 - DNA, 122 bp, Homo sapiens
tgtctggccttggcgccatgtttctcggacccatccacgtggcagcatgtgttggtgcttcgtcccttcccgtggcgggacggcatccctcgtgcggacctacctctagtgtgtgcttacca

SEQ ID NO: 335379 - DNA, 122 bp, Homo sapiens
agcgggaggagacaggagcaagcccctcaggaaaactaccaccacgggaggagacaggagcgggccctcaagaaaactcactacccaccgcaggaggagacgggagcgggcccttcaggaaa

SEQ ID NO: 335380 - DNA, 122 bp, Homo sapiens
acacaggatggcctggaaatgaagaacttgctgtgccaatttgcagcgattgtctcatgacgattctctacgctgcgcagcatgtcaggctttgagtgtttaaatggagggtaatgatttta

SEQ ID NO: 335381 - DNA, 122 bp, Homo sapiens
gcgggctgaggcggggctgacgtgaggggcggtgacgcgggtggccaaagcggagcggagcgggggtgaggagagtcgagggaggtgacgcgcgctgccggggcgaggtgaggggaggggag

SEQ ID NO: 335382 - DNA, 122 bp, Homo sapiens
acacttgcaggatcaaaaaagaaaaagaataagaaggaaggattaaaataatcacagcatcgccaacaggatcgtattttcccgaaggtggttaaccagccataccggaaccacgaaacaca

SEQ ID NO: 335383 - DNA, 122 bp, Homo sapiens
tccttggagaagaaagctgaaaatttccatgattaccatgcacactggagttatgctgatcgaaatctatctaaaaggtgccaggcacacagccaggcgggcaaatgctctcaaaggcaatt

SEQ ID NO: 335384 - DNA, 122 bp, Homo sapiens
acagctaattgtgggatggttacctcctgtaaattttaaatcctagtaaacttttcaccacgtttctacttcaattcccatcacccagccgaagtaaaataatggggatagttgtgcttgta

SEQ ID NO: 335385 - DNA, 122 bp, Homo sapiens
aggaggaaatcgggtgagttgaggttaatgtttccattaaacctggatggattttccctgcgtggaaggagctgttacgcgccagggctctgagcagcatggacggggccccagcgcagcca

SEQ ID NO: 335386 - DNA, 122 bp, Homo sapiens
ttcaccaagttagggcctcctgggtttattgcagattaaagccatctcagtgaagatatgcgtgcacgcacagacagacagacacacacacacacacacacacacacacacacacacacaca

SEQ ID NO: 335387 - DNA, 122 bp, Homo sapiens
tgggttggggctgtgtctgggcttagggcgggggcctgggatgctgccgctgagctgacccgctggacttgggttgtggcagacggatggcgaacgtgcaggtcgccgtgcgggtccggccg

SEQ ID NO: 335388 - DNA, 122 bp, Homo sapiens
gtctcggtggcgggagccgccttcttgtgggacttgggggcacgtggcgcggggcggggacgcggacagacccctcccgcatcctaggaggcctgggagggtccgcggggacgcggggaggg

SEQ ID NO: 335389 - DNA, 122 bp, Homo sapiens
cctggtgcaatgacgagaaaatatctgtgcgaccttggcctctggattgtggactggggacggggtgtccgtggcttcggtagcgagaagcgggtgggaggggcatgattttatagactcaa

SEQ ID NO: 335390 - DNA, 122 bp, Homo sapiens
gtgaaatttctagaaataaacttaagaaatgtgaagtgctgtcagtaaaacacttggaaacggtatggagggacaccaaataagacttgagcagataaaaaggaagatcaccatcctgtgta

SEQ ID NO: 335391 - DNA, 122 bp, Homo sapiens
caagggcaggtcacaaaatttcatgcaggaaccaaagcctggaattgaggactccaagagcgtgcttggtgctctaccccactgtggctgaactgatagtcaagctgagttttggttcttat

SEQ ID NO: 335392 - DNA, 122 bp, Homo sapiens
atttttgtgtagcttaaatgtgaaggcctcaggcagtggcctgttgtcctcctccacatgcgcccatcttcactctttcatgtgactggcctgtttttgaaggcaggaccctgtcacccttg

SEQ ID NO: 335393 - DNA, 122 bp, Homo sapiens
acctgagcgactttccgggccagaggccccaaggtgcatcggggcagagccggaagcggacgctgaaaactggcggctccttaatggttccggcggcagggaccgcagcgacgccctcaccg

SEQ ID NO: 335394 - DNA, 122 bp, Homo sapiens
gattctgcaagtgccctatgcgccagtgttcgagggtgagccgctagtcctgcgctgccgcggctggtacgacaaggtggtctacaagcttcactactaccacgacggccaggccgtgcgct

SEQ ID NO: 335395 - DNA, 122 bp, Homo sapiens
tcccacattctagctgtcctggtcctctacattcccatggttggtgtatctatgactcatcgctttgccaagcatgcctctccactggtccatgttatcatggccaatatctacctgctggc

SEQ ID NO: 335396 - DNA, 122 bp, Homo sapiens
acagacacagagaaacacaatgctagctagagcaacaacttgaaaagcagagatctgagtcgatgaattaaattcctccaaaagctgacgtgcataaccctgaacaaggcctcctttgttca

SEQ ID NO: 335397 - DNA, 122 bp, Homo sapiens
cccccctcgctcattcccgcctccacccttgacttgaatcactgttggcgggggacggggcgtgacccattcatgccgggaatcggatccagatgttcccgcggcgtgtgcagctgcatcct

SEQ ID NO: 335398 - DNA, 122 bp, Homo sapiens
agtgccaggagcgcttggattgggatggggacggagaagggtgcctcgctcgccgagccccgctgcccttggggacctggcaaagtcgaggtttcctcacagcgttgagattgagactgggg

SEQ ID NO: 335399 - DNA, 122 bp, Homo sapiens
gtatacaaaaattataatagtcagaatctgcacttactcttcacccctttcttcccctttcgttccttcttgtactgttccttcagtttacttattagtccctggtctacatcccaaacctc

SEQ ID NO: 335400 - DNA, 122 bp, Homo sapiens
tgcgccgctgcttgaactgcttggcgaactgctccaggtcgtccgagctgggcgcatcctcgtccgagtgctcgcccaccgatgagccgccgccgcccgcgcccgggtgcaggtgcgccgcc

SEQ ID NO: 335401 - DNA, 122 bp, Homo sapiens
caaggcttcctcgcctatgacatccggtaggcaaatggcgggcgggcaagacagggccggcggaggtcggctcccaaccgccaatcacgggcgcccaccaatcacaagcacctgcctggcat

SEQ ID NO: 335402 - DNA, 122 bp, Homo sapiens
cagggaccagagaaaaggccctggtcttgctaaagggcggcaccttcaagaagccctcaccgagagctgtgggaacaagagctgccgggaacaagagctgcgggaagcggctcctacgaatt

SEQ ID NO: 335403 - DNA, 122 bp, Homo sapiens
gcgccgcaacccgtcaaccggccaatgagaagacgcaacagcaatgacgccaggcacggccggaaaggagactcctgggaaaattgagctggaactcgggctttagttaaataccttcctcg

SEQ ID NO: 335404 - DNA, 122 bp, Homo sapiens
cttatcaaaggcctgcgaaaagacagacaccgggcaccaccagcagttggccattctcaacgaccagctgcacaagatcgtgggccggaagcaccttgggcatgccacgtactgctcacaac

SEQ ID NO: 335405 - DNA, 122 bp, Homo sapiens
ggttggctttcgtcagggacataggtagaagctggttggggagtgtgcgtgccagcctgacgcgatatagtgcgcacatgcgtgatgacgtagagggcgttgattgggaccgagtacagggc

SEQ ID NO: 335406 - DNA, 122 bp, Homo sapiens
tagggcgacagcaaaaggaaagcgaatgtggggctgttttggagtcccatacactctcagcggcagagcaatattaaaacttcctagaagacatctgagcagcaattctaataatcatgtat

SEQ ID NO: 335407 - DNA, 122 bp, Homo sapiens
ggaagttaatagactgactgtgccaccttaaaactcgtatgttgaagccctaacctccaacgtggtggtattgggagatgggccttttggaaggtaagtgtgtttgaatgaggtgaagaggt

SEQ ID NO: 335408 - DNA, 122 bp, Homo sapiens
acgggtctcctggctgttcctcccaggtgcagtccagccccagggcctttgcctgggctgcgccctctgcctgaaaccctcctcctccaggtacttgcctactcttgcctcctcccagatgc

SEQ ID NO: 335409 - DNA, 122 bp, Homo sapiens
tctacaaaagaagtaggaatggctgctctggaaaaacagaagaaataaatgaacaaattacgaaggagaaacaggaaggtggggctcgtatgtaataagcatctaagaatgcagagaaataa

SEQ ID NO: 335410 - DNA, 122 bp, Homo sapiens
catggcaccagctcagtaaacctagtgctcaatcctttctcagactcttgttagttcatacgtaaaatttgtcaggagttaaatgaataccctggcttatcaaatctgtaatttgagtatct

SEQ ID NO: 335411 - DNA, 122 bp, Homo sapiens
gccgctttaaggagaagaggaaagtgcgcgccacgctgctcccggaggcgggcaggtccccggaggaggcaggctttcctggtgacccccacgaggacaagcagtagccccaatagcctgcg

SEQ ID NO: 335412 - DNA, 122 bp, Homo sapiens
tcaccataatacctacacagtgacaaacagagtagtcctttcatagaaacacacagggaacgaagaaggaaaaaatatcctggggtagacagttatgacctcctaccctctgagttagaaaa

SEQ ID NO: 335413 - DNA, 122 bp, Homo sapiens
gaggcccccgttggaaacagtttctgtgttagaacaaacgccaccaaacgaccgacactgcgaggcctggagctacctgggctggcgccgcccgagccccgggctgcgagcccagaggctgg

SEQ ID NO: 335414 - DNA, 122 bp, Homo sapiens
taaactgtagagtgtgctgggaggaaactgaggcagggagggcctggtgccactggggagcgctgccccgaccccatgtgcttcccaggctcccttggagccacgtggatggcgacttcctg

SEQ ID NO: 335415 - DNA, 122 bp, Homo sapiens
taaaaatgtatttagggctttatttttaactgacagcaaatagaaatcctttagtgagatcgtggcaatttgacagtattataattaagctcaataaaggtacatggggtacctggaagatc

SEQ ID NO: 335416 - DNA, 122 bp, Homo sapiens
tctggacacattttggcgacccagatgggacttttgcttatcgccaagcagtgagactatcgccgagtggtgacaccaacgcctatcgctgagcggtgagactgtcacctatcgccaagcag

SEQ ID NO: 335417 - DNA, 122 bp, Homo sapiens
aaatcagccctcctcatcctgttgttgcacatcctgttgttattccccagcttcgcctcacgctcttcctccgggcaaaccctgccctcggaggactgggctggcaagagccccagccagct

SEQ ID NO: 335418 - DNA, 122 bp, Homo sapiens
ggtggtgagggaagtaactgtgcctccgcctgtgctgggtggatcaacatggagtgtggacgagcatagggatgtgtgggtttctcactagctgagagtgtttttaaatgttgtattttgat

SEQ ID NO: 335419 - DNA, 122 bp, Homo sapiens
ggcagtggagtccattgcaccggccgcggcccggcttagggaccaccaccgcccagcgtgcgccggcctttagctttcgccgcgctttttttgattttcggccccaccccctcgctctcaga

SEQ ID NO: 335420 - DNA, 122 bp, Homo sapiens
acaaattcagggattccagcagggcatggtgactcccagcactgagaggctaaggcagcacgatcactggagcccaggagtttgagatcggcccgggcaacatagagagacccccatctcta

SEQ ID NO: 335421 - DNA, 122 bp, Homo sapiens
gaagaggttggaggtgggcagccagggtagccagtgaggtcaggaagtctgttgccttaacgtccccttccccacgaacacacacccttctccgctcccaggtctggttggtgagacttggg

SEQ ID NO: 335422 - DNA, 122 bp, Homo sapiens
gagggaagaggtaggagctgaggctctggacccagaggctgagccatggcagcacgatctcgaccgccgccagtcctccacctgctcccgctgtccggcctgccgcagcctccgggaccgcc

SEQ ID NO: 335423 - DNA, 122 bp, Homo sapiens
tccttctggactggggtttccgatgaaggtgacagtttatccttcagtctccacaggtcacgaatttgccgtccaccaagaggcaacagagggagccccgccaagtcccatgccagaactat

SEQ ID NO: 335424 - DNA, 122 bp, Homo sapiens
actctggagtcaaagccacagtccacagatggccaacaaggccctatgggacctgccacccgctgttcccctgagtgctctccaggcccactggcctgcttgcagttgactgtgtagcccct

SEQ ID NO: 335425 - DNA, 122 bp, Homo sapiens
gcgcattttgagaactgtgcttagttttcactttggacgaatagcaacccttctgatggccgtcatgacaatgtctccaataaaaactgacagtctagctggctgcaaggcaggtcctcttc

SEQ ID NO: 335426 - DNA, 122 bp, Homo sapiens
ggagcccacctacaccaactctgcctggcacctgcagtcctctgacgacggggatttctacgcccctcccagctccccgcctctctccggactccctgcagaggttgctggagccaaattca

SEQ ID NO: 335427 - DNA, 122 bp, Homo sapiens
taggtttctttagtagaaagactcgcggtctacaaacgtttatatgcacatgcagaaatacgcacaccctagacaactaagaaagcacctttctaccggaacgtaatgtgtcaataaaaaat

SEQ ID NO: 335428 - DNA, 122 bp, Homo sapiens
ggggcagccaaagcgctggacccccaggtggcctgagaaggactcccagtgggtgggggccggggacttcttcctcgtcattgtgctgccagacaaaggcagatgggtcaccaggacaccca

SEQ ID NO: 335429 - DNA, 122 bp, Homo sapiens
aaggctgaggcaggaggagcccttgagctcaggagttcgaggctgtataagccaaggttgcgccactgcactccagcctgggcaatggagtgagaccctgtctcaaaaaataagggagtctc

SEQ ID NO: 335430 - DNA, 122 bp, Homo sapiens
ccccgcccaccacctgctctttcctcaccgtcccattggtggatctacataagagactcacgaagacgttcacactgcagtgttaactgcgttagccatcccaggggtgcttgcagtttaag

SEQ ID NO: 335431 - DNA, 122 bp, Homo sapiens
gtgtagggcccggttcgatcccgagctaggcagggagtcggcgccaggctgggtggtgctcggctacgcggagtgggcgagcgagcacgcgcctgcggtggccggcggtcccgcgctggagg

SEQ ID NO: 335432 - DNA, 122 bp, Homo sapiens
tcaggcagtcacatttcccacaaggcacttgtgcaacaagttagcagggaagaaagaagccgagcctttgtacggcggggccagaacacaaagctcattgtgatgtttgtgcttctattcag

SEQ ID NO: 335433 - DNA, 122 bp, Homo sapiens
gacctccacgcaggatgggcttcaaaagtcagctcaggcggtgccctggcctcgggtgcgcggggagaccactggcctccctcatgccggctccctgctgactgtctcgtgagctcctggca

SEQ ID NO: 335434 - DNA, 122 bp, Homo sapiens
caggctggagtgttatagcgcgatcttggctcactgtaactgccgcatcccaggttcaagcgattctcctgcctcagcctcctgagtagctgggactacaagcacgtgccaccatgcccagc

SEQ ID NO: 335435 - DNA, 122 bp, Homo sapiens
gaagtcacttcggcgatgtaaacgcgactttgcggcttcctgggctgctaaggtgaaggacgcccgccctccccagaacttgagagcttattggttggcgatgtcgtcactcagagtgacgt

SEQ ID NO: 335436 - DNA, 122 bp, Homo sapiens
actaactcacaaacgatgttaaaccaaaatgtgaaaacgctaggcagagtttactgttctcggctgagttcagagccatctgctaatgtggactcattgtttactttcccattttaaaagac

SEQ ID NO: 335437 - DNA, 122 bp, Homo sapiens
gctgcgggggcggggctggggccgcacgggcagcgaggatccctgggagggccaggcctgcgcgctgcgaacccacgtgactttttcgcctccagggacactgacgcatgcgcatcgtgccc

SEQ ID NO: 335438 - DNA, 122 bp, Homo sapiens
tattcggattttaaaaaccacatctaggtaatgtctcctactatcagtacattaccttttcgattctcacacccgatttaagaaaaccaacttctgccaaccttatttaacgtggcactact

SEQ ID NO: 335439 - DNA, 122 bp, Homo sapiens
tgcgcctgccaggtaagaccaccaccgagtcatatggtacatttttgccactcttcttggcggactcacctggagattctcctcctcaaagttatgtattgtaagcattgggaagtggagcc

SEQ ID NO: 335440 - DNA, 122 bp, Homo sapiens
tccctgcagggctgaagccgtcttcgcgcggagaggttgcaggggcccctcggggatgagcgagcggcgcgggacgcagtggaacgggagggggcgtgccgagcagcccagagtgtgccggg

SEQ ID NO: 335441 - DNA, 122 bp, Homo sapiens
acacatttaggagtgggtggtttcgtagatttaattttggtttcctaaaatcaccctcatcgttgaacgttgaataatcaaccaaggccttagatatattttgacagcgctcgattaacatt

SEQ ID NO: 335442 - DNA, 122 bp, Homo sapiens
gcgaccggattgacgccgtcacaccaacactggggagcagcaataaccagctcaattcttcgctcctccaagtctacatccccgattactcggtgcgagccctttcggatctgcagtttgtt

SEQ ID NO: 335443 - DNA, 122 bp, Homo sapiens
tgggctggcactatagtgaaataaaaaggagatggagaacattatctactggaacacgcacgtatgtgactgaacatctaaagccaggacagctcctaggagcagctcctccagactgtgga

SEQ ID NO: 335444 - DNA, 122 bp, Homo sapiens
tggtgggagtgttttttggaaagtgcactttgtaagagaatttggcaacactaacaaggacgtgtgtacaggtgagctcagcagttccctgcacaggtaaaatctcagcagcatccactgat

SEQ ID NO: 335445 - DNA, 122 bp, Homo sapiens
ctattgcaggcactcagatcgtgaacacatattggatgaagcagcaaagagccctgcccccggggggaagacagacaccaaatggggaacacaataaataagtaaattgtatagtatgtgag

SEQ ID NO: 335446 - DNA, 122 bp, Homo sapiens
ccgccactctgggggtgctgctgggtgagtgcggggtcggaacgcccgagtggtctcgggcgtgggatggggcgtcgtccggctgtggacacgggcgttggggccaacggataaaggaaatg

SEQ ID NO: 335447 - DNA, 122 bp, Homo sapiens
atggaggatcacttgagtgagactttgtctctaaacaaaacaaaactctgtgtgtgtgtgcgtgagcatttacagtgctaaacaactttaagtaccacactaatagtgaaaaatattacagg

SEQ ID NO: 335448 - DNA, 122 bp, Homo sapiens
tccaccaatatctttaaaaacagatcctctctaacagtatgagaaaatcaaggggagcctcggaagttcaggccaggctgcgttccgaggagccgccacgtccccccacctccgcttcccgg

SEQ ID NO: 335449 - DNA, 122 bp, Homo sapiens
ctttaaaaggggttaaaacgggtgttgcagaagagagaacactcaggtagaaagggcctgcggcagaggcgcccccaaatcatggaacctgttggaagagtgaggaaggaactctgggaccc

SEQ ID NO: 335450 - DNA, 122 bp, Homo sapiens
cctccttcacggtggttcttttggcgccacaggctcgtgtgtccagggggcaccgagctgcgcgctttcggcgagcggctagccccggctcaccgcaaccagccaccgtgaatctgaggatc

SEQ ID NO: 335451 - DNA, 122 bp, Homo sapiens
cttccccccagcatgtggtctggccattttagaaactttcaatacctttgcagaaaggttcgtttctattattgctactcttcctctctccaagctgaaggtccttgctcagagcaataagc

SEQ ID NO: 335452 - DNA, 122 bp, Homo sapiens
aaaatctcttttgaaagggaaaccaggcacagtggctcatgcctataatcccagcactttcgggggccaaggcgctcacctaaacccgagagttcaagaccagcctgggcaatacagcgaaa

SEQ ID NO: 335453 - DNA, 122 bp, Homo sapiens
ctggatacagtacggtgctttggaactcgtgggagagtacaggggaccggatgggcgcagcgaggttgcagggggcttccactgctgtggttccggcagcaaagcctatttaatgggatcca

SEQ ID NO: 335454 - DNA, 122 bp, Homo sapiens
tgctatgagaattcaattatttccagtgtcaaggatcaggggaaaatttaaggagcaaggcgtgtgtgggctgagtctttgagtctgtatggaagttagtcatgggacaatggataaaagga

SEQ ID NO: 335455 - DNA, 122 bp, Homo sapiens
tcggcctccctttcattagccccacatctgtctttcccatgggagggagcgcgcgccttccgcccagcggggcccttagcagagcctctccaatcctcggcgcctcccctacacagggttcg

SEQ ID NO: 335456 - DNA, 122 bp, Homo sapiens
gcagatcgtcaagccctctcccagcttagaattattagttgaggaatctcctgaagaggtcgtggaagacgtcatcgaagacattgttgaagaggttactgaagaggtcgaagggtctctgg

SEQ ID NO: 335457 - DNA, 122 bp, Homo sapiens
gggctgaagcaggagaatcgcttgaacccgggaggcggaggttgtagtgagcctagatcacgccagtgcattccagcctgggcgacaagaaggagactccgtcacaaaaaaaaaaaaagaaa

SEQ ID NO: 335458 - DNA, 122 bp, Homo sapiens
aacgcacaaagtattaactgcgcagtccagatcctttatcctgggcgcagcaggacgggacggaagagctggggctgccccgtactctgtcgtgggctgaaggcacccggcctgggaaaagg

SEQ ID NO: 335459 - DNA, 122 bp, Homo sapiens
gaagtgaaagaacttgccctaaagttatattgctagtaagtgatacagccagaattcaaacgtaggtctttttaaaatctaaagcttgtccccttaggtactatgttatactgcctcctaga

SEQ ID NO: 335460 - DNA, 122 bp, Homo sapiens
acttcccggccgcggccaggcgagcctcccaaagtttcctgtgaggccttcgtccgtctccggccccatctcaccacggcagcccaggacacccgctagggaggagcaggttaccgaggcgg

SEQ ID NO: 335461 - DNA, 122 bp, Homo sapiens
tggcctgtggctggtcaaccaccttcatccctggagcagcttagagcctgctgtgactcacgctcctctactgacaggatgccagcctgctaggccatctgctgggcagggcctgaggagcc

SEQ ID NO: 335462 - DNA, 122 bp, Homo sapiens
aggcggatggggggggggctgccagggaggggagggggcaccagagtgggagcggagacgcgagcaggtctcgtcggtaacccgggcttaccccacctgcgtacacacacctcagtcttcct

SEQ ID NO: 335463 - DNA, 122 bp, Homo sapiens
ggcgagacgccgagggcgtccagcggggcttacctaactctccctcccgcggaagggaagcggggaactactgcctcctaccatcaggtacgacgggcggcccaggcccacgcgcaggcgca

SEQ ID NO: 335464 - DNA, 122 bp, Homo sapiens
cccacccttggtctgcaccactcccggtttcacccagatctggggctgatgagaggtctccggcctgccccctacaggagttcaagggctacctctgatgcacctctctgggcccatcggct

SEQ ID NO: 335465 - DNA, 122 bp, Homo sapiens
cgacttggtcaaagccctgtgaccagtaagagaagggaccacatttgaatctggctgtgccgccaagacaccagctttttaatctcagtgactgataagagactttgcaaagatgtcggagt

SEQ ID NO: 335466 - DNA, 122 bp, Homo sapiens
acgtccagcgactcgatgacctgggacaggaataccttcactttctcaaattcaacaggccgaacgctgcgagagctgtcgacaacaaacaccaggtctgtgggccgcgtccggcagagatg

SEQ ID NO: 335467 - DNA, 122 bp, Homo sapiens
ggccatcgagatcgtggtgcagatggccgcggccaacggggtgagtgtccggatgcccctcgcttcccgccgcgccgccgccatgccctctcctagcccttgtccccctgctgcctccgggc

SEQ ID NO: 335468 - DNA, 122 bp, Homo sapiens
aattcacccagctcatgggcactgagcagggccgagggccaaggacctcacccacaaggtcgtgtcccgcgttcagtagcgtgcgggacgcggggcccccgaaagtggattcctgccccgcc

SEQ ID NO: 335469 - DNA, 122 bp, Homo sapiens
ctgccctgcccaggtggggagggcgctgcagttcccgggacgggcccgcaatcgacggtccgggcgccacccactccccgctgccagctcgcgccccagctccagcccggggacctccgggg

SEQ ID NO: 335470 - DNA, 122 bp, Homo sapiens
ggtcgtgctgccagcaatgcgcaggcacggggaacacctgtgggcaaattcacctctccacgtgccaactaccgccggccggacgtgatgatccctgagcgtggagcacacccgagccatcg

SEQ ID NO: 335471 - DNA, 122 bp, Homo sapiens
atgctattaaaataggctttgcatcatgacctggttttttctttttcagaacttgcattgcgccttccctgtagtaaataatatgaaatgaacatacatcttattgtgctcttaatgtcatc

SEQ ID NO: 335472 - DNA, 122 bp, Homo sapiens
gctggttgccaaggcaacccgccctgcccagaacaagtgcagatgactaggtttgggccccgcagggcttgggggtctggggtgcaagctgccccggccgggctggcgtcccggggtggggc

SEQ ID NO: 335473 - DNA, 122 bp, Homo sapiens
tctttctggtcctctgctttcccgcaacaatgggagtcttcaagcggccagtgcctttttcgttcttaactgcccaatccgtgccagcagaaggcagctttaaaccaaagtgaaagagctga

SEQ ID NO: 335474 - DNA, 122 bp, Homo sapiens
ccctccccggtctgggccgagttattggctggtggtagcgtcgctcgcccggcagtaccacgtgacggcctcggccgcgggcgtttacactggctctgcctccggcatctcttcgccggtgc

SEQ ID NO: 335475 - DNA, 122 bp, Homo sapiens
gcacacgccggccagccccagcaatgggttctttcgagcgacaagagctgtaaccagtcacggaacagcacgttaggcttgcgagccaatgaggagcagagggatggttggagccggcggga

SEQ ID NO: 335476 - DNA, 122 bp, Homo sapiens
acagcccagtgaaatgcccacgcagccggacctatgagcccatgtcagccctggaagctccggagctaactgggatggactcggaagaacttgaccaaatacactgagagctacttaggatt

SEQ ID NO: 335477 - DNA, 122 bp, Homo sapiens
aaaagctgagagcaccggccctgcaggtggaaactcgctgggcccggtggggaaggctggcgcagagcgcagagatggacgcgcagagctgcagccctagcagacgctccgagtgtgtgctg

SEQ ID NO: 335478 - DNA, 122 bp, Homo sapiens
gcctacagtacagtaatctggatacaaatgataagggagagccacgtttcctttcccccacgctgcctctacttgcctacattagaccggccttcaatgcaaatcttaacctcctgaggaat

SEQ ID NO: 335479 - DNA, 122 bp, Homo sapiens
gccgggaggagccgagccgggcggcggcggcgggaggctacagcgcgcgggggtctcccgcgtcccctccgcctcgccgggagctcgcgccctcgcccagccgagctcccacccccgctttt

SEQ ID NO: 335480 - DNA, 122 bp, Homo sapiens
tctatcctggcgcaggcgatttgatattttcaataggcctaacctcaccagtggcgtgcccggcccggctggctagcggctcctgtccccaagacccccgcagtcaccagacctttgcactg

SEQ ID NO: 335481 - DNA, 122 bp, Homo sapiens
cactcccgcctccaccatagaggagccagactgggttcatgctccacagtcttccagctgcgtctcctggaatgaacctttgagtaacaactctgagtgagtgatgataccccccttattgt

SEQ ID NO: 335482 - DNA, 122 bp, Homo sapiens
tggtgcccgccatcctttcagtctctatgaatccgactcctctagggacctcacataagtcgagtcttgccgtatctgtcctttcgtgtctggcttctttcactcagcgtcgtcctcaaggt

SEQ ID NO: 335483 - DNA, 122 bp, Homo sapiens
accctgacgccgcccgccccgtctgccgtccgctccggccgctcgctggctgcgtgcgcgcgtgtggagtcgtggcactttctgcctcagagctggcgaacggccccctccgccgggatcgc

SEQ ID NO: 335484 - DNA, 122 bp, Homo sapiens
accttcaaggagctcctgctctcctgcgtgaacagaaggcagaggtggagcgaatcctcacgcaagcttccttctcgctccgccactgtcggctccttgacagaagctatttatttcgtggc

SEQ ID NO: 335485 - DNA, 122 bp, Homo sapiens
ctgaaaaattggatccattagggagccagtggagctttttaagtaaggcatttctaattacgtttctgtagaagagaggctccccaggaaggcagtagtatgcaaagattttaaatttatgg

SEQ ID NO: 335486 - DNA, 122 bp, Homo sapiens
ggaagtgcagtgttcagtggctttctctatctgttcctttcctcagcgcccagtgtagcgcgtggcgttccatataagttgtggaattgaaatggattccagggccatgccattccccttct

SEQ ID NO: 335487 - DNA, 122 bp, Homo sapiens
gccgaggagtttggggctctgtcaggagcaacaggccattagcttccagcatgggtcaagcgcagaaacacccagacaatgctccaccctggccaggtccctctctcaaatctggttctcaa

SEQ ID NO: 335488 - DNA, 122 bp, Homo sapiens
tccagctgagggagtgcgctgtagccctcgcgcgcatactcgtacaggaggttccggtttcgtttctctgtagtgaaacttctccttggactatcgttggagatgcagcctccccggggccg

SEQ ID NO: 335489 - DNA, 122 bp, Homo sapiens
gataaaaaacaaaaataaaattaacaaaatagataacttgatatcctttccatattcagtcgtctactaacatgccatctccaaacaaatccattacctcaaaagaggaagaaaatgggcca

SEQ ID NO: 335490 - DNA, 122 bp, Homo sapiens
aaataaccatatggcactgaggtcattttctttataccacctgtgccctgattgaaattccgtacttgtttggctatttcatctgtttcctcttctagttcaattgctttccattatctctc

SEQ ID NO: 335491 - DNA, 122 bp, Homo sapiens
gcgtagcacccgggcccggcagctgcagagggtgtgccgggtcccccagcagtgccagcccgctggcgctgtgctggaattctcgccgggcttcagctgcctccccatggggcagggctagg

SEQ ID NO: 335492 - DNA, 122 bp, Homo sapiens
gaggagacggagcgcctggcccaggagctgcgggatgtgcggggcaaccagcaggccctgcgggcccagctgcaccagctgcagctccacgccgccgtgctacgccagggccatgaacctca

SEQ ID NO: 335493 - DNA, 122 bp, Homo sapiens
cccctgggcgtcctgggggctccagggggcgctgggggaccctacaggatttctggagggcgcctgcaggctgagggcccctagacgtggtctgagggccccagaggttgcgtgggggactc

SEQ ID NO: 335494 - DNA, 122 bp, Homo sapiens
atgagaacgaagaagaaaaaaataggtgtgtgaataatcaagggaggggtgacaagaaatcggaacaaaaacattcagagtaagttaaagggtaacaggtttaaaacaaaaatttaaaactc

SEQ ID NO: 335495 - DNA, 122 bp, Homo sapiens
gctgcggcggaggaagaggaactgcggggcttggcttctgcttttctctgcggcccctcccgctcgggcctcgcgcctacttgcggcgccctgagtccgccggccgctcgggggcgcccgag

SEQ ID NO: 335496 - DNA, 122 bp, Homo sapiens
atcacaatgacagcacttcttgctgacacagtgctgtgaatgtctgtgcacaagtctgagcgtctctcctgaacagtattagtcagggatgtccctagtgcctagcacaaggccagaagctg

SEQ ID NO: 335497 - DNA, 122 bp, Homo sapiens
gccctccccgcaggcgccagggcgttgcctggcaacttagctgcgaggggattggctgcgcgggaccccgtgaccatcccggagaccacgcatttcctgcgcccccggaagtggtgataatg

SEQ ID NO: 335498 - DNA, 122 bp, Homo sapiens
actcgcccaggtagtggccgatcatctcgggcttgatctccacctggttgaaggtcttgccgttgtagacgcccaccatgctgcccaccatctcgggtaggatgatcatgtcccgcaggtgc

SEQ ID NO: 335499 - DNA, 122 bp, Homo sapiens
aaggatgccagccaggactttgggaaaagcagcagatggaacactgcagacgtgcgctgtcggacgggcatggcctgcctgttacacactgcgccgtttacaaatctgttcttgtaagaatt

SEQ ID NO: 335500 - DNA, 122 bp, Homo sapiens
ttttcagctgcatacagaaaaatgaacttggctgagctgaagagccacacatatgttaaacggaagctcgggtattaggaacgtcgagaaaggcaggccgaaaagttagcccccttctcctc

SEQ ID NO: 335501 - DNA, 122 bp, Homo sapiens
ccatctgaacccctggggtaacttctgagccttggtggagtttccagccctttctcccctcgtagaggagccacttcatgttttagtaactcttcatcacccaccccgccagctcatgcagc

SEQ ID NO: 335502 - DNA, 122 bp, Homo sapiens
caaaagctatgcctgaaataggcaaaaatctctcttcccagtaccaggctgacctggctccggcaggaagtatagcccatgggggtctaaccctatctgaatgtggtccctggagcccggct

SEQ ID NO: 335503 - DNA, 122 bp, Homo sapiens
cagcccctaccagtgggtatgcctaaccatgggtgggtcagctgttctgcagtcccaagccgggggccctgcctggtgaagagttttgggggcagtggggagggagggtgtcacaaggaaga

SEQ ID NO: 335504 - DNA, 122 bp, Homo sapiens
cctctcccgggcccccacgggtcccgatgctgggcggggatgcactgaactgttcagttccgacgtgctgcagttcccacacgcccgcgccccacttacatccagcaccgaggccaggtgcc

SEQ ID NO: 335505 - DNA, 122 bp, Homo sapiens
ctgccgtaacacttaaatatttgtcaagttggctacgtttgaggttttgcagacttgaagcggcattgtaacactttcataatcttgaatgctgtcatgactggtctcaacagacaaaagga

SEQ ID NO: 335506 - DNA, 122 bp, Homo sapiens
tttgtctcattcctactcatcccgaattcttcctcatgatggtgtcaagaacctggacaccggctggcactggggctggcatctcgccggcatctgcagacccttctcagtcctccggccac

SEQ ID NO: 335507 - DNA, 122 bp, Homo sapiens
acaacaactgcaaaattttgggggattctcagtgaccaaagttgcatggtcaaggttatacgtggctcctcccttcacatagtacagcaaagctcttcttattcaggcaccaaccagccaag

SEQ ID NO: 335508 - DNA, 122 bp, Homo sapiens
tccagtagcctgtcttccttttgctgccatcaacgtgccctccacagcacccaggctgttcgttttgaagggcgcctctaggcctgagcccagcagcccacagcgcctcctcgcctctctcc

SEQ ID NO: 335509 - DNA, 122 bp, Homo sapiens
tagctgcgcaccatggccgggttgctggcgttgctgggtccggcaggcagggtgggcgcccgggtccggcctcgcgccacctggctcctgggcgccaccgccccctgcgccccgccgcccct

SEQ ID NO: 335510 - DNA, 122 bp, Homo sapiens
gctggacgagggcggcttgcgcccaccccctccgcgccccagacccctgccttgctcctgcgaaagtgccttctaggtgcttggtggtcagagacgggtcatctgtcgctaaggcgcaacct

SEQ ID NO: 335511 - DNA, 122 bp, Homo sapiens
gctatgatggaacgttcccctaggctgataatttctgccctaagttttaaaagaggtcagcgaatctcctttggattggcaggctgtcagatgttagagaagccgcttgcaaagtacaggca

SEQ ID NO: 335512 - DNA, 122 bp, Homo sapiens
agggtcggggtagaagaccccggagctcagaagggcgacaggaggagggcccttccctagcggccccgctccacccgtgcccttggcttcccgccgtccgctgtgcgctctcctgcgcctcg

SEQ ID NO: 335513 - DNA, 122 bp, Homo sapiens
gtggtgtctgtgcttcagcttatgagtcatacatgaaaccaagtgtttctaagggaggcacgcccatgttgctgtggacccaattattctgctaggtcaaacatgcaaatctgcaggtaaaa

SEQ ID NO: 335514 - DNA, 122 bp, Homo sapiens
cgtttgaccgtgttcacatccaaattaagaatgtgtaaaggaaacattccaggatagtgacgctagagatagcacctcccctagagacatcccagggaagtaaagataaagccttctctttt

SEQ ID NO: 335515 - DNA, 122 bp, Homo sapiens
tgctcagcttatgtgccacacactagactgatgttatgcatggataagctcttagatatccggctggttctgtgcccatccctctgcccccactgcagagaggccaataaaactcttgttca

SEQ ID NO: 335516 - DNA, 122 bp, Homo sapiens
gggcagccacttgggccagcatgttgcgcccttcagctttccgcccgcaggtggcagcagcgggctccgaagcctgtctctgcaggtagcagccgcttcacagctttcaggccggtgctcag

SEQ ID NO: 335517 - DNA, 122 bp, Homo sapiens
ttaattggtagaagattggtggactatgtaattacataataacaatggtaagtatggttccggtcgaatattaaattattcaagtaagttggtagtgttatttataccggctggtcaatatt

SEQ ID NO: 335518 - DNA, 122 bp, Homo sapiens
gttggatgaaggcagtggcacaaccgttcagaaaggcaggggcgggaggagaacgtgcctcgggcccagtcactagagggaagtgaagacagagaaggtgaggcagaaaagttggctcccca

SEQ ID NO: 335519 - DNA, 122 bp, Homo sapiens
gcactctagggctgtaggctgcgtccacacacaagggcatcaagcgtttctctgtgcatgcgcacacacacacacatctctctttttgcacactcaccgggcaggttctgattcagggcaaa

SEQ ID NO: 335520 - DNA, 122 bp, Homo sapiens
aacgcatcgaaaacaagcgccggaccgcgctgctgggagggggccaacgccgtattgacgcgcagcacaagcgagtgagtcctgaggggcctaagtgagtcccgcccctggcgtccgcgacc

SEQ ID NO: 335521 - DNA, 122 bp, Homo sapiens
ctccccagtgccgagacaatgaaggagacatcgctggggcggctctcctgtgtcaccaagcggcggcctcccctcagccacatgatcagcctcttcattaaagacaccaccaccagtgagcc

SEQ ID NO: 335522 - DNA, 122 bp, Homo sapiens
tgccgaggggcccgcggcgcccgggcaggcaggaccactgggcccacgcgtgcctctggacgggcctcccagccagcatgtgccgtgttgtgttcgcagaaagaagagcagagcctcaaaag

SEQ ID NO: 335523 - DNA, 122 bp, Homo sapiens
cagtagtatgtgtaaaatagaacactttttagaagctgagccgaccacttttattttactcgagtgcttttaaccccctgggatccccgggttgatatgctccaaacattttcagcttactt

SEQ ID NO: 335524 - DNA, 122 bp, Homo sapiens
ctgccccaaggccttctcctacccctccaagctggcagcccaccgcctcacgcacagcggcgcccgcccgcacccgtgcccacactgcccgaagtcctttggccaccgctccaagctggcgg

SEQ ID NO: 335525 - DNA, 122 bp, Homo sapiens
ctctggggatggcgctgcttggcagagcgcacacgcttgctattaatacctgaggcagcccgaacaggtcgggcaggtcgacagagatgctggggtgccaccttgtggcaaaaacaccaaat

SEQ ID NO: 335526 - DNA, 122 bp, Homo sapiens
tgaaggaaacagatgttcggtacacggacgacgccgactctcccatcaccaagctgccctcggttgcccaggagagccacagtgccttgagaacataagcaatttagtgaacagagttcttt

SEQ ID NO: 335527 - DNA, 122 bp, Homo sapiens
tcccattagttcttcatttttaatgcctttccaggtgccatgtcctttcaagcccactgccgcctttctggttctcgctatctggcactggatggcgtgagcggcctcctaccggttctctg

SEQ ID NO: 335528 - DNA, 122 bp, Homo sapiens
cctgtgactgagcctagaaagtccgctcggcaacagaggctgcaatccagaaagccccctcggtgacagaggctacaatctagaaagctcgctcagcgacagaggctaccacctagaaagcc

SEQ ID NO: 335529 - DNA, 122 bp, Homo sapiens
acccttgacccgggagaggcccaggagccgttacccggtttcattttcagccaaaatccccgcaggttggtcctggcgagggcggggctcggtgggcggggctggccgcgggggcggggcca

SEQ ID NO: 335530 - DNA, 122 bp, Homo sapiens
agccagaatgcaggaggctcgggcgtctgctctttgattagcagggccctgtctccagagcgactgtggtctctgtctgaccacatttccctttgttactactgaagcaaatatcaccctct

SEQ ID NO: 335531 - DNA, 122 bp, Homo sapiens
aaatcttactcacttttttcaaccaatgatgtagtacagacacagcctcactttccacaacgtcaatgtcctggaacaaattggcaagttggtgacctcagaaaacctagaaattcagctct

SEQ ID NO: 335532 - DNA, 122 bp, Homo sapiens
caccagcaccgacctgagccccgcccagacccctccagccggctttccctgtcctctgctcgtgtgccaataaagttattgaaattgacaccggttgctaaggaagtgggtcgccgagccag

SEQ ID NO: 335533 - DNA, 122 bp, Homo sapiens
cgcaggcgcgtttgctccgacgggccgaatgttttggggcagtgttttgagcgcggagaccgcgtgatactggatgcgcatgggcataccgtgctctgcggctgcttggcgttgcttcttcc

SEQ ID NO: 335534 - DNA, 122 bp, Homo sapiens
agtcacatcacaatattcagtggtgaaatcttgtttgttactgtcattcccattccttttcgtttagaatcagaataaagttgtatttcaaatatctaagcaagtgaactcatcccttgttt

SEQ ID NO: 335535 - DNA, 122 bp, Homo sapiens
gttagcatacacagcactcataactcaatccagtatatcacacaatcacaggaaataccgcgtgtcattacaacgtgcatgcttctgaggcagtccccctgcacaacacacatcgtggcata

SEQ ID NO: 335536 - DNA, 122 bp, Homo sapiens
ttccacctcaggccatcaggaagtgatatgattctcgtgaggagcgcgcagccgagatcccgcgcatgtgcaatccacaatagggttcgagcttctgtgagaatctgatgctgtggctgatc

SEQ ID NO: 335537 - DNA, 122 bp, Homo sapiens
cgaaataaaaataagcaccacgttaaaaagaggtcagcagggaagcacctgaaggctgttcgggtgatccgccgccgcctctattaggagcgacctccaccgccgagggaaatcacccaaac

SEQ ID NO: 335538 - DNA, 122 bp, Homo sapiens
acaatgtttaggtttaaacaattagaattaaggtatagagttacctacatatgctgtgttcgggttgtgctcatttgttggcacaagttgattctgcaaaggttatgtggcaaaagtttaat

SEQ ID NO: 335539 - DNA, 122 bp, Homo sapiens
gggcaggcgccggggacccccaccacgcgccgggcaccccgcgtcccgctctcttacggccgcgccctcacccacgtccgccgcgtccgccccacgctcgactctgcagccgccgggcccca

SEQ ID NO: 335540 - DNA, 122 bp, Homo sapiens
aagtggtgacagacggcacctagaaaattgggtcactcccacctgaatactacgcttttccgacgggcttaaaaaacggcacaccaggacattatatcccgcacctggcttggagggtccta

SEQ ID NO: 335541 - DNA, 122 bp, Homo sapiens
gtagataacagggagcacacatctaaagtatgtgtgcttaacatatgaacagtccgggtgcgatcacataacatgtgacactaacgtagaaaagcaagaggctatgggaggcaaaagaacat

SEQ ID NO: 335542 - DNA, 122 bp, Homo sapiens
acccacttccggccccaaacatggcctttccaggagccccgcccacttcctgcacatgcccgcctaagttcctgcctcggggaggtaacagcataactgtccgactcgtcgctcccaaagag

SEQ ID NO: 335543 - DNA, 122 bp, Homo sapiens
agccgggggaggagcgcggctgccgcgaggggcgagaggaggcagcaggccccgcggagccgggaggccccacagggaacccccctccacaaagactgccccgaaacattcatcggaactgg

SEQ ID NO: 335544 - DNA, 122 bp, Homo sapiens
cctccctgttacaaggggacctcaaaggggctgcacaggcaggcctcccagtctgggcttcgtgggtctttttcttggtgtcctcctgatggctggagaaacaggagagagggatgcagaga

SEQ ID NO: 335545 - DNA, 122 bp, Homo sapiens
acagccctgtcattaccattaactcctcagtcccatgaagttcactgagcgcctgtctcccggttacaggaaaactctgtgacagggaccacgtctgtcctgctctctgtggaatcccaggg

SEQ ID NO: 335546 - DNA, 122 bp, Homo sapiens
ggacaataactgtgcagctagcacggtgttctgctggccctgaagttagaatctcaccaacgattcagggagactgatttagggggttggctgggacacctaaagaaatcctttgaggacac

SEQ ID NO: 335547 - DNA, 122 bp, Homo sapiens
ccgggtgcgccctgtgcgggttgctgagagggcgcgggaggcggggtctccccggcgccccgcccccaccacctgggggagccctgccccgccccgccacctgggggagccccgcctccacg

SEQ ID NO: 335548 - DNA, 122 bp, Homo sapiens
gggatcatgtgcctccccgaagcctgcacatgcactctaatgatgcaagctaccaccaggcggtcagctttgccagctgacgtcccaaacagctggcatggggcatgcacacagtaggtgct

SEQ ID NO: 335549 - DNA, 122 bp, Homo sapiens
ctgaataagcacatagtttgctatgccgcgcatattcccactgcaatgaactgttaccaccgtttttagacagcctgttatttaggtcgacacagtaaaaacatgaattacgacaattatgt

SEQ ID NO: 335550 - DNA, 122 bp, Homo sapiens
ttcacatcgttatttcttcctttagctaaaactgcaatgtgaggtgacccaaagaaattccgggtaaaggaggaaagccctaaaattatcaattttgattacacattgtgacttgcccttag

SEQ ID NO: 335551 - DNA, 122 bp, Homo sapiens
actctcagaagtataatcattccatcgtaccaaaaaggaaagtggagctcggcgaggcttcgtaacatagagcaaaagttacatgacggatgggtgcaagccccttccaataatgtctatgg

SEQ ID NO: 335552 - DNA, 122 bp, Homo sapiens
gctgcaggctccatgaggacctggtcttagtcttggcggaaagccctctccatagccatccgtttcaattcaagcatcctgggtgacctttgagttggaaatctctctctctgctcatcctg

SEQ ID NO: 335553 - DNA, 122 bp, Homo sapiens
cctggttttaaacaatgtaaagcatttttaatttttactttttgtgagatatagattcttcgtgaattccagaggttctaaaaaactcataatgtggtgcagttctaatactctacccttgt

SEQ ID NO: 335554 - DNA, 122 bp, Homo sapiens
tttttgagaagatatcaatgttctgatagttccccagaagcgttctctctgagcgcattccgagaatggaaagaattcactgaagactcaggagatgagacccagaaaaacaattggtctaa

SEQ ID NO: 335555 - DNA, 122 bp, Homo sapiens
tttcaactctggacaattgcactctgggcggctttggttaaaggaggcgaagggtggaagcgacgggttgcacccacccccaagttagtctgatcagattaaactgccagaacgtatattca

SEQ ID NO: 335556 - DNA, 122 bp, Homo sapiens
cgaagaaggtgtgccgggggctggttggaggcgcgggcggcggggccaatgtggcggtgacgtcacggggcgggcggacgctggcgcgggtaggtaagagcagcggcgggcggtggcgctca

SEQ ID NO: 335557 - DNA, 122 bp, Homo sapiens
tctttatgaccccaattaagtaaaccctattaaggctcatcttcttatttcccctctctccgtttccctatttgaggaggggtaagtatcagaaagagagaacctgaactgaacaggaggaa

SEQ ID NO: 335558 - DNA, 122 bp, Homo sapiens
tccacatggctaatatgcaacaagagtccaagccaagacagatttggctttaaatctgtccgtccccgtcgtccttaagcactagacacactgtagtgggagggaggtgggttccctgtcat

SEQ ID NO: 335559 - DNA, 122 bp, Homo sapiens
accccatgccgggcctgcgagcgtcccctgggcctgcgtgcacccagaggctgtgtgttacgtgctgtgggcgattctctttaaagcagcaacaattacatgcaagtttgaatgaaaactgc

SEQ ID NO: 335560 - DNA, 122 bp, Homo sapiens
actcgcccgagctcacctgggtcacgaactccgcattgatttgggacaccgtaggggccacgatcttcttgggctgcgcaggggctgccatggcagcactcttccctccactccagtggaaa

SEQ ID NO: 335561 - DNA, 122 bp, Homo sapiens
gccacgctgcctggagggtcccagggtcaccgacgatgcaggggtgaaggtgaaggccagcgtggaggctgtgtagagaagcagccccgtcccacacccacccctgcctgcgaacttacggg

SEQ ID NO: 335562 - DNA, 122 bp, Homo sapiens
ggtgggtggatcatttgaggtcaggagttctagatcagcctggccaccgtggtgaaaaaccgcttctaataaaaatacaaacattagccgggtgtggtggcgcacgcctgtaatcccagcta

SEQ ID NO: 335563 - DNA, 122 bp, Homo sapiens
gcgcgttctcgcgcgcgctctctagtggcttcggagggcagagctgacagaacaagagggcggggttggcggcgacggaagtgaagtcacttccgggctggggtgtttgtttggactggaga

SEQ ID NO: 335564 - DNA, 122 bp, Homo sapiens
ggcggaggccggcggggcagctagcgcagtgaagtttggcggcggaggggccgggcgtcccggggtcgcgaggaggcggcggcggcgcggggaccggggccatgggggcgggcgcgggctgc

SEQ ID NO: 335565 - DNA, 122 bp, Homo sapiens
ttggggagatggttaaataagaaatacatttccagatgatgtcacatgtaaatagcactccgaaatcactaggcatcaaaattaatcaggctgaatccattgctttgtaaggtgtaaatcgc

SEQ ID NO: 335566 - DNA, 122 bp, Homo sapiens
cggcgaggagatggactcggccatggaggctgcgtggagcctgcttgggaaccgggatggcgtttgccttccaccatcaagttatttataaaatcaaaagtttcctccgaggccttggagat

SEQ ID NO: 335567 - DNA, 122 bp, Homo sapiens
cggccccaaaggccccgaagcccaccgcggcgcccctagcctgccccggcggcccagccgcggcccactggttacctggctttcgatgacacatttccgtcgcaaagttggagggtgggcat

SEQ ID NO: 335568 - DNA, 122 bp, Homo sapiens
ggggaaaggaattcattgtgaggggaacccaggaactcgggatccggcccaggggatctccgtgtgtgcccagctgaccccatgagaaggcaggtgtctgcagctcctccttgctctccagg

SEQ ID NO: 335569 - DNA, 122 bp, Homo sapiens
acataaacaaatggacatggccttgttccaggaggactttatttacatcgggctgcaggccggatttgaccagtcggccatggtttgcttacccctgctttagcttatggggggtgccccgc

SEQ ID NO: 335570 - DNA, 122 bp, Homo sapiens
atgagcagtgagacacacagacgctgtgggcctcctgatgtaacgcagcatgaaacatgccgccacctccatgggctcccgctataattctctgctggatcccaaggagaggtaacagcaga

SEQ ID NO: 335571 - DNA, 122 bp, Homo sapiens
actgtctgtgggcggctgctgtgatctcagcaaaaagcggagctcaaggctcagggactccgccgcccacactgtgccccgccttattttggatgcctccaacttcagcttcaggcacagta

SEQ ID NO: 335572 - DNA, 122 bp, Homo sapiens
caactctgcattatacctgcgagttaaaaagccaagggttcgctcactcaaccttgaatgcgcgtcagaatcacctgggggaggttttacaaaatacccgtgctccacccaagacaatgaaa

SEQ ID NO: 335573 - DNA, 122 bp, Homo sapiens
ggcagcgcgcggatcacgcgggaaggctgcccttggcctcccgggaaacagccaaggttccgccgccctccttggcgctctgccccggccggcctgccgggatctcctccccggcgcggtct

SEQ ID NO: 335574 - DNA, 122 bp, Homo sapiens
gtcgcccaaaactcagtggggagacacacttccattctccccgctctgtcgatgaggaaacgtcatgagcgtaagacacttggagcgttaagacacttgctcaagaacgcagctgccgttca

SEQ ID NO: 335575 - DNA, 122 bp, Homo sapiens
gggcaaagctctccatttatgcctttagctttcaccatttggcaagtcggagcctaataacgccaatgatcaaattaaagtgctctttttcttctttcttttctgcaaatactttaattggc

SEQ ID NO: 335576 - DNA, 122 bp, Homo sapiens
agagtcagactgctgtggccaccaagcccagaagcaggtaggagaggccgctgctatggacgcagaagcctcttcagtctgactctgctaagagcagtggtccccagtgtcttttttctaac

SEQ ID NO: 335577 - DNA, 122 bp, Homo sapiens
tcgctacccccagccccccatttccagcactaaaatggatggagggctcagtgcaaggggcgtcgagaaggcgagccaggttcgcttcggggtgctccctcccctgcccccgccccggcccg

SEQ ID NO: 335578 - DNA, 122 bp, Homo sapiens
gtgagccgtaatcgtaccacttcactccagcctgggtgacagagtgagattctgtgtcaacgaaaaaaaaaagagaaaaaaaagattttgtgggccttcagggaagtgaaatctattagctt

SEQ ID NO: 335579 - DNA, 122 bp, Homo sapiens
gcctggaagtctggtaggcacacagtctgcaccagacagccatgaaggcctagaaagtggcgaggagatggtgaagaagggagaccaggtgcagggaggcagccggggcccagcccttacag

SEQ ID NO: 335580 - DNA, 122 bp, Homo sapiens
ccaggacgccctccctactgggcctggtggaggattgggtgggccttcactcctgctccacgcccccgcagttactctgccgattgtgacgtcagctgacgctgggggcgggtgggggaatc

SEQ ID NO: 335581 - DNA, 122 bp, Homo sapiens
tgataactcacagctcaaattttacagtgctttacactcctctctcctcagtgctcaaggcgctgcctggtaagaagctaaacatttaaggaggcacattaactctttggagccattggctt

SEQ ID NO: 335582 - DNA, 122 bp, Homo sapiens
agcctaaaccctgagctggggttcatcggagaaactccctgcgatgagccactagggtcacggacagggaactttttgatgagcgccgagtggctggaaagtccttccgaccaggccccctc

SEQ ID NO: 335583 - DNA, 122 bp, Homo sapiens
ccaaatggatttggggtccctctgagccagttagttctgagctacaaccgagctatatcacgtctgcagactatactgtggccaggtcagacctgctcaagggtttctgaattaggtgcctc

SEQ ID NO: 335584 - DNA, 122 bp, Homo sapiens
cagggcctcggaagccctctacacacacacactggcctgcccggcacagttcccggggcccgcagcctccagggcaggcgctggctggaggctcttcctgcccgcagtcctcaccgccatag

SEQ ID NO: 335585 - DNA, 122 bp, Homo sapiens
ttctttgtctggttaatcgcgtgcgtctccagtctgtggctggccagccgcgtccacctgcgtgctccgggcacccaaggtgcttggttaatatgcagctctctcaacatctcccccttagg

SEQ ID NO: 335586 - DNA, 122 bp, Homo sapiens
atgcttcaagttaccgtggtaatttggctgtgctttatcatcgctggggacacctagactcggccaagaaacgctatgaagtctccttgcagcttcaccccacggcatcaggaactaaggag

SEQ ID NO: 335587 - DNA, 122 bp, Homo sapiens
ggagagtggcaggacccccgcaggcatgtctgctcatgctctcccaagggagggagggagcgtaattccagggagggtttaaacatggagccatggaaacaaagtgtatttcatgttgcctg

SEQ ID NO: 335588 - DNA, 122 bp, Homo sapiens
actctcttcgaaaatggggataatgatgcccgtctgtccagggtgctgatgggaatccatcgcagaggcagagtgtaaagcaaatgggtgggtgttatcaagtataagactgtgcataatac

SEQ ID NO: 335589 - DNA, 122 bp, Homo sapiens
tacagaagcaggagcttgctgactttctcatataaataatgaaatgttgatagagctcctcgtgctggccaagactttagaccactgtcctgcttctatctggagaaggatgaagtcagtgc

SEQ ID NO: 335590 - DNA, 122 bp, Homo sapiens
tgccatgtaggcgattttagatgagcctttgcaccaaccctgtgaggcagatctcaggaccgtggggccagttccacacacgaggaagtggaagctctgagaggtgccttggccagagctaa

SEQ ID NO: 335591 - DNA, 122 bp, Homo sapiens
aacctttacaaaaggatcaacagctcagcctggcatcagggactctgagtgatgaataggcgttgggcagttaggaagcccaggcccttcctaactagtaggatttgggatgtcaaaggaag

SEQ ID NO: 335592 - DNA, 122 bp, Homo sapiens
gcaaagagcccctgccctctttggtctttggattacccatcccctcaggcactgcgtccgcgcataatggacagtcaccagatggtgaatgctggaaacgcatcggtgtttttgaaagtgaa

SEQ ID NO: 335593 - DNA, 122 bp, Homo sapiens
gtcaaagaaaggggtgacagacggcacctggaaaatcgggtcactcccacccaaatactgcgcttttccgacgggcttaaaaaatggcgcgccacgagattatatcctgcacctggctcgga

SEQ ID NO: 335594 - DNA, 122 bp, Homo sapiens
catactggacagcacaggtgtatataggccttaatagacccaatactgcctcatttccttcgcttgccatgaaggcttcttggggagtactgtgaactcaatgactcatcctcctttgcatt

SEQ ID NO: 335595 - DNA, 122 bp, Homo sapiens
ttggacctgggggtcctgcatggcggcctcaggcgtgcccgacgcttcccttctgaaaagcggggagattttcctggaggagtgatttcctgaagagccatggccggaagccctgaactttc

SEQ ID NO: 335596 - DNA, 122 bp, Homo sapiens
aagaaggtgaatgaggttcacgaatctagagtctgaaggatttggcccggaactagagggcgggacacataccaaatttgaggagaccagctgtggttagtgatgtggcatgggaccggagg

SEQ ID NO: 335597 - DNA, 122 bp, Homo sapiens
ggtggggttttaaacgttatccaatcagcgacgctaggctgggaaccgtccaatcaggcacgcagctggagcggacaggacggcttccgggatgtggcggggcctttgtctctcgccgcagc

SEQ ID NO: 335598 - DNA, 122 bp, Homo sapiens
cacctgcgacggctgggcggtggccatggcgggcagcgcaagtgcaggcgagcacacgggcgaagtcggtgcggtagcgagggcagcagctgaggtgacaagaatggcggatagtgaaaggc

SEQ ID NO: 335599 - DNA, 122 bp, Homo sapiens
cagggtccaactaatggcagagcccctcttggttccttcaaacaagaaaagcaatacctacggactggtgtacacttccatccttggttataacaggaatgttatcaagctgtcagaacagg

SEQ ID NO: 335600 - DNA, 122 bp, Homo sapiens
tgcagatggctcacatcatcacaggcacagtgtcaggcctcactcaaggatagttttttccgacatcagggtatttcccctgcgagggaagcaaggactgccacaggtgtgaaggttgttta

SEQ ID NO: 335601 - DNA, 122 bp, Homo sapiens
tttatcagcatggaaaaaaatctctgaagttttgatttcttccaaaactacttacacattcgacaccaaaaaaacttaagaactcaaagtaggaatgacatataatatgtcactgattttaa

SEQ ID NO: 335602 - DNA, 122 bp, Homo sapiens
gacacccaaggcctgacgaaggttggtgccaagggatagcacctgtcaaggtgccctcagcggtggaaaggagggcccgctccactcagaagagaggcacgctgggccccaccatccatatg

SEQ ID NO: 335603 - DNA, 122 bp, Homo sapiens
tcgtgcgcccgctccctcctccttccctccctcccgcggggcttcggcggcggcgctcagcgcaggcaggtccccctgctgccgggtcccatttgttgccggctctgactcggggcggccgc

SEQ ID NO: 335604 - DNA, 122 bp, Homo sapiens
tcatggttagttttagtccctttgacccccatgcaggccaccactgttgcctgagaccatcgtgaccctgaaaggatgcaacgccaggcacacggcccattgctgccatgatgtcatggcca

SEQ ID NO: 335605 - DNA, 122 bp, Homo sapiens
ctttgaaggacccccagtaatcagccaggtcttacctgatcatcctatagtgaagccccccgacacagtatttccattcatagtttagctcttaaatgtgaattagctatccagcaatcacc

SEQ ID NO: 335606 - DNA, 122 bp, Homo sapiens
atgacaatggcggttttgcggaatagaaaagggggaaaggtggggaaaagattgagaaatcggatggttgctgtgtctgtgttgaaagaagtagacgtgggagacttttcattttgttctgt

SEQ ID NO: 335607 - DNA, 122 bp, Homo sapiens
gcccgtgctggctggggtccgagacccggtttcctccgtgacccagcaagtgtcgagacgcgcccagggacaggagctggacttggagtccactaggggcaatctcccgcccttcccgctgc

SEQ ID NO: 335608 - DNA, 122 bp, Homo sapiens
gggctgaagaggggtcggggcgctgcagagtcagccaagtagccaaggaagggccccctccgcgtcgcgacggccctcgccccccgcccggcgcgcgcgcgcacaaatacacacacacagtc

SEQ ID NO: 335609 - DNA, 122 bp, Homo sapiens
gtttattgcactatttacaatagctaagctttggaatcaacttaagggtctgtcaacagacgaatgaagaaaatgtggtacatatataatggagtactactcagccataaaaaagaataaga

SEQ ID NO: 335610 - DNA, 122 bp, Homo sapiens
ggagaagggcgttctggacgagggcgtcctggaggcatggggctgctgcagacgttggtgcggcggggggtgagcgttgagaaggcgcaggagactgaccacaatggctagaccggccttaa

SEQ ID NO: 335611 - DNA, 122 bp, Homo sapiens
tgacccaggccggcaggtagccaggggctctctgcctgggaggacaccttcggcggctggcgtggggaaaggggccgcccggccggggatgccccgccaggaggagggagcggccggggccg

SEQ ID NO: 335612 - DNA, 122 bp, Homo sapiens
aatgtctctgccgctacacctccggctcccgggctcacacaccggacgattgcctcgcgccgcggagcgcgaatggaatgtccctttccgaccaccacaccgacctcccctcccggcgcccg

SEQ ID NO: 335613 - DNA, 122 bp, Homo sapiens
gggcgaggactcagaccctctgtaagggccagcaggggatctttctgaagctgacctcctcgctggctcacaccacggcccgtcaaagctcgaaccttctgaactgggctgtttcttcttct

SEQ ID NO: 335614 - DNA, 122 bp, Homo sapiens
tggtaagagatggaatttgagaccatgggtcgtgctatggcacaggcagatggtacgagacggaatttgagagtacgggtcccgctatggcacaggcagatggtacgagacggaatttgagg

SEQ ID NO: 335615 - DNA, 122 bp, Homo sapiens
ctgaaacgactcggcttgcaagcaaaaagttattccaatgcaaactatacctgatattttcgtgaaacttagaaactaaacctaaaactcgactcccatcgcaatctattactaccacttct

SEQ ID NO: 335616 - DNA, 122 bp, Homo sapiens
aagctgcaggagagaaggaaaggcttcagatgatgcccacagtgagagggaagggaaagacgggaagcccatgaccaggaacccagacccccgagagaggttcacgttacctgatatcactg

SEQ ID NO: 335617 - DNA, 122 bp, Homo sapiens
ctcagcccctctgccatccgcctgcaccgcccaagaaagcacccagaacgcggctgagctcgccagctcctcgcaggcagggagagagcatcctggggggcagcttccccctccagcccgcg

SEQ ID NO: 335618 - DNA, 122 bp, Homo sapiens
tccttcctcctcggcctcccaaggtgctgagattacaggtgtgagccactacacaagacccgagaagggctttttcaagagggaaaagcacttgcaaaagtgcagaggaagagcatagaaca

SEQ ID NO: 335619 - DNA, 122 bp, Homo sapiens
ctgatttttcgtaagtcaggtttctaagtgagctccctgaggtgccaaggccatggtgtccgccctgctgcgtctgttcgtcagctgagttccttgtgaatctctgttttagggtttggggc

SEQ ID NO: 335620 - DNA, 122 bp, Homo sapiens
tcttcttcccgctgataccaatcctgctgcggtctggttgtggtatacagggagttccggcgggcccaggtcccctctcctcctgcagccctgggcccgggctccgctgcgtctggcgctgc

SEQ ID NO: 335621 - DNA, 122 bp, Homo sapiens
cggcccgccagtttcctcccaggacagtgctgctgcccccggtgggccttcctagccccacgtcagtacggccagccccgaaggtccctgctgagccaggccagccgccccggcggtcgctg

SEQ ID NO: 335622 - DNA, 122 bp, Homo sapiens
tcctgagagccctgttgaggagtgcgcaccccacccattcccggaaagagcagaccctagcgagcgcttcctgcgagccgtgcgctctgcctctgttggtagtgaatcttcccagcaactcc

SEQ ID NO: 335623 - DNA, 122 bp, Homo sapiens
catggtcttgttcgacacagtgacatactgcttacttattgcaactatgcaaatcatgggcgctcaataaatttttgttgaaaagcacagaagtaagaagagaggagaaagagaaatagaga

SEQ ID NO: 335624 - DNA, 122 bp, Homo sapiens
aaaatgactcagtaagttcagcgcgcccgctccggccggccctgcgcctcccgccgcgcccgggatgtattcgtccccgctctgcctcacccaggtacggtcctcgcccggccccccgccgg

SEQ ID NO: 335625 - DNA, 122 bp, Homo sapiens
ttaactcctttgcgttcctcacacatgctcaggtcttccagtctgcactgctgcaggtggcggtccctatgcctggaatcctctcctccatttctgcctgaccagctgtttcccatccttta

SEQ ID NO: 335626 - DNA, 122 bp, Homo sapiens
tggaatttcatatttcttcttgttggatgactaaaccggatgatggtagagatggtaagccggcatttactcagccccgccctgctcagcctcgggagcagacgaattctcagctggtggat

SEQ ID NO: 335627 - DNA, 122 bp, Homo sapiens
agaggacaggaaagcagatggggtttggaagaacgatctacaccctctggatgctgctgccgccatccccgcccgccctcagcaacctgtgcggaagcggagttgtccagacttgccggggc

SEQ ID NO: 335628 - DNA, 122 bp, Homo sapiens
atacaacacagcaaaggcacagtgacctggactcttgctcgtcatcctaacatcctgatccgctggacaaaacatgaacacactttctccccagtgaggttgttgggaaaaatttaatcagc

SEQ ID NO: 335629 - DNA, 122 bp, Homo sapiens
tctcacttcctgccccagcatgtctctgatgtgggagtcagcttggcattcacaactgtgcgatttgtaagtgtgaagtagttaatgcccaagggcattaaccttcgatcaaagaggacagg

SEQ ID NO: 335630 - DNA, 122 bp, Homo sapiens
cttgcttgcagatgggggtcttcctggtggcctaatgcttggtgtggcaggcaggggccccgtctcctgagaatatgctccttttgcccaagcaacgttcttccttcttcacagtctctgcc

SEQ ID NO: 335631 - DNA, 122 bp, Homo sapiens
ctgttctcccattctggcaagccggagggcacccaggtttgcatggccagcctgtaggcccggggctccgtaaggtgggtgagagtgtgataggctaagtgcagctgcttcttttgctagga

SEQ ID NO: 335632 - DNA, 122 bp, Homo sapiens
ggagcttctgcggcagctcgcctccctatctacgcggaagagaccagggcaccgtttacacgagaaaaacctcaattttgctgtctttggttcaggcaaggagcgcaaatctgagactgcag

SEQ ID NO: 335633 - DNA, 122 bp, Homo sapiens
atcccatagtgcttggccttggatcttcccaggaagcatgagacccagccaagctgaggacgaggctcagactctggcaggcgcatggtgaccccttcctgaggacttccagagggatgggt

SEQ ID NO: 335634 - DNA, 122 bp, Homo sapiens
tgggcagggggagacagggagcgtgccctcagccgggtgcccacagactcagaccccgggcgctggagagagggaagactccgtgggcccccacccacaggaacagctcccagctctcctcc

SEQ ID NO: 335635 - DNA, 122 bp, Homo sapiens
atccgacccgggccgggaaagcggctccctcggggaggccaagcctttggcttccgacaccgccaacctctgcctaccgccccctccagccgaactgccgggccaccagccaggcctgtccc

SEQ ID NO: 335636 - DNA, 122 bp, Homo sapiens
gcatcggaaagggcggctggaggctcccggagcgggctcagcctgggagcccagcgactacgctctgaaatcccgggctccattccatattttttggcgtttttagaagatggtcacggccc

SEQ ID NO: 335637 - DNA, 122 bp, Homo sapiens
ccagaggcagagaagatattactggcaataacgtgaacacgctgtgtgaccatcgtggatcgtcgtatccagggggggagggggggtgatatgactccccgcaacgccggtggcgcccgccc

SEQ ID NO: 335638 - DNA, 122 bp, Homo sapiens
aaaggaagaaatcattttcacaggagctgaaagcattaagagtaagaatccctaagcacacgcctatcttaaagatctcctgcccgttcctctccaaacccggtaatcctaaagagaaggaa

SEQ ID NO: 335639 - DNA, 122 bp, Homo sapiens
tcaggcagggttgagcagcgtacttgctgtttctaggaagtatttctggtccacgtgcctcgctcccatcctccctcccagtcataaccagccccacgttactcagcagcaggagagaagtc

SEQ ID NO: 335640 - DNA, 122 bp, Homo sapiens
gtgtttggagctgagctcctcacagcagcttctttcagctatcttataggaatagtgttccgtggggcaagaaatacattggttctaactgattttcaatcccctttctccagtggaataaa

SEQ ID NO: 335641 - DNA, 122 bp, Homo sapiens
cctccccctccagccacctgctcctcacactcacctctacacactggcaccctcccgaaccgctacgcggggccctgcgtcccccacactcccagctgaagaacaccacagccccacaccta

SEQ ID NO: 335642 - DNA, 122 bp, Homo sapiens
agagagccactaagggtcagggaacaaatggagagctcagtttcccaacaggtctgaccccggatgagattatggctcaaagctgagttacctaaccggtctagccacctgaatctcacctg

SEQ ID NO: 335643 - DNA, 122 bp, Homo sapiens
ttaactctttccaccaattgccaatcagaaaatctttcgatctacttataacctggaagtcgtccacttccccaaccccattccagttgtccagcctttccagatcaaaccactgtacatgt

SEQ ID NO: 335644 - DNA, 122 bp, Homo sapiens
ttttaaataccaatttgtcaagaaaggtaactccatcccatccaacaacagacttgagcacgccaagtatcgctcatttttcttaatttgctctaagtttcttaataaactgagtgtttcca

SEQ ID NO: 335645 - DNA, 122 bp, Homo sapiens
gagctttgttctgagggcagtggggaaccacaaaaactctcaggcaggaaaggggcaaaacgggtctgagatttataataatcccactgttccatgtttgcagagaaggggctggaggagcc

SEQ ID NO: 335646 - DNA, 122 bp, Homo sapiens
gatgcagggtcttgtggcaagatgcagacacaaccggactaataactaggttgctcaccacgggaggcctctaggtgaaagctctgaatttgtagcagacacacccacctcgtatagatcct

SEQ ID NO: 335647 - DNA, 122 bp, Homo sapiens
ccgctgctagccgacagtggtctccagcgttcagggagcatgggcctcaggggccagcctcgactcaccccagctgtgtcacccacacaccgtgtgactttggacaggttcccctcccactc

SEQ ID NO: 335648 - DNA, 122 bp, Homo sapiens
aggccgagatctgtccagctgcggtgagaggaacgctgaatcgccgaagagaattggctgcgcttccttgtttgtgagctagaattaggtagcaaacagctcgctgtctctgtctcttcgct

SEQ ID NO: 335649 - DNA, 122 bp, Homo sapiens
gcccggcgctgttggggaaccgcgccgaatagctgagctccaagttcggggctgaaggcccggaggacagggcagagggctccctgcctacagggttttcttttccatatttgagaaatgtt

SEQ ID NO: 335650 - DNA, 122 bp, Homo sapiens
gaaggcctggctgcttccatgtgatttctgactcaggggcttacccatattttcctcttccggttaaggcaaaacataatttttccatcgctcaccttcctggttgcctgtagcactaactg

SEQ ID NO: 335651 - DNA, 122 bp, Homo sapiens
tgggaaaccagagagtcggagggagtccatctggagcggccaagtaggtcggggaagggccgcgcctgacgtctggccgcaggtagccacgttccctccgcccccggtgcagcttcagggct

SEQ ID NO: 335652 - DNA, 122 bp, Homo sapiens
accttgattcacaccacacaaaaagccccaactaagaatacttctactcagaattcaagccgactgtcctagaaagtgcatcaccaataggtgaatatattttttaagagagaaaaaaacaa

SEQ ID NO: 335653 - DNA, 122 bp, Homo sapiens
agcgggtggggtcgggaggagctcggggaccagaaaacgctctgtttgggtgggtgcgtgcgtgggcatagtggtttggaaggagcgtgatgaggggagaagggccggggcggggctgcgag

SEQ ID NO: 335654 - DNA, 122 bp, Homo sapiens
gacttgggggcaccttgagtgggcggagggcaatcaaagtgataggaagtgatgtcccagcgccactaaagccaagacaccacctaactgctcacagcgaccatggacataaaagcagctgg

SEQ ID NO: 335655 - DNA, 122 bp, Homo sapiens
gataggtagggctttaacagtctgagacaggaggagaaggtcattgtagctggccattatcgttgtcactgtaaggatgtggctttgcagtagcactttattcacacatttcacaggggcca

SEQ ID NO: 335656 - DNA, 122 bp, Homo sapiens
taagctctccaaatgatgagttctagtaaactctgatttttgcctctggatagtagatctcgagcgtttatctcgggctttaatttgctaaagctgtgcacatatgtaaaaaaaaaaaaaaa

SEQ ID NO: 335657 - DNA, 122 bp, Homo sapiens
cacatccacctccagctcctctgcgcggggaggggtccggtcagaagacctggctcgccccgagggccacacaacccctcagcctcggggcactcaccttggtctgagtctgagcgctcaga

SEQ ID NO: 335658 - DNA, 122 bp, Homo sapiens
tccaggcgtaaaggagcaggtgactctgcggccgcagcactcgctttatttcgccagagtcgcggggcgtccagaaggggcccctggactccggcgcggggccggctcagtcccgccccttg

SEQ ID NO: 335659 - DNA, 122 bp, Homo sapiens
ccatttgtgagagctgaggaaatgtgaagactgacaggatatttgatggtattaagaaatcggtaagtttttttaggtgtgaaaacagtagtgtaatgatgttgaacgacaaaaagaggcct

SEQ ID NO: 335660 - DNA, 122 bp, Homo sapiens
aggctcactgcctctcgctgagccactcccagaaagttcacccttttctggatcccaagtcgagtcccttgtgtcatctctcattcatcctagctcttcttgttggcctaggtgtgaactcc

SEQ ID NO: 335661 - DNA, 122 bp, Homo sapiens
ttgcttgaaatatggctgagtttaaaaacttgaattgattattaaaatacattaagtagacgacactcatgcatgacaactacaggaggtgttaataggaataattgaagttagggagctct

SEQ ID NO: 335662 - DNA, 122 bp, Homo sapiens
aacggccctgccgccggccgcagcccaggctatataaggaattacacgtacatttcggaccgaggggctcgctttggttcctgcgttatttttaaaacgacttttaagagaggggcaataaa

SEQ ID NO: 335663 - DNA, 122 bp, Homo sapiens
tgttgctgccgcagccacagccagggccgctgtggttgaggaggagacagaggagaccgacgttgttaggaaaatgatctctatgatcttgaagatgtttctgcacagaaatgagggaaata

SEQ ID NO: 335664 - DNA, 122 bp, Homo sapiens
aagacattttaatttcattctaagaataatggggagcaattaaataattgtaagaaaagccgtgatatgattagagtagaatcaacatttagaaagccataactacaaaatgtagaatagat

SEQ ID NO: 335665 - DNA, 122 bp, Homo sapiens
gatctagaatggtatgaattctcatacttgcccagaccaggcgtttcagatgagggattgcggacctgagtgaactgcgcaggtgcagccacctgggaggcttaactaagtcgtcaaatgtt

SEQ ID NO: 335666 - DNA, 122 bp, Homo sapiens
agccccttatggccccctccccgggcccgcccctcaccaggggcccctgggtctggacgccgcctgcaaccccgatcccacaggcgccgccgtgccctaagccctggcctgtatctagtgcc

SEQ ID NO: 335667 - DNA, 122 bp, Homo sapiens
atacacgaggtaaataatgagggcgtttgggctcaccagcattttcctgtggtcatttgacggtatcacttcggctgcgaacatgcctgaaccagctaagtcagctcccgccccgaagaagg

SEQ ID NO: 335668 - DNA, 122 bp, Homo sapiens
agattttccccagcaacaatctggagctcagatttgaggatgagacagatcccgggggcacggagaagtgaaaatcttccgagcaggcgataagaaaatcgggttttcacatccgccacgcc

SEQ ID NO: 335669 - DNA, 122 bp, Homo sapiens
gaacctggccaggcggacagaacggcccctgcgcatttgcaggggtcctggtgggcttgccgggcagagggcgtgcgggtctcagcaagctgccgggtccgcccaggccccgccccatgccc

SEQ ID NO: 335670 - DNA, 122 bp, Homo sapiens
tgcccagccccactcgccgcagccaggtagcccctccacccttcctgcccggaagtcctgcgcgctccacccaaggacaggtgggttagccagggcacgcccacttccgtctcattagccta

SEQ ID NO: 335671 - DNA, 122 bp, Homo sapiens
gcagcaaaatcacctggcagcatggtcagtgctcgcagagagcagtggatcctggtggcacgtggctgactggggacttcagctttctgctgcagagaggagcctgggaaaagaccaaaatc

SEQ ID NO: 335672 - DNA, 122 bp, Homo sapiens
ttggagtcgggggctctgggtgaggtcctgattctgacctctgagggacctcgggctgctcggcctggtctcccacctgtagacggggacacctgtgcctccctgcagatgccggctgcaaa

SEQ ID NO: 335673 - DNA, 122 bp, Homo sapiens
cactgcagcggcagccacgacagtggcaggagtgttgatgatgactatgaggctgaccaccgtgacagtcacagtggaggcacggttagcactgagctcctgatggggagggcactgtccct

SEQ ID NO: 335674 - DNA, 122 bp, Homo sapiens
gtcagacacctgaggaggccacatctagctatgtctagacccattgaactttcaagtcttcgaggcttggtactgcctgatccctgttcccctctgatccttaaggtcagagagcaaagcct

SEQ ID NO: 335675 - DNA, 122 bp, Homo sapiens
gggtctgcccagcccccgcctccgctgctccgggccacgggggtcttcccgccctcgctccgcttcccgggctccgcagcaggggctcccttgggccccgacttcttccggctcttcacctc

SEQ ID NO: 335676 - DNA, 122 bp, Homo sapiens
ggagctttattgatcctggccccagaccattcagaaaaggcactaattcaattacagctgcgtgaaatccttcagaggcagcctaaggagactgattttgattctccttttctgtgtcagtg

SEQ ID NO: 335677 - DNA, 122 bp, Homo sapiens
ttcaggctggcatctgtgtcttttccatccatgtttcctggcattttcttactttgcagacgcacgcacacacacatttcatctgcagattcttctacctatttgtattgggaaccctgcat

SEQ ID NO: 335678 - DNA, 122 bp, Homo sapiens
tagtgattcctctgactgatctgggtaaagtaaattgaaaacctcctggaaaaaattcaccgttctagatgccattgagaacacttgcgattcatggagggaggtcaaaatagcaacattca

SEQ ID NO: 335679 - DNA, 122 bp, Homo sapiens
gttaaacggggaattctattgacgtattataaacttgggaaatgtattacattcagtctccgacaaaaaggcggggatacggaagccaaaaagtggcgaccgtcttctcgggaaaccccggg

SEQ ID NO: 335680 - DNA, 122 bp, Homo sapiens
gggcctctgtgctaccgctctcgtcagctacttgattcgcctacacaatgaaattgtctacgccgtggaaaaactctccaaggaaaacaacaggtttgtgcacgagccaccaggaagtggtg

SEQ ID NO: 335681 - DNA, 122 bp, Homo sapiens
attaagggtattagggacaatgctagggttcaatgaaagtgttcttcctgcggaggatgccggagcagagttctgggtaagtaagattttgccaggcaacacaaggtagaaagggagtttca

SEQ ID NO: 335682 - DNA, 122 bp, Homo sapiens
ctgccgctgccgaagctgctgtaggcctgatcgtcgtaggtgtcgaagtccgccatttgccgtctccgctccgagaggaacccctttttattttttaataaagcaaaaggcagttgtccctt

SEQ ID NO: 335683 - DNA, 122 bp, Homo sapiens
ttccagcccccaatctcagagcggagccgacagagagcagggaaccggcatggccaaagccgcggcgatcggcatcgacctgggcaccacctactcctgcgtgggggtgttccaacacggca

SEQ ID NO: 335684 - DNA, 122 bp, Homo sapiens
ggagcagcggactcgctgagacccccggacaccccagactccgcagaagcccgccctgcacgcttgaaccccaggcgccgggacagcccctggcgcccccccgggcccccacaccgcgtgac

SEQ ID NO: 335685 - DNA, 122 bp, Homo sapiens
gaaggggcagcccgtgtgtccgcgtgtgtgttcgtgcccatgctcgtgtctcctgtgtgtcggtgccatgtgcacacgggggcccagttcctcgtgcacacatgtgcagccatccttgtgca

SEQ ID NO: 335686 - DNA, 122 bp, Homo sapiens
tgtttaaaattaacaaataaaaatggtatctattctcacgcgtgctgagcgctttctgtgcgcattggacctttccgaattaccctgcgaactttctccccatattacagatggggaaacag

SEQ ID NO: 335687 - DNA, 122 bp, Homo sapiens
tctcatagcggtggtgttggtgcctgtgctggccaaggcctcccgtgaatcgtctcatagcggtggtgttggtggaacccttgacttgttcctagtctcaaaaagcaagtgttccgggttca

SEQ ID NO: 335688 - DNA, 122 bp, Homo sapiens
ccccagttggcgctccccgaccagcaaaagccccttccctggtccacgatcccgaccacccggttctccaggagacaatactccaattctctggaaagtggaagaaaccaagctgaagctag

SEQ ID NO: 335689 - DNA, 122 bp, Homo sapiens
ggccgctcatttccgggctcggctttgcaaggtgggtggtaagggggctacgggatcgagcggggaaggctttggtattctcccgtggttgctgtagggtgtttctagcccttggaaaattt

SEQ ID NO: 335690 - DNA, 122 bp, Homo sapiens
gggccgagtcctcgaaagaggccttgaggcgacgggagacccgggatcgaagtcagctgccggagggagagccccccatgccggctcgagagctcgggtttcggtggtggagaacgtagtac

SEQ ID NO: 335691 - DNA, 122 bp, Homo sapiens
caccgtgcccaggagcgagcgaggacgtcgagtaaccgtggtcgccaggctgggcgggggcgtccacctcgctgctacctgggcccaccttggggtttttccctcccgtccatccggggtgc

SEQ ID NO: 335692 - DNA, 122 bp, Homo sapiens
cctctctctgagcctccgttgccttctctgcaaaatgagtacaggctgaacaaatgctggcgagaatacaaagcacctagaactctaatccacagttggccggagtgtagacccattcactc

SEQ ID NO: 335693 - DNA, 122 bp, Homo sapiens
ttcgagcgccctgctttgtggtgctttgctgtggcagccatgagagactaacacgggggccggtgctgccgggaggacgtcgggaatttcatattcacgttttagacacaggactccctgct

SEQ ID NO: 335694 - DNA, 122 bp, Homo sapiens
ctagtccagttggccatccctttcaccctagcatctcgtcaacacaataagagagataatcggaaaaaaagaagtgcccctcacaggtcttttgactcacatgtatatatagatgctattgg

SEQ ID NO: 335695 - DNA, 122 bp, Homo sapiens
atgccagggccaggaccaagcccgcccgcccgccctcccacccagctcctcacgcactcccgtgcgagctaatatagattccactttaactagtgtcacctgtgcaaggggtaagtgcccag

SEQ ID NO: 335696 - DNA, 122 bp, Homo sapiens
tcacgcaggctggagtgcagtggcgcgatcttgactcactgcaacctccgctccactccgcgccaccgcacccaacccgggtgcaagtgattctcctgcctaagcctcccaagtagctggga

SEQ ID NO: 335697 - DNA, 122 bp, Homo sapiens
ccgcccgcccgaggcctgtgaggagctgcgcctggcgcttgtgcagctgctgggcctggccgtggacctgtgcggcgccgcgctcgcgccccacctggacgacgctctgcgcgcgctgcgct

SEQ ID NO: 335698 - DNA, 122 bp, Homo sapiens
aggaggctgtcctcttcacctgctaactccatgtatgagtggtggtcacaagagaggaagcgggcagcagaaatcctcagctcccacagaaatgaatacattttccaaaataaagtcaagcc

SEQ ID NO: 335699 - DNA, 122 bp, Homo sapiens
ttctgaattggctataagctgattacatattagaggtttatttttatgattctatataaacgtgcacgagtaatttaaaacctgcattgggattgattggaatattgtcctaaattaattaa

SEQ ID NO: 335700 - DNA, 122 bp, Homo sapiens
ctgccttgatggtagggacgtccctcctccagcgtcaccctcccaggacggtgagctgtgcgggtgaattcacacacctgccttggtggtagggacgacctagatggaatcggagggcattg

SEQ ID NO: 335701 - DNA, 122 bp, Homo sapiens
agcttctctccccgctcctcctccacaccctagctcatctctggctcactccctgtcccccgtctcccccggggctcccacagacatgatgcaaccaggccggagccaagccagctcagagg

SEQ ID NO: 335702 - DNA, 122 bp, Homo sapiens
gctgggaaaggctggtgggcggaacagccagaacacacaacgttcatagatgaaggttgccgggtccggtctgtggtgcccaaaacaatgacaatgctaacatggaggatcgctgatcacag

SEQ ID NO: 335703 - DNA, 122 bp, Homo sapiens
ttcccatccctcctgacctttccctctaggtttacttcctatgaggcagctccagagcctcggaggggcggctggaggtcgagggcgcgtggggggcctggagggtgcaggggacgccgagg

SEQ ID NO: 335704 - DNA, 122 bp, Homo sapiens
tgacttagccttaccaccaggtggcgacacgaacacacccaccggggaggacaccggccccgcggaaggtgaggataactgggaataccaggcatgttacaggacttggttttggtttggtt

SEQ ID NO: 335705 - DNA, 122 bp, Homo sapiens
aaagcactggggtggagggcggccagtgtggggcagacgcctgtgtgccttcctcagatacgggcagagttgtggatgtgagaagggtctggcttgggtacctcagttccaaacctcctgtg

SEQ ID NO: 335706 - DNA, 122 bp, Homo sapiens
ccgtggcggcatgagagcgagcctgtgattggacagggcctggcggtgaaaggttaatcccggccccccagccactcaggagcagggagacagcgggcgcgcgcgcggaggccggagaggcg

SEQ ID NO: 335707 - DNA, 122 bp, Homo sapiens
gcgcccgttctcaggtgagctcccggactagcgcgcatgcgcacaggtgagtgcccgccccgcccccgggcttggccacctgcccaagaaacttgttggttgttgccctcaggtcgctcccg

SEQ ID NO: 335708 - DNA, 122 bp, Homo sapiens
tccctggcagacctctctctgctgcaatcagctgggagtcatgtgtcctcagggctggtacgataggaacaaacaaagcccatcattccacaagcagaggaggccagccttcccaaacccac

SEQ ID NO: 335709 - DNA, 122 bp, Homo sapiens
agtctcccacagctaggcacaggcttctaagccgggctgagctgggctcgcgagtgccatcgaggcaaccaggcgcagggagcggaaggcaggagtgtaactgggcgctggggggcgctgct

SEQ ID NO: 335710 - DNA, 122 bp, Homo sapiens
taattgcagcttcgttagatttcgggtttgggaggctgtggttcgggctctaatatccgccgcccattatccctgctaataaatttgacctattgttcgtttgttaaaatgatgtcaccttg

SEQ ID NO: 335711 - DNA, 122 bp, Homo sapiens
taggaatcccaggaaggacagaccctttttttccctttttttttctcccctcaatttccacgtctttataaccggcttagggcattattagcacatgtcctggctcgtgggcgagttggtgg

SEQ ID NO: 335712 - DNA, 122 bp, Homo sapiens
cgggggccggggcgctcctgtgggaagggaggggtgaaaggtcgctggtccccggcaacacggctcaggcaaacgtaagcggcttgtcgcagaaaccaaggggtccacgaaacgcgctaggc

SEQ ID NO: 335713 - DNA, 122 bp, Homo sapiens
aatgccagaagcctggtggcaggtcttggggagaccaccccagactcaaccctgggtctccgcttcctgtcccttgtaccttcaaaacatatccagaatcccaggctttcccacacctccac

SEQ ID NO: 335714 - DNA, 122 bp, Homo sapiens
tttccagacggcgaagatgcggggtccgctccttaggtggccctgggcggaggcggcggccgcccagagcagcagcagcagccgcagccgcagcggaagccccaaccgagccggcgggccag

SEQ ID NO: 335715 - DNA, 122 bp, Homo sapiens
tcagtgaagcccacgtggcccaaaactggaaacacagagctcccacagaggaaccatctccggccttcccagctccagcctctccacggtctgtcctttcccggtgctattgccaaacaaca

SEQ ID NO: 335716 - DNA, 122 bp, Homo sapiens
ctataaaacagaattaataacccatatctcaaagtcataagaattcagcaagattatacacgcaaaatcagtgctggcatatgagtcagtaagtgttaactgttgttatgattattctttag

SEQ ID NO: 335717 - DNA, 122 bp, Homo sapiens
tcttcaaattagagaaaatagacatctttcagtgagaagtacatgaaatggtgaaagaaacggggatgtatattcaggcagctcatgtgaaacaaccttggtgatcaacaaggaaacagatc

SEQ ID NO: 335718 - DNA, 122 bp, Homo sapiens
aggcccaattagcacctggctcctgcaggggccaattagacaggggctgaggtcagctgccggccaaggccctgccacccctccaagcttcaccaagccaagcacaaaagctttctaggcat

SEQ ID NO: 335719 - DNA, 122 bp, Homo sapiens
ggggatgcctcagaaaacttataatcatggcagatggggaaacaaacacacccttctccacgtggcagcaggaagtgccgaacaagagggaaaagccccttataaaaccatcagatctcgtg

SEQ ID NO: 335720 - DNA, 122 bp, Homo sapiens
aaaagacgagatgacaagacacagacagcgagcatgtgcctgtgcacatttgggtctgtgcgtctctggatgggggtgagagagaaaataaaagaaggggagtggaggaaagagaatgcccg

SEQ ID NO: 335721 - DNA, 122 bp, Homo sapiens
gtgtgtttcattcctttacaggtggggaatgtcctgaagagcaggacttatgttcatttacgtttgaatcaccctcacctctgccccacctcaactcttcattagctctcaacaccgtgatt

SEQ ID NO: 335722 - DNA, 122 bp, Homo sapiens
ccccaaccaactgaacagacaccctcttgaacataagaaccccagagaaatcttaaaaaccgtgttcccagctgtgatggaaggagaggttggctatccctcagtatggcccttccttatca

SEQ ID NO: 335723 - DNA, 122 bp, Homo sapiens
gcttggaacctgtgacggcaaggatgccctctacattcctgcgtcaccggcagcgtgtgacggagtgctcagaacccgtgacggcaaggaggatgtcctctacattcctgcctcactggcag

SEQ ID NO: 335724 - DNA, 122 bp, Homo sapiens
gacagaaaaccgcaggaatttaaagtccgaggattaacaaagccgacctcgaaatgtgaacgcagctggactagacctcagaacccccggacccttactggaggttccgctgttaaatagcc

SEQ ID NO: 335725 - DNA, 122 bp, Homo sapiens
acctcatgatcctcctgcctcggcctcccaaagtgctaggattacaggcgtgagccaccacgcctggccaagatcttttttcaatggtgagatttggatcacctaatgtcaccatgatgata

SEQ ID NO: 335726 - DNA, 122 bp, Homo sapiens
ctctggagccacctcggttttgtccctgtcacggggattgactgattcttaaatgatctgcgcgaggcggccctggagcctacagcagcaccgttcccccagggtatcgctggcctgtgttt

SEQ ID NO: 335727 - DNA, 122 bp, Homo sapiens
cctatgtctggattctacagataattctataggaaagaagatgaaatggaccatagacagcgaatcactgttgtgattaagaaaatgtagatctccagcttgggcagcatagagagaccctg

SEQ ID NO: 335728 - DNA, 122 bp, Homo sapiens
aatttcctgggagactttccttttctttgaattacccatttactcggtgagaaaatgcttcggtggagagaaagagcctggcatcgagaaggggaggggagcgagtctgccactggaaatgc

SEQ ID NO: 335729 - DNA, 122 bp, Homo sapiens
tgggtgcagcttcatgaggcctggaatccaccaggaaggagaggagaatgtgcacagccacgcacacaggtgcacacagtcacgcacacaggcaagcacacaggtgcacacaggcacacacg

SEQ ID NO: 335730 - DNA, 122 bp, Homo sapiens
gacagaaattcaaatttccaaactcccgggttggctttcaattccacggtgcaatggttccgcctcccgcgggttcgccgagggagtcattttggccctctcggctcaccgtccgcgcagcc

SEQ ID NO: 335731 - DNA, 122 bp, Homo sapiens
ccaataggacagatttcatcagaaataagcatttaagaaaaacacaaaaatcaatgcagacgtatatatcagtgaagtgtcctgattggggttttctacgtgctaaacaagcctgttcccga

SEQ ID NO: 335732 - DNA, 122 bp, Homo sapiens
gctccataaagcggctctggagtcaaaataatggggtcacatccccgcaacaacctgccccgcccccacccttcttggccatgccaggagagactcactcacctgcagcttccccatggtcc

SEQ ID NO: 335733 - DNA, 122 bp, Homo sapiens
ggatttggctttattcggccgggagcttcggcagactcgcgtctcaagaaccgagctccccgaaaacagagttcctggcccttttaagggcttacacctctaaggggtccacgtgaaagggt

SEQ ID NO: 335734 - DNA, 122 bp, Homo sapiens
cacatccatcccccaccaggacttccgggagaagaacatggactacatgcggccagacatcgtggccctgctgcggggcagtgacagctcctacgtgcgggagctcatcggcatggaccccg

SEQ ID NO: 335735 - DNA, 122 bp, Homo sapiens
tactaaagtcacagaaactatgaggtcaaccaggagagtgcatgaacatttaaaaagcaccgggccagtgaccttggataacagcaatatttaaaggtcaggcaggccagatgtggaggctc

SEQ ID NO: 335736 - DNA, 122 bp, Homo sapiens
aaatataaactgaagcgtgtgccggctgggccctgcccccattctgttgcttcctataaccgctgttaatggatgggtggcagacccttctaggtttttcctgagcacacgggcagccgtcg

SEQ ID NO: 335737 - DNA, 122 bp, Homo sapiens
taaatccctcacgcacaagaactacacatcagattatttacctcttcccagcctgcaagtcgtaattatttccctttgctcatttttaatgttggcttttgtatgactgaaaatgactgtgc

SEQ ID NO: 335738 - DNA, 122 bp, Homo sapiens
tggcctcaagcagtcctcccacctccgcctcccaaagtatgctgcaagcttaagccatggcgcctggcagatctagtgttttttgaaatctcatgttttattctaacaattgatcgaaacat

SEQ ID NO: 335739 - DNA, 122 bp, Homo sapiens
gaggggcctggtggggtgggttccaaccaacccgcccctcgagtgccggaatcagcaggacgaatcgggtcccaaagatgtgggcaagactgttccgagggtcgaaactctggttcaggata

SEQ ID NO: 335740 - DNA, 122 bp, Homo sapiens
ccgacttcccaaacgccctttctcttgagggttggaagcgctgttctgtatttggccacgcgggggagctgctccgcacagctcaggactaagccacctcacgggaaacgccagcgcgggct

SEQ ID NO: 335741 - DNA, 122 bp, Homo sapiens
ggacctggcgtcgtgtctttggacggactcagggaacatattgattagggaatggaggaccgggaggagggagacactaagccaggtgctattagctgcagtaaattaacgtcctcctgctg

SEQ ID NO: 335742 - DNA, 122 bp, Homo sapiens
gcccacaggccgtggccctgagggcacccagtgctgctcgtgcgcagggtccgggactttcgccagcaggaaccgcagtgcacttgctgcctgttggcctcagtcttttttatttatttgtt

SEQ ID NO: 335743 - DNA, 122 bp, Homo sapiens
aaacacaagacttcaaaagtcaggggtgtggtgggaaatttcggtgcactgcagcattttcgtctaatcctccaaagttcttgcaccttcaagaccctcgtacagacattcattattcttcc

SEQ ID NO: 335744 - DNA, 122 bp, Homo sapiens
gtcacaaaccctaccattatctggagattacttcctgctgcactcctgtcttgccatgcacgtcttgccccctcacttttgctcagcctagcagtctacttcactttattgccttgtaagtg

SEQ ID NO: 335745 - DNA, 122 bp, Homo sapiens
cttcctatgagaaatctttctcaagtttactaagtcagatgagacttctccctcctctaacgcctgcaccactctgaatctctcacatcctgccttgtatttagatatgtgtgtatttattt

SEQ ID NO: 335746 - DNA, 122 bp, Homo sapiens
ttccgcctcgccggcagtagtaggcgcatgcgtggttgcgatcatggctggcggtaacttcgcgtttctgttacccatttttaaaacgcatcttcaggtgttccttccttctcatggaagga

SEQ ID NO: 335747 - DNA, 122 bp, Homo sapiens
ggccggcggggcggggcggggccacctggcagtggctgcctttagggcggagccggctcccgctctcctcagtctgcggtgggctagcggacggtccggcttccggcggccgtttctgtctc

SEQ ID NO: 335748 - DNA, 122 bp, Homo sapiens
gagcaggcaggtgtgacagtgctgtgtggtccctgcctagatcaagctcacactcgcttccggtcacactcatttacacacacccaaacccattactgtctcccaacatgtgcccactctga

SEQ ID NO: 335749 - DNA, 122 bp, Homo sapiens
tagcaggatctgtccagccctcgggctgcggcggctgctcgcggagcccactctccccgacggtccccagcttgctccagctctgcctggagctcccatgcgtgccctccgcatccgccctg

SEQ ID NO: 335750 - DNA, 122 bp, Homo sapiens
gtgggggaaaggagcggttgcccacaaaccatccgagcacagggagccgctcagacccgacgccggcgggacaggcacttggaaagcaagatccagggttctgaagattaaaatcgttagtt

SEQ ID NO: 335751 - DNA, 122 bp, Homo sapiens
tcgacgacctgggccctgggcctctgaaggcaagtgggggtgcgtgagcttggggtggtccgccagggtggaccggctggcagcctgccccgccgaccctgacatcctggcaaggaggagac

SEQ ID NO: 335752 - DNA, 122 bp, Homo sapiens
cagaatctgcaatgatccctccttgacaagtcaaacagagtcacccaaacaagcgtggcacgcaaacctttagagttcagcaaaccgagggctgagttaccaaaccgtgtcctttcagggca

SEQ ID NO: 335753 - DNA, 122 bp, Homo sapiens
agtaaccgtattgtgacctgcggcacagaccgcaacgcctacgtgtggacgctgaagggccgcacatggaagcccacgctggtcatcctgcggatcaaccgggctgcccgctgcgtgcgctg

SEQ ID NO: 335754 - DNA, 122 bp, Homo sapiens
tcttccagcttctggtggctcctggcattacttggtttgtgagagcataattctaatgtccgcttctaccttcatatggccttctttcatatgacatgtcaaatcttcctctcctttttctt

SEQ ID NO: 335755 - DNA, 122 bp, Homo sapiens
gggaggggcagctcttaaggcttgacctaatttccagtgctgctcatgttgatttctctccgtccttctactgcaggctgtgcgtctctgcttacccagcatgcttgtactccactactgga

SEQ ID NO: 335756 - DNA, 122 bp, Homo sapiens
gctgcagaggaggttgggatgggagtggccggcgtgaagccactgcctgtcaggtttctccgctggagtcccctgtttgtctctgtcattactctttaagtatttgcgtagcagacaggcgg

SEQ ID NO: 335757 - DNA, 122 bp, Homo sapiens
agggaagccaagggaggagggataaaaatttccagtgctgtacagatgcagaagaagatgcggtataagaaaaagctattgctttattgagggataggaaggtaatgtcattagtgaaatta

SEQ ID NO: 335758 - DNA, 122 bp, Homo sapiens
ggcgctggcgacccgtggctgctggcgtgggcggggtaccggttggtaggagagacggaccgttgttacataaccattaaactgaaataaaccggaccaaggtggaacagaatcaaggcacc

SEQ ID NO: 335759 - DNA, 122 bp, Homo sapiens
ttccctgcgccgggacgcctcggctgtggtcgggggcgcagaggtggagcgggtcggggtcgccggagcccgggcttcgtgccatttctggccctggagcgcgcgcgtccccgagcctgtcg

SEQ ID NO: 335760 - DNA, 122 bp, Homo sapiens
tcccgtagaactgcctcagcacagtgcttggaacaggctgggtccccaacaaatgctagtcgaaaagctgtagttccttagaaatatttgactatagttccacgtgctttcataagtatttc

SEQ ID NO: 335761 - DNA, 122 bp, Homo sapiens
gtccccaggcacggcgagcggcgcgctggagtcagcctcggcccaggcacaccgagcaagcgcccaatccaccacaagctcagagacgcagcttagggttttttgttgttcttgttgttctt

SEQ ID NO: 335762 - DNA, 122 bp, Homo sapiens
cccagtgctcatcgttacacccttaggtctgcgcctgcgggtgggggccacgggctgtgccggagcgcatagccgcgggtgtgcccttaattttcatatatataatgaagtgtctgcgcgct

SEQ ID NO: 335763 - DNA, 122 bp, Homo sapiens
tcgttcgccagcatccaagatggcggcagggcggggcccaaggcgcggcgcgaattgtgacgcaggcgtccggcgtgctccgtgcgcaagcgctttcggcggcgattaggtggtttccggtt

SEQ ID NO: 335764 - DNA, 122 bp, Homo sapiens
gtgctttatttattgacttagtcaaccagtctagttgagcaactgctgtgcgccaggcaccgctaggccctgaagatacaatggcagacaaggttctttccttcccctgggctcacagccca

SEQ ID NO: 335765 - DNA, 122 bp, Homo sapiens
gacggatcgttaatttgcaggttgttagaacaccagtgacttctctgtggctgagtgcatcgacaagtgtgtggtgggaggagaccgcggctccatctggagcaggagctgtcatgtgggga

SEQ ID NO: 335766 - DNA, 122 bp, Homo sapiens
ctcatgtggggcttgggtcttaatgcccaggaggggataggaagtatggcctagtgcctacgccaggcaaagagcagaaacacacaaaaccaggcccttggtgaaagggtagatcagaaaag

SEQ ID NO: 335767 - DNA, 122 bp, Homo sapiens
tgctcccaaagaagtcgctagtatctgaggccatctggtggagagcagtggcatggtaaccgagggctcaaagtcgggctcgcatcccggggactcgcagagactggactgcgcctgcggca

SEQ ID NO: 335768 - DNA, 122 bp, Homo sapiens
ggggaaaatggcactgagagacaggagagcaagagaaggtcagagaaacactttttcttccgaagctgcttctgaggccttcattttggggtattgttttctgatgcccaacatatctgagc

SEQ ID NO: 335769 - DNA, 122 bp, Homo sapiens
caacgtcccacagggcccgcctcccgcgcgtctttcaaaggtcttctaggaaccagtcagcgattagaggccgagtcttcggccacccaaaggcggagtaagaaaccagaagcggatctgat

SEQ ID NO: 335770 - DNA, 122 bp, Homo sapiens
gtcctggccttcacagctctgcactgccgccggccgggggcccgggcagtagaggggccgcgtagcgacgtgtgtgccgttctgcagctggtacacgcaggtcacctcccggtgctggaagc

SEQ ID NO: 335771 - DNA, 122 bp, Homo sapiens
ctaactggtgctagggccagtgagtcctgtgttgtgtcacttgccctgcctccatattctcggatgtcgcaagcaagcatctgcctgaaggtctttagtacctttctcttctgcctgtacca

SEQ ID NO: 335772 - DNA, 122 bp, Homo sapiens
agagtgtggtgtgagcccaggagaggggcttggatgtagtgacaagatgttcaggaagcccgtggcctttctggggaagagaatcctgaaagcaatgcagcggttaatcgtattgttacaaa

SEQ ID NO: 335773 - DNA, 122 bp, Homo sapiens
ttcttctttttgacataacaaagtgaacagaatgaaatcatgtacacttgcatgagaacccgtctctgtgttctgttttcctgtctatttttaacactgttaataaattaagttaaatctct

SEQ ID NO: 335774 - DNA, 122 bp, Homo sapiens
cataggttttaagtcctgggcacatctaattttgcttacttgggtggtaaagactgacaccggtacaaggctcaggtcttttcattcagcaacacgtgggactatagcaacctctcttctca

SEQ ID NO: 335775 - DNA, 122 bp, Homo sapiens
tctctagctagacttttttggaaaaaacccaacaaatcaaacttaccctggtgatatagccgggggttgaaaaatcaagaccaaactctttttgcataaccctctctttttcccaggccact

SEQ ID NO: 335776 - DNA, 122 bp, Homo sapiens
ttccctgtgacccagcctgttccatagccaaagggaccaaagtgaacgatcagagtgccccgcaactattctaggggccttggctctcagtagagctcaacccatggcatctgagagcaccc

SEQ ID NO: 335777 - DNA, 122 bp, Homo sapiens
gcattttcacataaggtgccagggcctgatgctgagcaaaacctttgtattgggtgccaccgactgtcatctcttgtttaggtttgactggggaaacgtttccacagacatgaactagtttg

SEQ ID NO: 335778 - DNA, 122 bp, Homo sapiens
taggaaggaggaaggaggcagaggatcagctagctgtgtggctgctacacgtggcttccacgggctctcacagctttcctcctcctcaggccatttgttcttaggcttctcttcctctgtcc

SEQ ID NO: 335779 - DNA, 122 bp, Homo sapiens
ggcttccttgagtgacacaaaccaactcctccaagaaaactcagacaaagccagtgtcggcgcagccaccgccgctggcccagctaattgataagccgcgttgcagttcgttagtggcgttg

SEQ ID NO: 335780 - DNA, 122 bp, Homo sapiens
gagactcagtgacagtcgcagcttaaccccgttgggggcgccgccccgctgaggtggttgcgtctccaagtcgtgagcctccaatagctgctcccgctttcgcgtcgcaaccccaggacccc

SEQ ID NO: 335781 - DNA, 122 bp, Homo sapiens
tgtcactgatttgagttaaatggagtggagagaggctgtttatcctcacaatgaagtaggcggcacagtgaatacaggactgttcagagctcttgagcggtttatgagtttttctatgctag

SEQ ID NO: 335782 - DNA, 122 bp, Homo sapiens
ggcgtcgcaggagcggtctaaagtgtttactctgcttcttctcagaaatggctttgatagcgccaataaccgctacaaccggaagcgaaatgaaagggggggggacttttttgaaatgatgt

SEQ ID NO: 335783 - DNA, 122 bp, Homo sapiens
aacagcttttcattgaccttctaaataaattccacaagggggcgaaaacacctaatggtccggggctgcaaagtttttattgcaaagctggccacccataatagattagtggattaatattt

SEQ ID NO: 335784 - DNA, 122 bp, Homo sapiens
caaaccaagacgacctgatcacgtagttagaacccagagaaagcattactgggcgtgagccggtcggggctccggtatttgcccttcgcccaggtgttgttttggctacagacttgatgtcc

SEQ ID NO: 335785 - DNA, 122 bp, Homo sapiens
cgtaggctgccgccgagccggggctccggaagccggcgggggcgccgcggccgtgcggggcgtcaatggatcgccactccagctacatcttcatctggctgcagctggagctctgcgccatg

SEQ ID NO: 335786 - DNA, 122 bp, Homo sapiens
catgactgccaacatagcaatgaatgtacagccacccggtgatattgctcctaatattcacggaagaagcgtatgatgttactcccaatatcgcagggagtgtacacttcttctgtgatatt

SEQ ID NO: 335787 - DNA, 122 bp, Homo sapiens
acaattattgatccggtgttgattcatgttctggaaaccacatgaaaatacctaagcagccgcagatgctgagcggagctgggccaagttggtaagaactgctggtggtaggagctccagca

SEQ ID NO: 335788 - DNA, 122 bp, Homo sapiens
aacgggctgcacttgtagcggttctgttgccaatgccattcagaccccagtccgggattccgcgctcggggtgcgagaggccgctcccggggaggggcgggacccgggcggggcgggagggg

SEQ ID NO: 335789 - DNA, 122 bp, Homo sapiens
ctggatgcggagccgagtaaggcgcaacccagcgggcctcgggccgccctttcaatggctcgttcattaacacctgtgggtgcctccagactgtgatcattgcagggctcgtcaactccctg

SEQ ID NO: 335790 - DNA, 122 bp, Homo sapiens
ccagaggatcagaaacatgcttggtttactgatggatctaccaaatacattgatgggacccgatgctagaaggccatggctcataaccctgttaaaaagcataagcatttctgatgaaggaa

SEQ ID NO: 335791 - DNA, 122 bp, Homo sapiens
cagtacttttcttagaagttttcctagattttggcttccagtccatgccttttcctccctcgggaaccttccagtgtctcccactgtcctcgcgaccccgtggccctcacctgggtcctggg

SEQ ID NO: 335792 - DNA, 122 bp, Homo sapiens
ttgttttcttttaattcggcttttttggttgcctttcacctactttttcgcagagccctccgctggggccttcacttgggcaaacaactatcgtagtcgaacagctttgacctaacaatttc

SEQ ID NO: 335793 - DNA, 122 bp, Homo sapiens
aggctgagactagggcatcaaatcctaatagcctctgtttactgagcacacagtctgtgccgtgtcctgtgctgaggacttgataggcattatctcttttaatcctcccaattcctggtggg

SEQ ID NO: 335794 - DNA, 122 bp, Homo sapiens
ccctttgtgtccgcggtaggggagctccagtcgtcacaccgcaggctggaggttacgcttcgagtcgcttaccgaatttgtgtgcattcacgtggacacggcctgtggggccttttgcccct

SEQ ID NO: 335795 - DNA, 122 bp, Homo sapiens
aaggagcaggaaggggaaggaggcctgggaccccgaaaagagaaggggagagcgaggggacgagagcggaggaggaagatgcaactgactcgctgctgcttcgtgttcctggtgcagggtag

SEQ ID NO: 335796 - DNA, 122 bp, Homo sapiens
cagagcgcgcagggctgggcggagccgtggcccactaggcggaggcgccgtggacagaggcgggggcgccccccaccctctttctcgcttcccgccactgcgtcggccaatcaggaggcagg

SEQ ID NO: 335797 - DNA, 122 bp, Homo sapiens
ctaaagtcataggtaagagatctgtagaagcgacgtcaaggtgtggttccctctgtaaggcggagctaaacggtgcattcgcccagcggggaagctagaactaaatgaccgctctgccgact

SEQ ID NO: 335798 - DNA, 122 bp, Homo sapiens
tgccatccttggtcttgaccgtcagctcgtcggaggcgaagtagttgatgtccagggatacgcgccagcggtccgctgtgggccgattctccgagaccccgccgctgagctgccggctgagc

SEQ ID NO: 335799 - DNA, 122 bp, Homo sapiens
ccagctctcgggttcccagaccgggggctcctcctcagtcaagaaagcccctcaccctgccgtcacctccgcagggacgcccaaacgggtcatcgtccaggcgtccaccagtgagctgcttc

SEQ ID NO: 335800 - DNA, 122 bp, Homo sapiens
ccggtgggaagccatggagggggtcccctagcggaggctgggcgcgggccagtgcgcgtgcgcggctggaggctcagcgcgcaagcgtgcgcgtgatttggccctgaacggacgccgtagcc

SEQ ID NO: 335801 - DNA, 122 bp, Homo sapiens
ccttggcccagtcacttcccccgctggggacgcgcttcctccccgcctgccgagcaaggacgaatgaatgggcctcctgccggccagaatccccgtaattacccgcctgatcaaaggccacg

SEQ ID NO: 335802 - DNA, 122 bp, Homo sapiens
gagcagccttgggccataacttccggatcccaggggctgtagaggagggggctgcacacccggacaccttgctccgaggaaggaggaagctggggacccagacacctggtctgaaagacagg

SEQ ID NO: 335803 - DNA, 122 bp, Homo sapiens
tctggagctgggtactgggtgcagtgttggctgttccagaaagtctatgagttctgtctccgttttggcttggagttctcctgtgggaggtgcccagcaaggatgattcccctcggccacca

SEQ ID NO: 335804 - DNA, 122 bp, Homo sapiens
ttcctgtgtctccttataaaatggtggctagggaactggacatcattctcaaagctatgacgttcagcaaggtatgtgatggcttttaaggagcacgggaagatcacatcctgctgtattcc

SEQ ID NO: 335805 - DNA, 122 bp, Homo sapiens
tgtgggtggtttgcattctgctccaactctttgagaagacgttctgtctcctgtgctgcccgcttcctagcttgctgaatatctccttttccttcagtatctacagagtctatttcaaaaag

SEQ ID NO: 335806 - DNA, 122 bp, Homo sapiens
gccgagggccgggccggggctgtaaacatggccagggctgccctgcccacccctagtggtcggtaacgactggaagcagagcagccaggcaaggtcgggaggctcaggcgtccgacagtcag

SEQ ID NO: 335807 - DNA, 122 bp, Homo sapiens
tccgccctgggccctgcagctttcgctggttgttgctcagtcagcctgggagagacgacccggagtgcccaggcagctcgccacggacatgtatgaagaacaagcagcaaagcctgtcgttg

SEQ ID NO: 335808 - DNA, 122 bp, Homo sapiens
cccatgtggaccaggttggcctcgaactcgtgccctcgaaccctcgcctccctgagggtccgagggcccgcgcaaccggctggagccacaatggctccacctgttttcttatctacaaaaca

SEQ ID NO: 335809 - DNA, 122 bp, Homo sapiens
ctcctcggccccctctggcccccgtcctcctttctctccttccccctctctctccaggagcgactctgggttagcacaattgaactggatttacgagcgagaatgggtaattacatccccca

SEQ ID NO: 335810 - DNA, 122 bp, Homo sapiens
agcatccttaacagatgacaccagggctctagcagtccacacagaactccccagctaagacgtttagagctaggattcaaatgcggtgatcacttattccagtgccagccccagctccccat

SEQ ID NO: 335811 - DNA, 122 bp, Homo sapiens
tttttaaagctactgggcagaagcgtgaccaccagccaaggctgcttagaggcctgtcaccgctctccaactgcctgactcagaggatgcgctgggctcggccaggtggagctggagggcaa

SEQ ID NO: 335812 - DNA, 122 bp, Homo sapiens
gatttttttttaacagctgaactcaacgaaaacctgagtggtaacacttttgctgggtctcgatcgccacctgtcgctttcccgacttagctgcaagaatgaatcatctcgcgccgggatat

SEQ ID NO: 335813 - DNA, 122 bp, Homo sapiens
ccctgctgagcaccagctgtggatgtggcagcactcagtcttaccaccttcagttgcccacggccccctgcctaaggcagggcagatggccagctgggcagtgcttctggtggctgagtgct

SEQ ID NO: 335814 - DNA, 122 bp, Homo sapiens
cacactatctgtaggatctgcaagcggatacttgggcctccctgaggatttctttggaaacgggataaaccgcacagaactaaacagaagcattctcagaaccttcttcatgacgtttgcat

SEQ ID NO: 335815 - DNA, 122 bp, Homo sapiens
gggcgctcaggcttgggactcctctggggacaaggctcaggaccttggggagggagtgttcgctgggaaaccttgagagattccgtgtcttagaatgctggagagagggtgcatgcttagga

SEQ ID NO: 335816 - DNA, 122 bp, Homo sapiens
tgaggcaacattgcccgtgctcaaaacagtttgtttgttttttttttccacctatctccccgtatacctagatagggtgaaacagatgctcattaattcttaaaatttcttcaaaatatata

SEQ ID NO: 335817 - DNA, 122 bp, Homo sapiens
tcctcattcttgacgtactcaaagtgggacaggcgggtgacgttgaggtcatctcggagccgcaggaagtactgttgcagctgcacctcggacagcagctccagcagccagcctgtgccctc

SEQ ID NO: 335818 - DNA, 122 bp, Homo sapiens
gaaattaggatgattgacaaccctataatggccgctaagtattcaaatgaaaggaagagtcgcgtgtctcacactgtacatcagaagctagaaatggctaagcttagtgaggaaggcatgct

SEQ ID NO: 335819 - DNA, 122 bp, Homo sapiens
ctcggtccacacagacacgtgcagaccagagccctcccgcactgctcagccacacggccacgttcaggctgaagccgcacgatcgccagaaacactgtccctcgccaaggtatgcctggctt

SEQ ID NO: 335820 - DNA, 122 bp, Homo sapiens
tgtgggtgggagccacaagcaggatcagtatttaaaaacctacaaggttttactggaggccgggtactagctaggacaaactgacctctaattagcccttcttatacagttccccctaaaac

SEQ ID NO: 335821 - DNA, 122 bp, Homo sapiens
gcccccggccccggcacgcgctctactcctgtaacggaaaggtcgcggcttgtgtgcctgcgggcagccgtgccgagaatgaaccccagcacccccagctacccaacggcctcgctctacgt

SEQ ID NO: 335822 - DNA, 122 bp, Homo sapiens
atttgcacctctcccactacagccccaaagggcaagcatctcttccgactcatccagtaacggtgctctgaaatagggaagtgtcttggccaaggtttatgcctttggcagatctcagaatt

SEQ ID NO: 335823 - DNA, 122 bp, Homo sapiens
gaggcaaaagataaaaacctgggtaaactgacaggagatgatgacaagaggaatgaggcgcggcgtgtagtagagcacagcgaccaggtttgtaatcgtagctctgttttcacgcacactat

SEQ ID NO: 335824 - DNA, 122 bp, Homo sapiens
tggtccacgtgggcgatgacagacatgttgcggatgttggccttcttgtccatgatggcgcggatctggtctaccgtgaagttcacctgggcaagacaaggaggctcagaccagctcgtgat

SEQ ID NO: 335825 - DNA, 122 bp, Homo sapiens
cacgagtaaccaccccaacggctgtgtgtgtgaaggtttcaccaggaagcaacattctcacggggcctttctgaaggacaagagtgtacggggtggagaaaaggggtggaggaatgccgggc

SEQ ID NO: 335826 - DNA, 122 bp, Homo sapiens
gaggccccagcacaaggggaggaccagagtccgccatggacgtctcatggagcccgagtacggccatgcgggccgcccgcacctgtcctgaggccccgctgctcccacccgaacctgggctg

SEQ ID NO: 335827 - DNA, 122 bp, Homo sapiens
tgtctcaggtcatgcattgtcctccaaacccaaaggtttttttcagggttggctagagagcgagtattgtgattttgctgaaaagacaaggtgtgaaggagcaacttcagttgacacaaaat

SEQ ID NO: 335828 - DNA, 122 bp, Homo sapiens
acatagtctgttgtgtagttaatgttgtctcacttatgtcaccaatgatttgagaacctccgctgacagtcaccacccacgtctgcgacaggctctgaaggttgctgcagcttcttttaaat

SEQ ID NO: 335829 - DNA, 122 bp, Homo sapiens
gacacagtttctaatggccggcatttgcatgtctaagcttgctgtcccagcttgaagagccgggctttcctgctagacaagaaacgttcctggagctgctttaaaagaaacaaaaacttccc

SEQ ID NO: 335830 - DNA, 122 bp, Homo sapiens
agagtacaggcacatgccaccatgcccggctaatttttttttctgtatttttagcagagacggggtctcgccatgttggccaggctggtcttgaactcgtgggctcaagtgatccacctgtc

SEQ ID NO: 335831 - DNA, 122 bp, Homo sapiens
ggtgacagacggcacctggaaaatcgggtcactcccacccgaatattgcgctttttggaccggcttaaaaaacggcgcaccacgagattatatcccgcagctggcttggagggtcctacgcc

SEQ ID NO: 335832 - DNA, 122 bp, Homo sapiens
caagaactggtgccgcccgtgccatttgggcgctgggaaggtgctcggcggcggggttcccggtcccaccatgtgcaccaacatagtttacgagtggctcaaagcgctgcagcttccgcagt

SEQ ID NO: 335833 - DNA, 122 bp, Homo sapiens
tgatacagttgccagtgaatcacacactctgcctgcagacgcccattctgtttgtggaaacgtattcactgcacatttgcgcttagaactcaatctgggccaaaagttcccagtacagtccc

SEQ ID NO: 335834 - DNA, 122 bp, Homo sapiens
ccttcttgagcagcagctcggtcacctccaggtgctcgttgcccacagccagctgcagcgcgttctggcccatgtagtccacgcagttgacgttcagcgtcttggactcctccagcatcttg

SEQ ID NO: 335835 - DNA, 122 bp, Homo sapiens
cgagcgcgacccccagcccccttctcacttcatggcgccggccggactgtgcagcggggtcgacccgcctccctcatgaatattcagcgagaggccgggtcgtggacatcctcgagggctcg

SEQ ID NO: 335836 - DNA, 122 bp, Homo sapiens
ttctacctctccttccttctctctctgtgcctcttcttctccccgtccctccacgtcccccgtgttacctgtgtgattcagctgcagctcagctacgtcccactggaagaaaagaccagaaa

SEQ ID NO: 335837 - DNA, 122 bp, Homo sapiens
tgcaaaaatgtattttttagcggccaggtgagcagctgatgtggtggacagaaagctcaccggaggccccaaggccttgcagcctccacgtgcctctcatcagtgtgtgaggtgcagtaggc

SEQ ID NO: 335838 - DNA, 122 bp, Homo sapiens
aactgaatgtttaaaaagaatttctaaggagtgaggtaaagaaaaagaattcctaaggggcgagataggctaataaacaatgtttacttagagtccgcttggtttcaatgatcagaaatagc

SEQ ID NO: 335839 - DNA, 122 bp, Homo sapiens
ggtggaggtggctctcagtgagatggatgcggagccggaagaagggatggggtgggaaggcggttttcccctggagtccggccgcctagcagcctgactcttctccaacggccctggccgaa

SEQ ID NO: 335840 - DNA, 122 bp, Homo sapiens
cttggtctaggaaccttcaggtgggtgtttggggcgcagtggccctagttccctagaattcgttttgcctcccgcggcctcagccggcgtgggtcaggcgagctccggcgaggaacggcagg

SEQ ID NO: 335841 - DNA, 122 bp, Homo sapiens
aaccccccatacaccaaatgcgtccgcttcctggtctgtcgtcctgcagcctacagaggccgcgtccttccacatgatggccccgcacctggcactgtcgccgtccctcagtggagacacca

SEQ ID NO: 335842 - DNA, 122 bp, Homo sapiens
ttgaagtagactgtcacactcaggcagcctgtcaatgctgaatgttaggacttctgtctccgctggagacacggcctggtgcaagtcagcgtttagtgtttgacagctttctcagcactccc

SEQ ID NO: 335843 - DNA, 122 bp, Homo sapiens
ctcttgtgatcaggcggagggaccaagggccaagagcggggcttcgccggacgctgggagcgtcactgtccagactgacagatggggaaactgaggctgaccagctgggcagggcgtgcata

SEQ ID NO: 335844 - DNA, 122 bp, Homo sapiens
catggatgtggttcattgatgtcactattcattgaactaatctatcctgatgataggcatcgtacatcagtcttagactaaatgaccagcaggtcaggctaggaaagatccactgccctaga

SEQ ID NO: 335845 - DNA, 122 bp, Homo sapiens
gggcgccgccgcaccgttgtgcgcaggttgagaggcctggtatctccccatagtcccagccgggattcagctcgagactggcgtgcccagtgggtggaggcgtgagtgcttcggcccgcgct

SEQ ID NO: 335846 - DNA, 122 bp, Homo sapiens
gtgggcgcgcatggcggggcttgaaggaaaggtccagagccggtgggaaaggccacgccccggggtagagcgcttccttccagatcccggcctttaactgcaattccgttttaagggcaacc

SEQ ID NO: 335847 - DNA, 122 bp, Homo sapiens
ggcccctgctcccaactggcccgggccctgcaggggcggggttggcagggacggcgctggcgggtggcggagacccggggggcgcagggatcggcttcccccgaggcctcggcccccgcccc

SEQ ID NO: 335848 - DNA, 122 bp, Homo sapiens
ttcccatcgctggaaaacagctgctgttagatgtcctcagaagtcagttgcaaattttagcgttaaagtcaggatttattgttcatacttggcggtgaggagggcagctggagatcttaaga

SEQ ID NO: 335849 - DNA, 122 bp, Homo sapiens
tctcgtccaaatcatgaaatgtttggccttagtcaatgtctatgcccgtcacataacagccgaggcaccgaggcccacagggaagcagctgggagcttggaaacctggtctcttgaatttca

SEQ ID NO: 335850 - DNA, 122 bp, Homo sapiens
tcctgtccttgaggagtttatgatgaaatgggagagataaggcaaacaaatgaaaaaatacgcaatggttgtcatagagtctagggctagccttctgataaaacaacaacaacaaaagacat

SEQ ID NO: 335851 - DNA, 122 bp, Homo sapiens
gccccccctgcctattgtcccgccgcttgtcccatttccaaaagctagagctaagcgaggcgctggggctggggcaggtgactaaccagctcacaatgccccctgcgggggaggaagagggc

SEQ ID NO: 335852 - DNA, 122 bp, Homo sapiens
ccacccacctccagaatctgcaccgagagcagcctgtgtttaaggactctgatggacagacggcggagtggacgtcccaccctcacgagggaggccgccggacacatcaccgggccactgcg

SEQ ID NO: 335853 - DNA, 122 bp, Homo sapiens
ggccacagtaaggcaaatttacagtgaaagccacttgactgatggagtgcacaaatccaacgacccatgaagccagcaccagcctgatgcaagtctgccaactcatcaaagtcatgtaatgc

SEQ ID NO: 335854 - DNA, 122 bp, Homo sapiens
gggatggaaagcacacatcaggagggagtcttgtcagttctgtgcacaacactggtctcacgtgacaggacagctgggatgggagtggggtatggagtccatctttcctaaggggaccgcca

SEQ ID NO: 335855 - DNA, 122 bp, Homo sapiens
gggcctggaacactgggtgcccgagccaggcttgggaagcctgcggcctggcccgcctggcgccgccactggacacactgcatgcacgtcccatgcccgcccgcccgcccgcccgcccgggc

SEQ ID NO: 335856 - DNA, 122 bp, Homo sapiens
atcggaagttctccgtgggcactgggcggctgaaggctccggaactgcgcctgcgcttttcggtgagtcatgcttcaggtttgccagggcctgtgtcccgcaaaaaggcgagcccttattcc

SEQ ID NO: 335857 - DNA, 122 bp, Homo sapiens
gactgctcacctttagccctaatgataggctcagagaactggcctgggctccaattcctgcgaaatgggcaccttgagcaaatcacttaacatttgcaggactcacctgcaagaaaggcgtg

SEQ ID NO: 335858 - DNA, 122 bp, Homo sapiens
agaacagcttctagggtcacgctgcggtgatcaaccctgcgtcggaggagcctaggaggtcgaaggagagacgtccgacagaggccgaggctggcgtgagggagtgctggtgtgcgttcaag

SEQ ID NO: 335859 - DNA, 122 bp, Homo sapiens
acacatggtctgtccatgcaatggaatatgaccagccacaaaacagattcagcactgacacgctacaaagtggacaaacctcgaaacatgatgcagagtgaaagacgccagacaccgaaggc

SEQ ID NO: 335860 - DNA, 122 bp, Homo sapiens
cgctctgtccaatcgctagtgactcctggagtctctggcccaatgagcagcctatggaggcggggtccgggtgcacacccggaagtgggtgcgggccagccggctcgcccgggggccatggc

SEQ ID NO: 335861 - DNA, 122 bp, Homo sapiens
ggaggggctggaggtgatggatgttttcctccggttctcagggctccacctctttcgggccgtagagccagggctggtgcagaagttctccctgcgagactgcagcccacggctcagtgaag

SEQ ID NO: 335862 - DNA, 122 bp, Homo sapiens
acccattatccagattctccacagccctggagagtccagggtttaatttagcaattgattcggaaaggggaaagtgaacattatgactagtcatacactaatacttttgttcatgtgaggtg

SEQ ID NO: 335863 - DNA, 122 bp, Homo sapiens
aggggcagtgagtgcttgtccagctcactgctctttggaaggggcattcatctccctgagcgcttgtgtgtgcatgcatgtgtgtgtgtgtttgtgcgcgcgtgtgtgtgtgcatgcacgtt

SEQ ID NO: 335864 - DNA, 122 bp, Homo sapiens
ctagcaattttctcaaaaaggcttgtgtgagcaatgctcgatagtcctgggagcaacgttcggtactcctgggagcaaactttggtattcctgggagcaatattcggtattcctgggagcaa

SEQ ID NO: 335865 - DNA, 122 bp, Homo sapiens
tcccccgggcttcaggccgtaccagggctccttgtgtttcccaaacaacgctgggctgtgcgccggcacgtggcacgcagatgtgcaaggggccggccagagcactgcctccctgtgcccac

SEQ ID NO: 335866 - DNA, 122 bp, Homo sapiens
ctgcggaaccaggaggaagtggtggcggggggccgcgtggccatctccgcggagggcacgcgccacacactaaccatctcccagtgctgcctggaggatgtgggccaggtggcctttatggc

SEQ ID NO: 335867 - DNA, 122 bp, Homo sapiens
tgctagtttatcttcccccatgaactcttgccaaacaatatacacagtgtcgtgcagcaccggagagtgtctgatgcatctccagagtatttatgaggacttctgttttgaagatagtttct

SEQ ID NO: 335868 - DNA, 122 bp, Homo sapiens
aggatgtccagatgggctttgattgcggcgatgccggccagcccgccctgcgggtcaaagcgggcaaagtcaccaaactcaggcagacgccacacggcctcgcttttcttcaggtccacaga

SEQ ID NO: 335869 - DNA, 122 bp, Homo sapiens
cctcgcgcaggctgtgcggggcgggcgcgcactggacccgccccatccccgccccctccccgcccccttgctctgccagtccagccctaggttctcctgaatcctgcggtcccagcgtcgct

SEQ ID NO: 335870 - DNA, 122 bp, Homo sapiens
ggctcagctcccgcttctcccgctgcagctggccctcctgccgctgcttggcgcgggccgcgcgctgggcgcgctccctgcggatctgctcagcccgctcccgcccttcctgtagaccttcc

SEQ ID NO: 335871 - DNA, 122 bp, Homo sapiens
ccagggctctacggactgggcctgaccgactgacctccagcctccctccctctgtgctgacgcctggccttcgaagcaggccctgccgcagccctttgcagacccatccccatcccacgcac

SEQ ID NO: 335872 - DNA, 122 bp, Homo sapiens
ctgaggaaaacctgggcctaaggctacagctagtgccgaaaaggcagacagtgactcagccgtaaaagggaattcaacaggtatagtccacagaaatctctatgcaaacataacaaatgcaa

SEQ ID NO: 335873 - DNA, 122 bp, Homo sapiens
cacccggcgcaagggcgtccccgcgaggacggccgcttcccgcaccgcggcgcccgggcgcgaatctcgggagccagccttgcagtgggggcttctcggcccccagactccacgctgcgcac

SEQ ID NO: 335874 - DNA, 122 bp, Homo sapiens
cgcccccaaccagttccagtgctccattaccaaacggtgcatcccccgggtctgggtctgcgaccgggacaatgactgtgtggatggcagtgatgagcccgccaactgcagtgagttgcctg

SEQ ID NO: 335875 - DNA, 122 bp, Homo sapiens
tcctccaaatggctccccctcccacctactcaacagggggcaggctgggacagagagtcacgtgtgttcacattagcctgatagaggatcagaatggagtcagactgcaagggtaggaattt

SEQ ID NO: 335876 - DNA, 122 bp, Homo sapiens
gaggtagtgcttatgaaagtatctggtgggcttgcattaagaagctgtcagtgtgaagaacgtgaatgctaagggcatatgagtgtgtccctgagaacatggatattgtgttctttacctcc

SEQ ID NO: 335877 - DNA, 122 bp, Homo sapiens
gcaagtgcagcctgaaatcctgagcatgaaacaggatgcgtgtgtacaccggttgcagagcggcacctgaagctgtgctgacctgccctagcatagatgcccgtgaggcacagctgcaaccg

SEQ ID NO: 335878 - DNA, 122 bp, Homo sapiens
ggggatagagtgagtacatagaccccaaggaaatcagagttggctgagctgaaagtagggcggagcagcacatgtgcagggtgagtgtccttgcccacacagggaggaaaagaaaaacgttt

SEQ ID NO: 335879 - DNA, 122 bp, Homo sapiens
ctggagcccgcgggaccggccaaccccgcccacgccgagcccacagtggccccgtcctgccgcgcggacactcagggcggcccaaggaatcgcctacatgggatccaccccgcgggtaacta

SEQ ID NO: 335880 - DNA, 122 bp, Homo sapiens
tttaaaattctcaaaataaccatatgagataggtgttattactatccccatcctcaggatcgaggaaagggaggcaacagaaaagtaacttgcccaaagaggtaccaagcaaggttcacttt

SEQ ID NO: 335881 - DNA, 122 bp, Homo sapiens
cgccacacacggcctttacggcaggagtcgtgagcgtcgccagcagaggtcgtaattcatcgcctttaaccttccctgctcttccgcctcgccggcagtagtaggcgcatgcgtggttgcga

SEQ ID NO: 335882 - DNA, 122 bp, Homo sapiens
tggctcctctgtgctttctctcccctctattttattgagacctgctggaaaactttctcccgaagaatattatttaaatttatcatgatccacaaactcctgtataggaaaagaatcagaaa

SEQ ID NO: 335883 - DNA, 122 bp, Homo sapiens
ttccccaccagccaagatgccagtacgtgttctggagttctttttattagactgggcggccgcggccagctctaggtgggctgctccagctttctggagttctcattagactgggttctagg

SEQ ID NO: 335884 - DNA, 122 bp, Homo sapiens
ctaggatgggagcttctgtcgtggggtcatctgggaagcaggagcctcatggcagactctcgggtaaccctacctggccagcccccattcaatccaggcctccctcccggaggtgtcgtcac

SEQ ID NO: 335885 - DNA, 122 bp, Homo sapiens
gaaagtaggagttagtcagtgcgggaagacgcaagcacttgtgtctcaacacgcgcagggcgcggctgcagatggaaaaaccgggaagctccgcgctgcaatgagccaggctcgcagtgaaa

SEQ ID NO: 335886 - DNA, 122 bp, Homo sapiens
gatgagatctgctaatggggtcactgcagacaaccacagagccccagcgtctgactcatacgctgcggctgccaagtggtttcacctgcctctgcctctctcattacctcctctcattcaag

SEQ ID NO: 335887 - DNA, 122 bp, Homo sapiens
ctccagtcagccccacatccttgcaggttaccgtgtgtaccaaatagatggaaactactccgggagctctcacgtggtcctggaccatgagacctacatcctgaatctgacccaggcaaaca

SEQ ID NO: 335888 - DNA, 122 bp, Homo sapiens
tgtctactcaatttagaatttctaaacccttcaggatcttcaaaagacaaaatcggccagcgattttaatagttccagtaaaggtttgagcagagaagtggactttcttctgttcctctttt

SEQ ID NO: 335889 - DNA, 122 bp, Homo sapiens
ggccgggccgcccgagtcgggggtggaaggcgggggccacataatgccacgcccccgcctcgtccccatttgaagccccgcgactcttcactgctggtcaatcagagcccgtgctctcccta

SEQ ID NO: 335890 - DNA, 122 bp, Homo sapiens
aagcctcactgagaatggaccccaaggtcttccttggtggattcccagggagctcccctccgtcccccatattcacgtgtctctctggcgatctgggaatctgtgtccctcacgttagtctc

SEQ ID NO: 335891 - DNA, 122 bp, Homo sapiens
tcccgtcttacgggatggatttcgctctcaggtcccagtctcgtgcggcggggcggggaccgcagccggctgggcggggaagccctgagccggggaagtcacgtggggcgtgtccggaggcg

SEQ ID NO: 335892 - DNA, 122 bp, Homo sapiens
ggccctgctctgccagcttcggccaatcagaggccagggagcggtgggcgtgacgtggggcggtgcgcggggctgggcggcggctgaggcgcgtgctctcgcgtggtcgctgggtctgcgtc

SEQ ID NO: 335893 - DNA, 122 bp, Homo sapiens
cccaggtgcgggtgggccccgacgggagcgcgtggcaggccgggggagagccagtctaaacgcggattcccaggccccaccccccggccagctgactcaggaggtcggggctggggccccag

SEQ ID NO: 335894 - DNA, 122 bp, Homo sapiens
gcctagaggagagtttaggaaatgacctggtccggagagagggtgggggtctgccctcagcgagcaccacagcagctgtgggtgaggagaggaaggcctttctgctgcagatgaagcagggg

SEQ ID NO: 335895 - DNA, 122 bp, Homo sapiens
tcgcgacagtttgaaacctagtgtggcatgcagacatggatgaagcaatgacaggcacgacgagcgttaatgaagggtataagctagcgcgagggcattcaagggaacttcagagcgcaaag

SEQ ID NO: 335896 - DNA, 122 bp, Homo sapiens
gcagtggttcatccacgagaacattagaccaccaggaattcaggcagcgatgggtggggacgaagccatagtgagagctgctgctgggtggttggtggccaatgacacgtgctccagctggg

SEQ ID NO: 335897 - DNA, 122 bp, Homo sapiens
acgagtggcagggagagctgtcccacatttgcggaagtggctatgtgaggacgggggaggcgggtcccttagagatgagacaatcataaggggagatatcagagaaaatcgtaaggggagca

SEQ ID NO: 335898 - DNA, 122 bp, Homo sapiens
tcctggctgctcgatttgaggctcaagctgtttctgtgcccagccagtgtggctccttaccgagctcgcccagaacccggactgtgcagcccaggctttctctgcacccggtgacgccaggc

SEQ ID NO: 335899 - DNA, 122 bp, Homo sapiens
ggaatgcagtcacctagcctgggtaacccaggggtcttttaaaagaccagatgattctagcgagcagccaggaataagaaacactgccccagaagggaggtcctcggacttgaggggccgcg

SEQ ID NO: 335900 - DNA, 122 bp, Homo sapiens
gacaccggggtctccaccctggagctgctgtactgagacccattggaactttgtggccagcgtctcatctgcaccattggtcaggtcactggcagagaacctcgtgccgttagacgtggaac

SEQ ID NO: 335901 - DNA, 122 bp, Homo sapiens
gcggggagcgaactctaaagacatggccagggaagcggcttaggagaggccagagcggggcgcagaggcagaacagaagtcaaactggtgggaggcgcctttagtgacctgaagtagtgagt

SEQ ID NO: 335902 - DNA, 122 bp, Homo sapiens
cctgagaagcccaaggcctgcaaagtgctgctgactcgcctggagaatgtggccggtccccggagtgcagatgaggctgatgagctaccgcctgacctgcccaagccccccagcccggcccc

SEQ ID NO: 335903 - DNA, 122 bp, Homo sapiens
ggcctgagttgaaagggacgaaggtctttatttgcaacatatggtctactgggagtccagcgttctgtgcttgggacagtgggactcaaacccgactccttgttcccgagtctgatggggaa

SEQ ID NO: 335904 - DNA, 122 bp, Homo sapiens
tccgtgtgtatatcacatcggttacatgcggatccgtgtgtacatcacatcggttacatgcggatccgtgtgtacatcacatcggttacatgcagatccgtgtgtacatcacatcggttaca

SEQ ID NO: 335905 - DNA, 122 bp, Homo sapiens
ctccttcatccctgtgggtctgcggtgaagtccatctccttgggctcctggtggacccagcgaggtcaggtgtctgcactgtgcctcgcctatggcatgagcagtgatggaggagttcacgt

SEQ ID NO: 335906 - DNA, 122 bp, Homo sapiens
ccctcttttaattccccgagcgcaatttggggcgcatgcgtccacgagacgccccgctaccgccctctaagggtgaagcagggactccagccagtcctcaaaatcccagggcaccggaggct

SEQ ID NO: 335907 - DNA, 122 bp, Homo sapiens
acaaataagtaagtccagaggtctccctggggacagggcctgtgttactcttccttcccacgcgcccagcacagttaccctttcccgtcccatgcgcccagcacagttaccctttcccgtcc

SEQ ID NO: 335908 - DNA, 122 bp, Homo sapiens
tgactctcctgtttgggggtgtagacttttttggaaaaacttcccccagtcttcccagtgcgcagtgtaatgctttgcacgtagtgtggctgcaacaaatatttataatgtgttttaatcca

SEQ ID NO: 335909 - DNA, 122 bp, Homo sapiens
gggagatgtacaccaatcggaatgtgtgttacagagacacttagtttgatgaaaggactgcgcaggaaaggccgtgggacactcattctgagatcttaccgttgattggaccaaattgttac

SEQ ID NO: 335910 - DNA, 122 bp, Homo sapiens
agaaaaataaagccccagtgatatatcttttttaaggtcatgcagctggttagtagaaaacgttgtatcagaacgttgctaggacattgtctacgatgacgtcatgcctctacaatctcctc

SEQ ID NO: 335911 - DNA, 122 bp, Homo sapiens
cccaaccccggcaaagctccccacagggcccctcctgccccaccactcctagcccaaatgcgggactttactccctagggcattcacccagcaatgggctttctctgttatccaaacttatt

SEQ ID NO: 335912 - DNA, 122 bp, Homo sapiens
ctgtgaggcttcacttacctcggtctgggcttctctgaggctgcgagagatggtcatgtccggatctcaactgggccgggtgagggctgaggacctgaggagtccactgtggggatggagag

SEQ ID NO: 335913 - DNA, 122 bp, Homo sapiens
aatccgagtgtaatgaaagacagatgcattgtttggagtaacacagaagctccaattcctcggctgcagggcttggcgcggggtttctgggcagcgtcgcttgcgcccggcacatgtgaaag

SEQ ID NO: 335914 - DNA, 122 bp, Homo sapiens
tgagtggcaaccagctcagcagacagcaaacagcaatgatgacagagatgatcacgacaacgtcagctggcagccttgagaactgtgtgctaagcacttggcatcccgtcgcccagggaacc

SEQ ID NO: 335915 - DNA, 122 bp, Homo sapiens
gttccttctggcagttccgccccagcctcccagcgtcttgcgcctgtggcggcggcagtacgggcctggggggtcacccacaggaaaggtgagattagcagcaccatgtgggagaggggttg

SEQ ID NO: 335916 - DNA, 122 bp, Homo sapiens
cactgcagtagtccgcagagtcggagcagaaattgtgtggacaaacgctcccgggttgcccggacgacaggccccgcccacttgagctccaggaaaagagcgcagccgcgcggaggctcttc

SEQ ID NO: 335917 - DNA, 122 bp, Homo sapiens
ggctgtgcttgggagtttgtaatggcaacacagacacataggcaatgacggacactgccccgtgaaatacgtaagtgtgtgtgcagaaacaaccagttgctcacggatacaaggaatgggga

SEQ ID NO: 335918 - DNA, 122 bp, Homo sapiens
cgcctgctgctgttgccatggcgggatggaccctgtgccagcgctcgtggtggtagtcgtcgtatctggggtggtaaagaagcccaaggtcacacgcgcgggggcacaccgcggctgtctgc

SEQ ID NO: 335919 - DNA, 122 bp, Homo sapiens
gggggctcctataggggggagatttgaccggcaggcttctgcggagggctgcttctacaacgctgactacctggcggcccgagcccggctggcaggtgaactggcaggccaggaagaggagg

SEQ ID NO: 335920 - DNA, 122 bp, Homo sapiens
cgcccccacccaggctagggacccgccaacgaggggtgggggcgggaggcgcccacccgtcgcactagtgggcatttgctaaactacgttttatttttttgtaaagtgagcgcccgctgcct

SEQ ID NO: 335921 - DNA, 122 bp, Homo sapiens
aatgtggaaagcaaatctgtgttttcatttaaatctttcattaaaatgcgtgggaggaaacggtggcgaatcccaaaccgaggacctgtctttactgcacaccttaggtgtctccatttcca

SEQ ID NO: 335922 - DNA, 122 bp, Homo sapiens
ggactgggggccaatttgttccacttgaagggaaaatagaagcacctgtaaaatcacccacgaactaaagtcttggcaggaaaaagcctatttgagtttaggaattcttaccctgggcaaca

SEQ ID NO: 335923 - DNA, 122 bp, Homo sapiens
gtgcagcgtgtgtgacttcgcccctgcccggcatggcctcaggtcccgttgataatgtagcgtcttatggccacagtcagttctgctgggccatggtctccttttattttttaatttttaaa

SEQ ID NO: 335924 - DNA, 122 bp, Homo sapiens
gaccttgggtggaatcagggtgagacattgaggctgggcgagaaggtcaatatgaagaatcgtctagagcaggcatctgcaaacagtatctgtaaagggctttgcagttggtcgttgttgca

SEQ ID NO: 335925 - DNA, 122 bp, Homo sapiens
ccagcccccatcccaccgacctaaacagtcaggcttgagagactggaagggtttcacttccgcctggctgcaggaaccacaagttccagactaggtcgtaattggaataatcacagtcaaaa

SEQ ID NO: 335926 - DNA, 122 bp, Homo sapiens
atgtaacctctataccttcttcacgttctgatctgagtggaggtcctcttcggtccctgtcgtctcttagatctcgtctttctcttagatcacgccggtcatccctctcacggcgacggtca

SEQ ID NO: 335927 - DNA, 122 bp, Homo sapiens
tctttctcgttggggagccaatgttagtgcgtgttggctttaatccctgcccgcttgcgtcggccttcagggtgcctggtctggtttggggtctagagcgaggcagtgagttattttgatgt

SEQ ID NO: 335928 - DNA, 122 bp, Homo sapiens
cggtttcgtttctctgtagtgaaacttctccttggactatcgttggagatgcagcctccccggggccggaacccccgacgagtcagcaaaggccacaagcgccgcgccatggacgcagccat

SEQ ID NO: 335929 - DNA, 122 bp, Homo sapiens
ctctgcggggactacaacggcctgcagagctattcagaattcctctctgacggtgaggcccggagggcttggagggggcagggtaggctacgggcccccaggagccctagctgaagggccgt

SEQ ID NO: 335930 - DNA, 122 bp, Homo sapiens
cactctgcctttttttttcttttttttctgtctcatccactatcaaatccagagtttgaacggctccttctgccaatgaaaagtaataacaaaggagaaaagctagtggagatcagtattac

SEQ ID NO: 335931 - DNA, 122 bp, Homo sapiens
ccggtgagcacgggccgggggctcagcggcatttccggtgagcacgggccgggggctcagcggcatttccggtgagcacgggctgggggctgagcaacaggacacaaaacacaggagagccg

SEQ ID NO: 335932 - DNA, 122 bp, Homo sapiens
tggtttgggacacccagcccggccttcatgaggcgccccccgcccagctccgcccctccacgcccctgtctttagtctcttaggcggtggccgccgccgccacagccctgggcctggcaccc

SEQ ID NO: 335933 - DNA, 122 bp, Homo sapiens
taaccactatagcatctgtacttagtgtgaattatttttatgaaaaccactttgctgatgcgaaaacagacctctcatgctcattaggtgtctttcacagcttgttttttagcatcacaaga

SEQ ID NO: 335934 - DNA, 122 bp, Homo sapiens
taagcatatttacaaaatatacaaggaaaaggacctgattccctggctgggtgagtgaaacgttaattcttcaccttggcacctcaacctacagctgtaataagggccgttatgcccaaata

SEQ ID NO: 335935 - DNA, 122 bp, Homo sapiens
ccacggggctcagacattctatcaaccctgcggccagagggtgctttgaggcaggcagcacgaagcacatcgcaaccgcccggggacggcacagtctgtcatcccgtgtttattccccgcac

SEQ ID NO: 335936 - DNA, 122 bp, Homo sapiens
ggctcccagaaggagagcacaaggtgcagatggttgccctgtatgagaaaagggagccctcgtgggaagagccaggacattattgtgggtagggcaaagaaataagaaaccctaggtgggag

SEQ ID NO: 335937 - DNA, 122 bp, Homo sapiens
ccctcgaggatgactccactagctccctgggaccccaactacgaagccaaagcaggacctcggctggtttggggggccaactgtagctcaggagcctcgttctcaggccagacggtgtgtca

SEQ ID NO: 335938 - DNA, 122 bp, Homo sapiens
acaccacctccagcactgaggaccaaatttcaacatgattgatagcccagctcaaagagccgcttgtctttgagctgggatatcagtgttctgccttcacactcagattggaacttacacca

SEQ ID NO: 335939 - DNA, 122 bp, Homo sapiens
cacagtaactgttttgtaccgaggccagctgtactcgggagcaggaaagctgtggaccagcgcctttccattctgggaaacacaagccttgcccactattcctcatcacggatctcccaagc

SEQ ID NO: 335940 - DNA, 122 bp, Homo sapiens
gccggttgcagtggctcacgcctgtaattccagcactttgggaggccgaggcaggcggatcgcttgaacccagcagttggaaaccaggctgggcaacatgaggaaaccttgtctctacaaaa

SEQ ID NO: 335941 - DNA, 122 bp, Homo sapiens
catccttaagtggcaaaaacacttttcagaaactgagaaaagtagaaatgacattccagtcgtctgcttttgtagacagtttgtgtaactttgcctgcaaagggtatctttgccccgtggta

SEQ ID NO: 335942 - DNA, 122 bp, Homo sapiens
aaaataacagtattttgtgcattcataatgatgagccattagcactgtctgtgaatagaacgtgcagagatggaataacgtgagttgttttaccaagaagcagatggttctaagatctgata

SEQ ID NO: 335943 - DNA, 122 bp, Homo sapiens
cccagcgccggcttgtccagccctcccgatggccgtcctgggggtgcttggcgtcacccgcgtggaggcagattgtcacgctcggcagctccccagctccgggggcttttacgactggcatc

SEQ ID NO: 335944 - DNA, 122 bp, Homo sapiens
ccctcccggcgggctgtccccgcagtgctcccggacccggcgagccttcggggcgcgcgtcgctggtggtggttgaggctctagcgataataaatgatagaggatacaatgactttgctgtc

SEQ ID NO: 335945 - DNA, 122 bp, Homo sapiens
ccggagggacgaggcgacacgcgcgcgacgcaggacaaatcggagcttgggaaatctccccgtcccccaagcttcagaggggggtaaaatcagaaaatgtgtgtgatggtgggagagagatc

SEQ ID NO: 335946 - DNA, 122 bp, Homo sapiens
tatgtctgcactccgaaggaaatttggggacgattatcaggtagtgaccacatcgtccagcggctcgggcttgcagccccaggggccaggccaggaccctcagcagcagcttgtgcccaaga

SEQ ID NO: 335947 - DNA, 122 bp, Homo sapiens
tcgggctgcccttgttctcctgcttggtcgtgaccctggacttgaggcttctgggctgcacgttcgtctttgctaaccggggaggtttgcgaaaggcgaactctttatgggcgcccttcaga

SEQ ID NO: 335948 - DNA, 122 bp, Homo sapiens
caacctccgacatggtccggcggatggacgtgaacttgtgcagcgggatcctgtcaaccacgggtcggggcatatcagggaggccctcccgcctgccggccgacgctgccaatgctgcacat

SEQ ID NO: 335949 - DNA, 122 bp, Homo sapiens
tgacctcgtgatccgcccgccttggcctcccaaagtgctgggattacaggtgtgagccaccgtgcccggccgccataggcctccatttctgtctctgacagtctacctttctattcctcttg

SEQ ID NO: 335950 - DNA, 122 bp, Homo sapiens
catctcaggagagagaggccacaccactgtccgcgtcagaagccgggccccacgagaccacgggcagggatgcccatgcagccgcaccccagaagtaggcaacctggggtcaaggccgctct

SEQ ID NO: 335951 - DNA, 122 bp, Homo sapiens
gagcaagactccatctcaaaaaaaaaaaaaaaaaaaaaagaaagaaaatctcaactggaacggcctctataagtataaactagggtagcatttgctggtaaaattcagtacctatggcctcc

SEQ ID NO: 335952 - DNA, 122 bp, Homo sapiens
aggttattttccaaaatcttaaggaaaaaaaaacaaaaacaaacagaaaaacctaaccttcgcaaggctgagagctgtagtgtttaccgaaggctttgtctttgggaatgtcaggatatagg

SEQ ID NO: 335953 - DNA, 122 bp, Homo sapiens
gtgatgataggtgcggtaacaagtttatttctcccttacaagagtccactgtgggccaggcgcggtgggtcacgcctgtaatcccaacactttgggaagccgaggcaggcgggatcatctga

SEQ ID NO: 335954 - DNA, 122 bp, Homo sapiens
ggcaggaccggccggacctgtgggacccggggccctggctgtctagggaggctgtcaccccgaggcgaccggctcttccggggctgggacggctgtaggcggcaagaggcctcggcacccgc

SEQ ID NO: 335955 - DNA, 122 bp, Homo sapiens
ttccggaattcagagagttgctgtcgccgctgggggtgggactgtctgcggtgtccgcggcgggcgtccagcctgggaggcgctggttcaacctgtggctcctcccagggtcagccgcgcgt

SEQ ID NO: 335956 - DNA, 122 bp, Homo sapiens
cgtgaaggaagaaggcgcagtggggctgaggcctcactagggcacccacacggagcgctgcgctcagccttctggacccggtacctccccaggctctgaggacagcagcagccccaggacgg

SEQ ID NO: 335957 - DNA, 122 bp, Homo sapiens
ctcgcttatttcattgttcccccatcttcagggagcgggggcagcggctcctcaaggcggcgggcgccggcgtcttcagagcgccatgcgaaccgcggagcgagtgtggcatctctaccagg

SEQ ID NO: 335958 - DNA, 122 bp, Homo sapiens
tccacctctggcctggcccagcttacgtggtccagcttgtgcaagatccaattccaactccgggtttccggcttttggccactcaggattggacctgggactggagctggtcggccctgcag

SEQ ID NO: 335959 - DNA, 122 bp, Homo sapiens
aaaatgagaataacacagctctccaaatggcacgacacccgctaccttttggcttggagacgctgccccgaaggcggaacctccaggacagctacgtagcgtcccgagcactcagactgaag

SEQ ID NO: 335960 - DNA, 122 bp, Homo sapiens
ttgtctcccccgcgttctctcccggcgcgctctctctctcattcatgtctctgatccacacgtctgttccagcagagccgctgcctccgtattaatttttatgacctgggctttgaggagag

SEQ ID NO: 335961 - DNA, 122 bp, Homo sapiens
tggtcttcatggttatttatgaggcttgacttaagctgggtcctgttcttaacaggagaacgatacagcttcccccggccgctgggttctctttctgtgatgcaaggatacatcgctgcact

SEQ ID NO: 335962 - DNA, 122 bp, Homo sapiens
agcaggggcgcgggcccgggcttcaggctgtggggccgggagtgcggggcgggactgctgcggccccgcgtcctgtggagtctgcggcgcggggagtgggggtcggggcggggaggaacgtg

SEQ ID NO: 335963 - DNA, 122 bp, Homo sapiens
attataattcaatcaatgaaggaaccactaaacaaatatacaaataaagtatgttggatgcgactaagcgttctctaactgtaaaaataatttgtgaggcaaaaaaagctatgatatggcca

SEQ ID NO: 335964 - DNA, 122 bp, Homo sapiens
ccctgcttaggggagaggtggggtgtagctgatggtggaaatcagaaaggagttttgcaccgggagcagatcacagggactgatttgaaaaggtaagataaaacatgaggatcgctggggtc

SEQ ID NO: 335965 - DNA, 122 bp, Homo sapiens
tgcacccatatggctgggcaggcacaggcagtgaggccgaggccaatagcgagtgatgagcgggatcctaggactgatctgtagcccatgctgatgtcacccaccagggcaatccatctgga

SEQ ID NO: 335966 - DNA, 122 bp, Homo sapiens
tagctaacataatgaacgtaaaataaatattagtgtctttcagtggggcacggtggttcacgtctgtaatcccagcactttgggaggtggaagtgggtggatcacccgaggtcaggagtttg

SEQ ID NO: 335967 - DNA, 122 bp, Homo sapiens
cccaggaggatggctgagagacaaccgtcttgaagtgcgggtgcctatggggaatgacagcgagcaagtttgtttgctctttttctttttcttttcaatctggaaagctgcaatcaatgagt

SEQ ID NO: 335968 - DNA, 122 bp, Homo sapiens
atgaggacagaccaccttagtccctccctgcacgtgtgagtttagcctggcacatgctcacgctccggttttatttaaaatgcgttctctttctgtctcgtgctggtggcttggtaagctgg

SEQ ID NO: 335969 - DNA, 122 bp, Homo sapiens
ggagactttaccactctgagattgtaaatctgtaaaatagagatgtaggattagcccatacggtagttgtggtaaatactgtgagacaataaggggcctgggacacagcattcaaatgggaa

SEQ ID NO: 335970 - DNA, 122 bp, Homo sapiens
cagggcttctccctagggcgtgcccttagaagattccaggcagcaggcggtaaggcactgcggcggtgtagcgctcccagtcccggccgtacttgctggcgcagcggtgctcgtcccggagg

SEQ ID NO: 335971 - DNA, 122 bp, Homo sapiens
aaggaacagccattacacacggccattaaatgtttaaagggcacaggtgctctgttgcaacggcctttgaaggtcaacaagtcctgttttcctagaaaggcctctggatagatctatttttc

SEQ ID NO: 335972 - DNA, 122 bp, Homo sapiens
gcatgagccactgtgcctggcccaggctaagccttatatagtaccctgtgcttgctctctcgtgacagacaccttctaaggtcttggttttctagtcccttaatttttccatcatttcaaaa

SEQ ID NO: 335973 - DNA, 122 bp, Homo sapiens
ctcggcacgacctggcacatcctgtgggctggaggtggccggaatgggcgggcttgggaacgtgatgcccgggtaccgtgcctacaaggacgctgggtcatgactgttctctggaggctacg

SEQ ID NO: 335974 - DNA, 122 bp, Homo sapiens
ccatttcccagcttccaggtgtccgggtgtcctccttaaaagccagtgtgggtcccagcgcgacagacgctgatacagaccttccagggcgtctctctctcagcgccagagccaggactcag

SEQ ID NO: 335975 - DNA, 122 bp, Homo sapiens
gtctcccgagccccccgcgtccccgccgcccccgccccgccgccgccgcgagcgcccgtccgagatgaagaaggcgtccatggagtagctgtcggtcactgccgcctcccctcggaagtagc

SEQ ID NO: 335976 - DNA, 122 bp, Homo sapiens
cagcctcggcgggaggggcggacgcagggcccgccccgcgtccctgatctggccgctcggcgtccgcggctgtcgccctagtcccgccttctcgccaaagctgaccaatcaaacgcctaggc

SEQ ID NO: 335977 - DNA, 122 bp, Homo sapiens
catgcaggcctgtgtgtcactttcaggcccttcctcatttattcataatatgtgtagccacgaggtagcatttcctttggcatcctggagaaacatgtctcacttagggttggacctgttag

SEQ ID NO: 335978 - DNA, 122 bp, Homo sapiens
cccctttcccactctgcattccagtaacactgaactatttatggttactggaacttaacacgttcttgctaagcttttgcttatgatacgtcccttgcttggaatttccttctctcctggtc

SEQ ID NO: 335979 - DNA, 122 bp, Homo sapiens
ttttggggggaccgggggtggtatgtgcatatctggctctctattttatttttatacaaacgatagcatatactgtttgtcttgccctcaggtttggtttctgttgccgctgttgttttctt

SEQ ID NO: 335980 - DNA, 122 bp, Homo sapiens
cgcgcccctgctcatttcccgggctgccttttgggggcactctgatgccggggatttcctcgggtgttggggaaacaagacgtgctcgcctaacaaagactcaatctacaaaggctgcaaaa

SEQ ID NO: 335981 - DNA, 122 bp, Homo sapiens
gagaacagaaagatttacactcacttatgtcagctaaaaaaatgtacccttgtctcattgcggtaaaagagcctccactgctcagatgcttctgatggaaagtctaccccctgctccgatac

SEQ ID NO: 335982 - DNA, 122 bp, Homo sapiens
gtcaaatgctctcagagaacgggatgagtgaacacaagtcagatgctctcagatagagaacgggatgagtgaagacaagtcagatgctctcagatagagaacggtatgagtgaagacaagtc

SEQ ID NO: 335983 - DNA, 122 bp, Homo sapiens
tcttaatcaaggacattcccatggagcccaagattacaaatgtactcagggctgtttattcggtggctccctggtttgcatttacctcatataaagaatgggaaggagaccattgggtaacc

SEQ ID NO: 335984 - DNA, 122 bp, Homo sapiens
agtcaggtgatggactcctccctgaaactgcacgaggtcacctctcctatccccgtattccgtttggatccttatgccaacgtgttaggaaggccccctctggtgggttttgtactgtctct

SEQ ID NO: 335985 - DNA, 122 bp, Homo sapiens
aggtaactactgttaacatctctattccctccagttcttctaatgtctatgtttttatatcgttttcatgctgaattttgaagtcttcaaagtacatttctgcttccatttataaatgttaa

SEQ ID NO: 335986 - DNA, 122 bp, Homo sapiens
acttgaacacgctcctgggaaattgccaaacccatttccagctccctacaacttttagtacgcttcctcgaaaatgttttggtaaatatcattttatccatttcattacattttcagtggtg

SEQ ID NO: 335987 - DNA, 122 bp, Homo sapiens
tctgtgcaaagcagaatatggtgttgggaggagtagaatcacaggatttgagggctgaggcgggagacaaattcaggggtacctcccatttatagagtgtttcgtagtttctagatcacagc

SEQ ID NO: 335988 - DNA, 122 bp, Homo sapiens
tacccggcgggggtcctggaggtgagcgagcggcggctgcaggagggcctggcggcagtgcgcgaggagctgggcgccgggattgaggcgctgcgcgcggagcttcgagcggagctggatgc

SEQ ID NO: 335989 - DNA, 122 bp, Homo sapiens
ggtgggagtggacggggctgggcagtgactgctgccaaggcagggggctggcgcgagggacgggggtagggggctgggcaggcatcggtgtcgcctcgcagggaacagttgggtggcttcca

SEQ ID NO: 335990 - DNA, 122 bp, Homo sapiens
ccgacgccaggcagaaccctttgggcggggccgtatctggccctccggggacggcagtgacgacacccccagaaatgtgggcttcagggctggccacagggtaccctcagaagcccgcagct

SEQ ID NO: 335991 - DNA, 122 bp, Homo sapiens
cagcgcccaggcaagcgcttaaaactgcagcctcctccacacctttgcacgtggggaaaccgaagcagaaccctgtctctttcacttttcttcccttcgctaagacttttttatatttgtaa

SEQ ID NO: 335992 - DNA, 122 bp, Homo sapiens
cgacagtgcgcttgcaaatccacgagagaacgtgcactcctcccacggtgagagggcgagcggcagcacacacaggcgcctgctgtccaaggtctaattttcttttgctttttccttttaga

SEQ ID NO: 335993 - DNA, 122 bp, Homo sapiens
atgtatatataggcaagaaattctgaattgtgtggagtatataagagagcatctaccgttcggaaaatggaaatctgtgtggactggggcaattagttaaaactttaagtagcattatataa

SEQ ID NO: 335994 - DNA, 122 bp, Homo sapiens
aacgcacagattttcagcgtacacttcatgagtttcggcaaatgtattcacccgtggaaccgccaccccagtgagggtacagcacgtttccaacaccccaggaagtcccaggacacttccca

SEQ ID NO: 335995 - DNA, 122 bp, Homo sapiens
ctcccagcatttcatgattccgcttccctgctccgtaaaaccgaagaaaaccgagatttccgtcaccgagaaatgcacttagcaagagggggaaattcggtgttttaaatgtcacatttttg

SEQ ID NO: 335996 - DNA, 122 bp, Homo sapiens
gtgggggctggccctcagacagggtcatatcccgtaagtagaactttaacttcttgaaatcgttctcctcaaggtcactcaaggcccagagcaatgcctcccggggctttctggccttggcc

SEQ ID NO: 335997 - DNA, 122 bp, Homo sapiens
tgatgaagagtcagtgagctgatgcctaccgggcattagtggagcactaaggagggcagccgtgccaggcaggccttgtgccgggtactggaggcacgatggtggatggccagaatgatggc

SEQ ID NO: 335998 - DNA, 122 bp, Homo sapiens
taggcctaattttgttttccccacaagatggggcatttcagaaattgtggagctgaagaacgactggaaagctggaggttaatataggatggggactatttagcaattctgacaataaggct

SEQ ID NO: 335999 - DNA, 122 bp, Homo sapiens
tccagagccttctctcctcaagtaaacaaaaagactaagttggccgggcgtggtggctcacgcctgtaatcccagcactttgtgaggccgagacaggcagatcacaaggtcaggagatcgag

SEQ ID NO: 336000 - DNA, 122 bp, Homo sapiens
ccgcagggcgctctccggcctcgaccacagcctccgcctagctccctgtccccggccttccgcatacaaggggtcccagccgataagccctccttagccaatagccaacccgggacccacac

SEQ ID NO: 336001 - DNA, 122 bp, Homo sapiens
gattttgagttctctaccctgggatgttacccagtattaccagctgtttctcacagtgaccgattgtggtcatgaatccttggggattcatgatatttttataatacatgcactcagggaaa

SEQ ID NO: 336002 - DNA, 122 bp, Homo sapiens
acgttctaaggtctcctgttgatttttgactgactccattttcccatctctaaaatgacacgatttacttagatacagggcttaatatttttgaaatttctattcagttaaaagtacatggt

SEQ ID NO: 336003 - DNA, 122 bp, Homo sapiens
ggttaagaaacatgccccaagttcaaacagccagaaaatgacaaggctgggataagaactcgtctgtctgatttcaaagtcattgggttttcacgctgtgtaggttgaagaatttcttaatg

SEQ ID NO: 336004 - DNA, 122 bp, Homo sapiens
agaagcgccctcaggcaacttcgtggacatgagccttcttccagccaccaccaccaccatcgtgcggtacttgaagaaatggtttaccgtcccacatacattttgaatatgtatgtgggatg

SEQ ID NO: 336005 - DNA, 122 bp, Homo sapiens
aggagcccccggcggcggcggcggcggcggcggcggcggcactcacccatagtacggatgcgctgcaaactgcacatgctcgcgtctgacaggcgctcgccctgccgcccggcttaactcct

SEQ ID NO: 336006 - DNA, 122 bp, Homo sapiens
accggtttccctcctctctattttgctctccttgaatccacactctataacattatggcccggactttcagaagcacatctgattatgtcaccttcctaccataaatcatttagcacttctt

SEQ ID NO: 336007 - DNA, 122 bp, Homo sapiens
tcccctgagtggtggcggcagcagcacctgggagcttgttagaaatgctgaatctcgctccgccagaccgccgccgcgccgccatcatggacaccagccgtgtgcagcctatcaagctggcc

SEQ ID NO: 336008 - DNA, 122 bp, Homo sapiens
caataacagataactatgaggcctgcaagagtatattatttttctggctgctatttactgcgtgtttaaagtgtactttgcatacgctatataatttaattctcacaacaatcctatgtagt

SEQ ID NO: 336009 - DNA, 122 bp, Homo sapiens
ttgtcttacctataacacttaataaagcattaaggacactgttccacctaatgatgtttccggggtttctggtatctcattagggactcatctaatatgactgatatatcaacagtaagcag

SEQ ID NO: 336010 - DNA, 122 bp, Homo sapiens
ctgtaagagaaaagtttgctcccccatgccctgtactgaagacggcagtgaggggagggccggtctgctgaaccccatcccagtggctgcgttgctcatgctctgacggtgggttccaggac

SEQ ID NO: 336011 - DNA, 122 bp, Homo sapiens
aatgtacatgtcttctcattatggagattttagtcactctgaggtttctctcttgagagtcgccaggatgtgagctgaaatgagtcaatataaggccttgtgtttgggagtctctggtgttg

SEQ ID NO: 336012 - DNA, 122 bp, Homo sapiens
acgcatcctggaggcgcgggcttggggatgggactgcccgcccgggtcctgaacaggatgcgtgcgcgcaggcacacacacaccagccagcctgtgtgtgcggccggagtccggtgcggtcc

SEQ ID NO: 336013 - DNA, 122 bp, Homo sapiens
ggggcgcagcgctggaaggatccgcgtccaaggtctagtccccgaagcctgtcgggaggccgggcgggcggtgccgagccaatgtgaacaactcttgcagtcacttttcttggaaatgggaa

SEQ ID NO: 336014 - DNA, 122 bp, Homo sapiens
ggtttttttttttttctttttttttttttgccggagtcgagcgggtgctgctagcggaggcgccatattggaggggacaaaactccggcgacagcgagtgacacaaataaacccctggaccc

SEQ ID NO: 336015 - DNA, 122 bp, Homo sapiens
ctcctacccggccgggacttcgcgcctcctcggagcccttctcctctccgccacgccccgcgaacttagtcggcctcgcctccgggtgcccgaacactgcctcatcccctagttatggcctc

SEQ ID NO: 336016 - DNA, 122 bp, Homo sapiens
caaagtgagcaggagccgcgatccccgcgcgagcgcttggaggtgagcagtcccgcgccgcggctcagccagctctcgcccgcgggactacagcccagcgacctcgccccgccctcccgcag

SEQ ID NO: 336017 - DNA, 122 bp, Homo sapiens
cctgtggcgatttggtggcatctggcaaaagccactctccagacgcaggccctttaaccccgtaagcccgggccaaggacgactcaccggggccaccttgcttgtgggtgggatggggcctc

SEQ ID NO: 336018 - DNA, 122 bp, Homo sapiens
agtgggtagcctcgccctgggaggggcttgagcagccttgaggtgcttttgtgctttgcacgttcgtaattgtgaacctcaacgcaaagcaggtgttgttgtaaatctggtgtctctgtgga

SEQ ID NO: 336019 - DNA, 122 bp, Homo sapiens
agggatgcgtcctacccgcgccatcgccccgtggcccaggacggggacctccccttagtccgtcctcccaccgccgggccctgccccgcatcccggccttatgcactgcccctcccacccgg

SEQ ID NO: 336020 - DNA, 122 bp, Homo sapiens
agcgtttccagccccgagaactttgttctttttgtcccgccccctgcgcccaaccgcctgcgccgccttccggcccgagttctggagactcaacatgaagctaccggccagggttttcttta

SEQ ID NO: 336021 - DNA, 122 bp, Homo sapiens
agtggaggctggggatcggtgaattattgataaaaggagagctcttaacctagcctggcacgttgtaagcgctgttagcatgattattggtgcagaaaacactcattagacacacctggtaa

SEQ ID NO: 336022 - DNA, 122 bp, Homo sapiens
cataaatgaagttctgaatgacctgtggtcagtatgggaatttggaactagccaggagcacgtcattaaaaaaataataataataagtattcaaagctaaagttactttactttacccaaat

SEQ ID NO: 336023 - DNA, 122 bp, Homo sapiens
cgtcccctcccgcccgcgcccccctcgccgggccccgccccgcgccccccgccccgcccgcgccccccgccgggccgcgccccccgccccccatgcaccacctcctggagcagtcggcggac

SEQ ID NO: 336024 - DNA, 122 bp, Homo sapiens
agtgttgttgcctgtcttatgatgatgctggttttcagccaaccttgagtgagtaaaagccgggtctgaggtctcagtgcctgcgtggctgatatgagcagcttgcatttctgactgggccc

SEQ ID NO: 336025 - DNA, 122 bp, Homo sapiens
aacaaaggaaggtgttttggggtacaactttattgagatgtaatccacatacacacaatccgcccattaaagctcacagcgaagtgtgttttagttattcacagatatctgcaactatcacc

SEQ ID NO: 336026 - DNA, 122 bp, Homo sapiens
tggggctgcttcccgcgcgttccctgcccgcccgcctgacattcccccgccctggccggccgggcagggacaggctgccccagacactaccgccttgtctccagcctgggaggcggccacac

SEQ ID NO: 336027 - DNA, 122 bp, Homo sapiens
tgcgagaagtttcctaaaatttaaggtagggggaacggagtttgcaaactcctttcaccccgatgggcattagcagacacctccggttttagaaaagcgttacaaacagttcttccacgatg

SEQ ID NO: 336028 - DNA, 122 bp, Homo sapiens
tcccggcgcgccgcaggaaggtgcaggcagaggaaccggaggcgacggggaaaactgtggcgccccaagggggcttctggcacggcgccgccaggcaactccccagggcacgcgtcctaggt

SEQ ID NO: 336029 - DNA, 122 bp, Homo sapiens
ccgaagaaatgaagttacaggaggggcacaccgtccttttgtctctgcctttgaggttggcgggaactgaaactggtacggtctttttgaatagaaatttggggtctttctggcgacgtaaa

SEQ ID NO: 336030 - DNA, 122 bp, Homo sapiens
gcttagaacataacctcccctctgggaaactcagcacaggctgctggtgagcagaggacacggaaccatgagggctgggctggccaatccatgggctctgggtagttccttcccagaataag

SEQ ID NO: 336031 - DNA, 122 bp, Homo sapiens
tttgttttgttttttggttaaagactctgttctccccttcccccacagccctaatctcagcgttctgaagtaggcaaaagcctccctgtccctaactcccattattactcttcagtagaaaa

SEQ ID NO: 336032 - DNA, 122 bp, Homo sapiens
aaacaaaagacatcgcatcggcaggtctgtttgcaacttctgggatacaccaggtgttagcggtgatgacttctggatgcttggactgtggatttttaaaatggttttatctgctcatctgt

SEQ ID NO: 336033 - DNA, 122 bp, Homo sapiens
cctcccgcctcccgccgaccccgccgcgccgccggcagccctccccagcccccgcgagcccgcgcccttgcccgcaccgccaggtgtccctcggccgcgcaccactcaccggctcccggcgc

SEQ ID NO: 336034 - DNA, 122 bp, Homo sapiens
ggcgcggggggaggagagggccgggcctgggaagatgctgcggaggacgctgcggattcgcgagcccggggtaaggcggcggcgcaccgccccctcccgccgcttcccccccaccccgcccc

SEQ ID NO: 336035 - DNA, 122 bp, Homo sapiens
ggcctcaggcacgggccagggacctaggaaaagcggcaaggacctgttgccccttatccacgtccccgtactggctcagggaaaggctgcccaccacccacagcccctggacagcttcctct

SEQ ID NO: 336036 - DNA, 122 bp, Homo sapiens
accttctctggaagtgctttcctggctgtatgaaatcgatggaataacgtgcttagcatccgttcatgaaaccaaatgatgtgatacgataaataggatgtgatatgataaatgataaatag

SEQ ID NO: 336037 - DNA, 122 bp, Homo sapiens
atgtatacatgcgtacatatttcctccaccacattaggaggcatcatattgttatcaattcgccgcagcgctcagcaatagatcaatgtgcctgccttcgcagggagggattgatgggccgg

SEQ ID NO: 336038 - DNA, 122 bp, Homo sapiens
ggccaaagcgagcacgccacggcatcctatagcccctcaaatatgtggggcgtgaggcttcggggaacatcaggaagtgcctgtaagagaaaagtaagctgggaaaagcaagaaaatgacaa

SEQ ID NO: 336039 - DNA, 122 bp, Homo sapiens
gcaaggctgggtccagaggtgagcttatgaggaaaccagaaagattaacagggtcccaatcgctaagattcccatttccacaagtggtgggcatcttgccacttaactagggtcacagagct

SEQ ID NO: 336040 - DNA, 122 bp, Homo sapiens
ttcaggagcctccgggggacccaccatcgaagaagtggactaagcttgcactcaagtcagcgtaaacctctttgcctttctctctctctctttttttttgtttgtttctttgaaatgtcctt

SEQ ID NO: 336041 - DNA, 122 bp, Homo sapiens
gaagcctccttcccagcttccccggcggcggcgccgtgacgtcacttccgttctccagcgcgcacgtgggaggaagtgctggtgccctctgccgctgctcccgtctctttggttacgctcgt

SEQ ID NO: 336042 - DNA, 122 bp, Homo sapiens
cttaccatatccatagacagaggccggagtgctcgcggagctggtctgaggtcctgagggcgagggaagtctcttgcatgggagaacgtgggtaccgggaggatagaggagaggtctgccgg

SEQ ID NO: 336043 - DNA, 122 bp, Homo sapiens
ctgcccccgactgtaaaacgaactgcttggttttgataggttgtggtttcaccaccactgcgagcctcaaggcccctggcaccgccacagcaagggaaaaaactttgcgcgtgcagcccctc

SEQ ID NO: 336044 - DNA, 122 bp, Homo sapiens
aaggactggccacggactgaaggagaggacagggaagtaggggggaactggggtggggggcgagggcacccactgctgccttgtcccagggacaggccaccccctggcagccgcagcccaag

SEQ ID NO: 336045 - DNA, 122 bp, Homo sapiens
ttagctcccggcgccggggacgggaccggtgggctgggaggctggccaggggcggagcgccgggggcggggcctgggcagagggcggagctcctgggttgaggggcgtgcactggggtggag

SEQ ID NO: 336046 - DNA, 122 bp, Homo sapiens
actactcctctttccagcacatcaggaagggcggcttctgcgaccagtacctggcggtgccgcagcacccctaccagtgggcgaagcccaagcccctgtcccctacgtcctacatgaggtga

SEQ ID NO: 336047 - DNA, 122 bp, Homo sapiens
ccaagtttcttgaaactcggaggctcagctcagtgtaaaaacatgggggttctcctgagtcggtttccctgaccacagggggacccctgcaaacacggcctcctctttaatacctttgtaac

SEQ ID NO: 336048 - DNA, 122 bp, Homo sapiens
ccccatttcccgcgtgccccttagctctcaagggcatctttgccctttgagataaagcaacgccgagcttgttgctgcaggggacagcactttcgctcggattttcgcattaaaatgtgaca

SEQ ID NO: 336049 - DNA, 122 bp, Homo sapiens
tgccaataaggacacaaggaaagtggtagcgtacccttgtcacttcccaaagtctcccagcgggataccggtgccctctgcccttaatcaagatggccgccttgggggggctctagcgcaca

SEQ ID NO: 336050 - DNA, 122 bp, Homo sapiens
tcggtgccccgaagagcacaggcactgagcccgagccagccgggctcctgcagtgctgggcgcaggccctggagcatgaggggccccggacaccacctgcggagggagtggcctgtgggcct

SEQ ID NO: 336051 - DNA, 122 bp, Homo sapiens
ttaaaaaaaaaaacattttggaggtacctagtgtctgagcggcacagacgagatctcgatcgaaggcgagatggcggacgtgctagatcttcacgaggctgggggcgaagatttcgccatgg

SEQ ID NO: 336052 - DNA, 122 bp, Homo sapiens
cgtgtgcggactgaagggaaggctgcgggagtgtgcttcgcgtcctctgtagtcgactaccgcagctcttctttgcattctggctctttaataatctcccttcgccctttctttaaatcagt

SEQ ID NO: 336053 - DNA, 122 bp, Homo sapiens
ccgcctaccagggcggggctcatgggaggggaccgagccgccctgctggggccctgacggcggcctaactcaatctaggcagtgtcccgtgcgtttggcttagtgaccaaatttaatcacac

SEQ ID NO: 336054 - DNA, 122 bp, Homo sapiens
cttcccagggcccgcctccccgccagggggcgatccacctccacttcctgtttccgcagccgccctaccaggagcctggcactctcctcagggcccgcctccccgccagggggcgcaccgcc

SEQ ID NO: 336055 - DNA, 122 bp, Homo sapiens
catctgacaaatgaccgccttggggatccgtggagctcagcggtgcccagagagagcactcgaaatgccagctggaaaggtcacgcacgccagctggaaggggagccgcgcagcccctgggc

SEQ ID NO: 336056 - DNA, 122 bp, Homo sapiens
cgttcgccattgggtgcgggtgacgtcgctcatttgcatggaggggcggggccaagccgccgacgcccgcccggccgccgttgccccggcgacgcgcggtaaacgccacaacagcgcgctgc

SEQ ID NO: 336057 - DNA, 122 bp, Homo sapiens
tgataaacccgatccaagtgtggactcatgagtccactcttgcacgcaaatcagtcacggcgcgtgagtgggaagggcttgttgataactgggtttcgattctcgaaacctcgggaagcgcg

SEQ ID NO: 336058 - DNA, 122 bp, Homo sapiens
gtgagcggtgatggcaggagcagctgcagaagagcagtggcaccactggaacctgtgccccgcgcccctgaagcagctgaccaggccacgcccaccttcgcatggtcgggacccgcccccag

SEQ ID NO: 336059 - DNA, 122 bp, Homo sapiens
actggggaatggtttcgggatgaaactgttccacctcagccattagattctcataaggagcgcctgacctagatccttcgcacgcacagttcacaataggatccgcgctcctatgagaatgt

SEQ ID NO: 336060 - DNA, 122 bp, Homo sapiens
ggcgttgctcaagctggcctgcggaggcgacggagacactaccgagaaccagatgttcgccgcccgcgtggtcatcctgctgctgccgtttgccgtcatcctggcctcctacggtgccgtgg

SEQ ID NO: 336061 - DNA, 122 bp, Homo sapiens
ttatttttaatatctatgttgtattcagcatattatgcgttaaaatctctcttggccgggcgcggtggctcacccctgtaatcccagcactttgggtggccaaggcgggtggatcacctgag

SEQ ID NO: 336062 - DNA, 122 bp, Homo sapiens
ccctccagttccaccagcaacctgaggaggcgttaggttgggcccaacccagacggcccacgagggcacagggaattcaagtgagctgctggaggacccacggccatcgagcgggggaacca

SEQ ID NO: 336063 - DNA, 122 bp, Homo sapiens
ctcatcgctggtggggctccaggctgggaacgggggtcgaggccgatgcgctgcgggcagcggccgccgggggcgctgcgggggccgcggttaaagccccggcgcgggcgcacgcgctcaga

SEQ ID NO: 336064 - DNA, 122 bp, Homo sapiens
aagcattcaattatttttcttccttgcatatacatgaaaggactcatacgagagagaatccgtatgaatgtaaggattgtgggaaagcattcagcttgcttaattgctttcatagacatgta

SEQ ID NO: 336065 - DNA, 122 bp, Homo sapiens
cgctactctgaccgttctacctgtgattctcgctggtggagtcaacctggaatggattcccgccgaaccacgcctccctttcctggttcgcccgcagtttcggcctatcaggttgagtcggg

SEQ ID NO: 336066 - DNA, 122 bp, Homo sapiens
tgactttgtcgtcaataaaaagtcccttgagggacttcagatgtaagtcccttagctgctcgttaaaactcccccagcctgacccaatacacaatcttgactttaaaccacttgtcattcta

SEQ ID NO: 336067 - DNA, 122 bp, Homo sapiens
ccaggtgtctccacagggctctttacctagctggggcaagtgatggcttggaggtggggccgccagtgactcaccctcgagaccaacgcagaggcccaagatgacagcaggacatgccgaac

SEQ ID NO: 336068 - DNA, 122 bp, Homo sapiens
aactttttttttttttttctgacgtgtaaagctgtaaccacaaattgtagcggccctccccggggtgggggtaggaggggggaggagggaagggagggcttctggggctccctctccctccc

SEQ ID NO: 336069 - DNA, 122 bp, Homo sapiens
cggcgggtccaggtctatgggaaccccagtgtgggtcccgttctgctggatgggagctgccgccatcatgtttgcagttcctgccgctgctaccgggagaaggttctcccttttgttttggc

SEQ ID NO: 336070 - DNA, 122 bp, Homo sapiens
aagacctgggctggatttgtgatgagctgtgtttactgagcatgatgaagtaaagctcaacgtgattactctgaagtccagccttactgtcagtctaaggactcaggatacaaatactcaaa

SEQ ID NO: 336071 - DNA, 122 bp, Homo sapiens
caagatcctggtggtttccactgggccagcgcaggcaagggtggtgcgggaagaaggccacgttaggtacataggccatgtccaaattcaggttccatccagcaagctcctatttcttggac

SEQ ID NO: 336072 - DNA, 122 bp, Homo sapiens
ggtaacctggaggtcgacagaccgggaggaacgctcgagggagcaccaggcctgttacaacgagcgcgcgccgacgcacgtctccacccacccggcgcaaccgccagagcgcgctcccagca

SEQ ID NO: 336073 - DNA, 122 bp, Homo sapiens
gggttagtatggcttagttaaactttggtttattgctaaaggtttatcactgctgtctcccgtggaggtgtggctaggctaagcgttttgagctgcgttgctgcgtgcttgatacctgttcc

SEQ ID NO: 336074 - DNA, 122 bp, Homo sapiens
cctttctctctgtgacacagacatgactggggactgcacgccagtgctggtgctgatggccgcagtgctgaccgtgactggagcagttcctgtcgccaggctccacggggctctcccggatg

SEQ ID NO: 336075 - DNA, 122 bp, Homo sapiens
cgctgcaggttaagatgacggaaaatacaactgcctacgcagctccaggatccagcaaaccgtttcccaaagcctggaagcaaaagaatagctgagccagagcgaacgtgagtgtgaaacct

SEQ ID NO: 336076 - DNA, 122 bp, Homo sapiens
aggtcaggtagtcagttcaaactatcatcaggtactgcatcaggctctaaagccagattacgtccgggtgatacatatttctcctctgagtccattgtaatcccattctggtagtctattac

SEQ ID NO: 336077 - DNA, 122 bp, Homo sapiens
cctattttcctgtggatagactaagcaaacgcttttcttcaggggcccggatagctcagtcggtagagcatcagacttttaatctgagggtccggggttcaagtccctgttcgggcggatgc

SEQ ID NO: 336078 - DNA, 122 bp, Homo sapiens
ggagtgttgagaattttgagatgcttgacgttggctctggcaacatggctttcgaagaatcggcatgggcatctgtagctcaggctgacgggcttccctagaagaggtaaggacaacaaggc

SEQ ID NO: 336079 - DNA, 122 bp, Homo sapiens
acagagactctggggtggggtgagggtgagagcctgagaaggctgttgcggaggacacaccggaaactgtcaccaggccctgccctcagccgacccgggccagggccaggagggcctcctgg

SEQ ID NO: 336080 - DNA, 122 bp, Homo sapiens
caggggacccagacaaagcccactttgtgcagggagttggccgcaggcggggaatgtgcgcgtcggcgcgcgccccctccccgctcccggccagctgcgagtcttggctcccggacttgtct

SEQ ID NO: 336081 - DNA, 122 bp, Homo sapiens
acatattctctgaaatgacaatgttcaagacgcagctaaagtcaccactctggcggtaagcgtgttacagagaactagatttctttccggcatccgcaacttggctggagtgaccaaggagg

SEQ ID NO: 336082 - DNA, 122 bp, Homo sapiens
agctagaaacactggccggtgtcgtagactgtacaaacaaaatcttttgaccctcataaccgtcctaacataagctgctgctattcccatttgcagactgaagttcggtgttttaagtaatc

SEQ ID NO: 336083 - DNA, 122 bp, Homo sapiens
ctacccaccgccacctgggcccttcgcccgccgggaggctccttatggggcaccccgcttcgacatgccagactttgaggacgatggtggcccctatggcgaatctgaggctcctgcgccac

SEQ ID NO: 336084 - DNA, 122 bp, Homo sapiens
ggctactcctgcgtgtctgggaggactcgcttgttcgtggcggtccctgtacctggagtgcggtgactcccaagtgtcagtggtctcagtgcacagctgtagttttctgcgtctctgtattc

SEQ ID NO: 336085 - DNA, 122 bp, Homo sapiens
cgtgcactgtgcatcagggagacctgcagctccgagctggggttcagcaggaactggtcccgcaggaagggtgagcaggcggccaagatgaccttgtggcctcgaaacttgaggctgtcggc

SEQ ID NO: 336086 - DNA, 122 bp, Homo sapiens
gctcaacttcacacagctagtgaggggctggttggagaccagattttccaagtggttccccgggccctcggggagcagcaagggccaggcgaacctccatgcactgcacaaacatgaagaag

SEQ ID NO: 336087 - DNA, 122 bp, Homo sapiens
tggaccactgttttctggcaaagctgttccattagggaatctcagccatggatggccccacgacctgctgggtccatactaccctcgctggtgaatgtgcttctggaaggctccatgagggt

SEQ ID NO: 336088 - DNA, 122 bp, Homo sapiens
cttaacggcccagatctaactgccaggtcctttctctttgtgttacgtctctataatctgcgtttctttgcaaaatggcattccatacacccttcatgtgattgctgcaaagtttatgtgat

SEQ ID NO: 336089 - DNA, 122 bp, Homo sapiens
ccgtgaagtcaggaatagctgaaccccttggataagcacacgctttgggcttctttaaagcgagcctctcatcaagagcatttcctttgctggcatgaggggagggctgtgcctgccagggc

SEQ ID NO: 336090 - DNA, 122 bp, Homo sapiens
acggatctcccaagctccccagctctttggactccccagctccttcctccccaggaccttcgatccgaatctggccgcacaaagtaaccccccaaacgccgcacctcgttatgacctgaagc

SEQ ID NO: 336091 - DNA, 122 bp, Homo sapiens
aacttttacatgtggtacggaacaaatgaacagaaaaggctcggcttacgaatcctctgccgttagttcatctgcacatgttctgacctctgaaactgaagcatgctggtaaatctcagagc

SEQ ID NO: 336092 - DNA, 122 bp, Homo sapiens
gcaggcatgggctttcagggctttcagagcaggggccgacggcattctccctcgggccagcggtcagatgtggggttcaggaaacaaggcccaggtggggatgaatcacagggctgtgattc

SEQ ID NO: 336093 - DNA, 122 bp, Homo sapiens
tggaaaatccagcgggatccccgagaccaaagccgactgtggaaggtcccattcaccgttcgcattggtcacacgtcgacacgatgccatgttggatagattgggttagaggtgtatttgct

SEQ ID NO: 336094 - DNA, 122 bp, Homo sapiens
aatctaagcgggagccaggttgccatcaatggcttgttcaaagagaatggatcataagaacgggggtgagctacatgatcttaatgcagtgtcaccaagcagtgatagcccagtgcactaat

SEQ ID NO: 336095 - DNA, 122 bp, Homo sapiens
ccgcccgcttctccagggctgaaaatggagaggctgaggcggcttggagagtgcgcactgcgcatgctccgcagagcatccccgcaggtcaaccggggcaagggagagacatgaaagcctgt

SEQ ID NO: 336096 - DNA, 122 bp, Homo sapiens
ggatcgcgcaccgctgctcacgcactctcctctgtcctgtgtcctccgtcccccgccccccgccccatccccaggtccttcccactgcgaagctgagaaccctagctccggccccgaccgga

SEQ ID NO: 336097 - DNA, 122 bp, Homo sapiens
tctgtgccggccggccagggactcactcagacttttatgttttaaaagatttatccaggccgggcgccgtggctcacgcctgtaatcccagcactttgggaggccgaggcgggcggatcacc

SEQ ID NO: 336098 - DNA, 122 bp, Homo sapiens
gcagccaagactgtgaaccactgatttggccaaactgcttaaaggagcaaacagggaaaacgaggccttagtaagtgaaatgtttaccactagtcacgtggccagccaggcacaggcctggc

SEQ ID NO: 336099 - DNA, 122 bp, Homo sapiens
agaaaagccccctcctggggtgaggcactggggctttctgccttgaagaaccctggaacacgggcctgggactgcagcaggtgcaggggaggctcctgattgtcccttctttctgtccacat

SEQ ID NO: 336100 - DNA, 122 bp, Homo sapiens
ctcactcctgggagccagtgacactttcttatttatttatttgcgccctgaaggacgactcggatttccaggccagccggaagaggcagaaagcgaacaggctgctcagaggtagtggccct

SEQ ID NO: 336101 - DNA, 122 bp, Homo sapiens
gttttttccaggagacacactgagctgagactcacttttctcttcctgaatttgaaccaccgtttccatcgtctcgtagtccgacgcctggggcgatggatccgtttacggaggtgagtgag

SEQ ID NO: 336102 - DNA, 122 bp, Homo sapiens
ggaggtaccggggaggagcgtgtgtggccccggcctctcactagcagcggcggctcccgacgctagcctgctcgagcgcacccagcaccctccccaagaccatggcccgcacctggacccgc

SEQ ID NO: 336103 - DNA, 122 bp, Homo sapiens
cagaacctgcaggcactggcaccacgacgctctcttagaaaaatgggtcctcagttctcgcgagagcagctgccctggctatccacgctcctctctgattggtcagctaagtgcgcatgcgc

SEQ ID NO: 336104 - DNA, 122 bp, Homo sapiens
aaaaggcagctatcagaggccatttggagagaagactgcctatggcatcatcccagcccacgcaagtgctgacgtttcctcaagcaccagctcgacctcagcacagttttactattgcctcc

SEQ ID NO: 336105 - DNA, 122 bp, Homo sapiens
ctcccccggggtggtgccggagggggggatgatgggtcgaggggtgtgtttatgtggaagcgagatgaccggcaggaacctgccccaatgggctgcagagtggttagtgagtgggtgacaga

SEQ ID NO: 336106 - DNA, 122 bp, Homo sapiens
ttctcggggctggctcaagactggctgtgttgtgcagccaccttggtgcccacagctgtacgggacgctcctgggaggaagggtcttgcttgcaccaaaccccaccccggcagccccgggaa

SEQ ID NO: 336107 - DNA, 122 bp, Homo sapiens
agggaaagcatatacctgcacacaaacacaaagcacaggaatgcagagtacgcttactatcgttgcaaagaaaaaatccagaaaccacactgaaagctacacaaggaaaaaacaagagaacc

SEQ ID NO: 336108 - DNA, 122 bp, Homo sapiens
tctgcaggcagctgggcagcgccaacggccaggcggaagacggaggcagctccacaggcccgcccaggagggctgagaccttcgcgggctacgactgcacaaacagccccaccaagagtaag

SEQ ID NO: 336109 - DNA, 122 bp, Homo sapiens
cggtgcactcctggcggggatctggccagtgcagcgcactgggaccgagggcagagcccgcggagtgaggccaggagagacttcaggcctctaaggacacagctgaggctaaggctgagttg

SEQ ID NO: 336110 - DNA, 122 bp, Homo sapiens
ctgcactcaagctcggtctcaggctctgccttgggggttcctgctcaaggcacagacccccgccaccccgtcacatgccagtgtcgtcctagcgtctctgcacagttgtgtccaggagtccc

SEQ ID NO: 336111 - DNA, 122 bp, Homo sapiens
taatttattgtaaggatcgatgctgtctttctggttagggcgagggcagcaatgcagccccgtccaggatggcggaaagtgaggacgggaaagctgtggggaacccaggggcgctctctccc

SEQ ID NO: 336112 - DNA, 122 bp, Homo sapiens
gaagggggcggactgaggctgcgtcacctgatgctgcgtcacctgatccagcgtccggagcgccttacagccattttcggtactggtgccatcacaactgctgatcgtttctgcaggattcc

SEQ ID NO: 336113 - DNA, 122 bp, Homo sapiens
ttgtggagcacagactgttgcgtgcttccaatccccaccctctttctgaaacacagtaaacggtgtccacttttcgcgacccatcaatgtgcgctgggcacttggtggacaggcatcttgcc

SEQ ID NO: 336114 - DNA, 122 bp, Homo sapiens
aaagaaaaaaagaagtaccttttctcttccttcatctctgccgtgattgtgaggcctttccggccatgtgaaactgtgagtccattaaacctcttttctctataaattacccagtctcaggt

SEQ ID NO: 336115 - DNA, 122 bp, Homo sapiens
ccgcccgcgccgccctgggcggggggggagtcgctgggggccgcgccctccttcgcctggcgccccgcccgcgctcgcccactcactcttgggacctgccgcaaggagcccgcaccggcctg

SEQ ID NO: 336116 - DNA, 122 bp, Homo sapiens
gcaaaagaacacacaagcggctggacgtcgagaggacgccaagagcacaccgacaggcaccggcaggccagctggccgttgaccagtggaactacatggagtttgtcctggacgattagagg

SEQ ID NO: 336117 - DNA, 122 bp, Homo sapiens
ttccgcgtgtgggagagtgccacaccactgcgcttccgcgaggtgccctatgcctacatccgtgagggccatgagaagcaggccgacatcatgatcttctttgccgagggcttccatggcga

SEQ ID NO: 336118 - DNA, 122 bp, Homo sapiens
aggaaaacaaggtggacgctgcacctgcgtcactgccctgcatcaccgtttggtccgtgtcgctggggcatcttggggtggtaccgcattggggtgttttactcagctttgtttctaggcga

SEQ ID NO: 336119 - DNA, 122 bp, Homo sapiens
aagccttccaatatgcgctttcctacctgttaccactaggtggcagcaaagacaggcagacgagccagcctttgcgcttagctgaaaatgtattcctaaaaattaatttgcttatttagatg

SEQ ID NO: 336120 - DNA, 122 bp, Homo sapiens
ttctgtagtttaactttgtcatcctcgcatctcttccccaggccctgtctgacctgcagccggctgttgaggcggccctagtcggcctccttctggtgatctgtttcttgtgcgtgtccacc

SEQ ID NO: 336121 - DNA, 122 bp, Homo sapiens
gggctgcacctcccaattcccatgcctacccttgtctcactgccaggacctatagctgctcggtgtctgccctgttcttccagggccctgcccccagggaccacactgcacagccggcttgg

SEQ ID NO: 336122 - DNA, 122 bp, Homo sapiens
agtcaactctttcagaattctggaacctgattggacacttacagcaaccatgggagtgctcgatgaagggagaggcatgctgatggctcataagtgagtggtgtgggcaaaccagctaccat

SEQ ID NO: 336123 - DNA, 122 bp, Homo sapiens
tccttcccaccccagcagcgggtgccagtgtgctctggtgagtctgcgccgatggccggacgtcccggagctgccggcagttccagctgccggggctgccagggtccgggagggtttcctgg

SEQ ID NO: 336124 - DNA, 122 bp, Homo sapiens
cctcccgggggtttataacgggaattcccatggcccgggctcaggcgtccaacctgctgccgcctgggccccgccgagcggagctagcgccgcgcgcagagcacacgctcgcgctccagctc

SEQ ID NO: 336125 - DNA, 122 bp, Homo sapiens
cacaccagcgtagggaagcgtgatcaccaccttcatcaaggacacgcggagctcagcctccgagtcacaccagtgtagggaggcgtgataaccaccctcatcaaggacacgcggagctcagc

SEQ ID NO: 336126 - DNA, 122 bp, Homo sapiens
gccactggcccgggtgctaagcccctcattgcctgggccagcagggccggccggctgctccgcgtgtggggcctgccaagcctacacccacccggaactccagttggcctgcaagcgcctca

SEQ ID NO: 336127 - DNA, 122 bp, Homo sapiens
ccagcctcggcctgcggcggggtagagcgccggaaacggctttagcggctttgggaattgcgggcgaaagttaaacggagagatcttagagatttgcccgcaaatcgaaacaaaactgcccc

SEQ ID NO: 336128 - DNA, 122 bp, Homo sapiens
tttgaaatgttcttttcatctcatgaaacataatccacattttacttgtgattttacagacggcaaacagtagctaattaccaccccaaggaaaaacagtaagtaatttctaccttcctgct

SEQ ID NO: 336129 - DNA, 122 bp, Homo sapiens
accaacgttgtatcttggttctgtcttaacacattggtgcactgcagtgaatctctcctccgccagcctcaggtcgtggggtgctcaggactcctggctgctgcatacacagcctcacgtgg

SEQ ID NO: 336130 - DNA, 122 bp, Homo sapiens
aaggggacccggctggcaaagcacgcagcttccgttggacagacacatactcggggctcacggcaaccccgtgtccacacccatcctgccggaaggaaaactgaggtctggggaagggcaag

SEQ ID NO: 336131 - DNA, 122 bp, Homo sapiens
cgccccgccccagccccgcccacacacagacccctccccgccggccccgccctccaccaccggccctgccccaacacacaggctcctccatcaccgccggccctgcccactgccaccacccc

SEQ ID NO: 336132 - DNA, 122 bp, Homo sapiens
aggcttgcctggcggggacagcagacaccaagtgaggtggcgacagactggtctgctgagcggattagtggggtagagtttccccagggtggaggtgtgaagaccccgcccctccaggggct

SEQ ID NO: 336133 - DNA, 122 bp, Homo sapiens
aaatccactggtcttataatttcacaattgcgttctagttcccaaaacagacttgctctccgacagagacagctgtgcaggaagtgagcctgcttctctgtgggctcatctttgctgtcaca

SEQ ID NO: 336134 - DNA, 122 bp, Homo sapiens
cttgggccagaagcctccagggcgcctaagtcagggggtgggtccctggctgcaggagggcgggaaccgacactcagtgccacccaagaggctgcaccgtgcccagcatcagggtccggctc

SEQ ID NO: 336135 - DNA, 122 bp, Homo sapiens
ccagggtttccagcaggagctgaacccttaactggctggaggaccagctgctttactggtcggctgggctggacaatgcgctgaacagcagcctggttcccagggaccttggcggccaacac

SEQ ID NO: 336136 - DNA, 122 bp, Homo sapiens
gagcgcagccagtcaggagcacaaggcgcaggcgcaaggcaacctttgccctttaactggcgcggcgccttctcaccccacccctccagcccaggcttcacctccagccactcagttgtctt

SEQ ID NO: 336137 - DNA, 122 bp, Homo sapiens
tgaggtggccaactgaaggtgaagaagcccaagcgtctgaagtgcgggcagggcctgaggcgtctcgagcttatccagcaagcaaagcccgggcagcctaagcgcgcgccacccacacccag

SEQ ID NO: 336138 - DNA, 122 bp, Homo sapiens
actgaatccccattcccatccgttttaagtgttaccaacctgatttcttctcccgagtatcggcgtagaggcctttactatcctgcctgggaacacctagcctactatgcacatcagaagag

SEQ ID NO: 336139 - DNA, 122 bp, Homo sapiens
aaaaaacttttaagaaaaaaagaagaaaacttcagaaggtctcacgtcctccgagctcagcggacttcattagactttcataaagtccaaagtcggggagacagggcactagggggctgatg

SEQ ID NO: 336140 - DNA, 122 bp, Homo sapiens
cgtttgcagcctggatgtgatgcccaaatctctgggccaggcacagctctccactgccggcggctggtgggattagatgtgaccaaggccgctcccgggccggctctactctgtggggggca

SEQ ID NO: 336141 - DNA, 122 bp, Homo sapiens
tgatgtagggcaggaaggcgaaggccagcagcaggccactgaggaagccgaagatgtgggcgatgttgtcgatccagggcaggaggccacagatgaacaggaagagcacgatggccgagagg

SEQ ID NO: 336142 - DNA, 122 bp, Homo sapiens
ctggcaattctgattcctgagcttttctttcaaggagttgtatgggccagatgacacaggcgaggagcattgacacaatttctactgaaccaagctcagcagaggaaccacagcaatagaat

SEQ ID NO: 336143 - DNA, 122 bp, Homo sapiens
ctcccgacctccccgacccttcccgtgtccccgcgccccgccgggtcctaaagcccggcgcgcaatgggttagtccacgcccgcttcctgagaccggctcagaccacgattcccagcaagca

SEQ ID NO: 336144 - DNA, 122 bp, Homo sapiens
cacttttaaaatcacaaacttcattgtagtaattttcattctcaactgaaatgtcttttccgtattgcaagttaaaaccctgtgttaattctgctactaaaaacatctctcagcttgagaca

SEQ ID NO: 336145 - DNA, 122 bp, Homo sapiens
ccgaaaaagctctgggtggtattttgcctgcaaccaaagcttgacgtcaaaatttgcacacgtgttgtaggatcatttactctgtgtctccagcccctactcttttcttggtgttcctgagt

SEQ ID NO: 336146 - DNA, 122 bp, Homo sapiens
ttactggacggcctgggagtgcagccactcagccccctcgggacaccgaggctggggattcgcagccctgcagggacgggctccttccctgagctcttccttgcactggctcaacatgactt

SEQ ID NO: 336147 - DNA, 122 bp, Homo sapiens
ggactagggagccaatgggaacgctggaagggttcgagacccggcactgagggcaacggccgcgcgccggctccgagacgagcgacgcctggcgggagcgcgcggcagcggggcgggcgtgg

SEQ ID NO: 336148 - DNA, 122 bp, Homo sapiens
tgtgaggaccttgaaatcatcaggaacaagagagaagatccttctgctactgactgaactcgttgtgaggtactcagtgttggctgaggtagaagctgccaccagagactaaagggaaggct

SEQ ID NO: 336149 - DNA, 122 bp, Homo sapiens
tgaagaagcgacccactcccactgccgcatgccctacgaaggggacaagggaacctttcccgtttcattgttagaggtcaaagctttttccatggcacatgcccagtctacataacttgcag

SEQ ID NO: 336150 - DNA, 122 bp, Homo sapiens
ccacaggggaccggtcccggggctggatgtggctcatgtccgaagcgcacggagccgagccggtgttgctcagggaggctgcccgccccttcacgcagaccctgcggctctgcgtgccctca

SEQ ID NO: 336151 - DNA, 122 bp, Homo sapiens
gctgaacacacggcgcctctcaggaaggcggtgtgcaggcacgcggggaccgggagacatcgcgggggcccggagcccgccgcggacgggaggcggggaggataggtggcgggaaccggccg

SEQ ID NO: 336152 - DNA, 122 bp, Homo sapiens
aacggcctgcaaagccggacgcagtagctcccctcaccccgccattcggtctccctctagcgtgccctactggccaaacttattaagaagccagatggcaaagcggatatgcagagcgctga

SEQ ID NO: 336153 - DNA, 122 bp, Homo sapiens
cgcctgggaggggccgggctgggcgcttttgccccgggccccggaccccgggcgtttgtccggtgcgctggcttaagaggcgctcagctcataccgtgattgcacaactggcttgctctccg

SEQ ID NO: 336154 - DNA, 122 bp, Homo sapiens
agcaaatgattattcatcattgaaaatgcttcaggcactgatctagatgctgggatgctgcggggagcagggaggccctgaggtgagaattcacttgatggcactggggaataggagggtcc

SEQ ID NO: 336155 - DNA, 122 bp, Homo sapiens
ggggcggcgagggcggcgagggcgccgaggtccggcccatcccagtcctgtggggctggccgggcagagaccccggacccaggcccaggcctaacctgctaaatgtccccggacggttctgg

SEQ ID NO: 336156 - DNA, 122 bp, Homo sapiens
aaaaaatctaataaaggtgggaagttgagagtccaaatttttcatcttatttaatttcatcgttttgaatcaaaatcaaattgactatgcaggtgaactggttgaggaggacaattccatac

SEQ ID NO: 336157 - DNA, 122 bp, Homo sapiens
gggaaaggagggcgggcaagcccccggggggttggggaatcccctgatttcccggccctccgctctctgctaggcaggcaggggcctgaaggtctcatttgagccctgggtcctgccaaagt

SEQ ID NO: 336158 - DNA, 122 bp, Homo sapiens
taggtgaggttgaggaggggtcccccggtacacaggaaaaggcagcccaggcagaggcaacgggggagtaaaactcaggtgcgttgccttctctggagctggacccgggaacccgggcaggg

SEQ ID NO: 336159 - DNA, 122 bp, Homo sapiens
ctgggggtcccaggtccagcggagtcgagcggctgaaacacgcgggtggtgcagcctaaacgcggcccagctgcgctccctcccccgccgaagctcgaataaatctctggccttcaattatt

SEQ ID NO: 336160 - DNA, 122 bp, Homo sapiens
ctcggcctgtgggcagtgctccctggacgcagtctttctgcacccgcatccggcgttctgcggacagtggccagagcagcttcaccacagagctttccacccagaccgtcaacttcgggaca

SEQ ID NO: 336161 - DNA, 122 bp, Homo sapiens
tcttgcggccctctaggtgcagtgcagggagctttgcgttttagggacttgggctccctccggccatcctctattgctttttggtattttcagtagagacgcggtttcgccatgttggccag

SEQ ID NO: 336162 - DNA, 122 bp, Homo sapiens
gtcaaagaaaggggtgacggacggcacttggaaaatcgggtcactcccacccgaatactgcgcttttccgacgggcttaaaaaaccgcgcaccacgagattgtatccctcacctggctcgga

SEQ ID NO: 336163 - DNA, 122 bp, Homo sapiens
aaccaacattctacagcagagacagccctgggacaccagcccagacatacagcagaggagcggccccatgcaagaatgggatttggagtcggagtttgcactcagtcatgagctttaggatc

SEQ ID NO: 336164 - DNA, 122 bp, Homo sapiens
agattttcctcagcgagaatccgaagctcagatttgaggatgagacagatcctgggaccacggagaagtgaaaatcttccgagcaggcggtaggaaaactgggctttcacatctgccaagcc

SEQ ID NO: 336165 - DNA, 122 bp, Homo sapiens
cccacccccccagcccgttcgggaagggaggggctgggggctacgccccctcccccagcacggcttcgttttctgggggggggttgacaccccggattacataccccgtaccaagccgaggg

SEQ ID NO: 336166 - DNA, 122 bp, Homo sapiens
cctcttccctgggcccgcctggaaccaccctttttcttgatcacgttttctgacctaggccggtcacaaagtttgactctgagggttgtgagcaatagcaggagtagaatcagcagctatat

SEQ ID NO: 336167 - DNA, 122 bp, Homo sapiens
tgattggccgtgtgctgcggaggcggcaagaggaacgtgtcctggcacgtgccgaaggagcgctaaaggccaggggcggtcccacccgcgaagccctggaaggcggattggctgcgcgagga

SEQ ID NO: 336168 - DNA, 122 bp, Homo sapiens
aagtgttgactccaagctcaccagcaggaaccccaggagcagcagagccctcatggcatccgtccgttggtccagctgcctatccaggagtccagatcaataggactggccaaaggtcttgg

SEQ ID NO: 336169 - DNA, 122 bp, Homo sapiens
tgtgggttttaaatggccttcccaaccaggaattctgattcgtggtagacacagctatgtcggtgtgccaatatgtgtatagaaaactcaatccagaatttaaatatttttcctaaattagg

SEQ ID NO: 336170 - DNA, 122 bp, Homo sapiens
cagcgaggggagggaggatgctaaggccccacaggtggagcgggacatcacgcccacgaccgagctccaggctccacccgccggtgggtggcttccttatggcttccttaccgtggcgtcct

SEQ ID NO: 336171 - DNA, 122 bp, Homo sapiens
tggtcctcggcctgctggggggcggggcccgagggccctgacgtcactggccgaggggggcgggcggctggaggagggggtgacggggccccggctcagcacctcggagagctccctccccg

SEQ ID NO: 336172 - DNA, 122 bp, Homo sapiens
tgacaccacaggtcaccgtaacacatacagtaacagtttgacatattgcgagaattaacacgtggagatggggagacgtggagacgtggagtgggcgtgctgctggaagaggggcactgatg

SEQ ID NO: 336173 - DNA, 122 bp, Homo sapiens
tctctgtacctttgttggattaaatacgtggctgtaatgtttccttgaattcagaaagtccgcatttctcttttttctatcacttcctgtagcataaatttatcaggataggagagccgtct

SEQ ID NO: 336174 - DNA, 122 bp, Homo sapiens
catcctagagccctttaattagagttaccatttgtagaaggcctgccgtgcacaatccctcgtttcatctccccccaaaccgagcaggtaggtagctgtgttttacagaggaggacactgaa

SEQ ID NO: 336175 - DNA, 122 bp, Homo sapiens
agtaagtgcggcccccgctaggatggcgccgggatctcccagctcccaggacctgccccgcgaaggctgcggcctcagttttcttatcagtaaactgaggaatggtttcctgaagctcaacg

SEQ ID NO: 336176 - DNA, 122 bp, Homo sapiens
tcctctacgtttgtttgctctgcctggtcttgtgtgtgggtccagcccctctctgcctggcgctaaccctttccatcactggcctctgggttcccaggtctctgccccttgggcaccactag

SEQ ID NO: 336177 - DNA, 122 bp, Homo sapiens
cctggaagacaccaacctgcatggagcgggctgagtgttcatatatgggcagagaagatacggtcagagcagtaagacagtcatgagatagcattcttctggaagccaagggagtgaagaat

SEQ ID NO: 336178 - DNA, 122 bp, Homo sapiens
ctctgggggacacacctgggcgtgtccgcctcctctctgggggacgtacctgagcgtgtccgcctcctccctggagaacaggaagctctgttcggcagagctggactgagacttcagcatct

SEQ ID NO: 336179 - DNA, 122 bp, Homo sapiens
aagaagctctccctggaattggccgctggttgtccagatctttctctaggagggccagtgcgtccaggacgcagcgtgggtcaggggcccgggcatgggagacaggcttcaggactgcgggg

SEQ ID NO: 336180 - DNA, 122 bp, Homo sapiens
ttctgtgcgcaggcgctgtggctcggcctcgggagacgagctgtgagcaacgcgcttgcgcgtctcagtttgcttagtttgggcttttttacagctcggctttctgatgtcttccatcattt

SEQ ID NO: 336181 - DNA, 122 bp, Homo sapiens
agaggaaagtcgagtgggaggctgggggcctggaaaacatgggcgtggcccatggtgtcccgaggtggggacggggcaggggtgccctgtcatgtggcccaggaaatggccgcactgtgctc

SEQ ID NO: 336182 - DNA, 122 bp, Homo sapiens
gaggcctaagtaattgaggattaaaaaggaaagcctgagattgatttcacaaaacatacacgcctaccacgaacaaataaccagtgtagaactcctgactcctagtcctgtgtttctgtcct

SEQ ID NO: 336183 - DNA, 122 bp, Homo sapiens
tggtagttgcttgagcattttatatggagcctgaccactcacatgctacagcctcagctgcgccttcagacacaaacactgtgttaagagccaagagaaactggttagcagaagactctctt

SEQ ID NO: 336184 - DNA, 122 bp, Homo sapiens
ggacgccaggcgcgagcgcaaggttaaagtcaaaagctctgcctgggccagcactcaagacggtcctggcaccaacgcctttcatttttgcctgtttgcaagcggggaaagtggagtcctca

SEQ ID NO: 336185 - DNA, 122 bp, Homo sapiens
ggcgtggaggggaggggcggggcggggcgtagagcaggcggggctggaggggccgcggggcggggacacccaggacaagcgccccaggcaaggtttttcagtgtcaatgtcactcttattac

SEQ ID NO: 336186 - DNA, 122 bp, Homo sapiens
aaacccagcagccggggcgagtatgtggtggccaagctggatgacctcgtcaactgggcccgccgggtgagtactatgagctgtaggccctcctcgagcgccagggcctctctgcacactca

SEQ ID NO: 336187 - DNA, 122 bp, Homo sapiens
ctgcccttccatggcatccaactagcagtcacgatctctgatgtcctagcctggtctagccggagtgacctttgtcatctgtcccccaaccctcaggctgctacatgtccttaacgtcacca

SEQ ID NO: 336188 - DNA, 122 bp, Homo sapiens
ccctgccgagcctgcccaggagctctcagtttcgattctggcccgggcactgacgctgatcgcggaaattacctcaccgccccccgccccgccccgccctgccccgcctccagcgacagctc

SEQ ID NO: 336189 - DNA, 122 bp, Homo sapiens
cactcacccacctctgcaggctggagactaaggcacagtgggaacctagcattcagacagcgttttcatcccctggagtttctgtaagtgcccaagttcacccctgcccttgcctcatcatt

SEQ ID NO: 336190 - DNA, 122 bp, Homo sapiens
aggccctgggttttcctcctcctccttcatcattcactacagcgcagtttttcccacattcgaggactgtcatccctatactcgtcctgtcggagacctacagtctttgccatcccggtaag

SEQ ID NO: 336191 - DNA, 122 bp, Homo sapiens
aatctcttgtcccccaactctcaagtgtcctttggctctggagctcctgggcccgggttccgcatccgggaggagaaaggagcgagcgcgcacggtgcctcccgagggcagggagcagagga

SEQ ID NO: 336192 - DNA, 122 bp, Homo sapiens
cccacccacgggagcacctgctccaaacgggcccacatggccctgacgatagcatgcgcacgcacgcagaaatcccttccagccacatcccgggcttcattgtcaatcagattagtaacaga

SEQ ID NO: 336193 - DNA, 122 bp, Homo sapiens
tggccgcggggcctgattacctacgtgacggtgacggagccgtcggcagtgctggtggtccgcggcgtgcgggaccggctggtcatcacctacccacacgagcaccatgccctcaagtcgag

SEQ ID NO: 336194 - DNA, 122 bp, Homo sapiens
cagcggggcctgcagatgctcttctccagccggagctgggactgttcaggctactggtggcgggatgtgggcctgagagcttggttgcagaaacttcggggtctacaaaggccggcgggagc

SEQ ID NO: 336195 - DNA, 122 bp, Homo sapiens
caacaatggaaagctcagtggagaaaagttaaccaaaataagaacgttccactcatgtcacgggagaggtaaaataaagctgagcatttatgactctggggaattatttgttgtgaaccagc

SEQ ID NO: 336196 - DNA, 122 bp, Homo sapiens
agcccgccatgcctgaccctcccccgcactccgtgggctccaagcctccccgacgagcgccgccccctactccacgggcacccagtcccatcgaccacccaagcgctgaggagtgcgggtgc

SEQ ID NO: 336197 - DNA, 122 bp, Homo sapiens
gcaaggcgaaaccacgggaatggcgctccgttgagtagagcaacgcacagcacatcacatcgcatcctccgtagcgggaggctctggcctcaccgcagcggcacttcccggaagagcccagg

SEQ ID NO: 336198 - DNA, 122 bp, Homo sapiens
gacacttactttgtgccgggcactgtgctgggcacagagaggtaagcctaaccctggcctcggcagggtctcaatgagggagagacacagaagcaggtaccccacacctggtactaagtact

SEQ ID NO: 336199 - DNA, 122 bp, Homo sapiens
gaggagcaagtgggagagacgcttatggtgacgggagagctggcaggcaggaattcgttccgggatccgaggcatggaggtggtccaggagaggcaggtattggacaaacgtgtggggggat

SEQ ID NO: 336200 - DNA, 122 bp, Homo sapiens
tactgatctgtatttatcaaaatgggaataccgtaccatgcattagaattctttatctgccgtagggctttgggcttaagggggccaggataaggaggtgaagtgtctcgttcctgactcag

SEQ ID NO: 336201 - DNA, 122 bp, Homo sapiens
tagtcaaatcacaagcacagacaggtgacccacgcttcctgttcaaggtttgaaaatgcccgaaaactgacggaaagacacgaagcgaatcagactccgagagccacccggggaaacgaccg

SEQ ID NO: 336202 - DNA, 122 bp, Homo sapiens
ggggccgctcaccccgcagcccggcctcggcctccgccgcttgtcgtcgcgccccgcccgcgagcccgccccgcacgtcccccgccggcggccaccatgagcacaggcctgcggtacaagag

SEQ ID NO: 336203 - DNA, 122 bp, Homo sapiens
tactcaggaggctgagacaggagactcacttgaatccaggagccggaggctgcagtgagtcgagattgcactccagcctggccacagagcaagactctgactcaaaaaaaaaaaaaaaaaaa

SEQ ID NO: 336204 - DNA, 122 bp, Homo sapiens
gtgtgtgtcataaagctaaataaggagccagttcagtccgccaccccccttcgcttctgccggccagacacacttccccatatgacagtcttataaatagctgctaagcagctggtcctcct

SEQ ID NO: 336205 - DNA, 122 bp, Homo sapiens
accacgggtaatgagaggtcactcacttgaactttgccattccaggcattctcagagtggcgaggggccacctgcaagtggagcacaacttggtgctcttactgtgtccttcagaaagaata

SEQ ID NO: 336206 - DNA, 122 bp, Homo sapiens
accaaccagcggcagccccgctgcggcgcaggcgcctgtgccagatcgcagggctggcgccgcctaccagctcacagcgccacctgccggccggagagtgcaccaccgagaaggcgcgtgac

SEQ ID NO: 336207 - DNA, 122 bp, Homo sapiens
aagtggtgggtgggactcctgggtctatggggctggggtgggacagcctgcctaacagcccggtatcccacttcagaacgacagaaccacgcccgggagctggtccaggggctgagcctgag

SEQ ID NO: 336208 - DNA, 122 bp, Homo sapiens
gctgctaagcctactcacccatctcttgggtctggagaggaaaatcatctctggaaaacccggcagagagagtctaaagggttgataaagagattccagcagggaaaggtttgcccagacac

SEQ ID NO: 336209 - DNA, 122 bp, Homo sapiens
tactactcccacttccggccagggaacagccacttccacccggaaaaggggttgttccgccgtggggcgccagctgtggcccacccatcctgccccgtactttcgccatcatagtattctcc

SEQ ID NO: 336210 - DNA, 122 bp, Homo sapiens
tgcctgtagtcctagctacttgggaggctgacatgggaggatcacttgagccttggagatcgaggctgtaatgaactgtgatctcttcactgcagtccagcctgtgcaacaaagtgagaccc

SEQ ID NO: 336211 - DNA, 122 bp, Homo sapiens
cagcacagacccaagaactgcgtggtcaggcctttccgcgtagccccgcccgcgtagccccgccaaacagccaatggacgcgcagctcgacgctccgcgcacctccgccaaccaactagaaa

SEQ ID NO: 336212 - DNA, 122 bp, Homo sapiens
aaaaaaacaaaaattaactgggcatcatggcaagcgtctagagtcccagctactctagggcgctgaggcaggaggatcacctgagccttgggaggttgaggctgcagtgggctgtgattggg

SEQ ID NO: 336213 - DNA, 122 bp, Homo sapiens
ccctctgggcgtgaaagacggggccaagctagccccaccccttccgtagggacagtcttacgccggaaatgctcctttgctgtccgggttagcggagggagggaggaacggctctccccgcg

SEQ ID NO: 336214 - DNA, 122 bp, Homo sapiens
cggcaggacgcgcgcccaggagcgcgctgggggctgccccgcccctctctccctcccccgcgggtaaactccgggcatccatcagtctgttaattgcactaattagagatcgcagaggtgtt

SEQ ID NO: 336215 - DNA, 122 bp, Homo sapiens
tagcgatctagcttgctttgttgcccgcctagtttaagattgggagtcgcatttccaatgcgcagtaccctgggatttgtggtctccctagattaaacagccagagacacaggttgatggtc

SEQ ID NO: 336216 - DNA, 122 bp, Homo sapiens
acggcccagtcccttcgccgcgggccgtggacgcctggctcgtgccgctcttcttcgcggcgctgatgctgctgggcctggtggggaactcgctggtcatctacgtcatctgccgccacaag

SEQ ID NO: 336217 - DNA, 122 bp, Homo sapiens
aggccagcaggagccgggccagggggccccttgccaaatacagaccctccagagtcatggcgtgtcccctggaggctgcggagaggaagcagagtcagccctagatgagccccccaccctag

SEQ ID NO: 336218 - DNA, 122 bp, Homo sapiens
gaattaaaattagtacaataaaaaaaattcagttatcagtcacactagccgcatttcaaacgtctgatagccacatggggctagaggcttctgtattgtacactgcacatataaaacacttc

SEQ ID NO: 336219 - DNA, 122 bp, Homo sapiens
ttagagtagttatgtctgttcacagaccccctaaggtaaactggaataatgggcagcttacggaagcaggttaatacaaagggttagggacctgggttctggagcagatagcctaggcttga

SEQ ID NO: 336220 - DNA, 122 bp, Homo sapiens
gggctggagcggagtcaggaggggtggatgagatcagagagggaacaggggctggaccaccgcagttcttgtagtcacagcaagtgaggatataggatccttttctgggtgaggtagaagct

SEQ ID NO: 336221 - DNA, 122 bp, Homo sapiens
gtgggctgggtatgagtgtctagcttggcccttcactgcaagactgtgcaaattgcttcacgtcttccagtttccgcggaaggagcgaattgtgcttacctctaagttttttgaggattaaa

SEQ ID NO: 336222 - DNA, 122 bp, Homo sapiens
gtgccaacggtttctggccgtgatgctttcccttttcgtctctgggttggagggggcgggcgaggtttcagcgaagggtagtgctgttctgggggacttccgggtaaggtcccgcccggccg

SEQ ID NO: 336223 - DNA, 122 bp, Homo sapiens
cggggagggcttccctttcttcccatcaactcgcggcactcggggaaaacctgtggcccccgtcggcctgacttgctaatgggaggcaaacccgttccgctgacttggacgccgcgtggtcc

SEQ ID NO: 336224 - DNA, 122 bp, Homo sapiens
tattctctccagctctgcaggctggaagtccgaggtagaggtgccaacagggtccgtttccggcgagcgcctcctggttcagaggcatcctcatgtcaggaggggctttggtgtcacctttt

SEQ ID NO: 336225 - DNA, 122 bp, Homo sapiens
gccactgctgcagtcaagtagaaaaaggagcaaatgccagtgcagcctggccccagagcccgactctgactgccacccacacacctcagagcacatcagtactcaggctggcaagctcacac

SEQ ID NO: 336226 - DNA, 122 bp, Homo sapiens
cttggtgcatacctgggtataaatccaagccaattcaggtatatgagctgatatttcaaccgaaacactatctatagcctaaattttttctaatattctgtttggtatgaattctagaaagt

SEQ ID NO: 336227 - DNA, 122 bp, Homo sapiens
caggtagtcccctttcggagctctccggttcggtagtctgaggacttggccgaaatgttccgcccttcttttcggggggaccgggcagttccgttctcggttttggggtaggcggcttgagc

SEQ ID NO: 336228 - DNA, 122 bp, Homo sapiens
acggaatgtgtcagtctgagtaatgcgccttcaatgcttctcaggagccgctggctcggccgggataaagcagcccccacgctttctcaggccccggcccgggatgaaagctgcccgcgccg

SEQ ID NO: 336229 - DNA, 122 bp, Homo sapiens
gcttgcatttcagagcctgccctgggcccatgaagcttctgggtctgtggctttagtcctcggtgaggacagggtggcctggtgccatgcctccctggccagcactgagaaaaatgctgcag

SEQ ID NO: 336230 - DNA, 122 bp, Homo sapiens
ttggaatgagtgaagttgtgcggcggaaactggaaccgaagcaaggcagtattagggacccgaggctggaagggcggggtagctatgctgtggcacacgggccctcaggctaaagaacctga

SEQ ID NO: 336231 - DNA, 122 bp, Homo sapiens
ccctgttacatgactcatgaccgtatttcagaaatctatccaaagatcctgcctcaccagcgctcagcatggcaagggcttaagagaaattatgacagatttttattttttgctttaatttt

SEQ ID NO: 336232 - DNA, 122 bp, Homo sapiens
cgcctgcattcgctcagcacggccgtcttgacgcaagagacgcaggggcccgggcacgcgcgctgattggctgcggcctgggggagagaagctaataaaatcctaaaggcagaaactgcgaa

SEQ ID NO: 336233 - DNA, 122 bp, Homo sapiens
ggagcttgttaaagtcgaaggaagagctttgctaactgtgcgtgggtgggctgaggctagcgtggcatccacccagggccaaggtggaggctacgcaggcacagtcacagacacagtcacga

SEQ ID NO: 336234 - DNA, 122 bp, Homo sapiens
gatccccaagggataaaggtctggccatatgggaatccaggtgttagagtacaggcagcacgtccttgtatggcagcgactttggaatcttttggatcagttgcaccaagcaccaatgggtg

SEQ ID NO: 336235 - DNA, 122 bp, Homo sapiens
gcttggaggataaaagtaagcgaatgaaagtctagaatagtgcttcaagaccagtcttgacgttactgctgatttgtctgggaacgctgggtcagtccatcagcatctcccagcctcatttt

SEQ ID NO: 336236 - DNA, 122 bp, Homo sapiens
ggagatgtattcacaggccactggtaaccttggcagggaagatggggtcagtgcctggggcggggctgaagtggtggtaagagcagataccatctaacaggggcaactattctttatctatt

SEQ ID NO: 336237 - DNA, 122 bp, Homo sapiens
cgccgcgcgtaacccgacgtctgagatcgcagtgcctgattggcgcagccaaggttggggcgggcctcggccgcggcagctctccccacccgcccccgaggggcggggctccggccgggcca

SEQ ID NO: 336238 - DNA, 122 bp, Homo sapiens
cgctgcctttttctctccgtctctctctcccccacaatcccaaaccgttgactctttcctcgcgagctggagaaatcatcagtttcactcttgcaaaaggggggcgggactagacctcggag

SEQ ID NO: 336239 - DNA, 122 bp, Homo sapiens
gcccccggggtatgcagaagggcccagccgggacagcagccactgcatttctttggcttgcgctgcagtccggatggagctcggttctgacccagaacatgagatcgggttctcattaattc

SEQ ID NO: 336240 - DNA, 122 bp, Homo sapiens
gtgctagtgatggatgagctgggctacatgtacttccgggaccgtagcggggacaccttccgctggcgaggggagaacgtctccaccaccgaggtggagggcgtgctgagccgcctgctggg

SEQ ID NO: 336241 - DNA, 122 bp, Homo sapiens
gaaagctgggtcatgttcttggccggaggtggcctctggcagtcacaaacacagcacagccggcgtctctgggacgtgcctgctgtgcctctcccagcccctacttgtcaaggtgagtgcac

SEQ ID NO: 336242 - DNA, 122 bp, Homo sapiens
tggaaagcaggtttctcataatattgtttaggaattttactggggatttatattggcagacgtgacttaattgtaatgtttattgctagtaatgagaattataggcttaatatacttaagaa

SEQ ID NO: 336243 - DNA, 122 bp, Homo sapiens
cagatgtagccgaggcccctccccggggagcagcagacaccacagaccctcgggcgctcccgtcttcagcaagcgtgaacgcgccgctggaaagaatgctggctttctctccaagtgaacgt

SEQ ID NO: 336244 - DNA, 122 bp, Homo sapiens
gaggagagaagagtatggactggcacccagggattgagttctcagctcagctctgcaaatcgcccattgatttttctgggccaggcctttcccctgcagaggcgcagtacctttcaagtcag

SEQ ID NO: 336245 - DNA, 122 bp, Homo sapiens
ttacttctgggctgtgtgtgtgtgtgtgtgtgtgtgtgtgtgcgtgcacgtgcacgtgcacgtgtgcgctcatttctgcaatgctacttccttgccatgggcctgcctcatctggtttccaa

SEQ ID NO: 336246 - DNA, 122 bp, Homo sapiens
gcgtgctgccggaacttctccaggtcccgggacagcaggttgaactgctcactttgagtccggcatttctcttccagctctcgaaccttggactgcacggcagaagcaggacagggggtcag

SEQ ID NO: 336247 - DNA, 122 bp, Homo sapiens
cctcgtggctctctgtcgtgtgaagcggggggtcaggagcgcacaaatgtttatactccacgtgagtcacttgcacagatgacgggtgatgttttcctcgccaaggctgatggcaccgggcc

SEQ ID NO: 336248 - DNA, 122 bp, Homo sapiens
atttaaaatatagtatttctttgcagaaaggattgaaagattagtcatagaacatggcaccgttcaaatgaagcctgtttaggaatcaaggttgactgcctccagaatctgttattgtaaga

SEQ ID NO: 336249 - DNA, 122 bp, Homo sapiens
tgactgcccagggccagtgtggctggccggccactctgagtgaggggcccgccgagcccacgcccaccgggaactcggctggccccgcaagcaccacgcagacctggttcccacccgcgcct

SEQ ID NO: 336250 - DNA, 122 bp, Homo sapiens
ccagaatggtcgtttggcagaagtctccgggaccgcactccaggacaggcacagtcagggcgtcgcgtgggcctactgtggcaaaggagacgtccgcgcgaatccggtcctggggaaagggc

SEQ ID NO: 336251 - DNA, 122 bp, Homo sapiens
tatgttgtaaacggaaaaaagttatcatgcaggaattcatcaaatattaaactgttttcccgtagggatgattaaaaagtaaacgaacccttctatccattcccaatgcaaatgaattagaa

SEQ ID NO: 336252 - DNA, 122 bp, Homo sapiens
cagggtgacctctggggtgaggaaactgcgactgggagcgggacccaggcgtgcagcattcgccatgctccgctcacgcgtgggagactgggctgtggggtaccggcccggaaagcacgcag

SEQ ID NO: 336253 - DNA, 122 bp, Homo sapiens
cagacggcaaatgctgaggagggccgggtgctggcgggtggctagagggcgtggggcagccgcgtgggagggcagtttggtggcttcttcaaacctgagcacactcttaccgtgtgacttgc

SEQ ID NO: 336254 - DNA, 122 bp, Homo sapiens
ctgctaacagcaccagggtttctgatgaaaatgcactcgccagagctgtgtttctttattcgaaatcacacggttttactcaacagggctcctagcccttctgtctctgctcctggtgcgta

SEQ ID NO: 336255 - DNA, 122 bp, Homo sapiens
aacacattcggagcaggcctaactggtgaactcctcaattatctcacaatagcactatcacgtgtctttcatttttcacagcacagtgtattttcataaaatctttattggtagaccacaac

SEQ ID NO: 336256 - DNA, 122 bp, Homo sapiens
ccactctccggagcctgcagtcctgaagacgcctcagcaggggcaggcaagaagacaccccgcgaacccccagggccggccgggcgcatcactgggagccggggctatctccctccgtcagc

SEQ ID NO: 336257 - DNA, 122 bp, Homo sapiens
gggcccccggggcgaggctggtcttgtactggcgcgcgctgcctgtgattaacaggcgggcgcggccgcgcgcggctggaaaggggcggggcttccggaacagccgccccgggagcctggga

SEQ ID NO: 336258 - DNA, 122 bp, Homo sapiens
cttcccccaaatactgccccgacctgtcccctggccctcaccaagacagggagaaacgaccgagacactgaggactccgctaacagctgcctgagacccaacccctccactccctgaccagg

SEQ ID NO: 336259 - DNA, 122 bp, Homo sapiens
gaaaggccctgtctcacgcctcacagcctgaagtagtctgtgtttgcttctccagagaggcgaggaatccagaaacaaagtcacgtcatgctccatacccaagctccatatctttcagtaac

SEQ ID NO: 336260 - DNA, 122 bp, Homo sapiens
tcccaggcttgagtacggtggcatgatcatagctcactgcctcgacctcctgggctccagcgatcctcccacctcagcttcccaagtagctgaggctacaggtgtgtgccacgatacctggc

SEQ ID NO: 336261 - DNA, 122 bp, Homo sapiens
agccctcctcatctcagacaatccttcctctgagggccacggggaaggcggggaaggggccgtcctcagtcccactcggctttctgcctgggctctgcagctctccgcgtcctccacttact

SEQ ID NO: 336262 - DNA, 122 bp, Homo sapiens
ccccatcttcgtcaccttctaccagtgcctggtgaccacgctgctgtgcaaaggcctcagcgctctggccgcctgctgccctggtgccgtggacttccccagcttgcgcctggacctcaggg

SEQ ID NO: 336263 - DNA, 122 bp, Homo sapiens
caatcagccttcactataagtgtagtggctctaaagtgaaagcctgacattcacttgtttcgggtattcagtgcctccatagaacttcagagaaagtgctccaggatctggccgtttattgg

SEQ ID NO: 336264 - DNA, 122 bp, Homo sapiens
ggcggcgcctggcgggcactgttgcccgcggagggacggtgggggggtttcagcagctggcgggggtggagggggcgggagagggagcctgcgccgggctgagcctggaggtgcggggcggg

SEQ ID NO: 336265 - DNA, 122 bp, Homo sapiens
agtgaaagggttcttgcgcccccacagcagcccggggcagggtcaccctcgcgaccggggcggtcattgccgtattccgtcctgagctgccgctcccccacgatcctcccaccaatcccggg

SEQ ID NO: 336266 - DNA, 122 bp, Homo sapiens
cagcgggcgggatgcgagccccacgatccctgggtcggaagccaagggcttaagcccccacgttctttctggctcgcggcgggcacttcgtgcgccccaccttccccgcagttctgagagag

SEQ ID NO: 336267 - DNA, 122 bp, Homo sapiens
ggtgggggcagaaagagcattccagagatgcacaccagccagtgcagaggatgactcacacgcagtttggtgaagactgaaggggtcataaaagtaaagcattttttggagtgtaatttggc

SEQ ID NO: 336268 - DNA, 122 bp, Homo sapiens
tcacggaccaaagctcttcccattcatgaacccacaccccaagtcaggattctcctctcacgaccctctcatggtccctgcacatctgggagagactccgcgctgcgggtgcagagcggccc

SEQ ID NO: 336269 - DNA, 122 bp, Homo sapiens
aatccccactttatatcttcctatgttctgaaatcttaggaccttcgatggttccggaatcgaatcaccctgcagcaatttattttagaaaataaggcaaaccggctgggcgcggtggttca

SEQ ID NO: 336270 - DNA, 122 bp, Homo sapiens
acgccttggctttgcttgaggtggtgggagtcgcgggtagcttgttcagccaacagctgtcgcccccactccccccacccacccacccaccccctccaccttttagatgtgggcggggaggg

SEQ ID NO: 336271 - DNA, 122 bp, Homo sapiens
gaagagagagagagagaaagaatgagagagagagagagagagggagagcgagcgccgaggcgggcctcgaagccactggagaggtaccctttgtctgacaaaccctgaaagggaagcctcta

SEQ ID NO: 336272 - DNA, 122 bp, Homo sapiens
tttctcttcatcagcgtgggctgtacgttcagtgtataaaaatggaattgccccaggagtcgtgtgggcgaagaccttactcatagtgttgccgatgctcctgcgtccgacttgcttctttg

SEQ ID NO: 336273 - DNA, 122 bp, Homo sapiens
ccggccccctcacccatgcgggccgccaaccgatcccacagcgccagcaggactccgggccgaactcctggcaaatccagttccaaggttcagaccactcctagcaaacctggcggtgaccg

SEQ ID NO: 336274 - DNA, 122 bp, Homo sapiens
cccgtagtccgccgagaggcgccaggctgggccagccttgaattctgggtttgcttctcccggtttgaaggccacccccaggattcgcaggaatctgacagctgcttgtgactgtgctgaag

SEQ ID NO: 336275 - DNA, 122 bp, Homo sapiens
catccgagcgagcggagactagcgcaccggcgtcggtggcgagggtggtgcagaggagtccggctgggcggagggaggaaggatgggtgcgggtaactttttgaccgccttggaagtaccag

SEQ ID NO: 336276 - DNA, 122 bp, Homo sapiens
gcagggagaaatagtgctgcggcctggagaagcgcatcagccaggaccagaggacatctgcgagctgccgggcggccaaggggaggaagtccggctggtgaacctcgtggtggcgatgtggc

SEQ ID NO: 336277 - DNA, 122 bp, Homo sapiens
agggcgagttctcggtcaccatgtggtcctcaggtgagcgccggccgcgcgccccggccccgggatgtttttgttttgaagggaagccatgttttatgtgtgtgatgggcgccgccatcttc

SEQ ID NO: 336278 - DNA, 122 bp, Homo sapiens
gtggatccagctgagttcaagtccagacgctgcctcaggacttctcaggaccacacttcccgcccaggttgtttcctccctctgggagcaggaaaggagatgagtcttggggtgtgcgtggg

SEQ ID NO: 336279 - DNA, 122 bp, Homo sapiens
cgccttgctgggttcacctctccaggcagggaaagttgcttctagactctgagctctcaccggactcaggagcccagttagctaataattctgggtcccaggagtgtctagacgcccctcgg

SEQ ID NO: 336280 - DNA, 122 bp, Homo sapiens
atgaacaaatgaattaatgaactagtgaaaaccaaaaactcccaggtggtagtaagtaaacgaaaacgtggagaatctaaaataacggggattttgttttgtaaggttaaaagttgatgaat

SEQ ID NO: 336281 - DNA, 122 bp, Homo sapiens
ggcctgggttgtctgatgcacctctgagtcaggtctcagggacaaacctttcaacctgtgcgcttcagtgcagcctcctacaaaagggaatcccagaacataaccatatctctgaataaggt

SEQ ID NO: 336282 - DNA, 122 bp, Homo sapiens
tcaaaagatctcactggcatgtctgccgacgtgcgattttccagcctttccctagagctgcggtttcgtcaggttcatggtccaacttccaagttgccgagtccagtctgaccgagtgttcc

SEQ ID NO: 336283 - DNA, 122 bp, Homo sapiens
agctgaagaaacagatgaggaagcacagatagtctgggaggagacactcaagcttcccaccggtggccacagcacactccatccctggaaatactgcaaaccaaccccccaggagccccggg

SEQ ID NO: 336284 - DNA, 122 bp, Homo sapiens
ttcccccacatagcaaagtggggagtggctttggaccaacggcttgcatcaaaataaccccggggctgtgtttcctacgaaagaattccacctatcacaatgccaaggagaccagagacctt

SEQ ID NO: 336285 - DNA, 122 bp, Homo sapiens
gcgccaggctgtggaggagccttagagggcaacactcggccgggaaaaggcgcggggggacggagagatgattgtgcagcggcttcctggctcctagttgccaagcccagggactctgatac

SEQ ID NO: 336286 - DNA, 122 bp, Homo sapiens
tggatttgggcatcgcagatgttggcaaagcagtgtcgcttctcttcgtcccagcgatgccggagctgggcctgccaggtgaaggcctgagaactctccacctgcaggatgagccggagctc

SEQ ID NO: 336287 - DNA, 122 bp, Homo sapiens
tcccctctccgaccaggaggcctgtggccatctcggggcgcaggcaggaggcactggaagcggaagcgagtggggagtccgggtagagggagtcgcccacctgaccggcttcgccccctccg

SEQ ID NO: 336288 - DNA, 122 bp, Homo sapiens
cctcggtcaccgtcttcgccgctgccgtcactcgcgctcggcgccggcggctgcgctggtcggtctggtagctggggacttttccgcccgacctcctccggctgctcctccccgaggaccac

SEQ ID NO: 336289 - DNA, 122 bp, Homo sapiens
cccgagctgtgcggtaggcattgaggcagccagcgcaggggcttctgctgagggggcaggcggagcttgaggaaaccgcagataagtttttttctctttgaaagatagagattaatacaact

SEQ ID NO: 336290 - DNA, 122 bp, Homo sapiens
gctgcgggctggggccgagctccgagcccgggaatactggtgggctgctgtttgccgggccgctcgggaaggaagaaactcagtaacaggagacagcgtcttgccagttaatcctcaggcac

SEQ ID NO: 336291 - DNA, 122 bp, Homo sapiens
ctgggagccccgagatcttcaagcccgaataatttttatcaggcgcagtgtggacagccccgaagcgcggccgggtcccctcatgcatatgcagcagattgtgatccttactccgtgagcgc

SEQ ID NO: 336292 - DNA, 122 bp, Homo sapiens
ccttcctgtccattctgggacctctgtgtactgcactgcaattagaaaatgacaatctgtcgagctgtgtgctcctgtatgcttgcgggcctctggtctctgcgtgccgcctcccttgcctg

SEQ ID NO: 336293 - DNA, 122 bp, Homo sapiens
cgcgggcgcggagggcggacggcggactgaggcgcggcggctgaggctggcccgagaggacgtgcggccccgcccctgtccccgcccttccccgcccctccactcccaccccgtcccgcggc

SEQ ID NO: 336294 - DNA, 122 bp, Homo sapiens
agaacgattactgcctttaaaaagtcgtgaaaatgatcgtgaaccgtaccccacaccgagcgcgcgtctaccccctaaggcggtggagacgcccccagcttccgccgccagctcgcggggca

SEQ ID NO: 336295 - DNA, 122 bp, Homo sapiens
tgagaaaagaatttgtcttacctgtacctgacaggtgtgtacctgaaagaggtgtgtgcccgacggtgtgtgcgaccgatgggtgtatgctcgacagtggtgtgtgcgcccaccgggtgtgt

SEQ ID NO: 336296 - DNA, 122 bp, Homo sapiens
cgccaaggacggagaaatagctctggtataactgctacccagttctccccctttctctcccgggcgagccaaatctttttcacgttttcaaccacaacgcagcgagccaagcatttaacgcg

SEQ ID NO: 336297 - DNA, 122 bp, Homo sapiens
cgccgccgccctgctcagcttcctcctccgctgccgctgccaccgctgccggcctctccgcgcatccacaaccgcactttcgccacggccgtcgcagcgcactcctcccccggccgccctgg

SEQ ID NO: 336298 - DNA, 122 bp, Homo sapiens
cggccttgaagatggcaatgatgccagtaggccagaagcaacagatggtggtcagcaccgcgatgggcatgtagtcgtgtggcgggcgcctcggctccagtagggccagccctgggccctgg

SEQ ID NO: 336299 - DNA, 122 bp, Homo sapiens
gcaccactgcactccagcctgggcaatagagcgaaactccgtctcaaaaaaaaaatgaggcgagagagaccctgtctctaagcaaaacaaaaggcctcatacctgtttcctgggattgtcaa

SEQ ID NO: 336300 - DNA, 122 bp, Homo sapiens
gaaaggtcagtggactcaccatgaccgtgatggcaagagcagaaacggacagaaaccgagcgagtggggagcaccatcctgagcatattacacaggggaagcctgggaggttaggactcgtt

SEQ ID NO: 336301 - DNA, 122 bp, Homo sapiens
gagttctgggtgctctctctctctgggagagatggtgcaaactcagatctgcaatatctacgacctcaaagaggcatgacaagtaggtgcagccagaccccaggctgaaagaaggaaaacac

SEQ ID NO: 336302 - DNA, 122 bp, Homo sapiens
tctattgactataattaccagttgtaagaacaattctaaccatattaatacctgacagaacgttgaggcctgattataactggatattgggtagcatccagttaaagtatcagtagagcttg

SEQ ID NO: 336303 - DNA, 122 bp, Homo sapiens
ttgtacttgacagcccctctccgccgggactcgctgaattccaagggccccataggcacacgtggctcttggcccccacagtggacagtaagcgtctgggacaggatggggtgactttcaca

SEQ ID NO: 336304 - DNA, 122 bp, Homo sapiens
atttgcatgataaggctcgcacgtgagccaactccggcgcagcccaggctgtgccgcggccggccgccaatggaatcttgctcctactgcgcctccaggtcacattgacatctcggtttccc

SEQ ID NO: 336305 - DNA, 122 bp, Homo sapiens
ccgcgatgccgtgagcgcagccctggcttcccctctgatgcagagagctggtcactccgccggctgcactcagagctcagaaccttctagatgaaagcaacgtgttccttttaaaatgggga

SEQ ID NO: 336306 - DNA, 122 bp, Homo sapiens
cctcggtagagcagggccgcgtggcggctcagggaccacagggcgtacagagcactgagccgccccagcacggcccgcagcgagggcggcacggaaggctggtgcacgtgctcgtggaacct

SEQ ID NO: 336307 - DNA, 122 bp, Homo sapiens
atctccttgccaggccgtgtggatcacatttagtcagggagcatccgtctcatgcctggccgaggcaattctgtttctgaataacccttgaaactcagaagggctctggcagtaccaccact

SEQ ID NO: 336308 - DNA, 122 bp, Homo sapiens
gcgtgaatccgccgatccgggctttggggcccgccgggagctctgtttataaacacacggcgcggctgccggcgaggggtaaccctaaggggagtggggtcggaggtcagaggtcagcgggc

SEQ ID NO: 336309 - DNA, 122 bp, Homo sapiens
catacccggctctgacacggactctggacaggctcaatatgcagatacacagtctttccccgaagtgagaagagggtaccacactgctgctgtcatttcctggacagagaaatgtgcatctt

SEQ ID NO: 336310 - DNA, 122 bp, Homo sapiens
ttcggctcagaatggctatctggcttgcagagctcacacagctacttagcaatagaggtgcgagaatgtgcacccctgttctgagaatgtttacctgtatctgttttgtcaacatgctaaga

SEQ ID NO: 336311 - DNA, 122 bp, Homo sapiens
gtccgcgaaggggttggtgtcgaaagccgacatggtgatcgggggccagcgggcgaactccgcgaacgctgctgcctccgggcacccagacccagcggcgcttcgtgtagaccctccacttc

SEQ ID NO: 336312 - DNA, 122 bp, Homo sapiens
cttccctcacttccatccatctctagacccccccaaggctttctgtgtcgctgccccgggcgggtgtatccctcacagcacctcacgactgtgcctcaaagcctgcatcaataaatgaaaac

SEQ ID NO: 336313 - DNA, 122 bp, Homo sapiens
agcttccacgttggttacggggcagtggccatgagcctctgtcggactgacgcaaggagccggggccccaggcgtttgtgggtggacctggcgggagtcgcctgcgtctggccccctgggga

SEQ ID NO: 336314 - DNA, 122 bp, Homo sapiens
tccataccagaaggaagtgcggcaccttagtgatcccgagtttaagccgagagttgctcacgtgaccgagatctcacatgacgtaggcgctcacgtgattactcgcttacgtgagcagaagt

SEQ ID NO: 336315 - DNA, 122 bp, Homo sapiens
ccccgggccctgggtggaggccaagcctggcccataaataggggtctcctcagtgccctccgctcctcctgcacacctccctcgctctcccacaccactggcaccaggccccggacacccgc

SEQ ID NO: 336316 - DNA, 122 bp, Homo sapiens
ttttccattggtcctcaagattgggcttggggcctctggcttccacagggtagcaggccacgatgacattctactttttttttttttttttgagacggagtctcactctgtcacccaggcta

SEQ ID NO: 336317 - DNA, 122 bp, Homo sapiens
tggcccgtgtgggcccaaagcgtcctgaagtcggcctcgccaggcccagctcctgcctgtcgtaggcgcctagaggcatggcctctgcctcctcacagtggacccccccagacccagctctt

SEQ ID NO: 336318 - DNA, 122 bp, Homo sapiens
gcacctcctgatccacctggattagacagccaatctcacagagagagcacggactgtgaacggcatagggtacacacaaggacatacagagtccagaagaagaactcaaactaagttggcac

SEQ ID NO: 336319 - DNA, 122 bp, Homo sapiens
ctctccggatttcactcctggctgaactggtgccttcggtaaacagctgcttaaagagtgcggggactgctgcagggacttcctttttccactaggcggcaccacagccaaagtgataagaa

SEQ ID NO: 336320 - DNA, 122 bp, Homo sapiens
ctgaacaagccgttgagagtgtgctctgttgtcagtgaattagttcagagagtccctcctcgtgttatagttctcatgaccactgcgcagtgttgctgtgctctgcctctgacgggtggctg

SEQ ID NO: 336321 - DNA, 122 bp, Homo sapiens
tatcaggagccacccctagtgacacagccagtgccagaactaactttgactttcactcttcgccaagggcttgcagaacaccttaaaggaaaaaagatggaggcgcttagagttcagatgtt

SEQ ID NO: 336322 - DNA, 122 bp, Homo sapiens
agccagattcccgcggttctaagctgaagctgtctcgggtgcatttgcattccaaaaaggcgaagggtcccgctattactgctcctggtacctggagctgccaagcacccctgcgatggggc

SEQ ID NO: 336323 - DNA, 122 bp, Homo sapiens
actggtgaggcaagaagacgacggctgcaaaaaccagcccagggaggaaaccccaggccgcgaccatggacaccggcaggacagcaagaggctgcttcctccacagctctgcacgtccagac

SEQ ID NO: 336324 - DNA, 122 bp, Homo sapiens
gtcatcgcctcccactctggacatcactttagcctccttaaaatagtggagctaggggcccggggctcactgaactctgaggctgtgtgctgattcaccactgcccggggttctggccatga

SEQ ID NO: 336325 - DNA, 122 bp, Homo sapiens
actctcatgggtaacatgactccttttacaaatagtctgccatcatcatcaaatacaaggcgcaaaaagaaaaaaaattcccattatacggctcatgttttttgtggtttgttggttgagac

SEQ ID NO: 336326 - DNA, 122 bp, Homo sapiens
agccagcccaggaccgggagctggtcctctctaacagcgaccccgcccgctttagctgagcgacccggggcaggttacatagtgtctctaacttaagccacgtgtttctcgaggaaatgctg

SEQ ID NO: 336327 - DNA, 122 bp, Homo sapiens
tcacgtgaccctcgcggggtaaccgcaccaggccttcctcagaagcagtgttgctgctgccggttcacctggtgcatgagccgctgacccaccagaggcgccaccaaaccctggagtgttac

SEQ ID NO: 336328 - DNA, 122 bp, Homo sapiens
cacacaaggcgccctccgtcgcagcctgggggagactacattacccagaaagccttgcgtcgagcggcagtactttgatccaatgaaaatccaagacaggggcatttccgtgtgggtctacc

SEQ ID NO: 336329 - DNA, 122 bp, Homo sapiens
aacgctcaggagagttaaatccctctatcttcttttgtgcgtcccacccacgttcggtcacggaaaaatgcaaagagcggtcttgcatgacctgataaggaaggcccatcaggctcttcctc

SEQ ID NO: 336330 - DNA, 122 bp, Homo sapiens
tttgcagagtgcttcaccttctaaatgaagcctggagcgccatttcagactgaatcaaaccgtagatgccatgtgtacctacgcaacaaatctgcgcattctgcacgtgtatcccggaacgt

SEQ ID NO: 336331 - DNA, 122 bp, Homo sapiens
gcgagtcctctgtttactgtttggtttccacggtgacacgtaggcgccgtcagcgactcccgtcaccgccccgcagcgcggcccccacccggcgccgtgacgccggcccgccgcttccgctc

SEQ ID NO: 336332 - DNA, 122 bp, Homo sapiens
cgcacacgcagtcaggtgtggatgtacacccgcgcacacccaggcacatgtacacccgcgcgctcacacaccccatccagctacagcagaattctggccaggctgttgaccgcacacctgct

SEQ ID NO: 336333 - DNA, 122 bp, Homo sapiens
ccctttcatgctacattcggtggaaatgtccccggcgtggagagcagtgagcgccgagagcgtgcctcctccgcgggatgagcgccttgcaggctgcctttccagggctaagatccccggcg

SEQ ID NO: 336334 - DNA, 122 bp, Homo sapiens
ggccaagaagaggaaaggtagctgcagacatagtaccgggacgaattggagtgctgcgtccgctgagtaggagggttcaagccagatccgaagagggatgatgtgtggagttttgtgccctc

SEQ ID NO: 336335 - DNA, 122 bp, Homo sapiens
taaaaagcttgcttcctagtgcccagcacagtatgggagctacagtagaaatgactgtgacggatgtcttcagcactcagagtccttgcaacttaggaatggcacaggacagtggctgacta

SEQ ID NO: 336336 - DNA, 122 bp, Homo sapiens
ttatctgaacccaaaggaagatggcaaccacgagtcgccaagtaaaggaccgctctatctcgcctttgttctcctctcggtggttactgcgcagacgtagtcgcccaagtcgcgtccccgcc

SEQ ID NO: 336337 - DNA, 122 bp, Homo sapiens
catcccagatcctcgcagacccagcccaaggtgtccccacgctcacttctcctttagctccgagaactgcttctctaggtccagcatctcactgacacactcgctgcggcgtcgctcatagt

SEQ ID NO: 336338 - DNA, 122 bp, Homo sapiens
taagaaaaaacagccacatgaaatccttttctatatcattcaagtcaactttgatactctcgtctattaagaggcgttttagcatgcaaaggtttccacttaagcccatttgctgaagggcc

SEQ ID NO: 336339 - DNA, 122 bp, Homo sapiens
gggaagggaaggcctggctgcagccggagctggcaggtggccgagccgggggtggacgggcgggctgggactggtgctggccattggctgcctcaaggctcccaccccgcctgcctccctag

SEQ ID NO: 336340 - DNA, 122 bp, Homo sapiens
gtgaggcagaacagagacgccgtcatggctctcaggaggctgagcgggaagcgcgtggctcgggcccctaacggcacctggagcagcctatgggcctgtgcccttcatgtgggttcgctttc

SEQ ID NO: 336341 - DNA, 122 bp, Homo sapiens
gccggagaaactgtaaggaggggttaggggaggagaaggcaaagaaaagctggagagggtcgtagattcttgcctaaggaggcaagaagtgacctccctgagtcaggatacttgagcatttg

SEQ ID NO: 336342 - DNA, 122 bp, Homo sapiens
gcatgtgttttctatctctaaggcccactgggctgggcctcatgtcacttgcctgacatccgattgtgaaagatgtcacccagaggcgggcagaggggctgtcttttccttttctcgttgct

SEQ ID NO: 336343 - DNA, 122 bp, Homo sapiens
ccagaatagaagggagagagaaaacatttctaccctttgatcaccagtgtgaacagaatccggaatgcagtttcagcgtgacctgcagtcattcatgttcattggatttgacagatggaaac

SEQ ID NO: 336344 - DNA, 122 bp, Homo sapiens
gcgccgcggccggagcaaaggcccagcgagcccagcactcagcggaacctgtagaagcgtcgggggttgccccgcttctgcgaaccgccctgggatgcgaggttcagcgtcactatctcatc

SEQ ID NO: 336345 - DNA, 122 bp, Homo sapiens
caagagtcaccgagtgccagctggtgtttacaccgtggcctgaggcctgttgactgggctcggggcactcacaggtattgtggtcacgggggcaaatggccatccggttccctgctctccac

SEQ ID NO: 336346 - DNA, 122 bp, Homo sapiens
atgagttaactagtggtttccaacaaggaacgactgtacccccaggagacatttgccagtcgagatggggatttacagcaggaagttagatatataaatataaagattagcagagcactggg

SEQ ID NO: 336347 - DNA, 122 bp, Homo sapiens
ctctccccgcagcctgggcacagaagagagcacaggggcatctggaggtcaagggtgctgcgtcagtatttggtgaatgtgtgggccggagccagatttcctctgttccagagcctgctctg

SEQ ID NO: 336348 - DNA, 122 bp, Homo sapiens
gcagacgtcctttgacaaacgtgtgacaaacatatgacaaacatgtcctgtaacgacaaacgtgttacaccccaaggattaaacaaagcagggttaaatgtggaagctgaagctgcaagtca

SEQ ID NO: 336349 - DNA, 122 bp, Homo sapiens
cttccctgtctcggtttagcctttccatatcctctctttcatgtgggtccaactgggcgtcggttcctggccactgagtccttccatactcttgggggttttgataatcagctggtgcatat

SEQ ID NO: 336350 - DNA, 122 bp, Homo sapiens
cgagcactttgctcggctcctgctgttgatgcttgtggttttgcagtttgggatgggatgcgttccgggcagatccctacctgtagggaatgccccgcttcaaagttgacctcctgagccat

SEQ ID NO: 336351 - DNA, 122 bp, Homo sapiens
cctgccctttatcaggcaaaagcagccaaaggcttggcaaagtcaggagagggaaatcagcgtattctgagctagtctccatggtccagaggatgaccatttccttctaataaaaccaatat

SEQ ID NO: 336352 - DNA, 122 bp, Homo sapiens
tcctggggtgcagcaggtttattttggataaagcagtggtgtgcagagaccaacctcccacggcaggctggagggatgtgcagggggaccacccagaaaggaggcgaggggtggaagacaga

SEQ ID NO: 336353 - DNA, 122 bp, Homo sapiens
ctgggaaggggacgggaggccagggcagcttcttgggtgactcagagatggattccgactcggacagttaaatttagccctcaggctctctgctttataccagctttttttttttttttttt

SEQ ID NO: 336354 - DNA, 122 bp, Homo sapiens
ggggtcacaccccccacctctccacatgtgggtcttgtctgaacagcctcgggtgacactcggcccggaccacacattacacaaggtgacttccatgtggtggcgtcagcaaagataagcat

SEQ ID NO: 336355 - DNA, 122 bp, Homo sapiens
gggctacctgcccacccagcaggacgtgctgcgggtccgcgtgcccaccaccggcatcatcgagtaccctttcgacctggagaacatcatcttccggtaccgcccgggccacagcaggcggg

SEQ ID NO: 336356 - DNA, 122 bp, Homo sapiens
cgggctgccgaggggctgctccggacgggcggctgcgggctgccagggggctgccgggggcgcgggaggcgggctgcgggctgctcccgcgccgcgcgccggccgagggccagccggagcag

SEQ ID NO: 336357 - DNA, 122 bp, Homo sapiens
ctgttaaccaatatggaagagagtaattgcgcctgagaggaaattacggcagcggaaacgcgggtattctacgtttaagaaatcccccaactgaggcagaaaaaggccaagttatttgtgtg

SEQ ID NO: 336358 - DNA, 122 bp, Homo sapiens
gaagcctttgtaaaaaggaacatcctctcccatcctgggcgtgctgccgggtatcgcagacggcccacgcccacactgcagaggccggcaccgagcccccgctccgccctctcttcctggtt

SEQ ID NO: 336359 - DNA, 122 bp, Homo sapiens
aggagctgctccaccccctggcacgttcagatagggatcgtagaaggatcttcctgggttcggtggtgcgaagattgcacaccggtaccggggcttttaagcagcggaaaacctggaggagc

SEQ ID NO: 336360 - DNA, 122 bp, Homo sapiens
aggagggccacaccctgcatttgtccttcagcattgccacagacatggcctgggagctcacgggggtgtagggaccccagaaacaatttgagaggacactgccaccacccaacaagaacaga

SEQ ID NO: 336361 - DNA, 122 bp, Homo sapiens
ctccgcgtggtgctgaaggggacagcgccagatttgtcgcactgcgcaggcgcagaggcgcgaacaaagaggggagggggacgaggcgcgcggccggaggtggtgcgcgctcacgtggctct

SEQ ID NO: 336362 - DNA, 122 bp, Homo sapiens
agggccactcccagagcgggctcattagggagccgggccggtgccgtgcgcggtgacaggcgggcgcattcagggccccacacaatcgggcccttgtggcgggcgggggagcaccgcgctca

SEQ ID NO: 336363 - DNA, 122 bp, Homo sapiens
catccggcctgggacccttctccttgtctgtgcccgggctggaaccctcctctgggtctgcgtccaggctgggaccctcctccttgtccgcgcccgggctgggaccctccactgggatgcag

SEQ ID NO: 336364 - DNA, 122 bp, Homo sapiens
gtctgggcgatgctctctccggctctacccagtagcaactgcggtaaggacaggacgcagcgaaattgtaccagtgagtcagaggccaaaggaggaatcctggcccaacagcgcagagtgtg

SEQ ID NO: 336365 - DNA, 122 bp, Homo sapiens
gacactgagtgcagggatgtctgtttcaccccaggaaaatggcaggagctggagggctggcgtggtagcgggcatagtgtcttacatctcttcacctcttataaacatacaatgaaagctag

SEQ ID NO: 336366 - DNA, 122 bp, Homo sapiens
ccaagacctcccagaggagacctgcccagctgccaccaccaccattattgattggcttcccggtactggtgcagcaggtcactgacatctgtactttctactttcacccaaccatcttcctt

SEQ ID NO: 336367 - DNA, 122 bp, Homo sapiens
ttactttgcctctccgtgcctccatttctccatctgtgcaataggggtgctacccagtggcgcgttgtggagggttaagtgagttgatgtatgcacagcacctggaacagagcctgatacat

SEQ ID NO: 336368 - DNA, 122 bp, Homo sapiens
ggggcagggtactcacagcgtctgctccgactgatggctgtccgggttaaagcggtacgacgggagctgctctatgtctgctttggtgagaccccggggcttggcatctcccagccgctcgg

SEQ ID NO: 336369 - DNA, 122 bp, Homo sapiens
ttcaatgagcccagatccgcggctggttcgccgggttgaggcgggggtagcgggcggggccggcgctggggagcccgcgacccgggcggggagggcgtgtgtcgggggggcggtggcggcga

SEQ ID NO: 336370 - DNA, 122 bp, Homo sapiens
tggtaccttgcctgacagctgggtccgcgggcccgcgggagcaggcggcgctagtgacagcgctggtgccaagcctgggaataaagctccgctccagccgctgctgcctccagcgccaccat

SEQ ID NO: 336371 - DNA, 122 bp, Homo sapiens
ccccgcctcggccccggcgggggaggggtctctgagcgcggcccctcccccctgcgcccccgcctgcgctgcggtgcccccatcccgcgtgtcccagtctgtctgaccgtccctccgctccc

SEQ ID NO: 336372 - DNA, 122 bp, Homo sapiens
aaagcagcattggacgatttttgctccttttccacagcctagtttcaaatggattgcaggcgcgtgcatgtggggagaagggttagtttgagaagaaagaaaagacacctagacaatctaag

SEQ ID NO: 336373 - DNA, 122 bp, Homo sapiens
tccaattgtataatgctgctgtttctgaattttttaagtacagaactttttatattaaggcgagcaattctgaatgactgataactgttcagcgagactccaggaattcttcttcccaaatt

SEQ ID NO: 336374 - DNA, 122 bp, Homo sapiens
cacatacattgtggcgcctgttgactcgaacacaagtgctcgcagtgatgattcaaaacacgcactgattcagcatgctctgatgtgtggtgcgattcaaatgtatggtcagaggacaagct

SEQ ID NO: 336375 - DNA, 122 bp, Homo sapiens
attgttaaaaaccataaaagaggtccttagtacataaattgtcaattcctggccattcctcggaggtactggcattctggaggcatctacacaatttcataacaattgtattgtccatgtaa

SEQ ID NO: 336376 - DNA, 122 bp, Homo sapiens
gctgctctctctgaactgagagagttaaccaagcgggccagggcagtctgggctgggggccgccccctggcccccctccagccccagctccagtttcagctgctggttggggagggcatggg

SEQ ID NO: 336377 - DNA, 122 bp, Homo sapiens
gtgctgctcaaatacagtgctggggaaaacggtccaggacctaaggaaaacacccgcgggcgggcgggcgcgagcggcagtcgcacccgtgtggaggagaggttgctgacagatcgaggcgg

SEQ ID NO: 336378 - DNA, 122 bp, Homo sapiens
gcgatggagcgggcaaggtcagctgtgccggtggcttctctcaagagacagcctggggagcggccacttttattcatcagatattccaagtttttaggacttggagtactgaataaacggaa

SEQ ID NO: 336379 - DNA, 122 bp, Homo sapiens
taggaggacgggattctgcagcgtccttagcctagcgggtggtgcggggcagggaagttccggacagcgaagagccacgttcgagctctaatgattctctgtgtccccagagaggaagtgtg

SEQ ID NO: 336380 - DNA, 122 bp, Homo sapiens
gggttcggagtcttctggggaaagggcgtgttgggagagaaaggcaagcccacgcaggagcgacctcctaattaattcatcatcgagaattctccagtggggtgtgtgtgtgtgtgtgtgtg

SEQ ID NO: 336381 - DNA, 122 bp, Homo sapiens
ggagaagctgagaaaggagagcggcaagggcagtttcctccagcccacagccaagccccgcgccctggcccagcagcaggctgtgatccggggcttcacctactacaaggcaggcaagcagg

SEQ ID NO: 336382 - DNA, 122 bp, Homo sapiens
tcacggtgactcagttcccaagtatgagatgagtgtttctgttgccacatgtccaagccacgaagtgaaaaacagagttggaagccaagatgtggggcagtatgggctcgggtgtgcccata

SEQ ID NO: 336383 - DNA, 122 bp, Homo sapiens
aaaagttgcttcctctctggccttttccttgagttgtacagtaacattacatagttctctcgtaatcccaggtctctatcttacacagtatgatagaaaggaaacttaaatgcaagacagtt

SEQ ID NO: 336384 - DNA, 122 bp, Homo sapiens
taaattttcactctcagagagcacgaatgcagtagattattgcaaaccgaagccttttctcggcagggtcaactgtccattttcttgcttttcttcatgtaccaattcttggttccagaggt

SEQ ID NO: 336385 - DNA, 122 bp, Homo sapiens
ctgaggtagcactgccgctccttgcccggccaacctctgcaaggagctgacctgaggacccgtgacaggcactgcagtgatcgttcccaaagcctgaaacatacaggagggcaacgctgaga

SEQ ID NO: 336386 - DNA, 122 bp, Homo sapiens
gcaggaccggagccaccaactgctgggcgggcacctgttagcttaggatggcgaggtagccggaggatgcagtgggaccacagccacccaccccaccttgcccgggccaacaagacgagcag

SEQ ID NO: 336387 - DNA, 122 bp, Homo sapiens
tggtgggggccgagtaacatccagcttaatctttcccccccttcgtcgcccgtgctatgccgggatgggtccaggctcctgtgtggactcgatatatcagagcaacccaatcttgccgggat

SEQ ID NO: 336388 - DNA, 122 bp, Homo sapiens
atgcactgctgctggtgctcactatgctcaacctcctggactacaagtggcacaaggagccgctgcagcagtgcaaccccgatgggccgctgggtgccgcagcgggggcagccggaggcagc

SEQ ID NO: 336389 - DNA, 122 bp, Homo sapiens
agagaaggtgaaataagagaggtgggacatggaggatggctgcggccacccctgaagcttcgtccagcgcgatgggagtcagtccatccttgcacacgccacccccaactcggcaatgaaac

SEQ ID NO: 336390 - DNA, 122 bp, Homo sapiens
tgagggtagagtctggcaaaggccaccagagggccgtgtgcctctgtctttcagagactccgagtgcctgttttacagctgcagccaacaggatgggggaaatgatatctcgtcgttttcat

SEQ ID NO: 336391 - DNA, 122 bp, Homo sapiens
gctttgttcattctcatctttagcaacttgttcattttagtatgcttgcctggatatctgcgctccatcccaatgccaccccttccatgatggcatacctctgctatggagtctcgttcctc

SEQ ID NO: 336392 - DNA, 122 bp, Homo sapiens
cttatgcaaatagaggctcagccactggtggtcaactttatccaaagtctcagagctagacgaggctccttccagttgtaacagtctatgtttgcatgaaacacacttcccacaatggctgt

SEQ ID NO: 336393 - DNA, 122 bp, Homo sapiens
tcggagaccgaattcaaaatgaaaaaccgggctgctgtcccgcacggagcctctgggcgccgctgtcggccagtgcagagcaagcgctgacgccggggatccgtcagcctctggcctgggat

SEQ ID NO: 336394 - DNA, 122 bp, Homo sapiens
cccactcccaccggcgagcagcccctgctcaccgttcaccaggcagcgacgctcccgggacgcgactgccgcaaccgaaaccacctgcactccccacgcggggctgcctggctgtgtacata

SEQ ID NO: 336395 - DNA, 122 bp, Homo sapiens
ccgcgaaggtctacagcttcactcctgaagccagcgagaccatgagcccaccgggaggaacgaacaactccaggcggcactgccttaggagctcatcgcgaaggtctgtagcttcactcctg

SEQ ID NO: 336396 - DNA, 122 bp, Homo sapiens
agggacggggacgagccgtgcgcgccgggggagggggaggcgctggcgctgcggcggccgcggggagggccaccttcccagcacacgcacacacgcgcccccggccctccgctgcgccagct

SEQ ID NO: 336397 - DNA, 122 bp, Homo sapiens
ataggctgtaactcaaggccctacctgaagctcgttgtcagggaaacagcactccagccccgcagctgcttccccagcctgggaagtacggatgagttggtgggagttggggattgttttac

SEQ ID NO: 336398 - DNA, 122 bp, Homo sapiens
tcacaataacataaacacgctgtgtgtccaccgtggatcgtaatatccttgggggagaggcggggtgatttactccactactaggattttacctctactgccactcttcgttaacaccctgg

SEQ ID NO: 336399 - DNA, 122 bp, Homo sapiens
aatgcttggtaggcatataattatctgtgggttgttaatttcacaagtatgaatatctggcggttgcactgtagcccaaatgagagggcacaatgaaatccccaagagcactgataaagctc

SEQ ID NO: 336400 - DNA, 122 bp, Homo sapiens
tcagttatttgcttctttccaacgtttggcgcccagctcccgccatcggagcgccccgcccgagaccactgatctcctggggcctcgcagccttgcttccgaacgccaaggtcgcggtgcgc

SEQ ID NO: 336401 - DNA, 122 bp, Homo sapiens
tccgtaggtgcttcttgaggctcctgctgtccacggcagcatagtcacacaggtaacactcgtgcggcatcacatgtgcatggtcaggttgtccttccgctgaagcacttgtcacagaactc

SEQ ID NO: 336402 - DNA, 122 bp, Homo sapiens
gacccctgggccgagggtggagggggtctgggcaggcaggagggaggagaccccggccatcggggaatcagcagaccctgaggtttggaggtggatgcagggaaacaaacactaccctaggc

SEQ ID NO: 336403 - DNA, 122 bp, Homo sapiens
agggctggccttccaggatctggaagatcaaaatctgctcatacaaactggcaaggagaacgtgaaaagcataaatgcaagaaatgagaaatctccgtggctggagtggtggcttatggatc

SEQ ID NO: 336404 - DNA, 122 bp, Homo sapiens
gatggccaggaactgctccaacatcagcagctccaggatctgctccttggagtgcacctccggcctcaaccactgacagcaaagctctcgcagccggctcagagcctcccgagggccagtgg

SEQ ID NO: 336405 - DNA, 122 bp, Homo sapiens
ggggtgtttattatccttctgaatggctttctcccagagaggggaagaaagagggggccccggtggagccaaagaacagtaatctttcaggaagaaaggaaaaggccagcaacagcaacaaa

SEQ ID NO: 336406 - DNA, 122 bp, Homo sapiens
gtacctccgtaggcatataacaggcacagcggcgaggacaggccttgcccccaggggtggcgaccaggcagatcacagcaaaggagaccagcaagcaggtgattcctctgccttttaccttc

SEQ ID NO: 336407 - DNA, 122 bp, Homo sapiens
ctcacgttggctgcagggcgctcgcgcggcgcctcggcccgggtcgcatcccttcccgctcgtgctcacgctcgcccggaatgtggggttgtgattgttactctacgttccggaggcgcgtc

SEQ ID NO: 336408 - DNA, 122 bp, Homo sapiens
gaactggcttggacttggcatgtccttgtacttctgggggctgatggaccttacgaccaccgttctctcggacaccccaacaccacaaggtgaattagaagcactcctgtcagacaagccac

SEQ ID NO: 336409 - DNA, 122 bp, Homo sapiens
ctggccaggaggccggagagccgggcccagcgggagcgccgagcgctggcttccttttcccgagagtctttagtgaggaaaaaccccatgagaggtgactgccaggcctcggccctctgtcc

SEQ ID NO: 336410 - DNA, 122 bp, Homo sapiens
tacaactcaagttgagatttgggtgggggcacaactaaatcatatcaccagccttacctccgaccacttcattcctcacactacagtccagtcacaccaaattgtgatgattccttcaatgc

SEQ ID NO: 336411 - DNA, 122 bp, Homo sapiens
gagtctgaactggccctcagcggagctcttgcaggaagcagccgaggtgcgtctccgccacggaccccaagctgcccaagttaagtccttctagaagggcgcattccatggagaccagaaag

SEQ ID NO: 336412 - DNA, 122 bp, Homo sapiens
caaggcgctccgaagcgccgccccgctccctcccggcgcacctgggcctcggcgttccggcgctcctcccagtcgcggcagctggccaggtcgcgctgccactgttcgcaggccggccgctc

SEQ ID NO: 336413 - DNA, 122 bp, Homo sapiens
gccgtctctcctgcccctgccccagcaactgtagctcagtgttcccagcagctgcctggccggataggaccagggctcggcccctccaccccggggtttccagcgcctcttctgtcttcctc

SEQ ID NO: 336414 - DNA, 122 bp, Homo sapiens
atctgtttgagggtttctgaaaacatcggtacctgaggggtcgtcgtcgtggtcggacttcgcgtctctgcggcctggaacggaagtgagcgggagggccggggtcagcttctaggcgcgtc

SEQ ID NO: 336415 - DNA, 122 bp, Homo sapiens
gcccggggacgggatccggatctaatcctccagtaatctcgctgaggcccgaaccagaggcgggcggggacatccgcgccgacgcggccgctggcgccgggacggccctcactgacggtctt

SEQ ID NO: 336416 - DNA, 122 bp, Homo sapiens
tggacggttggaagcttctttttccatcagcaaacaggtgtcggtaggcacgctgatctccggccaccctctcacggaaaggagcattttcctggatctccggccaccctctcacgggaagg

SEQ ID NO: 336417 - DNA, 122 bp, Homo sapiens
ggtgtctccaggtcaatcatcttctgtactgggctctgaccactattggttttgagaccacgatgttgggagggtatgtttacagcactccagccaaaaaatacagcactggcatgattcac

SEQ ID NO: 336418 - DNA, 122 bp, Homo sapiens
ccgggtacctggacctggatgcccagtgtgtatgcatgcctgtggcgctgcgtgagttatcggggctctgatagcgtccggagcgggttcgagggtctcctccaggaactcgcagaaattag

SEQ ID NO: 336419 - DNA, 122 bp, Homo sapiens
cacctgccgggggctaggcgtttccctctgcagggcctggaatggactcgtctgccaagtcggcactacacagcttctccagcagggggcggaaaagggcctgcagcgacgcgcaggacccg

SEQ ID NO: 336420 - DNA, 122 bp, Homo sapiens
cagctttttcctggattggaccctctgagttctgtggagatacccatgactcattgtcatcgacccagcacccatgctcagttcaaatgttacctcttctcttaagccttccctggtcttct

SEQ ID NO: 336421 - DNA, 122 bp, Homo sapiens
caccctacaagtggcctacagggcacaggtgaggcgggactggacagctcctgctttgatcgccggagatctgcaaattctgcccatgtcggggctgcagagcactccgacgtgtcccatag

SEQ ID NO: 336422 - DNA, 122 bp, Homo sapiens
agaggaggtgatgtctaaactttcatcctaatggaaggtggtagttatcgaggctggggacgtggggatagaaggatattttagatagcaggtgtaccaactactcagactaaggtgagaga

SEQ ID NO: 336423 - DNA, 122 bp, Homo sapiens
ccatcacatctttattcctcagcccagacactcgaggcactcaacagaatcagccatccacgtctaggtatcagagaggaccacaaatacaacattctccatctgctttcagagttattatt

SEQ ID NO: 336424 - DNA, 122 bp, Homo sapiens
cagattctgcagcagggcagccactgtgctcttcccagacccattgggtcccaccagcgccgtcacctcaccaggacgtagggtaaacgtcagcccctagaaaaccagaaaaagagttaagg

SEQ ID NO: 336425 - DNA, 122 bp, Homo sapiens
aggtgatccacccgccttggcctccaaagtcctgggatcacaggcctgagacatcacgcccggcctggcccattctttgttcaacccgtgcttcttaactagattcacagtgtattatcaat

SEQ ID NO: 336426 - DNA, 122 bp, Homo sapiens
ggcagggcaagatcacaggaccacaggaccggggcgaaattaaaattgctaatgaagtttcgggcacgcattgtcattggtaacatcttaggagaaagggtttgagagcagaaaacccatct

SEQ ID NO: 336427 - DNA, 122 bp, Homo sapiens
cgttcgcgcccgagcgctgttgggaggaggggggcccgacgctcttcctttatccttccccgggtgtttaaacttaggggtcccttcgctgcctctatgaatgcccccacaactggcgcacc

SEQ ID NO: 336428 - DNA, 122 bp, Homo sapiens
cttgaatttgattattttgttttaaaagagccttaagggctgaaggaatggggtgaagggcgccacatggtggtacaaagggagaaccagctgggtattgacaaagactctctccttgacca

SEQ ID NO: 336429 - DNA, 122 bp, Homo sapiens
ccctccccgcggagttcccgcccggccctctgcaatccggagcccaagccgccggctacgcgccctgcgcccccttggtgccgcgtccagtgcccagcgcgctttgatgctgcagctccggg

SEQ ID NO: 336430 - DNA, 122 bp, Homo sapiens
tgtgaccatcctgagaatggacaggacacctggggtggggaaggcggcagagaacccagacgccagcctggacacaggcacctgggataatctcctattcattggaaagttctagtctctga

SEQ ID NO: 336431 - DNA, 122 bp, Homo sapiens
ctgggatggggacatcggttgtcccataagagatcatcttttaaagacgaaatcactcagcgtccagtggccagtacctcagatgttgggtttttaaggaataagaaatcagatggcaggag

SEQ ID NO: 336432 - DNA, 122 bp, Homo sapiens
cacctcgcccctcttcagcatgtcccacttgttcatgatcttcatggcatacacctggcccgtctgcttcatcttcactaccgctacctgaggtcgagatagtgagacagagtggagacggc

SEQ ID NO: 336433 - DNA, 122 bp, Homo sapiens
gcaggccgagcccctgcagcctccttgctgcgcaatgtcccggggcccccctcccgtggccgcttcgccctcctggtgacgtcctgctgcaactccccgagcactgcctgtcttcccgctct

SEQ ID NO: 336434 - DNA, 122 bp, Homo sapiens
ggattggcgggccccgcactcgtcccagccggctggcgcctgctgggcttgatcaggggacgagctctctctgggctgccgcaaagttggggttaggtgccgcaaagtcccggctgcgagtg

SEQ ID NO: 336435 - DNA, 122 bp, Homo sapiens
tgagaaaggatctgagcacaagagattcagggtcatgtcctggctcctcaggctgaggaacgttaagcaaatcactcaacttgtctggggcttggctcttccatctgcaaccgggggcggtg

SEQ ID NO: 336436 - DNA, 122 bp, Homo sapiens
tgcagccacggccaataggcgagagacttcttgtttcctggcagagcggggtcccggcaccgcggcgctcgggtgtttttgggggcccgggtggagggcccgggtgccggggcccaaggtgc

SEQ ID NO: 336437 - DNA, 122 bp, Homo sapiens
gggcccagcgtaggcctctggcttgaaggcggccagcatgcaggaggagggcgccagggtcgcctccaggcgggcagagagctctccggcggcagccaggctgcgctgctgctgttccaggt

SEQ ID NO: 336438 - DNA, 122 bp, Homo sapiens
ggcgggggtagaggcagcggccacagccgtgtccggctctggctccgctgcgttttccgccgacgggccccgcccactacacttccggttccgggctgaaatcggaaacaggaggagggccg

SEQ ID NO: 336439 - DNA, 122 bp, Homo sapiens
aattccaaagggccactctcaagagatgctcttgacaggagcaactgctcatgatattttcggggtttttttgttgttaaagatgagttcttgctgtgtcgcccaggctggagtgcagtggt

SEQ ID NO: 336440 - DNA, 122 bp, Homo sapiens
cttccttcctttgctaacgtggtgcacgcacggatgccatttctacgggtcgcatgctcacggggtcctgggtcggtgactcctcaggcatggattttccacgttgctgtggacgccatctc

SEQ ID NO: 336441 - DNA, 122 bp, Homo sapiens
tgtcttcatttttttcaaacctgaaactctacttctttcagaaggtgacatcaaataccacgtcatggagaaagtagaaagtaatcagtaaaattttcctcaacttttcaaaataaaatcta

SEQ ID NO: 336442 - DNA, 122 bp, Homo sapiens
tggggtgggttcgccaggagggcaggttcgtgcggcacctcggagggaggctgagcgggccgcgccgggcggcgggtacacggcggtatggtcctgcgctcgggaacgcggaatgttccctg

SEQ ID NO: 336443 - DNA, 122 bp, Homo sapiens
aaccccattaggcaaattcaaggaatttgaggatcagaggtaatgcctgactaaggtcagcgtagctagctgagctgggactgttaggtgtgaactgctgaaggctgtcattgcatgttagc

SEQ ID NO: 336444 - DNA, 122 bp, Homo sapiens
aatagtccattctcttggctgccttggcgaggcagaggctggtgttacaaacttttctttcgtccacgtgtcatcttggagacttggagagaggacaagatttgtttccttatttgctgcct

SEQ ID NO: 336445 - DNA, 122 bp, Homo sapiens
ctcaggagtctgtgatgtttcctctcttaatgttttcttccccagcctctggctagcctccgcccctgtaccacccctccacagaattacaggaccatataatgcctctgcttatccagttc

SEQ ID NO: 336446 - DNA, 122 bp, Homo sapiens
ccggggctgcagcggccacagagccttggccctcccagaaacggactctgatggcagaggcgccggcctcttgcacagggtggaaggtggtgcctgcgtggatggtggtgcaccggggcagg

SEQ ID NO: 336447 - DNA, 122 bp, Homo sapiens
cgtctctgacggacattttgaggtcattttcttaaatccaagatcctaaagatctgtagtcgaacagagaaaactggtttgctctctgtcttaaaggctgtccccacctttcgaggggcgag

SEQ ID NO: 336448 - DNA, 122 bp, Homo sapiens
cccctcctggaagaggacacacacccacccacccacacacacacacacacaccccacacacgcactacgagaaggggagtttgatcttgtctcattggcgtctcgggtctgaaaggaaaatc

SEQ ID NO: 336449 - DNA, 122 bp, Homo sapiens
ccattcccacagatgagcggactcatcccatcagcagctctgtgaggacagcagggcacacgcttcatctttagagccgaggaaacggggtcccacaggcagtgatgtgcccaagattgtgc

SEQ ID NO: 336450 - DNA, 122 bp, Homo sapiens
gcgcagcccagcgcggtccccagacacagcagccacacaagccccagcacagccgcctgccgcagcctcccgcacacgctcctggggctgtgccgcagctgccactcggccagcagctcctg

SEQ ID NO: 336451 - DNA, 122 bp, Homo sapiens
gtgccggaacccactactggggtcctcaggtctcaaggccatgatcgcctaggggcttaacggtttcactagccctgtgtggatggagcagccaataggtttctttcctcctccttagcccc

SEQ ID NO: 336452 - DNA, 122 bp, Homo sapiens
tatgtaaatactaggccatgttatgtcagagacttgaggatccatggattttggcatccccggggaccctagaactaatccatggataccaagggatgactgtataaactcactcaggaagg

SEQ ID NO: 336453 - DNA, 122 bp, Homo sapiens
ccagcagggagctggcggtctcgggaatgacctccatgtgggctcctggggaagcccaggcgactgtgcaaaccctgctggcgagggtgccgccctccacggttttccaggccccagggtgg

SEQ ID NO: 336454 - DNA, 122 bp, Homo sapiens
cccgggagcccggtggagtggacatccagggcagggcggaccccaatgggaggcccagcacggctcctgtcggggacctacccgttcccagaattcccccgggagcccctcgcgggtttgtc

SEQ ID NO: 336455 - DNA, 122 bp, Homo sapiens
gagaagtccaaatcctgacttctctccaaggtgttgggaattctgtgccctaaagaattccgactcagatccgaacggggatctggtggaatcgagggtgaaagaccagagggacaatgttc

SEQ ID NO: 336456 - DNA, 122 bp, Homo sapiens
aaaacgtgtgctggcctgagcatcctgatgagcagatgctgaagaagagtgagggaagcacgagtaatcagcccaccctgggcttacctggatggagattaggcccaagagcatgcaccttt

SEQ ID NO: 336457 - DNA, 122 bp, Homo sapiens
tttgccaggcactgggaaaagacactgcaggccccaaattgtggttaatctccaaggacacgcaagaatgcagcaggagagactaggattagacaacagggagaactcgatgacagctagag

SEQ ID NO: 336458 - DNA, 122 bp, Homo sapiens
tccttctctctgaaaggcctggccctcaggccgttccagacaccccttccctgtcctccacggggtactctgacttttcataggtgactaaacaacaggcaaaaccgagcaaattaacagag

SEQ ID NO: 336459 - DNA, 122 bp, Homo sapiens
tcctctgactacctcgcgccagcaagacccaaactacggatcccgattgactccgcgcggcgcgtcacgctgtcagctccagccaatcggcttcagacaagtcggaggggagggagacgcag

SEQ ID NO: 336460 - DNA, 122 bp, Homo sapiens
cgactgtggcgacggagacgacaagactgtgctggtcgcgggttgtggggtttaggtcaccggcaggggtctggagtccctggaggttagggcttcgacccgcgcgacacctggggccctag

SEQ ID NO: 336461 - DNA, 122 bp, Homo sapiens
cccatcccggagagcagggctacagccttcaccgccgcgtctgacacagggctccgcacccgacccctcacacctggtggccaggactgagcccccgccctcccagatcctcctcaagccga

SEQ ID NO: 336462 - DNA, 122 bp, Homo sapiens
tgtgccgaggtgacaggtgtgctgttggctcgggagaaggagtggcagcagtatgagtgacgctggcagaagacagattccaagaagggtgaagccactccctgaagacacacaaagcctgc

SEQ ID NO: 336463 - DNA, 122 bp, Homo sapiens
atatccttgctatttaattttgatatcacagatattcatgttttagctatacatatcacacgggttggaaagaatccacaaaagatgctgtgtcagaaagataaagtcacatgtctctcaat

SEQ ID NO: 336464 - DNA, 122 bp, Homo sapiens
tggtcacgggcgcgcagctctgtggcccggcagtcaacctgagccagatcaaggacaccgcgtgcaagtccctcctgggcttggaggagaagaagcacgcggaagccccagctggggagaac

SEQ ID NO: 336465 - DNA, 122 bp, Homo sapiens
gggacgcccggggaacggcagagatctcggcgcgggagacagagtcccggcaaggggtcccgcgcggaggcgggggcgggcgctgaagggcggggcggggaggggcggccgtctcggccctc

SEQ ID NO: 336466 - DNA, 122 bp, Homo sapiens
acccgtgtccccaggcacctgtcctgggcgctggccaagaagcgtccatccggtccgggccggtgccaagaggagggtcaaactgccaggggtcccgacccccccaggccccgcggatgggc

SEQ ID NO: 336467 - DNA, 122 bp, Homo sapiens
tttttgatggacatgatcgcttgtaaaggcttccccaggtctctactgtagggaagagtgcgcctgtcctgattcagtcatttgtaaactattgttattgtttggacaggaatagcagatgg

SEQ ID NO: 336468 - DNA, 122 bp, Homo sapiens
gccgctcgccccaacccaaacattaccataaatgctcaggcggctgcgggtggatgggcgcgcggggagcctggggctctccggaagccccagatccagtctccaggcccgacccagcgcga

SEQ ID NO: 336469 - DNA, 122 bp, Homo sapiens
gagaaagtggagccgctgccctggaagagctgtgtctgaaccaggctcccagctgtgccacggcccaggcagacgcgttttaaaggcccgagccccgtgtgtcggggcttctcaggcagggc

SEQ ID NO: 336470 - DNA, 122 bp, Homo sapiens
gtagaatcaaaaaggacctgttatctccatgagatacggagctcccaggaaatataatggcgatctctctatgaggtgcggcctcatagcagcacccaggaagctggtgactgggcctgcat

SEQ ID NO: 336471 - DNA, 122 bp, Homo sapiens
tgggtggacctctggcggattttactgaaggcaacgtgtaaactgataccgaactccccgcgtctacgcagtgccgcaggcacagacttatgaattcgggaaatgtggaagtgaaaaggaca

SEQ ID NO: 336472 - DNA, 122 bp, Homo sapiens
tccgacacagcttccaccagccacgttacctgtagggtccaatggcccctggggctttcgcggtgctgatcacccttctgatcaaggacgacatggctaagccttccctcttgcagcccctt

SEQ ID NO: 336473 - DNA, 122 bp, Homo sapiens
caccggccctcagtgcgcttgcgccactagatgacccgccccctcgggctgtcggggggtcgagacagtggagtgttcctgatgccagctcacggagggaatccagggaattaggtaatgaa

SEQ ID NO: 336474 - DNA, 122 bp, Homo sapiens
cgcggcctcccggccactctgagtgcggcaccggccaagcccacgcccacccggaactcgcgctctccagcaagcatcgcgtgcagcccaggttcccgccggggcctctccctccacacctc

SEQ ID NO: 336475 - DNA, 122 bp, Homo sapiens
tgggcgttaccctatggagcgggagagccatggtgcatccaggcagccagaagcatcctccggcgcctgccgcagaaggaactggaattgcgagaggacaggggtggacgctgccgcgtggg

SEQ ID NO: 336476 - DNA, 122 bp, Homo sapiens
aatcagttagttgtctcctttaaaacctttctctctctcacacacccacacacacacacacgcaaacacacaggagagagagagagggaatatatagtattgtttttggagtatgagtgtgt

SEQ ID NO: 336477 - DNA, 122 bp, Homo sapiens
cgggagctgcgccggcaggtggaccagctaaccaacgacaaagcccgcgtcgaggtggagcgcgacaacctggccgaggacatcatgcgcctccgggagaagtaaggctgcgcccatgcaag

SEQ ID NO: 336478 - DNA, 122 bp, Homo sapiens
gagaagagatcagcaagtggccaagtgaccgggaagttgctgtcctcaatgtaacgccaccgcgtggtgggcctgctgtgctaaccacggtaatgcacgggacctttaacaacgacccttag

SEQ ID NO: 336479 - DNA, 122 bp, Homo sapiens
ggcgcaagccttccggccgggtcctcgggcgcacgcggctcccgccccgcctgctgagcgcggcctgccccgcccgcacctctgtctaggcctctgggggcgccccggccccgcccccgccg

SEQ ID NO: 336480 - DNA, 122 bp, Homo sapiens
aggcactggaggccccatcagccaatagcaggactgaaaatcctcctttatccaagacaacgtgtttggcaaggccgactggcttggcctccctaggctggaaattgcaattctgctttccc

SEQ ID NO: 336481 - DNA, 122 bp, Homo sapiens
tttagactggtactgataccacatctaataggatgtggctaagaagcaattggacttggacgttaatagggagctgcaaatcagcaaaagtgtgttccacaggcatatagtgtggtggagtg

SEQ ID NO: 336482 - DNA, 122 bp, Homo sapiens
ccatccccttccccttggtgttgacctttgacctgggggttcccagagccctgtagccctcgacccggagcagcctctcggaagccggagtgggcagttgctggcgattctgagaaaacttg

SEQ ID NO: 336483 - DNA, 122 bp, Homo sapiens
cagcatgtgcccgggagagctttagacccagctggctgaatccttaaaacaaccctctgccggaggtcccattttcctgagagggaagttgaggctgagggagatcatgctagtctgtggcc

SEQ ID NO: 336484 - DNA, 122 bp, Homo sapiens
cgggcggggggggtgggtggggtgatcccagggaaatacttccgggacatcctcccgttccgcgcgctctagttccgaaagtaccttttttagaccggactggggctcagaggggtttccat

SEQ ID NO: 336485 - DNA, 122 bp, Homo sapiens
agttaaaaccccagttctgctaattcctagcagtgtacacaggtcgtccaacctctgcctcggtttcctcatttaaaaaatggggataataagagtacccggccgggcgcggtggctcatgc

SEQ ID NO: 336486 - DNA, 122 bp, Homo sapiens
gcgcagcgccagcccggccccgccccggcccccgggaccccggccccgccccaccccgcccgggccccgcccagaccccgcccagaccccgccccaccccgcacgagcagccccgtggggat

SEQ ID NO: 336487 - DNA, 122 bp, Homo sapiens
ctcagcattccttgctttgggttatattcaagcaaattctcaccaagtttaatcctcttccgctgaattttacctcctctgctttgcagccctagtttgaaagaagttcctattatccacta

SEQ ID NO: 336488 - DNA, 122 bp, Homo sapiens
gcgccgctgcctctgttcctttaagtagccgctgtttagcattcctgccgccgccgctgccgctgccgctgcctgcctctgcgcgctgattggctggaatcaactgagaagggagccaggga

SEQ ID NO: 336489 - DNA, 122 bp, Homo sapiens
cacgacagcgcgacgcacccccataaggcaagaggtgactcacgccgggtcagtaggtcgcggagtctgcgagaagccactatccccgccgccatcgccgccgccttcgtctactgcgttcg

SEQ ID NO: 336490 - DNA, 122 bp, Homo sapiens
tatcgtctctaatcacaggcaaagcacaaccttcagaaagaaactggactttggccactacgtatctcacaagaatagaatacaaataggtatgtgggcagtttgggctggacactgctatt

SEQ ID NO: 336491 - DNA, 122 bp, Homo sapiens
cacacatcctgaaacccaccctgtaaaaacacgattaacagagttgtgagctaccaccaccgtaatgcaagggcacgcccatccccccgaaaaagaaaccccggcccgccgccggcggcccc

SEQ ID NO: 336492 - DNA, 122 bp, Homo sapiens
ccaggtacccttcaagcaaatacaaaccagatctgaacacatgtgaatatttgggggaaacgtcaaatgtaagcaaaccaccacagcatgctgcaggtgtttaacggccagctctccggaga

SEQ ID NO: 336493 - DNA, 122 bp, Homo sapiens
atctagggagatcatacccatgatgactttgtaaaacatctctcaactcccaacagcacacgcactttatttcttcccacctttcacttctcagtgcaagtgtctgcccagggggtctgagc

SEQ ID NO: 336494 - DNA, 122 bp, Homo sapiens
gaggcccgccagaggccacaagaaccctccagccctaagtctgcgaagttgctgatgtcacgtcctttcccaaactgagaccaatcagtgaggaagccttggagtttatcaggaaggaaact

SEQ ID NO: 336495 - DNA, 122 bp, Homo sapiens
ggcgcggggaggtgtgcgcggacgccctgcccgctgccgctgccacccccggcccggccccgcccgccccccgagccccggcctcattttcacacggtccctcccgggccggggcgggaagc

SEQ ID NO: 336496 - DNA, 122 bp, Homo sapiens
gaaatcaggatcacctctctactatgtgagggccagggacctagtggtgttttctaagagcgcccatctgattttcccagctgcagaaaggcaccctggtcccagcctctgctggatggagc

SEQ ID NO: 336497 - DNA, 122 bp, Homo sapiens
cggggcgcacggggtcgagagagccagctctagggtttggggctgggaactgaagcctggcgtgaaggaagtgggagcccgggccgaggaggcgaaggggaaaggaaaagcgaggggaacct

SEQ ID NO: 336498 - DNA, 122 bp, Homo sapiens
ttagtgttcttctgacctggcctgtgtagtcacagctctgcctgcctgccagcctgggcccgtgtacttccacagctgccccacagcagggcaggcttctttctgcaaacagtctaaaatcg

SEQ ID NO: 336499 - DNA, 122 bp, Homo sapiens
cccagttccactcccgcccttccttggctttgtagggtctcccctccgctccctcggaagcgcttctaagaaggtgggcagagggggggaggtttgctaccaacagctcatgaataattcat

SEQ ID NO: 336500 - DNA, 122 bp, Homo sapiens
ttactatcttcatctcacccatttcaagtctgaggtaaaaaaataataatgataacaaaacggggtgggtattcttaactgtgactatattttgacaattggtagaaggtgcacattttaag

SEQ ID NO: 336501 - DNA, 122 bp, Homo sapiens
atctgaacatcagaaggaacagactccggacacgccgcctttaagaactgtaacactcaccgcgagggtgggcggtttcattcctgaagtcagtgagaccaagaaccaaccaattccggaca

SEQ ID NO: 336502 - DNA, 122 bp, Homo sapiens
tcacggctaagcacagtggctgacacgaggtcgaggcgtgcccagggccgggggagcaggcggtacccgagagtctgtcctcccatggttgggcacggctggagaggaggcgaggtggagcg

SEQ ID NO: 336503 - DNA, 122 bp, Homo sapiens
cctccaattctgtgggtggatgatcctctgtgcttgcttcttctcctagtccgtgtatggcgtgactgaagagtcccaggcacagagcccggtgcatgtactcagccaaccaatcaggaaaa

SEQ ID NO: 336504 - DNA, 122 bp, Homo sapiens
cccaaagagaatctgacccattctctctgaccctttaacggcctgactagtatgccttcccgcttttccttttgaaaaggaaagtcagtgctggttagatcaatttcttactgtactgtgaa

SEQ ID NO: 336505 - DNA, 122 bp, Homo sapiens
catggaattttatcttctactaccaggagcacacatgtcttacaaggctttcagcatgcccgccacttcttgttcctcatgtgcaatcagcatgatgtcattgacataatggattgatgtaa

SEQ ID NO: 336506 - DNA, 122 bp, Homo sapiens
aacctggggccaggagggtgcatggggagggggctccgtaccccaatgcctgaggagtggcgcatccaggccccagtgctccacctggcagtcatagacgtcctcggctgagggcacgaagg

SEQ ID NO: 336507 - DNA, 122 bp, Homo sapiens
aacccttcaaataaccttcttctctatcattctgtgtaaaatctttgaaataactaatgacgtcctgaaaggtgcaaagggcaaagctcacacactgaattgaggcaagtcatcaagcagga

SEQ ID NO: 336508 - DNA, 122 bp, Homo sapiens
agattgtgctagccactgtactgcgctacccactgttactaagattgtgctactccgctgcgggaccagcggagatcctccacccaataaaagccccaggcgcctataccggattccatttt

SEQ ID NO: 336509 - DNA, 122 bp, Homo sapiens
tgctcatttaagtcccatgttactgctgtttgcttttacttactttcagtagcaccataacgaagtagctttaagtgaaaccttttaactacctttctttgctccaagtgaagtttggaccc

SEQ ID NO: 336510 - DNA, 122 bp, Homo sapiens
cagtttcccacacattcgagtttgcaaacttcaaccagacagtccacccgcctgacttttcgtgggtgcaagggccggtcccttgctcgttttttctcccatctttcccttctaactactgg

SEQ ID NO: 336511 - DNA, 122 bp, Homo sapiens
ctcgagcttgtgtgtggtgtaggacagccgcttgcgcagctcgcccttctgctcctgcagcgcgctgcaacgacatggcggcggcgggccgggccgcggcgctgagcgggggaaactaaggc

SEQ ID NO: 336512 - DNA, 122 bp, Homo sapiens
cgagactatcctggctaacacggtgacaccccgcctctactaaaaatccaaaaatttagccgggcatggtggcgggcacctgtagtcccagctactcgggaggctgaggcaggagaatggcg

SEQ ID NO: 336513 - DNA, 122 bp, Homo sapiens
aaaggggtaaaggacgcacctggaaaatcgggtcactcccacccgaatactgcgcttttccgaccggcttaaaaaacggcgcaccacgagattataagccgcacctggctcggagggtccta

SEQ ID NO: 336514 - DNA, 122 bp, Homo sapiens
cacgatacattaattcacatacttattgagctcctactttacagcaggttctgtccagggcgtacagcggattacatcagagaacaaaatagatcaacattcttttccttatggagcttaca

SEQ ID NO: 336515 - DNA, 122 bp, Homo sapiens
cgggggaagaggccacagggacaggcagagggagggggcggccccagtcctccggggcgtcgctgtttccaagcggcgagatctcgcctagtaaccggcagctgaggttcactagcgcggcg

SEQ ID NO: 336516 - DNA, 122 bp, Homo sapiens
gtgtctttccctctgctctgtgccataagtgggctccttttagacttttgcaaaagctagcggctagcctgccctgagcggtaatctgcctggattttgttccctgcacctggaaagttctt

SEQ ID NO: 336517 - DNA, 122 bp, Homo sapiens
gagtttgttccttcagatgttcagatgtgtccagagtttctcccagttggtttgtggtctcgctggcttcaggagtgaagctgcagaccttcgcggtgagtgtaacagctcttaaaggtggc

SEQ ID NO: 336518 - DNA, 122 bp, Homo sapiens
acaaaaagttttaactgtccacactccagaatcttctatcaacagaacatgcccctcggtcgctccagcccccttgtctttgacccggatgcggaaaccccaaccctacccctcagcttgtc

SEQ ID NO: 336519 - DNA, 122 bp, Homo sapiens
tatttcaccctgggctggcaggcagctgttagaggtatttacggccttgccgcagtgcggcggccaggcagccgggtagggtatgcgggggcaccggaagctggggagaagccatgaagaac

SEQ ID NO: 336520 - DNA, 122 bp, Homo sapiens
ttcagttttattcagagcaaagaaaaaagaaactttccatcatactagaagaaacttggccgtaaggtttgggatctgtgctcaaactacacatgcaatgaggacaatattctgctaataca

SEQ ID NO: 336521 - DNA, 122 bp, Homo sapiens
tgaaagtaaaaatgaaagttaatagcattgtgcatcatttgccagtaagcatctccattccgtgtgtgtgtgtgtgtgtgtgtgttgtgtgtgtgtgtgtgtgtgtgtgtgtgtatttgcct

SEQ ID NO: 336522 - DNA, 122 bp, Homo sapiens
ttctccttcactttcaatttcaggggtcctgaaaccctgcgtttctctgcggtaataacccgtgctttccgttcccggggcgggcgcgctctgactgatcagcgcagatggaggctgtgcgg

SEQ ID NO: 336523 - DNA, 122 bp, Homo sapiens
aagagtaggacacatcgcagaagccgataaatatttgttcaatgtttacatgaacaaacacggtcactcagccgtctttattttcagtgagtcataggtaaaatattcttcaccaggcgagg

SEQ ID NO: 336524 - DNA, 122 bp, Homo sapiens
ccagcagcgtggagttctacgcctcgggggtggcctggtctgccttccacagctgacccccggcctgcagaacatctgtccccaagccagctccactgcccaggcccccaagagggcagctc

SEQ ID NO: 336525 - DNA, 122 bp, Homo sapiens
aaccgcagccgccccgatcaaagatggcacccaggtgggcggggcttgaacagaccgtcccgcccatgccacctgcagccacttcagccttgccccgccgcatctgccgccaaccaatccgg

SEQ ID NO: 336526 - DNA, 122 bp, Homo sapiens
tgaacgaactaacaggactcatgagggactcagctttgactacggtgggcaggcctgcagcgttcacattttcccgatgatttctgtgtgggctggactcccccgcccgccgacaccagaca

SEQ ID NO: 336527 - DNA, 122 bp, Homo sapiens
atgaagcagaagcccttctcgaagggaaacctgaaggcacgtttttgctcagggactctgcgcaagaggactacctcttctctgtgagcttccgccgctacaacagatccctgcatgcccga

SEQ ID NO: 336528 - DNA, 122 bp, Homo sapiens
ttaccttttcctgcaactctgccttcttgagtccaaatgtcttcgaaaggggcaaatgctcgtaagtgccgacagggtgtgtttcagtgaatgtttgcagtgtgcaccggtctggctgaagg

SEQ ID NO: 336529 - DNA, 122 bp, Homo sapiens
tcctggatggtgggacctaccactgagcccatatgtacagttgcagtttccctggttccccgtggcagcccaggaaactgatgcccatccaaaggtcattgaccccagaggctcccaagaac

SEQ ID NO: 336530 - DNA, 122 bp, Homo sapiens
tttcctggcggggccgggggcggaggggggccctccagtgctcctgcgccgtgggaaacgcgagaactctagctgctgcgtatcgcgctatttacccggcttgtggggagtttcaagttggg

SEQ ID NO: 336531 - DNA, 122 bp, Homo sapiens
caaaacatctggggcacttcccaaaagatctcgaaagggaagaaccacagggaaagatgtcgccaccgccagtcctcagagaaatgcaaaccaaaaccacaaggagatgccgttaccagtga

SEQ ID NO: 336532 - DNA, 122 bp, Homo sapiens
agacgtcaaaacaggctggggcaaagtggtcagagcagatgaccgagcggtcattgcctccgtaccagtcggcgcggcaaccccgcacgaagcggtcccagagcagccgcacggcccggtcc

SEQ ID NO: 336533 - DNA, 122 bp, Homo sapiens
gcaggatgcggaaatcttcctcacatcaaatatttgaaaacaaactagaaactgtccaaccgcatttctactgcgcccgcccgcagatgcagttttctccgcacgtgcgcgccttctctcct

SEQ ID NO: 336534 - DNA, 122 bp, Homo sapiens
ccctcgcagaccgtgcactcctgcagggggccccggatgcgatggagctgcgcgagctgacgccctgggctgggcggcccccaggtccgcgccgtcgggcggggccccggcggcggcgcgcg

SEQ ID NO: 336535 - DNA, 122 bp, Homo sapiens
aactttactggccctggactccaaccttcgtttaacattccacccccctctgatccatcccgcatcccgcctatggaaatttgtaattagttgtggagatttagaggctgagaatatatagt

SEQ ID NO: 336536 - DNA, 122 bp, Homo sapiens
gcaatggcagcggcgcggggagccgcccgaggactggcagcggcggggctgattgatgggcgcccggcgcaatgaggggggcccgggcgggggcggggcggggccggctctgggctgagcca

SEQ ID NO: 336537 - DNA, 122 bp, Homo sapiens
cggcctggggtctttccagggcccggggtccgctccaactgcagtgtgagccacttcccccgccccttccaaggacccctggggagttctggcttctagctgtgcacacagactgtgttccc

SEQ ID NO: 336538 - DNA, 122 bp, Homo sapiens
caaaacccacagcactcagaagctaacctctacacccactcacactgtgagtattcagttcggtttcattttactgaaaacctgtgaaacctctttttataaaaatcaggcaattaaatccc

SEQ ID NO: 336539 - DNA, 122 bp, Homo sapiens
ggaacgtggcggggattggagcaggcgcgcaggtacccgatccgaggcggggagagcacccgggatggaaggagcaggcgtgcgggccgtgagcggcgccagagggtacctgggtgagtttc

SEQ ID NO: 336540 - DNA, 122 bp, Homo sapiens
tgtaaggttatttcagtttaaattgtaaccaattaaaacgaatcacgtcctggttgcactcgcctcacctgagtgcttggcccctgtggctagtggctgctgcaccggacagtgcaggtgac

SEQ ID NO: 336541 - DNA, 122 bp, Homo sapiens
cggggcgccgcacgctcccttcctgggcggcacgatgatcatcgcgctgggcggcgtcatcgtagcctcggtactggtcttcatcttcgtgctgctaatgcgctacaaggtgcacggcggcc

SEQ ID NO: 336542 - DNA, 122 bp, Homo sapiens
cgggagtccacgcccgaggcaggggttgggtgaagggtactgagtaggtgctgggagccccgtcaccagcaccctgctcccagctccgtagccagagcaaaccctctcccgctccccgcggg

SEQ ID NO: 336543 - DNA, 122 bp, Homo sapiens
caactttcaagctgctgacttgttagtgaaaactgtgcaagcctaggtcaccattcagttcggaggggaagcagaaggtcacgctggggcgctgaaatcccatctcagaatcctccagcact

SEQ ID NO: 336544 - DNA, 122 bp, Homo sapiens
ttttagtctgaacaagtataactggggaaaacgattaaaaaacaaaacaccgtggtcgggcgtggtggctcacacctgtaatcccagcactttgggaggcacaggtgggcagatcacttgag

SEQ ID NO: 336545 - DNA, 122 bp, Homo sapiens
gggttgactgttcttccctcaaggcctccctgcctgtgttccacgtcgcaactcgaagggcggcttggcagttcctgctgacatccccgcccggcccagctttggggaggaaaggcggggag

SEQ ID NO: 336546 - DNA, 122 bp, Homo sapiens
agacctaggctccaatttctcaccgtgaagaagctcgggaaaaccgggcgcttggggaggcgcgcgggcagaggctacccgtccccgcggcctctagacaggggcggagtccctacccggcc

SEQ ID NO: 336547 - DNA, 122 bp, Homo sapiens
cgtctgccacccagactgggccaggggagcaaggcagccggccaggcacacggagggtgccgtgggcagagctcttttaagaagcagcagtcaggccggctacagcagagggaacgcagggc

SEQ ID NO: 336548 - DNA, 122 bp, Homo sapiens
aagcctgtgagaggctcactctcctcaaagcctcggaccgagaccacggtcacctcatagcgagcgcctgggatcagcccctggagtttctgggtccgggcctggccatccacctgcacact

SEQ ID NO: 336549 - DNA, 122 bp, Homo sapiens
gagggcccagcctaatgggtgtcatggatccagatgtcatgtgatgtgacatgatgaggacggcactaggactagctgggccacagggacacacctagatgcccagttggggttgagctcca

SEQ ID NO: 336550 - DNA, 122 bp, Homo sapiens
aggtctcagaaaacctcatccctcttcctgggcttcccaggtgggagacactggctttcacgcatgtcaaaggcctgcaacccgccaccatctaccaagcatgaggtcattcagaggggcag

SEQ ID NO: 336551 - DNA, 122 bp, Homo sapiens
ttcctcgccgtgggcacctgccacctttccgagggcgtccccgcgcggaagcagcaaatccggccttgcgctggctgcagtgctcagtctccggcgagggcctttccacctcctccgtgcgc

SEQ ID NO: 336552 - DNA, 122 bp, Homo sapiens
aggcaagctggagaaactgcaagagtcgcctgacctggtctgcagcctgagaccaaacaacgcgagggcggccttacctcgcgaatcctcgggaccccacaacgcacccaaagccggcaggg

SEQ ID NO: 336553 - DNA, 122 bp, Homo sapiens
gctgggccctgagccacacaggggacctgtcaaacagcttcaagcggaagatggggctcacgggactggactctctctgcagccagctgtaattaacacaaaagcagaagagtttgggtaga

SEQ ID NO: 336554 - DNA, 122 bp, Homo sapiens
aatgccatggagaatgaccaggttcacacttttccagaattagcatttctcagataaacacgcaacccacatatcaggaaaattaccatttatcagaggggaccaatcctaaaagttctgtt

SEQ ID NO: 336555 - DNA, 122 bp, Homo sapiens
gccctgaacagtgtggccagaacactgccccccatgctccccaactcctgtgggccacagcgcagccccctccgcccagcccgcagcgcccagcccgctgccgtgcccacctccaccagcag

SEQ ID NO: 336556 - DNA, 122 bp, Homo sapiens
gagcttgctgcccacacccctccgggacactaacctggcttctctccagcccgcgtggtgcgtcagtgtggccttgccgctcccgcagccctggtggtgggcttcccgccccatcccctccc

SEQ ID NO: 336557 - DNA, 122 bp, Homo sapiens
tttgtggaaccttcctgatccgcccaggcagagggctcacctcttctttcttgttctcaccgtactgcggatagtcctctatttttccaaatgctgccttgcatatgtatcatttctatcac

SEQ ID NO: 336558 - DNA, 122 bp, Homo sapiens
ttagcttaggatatcctatctccctgcatagtaggcgtctctctgtggatctgatcctcccgtgaggctgggggccagggcagtgccgagtatcagcattgcgacctgcagaatacagggaa

SEQ ID NO: 336559 - DNA, 122 bp, Homo sapiens
gtactaatttttgccctttgatttccttttctacattcctctcttgtgtgtcaaaattgccgacaattaaagcaagagcctgagaaacagggcatattctttcctattcttaatccagccat

SEQ ID NO: 336560 - DNA, 122 bp, Homo sapiens
tcgcgcgtgcggacgcagggatgtcctgctcagtcgtcagggcccggccaatccggagggcgctcggcgcgtggtcgggggccaggagcgcgtctggcctgcagtgcgcagaggacgcggcg

SEQ ID NO: 336561 - DNA, 122 bp, Homo sapiens
cactgcagagaggtttttaatttgtgaattgtttgctaccattaaaaaaaaatcatgtttcggatgcaaatcctgatttcagcttttttggacaaagtgggagatctggctttcctgggcca

SEQ ID NO: 336562 - DNA, 122 bp, Homo sapiens
gttctcctccaagttcctgaacttttcccaacatcgctctatcaagactcctcacccactcggaccgctctgggattctcttccactggaaaaactaataggcgatttttctctttgccaag

SEQ ID NO: 336563 - DNA, 122 bp, Homo sapiens
tctccccctacttctccagccgccgctccagcgaggcctcgcccctgggcgccggccgcccgcacaacgcgagctccgctgactcctacgaccccatctccacggacgcgtcgcggcgctcg

SEQ ID NO: 336564 - DNA, 122 bp, Homo sapiens
agaagggagatggttttcccctggagtccgccaccggccctggctctcctcagactgccccggcaaactccacgtcgttctgctggtcagtggcctatcggcacgccagagctggggccagt

SEQ ID NO: 336565 - DNA, 122 bp, Homo sapiens
tccatgagtaggacaggatggctctaccttgcagggttacagcatggagctgcgggactgcgccggcagtgcgctgagcggcatccctgcgatagggtgagtgcaccaacccttgttgtctc

SEQ ID NO: 336566 - DNA, 122 bp, Homo sapiens
cgccatcggcaccaacctgcgccggttccgggccgtgtttggggagagcggcgggggaggcggcagcggagaggtaagggggcgaggaacccccaggtccggggtctcgaccctctgcggag

SEQ ID NO: 336567 - DNA, 122 bp, Homo sapiens
ccaccgtgggccggggtatggatagacatggaagtatgtgagcgtggacatccatgcgcacgcgcacaggcacacggggagaaccctcttcctcttccccatccagccctctggtttttggt

SEQ ID NO: 336568 - DNA, 122 bp, Homo sapiens
ataacatggtgagcatttccccaagctattacacatatttttaaacattgttttaatgaccggcataataatccagtgcttggatatatcaaattcttcggccatctccttataggtgagat

SEQ ID NO: 336569 - DNA, 122 bp, Homo sapiens
gggtggaacttgctagggcaacagcagccccacggcctggaaggggatggcagcagggtgcgcaggagggcagcgagccggccatttccagagcgaaaaacgacgtgcggtggttgttttgg

SEQ ID NO: 336570 - DNA, 122 bp, Homo sapiens
tccaggaagctcttcatagcaaaagcatagggtggaagggagcagggtggtggaagatcacgtcactgttgacagggcaatgttatttagatggtgccttattctcatccttccatcctcta

SEQ ID NO: 336571 - DNA, 122 bp, Homo sapiens
cccaggcgcgctgatctagccctctgcggaccaccgggttgccatggttaccacgaggggcggagctgaagggcaggctggacctccggggagagagacagatttcgattggctcttttctc

SEQ ID NO: 336572 - DNA, 122 bp, Homo sapiens
aagtgctgattggtctatgactggggtgggagtgtgggtgagcgaccagatgggacacctcgagttggcatgttggtatgatcatttttaaatgggcagtaagcttactagcttcttgcctg

SEQ ID NO: 336573 - DNA, 122 bp, Homo sapiens
ttgctcattttctcctgagttggggtcttcaaagtcatcttaagcactgcagggtttcaacgagctggaaaatgtgtgagaaaacaacatccaagtcgtggctcccatttttgacatctgca

SEQ ID NO: 336574 - DNA, 122 bp, Homo sapiens
gagaaacgcagaactttctacctgggcctgggttggtgtgggaggcaggtgccttgagtacggcaggggtggtgggacagggaggagacagaacttaggcaaggatgacagagtggagtggg

SEQ ID NO: 336575 - DNA, 122 bp, Homo sapiens
aggtcgcattccccacacgtgattccgtgttattgcaaagagggctttggagcgcgagcgcggggcgcgcgcacctataaatacggacacccggccccggagcccgcgagccagcggccagg

SEQ ID NO: 336576 - DNA, 122 bp, Homo sapiens
agcccgcacaggaagaggttggtgaactggaagtgatccttgttcttgaagaggtcttcccgcgccggaccactgccctgcaggcactggaacgggaggaagggaggatagcaggacgtggt

SEQ ID NO: 336577 - DNA, 122 bp, Homo sapiens
cctggccttcacccactccatgccaggagcaccccccaagtcatgacaaccaaaaatgtccgcagacattgccagatgcccccagagcatgcaaaatcatccctggtcaaggccactgccct

SEQ ID NO: 336578 - DNA, 122 bp, Homo sapiens
tagccggggacgctcccggggatccacgggccctggctgggggaggcgttgtggggcgcacgtacacaggctcaagtgaggcgagtgggcggccggggctgcagctggtgctggccattgag

SEQ ID NO: 336579 - DNA, 122 bp, Homo sapiens
ctgtgtgagaagcaaggaagagtcagggcgacaggacaatggggctccttccgccggaggcggcattcttgccctccttgtttgtcaatgctcagccggttgcttcactaacttccccacat

SEQ ID NO: 336580 - DNA, 122 bp, Homo sapiens
caacgcctcttctgattggctctgacgtgcgtggtgcgtgaaaacgtcacgagacgccggcgttactataagagcgcagccgtggcgcttgcgcgcctctttctcagtgaccgggtggtttg

SEQ ID NO: 336581 - DNA, 122 bp, Homo sapiens
aggtgttctcaggccaggagttctcaataaaagcttccctctcttttcaggtgttggctacgtttgtggttttaagaaagcctgagggcctgaaggcagcccctggagaagccctttccgag

SEQ ID NO: 336582 - DNA, 122 bp, Homo sapiens
ctcaaggagggcggctgaggggtgcgtctcgcacaggaccctaaggccagccgggggaggcgacagtgggttctctgctttcaagtggctggcagcagcagggaggagtggagccacaggaa

SEQ ID NO: 336583 - DNA, 122 bp, Homo sapiens
ggtcggggcctcggggggctctgaaggacccctgcatgagcgtggaaaagtgagagcgagcgagttctactccttgtattctgggagcgtcttcttgcgctgccctggaaagttccttgccc

SEQ ID NO: 336584 - DNA, 122 bp, Homo sapiens
gtgacatttctcttacagccaaaggtccaagaagcatcttctccgcagcccctccctccccgcacctgccagcatgtgctgcctccagggcccccggctgcccacatggcttggattgaggg

SEQ ID NO: 336585 - DNA, 122 bp, Homo sapiens
ctttccagtaggagccccaggggacagggtgggtctcacagcccttgaagaccgagctcccgtaggagtttccaggtgtccaaacagggtcctcactgtgagtcttcaacagctttctccaa

SEQ ID NO: 336586 - DNA, 122 bp, Homo sapiens
aatgggacccaaaggagtggtgaatgtaatggcaggtgcagggcttgtgaatggtgcagacggcttatttaaaagtttgggacataagatttcatttttgagggacttcagttcaatgttgg

SEQ ID NO: 336587 - DNA, 122 bp, Homo sapiens
ttgtactttgcgagtgtactttgtactttggtcctgtgtccctgcagccctgtgactacacgcgcacacgcaggcgcgcgcacacgcgaactgacggctcgctggcgatgctggaggctttc

SEQ ID NO: 336588 - DNA, 122 bp, Homo sapiens
cctggaaagtataagccttgtgctggagttctggaaactaccactcactatataaactttcgtttttgtttttgttttttcttggatacagggtctcactctgtcacccaggctggagagca

SEQ ID NO: 336589 - DNA, 122 bp, Homo sapiens
ccttttccagttgctaaggccaaatatgagtttatactcacctcctgtttctttcttagacgttgtatctaatctgtcaggagatcttcttggctctaacttcaaaatatatccagaatttg

SEQ ID NO: 336590 - DNA, 122 bp, Homo sapiens
cacagttcattttgaaccgctgcatttacagaggtagctgctcagttttaattaatggcacgggaaaaataacaggaaaaaaaccgaaattgcatgtttctcaatgtgacagcctcaaactg

SEQ ID NO: 336591 - DNA, 122 bp, Homo sapiens
cattagcctccgaggcgccgagacgcgagaggtgtgattggcactacgtcaggcggtatccggggacgcccaaagagggcgttcatcactgaaacttggcggccgcgcaatcgaagctcgag

SEQ ID NO: 336592 - DNA, 122 bp, Homo sapiens
cctggagacaacccagaaggaagagcccacaagagccacgtgttccagatctgctatgcccgggaagggttgccatggatcttgagagaacattctaagaagtcttaaaaagtcagatttcc

SEQ ID NO: 336593 - DNA, 122 bp, Homo sapiens
acaagaacacaaacggcgttccagaaataacacacagaagccacggcccggagaggtgggcggggggcccgggacgcttcaggtgggggcggggaggggccgcgcggcgccgtctgcagctg

SEQ ID NO: 336594 - DNA, 122 bp, Homo sapiens
cagtaactaggcctgctctacagagggaaacgcaggctctgagagcctacatgtcttcgccgggagtgcttgtcccggagctgctcgcagactgggccgggggtgggctcgggtcggagagg

SEQ ID NO: 336595 - DNA, 122 bp, Homo sapiens
ccagcagcttgggattggtggaaggaagcaggccaggccctgtgaggagtcaaggtgagacgctgaggaggactcaggaggccaccaccccagatagaagaccccaaataatcccgcaccac

SEQ ID NO: 336596 - DNA, 122 bp, Homo sapiens
tctacctgtctgccaatgacacaggaaggatgagaccgtctggggaatggaagcgcagggcgctctcagtaatgctgggcagatgcagtggcttttccccagcagaaatgggcttcgattca

SEQ ID NO: 336597 - DNA, 122 bp, Homo sapiens
tctctcttgctctcttttcttttatttttaataagaaagctaagcatattctttaaagtacgatcattgcagatgataaatgcacatttggccatgtctatttttctgctccttttaactag

SEQ ID NO: 336598 - DNA, 122 bp, Homo sapiens
ctacctctcctcagccttcgccagggcctccccaaccctctcacggttgttctgcgaaggcgtggggactgtgagcttgtccatggaggcaggcaccttttttgatccagtcaaggaagagg

SEQ ID NO: 336599 - DNA, 122 bp, Homo sapiens
ggtgagtgcgcatgtgcacgttgagcgagctcttctgcgtgaagcgcttggcgcagacggcgcactggaaggcgcgcacgccggtgtgcgtgaccatgtgtttgagcaggtagtcgcgtaga

SEQ ID NO: 336600 - DNA, 122 bp, Homo sapiens
aatacagcacatacacaattttccattagaaacaagtccccggccaggtgcggtggctcacgcctgtaatcccaacactttgggaggccaagcaagaggatcgcttgaggtcaggagtccga

SEQ ID NO: 336601 - DNA, 122 bp, Homo sapiens
ccagtggcatgaggaatgaatggaatattcattagtgggccctcctccactctcctggggcgaacagagtgggtgaaatcgggcggaaaccttgagaggataaagcaacctggaactcctta

SEQ ID NO: 336602 - DNA, 122 bp, Homo sapiens
accacccaagctgagagccctggctgcggctcctaatgtagaggacctcagcacagcaagcggctgggacagagggctggggtaggcctcatggaggaagtgagcaacgccaaatctggggg

SEQ ID NO: 336603 - DNA, 122 bp, Homo sapiens
cccgcatggagcgctgcacgttctgctcaaacagccgccggttgttctgcaggacctctgcggcctccttgttcagtgggtcctcggggttgggctcctgtggccagtacaggtaggggggg

SEQ ID NO: 336604 - DNA, 122 bp, Homo sapiens
aacttactgtgcctggctgctgctgttatttatcactaacacttgccacaccagctcaaacgcgcgtatttgcggaccaggcgctgagggtcacgtgagcagcttggggccgggaggatccc

SEQ ID NO: 336605 - DNA, 122 bp, Homo sapiens
taagaatctactgcagaacttggtttaaaaggtacatttaaggccgggcgcacttgctcacgcctgtaatcccagcactttgggaggccgaggcgggcggatcacctgaggtcgggagttca

SEQ ID NO: 336606 - DNA, 122 bp, Homo sapiens
gatttaaggggtgcttacaataaggggatacccaatctgcctatcctgacacattcaacacgagttcttaaattctcagctaatgggttggattcccattcattttataggcaggatggctc

SEQ ID NO: 336607 - DNA, 122 bp, Homo sapiens
tttataagaaagtaaacttttgtgcagaatgggctggggacacctctgagttttgctgcccgcaacgtgacctttttagcgcggtcctggacgcgttccctcgcagccaacccgtcagtctc

SEQ ID NO: 336608 - DNA, 122 bp, Homo sapiens
acattaaataatcacttgtgtgaaacttctattcccagcacgtcatggaggctccggaagcgtcacttaccctgtccctgtcggcatcatcatcgtcagcatcgtttaagaatcaagccctg

SEQ ID NO: 336609 - DNA, 122 bp, Homo sapiens
ctttaatgcagaggccatgtccttatctggtcctgcttctggctacagccaccctggaatcgagaaggcagctgactgggattgccttcctcagccgcagcagcacctggggcgccagctgc

SEQ ID NO: 336610 - DNA, 122 bp, Homo sapiens
tggggggcccgggccgcgtggaggccgcgcgatcctctccgcgcgcgctctcgccggggtcgccggacaaagctcgcccccctcgcccggcacccctacagtcgccctcccaattacagcgg

SEQ ID NO: 336611 - DNA, 122 bp, Homo sapiens
gctgggcggggcgacctgggatcccagagcctggcggcgcgagccgggcacccgggccgacgaaaaggcaggaagcgcctgacttcagacaccacccccgactgccagcgccgtgcggcagc

SEQ ID NO: 336612 - DNA, 122 bp, Homo sapiens
acgttgcctaagttagaacatgcaccgctgctgcccaggctccaataagggcagggttggcgcgtgtgggcttctctaaagggaaacatggccagtaattttaaaatccatcccctcttcaa

SEQ ID NO: 336613 - DNA, 122 bp, Homo sapiens
aggacccgaggcagggctgggcgcgcagttgcctgatttcgtggcggctcgcagtctgggcgctccgggcgctcggcgcgggcgggcagggccaggagctggggcggcgcactccgcggtcc

SEQ ID NO: 336614 - DNA, 122 bp, Homo sapiens
ggtctgacaggcgggtgcgcggcgccagccagcggaggttgccatggtttccgggggtcacgtgggcgcgctctcctgcgccccctcccgcgcaccgcggcggggcgggggcggggcgcccg

SEQ ID NO: 336615 - DNA, 122 bp, Homo sapiens
agaaataagaagagaaggaagttggtggaggacattccacgccaaggagcccatgagccccggctggtggtgcacgtggagcatttgaagtcaccaccagtgacccggcccaggtgcctctg

SEQ ID NO: 336616 - DNA, 122 bp, Homo sapiens
ccttcgggcttagggatcccttggagggaagcccgccgggaagctgaagacagtggtcaccgccctcggtcattacttcccgggacccggaccctaaccctgcgccacatctccacccgccc

SEQ ID NO: 336617 - DNA, 122 bp, Homo sapiens
gtcaggcctggccttggcctccctgtgatgtggcggggcttcctccctcaggtggtggaccgggggctgcagaaatcgcttgtgtttgaggatgacctgcgttttgagatcttcttcaagag

SEQ ID NO: 336618 - DNA, 122 bp, Homo sapiens
gccggccgcttttgtagccgtgggaggcggggcttcagcccagggcggggtccagcacggcggggcggggcgggacggggcggagccttcccgagctgcgaggtcgctgtctccttgcgctc

SEQ ID NO: 336619 - DNA, 122 bp, Homo sapiens
actgctggtgaggagaagcagtgacccagtgccaggcccacctgctgatacccagccaagcgcttcacaccctggtggccagagtctgaaactggttgttccagtaggtatcctgctgcttg

SEQ ID NO: 336620 - DNA, 122 bp, Homo sapiens
gatgatgacaatttcattactgttttcaaccaggccaccattgttaaggatgcagtgtgtcgctgctttcaaaagtatggtttagtttgagatcttctgtaatgcccaggatagacagtaaa

SEQ ID NO: 336621 - DNA, 122 bp, Homo sapiens
accctcgagccgatgaaacgcaccacgaccttggcttcccgaggcggcctcccctcaccccgacacgggagctgacattgtgcattccattcagagctccctttgttcaggccacatagaaa

SEQ ID NO: 336622 - DNA, 122 bp, Homo sapiens
tcccaggcattctttggtgccctctagtggtctgcaaaggcagctggagtgcctcaaagccggagcctcttggcagaagcagagagctcagccaccggctcccacctgcacactgtcctatt

SEQ ID NO: 336623 - DNA, 122 bp, Homo sapiens
caggcgggccattaggagaacacaggaaagtgagacacacacaaggaagtcccctctccccggaggtgccagactcaggtggggctgccactggcagcaatcatgaagaacatggccaaggc

SEQ ID NO: 336624 - DNA, 122 bp, Homo sapiens
accgtgtcggtattcatgctgtgaaagtaataaacggaacaccaactgagaaatgatccccgaatgctgtcaggtacttcagtcttgcaaaaactactacagattaatcagtcctgctcatc

SEQ ID NO: 336625 - DNA, 122 bp, Homo sapiens
gacatccagcacaacaccgtccactatggcagcgctctcaagcgcctggacaccttcgaccgccagggtatcttgcaccgtctcagcacctacaccaagatgctctttgtccgcgagccctt

SEQ ID NO: 336626 - DNA, 122 bp, Homo sapiens
ggaactccctgaccccttgcgcttcccaagtgaggcaatgcctcgccctgcttcggctggcgcatggtgcgcgaacccgctgacctgcgcccactgtctggcactccctagtgagatgaacc

SEQ ID NO: 336627 - DNA, 122 bp, Homo sapiens
cagagagagtgaactcaatattacaattttaaacttcctcaaaacaaaaacaggacaccacgtaaggggaagtagtgattaatgcataaacagtatgtgcctcgtatgtgtacacaaattgt

SEQ ID NO: 336628 - DNA, 122 bp, Homo sapiens
gggctgagaggaagaaaccagtgagacatcgagaggaagtcgctgtggcactcagtcctacggcctccgaggctgggtagtgagtgtgtcgctggccttagccagactccacaggccacgct

SEQ ID NO: 336629 - DNA, 122 bp, Homo sapiens
aggaagcctgcggaggagcacccctgcagggtctgcctggcgaagccctgggctgccctgcgggtgtgggcacccccgtgccagcagatggcactcagacccttacctgtgcacacacctct

SEQ ID NO: 336630 - DNA, 122 bp, Homo sapiens
cccccagggcccgctgaaggttccatggagagtggcggtgaatgcattttggaagcgggccgtgcaagagaagaaagaattgtatgtgcacaaggttcaggcataacgcgtttgttcctgct

SEQ ID NO: 336631 - DNA, 122 bp, Homo sapiens
atccccgcaggggattatttttgtccttgaaggccacatttcccaggccttgaactttgacgggaggagctggaatccaggaggcatctttgtgggagagccccaggtagggttcagaggag

SEQ ID NO: 336632 - DNA, 122 bp, Homo sapiens
atgggagaaatctcccagtaagatgttatgtgggtggtggccgagtaggggtgggttggtcgctgtgaactgtctgagactctcctgtcttaacattggagaaatggagacttgaagaggtg

SEQ ID NO: 336633 - DNA, 122 bp, Homo sapiens
gcatcttcccttgaacttttccccctacaaacccaaccagagccagacatttctaaagtccgatccttctgccatttgaatgtctctctcttccaccagtctaggcccctgctcgcccccca

SEQ ID NO: 336634 - DNA, 122 bp, Homo sapiens
aatgttttgctagggatttcgccagtttggtgacaacagggtttaccaaaaagtgttcaccgttcaccctaagataattagcagcaaacctagtaacaagatgagtcactctgagatggtga

SEQ ID NO: 336635 - DNA, 122 bp, Homo sapiens
cggttgaaaccggttcagactgggagattccatctcggttgagttttcagcccatggcgccgcggagcgtttggaacctgggcctccgcccccagcccgccctcctattggtcagttccagc

SEQ ID NO: 336636 - DNA, 122 bp, Homo sapiens
agacccgaccacccgccacgcgatcacgtcggggctcctggtccagcgtccgccggctcccgcggctccggccccaagtccgagccccaggccagccaagcccgcccctccgccgccgcccg

SEQ ID NO: 336637 - DNA, 122 bp, Homo sapiens
aactctatttaaaaaaaatggcactgagatgaccccagtctcagtgtttcagagcacagtcgccaaagattttggtaacccatattatacggggcctccctgaggactaggggcatggatcc

SEQ ID NO: 336638 - DNA, 122 bp, Homo sapiens
ttctgaaatgggtaatctgcccacaagcaccacagggaattcctcaacagctttagcatccgtaatattactccaaaatagcattgctgttctgcctcttactttaaggttgggcagatgcc

SEQ ID NO: 336639 - DNA, 122 bp, Homo sapiens
tttcctcctggccctcccttcactgtaagggcttttgtatagccaatttgagaaaaatgacgtttttaggtgtaggcagtttgagatcattttcaagctttagcacagctttatttatgcac

SEQ ID NO: 336640 - DNA, 122 bp, Homo sapiens
tctccgatgcacctgtgcgcctcgctgcggggtgcccggtgggtgcttgcgggatggacacgcacctccagagggtgtggacatgccccactatgtccttcagctcctaggatgtgggtcgc

SEQ ID NO: 336641 - DNA, 122 bp, Homo sapiens
agagccacggggaactgtgaaagacaagaaaatgtaaaaaaagcacattgattgcaggaccggtggtccaaaagcagcacgtgaaagaggtttcaaggctgtttctacaaacaagaatgcca

SEQ ID NO: 336642 - DNA, 122 bp, Homo sapiens
agaggctcaccggaagtgccggacccgagacccggagggggggtgcccgggacaaagcgtcggctgcaaaagagaaaaggccaggcgaagacgctaggctctaaaacaccctcagtagaagc

SEQ ID NO: 336643 - DNA, 122 bp, Homo sapiens
aatgtgttcctgaggaggagaggagaggagaggagagagcggacaagagaaggagcgggccggttgctggtcatccgtaatttggctaaggaagaaaggagcagcttctttctttgttatct

SEQ ID NO: 336644 - DNA, 122 bp, Homo sapiens
ctaatctatattgtaaaccattctcaggaaacaaatgaaagaaccatccgacactgccctcggagacagcggcagggatgcggctctgctctacaggcagacagaaacttcccaggatgggc

SEQ ID NO: 336645 - DNA, 122 bp, Homo sapiens
ggccctgcgcaggggctaccgcctctatctgccagcggcacacagggcacttggccgtatcgctgaagacccgccaggcacagtatctgcagaagtatgtgtggccgcagggcacaaggcgg

SEQ ID NO: 336646 - DNA, 122 bp, Homo sapiens
cggacgagtgcggggaggagtttgagatgggaggcgcttgcaggggctcccccagttctgcgctgtgagccggggcacaaagagccctctgcactagcgccgcaggaccgcggacccgaggt

SEQ ID NO: 336647 - DNA, 122 bp, Homo sapiens
actcacatggtggttggcaggaggcctcagttcttcaccctatgggccttcccataggctcgagtatcctcacactgtgacagctggctttctccagatctagtgatccaaaaaaaaaaaaa

SEQ ID NO: 336648 - DNA, 122 bp, Homo sapiens
ggcttgctctctctcgctgctgggatctttctaccatcttgtgaacaagttagggctagtcgcctgtagaataataggtcacatggaagtggactttagctacctcagtctgaggccccaga

SEQ ID NO: 336649 - DNA, 122 bp, Homo sapiens
ggtgagccaaggagctgggcatgtgtgggtgggctgggggagtgagggtggctggggagccggtccatgctgctgcctggcagagactcacctgtcagtctaggcctcctaggcccaggcag

SEQ ID NO: 336650 - DNA, 122 bp, Homo sapiens
agatttcctttcactgaaagggccagatcctggcgatggtgacaggaacggtaccccgcacggtaagggtcaggcaggaagggcctcccaccgcggcgtggctgccgccgttctaagaagag

SEQ ID NO: 336651 - DNA, 122 bp, Homo sapiens
taagggataatctttggccatcgtatccccggtgttatcactaagattctgggggttgcgcgcgggctaggcccgacccgggggccacgtacctgggtgtggataattttgtgcctgcagag

SEQ ID NO: 336652 - DNA, 122 bp, Homo sapiens
catccagaggttgaaaggcccttccttctcttccgcatctgggtcagtggcctgcacctccgagcctcagtttcctctgcgacagaaaggtctttaagaacttttccggtcttaacacacac

SEQ ID NO: 336653 - DNA, 122 bp, Homo sapiens
ctcgggctgtcggcgggtcccgggctcgctggaggctgttgaggctccagctccctgagccgccgctgcccgctgctgtgccaccgccgccgcggctgccctatttctgccgccgggaccgg

SEQ ID NO: 336654 - DNA, 122 bp, Homo sapiens
taggtttgcatctctgaaaagctgttttctagctgggcgaagaagtctctttcacccaatcgtatgtatgaactcttgctttcctccctgacgggactggaagctctttttacagtcacgat

SEQ ID NO: 336655 - DNA, 122 bp, Homo sapiens
gcctgcggctcctgagctctgggtggtggtctggcttgtggagggggcgtggggcccagccgcctggaggaggcccagggcaggccagctaaggctgcagaccttggtgggtggcatttagt

SEQ ID NO: 336656 - DNA, 122 bp, Homo sapiens
agcaaagcaaaataagcgcggggtcccgcacggcagcgcgggtgcagcgcccaaacctcgcgagatttgttggctgggccaagtaccacccaccaaatctcgcgatacctaggcgcctgaga

SEQ ID NO: 336657 - DNA, 122 bp, Homo sapiens
ggtggtgggctcactctgggaaacatcatcatgtaccctcttgaatcttcaaaaggggatcgagagtggcgcttttttgaagcagagacattttgaggagccattggcatataatcactgga

SEQ ID NO: 336658 - DNA, 122 bp, Homo sapiens
aaaaaaaaaaaaagtgccaaaccgcacaaaatataaaatctcatttgagtgtcagatccacgtacctctgcttcaacaaccaccacggcagtccacatttatcatctctcgcttggactgct

SEQ ID NO: 336659 - DNA, 122 bp, Homo sapiens
gtcgtccacttccataccgctcgtgcccgacaaattgtcatctggaagacgggggagtgccggctgcagggccacccaggagctccagtgcccaaggggtccctcccgccttcctgggtcta

SEQ ID NO: 336660 - DNA, 122 bp, Homo sapiens
ctctgtgccaggacgcactaggcacctagacttcggagaggagggcgccgaccccggccacggtgctatgggcatgtcacggggcagccctgagcagccaataacccccaaacaccctgccc

SEQ ID NO: 336661 - DNA, 122 bp, Homo sapiens
cctcagcgctctctcccagcctgtctggctgtggctgaggctctatctttgttttctgctcgatctttatctctgtttctgccttcagattggccttgcctctcctctcctgaccatgggaa

SEQ ID NO: 336662 - DNA, 122 bp, Homo sapiens
cttcctcaggagtcagcttggctcccttcttgcggcccaggggcagtgcacagtgggactcgtaccactgtcggtagggcgtgctgtcgatgggcacgatgcaattcttcaccacggtcttg

SEQ ID NO: 336663 - DNA, 122 bp, Homo sapiens
ttctgataatgttagagctataaggagatcaagaaatgcacacaacatggctttaaaacacggtctcgaattccatgattttggagacattttacaggtcaatgaaacagaacatgaacatg

SEQ ID NO: 336664 - DNA, 122 bp, Homo sapiens
ggtgaccccaacaccgatgaggccacgcgcgctccagctctgacactccttccagatcggcggggcctgaaacagcgggctaagcttcacctacggctgagcgtcagattcagctgaggaga

SEQ ID NO: 336665 - DNA, 122 bp, Homo sapiens
ccaatcgcctgggaacacgcagggaggcaatgggtcccccagtaagacccaaaggcaggacgtgcagtgcagcccgggtatcccctccgtgtggctggtgtctgtctgcaccaaaaggcagt

SEQ ID NO: 336666 - DNA, 122 bp, Homo sapiens
aggaatagcccaacatccagccccagactcatggcagacatcattaatccacggcagcaccgcaatctttcccttctgagcctgggcgagacctcagaatcctcctcaacacagagcaggtg

SEQ ID NO: 336667 - DNA, 122 bp, Homo sapiens
cgcctgcgcagaaacgctgatccggaaggcgctggctgagtcgattgcaggtctgccggtcggtgaaatccgttctggtattttctttttctttttcgtgaagagtgcagtgatatccgttc

SEQ ID NO: 336668 - DNA, 122 bp, Homo sapiens
aatgggtccttccaccggcggtgcggcggccctgcgccggctccgggcagccgagtagcccgccacccaccaactagctaagcagccgcctctgtgaagctcggcggttccctgtgcgcctg

SEQ ID NO: 336669 - DNA, 122 bp, Homo sapiens
agggagggcaagggtttccttttggcgctcccctttggaccccggagtgaaaaactctaacgtccagatcagtggagagaaacgcagatttaggaccctgaggagtctttttcacccgtttc

SEQ ID NO: 336670 - DNA, 122 bp, Homo sapiens
tgtatcatagcagcttagaatcccagctgctggctcgggctgcagttctctcatggctcgcgcagggtggaccagccccgttcctttatgtgtgtgtctactgctgacctgtggctttgccg

SEQ ID NO: 336671 - DNA, 122 bp, Homo sapiens
taggtctattcagatgttctctttcttcttgagccactttggtagtttgtgtctttctagcgattcatccatttcatccagggcacctaatttgttgctagacagttgttcacagtatactc

SEQ ID NO: 336672 - DNA, 122 bp, Homo sapiens
ctctgtggtccagcaatcttactctaggcatttacctaacagaaatgaaccagggcggggcgtggtggctcacacctgtaatcctagcactttgggaggctgaggagggtggatcacctgag

SEQ ID NO: 336673 - DNA, 122 bp, Homo sapiens
ccgccttcccagttccaggccgccctcggctcccttaatcctcacagtgcgcggcttctccgtctaacgtgctcgttgccggcatctccagcgcccggacaagcccttgaaggcctgacgcg

SEQ ID NO: 336674 - DNA, 122 bp, Homo sapiens
ctttctttttattttctttcttttttaacggcgtgattaaaatgtggcaaccacaaaccccgattagagctgccagaacgttatctttacctttggctgcccgcgccgccctttgaagtgcc

SEQ ID NO: 336675 - DNA, 122 bp, Homo sapiens
cccacgccacagcatccagcagagggactcaggacccaggacggcctccgagctcccccacgccacagcatccagcagagggactcaggaccgaggacggcccccgagctcccccacgccac

SEQ ID NO: 336676 - DNA, 122 bp, Homo sapiens
cacatcccggggaggctgccttgccgtttggataaggaggctgacacacgctgggcaacgcgactcgtggtagtagatgtttcctggctcctggatgagggccctggccagtcagaacgcac

SEQ ID NO: 336677 - DNA, 122 bp, Homo sapiens
tgaatatgcacattagcagagggttcgtcccactggccaataagctctggctctgccgcacggatcgctgggagtggtagtccccgtaaaaccaccgaccgcaagcccgccacattttccct

SEQ ID NO: 336678 - DNA, 122 bp, Homo sapiens
agcgaacggcaaacatcagcaagcggggagcacggcacgtgcggggcggtcagtgcagcgcgtgcatgcgtgcggggagggcagcgctggggaagagccaagagaggcctggggccaggggg

SEQ ID NO: 336679 - DNA, 122 bp, Homo sapiens
cccgcgcaggttccatttccggtcatctgttccttctggggctggacccggaagctggcgcgcggtcccgcaagaggagctttctggggcgctgctgccagtgttgtgaggtctaaggtgtg

SEQ ID NO: 336680 - DNA, 122 bp, Homo sapiens
aatgagtgtcagcaggagaaatgccagatccttgtaaaaccatcagattgcggaaacttccgagctctactctgcgtctgcagccgccgccgtcctgcagaggagcacgcaacccaggcgag

SEQ ID NO: 336681 - DNA, 122 bp, Homo sapiens
ggcccggcgcttagcagccagagcagcagcagcagcagcagcggtcgggggagggtgtttcgccgtttcctctcagccgccaggacaagatggcagcggccgcggagaggggctgagcccgg

SEQ ID NO: 336682 - DNA, 122 bp, Homo sapiens
acacctgagtgcgtcaaagcttggggggaagggaggacagcccaccgagctgcggtaccccgctcaggctagaagagcgctaggtaaggggaacatccaaagggacgcaatgaattcaaaac

SEQ ID NO: 336683 - DNA, 122 bp, Homo sapiens
agtattaggaaccattctgtttacagcaattaactggacccaaagccctgtcagcagttccggttgtgtggcccttctttgtgtctgttctttaatattcaaaacttgttcaaatagtgtga

SEQ ID NO: 336684 - DNA, 122 bp, Homo sapiens
ggagtatgtgatgataatcacccccagcagattccattacctcagcagctcttgttcccccgccactggcagttctgcaatgccatagcattttccagagctaagatctctgggttgtattt

SEQ ID NO: 336685 - DNA, 122 bp, Homo sapiens
caaggctccccgcccctccttggggagagatggcctgtgtaagcgaaggcccgggccgggcggctgagccacccgtggctgcctggaacccgcctgtccctgccggcgtagtcttttcaact

SEQ ID NO: 336686 - DNA, 122 bp, Homo sapiens
ttctcacccaccttctcactgggcggctgtgtgttgaatgaggtgttcccacggggcctgcgacatttcgagttttacattttggtgaacaaagaggggttagagttgaccacagtcgctgt

SEQ ID NO: 336687 - DNA, 122 bp, Homo sapiens
aatattaatagtgatattggtactttcagtctctttattgtgtgactagtaaattctgtgcgcttctgtagttactcattatacaagaagttgttttgttgggattcccaatcttacagctt

SEQ ID NO: 336688 - DNA, 122 bp, Homo sapiens
gactagactaacacctaagtattttctaaactcaaaagcataactgatacttcagaagaccgatttggatcgatgcttcactacagttcagctaacagcaacacaggtatctgattaaaagc

SEQ ID NO: 336689 - DNA, 122 bp, Homo sapiens
agcagccccgttggagagcagctgggcggcttctgtcgagtgaatcgctctcatgccacacgagccagcctctgcaccttggcctacattacccaatagaaatgagacacgtccacaccagg

SEQ ID NO: 336690 - DNA, 122 bp, Homo sapiens
gtggggcttcctgccgcagagccgccttccgccctccctgggcgcccccgctagagggcccgcccccctcgctcagggctgggaggagacaaccaatccagcacgcagaacacgaaatacaa

SEQ ID NO: 336691 - DNA, 122 bp, Homo sapiens
gggggcgcgccccggaggaaaggcccgctttggcccgaggacgacacgggagtgggtagccgggcctgttgaagcgcctagggcgccaaggatcccagtttgttgggtgactcggctcagct

SEQ ID NO: 336692 - DNA, 122 bp, Homo sapiens
atttcctcctcaagaacattgcatttcatgtggaatgtcaattattaaaatgcagtgtcccgtgtcttacttctcagtagatgaattcatttgcaaaacttgctaatttatgcaaatgatcc

SEQ ID NO: 336693 - DNA, 122 bp, Homo sapiens
atcagcatgtgatatgagcaacttgaccccttcacaaagacacatttgttgagtttgcatcgactgaatttcagtagcctgaaaacattgtgttacattaccttttacatataattctggca

SEQ ID NO: 336694 - DNA, 122 bp, Homo sapiens
agcgctccccacgcagaggctgtgggaaagtgattcagcgctgctagaatccccctctcccgcgcccttcgcagcgcagccagggagggagggagcgcgccagagcctcctgcaggtgcgcg

SEQ ID NO: 336695 - DNA, 122 bp, Homo sapiens
gaacgttccggcaggcattgccgtgcacggacacacaacttcacaagggcctcttgtgcacgtgggacatggagaaaattggccatttgtctgtggggtaatgggctttgctgcaatatgaa

SEQ ID NO: 336696 - DNA, 122 bp, Homo sapiens
tcccgcagccggaggcagctcctccacatcgcgcccgagggtctgggaagatgcgagacgcgaaacctggagcaggaaacacagagcgatgggatccccaaagccgcacggtcgggctgtac

SEQ ID NO: 336697 - DNA, 122 bp, Homo sapiens
aaaggggtgacagacgcacctggaaaatcgggtcactcccaccctaatactgcgcttttccgataggcttaaaaaacggcccaacacgagattatatcccgcacctggctgggagggtccta

SEQ ID NO: 336698 - DNA, 122 bp, Homo sapiens
gtaacactggacaggaatcttcctctctcatttctcctcggtaagctggcaagatcactacgtttgtgtgtagggatcatcttattgtagtacagggaggggattttttttttttttttttt

SEQ ID NO: 336699 - DNA, 122 bp, Homo sapiens
ctttaaaatcaattagtaacagctattggggttcttagaaaaccaggtgtcatccaggtacggtggcgcatgcctgtaatcccagcactttgggaggctgaggcaggcagatcacgaggtca

SEQ ID NO: 336700 - DNA, 122 bp, Homo sapiens
agccgaaaactgccccccgtaacttctttatagcttaagggtttagcttcaacttcactccggggccgcctctctcccgccctccctcaatgccactcacaagccccctcgcctcccattgg

SEQ ID NO: 336701 - DNA, 122 bp, Homo sapiens
gggtcttggtggtggaggggctgggccgtgaggtttatgtgacatggccgggccaccctccgtccgcagtggaagggcaccacgcagcccatgaagctgaacacgcggccgtccactggact

SEQ ID NO: 336702 - DNA, 122 bp, Homo sapiens
tatgcacatgatcagtgatagtagacattgccagtttttcaaaatgattgtaccaatttacgcctttgccagcaatatgagagagttctaggtgcctcttatccttgtcaacacaagagttt

SEQ ID NO: 336703 - DNA, 122 bp, Homo sapiens
tgtttgctcatctgggcgatgggttcttgcaggtccctgataaacttctcctgggtcccccgggccttttgcgtgcctccggcggcgtgcacgggtccgcagcgaccccctgcccacctctg

SEQ ID NO: 336704 - DNA, 122 bp, Homo sapiens
tctccaatgggaaaggatgtgtttgcgggccaataagtagccgagaataacacccgcccacgcgcctgccaagccaatcggctaggagcagcgagcggcgcggctgaggcgcggcggccccg

SEQ ID NO: 336705 - DNA, 122 bp, Homo sapiens
accattaaaaaggcagccatttgggagagagcgcttcgaaagagcttgagcacaagtcaacggcaacactgagcagctctgccccctctcaggatggattgccgactgcgagttcaaataga

SEQ ID NO: 336706 - DNA, 122 bp, Homo sapiens
tgggaaaaacctccaggctgctaccccatctgcacatgggagggccgggggtaggagccgcgacccctaagggctccaccgccttctgcccggccagggtcgtgcctggcgcgcccccgctc

SEQ ID NO: 336707 - DNA, 122 bp, Homo sapiens
aagaatggctcctctgtttacaacacacccaacaggaatctggggtcattgtgatgagggcgtcaaacttgtggcttccctatgaacaaacgtcccccaacacctctatgtggcttctgggc

SEQ ID NO: 336708 - DNA, 122 bp, Homo sapiens
ccatctaaaaaaaaaaaaaaagaaagacagtcagccctctgtccatgagtcctgtatccccggattcaataaaaaatgtagttaggtctgtgatagttgcatctgtattgaacatgtacaga

SEQ ID NO: 336709 - DNA, 122 bp, Homo sapiens
tgagaaaggccagagaggaaattcctctttggatttgtaaacagacttgtaaacctaggacgttttatgaggacttcattaggagacaatagattcaggaccctgctgtcatttttttttat

SEQ ID NO: 336710 - DNA, 122 bp, Homo sapiens
aaaagtctattgaattcaagttatgcatgttgagcaatcaaatctctgagtaagcctgaacgttgagacctggaaccaatgtgagtttgtgttaatcaatgtactgtgccatccagcggaag

SEQ ID NO: 336711 - DNA, 122 bp, Homo sapiens
tcccgccggcgcctccccggggtggcagtgtggggagagtggcttggcgcccgcagggggcgccgcgagcccaccgcgagagcggccgcggcgcggggtgggtgccgaacgggctgcgcgcc

SEQ ID NO: 336712 - DNA, 122 bp, Homo sapiens
catctctgtgtccgaattctgtgtgcagcaaacatcatctcaagtgcgttttcccaactacgcttctttccaggataaaatactctaagtgacaaatgttgagtacattatcaggtatgttc

SEQ ID NO: 336713 - DNA, 122 bp, Homo sapiens
gctgaagataagtgagacacttccacatgaggttgtacatttactattcattcagccagccgttttttttttttgaagtgctgggcacagtgtggtctcaggcaggccctacccatgtcctc

SEQ ID NO: 336714 - DNA, 122 bp, Homo sapiens
gcctcttatggtactttcaggcaggtagaatgtttatcctgggctgggcgcagtggctcacgcctgtaatcctagcatgttgggaggctgaggtgggcagatcacctgaggttgggagtttg

SEQ ID NO: 336715 - DNA, 122 bp, Homo sapiens
tatcaccggttgcctagacaacttcatgggaaggcccttgggaatctgagatggagcaggcgaaccctttacgtccagatggcgagtccaaaggaggtattcagagggtcgccgcctccttc

SEQ ID NO: 336716 - DNA, 122 bp, Homo sapiens
ggagcagcagatgaaagggtatgctattctgtttccagatgtttctttatgtaaatatgacgccaatgtaaatcctgtgtcaagatcatagagaatggtgctttttactacagttagcacat

SEQ ID NO: 336717 - DNA, 122 bp, Homo sapiens
gaaccctagtgagattaaaataaagagcccagggcaggcaggcaattcatctcggcctcccgggacgatactagaacaggacaggaggttggaaccctcagagctggggcctccggcacccc

SEQ ID NO: 336718 - DNA, 122 bp, Homo sapiens
ctcgccggtggccgctgccctcccagaagagagcgcggcccccgcaacccctttatggagcgccagacgccacccgtgtccgccccctcggccttggctcccgcccctccatcctgcctccc

SEQ ID NO: 336719 - DNA, 122 bp, Homo sapiens
ccacgaggagacagtaaccgaactgcagcgccccggtcagcagtatatacagcaggtacgcgtccagcaacttcagacgctgcggagtggagctcaagtactcttctaagaaccgcgaaatg

SEQ ID NO: 336720 - DNA, 122 bp, Homo sapiens
cgcctgcccctgaccaccaatgagaaggtggggaccggccttctcctgacccctgacccccgggactctgttcagccctgaaggccaagccacttggtgcctctctgcccgcaggctgacac

SEQ ID NO: 336721 - DNA, 122 bp, Homo sapiens
atattattcatctgtgccagaggaaggaggggcaacccatgtctatcgttatcacagaggcgagtcgaagctgcacatgtgcttggacatagggaatggtcaggtaagtgtactcaactgtc

SEQ ID NO: 336722 - DNA, 122 bp, Homo sapiens
ggcgcagaggcccggggagcagccagtggccgagtctcgtctcgcccgcctgaatggactcggcctctgcctgcccctgccgccccgcgggatccaggttcaccaacttccagattttccct

SEQ ID NO: 336723 - DNA, 122 bp, Homo sapiens
ggagagtcagcgagaacgaagatggacagactgcggaaacataaatgaaggtaggaacagcggagctcgaagagtaaatgcagagagtggacacagaggccaagaggcttggctccagggct

SEQ ID NO: 336724 - DNA, 122 bp, Homo sapiens
gctctgcggccgcagcagctgcgccccgcgccctccgcccaccgggcgccgagcagccctcggccccaggcttcttcggctcccggctgcccgcggacgccctcccacagtcatgaaccccc

SEQ ID NO: 336725 - DNA, 122 bp, Homo sapiens
ccaccccagcccccgtctgtgactgaaggcccggtgggaaaagaccacgatcctccttgacgagttttgtttttcaaaatggtgcaataatttaagtggcatcttctctcccaccgggtcta

SEQ ID NO: 336726 - DNA, 122 bp, Homo sapiens
caggagtcgaagccggggtagcacggcttcttggttgggcgagagggctgcccttctgtccgcctggtggaaaagccctgcagctttgccaggtggggtgagctggcccgttgtacgcgaag

SEQ ID NO: 336727 - DNA, 122 bp, Homo sapiens
gaaaacaaccaaattgtaggagtgtccttcagctgcctttccatattgaggcgatttgggcggaagggggtggggaattgggctgcgcttctgaggtttcccgcgaggttattttttggttg

SEQ ID NO: 336728 - DNA, 122 bp, Homo sapiens
agccacctgctcgccggggaaggtaggtccgggcaaggaggggcggggagtaggcgaggccggcgggagggatccgtgcccaaccccagggaatcgcacctagcccctccccggggtccgcg

SEQ ID NO: 336729 - DNA, 122 bp, Homo sapiens
ctttgggtcacttggagcgcggccagtttggcagatttgtttttttcccggaacaacccgcggcggctcggctgtcccgggaaactgcaaactttgctgtgcgcgttctcccgcgcgcgggc

SEQ ID NO: 336730 - DNA, 122 bp, Homo sapiens
agctagtcagaagaaccctctttgaaaatgagatgtttgacctgagatcacaagggaaaacgagggggtagccatgtaaagatctaggaataatatttcagattatgggaatgggaatggca

SEQ ID NO: 336731 - DNA, 122 bp, Homo sapiens
tgttaattataacatatgcatctcaataaccgacggtggcatttagtgcagcattaatcacgccacttgggccccccagtgcatacacaaagctccttttcatctgccattagcacagactt

SEQ ID NO: 336732 - DNA, 122 bp, Homo sapiens
ttcccagcacaccaaatgtttcctacttacatcttcctactcacagggccacctccaccccgctggagtggcaggcagggctccacagcaatctcaaaatcaaaccgtatttggagcacaag

SEQ ID NO: 336733 - DNA, 122 bp, Homo sapiens
gcttaccgagttcacaccctctcgtttccaggcttcctcgtcaacatttattggtgccaacgatgtgccctgcgctgggcactggctagacagtggtgataagaggctgttcctaccctggg

SEQ ID NO: 336734 - DNA, 122 bp, Homo sapiens
agggtttgcctcggattccgaggatccgagggagtcgctttcagacttccggtgtcctttcgcgttaatttcgtcctcttttcttctctgggctggggctggtggctgccacatcccacccc

SEQ ID NO: 336735 - DNA, 122 bp, Homo sapiens
gaacgggggcaggacttacagacctcaccagagtgtggccaaggacagaagttctctatacggaagagaaggcttgtctagtatggagttctaagttctgtacttaaatgttccctgacagg

SEQ ID NO: 336736 - DNA, 122 bp, Homo sapiens
ctgcagcctgggctgtgtccagcagcaccaggtggcgccctcgcacccacgcccccgacccgttctccattagtggctccgatactccgcgtccatcgtccttcagcagccttcggtgcacc

SEQ ID NO: 336737 - DNA, 122 bp, Homo sapiens
tccatccctgagagacaagctcagggcaagaagacaccacagacacaagaagccaacgttcgtttcaaatatgaaccccaacttcaaggtcacgaagacaaatacaagggctgatttttgcc

SEQ ID NO: 336738 - DNA, 122 bp, Homo sapiens
tcccacggggattgaattatgtacacacacaacccccaggcccgggggaggggggagcggcgagaaatgaatgcagaggggccctgccctactcacacgcatgcacctgccgcctgctgcgc

SEQ ID NO: 336739 - DNA, 122 bp, Homo sapiens
atcaccatgtccattttacaattaaacaaaaccacaactcaaggagttggctggttcctccgtgggcagacacggaaaacccaaaaattaaactgaaatctgcctccaagcccacgattctt

SEQ ID NO: 336740 - DNA, 122 bp, Homo sapiens
gccggccaccagcccgccatgtccgcgctgtgggcgcccgcgatcaggagcccgcgtggtcggaggcttcctgcaccgcctccgggcctcgccagcctccagcagctactgcgctgcagcag

SEQ ID NO: 336741 - DNA, 122 bp, Homo sapiens
accgggccgcatggtggaccaggcaacgtggtagaccgggcagtgtgatggaccaggcgacgtggtgggccgggtggtgtggtgaagccggcagcacagtggagcaggcattatggtggact

SEQ ID NO: 336742 - DNA, 122 bp, Homo sapiens
cgcaggcgcacgcacggcgtgcgtggtggcgtcagcagttctagaacgttgctgtggtagcgctcgggcgccatgttaggacgaaggggaaggaggagaagcgcttaaagcggcgggagcgg

SEQ ID NO: 336743 - DNA, 122 bp, Homo sapiens
gaaagtttccctaggccgggcgcgttggcttacgccagtaatcccagcattttgggaaaacgaggcgggggggatcgcttgggcccaggaattcaagaccagcctgggcaataaagcgaaag

SEQ ID NO: 336744 - DNA, 122 bp, Homo sapiens
tattcaaaggcttttggctgccatacaattaacatggctgatggggataaattgactgtgcgtgcttttcttaaatgaagcttatactagaaatgtaagagttactgagggctttggtcgat

SEQ ID NO: 336745 - DNA, 122 bp, Homo sapiens
cctagaagcaccgctggggccaaaatggcgtctgcccacgaccctcaaaggaatgcagcgcgcaggcgccgcaacccgtcaaccggccaatgagaagacgcaacagcaatgacgccaggcac

SEQ ID NO: 336746 - DNA, 122 bp, Homo sapiens
tatattgaaggctaaagggtattgaagctgcagagggatcaacttgtgcttgccagaggacgccaatgaagtttgaaacaccaacaatcagagattttgtttctgttcctcattaaatcatg

SEQ ID NO: 336747 - DNA, 122 bp, Homo sapiens
gctcccggcccgctcagcgcctccggaggtctcacccaagccctatcagctgggtccctacgggcctcaaagcgctggcccagccgcggggtcactcctctgagcctcccgaccttccatgg

SEQ ID NO: 336748 - DNA, 122 bp, Homo sapiens
caggctgcgttggcacaccctgctctgctgtgcggcccggcacaactcagccaggaaaggcggcaggctgagtccggggaagtgccccagcaaacacatggcaaatgtttcaaggggcttta

SEQ ID NO: 336749 - DNA, 122 bp, Homo sapiens
cgagagcagagcctcctacttctttggtgcgaaaacgctgcgctggcccaagattcagggcgactgacgccccccaccacctccaccgcccacacctggacaaacagagccagctgtgagcc

SEQ ID NO: 336750 - DNA, 122 bp, Homo sapiens
gagcgtaggcggagggctggggttctagggatctagaaaaagcgcgaagccggagggcggcgccagggctcctcgcagaccccagggccgcgggacggtgccggctcgtgggtcacacgcac

SEQ ID NO: 336751 - DNA, 122 bp, Homo sapiens
ggacaccatttcccagcagaactacatgggccgtcctgggcaatggttattggattagggcgaatacaaatctcattccaaatagcgctggaaggggacacgggctagaggagacgggatat

SEQ ID NO: 336752 - DNA, 122 bp, Homo sapiens
ttccctatatgacataaggatgctggggaaaatctactgtgcactagaaaggccatgagacgcagatcatagtgtgacttttctgtggtgctttgacacagactgaagctccccatccctac

SEQ ID NO: 336753 - DNA, 122 bp, Homo sapiens
ccatcatagccaacactcctgacaattggaagaatgagcacctccctcctgaggctgacccgggtagtaacccccaatatccactatagagacaaagtctagctttgcctatgagacagagc

SEQ ID NO: 336754 - DNA, 122 bp, Homo sapiens
gaatacagtccacagttctttgtatttcacaaaggttacttaactggttggctctgaagacggaagaagtacagtgtcccagcttgaagcagccagaggatgaattcttcctcatccagtca

SEQ ID NO: 336755 - DNA, 122 bp, Homo sapiens
tagtgtcctccgctgtggcaagaagaaggtctggttagaccccagtgagaccaatgaaatcgccaatgccaactcccgtcagcagatccggaagctcatcaaagacgggctgatcatccgca

SEQ ID NO: 336756 - DNA, 122 bp, Homo sapiens
gcccagggcccctgttccacatcaaagctacaagcactgttgtcagggcatggagagtgacgggaccagagccctcctcgtctcagggcagcctgcctggcttcaaggtggagatcacagcg

SEQ ID NO: 336757 - DNA, 122 bp, Homo sapiens
aagtgagagaccacgagggcccctccctccacccaaagggcatcacgccctgcctttggacgagcccacaggccagagactggggcgggaagtgctggagtaacagtcatagtggtcggccc

SEQ ID NO: 336758 - DNA, 122 bp, Homo sapiens
ccaccgagccttggaccagagggtttctaaggccctttcggtgccggcgttgcggggtcgcgggagatccgggggtctgtgctctgattcccggccctgcccgtctctcttacaggctctcc

SEQ ID NO: 336759 - DNA, 122 bp, Homo sapiens
aagactccatctcaaaaaaataaaaaataaaataaaataaatgggagaattaacattcgtcgtaattagggaggttaaatattacattttggattctgaagctggccaagatgaagtaagag

SEQ ID NO: 336760 - DNA, 122 bp, Homo sapiens
tttcatgtgttttttggctgcataaatgtcgtcttttgagaagtgtctgttcatattcttcgcccacttttcgatggggttgtttgtttttttcttgtaaatttgtttgagttcattgtaga

SEQ ID NO: 336761 - DNA, 122 bp, Homo sapiens
gtggtccaatcagccatagccagaaggtgcgtaggactgacaactgacatttccagggttcgtcgatgaaacagaatatatgtatgagggactgtggacataggcaagtaacaagcgtatcc

SEQ ID NO: 336762 - DNA, 122 bp, Homo sapiens
tttgggaatggcctgtctgtgcttcttggctgtattgtcctctgtgttgttttcactgttcggcaagtgtttcctctgcagtattagatgtggaaggtgaatgctttatgctgtttgcatga

SEQ ID NO: 336763 - DNA, 122 bp, Homo sapiens
cagactcagggtggagggcattggatcaggccttcaggcttccctggttcacacggggctcggacccttgttccatcaagtgcccctcgcttaagccccactaattgggtaggattgctgcc

SEQ ID NO: 336764 - DNA, 122 bp, Homo sapiens
acgccgccggcggccgcagccccggccgagcaggcgccgcgggccaagggccgcccgagacggtccccagagagccaccggaggagcagctcacctgagagacggagccccggctcgcccgt

SEQ ID NO: 336765 - DNA, 122 bp, Homo sapiens
ggggacaaatcgagcgcagcaccagtgggccagcactgctgggagacccggcgcaccctccgcagctgcttgcctgagtgctaagcccctcactgcccgcggcagggccggcaggccactcg

SEQ ID NO: 336766 - DNA, 122 bp, Homo sapiens
cagcctcctgggctcaagagattctcccacttcagcctcctgagtggctaaggccacaggcgtgtatcaccatgcctggctaatatttctgttttgtagcagcagggtttcaccatgttgtg

SEQ ID NO: 336767 - DNA, 122 bp, Homo sapiens
tgggagccactgaaggacactgcacaaccagagtggtgttttccattctggaggtacattcgaatgcctgggatactgaaccaatactgatgcccactctccacccaaaatcaatcccatca

SEQ ID NO: 336768 - DNA, 122 bp, Homo sapiens
tccgagcgctttctggctgttcggggtttggcgtgccaccacttgggacttgttgtaacccgtctccactcccgccccctccagcgctgcaccttgtctcggggaggcgcggttcgagccgg

SEQ ID NO: 336769 - DNA, 122 bp, Homo sapiens
ccgcccttcacgcaggagtggaggagcggagcgcgcacccctgaccccggcctcagcttccgttctccctgcaggtcgcccgtgtgcagcgccaccatcccggccgctcttccaatctcgcc

SEQ ID NO: 336770 - DNA, 122 bp, Homo sapiens
ccaccctcagcgggggcttctgcagcctgctcgggttgggtgggttcagcctggctgtcccgcgccgccccaggcccaaactgctgctccaccgagtcaggctcggtgcctatggaggagct

SEQ ID NO: 336771 - DNA, 122 bp, Homo sapiens
gtttatgaaatgttgaagcgtcacaatggacagagggtgccgcttatcaacaaatcagcccgctgggtgtcacgaccacccatgcaccacgagcagtttggcttctgagccgcggggagaga

SEQ ID NO: 336772 - DNA, 122 bp, Homo sapiens
taacgtcgtgttcccgtttgatatcccaagttgggcctgggcttatctggtgggaagggtcggagggtggggctggatgtgatggagagaatggagcgaggccgtcgtccagggagacgcct

SEQ ID NO: 336773 - DNA, 122 bp, Homo sapiens
gtgcgttcatcaccgcagttgattttagcccgttttccgtgactccacagagaaatccttcgccattctgtcatcactcctcaacccccttgtccgcctccagcccccgtcaagcactagcc

SEQ ID NO: 336774 - DNA, 122 bp, Homo sapiens
cgtgattttattttactccgtaaaccgaaagttttattgtccagtgaacatttcttgctccgccgcttgtgccaagagagccttagactctttccagtaatgaggcttgtaaatcctgcgga

SEQ ID NO: 336775 - DNA, 122 bp, Homo sapiens
ccaggcctcagctttctcatctgtgaagggggggctgatggttctcaccctgtagggcggcgtgtggattaaatgaaattgtgcgtgcacatcactcagcttgctgcacgctgaggcctcgg

SEQ ID NO: 336776 - DNA, 122 bp, Homo sapiens
cacacggtccttccccttctgtgcctggctgctttcactgaacgtcctgtcttcaaggttcgcccgtgcttagcccgtcacagctctgcccatcttcctggccagatgatatttcatgtcac

SEQ ID NO: 336777 - DNA, 122 bp, Homo sapiens
gtgcaggttcagggggatcttgggggtggcttgggcatggccctgcttctgcccgttcaccggactcccggctttagttcctcttacaacagccccttctcacttcctttggcgggaggggc

SEQ ID NO: 336778 - DNA, 122 bp, Homo sapiens
tttctgaggcattcaaacaagtctaaaggtgctcatttaactatttggcgataatcattgcgcatttatggcagggaccaggtatatactgtcaaaaatatatatgtattatatacttccct

SEQ ID NO: 336779 - DNA, 122 bp, Homo sapiens
agacgctggaaccgaacatggtaaagtaaaatacttatccatgaggcactttgtaatccccgcactcctgctctgcctaaagagaaacatctcggatgtgaggtccgcataggcattagatc

SEQ ID NO: 336780 - DNA, 122 bp, Homo sapiens
gagcacccccagggccaggaagatgatgagcagcaggaactcgttggtgctggcgcggagcgtgtgtcccagcacgcgcagccccacgaagtgccgggtcagcttgaagatgcgcaggatgc

SEQ ID NO: 336781 - DNA, 122 bp, Homo sapiens
caaaaaaagagaataagttcttccaagcactcatctatagagctatggatgaacacggtgcgcctgctcaaagggaaaccaggccaggctggaggaaatggtcaagctggaggggtggggag

SEQ ID NO: 336782 - DNA, 122 bp, Homo sapiens
gcgcctcagaatgacgtctgaaatgagcgccgacgctgcccaaacaggagcctgcgcatgcgctctgccctggcagcggccctgtgcagatccctgagcgtgtggcagcagtgcggtcgtgg

SEQ ID NO: 336783 - DNA, 122 bp, Homo sapiens
cgctatgttccttacaagcagtaaactcacgacttcagacacccgccacggagctccgcgcgcagtcctcaaacagccagccacgccggccgggcgcacagcgcatgccccggggtcggggc

SEQ ID NO: 336784 - DNA, 122 bp, Homo sapiens
tgggctcgcgcaccacatgctgggccagcagcttcaatcgcctccgccacccgcgcccaccgcccaccaagctgccaaagcgagctgagcagaattcgaggttggaaagaatctgccagtag

SEQ ID NO: 336785 - DNA, 122 bp, Homo sapiens
gagactgtccagataagtaagagatttgttcaaagtcacaaatcaataatgttacagaatcggggctaaaattcagatttcctggcatttctactcagaattcttttagggatacatgttac

SEQ ID NO: 336786 - DNA, 122 bp, Homo sapiens
gcggttgctggggtccccgcgcgcgcgcctcggcctccccggcgtccagctcgccccatgcggcccgcagctccaagcacagctgcttccagggctggtggcgcaggccctgccacacgtcg

SEQ ID NO: 336787 - DNA, 122 bp, Homo sapiens
cagggggcctggttgaggctggaggtcagccacagccaagaagctccgagaccaacggatcgcccagcccagaccctcccccaggcctaagaggagagggaaccagggagaaaagtctagac

SEQ ID NO: 336788 - DNA, 122 bp, Homo sapiens
gtatatgacatgcaaatattttcccccattctgtgggttttctttttactttatggatatcgtcctttgaagcacaaaagttttaaattttgatcaagtccaatttacatattttttctttt

SEQ ID NO: 336789 - DNA, 122 bp, Homo sapiens
tatggccgggctcaggcggctgctggggagccaggagaccgcgcgggacggcggatgaggcgcggcggctgcggcccagggcacctcccctctggcttcccgaacccggccaggtccgaccc

SEQ ID NO: 336790 - DNA, 122 bp, Homo sapiens
gtgctcaaggaatgttagtttccttccattcaacaaatatttgagtacctactatgtgcccggctttgactgagacctataaataccagaatgagcaagactgatggacgtcctgcctcctt

SEQ ID NO: 336791 - DNA, 122 bp, Homo sapiens
cgtgcgggtggagctcctccatgcggggtgggcccgggctgcgcctctgctcctgccccacgttgtcttcacaggagcttgtcctggctctgtttagggctgtgccattggtctgactggct

SEQ ID NO: 336792 - DNA, 122 bp, Homo sapiens
ctcggcggcgcagccgcggatcgctgttgcatgctgatccggggaggcggcggtggcgagcgctccgggcggatgctggcactcaggcttcgctgctctctggatgctgctcaacttctagc

SEQ ID NO: 336793 - DNA, 122 bp, Homo sapiens
catgtaattagtttacagattgtagggcatcacttcaattcaccaagcatgtagttctagcgcactagcatggcgccagccatgtacttacaatgtagttacagagtaattacatggtgatt

SEQ ID NO: 336794 - DNA, 122 bp, Homo sapiens
ccaaagagctgtagctgcgaggtggcgcctaacgggctgtccctctactgtggtcagagccgtgccccttgcaggtgggtagcgctgagagcagagcagcgcccgcgggactggcctgagga

SEQ ID NO: 336795 - DNA, 122 bp, Homo sapiens
gaaccatcacagtctcgcaggggcccagggcagcgctgggtgctttatttccatgctgggcgcccgggaagtatgtacacggggtacgtgccaagcatcctcgcgcgaccccgagagcccgg

SEQ ID NO: 336796 - DNA, 122 bp, Homo sapiens
cccccccagtccgagcgccgccgccgccgccgccgccgccgccgcggccgctcagtaacacgtccccaggagactcgcaggagcaacacgtgatgtgtctacttatcagggtgagaggggga

SEQ ID NO: 336797 - DNA, 122 bp, Homo sapiens
gcggaagcacagaggggagcggggctgcgtccacagaccgcgcacacacgagcagtttcccgtctcagagctgcctggcatgcacactggaaaatagttaagacagccccccgtgaggtaac

SEQ ID NO: 336798 - DNA, 122 bp, Homo sapiens
aagtattggcttcaggcagcagtgccagaatgcattgaaaagatgcaatttaaacccttgcgtgctcctcaggcaacatatcacaggccttagaagtccagtcctccagattaggtttgtaa

SEQ ID NO: 336799 - DNA, 122 bp, Homo sapiens
aggctgtgttctgacagtttgctgcacaatgaaccaagctgaaacccccttcaaagacgtcggcggaactgagtctcctttgtggagcccctcatttgcatgataaaccccggggacaaagt

SEQ ID NO: 336800 - DNA, 122 bp, Homo sapiens
cacacagtggatcacacagatccgaagtctgaggcacagggcgcggtccgcgagtgggagcggctgcttgtgggcagggtggacgcggggccacgtcttggccggcgttttgcggggtcttc

SEQ ID NO: 336801 - DNA, 122 bp, Homo sapiens
ggccaagaccccgccacccgcggcgcctctcccctccccgcgcgagttccctggcccgcacgtagcgcagcacctgctcgccgctgtgcaccctgcctgcctgcgggtcctcgggggcgccc

SEQ ID NO: 336802 - DNA, 122 bp, Homo sapiens
gcctaagctcaggaaggtgtctgtgagaacttcgctcagcccaagatccctttcccttcccgtcacatctgttagcgcacaagatttcttcgtctgtctccaaaggtttctgaagccccacc

SEQ ID NO: 336803 - DNA, 122 bp, Homo sapiens
tgtcctggcgggcgccaagaattcctgaggtcacctcaaggccccttcctgcattcctagcgttcttgtcacagggctctcctttctgaccccacatgtgaacctccgctgcaggctgggct

SEQ ID NO: 336804 - DNA, 122 bp, Homo sapiens
ctcccatgaggcctcttgggcttcaggctcaccaccctgtctgggaactctgctggtggccgggcacccagctccccacagccagaggggaggaccggttacaatgctcccctctccctgcc

SEQ ID NO: 336805 - DNA, 122 bp, Homo sapiens
tcaatacatgcttcaacacagatgaaccgtggaaacaggcttagtcaatacctgcttcaacgcggacgaaccgtggaaacaggcttagtcaatacgtgcttcaacgaggacgaaccatggaa

SEQ ID NO: 336806 - DNA, 122 bp, Homo sapiens
agagggaatttactacaaagaggcacgaagaaacttgtgggccagagctattttggtctccgttttggtgatgtatatacgtttgccagagttcacagaactgcacactgaagaaagatgga

SEQ ID NO: 336807 - DNA, 122 bp, Homo sapiens
ccggctcgggaggtagccaagctgtggacccagagatccgggatcgggatcggggaactgcgggcgagggcgggagggagccgcggacacacgccgaggcggccgcggtcgcccggcgcagc

SEQ ID NO: 336808 - DNA, 122 bp, Homo sapiens
cagaggataaggaagtggtggaggcgaggctttgtgggcgctggaaggaacgggtctgctcgcaggggcttgctactggcctggaaatgctctgcagagtcctgggctctgccgccgccgcc

SEQ ID NO: 336809 - DNA, 122 bp, Homo sapiens
gctgtgtctagattctgcttcccggtgccttgacatctgcggggtaacttctggcagcctcgacccgggagaacgtggacagcccttggcctctgggagcccctctcagcctcctaggaggc

SEQ ID NO: 336810 - DNA, 122 bp, Homo sapiens
ttagagaactagtgaagaggacagtgtggggaggatggaatccgaaacgggaggaggggccggcaaacctggccagagcagcgaagaggacgaatctctactgcaggagcttgcacggcccc

SEQ ID NO: 336811 - DNA, 122 bp, Homo sapiens
acacctcacaatggaccccagcggcgcgcaaaatccttatgattggtttgctggctgcctcgggagaccctgttgccaggatacttggcgttcccgacccgacccccgttccccattggctg

SEQ ID NO: 336812 - DNA, 122 bp, Homo sapiens
cctgcctccccatctggcttgaatgatatgggtggggaaatgcagagtcaggttctgtgacgcctttatccccagagtggaattggaaagtgcattttataaatggggattagaggctggat

SEQ ID NO: 336813 - DNA, 122 bp, Homo sapiens
gatgggggcccgatgtgtgggttggaccctgatatcggaggcgccatgcctactgcttagcgaaccagcccttaaaaccaggactctcccatgtggggcgatgcagtgagacaagaggcaac

SEQ ID NO: 336814 - DNA, 122 bp, Homo sapiens
gcgccgagttcagctgccttcccacaatccctaagattactttgaagtcacagtcgacttcgcgccggggcaggcgattggctgcagaggttagtgggcgggcatcaaggaccattgtgcgc

SEQ ID NO: 336815 - DNA, 122 bp, Homo sapiens
tcggctcaagggaagatgaggccgggcccttgctgggggctggagctgggagggcgcgggcgctgaggaccggcggccagccccgcggtgggcgtgagtgcgagggaggccgggagagcgcg

SEQ ID NO: 336816 - DNA, 122 bp, Homo sapiens
gggcgctggtgcgtgcaggtcccgccgagccgtttggggcttgatttatctccacctgcccgcatcataagggtctgcgtggtgactgcttgggctgagttacatttcttagcttttggggt

SEQ ID NO: 336817 - DNA, 122 bp, Homo sapiens
gcagatgcattgaggccaggccatggggcaggaggaagacaacacaaagataataatactcgcattgccccatgtggttctacaaccccaagctggtgccaaagccttcccctcgctgcatc

SEQ ID NO: 336818 - DNA, 122 bp, Homo sapiens
agacacaggcaggacatttcaacaataaaggaggcagatgctttctggggaaaaatgggccgggtgttgcatggaggttggggtgatgcccacaggttcaccctggccaaggttgcctgggg

SEQ ID NO: 336819 - DNA, 122 bp, Homo sapiens
atgacaactgggcctatctctaaatgagattgtgtaaatcctccaagaaatgggaagccccgtgttagtgtttgccttctccttttgccccaggatgatttggaaagaggaaccctaacctc

SEQ ID NO: 336820 - DNA, 122 bp, Homo sapiens
cttggcaacccggaggctgagcggcgggtagagcgggcgcgagagcgaggagaaagggcccggagcttttcagagtcaggatctggcacaggcagcgaagttgctgagcttcctctgttcac

SEQ ID NO: 336821 - DNA, 122 bp, Homo sapiens
ctcagagcatgtgccccgtgcgtgaatcagttgcactcgcacattggtgggcggtggtagcgtgcttgtgtctctgccctttgggtcgcgaggtgtgtggccgtggcacctgcttgggcttc

SEQ ID NO: 336822 - DNA, 122 bp, Homo sapiens
cgccagatcccgcctctgggggctggaccgagagggtcctcggcggcttctttaaggctgcggtccccgccccgtcgtcctccccgccctcctccctctcgccgcggctcctcccgccctcc

SEQ ID NO: 336823 - DNA, 122 bp, Homo sapiens
ggctggacaggctggaggccccttccatggggcactcaccccgtgcgacagacagaaggacggatggacggctggacgggccggaggcccctgccgtggacactcaccccgcaggacagaca

SEQ ID NO: 336824 - DNA, 122 bp, Homo sapiens
gagcccccagggcgactttggtggaatctggtgttgaaatcagagtcccaccgccgggcgcggtggctcacgcctgtaatcccagcactttgggaggccgaggcaggcggatcatgaggtga

SEQ ID NO: 336825 - DNA, 122 bp, Homo sapiens
ggtagcgtcgcttcgagtcgcatggacattggggtttagataatttaccccccacccaagcgatttaatggcttttaagcaaaaggcgaatacctggatttccatgggagggatgaggtttg

SEQ ID NO: 336826 - DNA, 122 bp, Homo sapiens
ggtatatttacacatctgtaagatggaatgcacatgataaaattatattccttccaggtgcggtggctcatgcctgtaatcccagcactttgggaggccaaggcgggcagatcacctgaggt

SEQ ID NO: 336827 - DNA, 122 bp, Homo sapiens
aaggtagtcacctggtttcaaaagttccagtttctgcttaaagggagcaaaggacagagacgtctcactcagagcgtggcagttatgctgctccggaaagggaggctggtcccgcagttgag

SEQ ID NO: 336828 - DNA, 122 bp, Homo sapiens
ctggggaaggtgcttggagggtgttgaggcctggcctggcctggggaaggtgcttgggggcgttgaggcctggcctggactggggaaggtgcttgggggcgttgaggcctggcctggcctgg

SEQ ID NO: 336829 - DNA, 122 bp, Homo sapiens
actcctgccagagagacaggagcaggcctccctgccagccctggtcagtcacccacctcccggccctcttagggttagtgctagttatcacacacacaacagcgagggggtagagaaaggaa

SEQ ID NO: 336830 - DNA, 122 bp, Homo sapiens
gtcacttccagtcattaggttgaaggcctgtcttgttactgctcaccacctcctacgctgcggctgacacatgtactggagcccttcagagaggaaggacaacccgttatttggtagtttgc

SEQ ID NO: 336831 - DNA, 122 bp, Homo sapiens
cgggagttctggttgcggccacggctgtggcctcgttgtgaacggtagcctttgcggttgcgatgcctaaacctttgtttcttggccaaggaggggcggggtgccatgcctgagatgtagat

SEQ ID NO: 336832 - DNA, 122 bp, Homo sapiens
agggccaggggtcctctggcgagtgtggacctgggcgagtgactcgttgtgtgctgtgcccgcaggagatgctgcaggataagggcctgtccgagagcgaggaggccttccgggccccgggc

SEQ ID NO: 336833 - DNA, 122 bp, Homo sapiens
acgtctgttcctcagggttcttctctcagaaactgaggtctcaagacttaggggaggtcccgcaggaggttgggggtgaagtcagaaaagtgacctcctcagaggaggaacttcacacacag

SEQ ID NO: 336834 - DNA, 122 bp, Homo sapiens
gacccgcggcccgcgcccggggaccccgcgcccgacgccctcgtaccgcgatcacgttgacgaaggtggtcttgcccgagtactgaagcccgaccagcgtgagctccatctcctccttccag

SEQ ID NO: 336835 - DNA, 122 bp, Homo sapiens
gggttctcagtgcgccttccctcagagtgaggcctcacgggggagccgctgggaggggagcgtggtacggctgcagccacagtaccagggcctggcaggactcttaacacccctctactggg

SEQ ID NO: 336836 - DNA, 122 bp, Homo sapiens
aaacacccagcagtccttataggggggcggttggggcgggggtgcagacacaccaagggacggtttggtatccatccgctgctccctccagcgcggctcttcgcgacctcgcgatcctgtcc

SEQ ID NO: 336837 - DNA, 122 bp, Homo sapiens
ctccacgcccgtgctctctcagcaccctctccactccagtcaacacggaccacacaccagcgtcacacgtgacccaacatgtctctacgagaacgtgatataagctctagtctaggggactg

SEQ ID NO: 336838 - DNA, 122 bp, Homo sapiens
aggcagggtatgtgctgagtgttacaggtggaaggccactggaggtcgctccaggagccgcggggatttacctctgcctaacagggctgctcaaggtgatggtcgacaccccactttcctga

SEQ ID NO: 336839 - DNA, 122 bp, Homo sapiens
atgatactcccttaccctcccagacccttggtttccgtatctaccatgtgggaaagaagccgttacgaaatatacggctgtgaaaatgcaaaataaataagaaagaaagaaaaatgttaacc

SEQ ID NO: 336840 - DNA, 122 bp, Homo sapiens
acaaacaaaaaaacccaaaactgcttggaaggaaaaatggggagggggaaataaacgaaacgatgatggcagtgtggttaattggttaagccaatggaagctcaatacactattctactctt

SEQ ID NO: 336841 - DNA, 122 bp, Homo sapiens
ttgcgcctgcgcataacaggctctagtctccgggctgtgggaagccagcaacacctctcacgcatgcgcattgtagtcttcccacctcccacaagatggcggagggcaagtagcaagggggc

SEQ ID NO: 336842 - DNA, 122 bp, Homo sapiens
attcccttcaaagaaaagagtgtgatgtgcaaggcaatgagaaaactcgaggtcctggtgcgtggcgcagggagcagataatgcctgtctcttgtgctcattgtattgttagaagctgctga

SEQ ID NO: 336843 - DNA, 122 bp, Homo sapiens
gccactttctggtagaggtcatggctattgagcaccatcgactccaaaatggccaaggaccgctgcaggatcgagatgtctatggctgacttgttcacaaaacttgctatctgaaaatccaa

SEQ ID NO: 336844 - DNA, 122 bp, Homo sapiens
tccccctgcctcctctgccaatgcagcccggaggctaccaccacccatcccggccgggcgcggtggctcacacatagaatcctagcattttgagaggcccaggcgggaggatcgcttgaggc

SEQ ID NO: 336845 - DNA, 122 bp, Homo sapiens
gggagtgagtctggggccctgggggaatggctccaaagatgggagctgggccacaggtcccgggagtggggtgctgcctctcctgttgccctcgtcccctgctcccttctgggcgggtgctg

SEQ ID NO: 336846 - DNA, 122 bp, Homo sapiens
caagccgcgccagcctagcaccgctgagcaatgcccccagaccccagagccagcggggggcggagtctcaccgctcaccatcatccatgggaaccaatcactaggcaccgccgcgggatgcc

SEQ ID NO: 336847 - DNA, 122 bp, Homo sapiens
actcaggccatttgtccgggtaattttcagagatgaggtaacatctctcctcttggacaacgaacaggttaacttattacttgccataaaagtggtagattccttaagctctgtgtttctca

SEQ ID NO: 336848 - DNA, 122 bp, Homo sapiens
gaggcctggctgggccccctcttgggggtgggggcccgacccctccagcgggcgccgactcggactctgaagagagtgaggccatctatgaagagatgaagtacccgctgccggaagaggct

SEQ ID NO: 336849 - DNA, 122 bp, Homo sapiens
agtgggcgcggaggcgcgggctccccgactacgcctgcgcagcggggctgagttggagaacgtcttagactacaagttccgggaatcagcgcggcgaggcctgagaagaagacgtttgcgcc

SEQ ID NO: 336850 - DNA, 122 bp, Homo sapiens
ttttgtgcatgtggacaaaaatgggggaaaaatgaaagctgtgttaggataatgggtatacggctgaattttccaggaatttctataataacaccaaatcgcatgttttaatgcccaccgtg

SEQ ID NO: 336851 - DNA, 122 bp, Homo sapiens
tcctttgctgtctcctagaatcatccagaaccgcatcctgctcgtcatcctagggatcatcgtggtcatcaccatcctgatggcgatcactttttctgtcagaagacactgatgtatctgct

SEQ ID NO: 336852 - DNA, 122 bp, Homo sapiens
aagaaatcattgactttgaggtcattatcactgagacagcctaggaaagcatgccagttccgcttttaacactaatttttgcctattaaaaaattatcacttcacacattcatgtaaaatat

SEQ ID NO: 336853 - DNA, 122 bp, Homo sapiens
gtaaattcgcctcacggagcagggagtccaggcactgtgttcaagcagcgacggaacctccgcagggtcttcaaagcagctcgatggtcgacgactggaccctgaaaaaaagaaagaaagaa

SEQ ID NO: 336854 - DNA, 122 bp, Homo sapiens
gatagctatgcaaagcttcattctgcagcagtaaaagtgtttcctagaagtactaaggctcgttaattgcagccaccctataaaagaaggtcctctttcatgaagagcctgtttctctgcag

SEQ ID NO: 336855 - DNA, 122 bp, Homo sapiens
gaagctgaaaggaaatgaaggatcagagtctgctgaagtcctagaggattcacggatctacgggacagttactgagtatgaaatggaaaagaatcaatgagcattccagggttttggctcga

SEQ ID NO: 336856 - DNA, 122 bp, Homo sapiens
cagtacaccggcctgggggaaatcacctgacttctcctttggtaaaggcccccttaccaacgctgcctctctggtaagggggtcctttaccaaaagacaccttaaagaagaaacagcctctc

SEQ ID NO: 336857 - DNA, 122 bp, Homo sapiens
tatctctaatgaagaaatcatttctgcttctatagagatttaaaaataataaagtctcaacgtttgaaccctcttaggtcaggaggaagcccatgctttcagccctaccccaagcttaggag

SEQ ID NO: 336858 - DNA, 122 bp, Homo sapiens
ccgtaatgatgtgttatggagacgagtaacgttgttggatactgagcagtgcgttcaggccgcattcctgtgggcacgcgctcaagtccatcatccctcagcagaggccgcgtatcacactg

SEQ ID NO: 336859 - DNA, 122 bp, Homo sapiens
cgcagcaaacaaacaaaagggctggaagcagaaaccaaacaaaagctgcccacaggaatccgtgccctggtgccatccgggggctcttccctccggcgtattgtaaacggtggtgacaaagc

SEQ ID NO: 336860 - DNA, 122 bp, Homo sapiens
tgcacaattcacaccctggtgccattttcctaaaagaaacgcaaatgttcaacagagacccgctttgaagcagccctgtctgctgcaaagaacctcggaatcattccgcgtcggcaggaaaa

SEQ ID NO: 336861 - DNA, 122 bp, Homo sapiens
tgcgtttcagggcagcacagttcctgcggaagatggcagatccccagtctatccaggagtcgcagaacctttccatgttcctggccaaccacaacaggatcacccaggtgagggcagactcc

SEQ ID NO: 336862 - DNA, 122 bp, Homo sapiens
atccaaggcagcagttaattggaatccttgcatgaccatcattttgacatggaactgttgcgacctagaagacacaaactacaaggaagctaaacaaacaaggaccaaagattagtaggaat

SEQ ID NO: 336863 - DNA, 122 bp, Homo sapiens
tggggacgagggtaaggttggttgcgtgaaatcgagagcttttcgacggggtctgagtcacggacgatcccctctccacaaggaactcctgaaaccaccccctccgagcttctcacgtaggg

SEQ ID NO: 336864 - DNA, 122 bp, Homo sapiens
aacgtacacagtctcagacttaatcatgcacagtgagcaagactgtggtgtgataattggcgtccctgacttattagggcaaatctatgggagggggagacctcctggaccactgagcaatt

SEQ ID NO: 336865 - DNA, 122 bp, Homo sapiens
gaagaacaagcagagggtgtgtcctatccgattcacgtcgctgagctagcgtgtcactgccgagagacaggctcgcctgtgaagcggaggaggacattagtgtagaaacgcacagccttgga

SEQ ID NO: 336866 - DNA, 122 bp, Homo sapiens
ggtttttagcatattcatagatacatgcaaccatcaccacagtcaacttcaggatattttcgtcacctcaaaaagcgacctcctattcttttgctatcactctcctattcccccatcctctt

SEQ ID NO: 336867 - DNA, 122 bp, Homo sapiens
gtgatccacccacctcggcctcccaaagtgctgggattcataggcatgagccaccgtgcccggccctgccattacttttaatgcattcatgtggtaatctgtgagccccttccaaagaaatc

SEQ ID NO: 336868 - DNA, 122 bp, Homo sapiens
tgtaagtggtctcttggctccgcgactgcagcctgcaccgcctcgcccactcctctcgcgcgcagcaagccccgcctcctccgttacgaaagagcgcttctggccccacttgctctcggctc

SEQ ID NO: 336869 - DNA, 122 bp, Homo sapiens
agacatgttcttacttctcatttctgatttctgtaatacacacacactgatttcataaaacgtttatgagtccaacacttccattatagccctgtatcaatgttttgcttagctgaaatcaa

SEQ ID NO: 336870 - DNA, 122 bp, Homo sapiens
ggtgaggcttgggggacggggatgccaggcacttggatctcagggctagaagggtcagaccgaggctggggagtgaggccgtgggctggtgttgggctggacgcagactcagctgtgtcctg

SEQ ID NO: 336871 - DNA, 122 bp, Homo sapiens
cggttatcatagaaacagaggccggctacacctaaaaggcggggcgtggacctaagtcgtcgccaaagaaacggcgttctggacggggacgtagggtcccgcccattccttctcgtgaaagc

SEQ ID NO: 336872 - DNA, 122 bp, Homo sapiens
gtgggtggggctacacgtagggccgagacgaccggatttccggaaatcagagccggcacacgtgacttttgtttgcagaagtgggaaggtaccctaggcagccaatcggggagcgctgagtc

SEQ ID NO: 336873 - DNA, 122 bp, Homo sapiens
acgtggagctggggctacagccattactttcggacaggtgcaattcaaagcgtgatcctccgaccaagagcttcgtcatcgccacctgggagcttattagaaatgcaggatctcaggtctcc

SEQ ID NO: 336874 - DNA, 122 bp, Homo sapiens
tctcattccccggcttgcagatggcccactgtggggcttcacctgtgtaaccatatgagccggttctccccagtaaactccattttatatgtacatatatcctactggttatgtctctctgg

SEQ ID NO: 336875 - DNA, 122 bp, Homo sapiens
aggcaattttttttttttgagacggagtctcgctctgtctcccaggctggaatccagtggcgtaatctcggcttgctgcaaccactgcctcccaggttcaaacgattctcctgcctcagcct

SEQ ID NO: 336876 - DNA, 122 bp, Homo sapiens
cctgagggaacaaagggaggttgggcggggcggtgctgggactgggcttgcggggtcccgcgggaggacccgcctcaaagagccggcccgatcatcgcctcctagaatacccagctcaacgt

SEQ ID NO: 336877 - DNA, 122 bp, Homo sapiens
gccgaatcatccatcctcctgccctctttgttaaaggaggctttgaggccagcagccccacggggaaggcgtatagttgggactcagggctgactcagagggccagccctggccagctcatg

SEQ ID NO: 336878 - DNA, 122 bp, Homo sapiens
tctcagttgcctcctccgggacctgtgcagtgcacagcctccgctgactgtcgccgtctccgtttcgcacaggccatggcgattacgcctaccagcagtcatcctacacggagcagagctac

SEQ ID NO: 336879 - DNA, 122 bp, Homo sapiens
gtcagtcttttgtaatatactcaaggatgtgatattccatcacttctggcatattctactcgttagaaggaagtcatcaggcacagcctacactcaaaggtaggggattacacagggcacaa

SEQ ID NO: 336880 - DNA, 122 bp, Homo sapiens
agcctcatggtggcttcctcacatccttcatgtctctgctcagaggtaagcttttagagacgccttcccaggccaccctacataagatcctacatcctcacctccactgacacccctcatgc

SEQ ID NO: 336881 - DNA, 122 bp, Homo sapiens
gggtggccagaagtgggggaggcgaggagccggggcggccgccgcagcggcagggctgcacgctcatacttcccagcttcccagcgagagaagaaagaaaggggcacgtcaaggttccgcgc

SEQ ID NO: 336882 - DNA, 122 bp, Homo sapiens
agggcgcgctgcggggtgcccccgggctgctcaggctaggctgttgcgcagtaagataaccgcgcgggagccggggtgtgcttggccccccttcccccgcccccctgcgctccccgccactg

SEQ ID NO: 336883 - DNA, 122 bp, Homo sapiens
ctggttggtgaggttggcccagggctgggagggcgcgggggaagccacaggcagtcccagcgcggaaggggaggaggagaggttgccagcttggtccagcagttgcagccacccagtctcaa

SEQ ID NO: 336884 - DNA, 122 bp, Homo sapiens
gggcacagtgaggccccagctccttaccagcaagccgtctaggctgcgaacgcgagccgccgggccgcagctctctagaggtccctgtccccaccgcctggccccatctcatgtcacattcc

SEQ ID NO: 336885 - DNA, 122 bp, Homo sapiens
ctccattctcaggggctgggggacaccccttctggttgagaaggccacaggtggcccccccgccacccggcaggcacagcagggcaccaccgagaccactgtggcctgaggaggagcttcag

SEQ ID NO: 336886 - DNA, 122 bp, Homo sapiens
attccccaggacgaaagcctagcggccaggctgcatttcgccccgggtataaatccctgccggataaattcaaatctgtagcagggttttggtaatatgcatcttagcaacaaaacaaaaac

SEQ ID NO: 336887 - DNA, 122 bp, Homo sapiens
gaccgagtgtgtggcacccgtggcctccagcaggaccgagctccgacccgcgacacagcgcgccccgccccgccccggggaccccacccccggcagccccgcccacccctcctccagccgtc

SEQ ID NO: 336888 - DNA, 122 bp, Homo sapiens
ttaagggaaaggctggcccgtgactgacggcagcaggttttacgggcaggcttgaggaggcggtgtctgatttacgtggagcccagagattggttcgaccaggggtgacgtttacgtagcgc

SEQ ID NO: 336889 - DNA, 122 bp, Homo sapiens
ctggctacaggcagagagccagtcagcagtgcccctgcagctgtttggggctgggggctccgatgatgccagagccctagggtttacaggcacctaggcagattcgaggatccaagtccctg

SEQ ID NO: 336890 - DNA, 122 bp, Homo sapiens
cgggtggaaggaggaggggcttgcagccccaggtcggccctgccaaggtcaccctagttccggaagctccgggggtcgtcctggggtgaaaggaggtggtgggaggcggaaggatgaaacgg

SEQ ID NO: 336891 - DNA, 122 bp, Homo sapiens
cgaagccccttctggaacctcctggggacaattcccttttcctttcttcagcctaacccgcggtggccctcgcggagtccggtcagccccggggagcgcagccgggaggggcgtccaagggg

SEQ ID NO: 336892 - DNA, 122 bp, Homo sapiens
ggcggagctgggaggtgggtgggaatgtggcctacaggaaagcggggttagttttgggatcggagctctcgcgatatttcacggaacttgggcaaatgacaaatctgaaggcgccgcgttga

SEQ ID NO: 336893 - DNA, 122 bp, Homo sapiens
ggccctcccgttactgtcaccaattccgggggctgctcccggtccagtaagtggaggggtcgcgtccctgctgcccgggcgtacacgatcccggggcccccccgatgtcgccccgcgccctg

SEQ ID NO: 336894 - DNA, 122 bp, Homo sapiens
agtgtggtacagaagcccagggtcatgtttatactagccctgggtgtggggtgaatacaacgggtgatctttatactgaaattcactctgtctttacaagggaaccaaaatccagccctctg

SEQ ID NO: 336895 - DNA, 122 bp, Homo sapiens
ctgctgggcaaaagcccaagaaacatccttatcaactttctcccaggcaacaagccataccgcccagacccctcctgcccaggcctgtaattaccccagcctggaagcggcagtgggctctg

SEQ ID NO: 336896 - DNA, 122 bp, Homo sapiens
atggtttctcattatcactgaatagttgagagtctactgtatttgagtgaaaatgcagcacgagaaactgaaatcagatgcactcatgattatgaccctgaggtcaatgtgtcattcccttc

SEQ ID NO: 336897 - DNA, 122 bp, Homo sapiens
ttaggaaaaaattagggacgttttcagcagctcccgccacctactatgtccgggttactgcgggatccacagaatggaagttgcccgccaacaggaagaatgtctcctccctctgcagggct

SEQ ID NO: 336898 - DNA, 122 bp, Homo sapiens
ctggcctccctctcacgtccactcagatgacacatcctcggaaacaacacagagcgttatcgtgccgacattgggaagcactgcccggaggatcggaggatagaaggacgtctgcagggagc

SEQ ID NO: 336899 - DNA, 122 bp, Homo sapiens
ggctcctcacttcccagtaggggcggctgggcagaggagcccctcacctcccggatggggcggctggccgggcggggggctgacccccccacctccctcccggacggggcggctggccgggc

SEQ ID NO: 336900 - DNA, 122 bp, Homo sapiens
tgctgccccatcatgggggctggggttgtcacctggacagggggcagccgtggaggccaccgttaccaactgaagctgggggcctgggtcctaccctgtctggtcatgaccccattaggtat

SEQ ID NO: 336901 - DNA, 122 bp, Homo sapiens
ccgcctcttaaagggggcagtgactgcggctgggcgggagtccgggtcggcttggctgagcgggggcggtgctgggcagggcggcggccgctccctcccggactcccggcctcccggcctcc

SEQ ID NO: 336902 - DNA, 122 bp, Homo sapiens
actgcaaagaagcatattcatattcacaaaaatgagccttagataagactttcctcctctcgtgggggctccaggaaactgaaaagccaagcttgttaccaatgcttgcccttccttaagta

SEQ ID NO: 336903 - DNA, 122 bp, Homo sapiens
cccagccaggacattctgagtctgtaatttgaagtgagcttcaagaatctgcatttttaccgcggcgcttttgatgcaggcggtccacggtaaagttagagaaatgctgccctgctgctgcg

SEQ ID NO: 336904 - DNA, 122 bp, Homo sapiens
cacccctataaatccaggcgggcgcttcgttacccaggagcccaaggtgcagctccgggacgcttcttttcaaggccgggacccctgcagcggcccgtaggacacctccctttccgagcacg

SEQ ID NO: 336905 - DNA, 122 bp, Homo sapiens
gagggccctccagtccggctagcgttttgctgcggaggtggtggaggtggctgcggaaaccgctgggagcgataggacctctagggagacttggggtccgagttgggccgagccccctggga

SEQ ID NO: 336906 - DNA, 122 bp, Homo sapiens
gcccgagtcccctgttgcctgagacccaggacagcctggccgcctcagccttccccagatcggccgcccccacagacctgcctcaggcgccgactggctcccctccgccatttttgttgtcc

SEQ ID NO: 336907 - DNA, 122 bp, Homo sapiens
cctgactcctcatagttccacagacagagtctaaagtccatgtgcccggcagcaggagagcggataaggaggccacatccacaccagcactgagccagaaggaaccacagagacgagaaggg

SEQ ID NO: 336908 - DNA, 122 bp, Homo sapiens
ttgcagcggcctggccacctcaggagcacgctgtctcttcccgacgtgcagcccggggcccggccctgtccccgggtgactgctccccggcaggactgcacatctgtggcggcaggcccagc

SEQ ID NO: 336909 - DNA, 122 bp, Homo sapiens
ttcccgcggggcagggctcgggacctgcagcccgccatgcctgagcctcacccccacccccgcctccgtgggctcctgtgccgcccaagcctccccaacgagcgccgccccctgctgcacgg

SEQ ID NO: 336910 - DNA, 122 bp, Homo sapiens
ggttttattacctttggacttcccccactctttatttgtttgggggctggaggggggagacggagaaacagtgaaaagttcggactctctgtctcactccttgccccacacacacttgtccc

SEQ ID NO: 336911 - DNA, 122 bp, Homo sapiens
gagaggagactgggccatgttctgttttattctctaagttttactacgttgcaaccaacccgcccatcctgggctttctgttgctattcataacttgcctttgaaactattggctcacttga

SEQ ID NO: 336912 - DNA, 122 bp, Homo sapiens
ccgccacacacacagctgtacccggcacaacacgcggccacaggtcacctcaggtcgcctcgggtgctcctcccgcagccccacgtagacagaagacattcctcgggcctgggtgcccagcc

SEQ ID NO: 336913 - DNA, 122 bp, Homo sapiens
gtcggacttggaaaccggccacccttccccctctggggcgggagtggccactctcccgggcgttccgaatgacctcaggagggctgcatcgctcagcataactaaggccagcattaccccaa

SEQ ID NO: 336914 - DNA, 122 bp, Homo sapiens
gggtgggagcaccgcttcatggggactgagttctgggtgggattgagttctgggtgggagcgccacttcaccaggactgagttctgggtgggagcaccgcttcatcgggaccgagttctggg

SEQ ID NO: 336915 - DNA, 122 bp, Homo sapiens
actgacccatttcatgtctgggcttctaactgaaactacaatttcattacaacctctatgcgcccacgggtcctgcctgcggcaatgacatctctcgggtcaataaggaccacttggaacag

SEQ ID NO: 336916 - DNA, 122 bp, Homo sapiens
ccctgagcagtggcagcgagctggagagcagcccgatgaggaagggcgtcggcgagcacacgatgtcgaccatggcgggtggcagcaccgggatgtaggtgtgctgccaggcgaaggggtag

SEQ ID NO: 336917 - DNA, 122 bp, Homo sapiens
gagtgcagggccggccagagggagtcacagtccggcaccgagaggcaactcggcagctggcggggcccgggctcgaacccagggactcacccaaaccgaggtgaccgtcgcacgcgccgccg

SEQ ID NO: 336918 - DNA, 122 bp, Homo sapiens
ctccctcgcgcaggagggcaccgcccagatctggaagaggcagtctcaggaagtggaggccgggggcatccagacggtggaggatgagcacgtggccgagctgaccctgatgggggaggggg

SEQ ID NO: 336919 - DNA, 122 bp, Homo sapiens
atgaagaggctcaaagtccagctgaagcggcccaaagacccgggacacccctactgaccgcgcccacagccgccctgaggctgtaggcatggcccaggtgagccgccaggcggccccacccc

SEQ ID NO: 336920 - DNA, 122 bp, Homo sapiens
gcccacaggtgtggaggggcaacccaccccttcacgtgacagatgtcccagcagttctgacgcacctaggagagcggggtgggtggcagggcatatgtacgtgttttgaaaaaactcccagt

SEQ ID NO: 336921 - DNA, 122 bp, Homo sapiens
accggctccccagccctccccaccaaggggtactgcaggggaagggctggctggggtccccgagatctcaggaatttttgtaggggattgaagccagagctagttgcgtcccagggaccaag

SEQ ID NO: 336922 - DNA, 122 bp, Homo sapiens
aaaaaaattaccctgcgtttgtccgggggagatgtgtgcgtgggtccgcgcgccccgcaccgacactgagggctggcacgcccttactgtctttcgattgtgctggacttgtgcgtcctttt

SEQ ID NO: 336923 - DNA, 122 bp, Homo sapiens
ccgggcgtggagatgtgggggaggaagtcggcgggcgggcgccggctccgcgaagagcttcggccctagcagatctcaccggacgagctctggcctcgcggccgcccctctaccacccctca

SEQ ID NO: 336924 - DNA, 122 bp, Homo sapiens
gtgtgaaccctgacccgaatctctggaagtgattaaagtttgttttcatcgcccacaagccggccagcagggccgaggaggcaggagagtttctaaaaacgatgtctccctgtagctcaaaa

SEQ ID NO: 336925 - DNA, 122 bp, Homo sapiens
tatgttctccaagaccggctggtggaggctgttcacctgcggagaaggggcctggtcatccggttcctgaatgcctttgccacactagaatgttttatggttctaaagttcccaccttagaa

SEQ ID NO: 336926 - DNA, 122 bp, Homo sapiens
gaaagccctcccctcgcagcgcgctccgccactagccgcaccccgccgagctctgacctccgaagagggtccctgtggcgatcccgccccttcgtctgatgtttgtgcctttgattggctct

SEQ ID NO: 336927 - DNA, 122 bp, Homo sapiens
tctgccacaacacataaggttgccgtgcatttttgacactgtgacccttcaataccaatacggctttttagacagtaattcctggggccctctaacaattcccgacccttagcccgctcaaa

SEQ ID NO: 336928 - DNA, 122 bp, Homo sapiens
tagtattcaatttcattttttagatgcggtcttgactgaccttgtcagagtccaggctcccgaactagtttgagatctgggactcagcagcacccggcacgctgccgtccctcctgttcttt

SEQ ID NO: 336929 - DNA, 122 bp, Homo sapiens
tgcagagctgtggcggggttcagaccccgattccgggagaggacacctgtcggggaagggcggggctgggggactgcggggccgcggcgaggctcagccgggaactacgcttcccagcctgc

SEQ ID NO: 336930 - DNA, 122 bp, Homo sapiens
tgtgggagattaaattcgttagcacactacaaacttaaaacaatgttaggtcacaagtatcgaggccagggcttctcgaactttaatgtgcatacaaattagttggggatcttgttaaaatg

SEQ ID NO: 336931 - DNA, 122 bp, Homo sapiens
cccagtgcccgaaacgcccccttttcatcccttttggaactggcttccgtggggattctccgggtcccggtgccaagaaggcttcccaggcgcggggagagggttcacgtccccagcaaggc

SEQ ID NO: 336932 - DNA, 122 bp, Homo sapiens
tgggctaggaggcagggggcggtgactgggtgagtctcgacacctcacttttcagcctaccgtcaccccaaccctggtggcctctcctatgtccccaggcgatcacagccatggcacctcct

SEQ ID NO: 336933 - DNA, 122 bp, Homo sapiens
gcgggcagccagcgctaggccgattcgaactcgaccttgttttggcgttgctaggagacgcggctcctgcgcgccccctacaggccggcgcccgggcggcgcgcgggcagggggcggggact

SEQ ID NO: 336934 - DNA, 122 bp, Homo sapiens
gactagtgctgggctcctttcctcctgttctgctgcctctgagaggagccaggattgaatcgtagccttgtcctctgacctggaggtctgggagtaactctcttatgacttttttagcctag

SEQ ID NO: 336935 - DNA, 122 bp, Homo sapiens
gggagcttattagaaatgcaggatctcaggtctccaccccagaccttctggatcagaatccgcattttaacaagagagtcaagtgattcttatttatattagaatttgagaagtcaattgat

SEQ ID NO: 336936 - DNA, 122 bp, Homo sapiens
tccctcgcacactgggaggaggaagccgccgagactgcagggagcctggccccggagccccgggtgcgccctggtctttggagcagccacggcccacaatcaccccccttttctaagactgc

SEQ ID NO: 336937 - DNA, 122 bp, Homo sapiens
ccaatcaaggatgcaaagtaaaatgccacccgggccaggtaagtaatatatgtgaagccgcgacgggatataacgctggtgagtagtgggatgtgatccgactgggagagtgcatttccacc

SEQ ID NO: 336938 - DNA, 122 bp, Homo sapiens
tctgaaaggtgcacagattcccaacatgccattctatctcaatgtacacaccctgccccacgtgtgcagagaaaaaccctccctgtactggcccgccaccaccagagccactctccattctg

SEQ ID NO: 336939 - DNA, 122 bp, Homo sapiens
aggcgggatctaggtgattaggaaacatcccatgtctcggatcagaagacccggcgctgtcgggaccagagactcccagggctgatctgcacattctgtacaatcccaggactcagccggcc

SEQ ID NO: 336940 - DNA, 122 bp, Homo sapiens
cctcgccggcggactacaagagggcagccgggcagagcgagcttcctctcggcagctcagcggtgccccttctgcagctttgccgccgggcacatttttatagcagcggctggcgtctgtgg

SEQ ID NO: 336941 - DNA, 122 bp, Homo sapiens
tggggctgagggggtgagagcaggcgcggccggcgggcaaggggaaccgggcgatggcagcggcgggcggccgcgggaggcgaggcagcggcggcggcgggcggcgcgacgagcccctgtga

SEQ ID NO: 336942 - DNA, 122 bp, Homo sapiens
taagtcagtctttgcatattctgttctcactttccagaaaagccctctatgtcctggccccggacttgcctatgccttcttcatgtcatcacttaaatattatgcgctcagagctggaggct

SEQ ID NO: 336943 - DNA, 122 bp, Homo sapiens
tacctttagacacgttgtacccgtatgcggcataggcagctgcagaggccgctgcagccccggctttggctcctgccattgcagcagcactgcctgccgtggactttcggctccggcccttc

SEQ ID NO: 336944 - DNA, 122 bp, Homo sapiens
gctccttctgcaccgagtaacatttccccccagacgctggccgctcttttgtgggttgggcgcgtgaggatccctgactgcgctggggagccagcagtgggagcccgcccagacgggaacag

SEQ ID NO: 336945 - DNA, 122 bp, Homo sapiens
tcccacaatccccgcggctagcctgtgtggctactggcggcagctagcgggctgcgaaagcgagcccagcgtccttgacagcagcccacgcgtcggggcggggcttgagcccgctgctttaa

SEQ ID NO: 336946 - DNA, 122 bp, Homo sapiens
cttagagtttgttataggaaactttaggacgtgaatacactataaaatatagaaatattacgataattcatgaagcatgtctgtcagttatctattgttaacaacccattccaaaagtttgt

SEQ ID NO: 336947 - DNA, 122 bp, Homo sapiens
gctgttagggaagtgtccctttctagcaccttctcagagggtcctcctgtataccatatgcgaaattctgacttaagatttggagcagctagtgctttttcattgtttgacttaacatgatc

SEQ ID NO: 336948 - DNA, 122 bp, Homo sapiens
tgcatccaaggcactggaaaagtcagtccagggcgagaaaagggcactgagaagtcggtccggttgcagacatccgctaatctgggcagagcagtgacttcttgaataaaagcccatttcac

SEQ ID NO: 336949 - DNA, 122 bp, Homo sapiens
tggccgccgagcgcacggagaagtgggctccccagagttcggcacccaaaggaccaacttcgcctccggaaaagcggcggatccggaacttggatgtcaggactatgactacgtaaaatctc

SEQ ID NO: 336950 - DNA, 122 bp, Homo sapiens
gtagaacacagcagatcttcctccaaagagaccgccgcacactggagtcacctattcgtgcggccagttaggacagcaggcgccctggacagccggcctctgctgtgtccctgcacccctga

SEQ ID NO: 336951 - DNA, 122 bp, Homo sapiens
gagtcgctcaaaagctactggagctaatagattgtggtcatgaggagagcggcagcatctcggtagtgatgggaacactcaaaagcatcatcaaaacagttgcagaaacatgctgagctctg

SEQ ID NO: 336952 - DNA, 122 bp, Homo sapiens
ggtaataatagtgactggctcccaaaggaaagagtatcaaaatgatcagtatctggatgccgcctgccggctccgagcgcacttactcaggttctctgtgccacagcaacagcttggcttta

SEQ ID NO: 336953 - DNA, 122 bp, Homo sapiens
agtgatccacccatctcggcctcccaaagtgctgggattacaggcatgagccactgtgcccggctcactttatgtttacaacaggaatatgagataagccgggctggcatcctctttttaaa

SEQ ID NO: 336954 - DNA, 122 bp, Homo sapiens
atttaagtaacaggcaggtccaaaacaatatgtatcctgttctttaaacctgatgaaatccgagccctctgtctttttaaagcctgatagcaccttgcaggaaaggcttccccaagccaaat

SEQ ID NO: 336955 - DNA, 122 bp, Homo sapiens
ggtgtggagtgagaggtggtggcgggaactgacgctgtgcgcggtgcttgcgggccagcgcgagttccgggtgagcgtgggctgggcaggccccgcacagggagcgcccgcgggccccgccg

SEQ ID NO: 336956 - DNA, 122 bp, Homo sapiens
gaattattccaaagatattttagtgtcctttagacactctcagcctgctacccaacttgccggccccttaattgcactctggagtcgggtccaagtcgtaagggaggtcctagaaagagaga

SEQ ID NO: 336957 - DNA, 122 bp, Homo sapiens
cccaccggccgggggccgctgccccagtttggggaacgaggcaagttatataaaagcggccggcccccctgcccagcggggatgctttgtgcggagcgcaccttatcggccccgcgctgcgc

SEQ ID NO: 336958 - DNA, 122 bp, Homo sapiens
ttaacattttgctttctcccttagcagctgaatgagaataaaggacagagactaggggagcgaattccattctaggtcagaacatagcccactgtccatggggcactgcaatgtggaactac

SEQ ID NO: 336959 - DNA, 122 bp, Homo sapiens
tatatgacactgaatttatctgtttatcaggagcccactcctgtgataactaagccataacggcattaatccattcatgagggctaaccacctcttaaaggccccacttactaatactgtta

SEQ ID NO: 336960 - DNA, 122 bp, Homo sapiens
aagggcctgatggtccactgagacctttcgtaaaagctagggcggggtgggcaaaggcaccggcacagctgtattttagtagagcttcgccagggccgtaagtgatggtgactttgggttca

SEQ ID NO: 336961 - DNA, 122 bp, Homo sapiens
ggctgcagcgggtgccgccgcgcggcctttctgtgcttccaccccttcgcagtgcccaggcgacaacccactgggcttggaaccgaaaagacttccccagctctgtgtgtgtcgtttagtgt

SEQ ID NO: 336962 - DNA, 122 bp, Homo sapiens
cgtggaatccgcgtagaagggcgtctgcccatagaacatttcataggcgaatacacccagcgcccaccagtcacactcgggcccgtagctgcctgtcccaggcccaccgcccacagcctgca

SEQ ID NO: 336963 - DNA, 122 bp, Homo sapiens
ggaaaatggggattattacttgtggctcatctttcctccggtttcccctcaggcacagaccggagaattcactacatgatcagcaagggtggcagtgaagctcttctgcagaccctggtaga

SEQ ID NO: 336964 - DNA, 122 bp, Homo sapiens
gtgtgctggggctctggaataaagtatagcttctggagcttttcttctcccaggccagatcgatgccctagcatcacaaagccaaggttgccaaaatccacatatctatttcgcttgttgct

SEQ ID NO: 336965 - DNA, 122 bp, Homo sapiens
accgcttctttacaagcacgacttggcacggaagaacttcccgctgcgcctgcgcctgtgcgtatgaggtcgacccggacgagattcttcgtcgccttggcccaaatcccgaatgctctgag

SEQ ID NO: 336966 - DNA, 122 bp, Homo sapiens
ggtctgtgtttgttctggttcgaactgagctttcactcgccgtccaccactgctgattgccgtcgttgtagaagccaccactgacttccacccctccggatccggcagggtatccgctgtgc

SEQ ID NO: 336967 - DNA, 122 bp, Homo sapiens
ccaggacccctgggggcagtggcagccgctccagccagccgtcatcgcctgggcccgcagcgctgcccacagcctgggttgagccagcccctgcccttgaggcatttcctcctccgtgtcag

SEQ ID NO: 336968 - DNA, 122 bp, Homo sapiens
agtcccgccccgaagccgtgcgtggccggggccacagcgtttggggtagatgacgtcacgcggccgcgggcgctcgcttggtagggtgtgctggggcgtagagtttagggtcctgaggctgc

SEQ ID NO: 336969 - DNA, 122 bp, Homo sapiens
ttacaacatcatgacaggtgacaacgtgctagcagccctcgctcgctctccgcgcctcctcgttctccatgtctgctctggccgcgctccaggagcccttcagccccccgctgcgctgtgag

SEQ ID NO: 336970 - DNA, 122 bp, Homo sapiens
actgctggctgaggcgcagcacagccttggttaaatccttaattgcgcgcttacgcacagcggggtggatctggttctattggccagggcctcgggagcaacagtaacaccctaactcgtcc

SEQ ID NO: 336971 - DNA, 122 bp, Homo sapiens
gactactgtacacattgagagcctcctgaacaggtagtctgaacactgggttggcggggccggctatccatcctgcagaaccccccaggcagacgctggggccaccaggccaggccgtgcct

SEQ ID NO: 336972 - DNA, 122 bp, Homo sapiens
ggctgcaccctgagggtccacatctaggtgtctgagagcagaggttggagggaggggagccgaggggcccagatcagaccataggggcctggggtcccctgaaaggacattgctgccactgc

SEQ ID NO: 336973 - DNA, 122 bp, Homo sapiens
actttttcctatttaaggccaaagcaaaggaatctcagtggctgagttttatgacgggcccggtgctgaagggcagggaacaacttgatggtgctactttgaactgcttttcttttctcctt

SEQ ID NO: 336974 - DNA, 122 bp, Homo sapiens
ccatgggcttcacctcctgcttgtggacgccctcccagcagctcctaagagcccaagatgcggcgggggtctctgcttggtcagcaccaaccacagcaacacgctagaacggtttacacgct

SEQ ID NO: 336975 - DNA, 122 bp, Homo sapiens
ccaaggcttgaggctctggccaccctcgtgtcttgggccctgacttgctcctggattccacgtgtccaactcaggcctgacttgaggaataaatgaatttgggagcagactttaacattggg

SEQ ID NO: 336976 - DNA, 122 bp, Homo sapiens
acagaggggcctgggccggcgcgccggggcccccgcccccagcccctctcccctgcgggacgctgtccctttaataggctcccgctgcctggcgctctgcggctggggagtaaatttctccc

SEQ ID NO: 336977 - DNA, 122 bp, Homo sapiens
aaacacatatttttctagtgatacatgcaaagaaaactcaaacagggtgagggcacagagcgttccctcagaaccctggacatgctattctggtggcctcagtaatgcagtgatactgtatg

SEQ ID NO: 336978 - DNA, 122 bp, Homo sapiens
tcattacttcctttgactctgctgcccaagtaagaaacctatttttctgaattactttaccggcacccagaacacgtgttccattaattaattataggccactgatgatccctttaaaacaa

SEQ ID NO: 336979 - DNA, 122 bp, Homo sapiens
aaattgtcctccaaaatggctgccctaatttatacttccatcaacagtgtagaagaatgtcgtgtttctccacacccttgtcaacactaaatatgacaaaaatttcagtttgtaaatacaat

SEQ ID NO: 336980 - DNA, 122 bp, Homo sapiens
atgggcctccagtgcctcctctggagctcactacccagactacagcagcgcagtgggcagcgcctcagctccttccccttctgctgcctacagcctggacaggacccggaatcaaaccgcag

SEQ ID NO: 336981 - DNA, 122 bp, Homo sapiens
gcctcttgccagggcctgggcaccatatacccaccgcccgcgttctctatctgcagggcccgggcaccatgtacccgccacccgcgatctctgtctgcagggcccgggcaccatgtacccgc

SEQ ID NO: 336982 - DNA, 122 bp, Homo sapiens
caggcggtccctgggcaagtctcctggttcctgagcagctggtgctgtgtcctgggggtccgatttagatcccgggggcatgcaaaaatacagctgtgatactctacagttctgatgggaag

SEQ ID NO: 336983 - DNA, 122 bp, Homo sapiens
agaaatgtaagtcctcactgttttcccagagccaacttgcacatgtctttttgatttcgtcgcctttcaatgtctctagggattttatcttaaaacctttagtggttctttcctaaaaagca

SEQ ID NO: 336984 - DNA, 122 bp, Homo sapiens
cagatggggaacaagaggagggagaaacactcactcggaaggatgacaagaaccataaggcggcgattgtagcctggggataacatgaagcattcatagatctgttctactatactcaagga

SEQ ID NO: 336985 - DNA, 122 bp, Homo sapiens
gcacctagaaccctgccagattcaggggacacagcatcctgccgttttcctgccgtcccccgcccgccacacagtaggcgctccagtggctcggggcatctaccaggcaggccgcgctgtcc

SEQ ID NO: 336986 - DNA, 122 bp, Homo sapiens
aggcaccctggctgggcatccaaggctgcagtacaagcaggtgcacccaggctggggccccggaagaggccagcagacaggggtgcacttaggtcagattggccccattccatgggcatgat

SEQ ID NO: 336987 - DNA, 122 bp, Homo sapiens
tctacatgctctagctgggggtggggaaaagtcataaaagcattctatgctggaccggttcgtgttaagtctgagttcctcaatcgctggctctcaggagctgtttggaaaattcgttgcca

SEQ ID NO: 336988 - DNA, 122 bp, Homo sapiens
tatttatgtatttcttgtaatttttgcttcctgaaccctattccttttaggttctctctacgtttgctgttttggtctctgactttgatgtcagaagcgatcctccaatatctaatcatctt

SEQ ID NO: 336989 - DNA, 122 bp, Homo sapiens
ggcccggcaggaggactccaaggagctgcgcgccctgcggaagatggtcagcaacatgtccgggccctccggggaggaggaggccaaggtgggcccgggcctgcccgacggctgccagcccc

SEQ ID NO: 336990 - DNA, 122 bp, Homo sapiens
tttagaatttaatgtagtttactgagataggccctgtcctacaaattatgttttgaaaaccgtttttcattgaggaatgtggtttcaaacatgataaagagaattctgatgtgtgaataaca

SEQ ID NO: 336991 - DNA, 122 bp, Homo sapiens
agtccagcagaacaccagcctttctgccagacccagaaggcctcggattggttgtgtttccggatccctagagtcccaggcaggtgcgggaggcatgtgggacctggggcccctgtcggggc

SEQ ID NO: 336992 - DNA, 122 bp, Homo sapiens
gccccacagagcctgcctgctgggatgtagaggaggggggttccagcccctcctgtcccgcgtcaggtctgtagcacacaagctgcctgcccagggtcctcaaatcagctgtcttcactctg

SEQ ID NO: 336993 - DNA, 122 bp, Homo sapiens
ttttttcaaagtaagtgcttcgggccacaggacactcagctaagagcatccagggggcaccgagaggcaagaagcagggacgggctgtggctcgctagcccacccgctcccaagattcaact

SEQ ID NO: 336994 - DNA, 122 bp, Homo sapiens
cataatttcttttacacagtgttatgagactgaatgacagaaattaaaagaagtgttctacgaaggcaaagttaggtttcttatagcaggaagggagatgcacacagagaagtgggaatctc

SEQ ID NO: 336995 - DNA, 122 bp, Homo sapiens
gacctaataaggcgtggaactaaaaacatcgatgagttatcaatcttactctcctgtcaacgatatgatgctgtaatcatacggtacttttttttctctttaaaacaacattttgttttgtt

SEQ ID NO: 336996 - DNA, 122 bp, Homo sapiens
agcaattcttctccctcagcctcccaagtagctggtattacaggcctgtgtcactacgcccggctaattttgtgtgtgtgtgtttatagtggagacagggtttcaccatattggccaggctg

SEQ ID NO: 336997 - DNA, 122 bp, Homo sapiens
tttcattggatgcctgtgccttcggcacatggagttccagtgcttgcacaatagtctgcacgtgcaaacacaaagctcggtggtctgtgagtggcatgtggcttcaaaaggtctgtgtcatc

SEQ ID NO: 336998 - DNA, 122 bp, Homo sapiens
acgccttgctctcctggactacacagatactgtgcttcttacaaatggaaggcttgtggccgtcctgccttcggcgaggcaccatgttcccaacagcatgtgctccctacacggctctgtca

SEQ ID NO: 336999 - DNA, 122 bp, Homo sapiens
ccgggacgtaccaactgcgcgggaggcgctgaccgcccgtgagccggctcgcaccttgcgcggtctcagttgcttgcgctttgggggaaagcaaggagtaacaacagactcagagatagctg

SEQ ID NO: 337000 - DNA, 122 bp, Homo sapiens
tccagccctggagaagcccctgcagggtttttccatgccaggcagggacctcacactgaccggagtgcctgagagaaccacacatgccttcctctaccctgggctttctctgctagggtgag

SEQ ID NO: 337001 - DNA, 122 bp, Homo sapiens
ccgagggtgcactggcttggggcagaagtctctggatggctccagcctgtcccgcggagccggccccaccactcacgtcttcccaccggaggccagcacctcgaggagcagagaggagctgt

SEQ ID NO: 337002 - DNA, 122 bp, Homo sapiens
cttaccccgcccgtatctcccagtgaccccctcctcaccaaaacggcaccctgggagccgcggagcgccacggtgacccttccaactgcctctggagtccaaatccgaaccggtccgcggcc

SEQ ID NO: 337003 - DNA, 122 bp, Homo sapiens
ccaagttaccaaatttattccccatgcattatgccttacagcgttggcatataagaaattcgttacttgtgccacttcaagaatgcccatgtcatctgaacacagatttttatagtagctag

SEQ ID NO: 337004 - DNA, 122 bp, Homo sapiens
cgaggccagggctctccaagcggtttataagagttggggctgccgggcgccctgcccgctcgcccgcgcgccccaggacccaaagccgggctccaagtcggcgccccacgtcgaggctccgc

SEQ ID NO: 337005 - DNA, 122 bp, Homo sapiens
tgagctgtgtagtgtgtaaatactcctttcattagctggcctattagaaagcgtaacccccgagccaggacttattttgccccaccttctagaaaataccgtgacttcatgttgaaggtgcc

SEQ ID NO: 337006 - DNA, 122 bp, Homo sapiens
gtcacccctcacgttgcacaccaaagacataccctagtgattaaatgctgattttgtgtacgattgtccacggacgccaaaacaatcacagagctgcttgatttgttttaattaccagcaca

SEQ ID NO: 337007 - DNA, 122 bp, Homo sapiens
tggggcaccgccacctggctgcctgcgctttaccccttgctgagggctgcgtgagctggtcgcggcgccagacacggcgcaggaaagtgggtgagcgacccccggctcccgcgggcgccgcg

SEQ ID NO: 337008 - DNA, 122 bp, Homo sapiens
cattttgagaaactctgatgctgaaaaaataaggaagaacaatctgactcctctctcaaacgctgacattctagctgagtgttgattttttcttagaaaaacaaactttgggtcaacaagga

SEQ ID NO: 337009 - DNA, 122 bp, Homo sapiens
cggcacccacctcccctctgctggctggtcttgctccagacacccgccccctcctccccccgcaaatggccacagccgcctggaaggaaattacatatatccaggcatcagcctggtggtta

SEQ ID NO: 337010 - DNA, 122 bp, Homo sapiens
cctgtcatcctgccctttcctctcctgcttcttctgtaacaagaggcaggaaggagcccgcgggagatggggagactcggaccagcctcaccgtgttgccgcacacccttgcctgcccctcc

SEQ ID NO: 337011 - DNA, 122 bp, Homo sapiens
gccccccgccgggccaggagggcggagctggagagtcggcgtgaacgcgcttcccaggcgcgcagcggttaccatggcagcgccggcgcagagcgtagaccgcagggcccagggcggaggcc

SEQ ID NO: 337012 - DNA, 122 bp, Homo sapiens
actatcaaaaatagtactattgtcttccccgctgggtattggaaacaacaacacaaggtgcgtcaaaccacctgctacatttcagggaatgttatcttctccccccatcccccggccccgga

SEQ ID NO: 337013 - DNA, 122 bp, Homo sapiens
tggaacatcagaagggacaaactcgggacacgccgccattaagaactgtaacaaacaccgcgagggtctgcgtctttattctcgaagtcagccagaccgagaacccacgaattccagacaca

SEQ ID NO: 337014 - DNA, 122 bp, Homo sapiens
tcacactgcatcctctcagcatcctgagagcttcctcagagcataatacatggaggctgccggggatataacttctaatgaaacagctgaaaagtaaaatgagtaaagataacagacagtta

SEQ ID NO: 337015 - DNA, 122 bp, Homo sapiens
ggtcgccggatccgcccaagtggaattcccaagatgtttcccggggagcagcctcaggaacgcgcctggaccccaggagtagcttcccgccccgctgccgagcctcggaggtctccgcagtt

SEQ ID NO: 337016 - DNA, 122 bp, Homo sapiens
agccaccgcgcccagcccctggtgccttctttaacactgggtgggaagagagtgtcctggcgaggcctctgcacaccgactgcatttcccagatccaaactaataacctcccttgccccagg

SEQ ID NO: 337017 - DNA, 122 bp, Homo sapiens
cggcgaaggtctgcagcttcactcctgaagtcagtgagaccaggaacccacccagaggaacgaacaactccagacgcgccgcctttatgaactgtaacactcactgcgaaggtctgcagctt

SEQ ID NO: 337018 - DNA, 122 bp, Homo sapiens
tataatctgcccttagttaacatgtcaccaggtattatcaaccttgttgctgcctctccacgcccactccaggccccaaagctcttctcattctgtaccctcaccccaccctgctccaagac

SEQ ID NO: 337019 - DNA, 122 bp, Homo sapiens
gacaggagccaggctgccgtcatctctttatttgctgccagcagagtccaccaagcctgccgggcagccctgctgcccaccacggtggggtccaggcccagcccaccaccccgtggctgtct

SEQ ID NO: 337020 - DNA, 122 bp, Homo sapiens
ctcccggcggagtgcagggtcatcgggagccccggacggctttccccagctcgcgctgcgcggactcgccccggagcctcagtgcgcctcggagaaacgcctgccccagaaagggagggggt

SEQ ID NO: 337021 - DNA, 122 bp, Homo sapiens
tggtgaaggcagagcagctccttttctccgtgatgtgtcaggttgccggatactgggctccggtccctggcctggagggtgggatgtggagggccaggtgggtcctggaaggagctttccac

SEQ ID NO: 337022 - DNA, 122 bp, Homo sapiens
agctcgttctgactgacaagtctacggaacctcggagtcaaaagaaccgccataagctcgcgcgctggctcctcccctggcaccatagccccgccccacctgacacccggggcggagagaag

SEQ ID NO: 337023 - DNA, 122 bp, Homo sapiens
attgtaaccccattcccgatcagccggtgggagccatcatcggatcccaagaggagtccgcgcagcccagccagcaccccgaaggtcctccttcaccgggaaccaaagcaggagaccgatca

SEQ ID NO: 337024 - DNA, 122 bp, Homo sapiens
aaaagtcataagaagcccaagtgattctcaatcctcctttacagaggcagaaacagaggccggggaggttccgccctgacccacgatggcagaggaaggggagaggggtccctgatgcagtc

SEQ ID NO: 337025 - DNA, 122 bp, Homo sapiens
cactatgtcagtgcccaggcagcaaggccctgcagaggaaggctgggtcaatgccgttggcggcgacacagcagccctgggaccctccccgccctgccgacttacccggggcttggcctcga

SEQ ID NO: 337026 - DNA, 122 bp, Homo sapiens
cctcggcgaccccgggctcccgctgctttgcgtcctcaaccgggaagcacctgccggttccgcacggtccctgcacccagcgtaggccacgtttttgcctgggaaaatccacaccgggatgc

SEQ ID NO: 337027 - DNA, 122 bp, Homo sapiens
ggtgctcagcacagtcctgggagccgtttgccgactcaaggcgcctgtcctggtttctcccgccaggcccggccttcccccgtacactcacgcggcaacccccaggcgcgggtttggacagg

SEQ ID NO: 337028 - DNA, 122 bp, Homo sapiens
caaccgtgcccggcctctattgcttttttaaaagcaatagctggtgacctgacttctcaccggccttagcactccacgccccagatgtggcccaggaaactctttggaactctctactccag

SEQ ID NO: 337029 - DNA, 122 bp, Homo sapiens
ggcatcacctcatcagtgacggaccaggaaggctcctgcagcccagcaggtcctgctcgccggtgtctgccctgcccacccagtctcgtctccgggaccccaaacgtgaccaaagggcacgg

SEQ ID NO: 337030 - DNA, 122 bp, Homo sapiens
ctactaaagttattcagtgtgcttggctctatatcactttgatgtttttctccatatactcggtcgttggctttcttagttcattttacatttactgagtactccttagacgctgtgggtac

SEQ ID NO: 337031 - DNA, 122 bp, Homo sapiens
ggggctgtagttttctggggctaaatgcacgtgcctatcctgtacagaggctaagactgccgcaaggagagccttagggctccgggaaagaggaggtgggcgtccagctggtggcaaaaatt

SEQ ID NO: 337032 - DNA, 122 bp, Homo sapiens
gaaacattgccttctggcgtagtgggtcgtgggtgaggccgtcgcagaaggagacgacgccgtgggggaagttgtgctgcgacagccatgccaccacgcggtgcttctgcatatccggccgg

SEQ ID NO: 337033 - DNA, 122 bp, Homo sapiens
taggaacgcctttaagtggttttccgccctgggtgggccaggttttccttgcctttattccggtaaacccacaaccttcagtgtgggcgtcatggccatcatgagcatgtcacagtgctgca

SEQ ID NO: 337034 - DNA, 122 bp, Homo sapiens
tgtctcacgagtgtcggtttttcctgtccagggccctcccaaagcgcccacgttgtatttcgttgtctccctgccttccagtctctgctgcagtctttcaggacccgagcacttgggaagtg

SEQ ID NO: 337035 - DNA, 122 bp, Homo sapiens
ggaagtgtgaggccagtgctgggagggcagggtacatggggcgcaggggaagtgagagtccggacaggcccctgctgcgtctggcttctctcaggctccagcctggggtctcctcagcctgg

SEQ ID NO: 337036 - DNA, 122 bp, Homo sapiens
agatctgggaattcggaggcctggggtccaggcctttggctagtttcatcttgccaccctcggcttccatttctcattcagctcggtagaggagatcaccttttaaggtccctcatacggcc

SEQ ID NO: 337037 - DNA, 122 bp, Homo sapiens
ggttcacaacagcatcacggctcctctgacagctcactgcagcttctcacctcggcagggcgaccacagttgtacaatttgtgcttgacatggcaacaggcaacaagattcccattttctaa

SEQ ID NO: 337038 - DNA, 122 bp, Homo sapiens
ttcttccccgcccccaaggcgggcgcgcgggaaagccacgaggccccaggagtgcgactgcggtgcctgcggtgccggtgttttgtttgattccctgcctcaaacggagggaaacgaccttc

SEQ ID NO: 337039 - DNA, 122 bp, Homo sapiens
ggagagaacacaaagaaaagctctctccaatccggtcagagccgtggcggcgcaggcaggcgacagtaatccacctcctgtttgcttaaaaagtcgagcaggctggtgagaaaggaacaatc

SEQ ID NO: 337040 - DNA, 122 bp, Homo sapiens
tgacatccagcatatttctgttttgttatggcaggaccttgttgctcgcctggatgaactcgggggcgtgtatctccagtttgaagaaggactggaaacaacagcgttatttgtggctgcca

SEQ ID NO: 337041 - DNA, 122 bp, Homo sapiens
ctgtctcccatgccctctgccctctccctttctccctggctcccgccctgtctgtgctgccgtggtcctggctgtgcctctgtccctgtgtctgtttccagggtgccccttacgcgtcagcc

SEQ ID NO: 337042 - DNA, 122 bp, Homo sapiens
ccatcgggcaaggtggaagccgcagagatcgtcgagggcgaggacagcgcctacagcgtgcgctttgtgccccaggaaatggggccccatacggtcgctgtcaagtaccgtggccagcacgt

SEQ ID NO: 337043 - DNA, 122 bp, Homo sapiens
tttcctgcaggcactcatttactcattccacaagtgtctgccaaaggcctgctagccccacgcactgtgcaggctgtgcagacggattgcagacgcagccacaggtcagcacaggagagtga

SEQ ID NO: 337044 - DNA, 122 bp, Homo sapiens
cccaacccaggctcacaccacctcacctggaacaggtcccactagtttgtcttcatgcttcgtgtcccctggcccaggtatgtgcacttcccatcagtcttcctgaagcacagtcctaattc

SEQ ID NO: 337045 - DNA, 122 bp, Homo sapiens
caacccttctccacactccccattgcaacagaccatcatcattatcatcactagcatcatcgccatcatcatcatcctcatcatcatcatcatcctcatcatcatcaccatcaccagcatca

SEQ ID NO: 337046 - DNA, 122 bp, Homo sapiens
ggactctcagttgtttttgctttgggacctttgactgtcagtctcagcccagcaatttaacgtatttttctagattaaacagtgttgcttctgaattcctcccttggaccttggactgctgg

SEQ ID NO: 337047 - DNA, 122 bp, Homo sapiens
tctgtagctcctgccaaatgggtcaaatatcatggttcaggcgcagggagggtgattgggcgggcctgtctgggtataaattctggagcttctgcatctatcccaaaaaacaagggtgttct

SEQ ID NO: 337048 - DNA, 122 bp, Homo sapiens
tggcctctacccactagataccagtaacactccccacaacaggttctaacacccaaaaaacgtctccagtcattgctaaatgctccaggggcaggaagaggcaatattaccataggttaaga

SEQ ID NO: 337049 - DNA, 122 bp, Homo sapiens
ggagaggacacgtccctagtcccatttcacagatgaggaagttgtggctcagaaaaggggcggtaagcggagaaacccaacacttattggtcctcttctgtgttctgggtgctatatacaca

SEQ ID NO: 337050 - DNA, 122 bp, Homo sapiens
ctctaccgggcccctcttctccagcagctcagtttgggaggcagcacccgtcttgggagacgcagggcaggcagtaagcctggtgctggaggaagagaagggggaagaaaaggagaaggggg

SEQ ID NO: 337051 - DNA, 122 bp, Homo sapiens
ccctcctcttggaccccaaggccaggccggatccttttatcccgtggggagcccctgcctcggccatcgggatgaggtccctcaagtccctgcacaagcaggtcagagacccacccacatgc

SEQ ID NO: 337052 - DNA, 122 bp, Homo sapiens
gtgacactggacactgagccacacacgatccgtggggactgaaggctcggccccccgacccgctctggtgggtggcagtagatcgggacgcttctcactccaggctctttcccggtccctgg

SEQ ID NO: 337053 - DNA, 122 bp, Homo sapiens
tgcccggaggcgggaggcggccggcggtcctcggggggttgagggtcacctgcaggaccacggcggcagcccggggacggggccagccttcgcgtccgagctcaggggcggcggcagcagct

SEQ ID NO: 337054 - DNA, 122 bp, Homo sapiens
agtggccactgccccgtcacaggtcatctacaccctgtctgctctgtcctggaccccgatcgcccagaacagggggatcatgtgagtaaccacctgggccttgggccatttagccccagtcc

SEQ ID NO: 337055 - DNA, 122 bp, Homo sapiens
ctcacggttcctccccagggagcctgcgtgagaaccccccatccctgtcccgaggccaagcgccatccacactgcccctgcgtccgtccgtggatgcctgggtgctccccgtgttggctatt

SEQ ID NO: 337056 - DNA, 122 bp, Homo sapiens
tttccggttggtgcagtgctctctggggttctcccagggggactgtcggtgaggctgcggcgcccgagaccgctccacgtgcagctccacggcgtgcccaccagggggcgcggcccgcatcc

SEQ ID NO: 337057 - DNA, 122 bp, Homo sapiens
atgtcattcctgtccccaacatttcagatccccctctcctgctatgtatttgctccacagcgcttgccaccactgggcacgtgagacagttatttgtcaagtttatggcccggctatttact

SEQ ID NO: 337058 - DNA, 122 bp, Homo sapiens
gaaactgtctgtcatgcaccacggtgtctgtgtccacacagtaataaacggtttactgtccgcaccctcgggctcaggccctcgcattggtccatcacgctccgggctggggatgccccttt

SEQ ID NO: 337059 - DNA, 122 bp, Homo sapiens
gaagcgcttgtgggcatctgaagtctgattaggctccttggagttgcaaggaagcagcagcggcccaggccccaaaggcacagagagctcaaggcggaggagttagctggacgctgtcaagc

SEQ ID NO: 337060 - DNA, 122 bp, Homo sapiens
ttataatagaaacacaagcataaaattgttggttctctgcatagagtcactggccaaaggcgttaacatcccattatgtcattggccgaaaactgccagctacctttgtagagaggaaagtc

SEQ ID NO: 337061 - DNA, 122 bp, Homo sapiens
tttctcatgtatttaaaattaaaaccatatactctacggaagatgacgtcatcacagattcgggaagaaagaaacactttctgttggttttgatatcacatctctcaaatgagaaggaaaca

SEQ ID NO: 337062 - DNA, 122 bp, Homo sapiens
cagtggcctggctcactcccctccttcctgcagggcagaggccatgtgcctggcctgagccggcccatcctggttaccaagcacggatgtgtccatcaagccctccgggaacggtgagcgta

SEQ ID NO: 337063 - DNA, 122 bp, Homo sapiens
gagggcccgcacctgctaagcatgcacgcggcaggctcacctgaagcccgaaagtgagcccgcacaacgcacgcacatgagcacgcacgcgcacgcacggaggctcgctggaagcttggagg

SEQ ID NO: 337064 - DNA, 122 bp, Homo sapiens
gcctcactggcaggcattttggagacagttcagacatcgcgagtacacattcctcagcttcgcctcacactctccaccagattggtattaacgctgggagcgtaaaattggaatcggctgga

SEQ ID NO: 337065 - DNA, 122 bp, Homo sapiens
gagctggcagctcccgtctctccaggccccacaacaatggggtttcctgctttgtgaggacgtctaggaccagtgagcgctcaagcccgtccatcggccgccacgaggcttcacgttggtaa

SEQ ID NO: 337066 - DNA, 122 bp, Homo sapiens
gcagagtggctccgtccgtctgctcgtgggtggtcagcaggacagccggctgggtcattgcgcccgcctcgctcggacaccgcgaggactgagggggggcgatcagactgacctggcgcagg

SEQ ID NO: 337067 - DNA, 122 bp, Homo sapiens
ggaggagtgttcagactcaaccccctggggcttccacagtcagaatctgctaacttgtcccgcacaactctgtgaggaaatctcagctcctgccacatggtcatgacccagtgtacctccca

SEQ ID NO: 337068 - DNA, 122 bp, Homo sapiens
cgttgtcactgttaagcataaagcttcaggaagttatgggttcctgtagattaaaccagacgttctgtccatagacaagaaatcacaggctttgtagaccagaggaggactgagaatatgtt

SEQ ID NO: 337069 - DNA, 122 bp, Homo sapiens
cccgacctgcgcagggagccgcccacctccagccgccagcggggaggcgccccagagctgcggagctgcagacccgccgacggtctcgcgctctgatttcctcaccgtatgaaatgaaattc

SEQ ID NO: 337070 - DNA, 122 bp, Homo sapiens
caatcactgtactggaggaggtatgcctggtccattatatttccaagcataattaattgtcgtatctgtgttacctcagtactttgcacacaattctggtatttcacttaccatactagata

SEQ ID NO: 337071 - DNA, 122 bp, Homo sapiens
gcctgggtgacagagcaagactctgtctcaaaaaaaaccgggcgtcaaggaaggaacccgcgtgcgcccttagcctgctctgccgaaatgagccatgaactagtcccagccccgcagtgggg

SEQ ID NO: 337072 - DNA, 122 bp, Homo sapiens
cctgccgacctctgtgtccccaggagagagcgagccagccagccggggagacagctacagcgtgtgtcaccacactggcccccgcccctgccccgggctggggagcaggcccaggcgcgatg

SEQ ID NO: 337073 - DNA, 122 bp, Homo sapiens
gcggcggtctgggcgctgcaggatgcgcctggccgcggaggagacgaccagggagcgggtcgccagatcaagatctgccagtgccactacctctgcttatctccaggggcaatcatcggctg

SEQ ID NO: 337074 - DNA, 122 bp, Homo sapiens
aaaacaggaagacccaaggccagtgacccccataggcctgaggcttgtgcaggcagtgggcgtggggtaaggcttcctgatgccccctgtccctgcccagaacctgatggccctcattagtc

SEQ ID NO: 337075 - DNA, 122 bp, Homo sapiens
atatatataccaacagatgggcagtagtcaccaaggattccaaaaaagatctgtggtacacgaatctgttagtgttcctctagcactgtctaggggagaaacagaatagtggagaaaaaaga

SEQ ID NO: 337076 - DNA, 122 bp, Homo sapiens
gcagggacttagcggctggggtgcaggttaactcctgcccaactcttggggacagggacccggggctgggccctgctcaggtggctctctccttgcagggaccggcgatgctctgcaggctg

SEQ ID NO: 337077 - DNA, 122 bp, Homo sapiens
aggtcgtgggtgactgggggatcttgcttctttcgggtgggctcttgggcagggcgggagcggccaaagttcatgttggtgaagccacccattcccatagggaagccagagaatgggtcagc

SEQ ID NO: 337078 - DNA, 122 bp, Homo sapiens
gtctgcctgtgtggttttaataaaatacagcatccgttgtgaccgcttcctttgcaccggcgctctgttaccttgtgtcggtcttctgctgaattcattttcgttttcttggttggttttct

SEQ ID NO: 337079 - DNA, 122 bp, Homo sapiens
tccgatctagggggatgtccaggctgccggcggagcagagccgataacccccctctcctgcgcgttcccctgagacttggcctccgcaacctgtcccagccgcggagcaaactgctctgcgg

SEQ ID NO: 337080 - DNA, 122 bp, Homo sapiens
cggggcagcgcggggccccgacggggagggtccatggcgaggcttcacctgctgggagagcgatcccggggtttcctgtttgggctgagaagatctagggcaggagagaagtgagatggatg

SEQ ID NO: 337081 - DNA, 122 bp, Homo sapiens
tccggtccccctgggagctgtcctgcggtctacgttcccccgaggtgctgggactgcggccgcaggttccgctgtctcgggaaccgtcgtatccctcggtccggcggcggcggcggcggtag

SEQ ID NO: 337082 - DNA, 122 bp, Homo sapiens
gttcccagaatacgcttgaaatttccatcaatctgtttaggtataagcagcattttggaacgtatgtatggcaatgcccatgagaaggtgaggagaggagaggcctgggctggctgggagct

SEQ ID NO: 337083 - DNA, 122 bp, Homo sapiens
ttggtaatttgtccttttattattgacatacaagagtttgttttggttttgtttgtattccggatactagagcccgagaagatatgtaattggaaatattgtctctcattatgcagcttaga

SEQ ID NO: 337084 - DNA, 122 bp, Homo sapiens
ctggcgtgtgccgagccatggtggggcaggcaggcaaaggtccctgtctcaggcagccctcgggagtgggtgtgaaggtccccagtgctcaggcgtccctgaggcttccagctgaatctttc

SEQ ID NO: 337085 - DNA, 122 bp, Homo sapiens
ggtgggtgggggtggcttgaagagggcccaaaggcttcaatgaacctcttctccagcagacgagaggactagcctgggaaatcactagtgctactcccaccttcccagattttttgttcgtt

SEQ ID NO: 337086 - DNA, 122 bp, Homo sapiens
agattatgaaagcttgggagaccgcatttcccagacacctccacggggcctacacttccacggggcctacaactcccaaacacccttgggccactgacgtcttccggaaacgtgcacttgca

SEQ ID NO: 337087 - DNA, 122 bp, Homo sapiens
aatgacctagcccaggcaggattttgcagctggggtaacgttttcagtggtgctatgtggcggaggtggccggcagggtgtgtgtgaggctgagtgtggggctaggagaaagcggagattcc

SEQ ID NO: 337088 - DNA, 122 bp, Homo sapiens
tcggaggctcctccccggggtggccgcgcaggaagcggggcgggtgggggcggtgcggggcgcgcacggggccggggcggcgggggaggcgcgggcctgggcggccagccccggcgcacagc

SEQ ID NO: 337089 - DNA, 122 bp, Homo sapiens
ctttgaggtatgctccctgtctggacactccaccatgattccacagcttccctacgtgaccgtggcccaggactgtcaggctacaggacagagtaaatccaatgtctcataacagggcccaa

SEQ ID NO: 337090 - DNA, 122 bp, Homo sapiens
gcgtgaagccggctcggagcacctctagtgcccaagcctgagagcggacattggcggcagcgtccccctgcagaggggctccccagacaccagagggaccgtggctctcatcagtccaggcc

SEQ ID NO: 337091 - DNA, 122 bp, Homo sapiens
gctggtctcaaactcctggcctcaaatgatctgccctgggattacagacgtgagccaccacgcccagcccagtcctagtccttataacatcctcatggataagaggcatcctgcttttgagc

SEQ ID NO: 337092 - DNA, 122 bp, Homo sapiens
ctagagtaaagctacgtcacatagtctcccccaagttccaatgtgttagtgccagatatacggaatgcttgttgggaatgtggcttaaactgtctctactgtgacagaaggacagactgtca

SEQ ID NO: 337093 - DNA, 122 bp, Homo sapiens
ttttgcacatcatgtccactgggaaggattctcggaggtgactttatttacgtgtggcatcgtcaacacatgtcaccagcactagccagaatcctctccagagctgagtcaacccagaaagg

SEQ ID NO: 337094 - DNA, 122 bp, Homo sapiens
ataggagactccgccctccctgccttcctctcggttttctattggctagagcggagaagccgggcactgattgggcctttcaaacaaatttgcgtcccaccttccggccaatccactcccga

SEQ ID NO: 337095 - DNA, 122 bp, Homo sapiens
gcttctaaggagccttttccaccagcaagcggagcctggatggagctcatcgggcagagccgagcggagctgagcagaggtccacaaggttaatttaagttacacgcattcaaacaaaattc

SEQ ID NO: 337096 - DNA, 122 bp, Homo sapiens
cgcttctcagtcacagttagctggtggcgggtctctatccagttagcacctgccttctttcgtgttacggattaatgctggaacgtggcacggaaacttttccaaaaaattgattaaaatcg

SEQ ID NO: 337097 - DNA, 122 bp, Homo sapiens
ttccctgaccagatgaaacatcagccgatgttctaatgcccgtcccctgggcactgtccccgagagggaaaacctgttttctgaccccggctctagtcggcctctggagatctgcagctggg

SEQ ID NO: 337098 - DNA, 122 bp, Homo sapiens
agcaactgagagagctggagagggcaaccgcgccagctgtagtagcaaggtggggccagccgctcccatcctgaatgctgctatacatttcttatcagctccaaacagctctggtttaagaa

SEQ ID NO: 337099 - DNA, 122 bp, Homo sapiens
aggtcaataggaaggaaagaacgtctccaggccccggtgattggtctccgggggtcggggcggttggggcctttggagctgcggttttccatggaacggaatcctctgttccaagccggacc

SEQ ID NO: 337100 - DNA, 122 bp, Homo sapiens
gattgaaagatggagatgagttagtttggctcacactaaatttaaaatatctccggggcacggttgtgaagatattacacggagaactcaggcaattaactccgtctccagcctgggatttg

SEQ ID NO: 337101 - DNA, 122 bp, Homo sapiens
tcaatggctccgaccaccgtgggatgcgcccgggaatgggagaagagaaggggcctgggacgttcgtgcccattcaaaaccgatggctgcagagagcgcgaccaactgtctcatttcccacg

SEQ ID NO: 337102 - DNA, 122 bp, Homo sapiens
gaatgtacaaactaatggatgattctctccattactccagtactgctgggatggctcccacggatggggtctcggttgtggtagctggggacttacaaggctttggggaacaacagggaaat

SEQ ID NO: 337103 - DNA, 122 bp, Homo sapiens
ccgcggcgggccgggtctccagggaggacctgagtttttcttcacccatggtcagggaggcgccatcgccctggctttggggctggggcctccggggaggttccggtaggggcgttggagag

SEQ ID NO: 337104 - DNA, 122 bp, Homo sapiens
ctgccctctgatctgtgcaggccatacccctcccgtgagccgctcgccctcccagcgccccgctgcctcaggacggccaaatcctccccacaccgcggttaacaacgccgcctccactcacg

SEQ ID NO: 337105 - DNA, 122 bp, Homo sapiens
ctactgtgagtcactgtcatcaagccagtcctggcgttattacccaacaactccatggcacggagccacttacacccagtgctgggaggaggtgcccactcagataatactggttcttgtag

SEQ ID NO: 337106 - DNA, 122 bp, Homo sapiens
tgtatagccccgttaagtgcaccccggcctggagggggtggttctgggtagaagcacgtccgggccgcgccggatgcctcctggaaggcgcctggacccacgccaggtttcccagtttaatt

SEQ ID NO: 337107 - DNA, 122 bp, Homo sapiens
tgggtgttttattggaaatagtagagagtacactgagtgatcatgagaacaaatagaactcgtccttgtagaacatctttgattttcagacattgctgtgcttttcaagtatttaagtcaat

SEQ ID NO: 337108 - DNA, 122 bp, Homo sapiens
tgtgggtttgagggaccccactttgggaatggagggagacatgagcaggccctccaagggcgcccctagacagtgcccccatcaccactgcctgtcacctgggctgcctcgtttccgtcctc

SEQ ID NO: 337109 - DNA, 122 bp, Homo sapiens
gacacttaatacattttgatgtacggcttaaaaataaaggactgatgtaggcatttgcagcggcaaatgttgacaaaaagtgccaaggagtgacaatattagtatccgcggaaaataaagca

SEQ ID NO: 337110 - DNA, 122 bp, Homo sapiens
acacacctccctcccgtcctctaaaacagccctgttaaggacctcacggagcactgggatcgggggtcagtgggctcctgggcagtcaggctgggtgaccttcggccctggctggacccagt

SEQ ID NO: 337111 - DNA, 122 bp, Homo sapiens
ggcctcgaagcgccagcctactggcaaggagctgacatgcagcccggagtcagctccctgcggatgggctgatcctcgcgcaggctgtgcggggcgggcgcgcactggacccgccccatccc

SEQ ID NO: 337112 - DNA, 122 bp, Homo sapiens
cgcagccctgtgtgcgcgccgggccggctagctgcggggcgggggagcggcgccccagagcgccccgcctagcctcccgcgcgcagcctctaccctgctccgccacagacacacacccacca

SEQ ID NO: 337113 - DNA, 122 bp, Homo sapiens
ccttatttatggtcactttagagggtaggttttcttaatgggtctgcctgtcatgtttaacgtccttggctgggtccaaggcagatgcagtccaaactctcactaaaattgccgagcccttt

SEQ ID NO: 337114 - DNA, 122 bp, Homo sapiens
aggatgtaggattcagcattgctctttttgaccttaggccctactgcggcctcgcctggacgttttgtcacctggccctggtgcctccagacagaaccaggacgcataggtgggtggatacg

SEQ ID NO: 337115 - DNA, 122 bp, Homo sapiens
atagcgtgggtcgggtcccgtggctgagcactcctctgctgcacagcgtgggttgggtcccgtggctgagcacccctctgccatgcagatggaccacatggggttcatctcaccagtatttt

SEQ ID NO: 337116 - DNA, 122 bp, Homo sapiens
tcccagcggcctttgcggttccaacatggcggagctgacggtggaggttcgcggctctaacggggctttctacaaggtactgaccgttttgccactttgtcgagtgttctgggtgctggagc

SEQ ID NO: 337117 - DNA, 122 bp, Homo sapiens
gcggaggccgaagagttgagtccgttgctaagcaacgtaagtgggctgtgttcgcttccccgcgctgacgccctccggcttccctcaagtgcctgccaaataagacccagaaaaggaggacc

SEQ ID NO: 337118 - DNA, 122 bp, Homo sapiens
ccctccctgagatatgccttggaaatgccatacagtaagctagatagccataggggttaccgcatatgattttcttctcagatatcagagatgagatcccacacagcctgatgtccagtgtt

SEQ ID NO: 337119 - DNA, 122 bp, Homo sapiens
tgtggttaatttctagaggcagctgggtttcctgtggagaagacaggtttgcctacgcagcgtagagaggagacggctgtgtgggctccagccccaggggaagtagggcccgggggtcaccg

SEQ ID NO: 337120 - DNA, 122 bp, Homo sapiens
gaggcctggctcagttaataggagacaggtccgctggcccaagcaaagatgcgggtgccacgagggccaggcctcggccaagccctgctggggtaaatcccagcagcccaggctccagtctc

SEQ ID NO: 337121 - DNA, 122 bp, Homo sapiens
gaggcctcgtaaatgtggctgtgtgctgcatacgcagacagggacgggcccggccataggcgtacacgtacgaatgcacacacatgcacaccccagctggcacagtaacggtgccacgtgga

SEQ ID NO: 337122 - DNA, 122 bp, Homo sapiens
tgaaccccccggctccacccaccttccatcagccacagaagtttgctggagtcaacaaagcgccgtctgtcatcacccacacggcctctgccaccctcacccacgatgcccccgccaccacc

SEQ ID NO: 337123 - DNA, 122 bp, Homo sapiens
cctaattcagccacctccatcggaggcaaatcatggtgccacaggctctagcctccagcccgtggcatgtagctccttctcagggcactgggcatccgggcagacaaagccagaaaagccta

SEQ ID NO: 337124 - DNA, 122 bp, Homo sapiens
gcgtgcaagcgcaagaccaccaacgccgaccgccgcaaggccgccaccatgcgcgagcggcgccgcctgagcaaagtaaatgaggcctttgagacactcaagcgctgcacgtcgagcaatcc

SEQ ID NO: 337125 - DNA, 122 bp, Homo sapiens
taaagtgaaaattggaagaaaagcagttgtgaaggaagactacagtttttgttaaacaagcgcacttgagacaccgaagaagaatcatgtagccgccacctagcgtaggaggccttctgagc

SEQ ID NO: 337126 - DNA, 122 bp, Homo sapiens
caattttgtgttttgttggttcttagaatacagagcaacaattatgagggcatttcttaacgggaacgtttgggaagaatatacttttatcatcggtgtttagatcatatttgtccttacat

SEQ ID NO: 337127 - DNA, 122 bp, Homo sapiens
attccctatcatgcaatcacatccatccccttggtccctgctgtatatcaccctcaggaacgggaaaggatgagttacgtttattgccccatcccttcactgaatgtttacattaacaaaca

SEQ ID NO: 337128 - DNA, 122 bp, Homo sapiens
cacacactcacccaaacccacacgctccacgcggggacagcgcggggacagcccgggacccgcagagctgcgcgcacgcactccctccgggtgcagcacactccgcacccgccccgcgcagc

SEQ ID NO: 337129 - DNA, 122 bp, Homo sapiens
cacacactcactcacacacgcacgcacacacacatcctcccggcccggccgcagccgcggcggcaataaaacatcctggcacgtgctccggctccaggcgcgcccacgccggccggctgatg

SEQ ID NO: 337130 - DNA, 122 bp, Homo sapiens
ctttcttggttctagaaccttcagtaggcttttctgggttgcagggacccggaaaagcagcggcttccactcggggggcgggtcccaagggtcttgctgctgctctggggccgtttggactc

SEQ ID NO: 337131 - DNA, 122 bp, Homo sapiens
cataaaacaacagttggaaaagtaacatgtttgggctgtagcccccagcaggatcccggtcggcccgcagaagaggggaatgggcgcaggtggagggcataggaaagagagtgctcaatgca

SEQ ID NO: 337132 - DNA, 122 bp, Homo sapiens
cacgtcggccgggcccaggctcaggaagatctggtagaccaggctgtcggggagcaggggcgtgccgccctcgtccatcgtgacattctgcccaggcggccctgaaacccaccaacggctgc

SEQ ID NO: 337133 - DNA, 122 bp, Homo sapiens
caatagatagaaagtgaggatatttgtccacctactcagattttcaagatcagattccaccggtttagtagttttcagtggaggagccagtggaatttgggctcatttggaaatcttggcaa

SEQ ID NO: 337134 - DNA, 122 bp, Homo sapiens
tgcgaggggagtgcggcgcatgcgacagcgcctgcgcagtcatgtcttaagaatcctttgcgctctcggtgcccccctccacgcccaggagcgtgggaaccctgcttaagggctttactagg

SEQ ID NO: 337135 - DNA, 122 bp, Homo sapiens
cggctacgcccgaagccttccagtcccggcctcttaccctgagacctcctccgcggcccgcgcttgcccagccagctcagcccctgcagctgcagccccgtcgtcgccaggtctacctgagc

SEQ ID NO: 337136 - DNA, 122 bp, Homo sapiens
taataccttttattggaaaatgatctatcaacccgctttaacaagctggcagtcattttgcgagtacgcagttcctcggctgaaggacacatggcacagaaaggggaaatgagtttgcattt

SEQ ID NO: 337137 - DNA, 122 bp, Homo sapiens
gcagcaggagagcaattccttctccaagaaagcgcctaggggagcacgttgacttgtggccggctggacttgggaagtgggacgaatactgggggtgcacagcagtttggggcccaacagca

SEQ ID NO: 337138 - DNA, 122 bp, Homo sapiens
cctggccccgttttgaacccgggcccggcggctgcgttgggtcgccccaaacccggtgagcgtacgagactgttgcttcgctgtatgtctcatgtgcaccccctactcaccggtcccgagct

SEQ ID NO: 337139 - DNA, 122 bp, Homo sapiens
taattttctgaattttatgggatgatgcggtaagaaggcactccccagaagtgggcccctcgatcttggacttcccagcttccagaactgtgagccaaatagaagtttataaacaaacttct

SEQ ID NO: 337140 - DNA, 122 bp, Homo sapiens
ggcggacttctgcccctgaggctccgcatgccgtcctcaaggggcgccgctgcaggactgcggtctgctggcgctggtccccagatctgaaccctaaacaccggtggcctcgtggcctgtgc

SEQ ID NO: 337141 - DNA, 122 bp, Homo sapiens
tgttgttgaggtgggtaatgacccggtccacagcgtagccatcagccatctccaccatggcgcccccggcttgcttttcaggaatttcaccttctccacattgccatacaagcagaagacat

SEQ ID NO: 337142 - DNA, 122 bp, Homo sapiens
gggaggggcgcgagggtgcacgcgcggggtgggggcgcgggagccgccccctgcccgccccgcgcgcatgctcccgccgcacctgcctcgctcagtgttccacaccccggggagccgggtgg

SEQ ID NO: 337143 - DNA, 122 bp, Homo sapiens
gcaggggcccactgaccaccctcccacccagccctgcccggcctgctgccctgcaggaagcggatgccagcctggcggtcatttccgggttttgaaagcagtttttaaacttgaaagagcca

SEQ ID NO: 337144 - DNA, 122 bp, Homo sapiens
agaccaagcgcaagaattgttggagacatgttacagcttctctgccttctctcaatgttacgctgttcaggactcaggatcctgccctctgagggtttacagaagtcattctcactatctca

SEQ ID NO: 337145 - DNA, 122 bp, Homo sapiens
cggcgggggagcgacggggatgcgctcattggtcaaggaaggggcgcctgttactagaggcgagaaccggagcccattggtcggaacacctcacaatggaccccagcggcgcgcaaaatcct

SEQ ID NO: 337146 - DNA, 122 bp, Homo sapiens
ctgggaaaagttgtctatgcccagaagccagcatcaggcaaagttgcccaagacctgctccgccagccccttgcagctgggctgggcttccaggagcagacgcccggtgtcgcactgcagga

SEQ ID NO: 337147 - DNA, 122 bp, Homo sapiens
gccccgccccggctgcaagccacaagttgggccggggcggtgcgtttgggtcgttcacgacgaaatctgtcctgctggagggagggtagggtgaacaattcaagatttaacagagttccaac

SEQ ID NO: 337148 - DNA, 122 bp, Homo sapiens
cagcggggattcgcccccgtgcttgcggccgcctgcgctttcgcttcgcgccccctcctccgctggagccacacgtccccgcctccccggggatgcccaagttgcacttgcagaaagtttga

SEQ ID NO: 337149 - DNA, 122 bp, Homo sapiens
ctagtacagaagaagccaagcttgagggcacccctaggactgcgggcacttgaacattctcgtaggtgatttccccatcatcatcagcccctgggtctagagagaagagaaaagggaccaag

SEQ ID NO: 337150 - DNA, 122 bp, Homo sapiens
ttctccactgaagatccccaggaggtcaccgcacaacctgaggaaatgcatggttgcgggcgtggagctgccccaggagggctagagccaagccgaagtcaccgagcaggcacgggtagaga

SEQ ID NO: 337151 - DNA, 122 bp, Homo sapiens
gcccgagcgactcgatcgcccgagccgacctcttcccaagccttggacagctgacccctgcgcatcctaaaggaaagaccccatctgttcctcagaatgggaaaattcccgtgcatactttg

SEQ ID NO: 337152 - DNA, 122 bp, Homo sapiens
aggggggactgtcagacttaggctgacaccagtccgcttgctgagtggcggggcggccatcgctctcctggccgtcccgtacgggaaagcccaggccacaggggcacttcctcgggctcgag

SEQ ID NO: 337153 - DNA, 122 bp, Homo sapiens
aggtgtagctgttcagtccccatgtctgccactggccatgaggtcgaagttgacatttatcgctctcttcttccaccgctcattgcataatcccgttgacctctgccagcacctggctgttt

SEQ ID NO: 337154 - DNA, 122 bp, Homo sapiens
agattgatgcaactgatgcatcttcaaatttctttcttgagcagtatactcttgtccagtcgtttggcttttttgcagcagtggctgcatttgagcttcctcccggcctcaccatcccatcc

SEQ ID NO: 337155 - DNA, 122 bp, Homo sapiens
aagctttcacactgcaaacagcccgctccacctacaccccgactgggctccacgactccccgcaagtgccctgccacctcaggcacctgcccccacgcccactcagcgtcaccccctcggcg

SEQ ID NO: 337156 - DNA, 122 bp, Homo sapiens
gggggcgggccggggagaacaactgacttctgcgcggggcgcggtggggttctgcggggtcggaaagactccccagatccccgcgcggccccagacccagacttacctgggccctccctggg

SEQ ID NO: 337157 - DNA, 122 bp, Homo sapiens
caggagtggagggcggggacgggctcagcggcactttgcaggcgacaccaggatgtcactcgagactgaaagcatgaaggctgaaaatgtcggcagttccaggggacaggagggaagatgtg

SEQ ID NO: 337158 - DNA, 122 bp, Homo sapiens
cctctgcaatgacaagctgcctcccctctatgtgtttagcatatgttattagaacatgtccgacacccctaccgctgccatttgggccctttaataaagccaagtagagaaatctggcaata

SEQ ID NO: 337159 - DNA, 122 bp, Homo sapiens
tttagcaggcggtataggcaaattggatactgttttatccgtagtttcctcgtggcctcacggcctaacctggaccatcggacagcggagtgctaccaacctgtcattgatgtcattcattc

SEQ ID NO: 337160 - DNA, 122 bp, Homo sapiens
gagaagcaaacagttcacttccttggatccgtggtttcgcctgtggccttcagggggcgacgttgcactaaggaggcatctgtgttcattgccgaccatcctcatccactgagcctcctccc

SEQ ID NO: 337161 - DNA, 122 bp, Homo sapiens
ttgtgctactctgcgccctccgcttctcctgcctcctgcgcctgcctccccaccccccgccgcgtcgccagaatttcctgagccgtctggatttcctgcaccgccagtcgcctcttccccac

SEQ ID NO: 337162 - DNA, 122 bp, Homo sapiens
tgtaggaaaataggtgagttgtggtaaacttttcagctgatttactccaaccactgtgtccgtcttactgtctttgctactcacaaacataacactccagtctttacacttctcaagggccg

SEQ ID NO: 337163 - DNA, 122 bp, Homo sapiens
gtgtggtggtacagctttctcttgtcacagctgaggtccctggaggctgccccacacccccggccccacacctggctcttggcactaaggtccttggaggctgccccacgccccctggcccc

SEQ ID NO: 337164 - DNA, 122 bp, Homo sapiens
tcttcctctgttggatccctactttgttgttacacatctattcattgagcgctctgtgcccgacactgtgctggtttcctaaaactcatccaagcctcttgctttctgcctggagtgaagag

SEQ ID NO: 337165 - DNA, 122 bp, Homo sapiens
aggtcgaggttggcgaaaaaaggtttattctttcactcgccttccacacaaaactcttaacggtgagttcatggcagccttccaaggccttgcaattaaattcaagtcaacagatatttatg

SEQ ID NO: 337166 - DNA, 122 bp, Homo sapiens
cctccccagcatgccccagcctcctctccagatgatttttcttccataaggactatttgtcgtctcacacaccatccgtttcatgtttgtttgctatctgttgccccactggaatgtaaagt

SEQ ID NO: 337167 - DNA, 122 bp, Homo sapiens
cagtaatgaacatatgggccacactgccctgtccctaccaaacccaaacagaacaggtatcgtaaccaccctttagtgcaaaggtggcacttaactctcatgaatgtatcttgaagccctca

SEQ ID NO: 337168 - DNA, 122 bp, Homo sapiens
aaccaaagagactagaacctgccattttgtctcatgcaagtagcccatcctgcactgtcccgggaagccccacagcccggatggccctcaggggagcctcgcggcccttcaccgtcgcggga

SEQ ID NO: 337169 - DNA, 122 bp, Homo sapiens
gcagcggtgcgcccagtgcatcaacgacaagcttcagggcctggggctggacgcaggcagcgaaggcgagccccccacgcgacaactgctacaactcctccagcctgcccgatgacatctca

SEQ ID NO: 337170 - DNA, 122 bp, Homo sapiens
gttctaggctggaaagatgtgtcggaacgtggctgtagccacagggtggacaggaggtcccggaagcaggagagggtggggaggctgctgggaggccgagaccgcctctgggagggatgggg

SEQ ID NO: 337171 - DNA, 122 bp, Homo sapiens
ggctcctcatcccgctactcgctgggccccagcctgcgccgggggcacgaggtgagcgaacgtgtgcagagcagtgagatgggcacatccgtgctcatcatgcagcccatcctgcgctttct

SEQ ID NO: 337172 - DNA, 122 bp, Homo sapiens
ctgttatgggaacagagtcatttatggcgtgcacattgaggcacgacccatgatgttgaacgagcttggttttctcaaccacttcacatgggacggacgtgggatggggggataatgttcat

SEQ ID NO: 337173 - DNA, 122 bp, Homo sapiens
acagccagggagcccagcccttggtataggagtacaggctgaagtgcccaggggtttacccgatcccacagttttagaggcaagaagctgacatttaaggcttgaatagtgctccttttcta

SEQ ID NO: 337174 - DNA, 122 bp, Homo sapiens
ggggcgcaccagggcacctgtgcgtgcaggtggggcgggcgcgcggcgacagcaggttggcgatgccgccctgtcggccggcgggggaaggaagagggcgggagggcccacctgaagacgcg

SEQ ID NO: 337175 - DNA, 122 bp, Homo sapiens
cgttggcagaaagagctcccttgccaacaaccttgctagcacggcgttcactcccttgcccgctagcatttgctagcacggcgttcactcccttgccaacaaccttgctagcacggcgttca

SEQ ID NO: 337176 - DNA, 122 bp, Homo sapiens
gagtcctggtgcgcaggcgcgggccgccgcggcccggctctcttgcgcaagcgcgctgtccgcttcttctgggcggacgctctggaggcaaaacatttccctgctgggggcggcgaccaccg

SEQ ID NO: 337177 - DNA, 122 bp, Homo sapiens
gcatccagcttgggctgcagataacacaaaagcatggaggcaagagtggaggggagcaggcggtgtagcatcctcaaactgcagcttcgctctccgagcctcggtataactgggctgtggtc

SEQ ID NO: 337178 - DNA, 122 bp, Homo sapiens
tctatttctgccactatctctgtcccctctttgcctccagacatcagagagagctaacagcgccagagctcctaagagaaaaaataattatatacaagagatttaacttacctgatggaaat

SEQ ID NO: 337179 - DNA, 122 bp, Homo sapiens
ctagctcaggtgctctgataatcaaccaagagactgggccaacacagatgctgaggcccgcgctgcactctcctactctttccaggctgcaagtgtagcattgttattgacaattccattca

SEQ ID NO: 337180 - DNA, 122 bp, Homo sapiens
gcatgtgtgtgagtgtgtgcatgtgggccgtggggcctcacagcatgtgtgtgcacactccggcatgtgcgtgtgtgtgtcccccacccccaggcctgccccacccatgcatgtgacctgcc

SEQ ID NO: 337181 - DNA, 122 bp, Homo sapiens
ggcgccggacgcccatctccatcgcagcagcccgcgcctccttgagcgagagcgttaaagcgctcagaggatgttaggacggggtgggtagaaaacctgactcttcgtgtcttctgcgttgc

SEQ ID NO: 337182 - DNA, 122 bp, Homo sapiens
ttctatccaattctatccccacaaagacgaccggactaagcagcagccccagggtcttgccgcatcgtttcctttcgggagcactcacccacaatgtgttgggtgccacaatgcactgaaaa

SEQ ID NO: 337183 - DNA, 122 bp, Homo sapiens
acttggtcattttgtgtttcatttgtctgcatgcaggtttgtgtggagacaatgtgccctcggaacttcgagctgcaatccggtcttttattcctgcccctccctctggtgggcgtgcctgc

SEQ ID NO: 337184 - DNA, 122 bp, Homo sapiens
gggaaagggctggccagaagtgaaagtccggtcggggcgccacacctaggctgcggattccgagagactgggaggctggaggcctgggaggcgtggcgggggcggagtcgccgggggccggc

SEQ ID NO: 337185 - DNA, 122 bp, Homo sapiens
tcatcttcgctacaagaggaaggtaaaattgcgtgtgtgtgggtgagtgtgtgggtgtgtcgcctgtgggattgcatttttgcatcgtgtatttggatgcctgatcccctgcctccggtggg

SEQ ID NO: 337186 - DNA, 122 bp, Homo sapiens
acagtctctccaggataaggtgagggtgtcaggggcctgggtccccacttgcgaccccaccgggctgctcctgggacgggctgtgcaggccaggagactggcggacctaagaaactgagacg

SEQ ID NO: 337187 - DNA, 122 bp, Homo sapiens
ggacctggctctcagccatctccctaggtccagctgttatttctcgccctttagaacatgcgggcggaatgtggggcggccctgtggtctgatgtctcccggagccttctgggagtctcagg

SEQ ID NO: 337188 - DNA, 122 bp, Homo sapiens
tcacagcaggcgtaaggcgtcacgtcaggcgtaaggtgtcacagcaggcgtaaggcatcacgtcaggcgtaaggcgtcacgtcaggcgtaaggtgtcacaagctcggtgaacgtcaggggtg

SEQ ID NO: 337189 - DNA, 122 bp, Homo sapiens
accatcttccgcctcgacgccgtgacgtaggcgcccgtgaggacgcgtcgcgtcaggcggcgacccggcctagccccgtcccctccgccgcggcctcacttcctggctgcgcgcgcaggcgc

SEQ ID NO: 337190 - DNA, 122 bp, Homo sapiens
ctatgtacctggtattttctccttcaggaatatcctccatctcttcccacaatacatatccgcacataattacaatgctcatgtattaactctaatgctagataataaagattttatagtga

SEQ ID NO: 337191 - DNA, 122 bp, Homo sapiens
gctccgcggtccccttctgacagccgtcttcatggctccggggatgttgtttgccttggacgtgggctttgccacccaactaagtgccgggcctcagtctccctgtctgcgcaatggggcca

SEQ ID NO: 337192 - DNA, 122 bp, Homo sapiens
tgaatgctgtacccagcacttcatgggaaatgtgactttttaaaatggagggtgaatacgcgaagtcacaagtgtccctggaaatcagggatgtgtggctgttcacatgtcactactgggga

SEQ ID NO: 337193 - DNA, 122 bp, Homo sapiens
cttcttcctcctttaaactcttcactttgctctaacacggaagatgggggacagtgatcccgaaggtattactaaaatattgcagctttcagtaattatgagaagcacagatatcaccagaa

SEQ ID NO: 337194 - DNA, 122 bp, Homo sapiens
ccagctgcgcagggagaccgggaggtggcagatctgcggggcgcccagtcacttcctccacgttctcgtgctgggcgggaggagcggatggggcttgggaggcagcctgctctccagtccct

SEQ ID NO: 337195 - DNA, 122 bp, Homo sapiens
agcaagatgggtcaccaagaactgtactggagccacccgcgaaaatttggccgcggttctcgctcttgtcgcgtctgctcaaaccagcacggtctgatccggaaatacggcctcaataagtg

SEQ ID NO: 337196 - DNA, 122 bp, Homo sapiens
cctggaagtcaggaaggctatccttttaaggtgatccctgagctgggagtttgtttcaaacggtggggaccgcaggtagaagcaccgcttaaggggaacggcgattcgactcgcagtgactt

SEQ ID NO: 337197 - DNA, 122 bp, Homo sapiens
ctcctgacttctcaggcctggatgtactcagcaaagcagctgcgaggaatgagggtactgcgggggcaaaaggtgctgaatgagactcccagggttcagtttgaggcagcctgtggccctgg

SEQ ID NO: 337198 - DNA, 122 bp, Homo sapiens
aggagcccctgctatcacctctttgggactcagaaacttgctgccctggcctcctgaatccggacattccctgagcccacacgactctgcttccctaactcattcacctctcctgtgatcca

SEQ ID NO: 337199 - DNA, 122 bp, Homo sapiens
aagctttggccagagccaagggtgcagaggggagagctgggctggcgctgctcatggagtcgtaggagacagaaggtggcattataagtccagcgggctgagctccctgtgaggacagggca

SEQ ID NO: 337200 - DNA, 122 bp, Homo sapiens
gcaggaccctgggaaagaagacaggccagcagtcaaggggcctgaacacctcagccttcccgctctgactgcccgaactcgggtccccacccactaggtaaacttcatcctgtttatttgca

SEQ ID NO: 337201 - DNA, 122 bp, Homo sapiens
cccaggatcctgaaagctatgactgagcgtcagtccgaattcacaaatttcaagcggatccggattgctatggggacctggaacgtgaacggaggaaagcagttccggagcaacgtgctcag

SEQ ID NO: 337202 - DNA, 122 bp, Homo sapiens
ggtcgcggagcatcttctccagcacgccgctgcggccccagatgtcaaacaccgtgcgcccgtgctggtagcccacttcctgtgcacacccccagggccccgtcaggaggtgtggggagccc

SEQ ID NO: 337203 - DNA, 122 bp, Homo sapiens
tttcactctacttaatccccggccaggcttgtcacccagaggccagtgtttaagctctgacgcagcccacatcctcactgccagacctgactcctgtctgtctctccagctcagccttgcct

SEQ ID NO: 337204 - DNA, 122 bp, Homo sapiens
tgccgagagagcactcagaagccgcccgttggctttgaggacttttatcgcccaaggtcccgaggtctgggtgggaccgcaaggggttgcccctgtccccagagctgcgcccggccatcccg

SEQ ID NO: 337205 - DNA, 122 bp, Homo sapiens
cactccaatcctggagatttgctcaaattaaaccctttctatttaaaaactctggagcagcgagtgaaagcaactcactactctgcaggacaagactctgtgtgtgtgtgtgtgtgtgtgtg

SEQ ID NO: 337206 - DNA, 122 bp, Homo sapiens
ccaggccagggactgtccttatgggtagagatacactatctgcaggaatttatttttttacgtatttttactagttgatgggaaagacattgggaaagacctgggctggatttgtgatgagc

SEQ ID NO: 337207 - DNA, 122 bp, Homo sapiens
aaaagaatcaactcagagcaggctgagctatgtgaggtatgaaaacttgatcagggccagcgtgagtatgggacttcagtcatgctcccactccctcacaggacccacacgggtggggggtg

SEQ ID NO: 337208 - DNA, 122 bp, Homo sapiens
agccatgaaactggcataccacaggtctggaatgcctctctgtctctccatttgtatctccgacattagaccatttcagccactcctgcatgcagttacacccacctcatttttatcacagt

SEQ ID NO: 337209 - DNA, 122 bp, Homo sapiens
gtggcccccgcagaccgcggagacctcgccggcggccggcgcggaggtgtctgcccccgccgggcttgaaggcacttgttggtaaaagacacagacgtgtcggtgtttgcctctcccgggga

SEQ ID NO: 337210 - DNA, 122 bp, Homo sapiens
aagcactgcctgcaagggccctgctcagggtaggaatcaggggagcttaagaaatctttccggccaggcgcggtggcttacgcctgtaatcccagcactttgggaggctgaagcaggaggat

SEQ ID NO: 337211 - DNA, 122 bp, Homo sapiens
acctgggaggagggcccagctaataggaactttggacttgaggcagagtatccagagggccggcatgtggtctgcagaagaggaggacgtggctgggtggcagggctggtctccaaggacga

SEQ ID NO: 337212 - DNA, 122 bp, Homo sapiens
cgccccccggcggccgcgagtagcgggcggagcgcaagcagagaggcgctctgggctgtgcggcaccgcctctcctcggtgtctggggagggacggagggaccgggcgggagagagagaaag

SEQ ID NO: 337213 - DNA, 122 bp, Homo sapiens
gtaaacggagcccaggaatagagaaggaagtgcaggttgtggactgggcaacccccaaggcggcaaagaggaaaccaggtgagttgaggtcatctgggagatattagggctttgatttaaca

SEQ ID NO: 337214 - DNA, 122 bp, Homo sapiens
ctcaaatgtttgaaaattaaacaatagagacgccggccgagacagcgcagacagaccgaccgactggggtgtttcgtgaatgtgagaggtaagcgccgcggcctgcatttccagagctgccc

SEQ ID NO: 337215 - DNA, 122 bp, Homo sapiens
cgcagggacgtggcggcccttagaggccgggacagcgggcgcagcgtggagcttgggggccgcgaggcgcgggctcagacatccccgggtaagcctcggcggcggcggccgcgacaacggca

SEQ ID NO: 337216 - DNA, 122 bp, Homo sapiens
ttaagcctagctgaaattcttttcaaggttggtcattctcaaatgccagagagggttgcccggctctctctgctcttgccccattccattcacaacaggaggtggggaatgagctcagatga

SEQ ID NO: 337217 - DNA, 122 bp, Homo sapiens
ttttacatacaaaccatcctcccgaaggtggcacgccagccctagacacgtaggtgaagccgacagaataacaaaggagcatcgttacatcagagagttgggatagcacaccagtgttcact

SEQ ID NO: 337218 - DNA, 122 bp, Homo sapiens
tctctccagagtcccttccctgcacctccagggcctccccagatggaactggctgggagccgtgctttgttgaaacaaagggaaaacctgtctctcttgggtttgcagctgctgttgaaacc

SEQ ID NO: 337219 - DNA, 122 bp, Homo sapiens
actgagggggcagcggttcaaagacaggcacgaagaatgtaatgaggtgctcgtcctgggcgtacttggccttgaggagaaaatactcatggtgcagaatcacctcgctgtccacatcctcc

SEQ ID NO: 337220 - DNA, 122 bp, Homo sapiens
acacgggagcttctcttgaaagagcctcggccctcagaggcggcttctttgaaggacagccgtggttgtaatgcgtgaaccctgctgcgcctctttagagcaacaccaaagtctctttacct

SEQ ID NO: 337221 - DNA, 122 bp, Homo sapiens
atgtgttgaggcccacgcctccctgatgtgggggcatcctctccagagagctgctgtgggcgcctgtgaaggactcactcacagggtgcagcttaaaaaggtgactcactttcagtcagttt

SEQ ID NO: 337222 - DNA, 122 bp, Homo sapiens
cgtagcaggtgggggcgtggagagggggcggctggggagtgccttgtccgggaacatcttcggagaccatgtatgggtaggggggagccaggctcctccatcgagtccatagaactgtttac

SEQ ID NO: 337223 - DNA, 122 bp, Homo sapiens
acctgcaagacggagctgccatgagctggataagaggggctgcaggctggggcgaggccgcggccaggactccgtctgggatgctgagttttaggtgactggatattcaagaggagaggcga

SEQ ID NO: 337224 - DNA, 122 bp, Homo sapiens
gccctggctgtcaggtccttcttagagcaggttgtagctattggtcactctctgtatacacgtgtctgtatatgtgtaaatctttctgtgtttgcgtctacctatctgtctgcatcttttta

SEQ ID NO: 337225 - DNA, 122 bp, Homo sapiens
ggccggggggaatcagagaaggcaaatattcaacaagccctagatctcaagaacacagggcgctgtggaagtaaaggtcagttaggagctgtgagtctgtgtgaaaagagagtgcctttgat

SEQ ID NO: 337226 - DNA, 122 bp, Homo sapiens
ttcaagtgatccacctgcctcggcctcccaaagtgttgagattataggtgtgagccaccgcgcccagccgactgttgctgttttaaaccagtaagttttgggttactgtagcaacagagagt

SEQ ID NO: 337227 - DNA, 122 bp, Homo sapiens
gaaatatagggggctcttcctctctctccacctggcccctcaagcaccttcatcctctgccggtgcttgttttgggtaatgcgtgtcccatctgttgatgccctccgcctgctgcagtggga

SEQ ID NO: 337228 - DNA, 122 bp, Homo sapiens
gtgcgcaggtgcgctaggggcgcgtccgggggcctgtagggtgcgctctgagctaggcctcgggccccgcctggcctctggctgccaatgtggcccaggagcctgagctaaacgcctggact

SEQ ID NO: 337229 - DNA, 122 bp, Homo sapiens
gaaaatggggaagtattaaaggaagagacgattaagcccctgagagtgtggctcctgggacgccagcgtttcagaagtagcataggctcctagatggacgctgacaaacccaagtagcgcct

SEQ ID NO: 337230 - DNA, 122 bp, Homo sapiens
actcgcaacggcgaggggtcaaaaagccggggcggactaaaagccctggcgccggggcggcgggggcgcaaaaagccgcagcggcgggtgggggcagaaagccgcagcggcgatggggcaaa

SEQ ID NO: 337231 - DNA, 122 bp, Homo sapiens
gttcccagtagagggtatgatggtcctgccctgcttgtggacatttgtaatatgaaaccccggctttcaggaacattccatggatttaaaatggagactgctctgaggatatatgacccaca

SEQ ID NO: 337232 - DNA, 122 bp, Homo sapiens
ttttttttttgagacacagtctcgctctgtcgtccaggctggagtgccgtggcgtaatctcggctcactgcaacctctgcctcctggattcaaacaattcttctgcctcagcctcctgagta

SEQ ID NO: 337233 - DNA, 122 bp, Homo sapiens
agccaccgcaacgaggggtgagtctgagccaaagagtggctcagagctccccgcccacctcgtgccgggccgtccctcccgcttgtcccaccctcaccggcgccgcgtcagcccccaggccg

SEQ ID NO: 337234 - DNA, 122 bp, Homo sapiens
cgcccgcgcccgtccccgcccccggctccctgacgcccccggcctggagacgcaacccgacgcgcacaaccccagaccctgcgcgggagtcgggggtccttccagttcccagagcgagagcg

SEQ ID NO: 337235 - DNA, 122 bp, Homo sapiens
aagggcttagatgttgctgcggcttgtttctgttttcctcgtggccggcctgtctttctccgagaaaattcaaacctgggataaaaggaacacaagggagaaagatgtaatcagtacgggtt

SEQ ID NO: 337236 - DNA, 122 bp, Homo sapiens
actaacgcagaattctttttccagctctcaaaattccgcctcattgccggagtggcagggcggtgcagagaaagagccctgggcttgacaccgcttgaaaagcccacgttcgcattgctctg

SEQ ID NO: 337237 - DNA, 122 bp, Homo sapiens
ctggctttttatgtcttaccattatctctcatttgcattctcccacatctttaattatagcgtatcagttagggcccagcaggaaacagatggcccgtcaatttaggataatttgaggtggg

SEQ ID NO: 337238 - DNA, 122 bp, Homo sapiens
ctttccagcaaatagaaaacaaccgagagcctgaattcactgtcagctttgaacactgaacgcgaggactgttaactgtttctggcaaacatgaagtcaggcctctggtatttctttctctt

SEQ ID NO: 337239 - DNA, 122 bp, Homo sapiens
gcccgcgcccgcccggacttcgggacattccctccagccgcgcagcccccgggacgtaaccggcgcagcagactcgaagcccggtcttaccccgcccacccgcctgccaggcagccacgggg

SEQ ID NO: 337240 - DNA, 122 bp, Homo sapiens
ttccagaagtgctgtgacctcagctttgctgcatcattcctttgagtggggttaggctggcgtggctggtgaggagctgttgtcccaaggctatgtaattcttggtgtggggaagagtcatc

SEQ ID NO: 337241 - DNA, 122 bp, Homo sapiens
ttcggccatcttggctcctcccctacaattcttccactgtgagagttacccaaagctcggcgtctgtgatggtctaccgggcctccgaggcgatcgagcagcatcagtcttcagccgctaag

SEQ ID NO: 337242 - DNA, 122 bp, Homo sapiens
gtgtgaaactcgtgatgtgtgtggtcattggctccctggaacatccagaccctgatcgtgcgtatcgtgtttccttataagcagcactcgcgatttaaaaacaggtcccggtgcccctcttg

SEQ ID NO: 337243 - DNA, 122 bp, Homo sapiens
cagtgcgcgggtgcagttccccgccgctgcccagacccccgttggaccccggtcctgagccgctcccgctggggcccccacccccgcccggccccggtccagggcctcccccagagccccca

SEQ ID NO: 337244 - DNA, 122 bp, Homo sapiens
ccctcaaagccttcgcgtcggattaaaggtgttcttgatccttctttaccaaccacggtgcgggccaggcgtgatgagggatgagggagaggaaacctcagtagcaaaattgttcagaggac

SEQ ID NO: 337245 - DNA, 122 bp, Homo sapiens
gtggtatgaccgtggcggcccttaatttagttacattcaaataaaacttttggtgcacctcggtagctaacattgtgtgtatgcctttttttttttttttttttttttcctgttacgccgtc

SEQ ID NO: 337246 - DNA, 122 bp, Homo sapiens
ctccctcgctcgtctcctatgctcatatttggactcggctgcccgtgcccaggaatttcccgtcatgcctcccgccgccccgtccgtcgcccggagccggggagggagggagcgaggttcgg

SEQ ID NO: 337247 - DNA, 122 bp, Homo sapiens
ccgtgaaccagatggtcagatggccattgtagctggttcgctctactgcaaggggcaggacggttttacagttgcacatcaggttggccaaactgtagtcacaatcccggatgtccgcagaa

SEQ ID NO: 337248 - DNA, 122 bp, Homo sapiens
tcacaatgtggccagaaacgattccatgatttctcaaagcagttaaatacttttccaagacggagaatgcaaccaggctgctgggtacctctccagcttcttagcgtgctaagctgaacaga

SEQ ID NO: 337249 - DNA, 122 bp, Homo sapiens
cacaagccttgtcgttcgtgatcagaggcctggaggggtttgggggcaggacctcaccttcggctgcccaggtgagaggggccgctcgcccagctgcagggacggcgcaggagggaagaggc

SEQ ID NO: 337250 - DNA, 122 bp, Homo sapiens
aataacattaaaataggtggcagaagacagacagaaagtcgattcgtggttgccaggcgtcgtgaataccggggaacgcggagtgcctattaatgggtaagggtttcgttttggaatcagac

SEQ ID NO: 337251 - DNA, 122 bp, Homo sapiens
cctggcaaccggtctcccaggagacgcgagacgctgagcccagggccagagcttgcggggcgcacagagcccccaggcctcatggcgcagaaacctctcagcaccgcggcggctgaacgcat

SEQ ID NO: 337252 - DNA, 122 bp, Homo sapiens
cccgcgaggcggggactcagagccaacccctcttccccccctggctcttgggaccaccatcgcagggggggaggcaatcctcccgaggcgggactgcaaacctccacctttcctcccctggc

SEQ ID NO: 337253 - DNA, 122 bp, Homo sapiens
aggaaatgactaccacaaaaatcagggtagtggatacctcaagacaggagaagggaggtacgtctagaaggtaaacaaaggagggacgtctgggctggccatgttccatttcttgatggagg

SEQ ID NO: 337254 - DNA, 122 bp, Homo sapiens
ctagaggcaaactctacagcagtctataaatactctcgtacacgtgcccagcgagcggcacgtgtagaggcctactcctcacagcacagtgtctagaggcaaactctacagcagtctataaa

SEQ ID NO: 337255 - DNA, 122 bp, Homo sapiens
attattagaactaatcagcctctacctccctcgaggcagaggctcatctgtcattgaccccgggacacgtctgctccaggcatgctgactctggccttgacgttccccaagcacatggtatc

SEQ ID NO: 337256 - DNA, 122 bp, Homo sapiens
cacagctttgtgtaagacactcaagggaacatgcaaagctcagggcagctcaatttggggcgagggttatggagaaaatacagtctgcatgcttttagtacatgcagttctgcatcttgggg

SEQ ID NO: 337257 - DNA, 122 bp, Homo sapiens
gagtcggaccccgtcccctcggcgccgcgcgcaggcgcacaggcgacaggcggcccaaggcgcagcctctctgcagcgctcacctacgccccgcctcgcgccacccgttgggggcggggcct

SEQ ID NO: 337258 - DNA, 122 bp, Homo sapiens
tccccgcccccgcccccgccccagcccgggcccgcgccccccgcccgctactcgggcccacgccccctgtcccagcaaagggccgcgcccccgccccgcccccccggagcccgcgtggccgg

SEQ ID NO: 337259 - DNA, 122 bp, Homo sapiens
ctaggcccccaagtcacagaaaagcaggcgattgggaacaacggaggcgcggcgggcccccgggccgcgggccagcgccaccttctggtggatcttccccgacgcgagtctgggagtcgtcc

SEQ ID NO: 337260 - DNA, 122 bp, Homo sapiens
cacggcagtagaggctggggctggggccaggggcggggacggcatccaccacgcagctaccggccacgggcacaaccagctcccgaggcacagtctccgggaatcgagtcaggttcacagtc

SEQ ID NO: 337261 - DNA, 122 bp, Homo sapiens
tcgccctctgagcgcatccggggcgtctcggctccctccgattccgccgcctccagggcgcgtccgtcccggctccagctcagctccccgcgacctggcccccaccccaggcagcgcagccg

SEQ ID NO: 337262 - DNA, 122 bp, Homo sapiens
gatgcacttggacgccagtgagtttcctcggaagatggtgttggggtccctgggaaatggcgatggggacagcgtttgtctcctggggacgcggaagtgcagacggagcagagcctggcccc

SEQ ID NO: 337263 - DNA, 122 bp, Homo sapiens
ggaggcgagactccctggggacagaggcaggcggggagaggacgtccctgccttttcccccgagccactgtggctttccctcagtgcccaagcaggggataccactgggaggtccccatccc

SEQ ID NO: 337264 - DNA, 122 bp, Homo sapiens
atataatggcaggaaatgcaaggatggccctccagcttccctgagagatccattgcacatcggtggccagtgggtaggcaggcccctggtttattactcttctgcggctgaatggctaggaa

SEQ ID NO: 337265 - DNA, 122 bp, Homo sapiens
attacgcctgcgtcacctcgcccctcctccttcccccaactcgcgcaggtgcgaccgccacgccccttcggcgcatgcgcagaacgaggcctccaagccccgcccttcctgggccgcttgac

SEQ ID NO: 337266 - DNA, 122 bp, Homo sapiens
tttaataaaagatgccaccataactagcaaaacagcattgcataaacaggctcagagctacgcgattttcatgcattatctcacttaatattcactacaatctactgggtagagagtattat

SEQ ID NO: 337267 - DNA, 122 bp, Homo sapiens
cagcccagaagtttcagtccttgttccccaaaaagtggtcactgaggcaaagtgtggccccggggctctacctactgatgtgtctcttatttgtttggcaagtcgctcatggaaaccattag

SEQ ID NO: 337268 - DNA, 122 bp, Homo sapiens
cagacctgtgggtgagagttctcggttaacatgcagtgtctctgtggctcaggaaacccacggctccccgcgcccaagagcgtcctgcggtctcgctggcacagcgccccgtacactagggg

SEQ ID NO: 337269 - DNA, 122 bp, Homo sapiens
atctcagcaaagctctccttgaactgaatgtgatacaactcgactttcccatccgtggagcggttgctccaggaggccttctccttcttcttcacggctttctgtctggcagacaggtgctt

SEQ ID NO: 337270 - DNA, 122 bp, Homo sapiens
atcgctggcacacacatacacgtagacctggttgtcacaggcaatgccccagcagcactgcgtggtggcgctgacgcgcttgaactccagctgggagtccttgcacatttcccagtactggc

SEQ ID NO: 337271 - DNA, 122 bp, Homo sapiens
cccaaggagtcgaggcttttgtgcagttacactccctggggggacagctagggttcagcccgtggctctccttgtccctctgtgggttcccttgtgatgaacaatagaacaggcacccaagg

SEQ ID NO: 337272 - DNA, 122 bp, Homo sapiens
tggtggaggggggcggtgggtgacccacagagaggaacccaggagccgggagcctggagtcgcagagaccactcaccgaggatcatgctggggacccaggcgcccggggttccgcgtcgctc

SEQ ID NO: 337273 - DNA, 122 bp, Homo sapiens
tccggctccgcagcgccacctggaggcttctaggtcctagctcggtgagcgtctttgctccgatcccagggtcgtggtcttcaatgattgtctggaggacgcatcccatctgtcactcccag

SEQ ID NO: 337274 - DNA, 122 bp, Homo sapiens
cgggtataaccagagcatgaagtgcataaagaggcgtcgccttggcatcttcatcagtcccgagggagcccagagccctgtcatagtcagtgaggcagcctgtggccagctggcccatgtac

SEQ ID NO: 337275 - DNA, 122 bp, Homo sapiens
gcaaaatcacccagcgcattaaaggcacaccatgcaactgtgaatcatatatggttgtaacgaaaaactgttaaaaactaaaaatgaatttcaagtttttcttctcaatcttggcttattta

SEQ ID NO: 337276 - DNA, 122 bp, Homo sapiens
gcgcgctcgcgcgggtgtcatggccgagcggcggcccccgacgaagtttcccggagctgacggctttaccttttagcccaaggggcggcagcagctttgagcagcagcaaggcggcggcggc

SEQ ID NO: 337277 - DNA, 122 bp, Homo sapiens
gtggggaaacctaagtaacaccagagaggctgaggaggactgaagtctctctgcagaggccgaaacgaagttggcacagcagcaagcacctcggggacctgagggagtctttggaatttcct

SEQ ID NO: 337278 - DNA, 122 bp, Homo sapiens
aaatgtaatttcttggtccgggcgccatggcccttataagtagagggtgtcccttggtttcgagttgtatcgttcaccagaggacgactgtgtgccccaggacaatttgcgcatggtcctag

SEQ ID NO: 337279 - DNA, 122 bp, Homo sapiens
caccaagacagtgcgagagtcgctcctctctctgtatcgactccaagccggccccacccccggctcctctgaaccccgcctggaaaccttgcccaagccgctcattgctcaaggcccccgta

SEQ ID NO: 337280 - DNA, 122 bp, Homo sapiens
aaagaggcacacacacttaattagcatggagtgttataaaaagcttggagtgcaagctcacggttgtcttaacaagaggagaaggcttcaatggatccttttgtggtccttgtgctctgtct

SEQ ID NO: 337281 - DNA, 122 bp, Homo sapiens
cttataaatagggagagactctgtgaagggtaatgggctttgcaaatagtgatggcaagccgcgataggctctgaaaaaactgaataatcattcttaaaggacaagagatccctcctgtggg

SEQ ID NO: 337282 - DNA, 122 bp, Homo sapiens
tttgggaacattagcctaagaaacccactatgatggagttatcatctatatgcctgcattcgttttgccttcatgacaccttacgtctgagctaaataatttccagcatttgtctttcttgc

SEQ ID NO: 337283 - DNA, 122 bp, Homo sapiens
cggagtgtggggaacttgaaaggtctgtagcccctgctgtgacaccgctgagcaggaaaccgcgtgcgtccacaagcagccccaaggccttgttgtaggacagtggacagtttgctctcccg

SEQ ID NO: 337284 - DNA, 122 bp, Homo sapiens
agctctctgatgaagatattacactctcaggatagaatactgactacctgattcccagatcgtgttcttgacttgtctcgaagtcgattatccttcttggaaatcacccacatcttcaacgc

SEQ ID NO: 337285 - DNA, 122 bp, Homo sapiens
cacatgagaatggtaaggacaaggaaatttatacgcgaagcctggaagcgcccccgcccccgacgcactcccgcgggtcccacgcgtgctttcgccgcctttgtccacaaggtggcagcctt

SEQ ID NO: 337286 - DNA, 122 bp, Homo sapiens
ctgtccaagagcgtgaacccttcggagcagcagaagccgtggcagtggtgcagtccagcccggtggaccgaggacggatttggcctggatttccagaaatagcctatagtgaggtctgccca

SEQ ID NO: 337287 - DNA, 122 bp, Homo sapiens
tggcagaaaggaagctggagggatggggactgcaggttagctgtgagggccggaagggagcggttttgtgctgcacacaggcaggtcagcactcccagagcagggaccgccgggcgtgcttt

SEQ ID NO: 337288 - DNA, 122 bp, Homo sapiens
gggtgtcaagtagagaagggctgagccgcatgcagcctctggattccacgatgagctggccggagactttggcaagagcagtgtcaggagaccgcttggggaaaacccagactgcatggaat

SEQ ID NO: 337289 - DNA, 122 bp, Homo sapiens
ctcaggcgacccgcccacctcggcgtcccaaagtgctgggattacaggcatgagccactgcgcctggtcactggaccttattttgcctccatctattagatgggggtaataatccctgcttt

SEQ ID NO: 337290 - DNA, 122 bp, Homo sapiens
gcggcctgccggcgctctaaaggctctgtctctctgtctgtctgactgtgggcggcctgccggcgctctaaaggctctgtctgtctgtctgtctgactgtggggcggcctgccggcgctcta

SEQ ID NO: 337291 - DNA, 122 bp, Homo sapiens
cccttgtggtgttgtttcaaatatccactggggaagacaatagcactatttttgatcgtccgattcatccgctccacctttctggaactctgaggccgggaggcgtcatgcaaattccatgt

SEQ ID NO: 337292 - DNA, 122 bp, Homo sapiens
cgcctatgatcagctgaggaggtgcagaaaggtgaattacttccaaaatgcataaacccacgtcaggatgcgcctcctaggtacccgacacacaacagtgaaaagtcgattcccaagcaaag

SEQ ID NO: 337293 - DNA, 122 bp, Homo sapiens
caaggtgcttccgccgctcttaacggggatttgacccggagaagagagttctgtcgcctgcggcccgcgcacccgggcccctccgggctgcccctcccaggcaaatagtccttcggggatgt

SEQ ID NO: 337294 - DNA, 122 bp, Homo sapiens
tccggctttccgggaccagagctctgttgggaactgctgctgcttggacaggtgtgttcccggaaagccctgggcatggatggaatcctgtttaccctctggtttccactgatgtgtaagac

SEQ ID NO: 337295 - DNA, 122 bp, Homo sapiens
gcgaaggtggatacagtcgcctgtgctcggattctattggcccacagagtcggtattcttcgcgggcgaatcccagaatgcaccgctctgagagggctccaggtccggggcggggtgggggg

SEQ ID NO: 337296 - DNA, 122 bp, Homo sapiens
gtgccaggctgtcaaggcccagggtgcagggggccaggtgggaagaacaggaaggccggccgagctggagcctgcacggccctgcatttgttactctgcctcttagactatgcagtggtagc

SEQ ID NO: 337297 - DNA, 122 bp, Homo sapiens
cttcgccccggccctgctcttggctgcgctccgatgtcagcgtgacctggagtcagctgccgcgccctcccacacccgctcctgccagcacccccgtctgctttccggagctgttcagactg

SEQ ID NO: 337298 - DNA, 122 bp, Homo sapiens
atccctcatgcctgcaaaccaccgctccccaggctgcctcgctgctgggctgcctggccgcgcagacaccaggcctttgaggcagaccagtgtcagcctgggtgctcaacacactgttagga

SEQ ID NO: 337299 - DNA, 122 bp, Homo sapiens
caaagacccttcagtaatcatctggatttcctagtcagatgtctttccccactctgcaagcgagtctcacctctgtaaatatcctttaagacagtatgaactggatataaaatactatttct

SEQ ID NO: 337300 - DNA, 122 bp, Homo sapiens
agagccccccaggccgggttccccaggggagcaaagctggaggtcaacagcaaacaggcacggtgtcctctacccaccatctgccaccccctccctcgcgtcctctcttaccactccgtccc

SEQ ID NO: 337301 - DNA, 122 bp, Homo sapiens
tcttttttgcaaaggtgactttctggcaacgtctttgtctctgtttggtggtgggctgctcgggctcctggacctggacttgcccccaaattttgtgtatgcagtgaaggcttcaacatctc

SEQ ID NO: 337302 - DNA, 122 bp, Homo sapiens
cggcgtggacgaccgttgctgagctggtgtggaacgtctgtgatcaggtaggtgtagtctcgtcgctctacgctgcgtgcaagaccgactcctgacctcgttctttcccaaggggacgccag

SEQ ID NO: 337303 - DNA, 122 bp, Homo sapiens
agggaagctagagtaaaaccaaacttattggccaactgccttggagccatttcagtcctccgcaacttagctcaggtggagaggccggcgctaccgagccgggttctttgcccgtcggggga

SEQ ID NO: 337304 - DNA, 122 bp, Homo sapiens
gcgcccggacggtgcgcgcccggcactccaggggaagttggcactttgcggcgaagtgagcgcgctcgggtcccagcctcgcccgcgccgcgcccgctcctcctgcccggccctcgcccgct

SEQ ID NO: 337305 - DNA, 122 bp, Homo sapiens
gcaggtaggggagctgccacagagtcctagcacgtcctgggggggtcctggcaaggagggcgcgctctggcccccaggaagtcgcgtaggtcagggcgtgcctctgttaacaacccctttcg

SEQ ID NO: 337306 - DNA, 122 bp, Homo sapiens
ccactgcacagcttcaccagctgtgggccagcggggcgtggtgagcacagtgggcactggcgcctgcactcgccaccacacacggccactcagaggcaggaagagctcccagggtaggttcc

SEQ ID NO: 337307 - DNA, 122 bp, Homo sapiens
acaccagagaagggggataaattggcgagctggcattcctcccgtcctcactgacggacccgcgagcggagtgagcggtgactcagcccgctccggctcggctccgccctcccgcctcccgc

SEQ ID NO: 337308 - DNA, 122 bp, Homo sapiens
cctccagggtcacctccttggtttggctaatcaggatgtccttggactccttcttggtcacggtgaagggcgactccggggacttggcctgagtcgtcatctccaccacgtctgtctcctgg

SEQ ID NO: 337309 - DNA, 122 bp, Homo sapiens
tatgccaaactcgccccacgcccccaaatgccaggttccccggggtagcaacgaatgacacgttgtccaatcagacttcagtgtaaccatgtcacagaagacatgactaaagcaaaacagga

SEQ ID NO: 337310 - DNA, 122 bp, Homo sapiens
attaatggggagccttcaggaagctgggagagctcatggggccctcagcttccctgcccacgagagggagcccagagtactcactggaccacactggggcacacacagctcttctcctcaaa

SEQ ID NO: 337311 - DNA, 122 bp, Homo sapiens
acccacacatccagtctccgggaacaaaactctgtctggatctacactgacccgttgacgcgctttcccaaaggaggaacgacaccaacaaaagcagaatcgctcgtgggagattttctacc

SEQ ID NO: 337312 - DNA, 122 bp, Homo sapiens
ctgagaagttagtctgaggcgtgactgctgcatcatcaatgactgcgttagaaaccccagcgattcactgctatgttctttatatgtaggatagttactggcacatggaaggcacccaatat

SEQ ID NO: 337313 - DNA, 122 bp, Homo sapiens
cctgattctgaatgccatggatgtttaggagcccgacttagggccgggtgcagtggctcacgtctataatctcagcactttgggaggccgaggcaggtggatcacttgaagccaggagtttg

SEQ ID NO: 337314 - DNA, 122 bp, Homo sapiens
tcagtacttgatttggcttcttttttttttttttttttttgagacggagtcttgctctgtcgccgaggctggaatgcagtgacgtgatctaggctcactgcaacctccgcctctcaggttca

SEQ ID NO: 337315 - DNA, 122 bp, Homo sapiens
cgtgatctgcccgccttggcctcccaaagttctgggactacaggcgtgagccaccgctcccggccagcagcagctttatttgtaattgccaaaacttgaaagcaaccaagatgtcctttagc

SEQ ID NO: 337316 - DNA, 122 bp, Homo sapiens
tagtggtgaccaggggctgggagaagagaagaatgggaggtgactgcttaataggtatggcgtcaactttagaagccatgaaaatcggttggaactagacagtggtgagagttgtacaacat

SEQ ID NO: 337317 - DNA, 122 bp, Homo sapiens
agtgatcctcccaccccagcctccagagtatctgggactatagcagtgcacgaccctgtccggctaatttttgtattttttgtagagacagagtttcaccatgttgcccaggctggtctcga

SEQ ID NO: 337318 - DNA, 122 bp, Homo sapiens
tgggaggcgcataggaaaagcctaggaaagcctcggcagcttccttgacgctggctgtgacgaggacgctgtcaggggacttgccaatggagttggggacaggctcttcggtaaactcgggg

SEQ ID NO: 337319 - DNA, 122 bp, Homo sapiens
atctgaaactcacaatattcaaattccccagctcaaatacatatattttaatctccacgtcgccacaatctcatttgttgcccagaaccaccacattctggaagctattttccttgatcata

SEQ ID NO: 337320 - DNA, 122 bp, Homo sapiens
gtaaaatggctggtcctctcagctctgctgcagacagctcattgggttccactggcttttcgtagccatagcaacaaccaacagacagacttagcaagcatggctgatcatgtgcagcacac

SEQ ID NO: 337321 - DNA, 122 bp, Homo sapiens
cacactgacccaggaccacaaagccctcccggtttaatgcttgcgtccaatcagaacttgcgagcagcttgggggtgctccccaccaccaccccctttcagggcagcacttctttcatttgt

SEQ ID NO: 337322 - DNA, 122 bp, Homo sapiens
tggcagcaataatggcttcaatccccataaatactcctgacaggtgtaaatgagtcactgcggaagagctagcttccacagacatgtccttggggcattatttggcagaagagattgaattc

SEQ ID NO: 337323 - DNA, 122 bp, Homo sapiens
ccctcgtttaaagaggctggctccggggcctgagttaatcgcttgcacctctagtttattcgctcccctcctccgccttgcagggaacctagtgtacggctcacccagcccgcgccccaccc

SEQ ID NO: 337324 - DNA, 122 bp, Homo sapiens
tctccagcctcaatttctcccttaagctccagacccagggtttgtgcacctcctggacctcgctactaggcatccacattgggcttagtatcttcccaacctgcttctggcgcccagtctcc

SEQ ID NO: 337325 - DNA, 122 bp, Homo sapiens
cagctgaacgaggtctacaggcagatctccggtgtacacaagctccagcagaccaagttccggtgagtcccggggtgcccgggttgggtgggggagccgctcctaccgggactccaggagcc

SEQ ID NO: 337326 - DNA, 122 bp, Homo sapiens
atccaggagcaccaccgcgccgcctgcagggagacccatggcgaggcgcgccccctaaggcggccaaggaaaaagcagaaggacgggaaggtgccccagagctcgatctcaggccgcaagca

SEQ ID NO: 337327 - DNA, 122 bp, Homo sapiens
tggaccgggggttggggacccctgccatagagtactgttgaatagaaactttagctcgtccggcggtgggctgggggggtgggggtagctcatgcctgtaaccccaccactttgggaagcca

SEQ ID NO: 337328 - DNA, 122 bp, Homo sapiens
agagatcggcacgtttctgggtattctggtcaaagaacagggagtctggattaatatacacggcagaaaaaagcgaagaaaagacacacaggtcatatatttctgactgatattccgtttgt

SEQ ID NO: 337329 - DNA, 122 bp, Homo sapiens
gaggggtggaaatcatcctaactacagactagattttcttccctcttgcgacggttgtaacgcaacagccatgtttcacgttcagatgtacagctgcaggaacaaatacttcttattccaaa

SEQ ID NO: 337330 - DNA, 122 bp, Homo sapiens
gcggctgcgggccaggaacaggcccatgcgcgcagcggcgccagccgcgcctcccaccagcggctctcctgggttaaatcctccaggcctccccgcccccgcgcccggccctaggaatgcgc

SEQ ID NO: 337331 - DNA, 122 bp, Homo sapiens
agacgagcttctgcagatttcaaacctgtcatttcttttctgacgcataccctcccctcccgcttcatgacaagctctgttcccaccttccccgggttcccagagcagcctcctagacacga

SEQ ID NO: 337332 - DNA, 122 bp, Homo sapiens
aggggaaagggtggactgcgcggtgaggtgagcctggagaggcgcccagagtgaccctcgcgactgtctccccagaagcccacgacgccctgcaccatttctcctgcaagatgctgacgccc

SEQ ID NO: 337333 - DNA, 122 bp, Homo sapiens
gctgccctctctgtccccagagaggactcagggagccaaaggcccagtgatctcagctcccgcctcctagtctggccctggcacagccagccccagctgttggggggagagaggaggtagcc

SEQ ID NO: 337334 - DNA, 122 bp, Homo sapiens
ccaagcacagcaagccctacacaccgagagccaccgagagggacctggttccgaggagagcggtgaggccgagcacggggtgcgtggggaggagagcggtgaggccgagcacggggtgcgtg

SEQ ID NO: 337335 - DNA, 122 bp, Homo sapiens
gggccccaatgagtggcacacagtctactatcaccgacaggttggtatgaattcctccttcgttcggcctcccggaatcgggcccgacctagcaggggagtcggtgattgcagattgccttt

SEQ ID NO: 337336 - DNA, 122 bp, Homo sapiens
tagttcgagaccagcctgggcacaatagcgagagctctaccagaaacccaaaataagaaccgggcatggtggcgcgcacttttggccccagctacccccggaggctgaggtcccaccactgc

SEQ ID NO: 337337 - DNA, 122 bp, Homo sapiens
ctccactcctcccttgtttgcagcgctagaagctgcaggtggtagttcctacactgggggcggcgcctggacgcgggtgtccctggccaaggcggcctcgctgtcctggaagggagggtgaa

SEQ ID NO: 337338 - DNA, 122 bp, Homo sapiens
ttccattctctctctccacttcttcagtgagcagccatgagttggactgtgcctgttgtgcgggccagccagagagtgagctcggtgggagcgaatttcctatgcctggggatggccctgtg

SEQ ID NO: 337339 - DNA, 122 bp, Homo sapiens
tctggtgagcttttaagacatggaactcacactcttactagaagtgctgtacagaagcagcgcatgagatcattgtggttgggtgatctcaccatgtggttaccatggcctaggaatctttg

SEQ ID NO: 337340 - DNA, 122 bp, Homo sapiens
tgtgggagaaaggaaaacgcgctatgggaaagtggagggcgaagaacccccgaataatttcggactgatgtttcacaaatcatttcgccagggaacaacccgcgagcctccccttcccaaat

SEQ ID NO: 337341 - DNA, 122 bp, Homo sapiens
atgaataaagagaatctggaccactacccgggcaccagggaccacagcactggtttggaccgttactctgcacatggaccagaaaaagtatatgggaccttaagctcaccttctttacttgt

SEQ ID NO: 337342 - DNA, 122 bp, Homo sapiens
ctgaaggatggtgagaccagcagggctcggcagcctgctgagcagatgtctggcctgagccgtgccagtaggtggcccccttcactaaggaagggaatccaagaagactaggtttggggagt

SEQ ID NO: 337343 - DNA, 122 bp, Homo sapiens
gcggccctacacggccaccgtgtgccaccacattgagaacgtgctgaaggaggacgctcgcggttccgtggtcctggggcaggtggacgcccagcttgtgccctacatcatcgacctgcagt

SEQ ID NO: 337344 - DNA, 122 bp, Homo sapiens
cgaagcggccagcgccgggagctgcagcgctgagacccccagcccgccccctcgggctcccggccggggccccatcatgttctccaggaagaaacgagagctcatgaaaaccccttccatct

SEQ ID NO: 337345 - DNA, 122 bp, Homo sapiens
taagcttagggggttgtttgtggggggcggggggagaaagagagaacgtatttggggtcacggtggtggtgaagggctgcgaagctcctctaagttctttttagaattgccctaacagagta

SEQ ID NO: 337346 - DNA, 122 bp, Homo sapiens
aaagctgaggctccaggcagctgggctgggggagagtgagagaaacgggcctgccctcctcggctccctggaggcctctccagaattcgccagtggcccccccggggcagaggtgaaagtgg

SEQ ID NO: 337347 - DNA, 122 bp, Homo sapiens
cgccccaagcagagccgcccctgggcccgtctgcgccggaggctgcggcggcgggagccacggaccagaccagccacatccaggggtcctcatttctccggctctggctcttgtttggggtt

SEQ ID NO: 337348 - DNA, 122 bp, Homo sapiens
ctcactccacactctcctttctctttcataaggcctaattcccaatgaagattcaggaaacggggatgtcagttccagttccactttctttttatttaaataaccgaagcaacagccgtggc

SEQ ID NO: 337349 - DNA, 122 bp, Homo sapiens
taattgggcaagacttttcatgggcattgcatgctgggctcgtgcaggtgtctccagggccgcctcgagaccagcgcccgcctccctggtcctggatacaggtggggcgggggctcccccgc

SEQ ID NO: 337350 - DNA, 122 bp, Homo sapiens
ccctcacacctcccagccgggacttggggaggcacttgcgagaggctgcgtttgccgttgcgctctctggagctggagaaccactgggcgactctgcgtgactcctgcacccactgtcagga

SEQ ID NO: 337351 - DNA, 122 bp, Homo sapiens
tgagaaatgtcatcagaatgatgcccctgataaccttgcccataaccatgcatttccccacggtatgtaatgccttatgggctggctccaaggccttctgcctagcctagccacctagcaag

SEQ ID NO: 337352 - DNA, 122 bp, Homo sapiens
cctggcggaaggggcagcctcaggagtgtggagttcagggatccagctttgacttggccacgcccagagccagccagcctcgagcacctgtttcctgtctgggggcacgggaaccctcctgt

SEQ ID NO: 337353 - DNA, 122 bp, Homo sapiens
cgtggctcgttgtgtgggcagttggacaggatggaactcttcaggattctagtttccctccgcgtgggtgcggaggtatcaaggggtcggctcagtgcctgggtgggcaagagagaaatgga

SEQ ID NO: 337354 - DNA, 122 bp, Homo sapiens
cagacattcaaactatatgaggaaaaaagaaatgagtgtttcccaagatgcaaagcattacgcagttgtaatgtgacatttctgcattatgttcagtggagctgttttgtctaaattccatg

SEQ ID NO: 337355 - DNA, 122 bp, Homo sapiens
agaaggtttttttccattctcttaaatgcagccataattagagtaatttttcatgtagcccgctgattacagcgtttttaccgtcaaagataattacctgtaattttcttccacttttaata

SEQ ID NO: 337356 - DNA, 122 bp, Homo sapiens
atctccaggcgctgcttgagcagcgagtccttctcctggcgcaggctgtcgatctccccgcggatctgctgctggctctgggcgctgccctgccgcagctgcccgctcttctcggacagctc

SEQ ID NO: 337357 - DNA, 122 bp, Homo sapiens
taatactggataatcgtcacccaacgaacatttccatataaaatggcttttctcagacagcgtcgtgttgctgatgggagttaattaagttcaatttatctgaaggaaaatatggcaccgcg

SEQ ID NO: 337358 - DNA, 122 bp, Homo sapiens
agaaccacagaaaggacgctttgagggctgggaggtagcaccggggctgtggccacacctcgcctaatgggcctctctccctttcccctgcactgtggcagtggagtcacagcagagggtca

SEQ ID NO: 337359 - DNA, 122 bp, Homo sapiens
tgcaaggcccagcgatcaccagacgtgcctcaggacacagggcacagtgtccaactttgacgcgtcctctccgggcactttaataccaaatcacggctccgccacttgacagctatgtggac

SEQ ID NO: 337360 - DNA, 122 bp, Homo sapiens
cactggaccctgtcccagggcctggcagtgttgagggcccctcctggggatgctcctttccgtctctctgacccccttctctgacccgcagccctcaggcactcggctggcccctgggcctc

SEQ ID NO: 337361 - DNA, 122 bp, Homo sapiens
cgctgtccgcgccgccatcttgccggtcccgacctctcaggattgcttccggggttacagcggcgtcctcagaccatagagttccgcaaaagaagagagtacatcctcatgttccggcgctg

SEQ ID NO: 337362 - DNA, 122 bp, Homo sapiens
gaaccttagctccctccactgacagtggggacagtctgctggagggtgtgtagaagacctcgggttgccttttggaggttctggaaatgtcccttgaaagatgaatggagttaatttaaaaa

SEQ ID NO: 337363 - DNA, 122 bp, Homo sapiens
gggttccattccttctaccactcactcctcagaaggtctcagacaagccaattagactctcggttcactggtaaaatgtgttcctaaaaactcttagagtgagaagaggctgcgcgcggctc

SEQ ID NO: 337364 - DNA, 122 bp, Homo sapiens
tgtgacctccgcgggtgcatagctgcaggagcacagatgggacccagctgtggggccacacgggcctggctgcagacccaactcccccttcattgatggggcacttgggagtgtgttattca

SEQ ID NO: 337365 - DNA, 122 bp, Homo sapiens
tcatctgtacgtggagagggtccctgaagaggtccttgccgggggctggggtagtcatctcgggacagaggtcaggggatggatgccttcccagggtcagtaagaggaggggacaagggtgt

SEQ ID NO: 337366 - DNA, 122 bp, Homo sapiens
gggtccggctctgacgaaacgctgcgagaatgccagacagtgtagcctccaccgtttgctcggggtctctgctgccatcagacaagtacttttattcattcatcccttcccatcaatcaccg

SEQ ID NO: 337367 - DNA, 122 bp, Homo sapiens
ccactattctaagggatgccagctttgaaagaagcattaggatgaaaatttgtagggttccgatttcacgaagcctaggagagggaagtctggatgctcagagcgcagtagactgtcttgct

SEQ ID NO: 337368 - DNA, 122 bp, Homo sapiens
acttgggccgaccagcggtcgtggggaggcggacccgacaggccagggtggtcgtggcatcgagtccatcgttggtgcaaatggccgggggccggtggcggtggtggggcggggggcacggc

SEQ ID NO: 337369 - DNA, 122 bp, Homo sapiens
caagggaatagaacaatggtcccgatgggtcccttgggctctggacagtgatggaccatgcgctatggtctgtagttcccatagaccacaataccctaccctctcagtcctcagttccgggc

SEQ ID NO: 337370 - DNA, 122 bp, Homo sapiens
tcagagacaccagaacacccagcggcccgcgtccagggagtctagaaccttgggctcccgcgcacacccaggccaggtcctggccgtcattctcccgccggcctctgggggagctgcgcggt

SEQ ID NO: 337371 - DNA, 122 bp, Homo sapiens
cggggccgcagcgggggctcagtcactcactggaggcgcagggcgcggggcggggagggccgggactgagagggggctgcttactcaacagcccaagccttctggctgccgtctgccgcttc

SEQ ID NO: 337372 - DNA, 122 bp, Homo sapiens
gcatttgtacacggaagtcccagtgagacccagaagggtcccagcttgtgtcctgtgctccgtgatcccagatacacaccacctcccctaaatccttacagacagagcctggcttgcaagcc

SEQ ID NO: 337373 - DNA, 122 bp, Homo sapiens
ctgaccaaatagtgggggaaggggtggcagggggtggcaggggtgagtacacgggcagcacggaggtcttcccaacctctatggaaggtattgccatttgtaagttttaacagagctggttg

SEQ ID NO: 337374 - DNA, 122 bp, Homo sapiens
tggccatgggcacaggctgtgagggacgacacaggagccagccttagcatccctgagatgcggaacacgcacagacgccgcggtgtgctcacagaacccaacgtgatgcagcgcggaatcga

SEQ ID NO: 337375 - DNA, 122 bp, Homo sapiens
tctggacggaggtaacgcctggtcccgcctcgaggccgccccgacgacgcggccggcccccgatcctggatctgcgttgtcgcccgtaattaccgtttagaggtccaacacggtggcctccc

SEQ ID NO: 337376 - DNA, 122 bp, Homo sapiens
ctctccaggggaccggcgcgcattttctgcctccggtcctaatccctctttgcagcccttcgtggccacccttaagcctgctagcctgccccaggatcttaaaatctggatagtctcacggg

SEQ ID NO: 337377 - DNA, 122 bp, Homo sapiens
ataaatttctgagcctcaatgtgccctgatgccgttcctttcttccaccgtaagagttaccgaaagctcggcgtccgtgatggggtagagggcttccgaggcgatcgggcagtgtcagtctt

SEQ ID NO: 337378 - DNA, 122 bp, Homo sapiens
ggagacacgcgcgttatgtaccctgtggagtctgttgcctggcgaggtgttctgggtccccgcctgtaatctgactctcactgtagccatccctgattgaggctgggtccccgcctgtaatc

SEQ ID NO: 337379 - DNA, 122 bp, Homo sapiens
gccacgcagcgaagggaaaaagcggcggggacctgccgagagggatgtggtcctgaggaccgctgaccaatctggaagagaaggaggcggaccccatgctgctgcctggccaatcacggacg

SEQ ID NO: 337380 - DNA, 122 bp, Homo sapiens
gggtgaaggagttggtgagaattatgtgtagagaccccaggcagcctcaggccagcctcgcgaaggcatgtccccgggctcactgccaccctctctctcaccatctcatccttcttcacctc

SEQ ID NO: 337381 - DNA, 122 bp, Homo sapiens
atcgggtcactcccacccgaataccgcgcttttccgatgggcttaaaaaacggcgcaccacgagattatatcccgcacccggctcagagggtctgacgcccagggagtctccctgattgcta

SEQ ID NO: 337382 - DNA, 122 bp, Homo sapiens
cgaggagcctttcaacattttcacatctcaaaactgaccccttttctagcttaaatggcacggatctggaaaggcaaactatactcagaatcagaaaagatgactgcccctgagggattaca

SEQ ID NO: 337383 - DNA, 122 bp, Homo sapiens
ctcaggttatctgcccacctcggcccccttaagtgctgggattacaggcaggagccactgcgcccagtccatctttggtcttctgcatatgctgttccctgtgcctggaacatatactcctg

SEQ ID NO: 337384 - DNA, 122 bp, Homo sapiens
gcctctgagaacaaaggcaagcaccctgtttcagcactagggagattgtagtactgaaggcggacaccagggggagaaagaggttacaggctccagacaagaaacaagcaaacctctttaac

SEQ ID NO: 337385 - DNA, 122 bp, Homo sapiens
acgtggtgaaaccccatctgtactaaaaatacacacacaaaaattagccagacgtggtggcgggtgcctgtattcccagctactcgggaggctgaggcaggagaatggcgtgaacccgggag

SEQ ID NO: 337386 - DNA, 122 bp, Homo sapiens
ccattttcagcagcagacccaccagaaacagatttacctcccacatcacagaattgtctccgtaggtcttcacttcactggcattgaccactttaccttgaaagggcccaaacctgactcct

SEQ ID NO: 337387 - DNA, 122 bp, Homo sapiens
ctccaatcagacacctcaaggctggcgcctgatccaatctcctcccctggagggtgggaacgcgaagttcctacctgcacctgtggcagcggtgaccgcctcctgggttattttcttttctc

SEQ ID NO: 337388 - DNA, 122 bp, Homo sapiens
gattgcacacgcacacacacacaccactcacacgcactcgccgcccgcccgctcgcacagcgctggaacacgcgcgcccagacacgcacacacgcacgcacacacactcgcacacacgcaga

SEQ ID NO: 337389 - DNA, 122 bp, Homo sapiens
gacgacgtgcagaaacatatcagacaggcattgtgaagggtagggttttttaaatacagacgctctggtgtttacctcttgaactcagcaggtcacctggtctccctgtcctctaagcctag

SEQ ID NO: 337390 - DNA, 122 bp, Homo sapiens
gcgctctggcggagctcgggagcggggaccggtagccgactgcctctgggacagcggtggcgtctctgtgcccgtttagtggagttggagggaagctgcgaggaggcgcaggaagtccacct

SEQ ID NO: 337391 - DNA, 122 bp, Homo sapiens
agaagcagtaagttctagccaggaaatacccacgatgcctcagcccatcgaaaaagtctccgtgtcaactcagacaaagaagttaagtgcctcttcaccaagaatgctgcatcggagcaccc

SEQ ID NO: 337392 - DNA, 122 bp, Homo sapiens
ccctcttgtgggcagattcccctgtgtaaggtgctggaggctgaggttccagcctgcagccgcttgtgatcctgatatgtcgagagttctggaagactgatgactgctgacccccttcttaa

SEQ ID NO: 337393 - DNA, 122 bp, Homo sapiens
tgcgttctcattggctgaggctgcatagaggggcggtcccaacagtgggcggggtagagccgcgccgcaggacggagggtctggacactttggggtcacgtgctcattccgtttccctacct

SEQ ID NO: 337394 - DNA, 122 bp, Homo sapiens
tctccccctacttttttttttttagccatagctatggttaccacgtttctctccgcctcccgccacctaccaagaaaacgactgaccattggctgcctttcaccaaggcggtaagtcattgg

SEQ ID NO: 337395 - DNA, 122 bp, Homo sapiens
gactcaagtgaatacagaaactccacagttgtgtgtttctcaagattcaaaaaacaactgcggaaaagttgaactgtttggggagacccaagtttctgccttcctgtttcttgtcgacagcg

SEQ ID NO: 337396 - DNA, 122 bp, Homo sapiens
atatagggattaacagctgtgtgctgaagtagattagtgtttctaatttttagtcattcacgtgctagcttcataatttttggccaaattgttcactaacctgctgtttacttaataaatat

SEQ ID NO: 337397 - DNA, 122 bp, Homo sapiens
gtaatactcacgccctctagcagcggaacaggaggactacatgctcctatcagggtctgccgcagaaactcatcccagtcagatactttatctctgatgcctagatgagggaataaatgact

SEQ ID NO: 337398 - DNA, 122 bp, Homo sapiens
tgagagaacccagcgcaccttgtgccctagcagtggttgaaagtttctgggtggatagtgcgtaattgggaggggcagcaggaggattggtggggctgggagaggggaaccaagcctaccac

SEQ ID NO: 337399 - DNA, 122 bp, Homo sapiens
tgtccaaggccttcaagtacttggccagggcctgggtggtgacaccacccttggagttggcggtgtagtcgcagggcaggccggcttggcctgcgcggggcttggccgacttgccggccacc

SEQ ID NO: 337400 - DNA, 122 bp, Homo sapiens
atgattcctgaaaacaatagcggcttcttgtttaaaatggaactgcacctgctagaatatcgtgtcaacaaacaattgctttgtttttcataatagccatccgagccgaagcaatgggactt

SEQ ID NO: 337401 - DNA, 122 bp, Homo sapiens
ccactgtcgaggcatgaaggctgctgtgctggaccttgggtctctcttggccaaactcttcgagacctcgacggcgccccccgcaggcccctcctccagaccctcgggaggtgctgccgctg

SEQ ID NO: 337402 - DNA, 122 bp, Homo sapiens
aatccccccaacattggcagtgagagtacatttccttcccatctctatcctgtgtgtccacgagagacaacagcgagccatctgagagaggtccatatgccctcagctccccacaaggccaa

SEQ ID NO: 337403 - DNA, 122 bp, Homo sapiens
aaaacaattgctctgttcttacctggagagtctgtgccttgagtcatggaggaatccagtcgggtcagattcactagcagagccaccacccaggggacccacccagaacccattctggagaa

SEQ ID NO: 337404 - DNA, 122 bp, Homo sapiens
tgcattccggaatctgacccacaaagggctgtggcattcataggagaagccacggaagaccggcaggaatgacagaagcagcagcgagagcccttcagaggaccgcgaaacgcgaactccca

SEQ ID NO: 337405 - DNA, 122 bp, Homo sapiens
catttgtgcttgccaaggtagggaaagttttcaaataaatttgcaaccagctactcatcacgggtcttgtgagaagagcaagtaagacacacattgctgtgcctcactgccattcatttgct

SEQ ID NO: 337406 - DNA, 122 bp, Homo sapiens
aggaaatagagacaaatatggttgtcatggtttctttgagaggcagtaaacaaagggacacgaatggacaatgaaagcccccattgggaaaagccacatgtctctcttttctttgttagata

SEQ ID NO: 337407 - DNA, 122 bp, Homo sapiens
ccaaaatttttatccctcctgaagacttgtaggtaacagacaaagacattgtggaaaaggcggatgtatcacagactttcagagctgcaagtgaagttagaaatctagtcctattccctcat

SEQ ID NO: 337408 - DNA, 122 bp, Homo sapiens
tagactcaaccacaggtgagaccttgaccttgactggatgtctcacttcggagaacagagcgggctgcttttattacagggttactggaaagtcaagttcagatctcactttattaatcacc

SEQ ID NO: 337409 - DNA, 122 bp, Homo sapiens
catcctccacatcctgtgaggcacgtctcagcacctcttcgtgcaagcgcccgcactagacgtttgagaaacagatgtgagcaggcgtggtcctgacctccatcccgaggttgggggtggaa

SEQ ID NO: 337410 - DNA, 122 bp, Homo sapiens
tagagttgcctcgcctcccagctctgtccggggaaaccctccctgtgctatggatgcaggcgtttcctgttggcatattgtgtcctgatttgcctctcctgttagagccattggataaagac

SEQ ID NO: 337411 - DNA, 122 bp, Homo sapiens
agaatatttctttgccttttccagttcccagtgactatttgcattccttggcttatggctcgctcctttatcttcaaagtgcatgactgcaacctctgccttcatcatcacatcacatgctc

SEQ ID NO: 337412 - DNA, 122 bp, Homo sapiens
ctcacttcctagatgggatggcggccgggaagaggctcctcatttcccagactgggcggccgggcagaggggctcctcgcatcccagacaatgggcggccaggcagagacgctcctcacttc

SEQ ID NO: 337413 - DNA, 122 bp, Homo sapiens
gaaaatatgcagataacatgaatcttagatctagatacttttctcctaaagaaaattgcccgggttgaagtcattttttggcctttccattctccctgggtggtccttaaagtgtctgtaaa

SEQ ID NO: 337414 - DNA, 122 bp, Homo sapiens
caagctgctgctgtatttctgcatgaccccttggaacaagcccattggggcccgggccggcgaactctcaggaggtgcagtggacctggagggtgcagagcaggagtgaaagagggaaaagt

SEQ ID NO: 337415 - DNA, 122 bp, Homo sapiens
cgctgcgcggtcctcgctcccctcaaacgccgctggcgaaggcgcccctgctcaggaatgcgcatctgagtgcaccaggaagaggaacaaatctttgaagcaaattccctttctgcgcgttt

SEQ ID NO: 337416 - DNA, 122 bp, Homo sapiens
agattcctgggtgtgggggaccctgggcacagggaccctgggcaagggcacaaggccacccgggtgtggagtcctgagtcccagggttacctgagcataggcctagctgagtaaagggccac

SEQ ID NO: 337417 - DNA, 122 bp, Homo sapiens
acctttccaagtcaccagcacataatcctctcttggaaaacgcccagagttctgagaaaacggaagaaaatgaattcagcggctgtaggtctgagtcatccctcggcacctctcatctcggc

SEQ ID NO: 337418 - DNA, 122 bp, Homo sapiens
gcaagttgcgggcgcgcggggagctgtcgcgggcagcgcgccctcgggaggacgtggccccggcccccgcccgcagtgggcccgaccctcatggccctgagcaaagggctgcggctgctggg

SEQ ID NO: 337419 - DNA, 122 bp, Homo sapiens
cccggggcctgcctcccatcccgctccgctggggttcagagcgttccgtgaggaggtaagcgctagggcaggagaggccgacagagaccccggggcccgccgctccttgaggccggggttgg

SEQ ID NO: 337420 - DNA, 122 bp, Homo sapiens
acccggagggtgagttaaaacatggaatgctgggctccacccccagactttctgatttagcgggtctgtcttggggcccaagatttctaacaagttcccaagtgatactgatactggtccag

SEQ ID NO: 337421 - DNA, 122 bp, Homo sapiens
agacccaggctccgggataagcaacttcacaagactggagattagaagctcccacccttccgcgctgcgctccgcgcaatcccaaaccaaaacccagagacaatggtccccgtcgaggacac

SEQ ID NO: 337422 - DNA, 122 bp, Homo sapiens
ttcggctcatttggctatacttcatggctgctgctctgccctggcatcctcggataagctcgctgcccattagaggaaaaagggtttaatttacctgagtcctcgagtgaatgtaattgttg

SEQ ID NO: 337423 - DNA, 122 bp, Homo sapiens
agcacaagcttttattaaccagaggcagcgtgagaggccaagtaagcaagaggtccattccggagccctgtcctcagggagggtgaggggctgtcgtcaggtcaggtcgtggctcctggggc

SEQ ID NO: 337424 - DNA, 122 bp, Homo sapiens
ggtttcttttactcagcatgattattttgagattcatccctattgtatgtgtaaatcggtcgttcctttttgttgagttgaattctattggatggatatatcacggtgtgtttatccattca

SEQ ID NO: 337425 - DNA, 122 bp, Homo sapiens
cccctggccgtgggttcccccgggcagggtggcagttctgcgcgcagaggccgggccgcgcgtccccaaggtcctttcttggtttccgggcctcaggcccctgcaggcacaaggacccgcgg

SEQ ID NO: 337426 - DNA, 122 bp, Homo sapiens
catctctagagatgaatttttagtttgaaatagcttctctaatttagagttactgagaagcgctttactacatggggttccatagaatagttcttgggtattcacaccttcctgggaatgca

SEQ ID NO: 337427 - DNA, 122 bp, Homo sapiens
gacgactggtctacctgtccctcagttcctctgtcccacccattctgagtcctgatcattcgtctcaacttcagcctgggactggaccagtaagagcagaacccgtcttctctcccgccagg

SEQ ID NO: 337428 - DNA, 122 bp, Homo sapiens
cacgctgagataggggaggatcttttgaggcgacaggcttctccagcctcgcatttttgacgcacatggttaagagagcttggcgccagcgttgagaattccctgaagtcaccagagagaat

SEQ ID NO: 337429 - DNA, 122 bp, Homo sapiens
gctgtgggcctcctttaacagcattccctgaaatgaggggttgcccaggggtggttgggacgctgcagctggaaccgatgtcggccgagcacagacagcctgggacactgggcccctacctg

SEQ ID NO: 337430 - DNA, 122 bp, Homo sapiens
gccgtgaatggagtggagactggccgcaggtcaggagagctcaccacttgaaggtgaagtcgccctgctcggattccatctgcagattttgtttctcccccaaatcagccactgctggagct

SEQ ID NO: 337431 - DNA, 122 bp, Homo sapiens
cctcttctcagtctttccttgcaggtccctggtgtccaggccttggggcagtgaagaaaccgtggggaggggcatgagatgccagtccccaaagtccttgggagcccttgtgggccaagtca

SEQ ID NO: 337432 - DNA, 122 bp, Homo sapiens
cttggaggtgcaggaaggttctccaaggagtaggaccagaaagggatgagagcgcgagcgcggttaatgtcgaggctgctaagtgatgctcgttaatttcgcagcagggtgtgactggccca

SEQ ID NO: 337433 - DNA, 122 bp, Homo sapiens
tcttgacagggcggagggatttctctttcctgagctcaccaaacttattccagtgttgatcgcaagctgttgatgcacaggcgtcttgtggcaagcccagcttcagtttatgttagacaatc

SEQ ID NO: 337434 - DNA, 122 bp, Homo sapiens
cctggactactgtccattcatccatccattcatccattgtctccccccactcccccatctcggactgtcccaatgacagccctagcaagaagagacaagaaacaagataagttcacattgtc

SEQ ID NO: 337435 - DNA, 122 bp, Homo sapiens
ggcccaatattctgcatttctaacaaacacccaggtggtggggatgctgctggtccctcccgctgcactttgagaagcaaatccttaacagcaccacttgctgattaggtagaagggcggtt

SEQ ID NO: 337436 - DNA, 122 bp, Homo sapiens
gccgggggggcggggacgggggggtgtgcgaggcagcggggctgagctaagccgagcccacgtgtgacggctctcgccgctgccccggctccgccgctcgcagagagattcggaggagcccg

SEQ ID NO: 337437 - DNA, 122 bp, Homo sapiens
ctggttaaagatatcataaacagctttctccatgtccctggtccctggagtcagtgatgtcggcatttgggactgcgacctggctggagcttggatttgcccacatcaatcaatgcttctcc

SEQ ID NO: 337438 - DNA, 122 bp, Homo sapiens
gtaagaatggatggtgtcttacaatcaaacttaaagcacagggctgcgcacagtggctcacgcctgtaatcccagcagtttgggaggctgaggcgggtggatcacttgaggtcaggagttca

SEQ ID NO: 337439 - DNA, 122 bp, Homo sapiens
tccctcccgtaggagtctcatgaggctcaggtgataccagttccctcttatggcgcccagcggtgccaggcatcatttcccccgcccgtgccccaccttcccctcctgcggcctttcctctc

SEQ ID NO: 337440 - DNA, 122 bp, Homo sapiens
aacctgtggcgcctacaacaagcaacacgtggaattgaatgttgaagagccgcgcggggccgcggagtgcgcgtgcgcgcgccgccgctgctgcccgggcccgcctggagccctagcacaca

SEQ ID NO: 337441 - DNA, 122 bp, Homo sapiens
tgcgacctcaggtaagttttgtctgccgccttgtctgccaattgcaaagcaaaatggccccggggccacctgtgagtgtctgggtgtctgtcattccaaatgtagagatgcgatgtcccgaa

SEQ ID NO: 337442 - DNA, 122 bp, Homo sapiens
caatggaactaccatgcctgacctggaaaactaaaggtcatggacactgagcatctaaatcgctattctgaagaaagtggtgacaagataatctcctgttgtgaaaacaagacaaccggaaa

SEQ ID NO: 337443 - DNA, 122 bp, Homo sapiens
aaagcagcctttgtttcctacaatgagagaataaatccttgatgtagtccagtggccacccgggagttcccagaaagacactggcctcgaagaactgtttctgtctgtttgccttgaatatg

SEQ ID NO: 337444 - DNA, 122 bp, Homo sapiens
gttattggtcagcccggatccacgccgccccaagcatcagcccatcatccttactttccccgtctttcagaccttggcccccaaaattgtcactgctttaggagttcttcattgatttcgaa

SEQ ID NO: 337445 - DNA, 122 bp, Homo sapiens
gcaggcggcggcaaggacactgcggccttagccctcttagggaggccgctgcagccccaccgtgagaagccccgagggagggttgccatactgggaagtgtactcctagtttggtcgaggag

SEQ ID NO: 337446 - DNA, 122 bp, Homo sapiens
cagccccacgtttgagcagagttcaaggctggatccacatacctgcgttgtgaagcaactcgtctgcctgctttgttgggatctatgcctccttggctgaaagcagtgatgactgtggttaa

SEQ ID NO: 337447 - DNA, 122 bp, Homo sapiens
aacaagaacgacgacgaaccctgggctcggaactcgcccaggccccgcccctcacagccccgccccgtcctcggccccgcccccggcctgtcgcctcaacaaagtccccgccgcgcggccgc

SEQ ID NO: 337448 - DNA, 122 bp, Homo sapiens
gaggcccgcgctgcgcgagtggggccgggcggcgcgcgtgtggccgactctgtatgtgtgcgcctgtcagtcaacgctgacaggccgcagcccattggtcaggccccgccggccgtcaccgc

SEQ ID NO: 337449 - DNA, 122 bp, Homo sapiens
aagattaaggaaacgtggcatgcacagctaaagcaagaggtgacgtcttgtatcttcccccgtttcctgggacattggtggtgtagcccattccacagactttcgctccctagcagcgggtc

SEQ ID NO: 337450 - DNA, 122 bp, Homo sapiens
gccagcatttgaagaagcgatctgttgcaaagcgatccacacggagagccttagttatcgcgagacttgacaggcaccctcaactttagcccgccggaagcggaagtcaggtggttgtcgga

SEQ ID NO: 337451 - DNA, 122 bp, Homo sapiens
ttctcagttaagctttatactggtggtgcagctaagagtagcatcacatcagcaatagctcgtaataaaaaataatcatgggatgaacttgatgtatactcagcatcagaagaaccaacaat

SEQ ID NO: 337452 - DNA, 122 bp, Homo sapiens
cacccctcctaccagtcctagttcgggtctagcggaatggctgggctccgagaagggcgccgggcccacgggcgggacggccagggcggccccgcaccctctgggcgcaaatttctccagcg

SEQ ID NO: 337453 - DNA, 122 bp, Homo sapiens
gccccaatggcccctcctcctaaataccttcctgcgacattaacacaggtaggaaagactcggagcttccatccacgtggtcactggctctgtccatctgcccccaggggtgtcatgtttgg

SEQ ID NO: 337454 - DNA, 122 bp, Homo sapiens
tgggtgaggcagtggggggtggatggtgctggcacagtccacagggctcccaagcctatgcgagtttcggctgcatctggggtcagggccgtgggctccacctgaggaggcccctaacaggg

SEQ ID NO: 337455 - DNA, 122 bp, Homo sapiens
ctctcacgatctggtcccagctcccctttgttccttgggttctttcttaccgaaaagttccgtctcctccttggtgtgttttaatgcacattatagatgctgtttctctctctctggctatc

SEQ ID NO: 337456 - DNA, 122 bp, Homo sapiens
ccgccgtgctggcacatacaggctggcacatatgtgcacgggaagctgtacatatatgcccggacatatacatcatgctgtgcatgcctgtgcatggaaggcgactccgcagcggccggggg

SEQ ID NO: 337457 - DNA, 122 bp, Homo sapiens
caatgaagcttcagagaagccgtgccattgccggggcacgtaaagtcaagccaggacttccggcgtcctagccgtggcagccattttggcctgtcaggtccatccggcgatgctgggtctgg

SEQ ID NO: 337458 - DNA, 122 bp, Homo sapiens
tttggatcatttgggcgtggcttgacaccttggaggagctgtgtttctctgggaggcctccgcgatttgtgcagcttgccatattttgaaagatggaggtgagccagggtgatgttccctca

SEQ ID NO: 337459 - DNA, 122 bp, Homo sapiens
gtcctcctctgtttggagaggcctcgcgctcccttcattctctttagctgcagtagccaccgtgtggatgctgacttcacagccagcgtcctctgtgactcagctgatgcagctcattccac

SEQ ID NO: 337460 - DNA, 122 bp, Homo sapiens
gaggggccgccctccaggatccaatagggtataggttcagatgcctgggtcctggaggtccgggtagtggcggaggaaccgccctcgggttcccgatggattggggacaaatgctcagccca

SEQ ID NO: 337461 - DNA, 122 bp, Homo sapiens
ctctgttcagctgcaggcaggaagaagaagcagcgtcacggggaggcggtcgtccctcctcggtccctgtttgaccgcgcaacaccaggacttctgaaaattcgcagagagggcaaggagca

SEQ ID NO: 337462 - DNA, 122 bp, Homo sapiens
cggccgtccgggccgtgggcaggtggagggcgcggcgggggtgcgcgggggaggccagggcgctcactgaactcggtcgggagcggcccccgcgctgccccccgaggccaggaaggcgcagc

SEQ ID NO: 337463 - DNA, 122 bp, Homo sapiens
gccccacttcttagcactatcacaatgggtattaggttccaacaaatgaatttggggtggcgagcaccaacatttagatcacagcaagtgtttaggaaaatactaaaattaagcctactctt

SEQ ID NO: 337464 - DNA, 122 bp, Homo sapiens
ttccgctagaaaactaaatgagagcacgcctgatgggttggtgtcctcacttccagtcaccgccccctttccaatggaatccgacactgaagcataagttgaatgtggcatttcccttcagc

SEQ ID NO: 337465 - DNA, 122 bp, Homo sapiens
gggggtgggggagggctgcaggtgtccatccagtcacccctccctccatctccttagatccggcgcaggagaccaacgcctgccatgctgttccggctctcagagcactcctcaccaggtag

SEQ ID NO: 337466 - DNA, 122 bp, Homo sapiens
gggtttccttcttggtagtttgggcggcggtcctgacaggaagaagggaggccgccttggcgtggctgttttggtagctggaccgtgaatcatggaggcctggctggctcccacacggtggc

SEQ ID NO: 337467 - DNA, 122 bp, Homo sapiens
aaaaggaagggggagtagagaggcaaggcacgagttttccaggcgtggtgaagctggagacgagtataatccctccctaagtggcttttggatggcagctcaggaaacagtcaatcctcttg

SEQ ID NO: 337468 - DNA, 122 bp, Homo sapiens
gaacttgagttgagttttgcaggaaaaccccttaagaaaatcttgtgtgaactacgtcctcggttgcaatgccatgagcctgtttcagtgtgtgcattccaggcttgcctttctagctgggt

SEQ ID NO: 337469 - DNA, 122 bp, Homo sapiens
aaacatagtcgcgcgggtgaccgtccttgtgccttgcgtttttaaaaagccgctcctgaacgtcggtttcagaagcgagaggagcgagcagggtctcgactcgcgcccgagccctgccgctg

SEQ ID NO: 337470 - DNA, 122 bp, Homo sapiens
aagaagtttgcaaaggaatagcccaaggggtggttgtttaggttaggagttggagaaagacgtctcattgactcacttagggaggggagtctggatgaagcagggctgagtctttttgagac

SEQ ID NO: 337471 - DNA, 122 bp, Homo sapiens
gcagcccggcgagcgcaggagtgagcgcgaggtgagcgctagaagaggcttggcgctccccgcgctcccagggtcagccgccaggggaggctgcgccgcccgcccagacctgcacgccctgc

SEQ ID NO: 337472 - DNA, 122 bp, Homo sapiens
gagcagcacagggcgcagaggccgccgtcagaggcagaggacgtgctcatcaagctgactcgtgtgctggccaacattgccatccacccgggcgtgggcccggtgctggccgccaacccggg

SEQ ID NO: 337473 - DNA, 122 bp, Homo sapiens
cgcccagctccctacctcctggacgtctctgagagtccaggcagagcagagggcagcgctcggccggtcatgctggctcccttggccttgcagcgagcccctggcccacgccgagcgaggga

SEQ ID NO: 337474 - DNA, 122 bp, Homo sapiens
cccatgctctagcactgtgattttccccagaaacccccacagaaggcacatgacttctgccggcatcttctgaatgacattcagggccagaactagaaaagcagagttcacgtgcacggttc

SEQ ID NO: 337475 - DNA, 122 bp, Homo sapiens
acggcaacagcagggctggcatgcacaaacctgcaatgggtttctacagcccagatggaacgggtgtggccccttcctgagcatctttaaacttctataaggaaagaggtacattcagtaaa

SEQ ID NO: 337476 - DNA, 122 bp, Homo sapiens
ctcccgttgttgaacacatgaggaaaactacactacttagaaggctgtgcattatgcgtacggcgggagctgggccaacgacggcctaggacggggacgtttccgacggctcacgccggtgg

SEQ ID NO: 337477 - DNA, 122 bp, Homo sapiens
accgtctctcgaggaaacgcggttcagcgattctttgactgcggaccctgtgggaaaccccgtcaataaatgttaaagacacactccgaggcagcgtggatgtggtttgctttcactcaaca

SEQ ID NO: 337478 - DNA, 122 bp, Homo sapiens
aaacctgcacgagaagaccgagtcttagccttggcgcgagctttaccgccttgtttgccgcgaccagacataactacttctgataagggaaaatcgccacaagaaaatgtaatgaaactaca

SEQ ID NO: 337479 - DNA, 122 bp, Homo sapiens
actttagctccccttgtctgagtaaattatggctctgtttgggcggcactccttagatttcgacaaacgagcacacagttgagagctgtgaaatagctgaactttaggctgccttgctcttt

SEQ ID NO: 337480 - DNA, 122 bp, Homo sapiens
gccctcgcgctcgccactgattggccgccgtccgccggcccggcgcatcataaccgccgccgccctcgccacaccgcctccccattggctgcggcgccgcccccaacccagagcgctgcggc

SEQ ID NO: 337481 - DNA, 122 bp, Homo sapiens
tgcagctccttgtagagctccccgcggggggcatactctagaatcaagtagatcctcctccggtcataaaaatagttgtagagacgcaggatgttgggatggctgggggaagagacagagga

SEQ ID NO: 337482 - DNA, 122 bp, Homo sapiens
catgtgcgaatggcgccccctcgtgttgtggatggtgtaggttgcaccgctgtgtgcacacgtgtgcatacatgcatgcacacgcttggaatttcagctgctctgtcccttataggcccgtg

SEQ ID NO: 337483 - DNA, 122 bp, Homo sapiens
atacccaaggaggatggaaacttggagggcccctcaccaaggctgggattctgacccggtcggagagggtgtggctactgcccattacacgtcacaaaggaggtggccaggcgttgctgggc

SEQ ID NO: 337484 - DNA, 122 bp, Homo sapiens
gccgggcaggcggggctgggcgcgggcggcggcggcccggaggagaacgggcggagggcgcgggccgaccgggcgcaccgaccatggcctccaaatgccccaagtgcgacaagaccgtgtac

SEQ ID NO: 337485 - DNA, 122 bp, Homo sapiens
cttgatttgttgttgttgttgtcctgtttgtttaagaactttacttctttatccaatgaacggagtatcttgtgtcctggaccctttgcaagaacccttcccctagcaacagatgcgtcatc

SEQ ID NO: 337486 - DNA, 122 bp, Homo sapiens
tctgtgccggcgtcggcaggaggcgggaccagggcgtgggcggggtcaagtccgggaagccgcaggaggcggactcaggcgcagcacccagcagtgagcacggcgtcgtgcggtcgggacct

SEQ ID NO: 337487 - DNA, 122 bp, Homo sapiens
ttttaagactgcgtggcagtgtagggattctgccagaccgttcagctaatctccgtctcgcgctcactgttcacagcgtaaatccagacccatagtgagaggaagaggacccagggagagca

SEQ ID NO: 337488 - DNA, 122 bp, Homo sapiens
ccccagcccctgcggggctctgggagaaggggagggagtgcctggacactttcagatggccgctcccagggccagggccttcgacagcctcagagcacacaccctcgggtcggtggcctcaa

SEQ ID NO: 337489 - DNA, 122 bp, Homo sapiens
ctgtcgcggaacaccatccgccacgtggctgccggcgccttcgccgacctgcgggccctgcgtgccctgcacctggatggcaaccggctgacctcactgggcgagggccagctgcgcggcct

SEQ ID NO: 337490 - DNA, 122 bp, Homo sapiens
gaagaaaaacggagtgggggtggtctgtgcgtggacactcgccaggggacgtggccagggcgtgtctgggatcttgcgccactgaagaggctcccagtcgtcaaatagagtgagggatggga

SEQ ID NO: 337491 - DNA, 122 bp, Homo sapiens
gccccctgctgccgttgtctttacggaacctttggtgtcggggcttggaagtctccttggcgccggcttctgggcccgggcgaagctggtgcgtggcgccggggtggaggcggctaagtccc

SEQ ID NO: 337492 - DNA, 122 bp, Homo sapiens
ccacccagcagggccagcccagggcgcgctaagagtccagagagttcgtttccatggtgacgggttccgcgaaggttttcctggggtgaagaggcagggcgttgaataatcgccatggcgac

SEQ ID NO: 337493 - DNA, 122 bp, Homo sapiens
gcattagttttttattattaaaaatgatggtattagtggcacatacatgttaagctggtacgcatgcattggacagctctttggttcatcctaggcaaactctggcacctgtagagctgagg

SEQ ID NO: 337494 - DNA, 122 bp, Homo sapiens
cagtttcatgaatggatgaatgaaagattcaatgggagtccgcagccgctgacggcgcgccgagagccccgctcgcttctggtcctccgactgcgcgccagggccacgggcgggtcctttgc

SEQ ID NO: 337495 - DNA, 122 bp, Homo sapiens
tttgatttgataaaacaaaactattatctagagaggtaaggcagacttgtgaactggacccgtagaagttaagtgatgtccctgtttgcagtgtcaatgagattgagggcttgggcttgaac

SEQ ID NO: 337496 - DNA, 122 bp, Homo sapiens
ccggcgctgctgggaaggcttcctagtctctctgcccgcacttcccgcccagaccacgtgcggagcctgagggccctcttggaaggtctgtctgtccaaagagtttgcccgaggcttcttca

SEQ ID NO: 337497 - DNA, 122 bp, Homo sapiens
ggaggcggggcaggcctccgttctccaattggccttatccaccgagctctccccttgtgccgggctctgtgccaagcacatcacacgctgtatcctgcggccaggttgctgtggtccagggt

SEQ ID NO: 337498 - DNA, 122 bp, Homo sapiens
gattgttcaacaaataaaatacaaccacagcaacagtagctcatatgctgcatgtgtgagcgacataatttatagaggaaaaacaagaacagaaaactttcccccaaaatactcaaagataa

SEQ ID NO: 337499 - DNA, 122 bp, Homo sapiens
gtagccaggtgtcgccgggctggcgcggttatttatgactgcgtggttgggctgggggttcggggccggggagcagccgggatccgccgcctcttccatgatcttcccgggccgaaccacgg

SEQ ID NO: 337500 - DNA, 122 bp, Homo sapiens
gggctcgggcactggggctcggagttgcgggacttggggctccgggggtggccccgggaccgccgcggcttcttccccgtccgccgacttcagctctgactccccacaacccatcatcatct

SEQ ID NO: 337501 - DNA, 122 bp, Homo sapiens
gttgtgcaactaccatcacaattttagaacaccttcatcgcccttaaaagaaatgccacacgctttagtggtcactccctatttcccctaaccctccacaccccaccccaccagccctaagc

SEQ ID NO: 337502 - DNA, 122 bp, Homo sapiens
ctgggccgcgcggagctggctgttccgccctcgcggcaaccgcaccaacaggaaccgaaacggcctcggcaagggcagctacagcctctcagtcctccggctacctttcctccacgtggaag

SEQ ID NO: 337503 - DNA, 122 bp, Homo sapiens
caaagggaagaactttctgttgtctaaaagaaaagaacgcacttccctttagagtgttaccgtgtgagaaaagcaacgttgaagctgatgctgatcttggtaataagtttgcagagcctgct

SEQ ID NO: 337504 - DNA, 122 bp, Homo sapiens
tggaaattgccctgtttcttcccgctgcttgctaccttcttcagttctggacatcggctccgcagtggaactaggtagcctcaactcttataatgattcaagatttttcctgttttataact

SEQ ID NO: 337505 - DNA, 122 bp, Homo sapiens
atacatgaaattaacctaaaattgctttttttttttttttgaggcagggtctcaccctgtcgctcaggcagaagtgcaatggcgcaatcaccatcaccatagcctcaacctcctgggctcaa

SEQ ID NO: 337506 - DNA, 122 bp, Homo sapiens
aaatctgtagtagaaataaaaatatagtaaaatctctgaggaaggagtgttcagtccaggcgagatgctggtgatacatcctggagaaaaaggaggttgtgatgtaaggcttgatgtataga

SEQ ID NO: 337507 - DNA, 122 bp, Homo sapiens
accacaactttcttcctagtgtacacatctgttgatggtattctttcccagatatccactcgttcttcactggatcacagaatgaaatctaacctcatagtattgcattcagtgcctcccca

SEQ ID NO: 337508 - DNA, 122 bp, Homo sapiens
caggaacaggagcggcggcccgggccagaccgccccgacccggctccgctgtctgagaggcgaggggtccctgtcacccaccggcttggagcctgtggtcgcagacaggcatgtgtcatcca

SEQ ID NO: 337509 - DNA, 122 bp, Homo sapiens
accacataaaaacaaactaaaaggacaggagaaaaccgcctaaatgtcacatttcacccacgagccagcctggccagggggcaaggcaccgcgccacccacgcccagccaaactcatcaatg

SEQ ID NO: 337510 - DNA, 122 bp, Homo sapiens
ggcttagaggaagggacactggcaggctgggagtccaggggtcagagccacgagggcccccgtgaggaccctcttgttacccctcactctggatcccggagactttctggttccttagtggc

SEQ ID NO: 337511 - DNA, 122 bp, Homo sapiens
tttattttatttcattttattttgagacaggctcttgcactgttgcccaggctagtgtgccgtggcatgaccatagctcactgtaaacttgaactcctgggttcaggcgatcctccttcctc

SEQ ID NO: 337512 - DNA, 122 bp, Homo sapiens
aaataaaggttctgtaagtcccaccgcgggtgcatattgaaaagaaagggatcattagcacgcgaccctcgcctaggagtatataaaccgcagcacgactttcggatcacaaaggcagagaa

SEQ ID NO: 337513 - DNA, 122 bp, Homo sapiens
cgagcgggacacgggcagctggcgcaactgggcggcgtgttgctgctggcggggggcaaccgctccggggccgcctccggagaggccagcgagggcgctgaggcatcggacgcgcccccgac

SEQ ID NO: 337514 - DNA, 122 bp, Homo sapiens
caaagcaagtggtgtttaaagccatgggatgggaagaagctaagttcagacagaggagggcggcagtaagcactgagccctggaagatgaggcagaaccagcaaaggagctgggcgggagta

SEQ ID NO: 337515 - DNA, 122 bp, Homo sapiens
agctcgacgctcgtgctgcggttattatctggctcacctgttatcttcctctggaggcagcggttgatcaaagtggagaagaagttgggaaaggatgggctggagaagtagtacaccacggg

SEQ ID NO: 337516 - DNA, 122 bp, Homo sapiens
gcacttcatcatgcattacgattacatatttccatgttcttgtgttaatctctgtgtccacgcacccaggcactgagctgtctggcacacagcaggcattcaacacattttgctacatgaat

SEQ ID NO: 337517 - DNA, 122 bp, Homo sapiens
aggcctaatatgaagcttaggatttgaactaggatgagagaatagagatggggtagaacacggggtgagggagcatgcaactgctctgtaaatgagaaaatgtattcaaagcaccaggaata

SEQ ID NO: 337518 - DNA, 122 bp, Homo sapiens
ccagtgcctagaatagtgcctgacacaaagcaaataattaatacgcactgaatgagcaaacgacagacaggcattagctcatttcctgtagtcttgccggggtaggtctgctgcagctttat

SEQ ID NO: 337519 - DNA, 122 bp, Homo sapiens
tttaccatccctggtttacagatgtggaaaccaggacttagattactggccctctaaaatcgcacagctaggaagtggtagagctggaatttgagcccaggtctgtttaactttaaagcagg

SEQ ID NO: 337520 - DNA, 122 bp, Homo sapiens
gtagagccaccccgaatccccgaaacgtctacttcccactacaccttcgtggactgcgaacgggacggctaccgctctcccagagcacccgggcccaagaaatgaccctcgtcaggccccgt

SEQ ID NO: 337521 - DNA, 122 bp, Homo sapiens
tctgacctactcttctctccactctttgtgcaataaagttcgaaacccaaggtttcctctcgtgctgtattttattcgtgccctttcccccccgctcctacaccgttgaggaaatgctgctt

SEQ ID NO: 337522 - DNA, 122 bp, Homo sapiens
ctggccggggggcggagtttcccagccgcgggggccaatcagaatgtaggggttggctcccggcttcattcagtgctccggctcccattcataaaaaaataaaactcgcggctggagttcat

SEQ ID NO: 337523 - DNA, 122 bp, Homo sapiens
agagctaggcccaaagaaaagaagagagggtcctctccttctgtttaatctcaccacccgcgccacctgcgggactaggcctcaaaaccaggcaaagtagcgccagttacctggggtttctg

SEQ ID NO: 337524 - DNA, 122 bp, Homo sapiens
ggagcggcaggggttagaggacacccctggagtcagggcctgccagtgaaagggagccagcggctcaggcgtcaggcatagggtgctctgggcctcgggcaataggaaccaggagcaggggt

SEQ ID NO: 337525 - DNA, 122 bp, Homo sapiens
ccgcgggcagacaagcccgggcggagcgcgctaagccacaggtccccgcggcgttcctcccggtcttcggggatgctaatggcagcgaaaatatttgctgaagtgcaggcataaatcagccg

SEQ ID NO: 337526 - DNA, 122 bp, Homo sapiens
gctcgcaacatcttgctgccttcgggagcaccggcctggctctgctcctctcccaactggcggcttcaatgagtgctgcggccgccacgcgtcgcctttatatacgcacagggcagactggg

SEQ ID NO: 337527 - DNA, 122 bp, Homo sapiens
tttgtcgtgcgtgtgtgtgcgcgcgcgcacgtgtgttggggatgtttggagatagtgagccggataggacatgaggaaagagaaaggcctttggagagaaaactgtagaactcaggttagac

SEQ ID NO: 337528 - DNA, 122 bp, Homo sapiens
gtgcctgtaatcccagctacttcagaggctgaggcacgagaatcgcttgaagctgggaggcggaggttgcagtgagctgagatcacgccactgcactccagcctgggtggcagagtgagacg

SEQ ID NO: 337529 - DNA, 122 bp, Homo sapiens
tggaagcaatctcttccaaatcttcatttcggctgaacaactcgagctgcgataacatttcggcagccttctcaaggagatccatccaggcccttgaacaccttctcctggactatccggga

SEQ ID NO: 337530 - DNA, 122 bp, Homo sapiens
catcctcttggggaacaggaggatatgtccgtagaagacttcgtggactggggaaagccacgccgggatcgggacgccggagagggtcgcccctccctaggctttttcccgtcgcggcgccc

SEQ ID NO: 337531 - DNA, 122 bp, Homo sapiens
caactacccaggactaaagagaccatcaaagggagcttaccaatcacagttcagactcaccgcctcaaatatcgaatgagcaatcaacattgtcaggcaatctcattccactcctttctcat

SEQ ID NO: 337532 - DNA, 122 bp, Homo sapiens
cttgggtgcatccagaccgtcagagctttgggagcgctttgtttggcgacagtcggaaggcgcgaggggaggggtcctcccgctgaacagtgggggttctaagggtcggcggcggcggggtt

SEQ ID NO: 337533 - DNA, 122 bp, Homo sapiens
aggctggggtgggactggtggatccatcgtggacctgttgggctcatgtggtgtggtgtccggagactgtgacttcctgagggtttaaagactaaaatgggatggactgaggcgcgtgctgt

SEQ ID NO: 337534 - DNA, 122 bp, Homo sapiens
tcatgacacacccaggtctggacacgctgtccctgaggccagtgcccggagcgccccccgcggagccgctctccaccaataagagcctgaggtcccgagatgatgagatgcggggccgctgc

SEQ ID NO: 337535 - DNA, 122 bp, Homo sapiens
tccaagatctagcgattgttggccttctaaagctttctttcctctacactcggggatgtacgattagcactaagcctctaacaaggatgaactactagaaatttccagaaggcgttatgctg

SEQ ID NO: 337536 - DNA, 122 bp, Homo sapiens
ggtcacctcttcataaataataaaaaccagagtccagaacctgaataggcaaccgctgatcggtccagctcgcttccccgccagtgaaaagcaatcttatttcagcgtcaacgctctatgtc

SEQ ID NO: 337537 - DNA, 122 bp, Homo sapiens
tttagtttctgactaattctgccctagcattttcttcctgtgcttttggctgtgattttccggttacttgaatttcttgtctgccttctttgagctagaattttcaggtttagtgtttgtat

SEQ ID NO: 337538 - DNA, 122 bp, Homo sapiens
gcccttggcctggggcccctccgtgccgtcgggatttgtgggacgcgctgaaggaagaggcgggcggctccgacagaaaacagccagagcgcaccactcacctgagtgccaggtaaacacct

SEQ ID NO: 337539 - DNA, 122 bp, Homo sapiens
gagcaaaggcccagcgagcccagcactcagcggaacctgtagaagcgtcgggggttgccccgcttctgcgaaccgccctgggatgcgaggttcagcgtcactatctcatcctgggaaaggat

SEQ ID NO: 337540 - DNA, 122 bp, Homo sapiens
gagctgggggctggcttaggagcccagagttgaccacatgcaaactccctccaaaactcccgctcagcctgcgccacgcgctcccagttccacttcctatctcctgctggacggacgtagag

SEQ ID NO: 337541 - DNA, 122 bp, Homo sapiens
aaataaaatttattgccttctaacaccatcaaatagtttatttgagaccaggaattggtccgaccacttattttcaacttttggctgaatacgggtgaacttggctttttgttttccctaaa

SEQ ID NO: 337542 - DNA, 122 bp, Homo sapiens
aaaatgctgacgaggacgaaggtgggcagagcccattggctgctgaaagagacgcgcccccgacgggcgtttttgcatcgtcacatctgcgacttctggttaggcggaggcggccgagctga

SEQ ID NO: 337543 - DNA, 122 bp, Homo sapiens
cttgctagatacaagacagttcaggtcactgatggggttttccgagtcccttttgcaaaccggcttcctcaccttccctgctgccccagtccagaaccgaatagggcctcacacaagttttg

SEQ ID NO: 337544 - DNA, 122 bp, Homo sapiens
cattcaggagagtaggggtcctaatctcccacccaagtcagagggtagggctggggatggcggcccctggtgcccagaggagttaatagttgactaggaaatcccctaaccttgatgcagat

SEQ ID NO: 337545 - DNA, 122 bp, Homo sapiens
gccggagccgggtccctgtccccgggccgggcgccgccgccgccccctgcccagcgcccgcgtctccgcggcgccaccccagcgccaatattccggagatcaagcgttacgcggcggcggcg

SEQ ID NO: 337546 - DNA, 122 bp, Homo sapiens
gagaggcagtcaacccgaggtgctgtgctgcaggacagtctccagcgcgtgctcgtttaccgccttaatgattcacctaggttgctttgtccatgggggtcttggggagaccaaaacttggt

SEQ ID NO: 337547 - DNA, 122 bp, Homo sapiens
tatcccttggaaaaggggcacctattttatccttacccaatctgtacagaaacagcagaccgagagctgcttccatgtaagtctcacctctcttcagccagtgagggtgtgtggtgaaaggt

SEQ ID NO: 337548 - DNA, 122 bp, Homo sapiens
actggcatttattgctaaggacagtaagttcagagtggcggtgtctcatcacaacctctgcgtttggcaccaccaaatattgtagttgactcacccaggcaaagaaaaaaataattctcaga

SEQ ID NO: 337549 - DNA, 122 bp, Homo sapiens
gttctaattacgggtgcatgcagcccccagtcacgtaccccctgcttgctcaatcaatcacgaccctctcacgcagacccctgaagagttgtgagcccttaaaagggacaggaattgctcac

SEQ ID NO: 337550 - DNA, 122 bp, Homo sapiens
ccagcgaccaatcggaagcggtggcaacgtgggcggctgcgtgacagacaggcggcaggacgctgtcgccgcagcttcttccggctagctgggggacgccgaggctgcggagtgcacgcctg

SEQ ID NO: 337551 - DNA, 122 bp, Homo sapiens
ttctagttctaccacttggacaaggcactttttttcttcgggctttttctctgtagaaaacgaggagtaatatctgcctcataaggctgcgggcttaactgagataatctgtaaactttaac

SEQ ID NO: 337552 - DNA, 122 bp, Homo sapiens
gtctcagtttagttgctgcaacccagcgagcgcctggagcccgagtggatgggttgtttccgccaactctggacacttcctcaagtgcagcctaagtacctgcggccccttggcgcacttac

SEQ ID NO: 337553 - DNA, 122 bp, Homo sapiens
atggccatgagctcccagccgcgggccaggctctccaggcggaagttctcggtggtctgccggcacagctggatgtagagctcgtcccgcaggccctgcacgctccagcccttggtggccac

SEQ ID NO: 337554 - DNA, 122 bp, Homo sapiens
ccctggcccgtcgcgcccggttccgcgcccttctaggggaccatggcgacggtacaggcacggacctgcaccgcaaaacccaaagcaaaagcaacttgccatggcggaggggagacgcgccc

SEQ ID NO: 337555 - DNA, 122 bp, Homo sapiens
ttccgcagccatcaccgccgcccagcactggcatgtttcacagtgttccgcagccatcaccgccacccagcaccggcatgtttcacagtgttccgcagccaccaccgccgcccagcaccggc

SEQ ID NO: 337556 - DNA, 122 bp, Homo sapiens
tcaaagtctgactttgccctttactaactctgtgaccgtggatgtttcccttaaccaccccgggcttcatcttcctcatctgtaagatgttgctaataataacatgtatctttaaggctatt

SEQ ID NO: 337557 - DNA, 122 bp, Homo sapiens
ctaaatgtcacttgggtcatagatctgatctttattttgcctaaacctcctatatcctttcggtgatcgcccttagttcctgcccgggcaagcacaccacaccgaggagcatcgaagcgaac

SEQ ID NO: 337558 - DNA, 122 bp, Homo sapiens
ccaccgggtgcgtgccaggcaggccctcctggggtacaggaagctgtgtgcacgcagcctcgcctgtatggggagcagggaacgggacaggcccccatggtcttcccggtggcctctcgggg

SEQ ID NO: 337559 - DNA, 122 bp, Homo sapiens
aggggcccggagaagggcatgtgggggcccctctgacagtggcccgattggggtgacaggcgcccaaatggccaagtggctacgggactacctgagctttgggggtcggaggccccctccgc

SEQ ID NO: 337560 - DNA, 122 bp, Homo sapiens
acttatatgtgggaggtgaaaaacttcacctcatggagatagggaatagaataagttatccggggctgagaaggggaaatgaagagaaattggtgaatatgtacaaatttccatttagatca

SEQ ID NO: 337561 - DNA, 122 bp, Homo sapiens
ccggagcctcctggagcgcagggtcacatgtgtctgagcttgaggccccgacttcagaaccgagggggcgccgtctggattgtgcggtcggtgaactgcggcttcggttctatcctttgtgg

SEQ ID NO: 337562 - DNA, 122 bp, Homo sapiens
caaaagagttaatgtctctgaacatccttttctttatctataaaaatggggatgctagggcgttgaagccctgaccttagaagattcttgtagaaataagtgtgattagtgtgtcacataat

SEQ ID NO: 337563 - DNA, 122 bp, Homo sapiens
cttcaacctgtgactctgtgtcctgtaacaatggtgtaaaactcccaaatgtcacatctccgtcctgcccccgctccgtcctctctcctctccacctgggcctgtttcagggacacaacttc

SEQ ID NO: 337564 - DNA, 122 bp, Homo sapiens
aaaggcgcggccgctcaagggagcacgtgacctcggcctctggcgtgggcggtgggatcacgtgatgaggtccggaagcggctgccgggcagcaaaggaggatggcgaggggctgatactga

SEQ ID NO: 337565 - DNA, 122 bp, Homo sapiens
atcccaggatcccctccccggcctcccagctatgatctaccccggggcccagacttcaggcgccttcacgatgccggcggtcagtggtccaggtcccttattctgccttctcctcctgctcc

SEQ ID NO: 337566 - DNA, 122 bp, Homo sapiens
tcactgtgccttacaatcttctccatggcaggacatagtgaaactccgtctctaccactccgtcagtacctgccacaggaaatggcgggtttacggatttgtttataagtttatttccccaa

SEQ ID NO: 337567 - DNA, 122 bp, Homo sapiens
gcacattgcatttgggtcaagagtggaggccgccgggaagtaggacgctattcccgagtccggtcacaagatggcggactggtccggcagaagacgagcagggacgaggaagcggggctaat

SEQ ID NO: 337568 - DNA, 122 bp, Homo sapiens
gacttctgcccgaccagatcccgtggttctgaggaccggccctggaaccctgcgtccttccgacccaccagctccctcgaggatggacttgaggctggatgctttcctcttcccactttttg

SEQ ID NO: 337569 - DNA, 122 bp, Homo sapiens
tgtcaaggcagaccggcgccccatcccccggccagcccgcaaagcttcccgttgtctgcacggaggttttctggccgcttctgctgccagcgctaggaacgcagggcaccaccagctaccca

SEQ ID NO: 337570 - DNA, 122 bp, Homo sapiens
cgtgcattattattttgaggaaatttccagtcatcttatcatttcagtcataaatattaccgcatggatttctaagataaggtctttggaaaaaaataacactgtaaaaccactaccatacc

SEQ ID NO: 337571 - DNA, 122 bp, Homo sapiens
ccacaggcacacgccttcatgcctggctttttttttttttctttccaagagactggatgtcgctaggtttcccaggctaacagaggcatttttacagtgtccagccaagtgctaggcaccaa

SEQ ID NO: 337572 - DNA, 122 bp, Homo sapiens
tccccgccccatccagccccgccgctctggtcccgggataggtggcgcctggggctggggcgcatccacggccacccccaccccggacatcggccactgttggcattttctccaagaaggcc

SEQ ID NO: 337573 - DNA, 122 bp, Homo sapiens
ttaaacataaatctgcggtctgttcttagcacctgcggctgcgtgggaggtatggaaaggcgcactttgggtttcgtgaaatctcaagtcaggtcttgacttctctctttccacagattcat

SEQ ID NO: 337574 - DNA, 122 bp, Homo sapiens
tgcggcgaccgagctccgcctcctcgcggctcccgacggcgcggcaggtggaagtgagcgcgcactggtcgggactctgaatcccccaaaagcgcatcctaggtgctcgggttgccagattt

SEQ ID NO: 337575 - DNA, 122 bp, Homo sapiens
ctcaagaaagaagatgggtgttctagaggggaaagctaaacgatgataggcaatgaggagcggaggacaagaccctgaactaagggtgaggaggccagcattctgtcaggagaaccttagga

SEQ ID NO: 337576 - DNA, 122 bp, Homo sapiens
gatccaatcacttccctacttccacaatggggattacaaatgaagatgagatttgggtggcgacacagagccatatcgtatcaaagtatgaaaggtttctaggatttattagtttgggttgt

SEQ ID NO: 337577 - DNA, 122 bp, Homo sapiens
gctcagtggggccacttggcttttcagagcagtgggccttttttctcaaaggaagattagcgtgggggtgtctatgtacttacctggtggcctcagaaggaggacttgtttggagtctatta

SEQ ID NO: 337578 - DNA, 122 bp, Homo sapiens
agtgattctcctgcctcagcctcctgagtagctgggattacaggcatgcgccaccacacccggctaattttgtattttgtattgttggtcaggctggtcaccaactcccaaactcaggtgat

SEQ ID NO: 337579 - DNA, 122 bp, Homo sapiens
gggcaggatggcagaagtcagcacaggctttgacctcgaacggccatggtttcacttgcacgctctcccacttaccatttaaccttcagcaaccagtttttcattccatcagcaggtgccta

SEQ ID NO: 337580 - DNA, 122 bp, Homo sapiens
ccctggggaccagaggacgagcggaggaagtgtcttgggcggcaaacatcccactccccgcgccggtccgcgcagcccgcgggaacgcccctgggcttgcgggaggggctggagcgcgtccc

SEQ ID NO: 337581 - DNA, 122 bp, Homo sapiens
ttggccccgaggtctcttaggtgttggcacttcgctgggctccttctgactccctacaagcgctgtcccaggactcatcggaggctgcttgcgcggcctgccccggccccgcttctcagtgc

SEQ ID NO: 337582 - DNA, 122 bp, Homo sapiens
tgggaaattccctcttcctaatgcgtctgtcttgcaactcctattagcatccttcgacagcggcctttgaaaatctcctttaaatttcaatacctctactcgtttcccaaatggggggaagg

SEQ ID NO: 337583 - DNA, 122 bp, Homo sapiens
aggctgggctcgggatgcgctcagccaatcagtgggggagcggcgcgcgcgggggtggcgcgcggaagggcagcccgcgcgctcccggccgcagggagtaaccgctttgtgtgctgcttcta

SEQ ID NO: 337584 - DNA, 122 bp, Homo sapiens
tgaacgactcggagcggacgctgcaggccaccttccccggcgccttcggagagctgtacacgcagaacgcgagggccttccgggacctgtactcagagctgcgcctgtactaccgcggtgcc

SEQ ID NO: 337585 - DNA, 122 bp, Homo sapiens
ctcaggtgatccgtccgcctcagcctcccaaagtgctgggattgcagacatgagccacctcgcctagccagtcacgattttaaaaaaccaccatagcctagttaatgatgtttaatagctca

SEQ ID NO: 337586 - DNA, 122 bp, Homo sapiens
gtccctctcgcagcctccagacccctgaccgccttccctcctggccatcccggcccggcgcggcactcaccctatcgctgctggcggggggtccggagatccgctcatcagcaggcggcgcc

SEQ ID NO: 337587 - DNA, 122 bp, Homo sapiens
agacaggtgcacagacctgcgtggcatctgattctgtgctcatggagccaggcctgctcccgtcctcccagcaggcagctccggccgcccctccatccttggaccgtcaggaacccctgagg

SEQ ID NO: 337588 - DNA, 122 bp, Homo sapiens
gtgatgagccactggcatcttctcctacatacttcattaagccatgaggaattctctatgcggatatgaggaacgctgtgattttggtcagcagtcctgtgtggctggtgccacggtagaag

SEQ ID NO: 337589 - DNA, 122 bp, Homo sapiens
tggcacccagacgcgtttcccagcccacacgcctgctacagggcccacctgtgtcaccctcgcagaggcgcttaccaggactcaaggggctctccgctcagaacccctcatggcctccctga

SEQ ID NO: 337590 - DNA, 122 bp, Homo sapiens
gcgcactgcggctcttcaccttgtaaaacaccctgcagccgggtgggggttgctcagaaccggcctagcccacccgggggcccccagcgcgggtgcgcgaggagccccagccttcaccttca

SEQ ID NO: 337591 - DNA, 122 bp, Homo sapiens
cgtcctcgtcgtagacggtgagcacaagcagcgcggcgaagagtgcacccgcgaagaaaacgagctggcgggccagcagcgtgcgcaggggcgcggggggcgcagcggtgcgcaggaaggcg

SEQ ID NO: 337592 - DNA, 122 bp, Homo sapiens
cgcctgggccccgcctggccccggccgaacacccctcgctgaatgcgcgctccgctggaccgaccctaggcactcctggcccggagtcaggtttcattgctgcctaaagctactcacaatct

SEQ ID NO: 337593 - DNA, 122 bp, Homo sapiens
cgttagggagtctgaagggaccagacgtgaaaaggcaaagttcagagtaataaagggaaacggccggtcatttcctgagaccattcttccgtgtctttctagcagaccttactgttggatga

SEQ ID NO: 337594 - DNA, 122 bp, Homo sapiens
ctttggccacgcaggagactgagttttgtgaggggttgtccttctcccagtctctcttcccgctgggaacagaagtgtccagtaaacccacctgcattccacgtgtcctgtggccgcctcca

SEQ ID NO: 337595 - DNA, 122 bp, Homo sapiens
acaacccaaaatgagatctaggaagtacaagtgatacaagttgttcagaagaccatagggcggcagcactggctggattgtccaggacaggatcaccttcatgggagaggaagactttgcac

SEQ ID NO: 337596 - DNA, 122 bp, Homo sapiens
tgcccatgatgggagaagctgtggagttccattgcacaggggtgtgagggactgtggccacgtttgcagtttgccacttgtgtgaaggaagttcagatgtggccagaatcaggacagacatc

SEQ ID NO: 337597 - DNA, 122 bp, Homo sapiens
ggagagttcccaaaccctcacgtatcctttgagtaacttgccaacttggggtgatgaaaacgcactcccctcctcccgccgccgctgggtcgggctctgaacgcacgagcctcggagctatg

SEQ ID NO: 337598 - DNA, 122 bp, Homo sapiens
tcttctacaacctttgtgtccaaggccttgaccattccagccatgacattgaccacattccggaatttagaccaccagggatggactgcatcagacgcccaatgggtgcctctgactccctt

SEQ ID NO: 337599 - DNA, 122 bp, Homo sapiens
ctcgacgcgaccagacaggcgcgtgcgcgtcagtcgaaaactccgcccctcacacgccctcgccccgccccgccagtacctagagcggcctagcccgggcagccccgcccctgccgtgactg

SEQ ID NO: 337600 - DNA, 122 bp, Homo sapiens
ccgacaccgctaccctggctccccgccggcagccggcagccagcggcagcggatcgaccccgttctgcggccgttgagtagttttcgatttcggctgatttttgtccctctgcgcttgcccc

SEQ ID NO: 337601 - DNA, 122 bp, Homo sapiens
agttctacctggtttccacagagtctttctttagatatgctaatgtaatcaattaactaacgcagagccttgctgtgtcctgtgagcctccatttctgtaaggtctgtaacctgctgtgtta

SEQ ID NO: 337602 - DNA, 122 bp, Homo sapiens
aaagatctgaatattcttattcacaagaacagaggcctgaatacaggaacactatgctcacgtacacacaaaagacacgcatggaataaagcattttgcatatccagtcttgcgcacttaca

SEQ ID NO: 337603 - DNA, 122 bp, Homo sapiens
ccccttgagaagtcattctttccatctacaggacaaaacccacaaaagccaggttagaaacgtcccccaaggtcacacagccagtgagggatggtggtaagattcaaactctggcagcatgg

SEQ ID NO: 337604 - DNA, 122 bp, Homo sapiens
gaagggtcccaggccggagcagaggggccctccagccccgaggcatcaaggagccctgcacggggagcctacctgcaaagcctggagcccagtagccgccgatgggtgctgggtggggccaa

SEQ ID NO: 337605 - DNA, 122 bp, Homo sapiens
ggtgaggtagaggaggtgtccctgacccgacgagctcgagggagcggcctggctgggaggcggggggccgcggggcccggggagcgggcgccgccgagggccctggaagcggcggggctggg

SEQ ID NO: 337606 - DNA, 122 bp, Homo sapiens
catttactatcgagatttaaatgcctgttttctccccagaggttgacggatatattcagacgttacgacacggatcaggacggctggattcaggtgtcgtacgaacagtacctgtccatggt

SEQ ID NO: 337607 - DNA, 122 bp, Homo sapiens
gaaatccaaaaaagagtgagtgagttagagtgcgcgaaggagtagccaaagggagcgtcgcggagctgccgcggctgctgcgcacttctccgactccccgttttggagctgtagttcacccc

SEQ ID NO: 337608 - DNA, 122 bp, Homo sapiens
agcctcaagaggccccagacttgctggaaaggcagatgtgtttaaaaatgaaaagaaaaccggaacggaaaggtctgttcactggcaaaagaagtatttacaaatcattgtggaaatataga

SEQ ID NO: 337609 - DNA, 122 bp, Homo sapiens
gttgtggaccaagcaggacacagactctgcagaggcgttcctgaccaccagggtggcttccgcatagaacaggccatctttatcttggatgcgatgctcagacacggccagcagcttctctc

SEQ ID NO: 337610 - DNA, 122 bp, Homo sapiens
gagtggagaccacacaccaccctaagagtgggggtccccacagcacctaaagtggcaggacgtgccctcgggtagaggcacagtgaggctgtgcgggcaacacaggcaacctcctccgccag

SEQ ID NO: 337611 - DNA, 122 bp, Homo sapiens
ctgtgttgcccaggcacacaataggtgtctcgcccttgggtcaagccgatgccttgtatacgttctgcctggaaagccccttcttttcagacagcaaacctgtactcaactttgatgactga

SEQ ID NO: 337612 - DNA, 122 bp, Homo sapiens
cacaccacaaccatcgcagtgggacaagtcgcggcctctccaggcaagagacatttgactcggaaacccaggagagtcgagactctgcctacgtagagccaaaggaagattattcccatgac

SEQ ID NO: 337613 - DNA, 122 bp, Homo sapiens
ttctcaaatctcttttggttctcagaaatcattcaaatttaaaagtgaggattaaaaaaccgattggaaactttatggtgtatgcatcaagtgaggtgttatttataaaatgtgggtataag

SEQ ID NO: 337614 - DNA, 122 bp, Homo sapiens
ggtggccgcctccccctaggttgtggatgagtcttggcctagggttcagggccctccggccgcgggaggatctcccgccaagcttgttgcttttccaagttagtgcctggcgtgtgtgtggg

SEQ ID NO: 337615 - DNA, 122 bp, Homo sapiens
gtctccgccactccctctggcggcgctggccgtggctctgtctctctgaggtgggtcgggcgccctctgcccgccccctcccacaccagccaggctggtctcctctagcctgtttgttgtgg

SEQ ID NO: 337616 - DNA, 122 bp, Homo sapiens
ttatctgactgaccggctgggatgtgagctcagcttagaggcccttgtctaattcctctccgtccccagagtctcacaataaagacttccacaatgaaggaatgaagaactggttctcattt

SEQ ID NO: 337617 - DNA, 122 bp, Homo sapiens
ggggcagggcggaagggccctggccttgttgggtggaggtgaagagttaatggctccgcgcgcaggcactgccctctgaactggaacaaaatgcaacttccggttggagtcactcggccagg

SEQ ID NO: 337618 - DNA, 122 bp, Homo sapiens
ggcttcttcctgaagagcgtggagaatgcacccctggccaagcggcggaagcagaagctgcggagcgccaccgcctcccgccggggctcccctgcaccagccaacccgggccgagcccccgt

SEQ ID NO: 337619 - DNA, 122 bp, Homo sapiens
ctcgttctgcttttcctcttctctaacgcacagctccccacatcccaggctggggtgtagcggcccagcctctgggagttccatgtcgtctgccacttctgccccacgttttattttctgat

SEQ ID NO: 337620 - DNA, 122 bp, Homo sapiens
gctagactctctaagagcatgttatacgttagaatatcaattacttttatttgcattcatcggaactggtattgcaaacaatttgtctgagtggaatgaaagaagagactgaagtccttcag

SEQ ID NO: 337621 - DNA, 122 bp, Homo sapiens
tccgggtcgtcctggtttggcttccttaggactgtgccgctttcactcgagctcctgcagcggcagcccgccgccttgtggccagggtggaaaacggcacccggcggacagggcaggagacc

SEQ ID NO: 337622 - DNA, 122 bp, Homo sapiens
ctaaagactattaaggtttgaggattcagggcccgtttcgcttccggctagggaaggaagcgtgcttcccggggcccaaatgaacatggaaatttactaagtaggaagttgagcactagtcc

SEQ ID NO: 337623 - DNA, 122 bp, Homo sapiens
ggctgcaccgccatctactcacgcaaccaggcaggaaatgacagaggcatcttctgctcccgccctgcctccctccccgccaggagagtcaccctccatgccctgccccggggatgtttttc

SEQ ID NO: 337624 - DNA, 122 bp, Homo sapiens
agtcaggattatatgagatgtttgtataggcaaaaccccaagaaacttcctgaaaggttacggtaatagtaaaacaagtttttccatcacatctgtagcttgtgttgaatgagatgtattga

SEQ ID NO: 337625 - DNA, 122 bp, Homo sapiens
gagagaagtgaacaacagccactgatgggctgggaagatgaaggtcaaccattcattcgtcggcaatcaagaactgatagtggaatattttatgaagattctggctactctcagctctctat

SEQ ID NO: 337626 - DNA, 122 bp, Homo sapiens
cacattcccatccacgatttctacagaaacagcagcagcacacatcagaaagggcctcagcggggacagaattaacactccctcagcacccacagcactccatgccccacgctaggaatcaa

SEQ ID NO: 337627 - DNA, 122 bp, Homo sapiens
aagaggtccggtcgaaaagagttgaaagatacgaaattaggtggtcgttggaatcctgatcgcagtaaagtggtccttggtaactgctcgagtagaacatgtctgcatccgccaatagtccg

SEQ ID NO: 337628 - DNA, 122 bp, Homo sapiens
tttgcctaattctatcttctgtctttagaaactcaagcctcgactgggctcggtggctcacgcctgtaatcccagcactttgggaggccgaggcgggcggatcatgaggtcaggagattgag

SEQ ID NO: 337629 - DNA, 122 bp, Homo sapiens
cagcaagtggcagtgaatgaacgatctaagggagcgactgagggcgcgtgacgggcccgccgggcactggttcgtggagcgtggcggttacgggcggtgcacagcgcccgcagcccgctcct

SEQ ID NO: 337630 - DNA, 122 bp, Homo sapiens
gggccagaccgccccgacccggctccgctgtctgagaggcgaggggtccctgtcacccaccggcttggagcctgtggtcgcagacaggcatgtgtcatccatgtgccaacagcctgccatgc

SEQ ID NO: 337631 - DNA, 122 bp, Homo sapiens
acccttcgcggtgggtttccttgactccgcataaactcccgttccagcccaaatcagaggcggtcgcagcagccgttcctcgtctccatcagcatccgcgttgccatttccccgtcctgagc

SEQ ID NO: 337632 - DNA, 122 bp, Homo sapiens
attcttggcttcacaggtatagactgccgcatcctctgggaaggcttcaattagcaaaagcgtgtattcttgcccatcatgaagaaatttgcacttgaagccagtggaaagcagctgctctt

SEQ ID NO: 337633 - DNA, 122 bp, Homo sapiens
agggtggcctccggggccagtggctctggcaggaggctcgagtcaacctggcgggaagaccgtggcctcacagagcgagagcggacccgcgaggctccctggtgcgtgagtgcccaggccct

SEQ ID NO: 337634 - DNA, 122 bp, Homo sapiens
gcggaattgccagacagtacttatcagggatacatcttaactagaagcttcttccggcgccgaggcaaccgcctcgccccaccaatgggtcccccagagaccccacccccgctcaagtctaa

SEQ ID NO: 337635 - DNA, 122 bp, Homo sapiens
acgcgctccgggtagcacgtgtccagcccggtgacctccagcaccacgcgcagcctgcgccgctggtagatctccaggaagcacaggaagtcggtgagcagctccacctccttcttcacctc

SEQ ID NO: 337636 - DNA, 122 bp, Homo sapiens
aagggacctcgacgcgggttccttgcctcagcagaggttttcgatcggccttatgtcccgcggctggcaggacacttagagctcacttgctgttttcgttgaaagaccgacccttttgataa

SEQ ID NO: 337637 - DNA, 122 bp, Homo sapiens
taatatagcaagggatggcttgaggaacaggaactgagtttccgataaaatccaggatggcgtctgtgcttcagtgagccgtcttgatccattgtccttcctagagagtttctattccctct

SEQ ID NO: 337638 - DNA, 122 bp, Homo sapiens
taattgtgccttcctaaatactcttcttcattcagatatcatgtgcctacctagtctattcgatcttgtgggggaggcaggaaggcaaacattacttatgcaatactcaagtcaaatacata

SEQ ID NO: 337639 - DNA, 122 bp, Homo sapiens
gaaagcaggaagctcaacgtgtggctgagtctggggatttttatgtgctcagaatgggggcgaggctgctgattggtccatgggtgggcctagataaagcaccatttgaatggctaaaaagc

SEQ ID NO: 337640 - DNA, 122 bp, Homo sapiens
atgttggtatagctgattcaacatctttatgattcagagatccctgtaggaagcatgccccgattatttgtcttgttcttgtttactactcttgggggattgggagatccctggattataag

SEQ ID NO: 337641 - DNA, 122 bp, Homo sapiens
ccaatgcccacttcctgcctttctttcgctcggttttgaaagttgctctctttcctattccgtttctccttccttttcgctcctcctactgccgtaaatggcctactagagttgtcgtgaaa

SEQ ID NO: 337642 - DNA, 122 bp, Homo sapiens
aaaagcttgtacactctctaaacagtgcaagggcagacctgggaggagtagtgagcagcccgtccctaaaggagtccaagcaaagtttctgcgcaggatgcctttggctgtgtggtgggaag

SEQ ID NO: 337643 - DNA, 122 bp, Homo sapiens
gagcttgtcctcattttggaactctctcagcctgctgcccagtttcccgggaaggtagggcggaaatcgccccggccaagcggtttcatccaaaactgcatataatctttacatctgaagtt

SEQ ID NO: 337644 - DNA, 122 bp, Homo sapiens
gggctcgggacctgcagcccaccatgtctgagcctcccaccccctccatgggctcctgtgcgcccgagcctccccgacgagtgccactccctgctccaccatgcccagtcccatcgaccacc

SEQ ID NO: 337645 - DNA, 122 bp, Homo sapiens
tgagttcagatgcattttaactagaagatagaggtacattatttcaaaaaacaattaattcgctttaaaaacctaaaacactggagatgatacaaacctgagctggcacagtgtatgggttt

SEQ ID NO: 337646 - DNA, 122 bp, Homo sapiens
caggtgggagagggcctatgactcggccgagtccagatgcgagaggggctatgactcggccgagtccaggtgggagaggggctatgactcggccgagtccaggtgcgagaggggctatgact

SEQ ID NO: 337647 - DNA, 122 bp, Homo sapiens
tcttgcatcctagcttctgagaggcgtgcttcttggtgcccggcctttctgccacctccccggctcccctggattgagccctgtttgtctgggagagcccagagtgtcctgtagacacaggt

SEQ ID NO: 337648 - DNA, 122 bp, Homo sapiens
ggcacgacagtatacttagctttggttaattgtcctctgaataggattctaaatttaaatcgtgtgggagaagacatgaggaggtctgagccatgctcctgagaagctccaggcatcttcct

SEQ ID NO: 337649 - DNA, 122 bp, Homo sapiens
tctcctctaccctttcctgaaaatcccttctgtaaaagtataaacaaaatgtcttctacccggcccggcgcggtggctcactcctgtaatcccagcactttgggaggctgaggcgggcggat

SEQ ID NO: 337650 - DNA, 122 bp, Homo sapiens
tgcctggccccttgtttctttttaattttctagtttggctaccagaaaattcaaaattcacgtggctcacattttatttcagaggattacctcctttttaaaatctcaggctgcctgctcaa

SEQ ID NO: 337651 - DNA, 122 bp, Homo sapiens
gctggggtcgcagggggcacagaccgccgggggttgacggtgaaggtgtgtccactgcggcggggggcccccacccctggccctgccttcaccccatagaacaggcggctcatgaggggatc

SEQ ID NO: 337652 - DNA, 122 bp, Homo sapiens
gccgtcctcaccagagatggaccagggaggacaggatgctgggcaggggaagccaagtcacgggcaggccgcagtggttcttgcgtggcctggttttattttcattgtgaaatatcatgctc

SEQ ID NO: 337653 - DNA, 122 bp, Homo sapiens
acctgagtgtcaccgacagctgcggaggcactggggcaatctgtgtgtttctcagcctggcgtcgggggttaagggggcgggaattactcggcgaggtcgggaggtcgcgcggtggaacccg

SEQ ID NO: 337654 - DNA, 122 bp, Homo sapiens
cttcactcctgagccagcgcgaccacgaacccaccagaaggaagaaactccgaacacatccgaacatcagaaagaaactccagacgcaccaccttaagagctgtaacgttcaccgtgagggt

SEQ ID NO: 337655 - DNA, 122 bp, Homo sapiens
aagccaccgactctgtccttgattggctgtaagagctgtcctttaacgaaattctagctccgcctcagaccgatccctcgctgttgcgcctacgtatgtttgactcctcccatccacccgtt

SEQ ID NO: 337656 - DNA, 122 bp, Homo sapiens
ccccgcagctccagctccaccagaccgctttcatcctccagcccgtcaatgacctcacagcggtaacgcccatagtcctccagccgcagatcctggatctccagcgagacgtcatgctcttt

SEQ ID NO: 337657 - DNA, 122 bp, Homo sapiens
cccctgtgcaacttatacctagcatcttgccttgtgagagaaaaaagtaattggtaaattcgtgactgaaattgataaataatagatcgtattcagtctgagttcttctgttcttctgttgg

SEQ ID NO: 337658 - DNA, 122 bp, Homo sapiens
gtgagcgaggaggagctggtgcggcgccagagcaaggtggaggcgctgtacgagctgctgcgcgaccaggtgctgggcgtgctgcggcggccgctggaggcgccgcccgagcggctgcgcca

SEQ ID NO: 337659 - DNA, 122 bp, Homo sapiens
agcccccttgtgctgggcattcattcttcaacaaatatttactgagtggctcctctgtggcgggaactgttagaggtgctgcgaatgccatgaacaagaaagacactgcctctgcccctctg

SEQ ID NO: 337660 - DNA, 122 bp, Homo sapiens
cgcctgcgaacaggaggttccaaagggagcagccccaggtggcaggggcgcaggccgccgcgccctgggaggccccccgagcacaccagccactctgtcgcctgcgggcacggggcgagacg

SEQ ID NO: 337661 - DNA, 122 bp, Homo sapiens
aggttaaacggcactgaccatgctgagccacagccggtaaagatggcggtggcacactgacgtcacttccgctccgagcctccggccgggtggggctccagggcttgagtttcaggcacgta

SEQ ID NO: 337662 - DNA, 122 bp, Homo sapiens
tcacacgtgctgcacacacgcggtgatcctgctggtctgttgggagtgaaatatgtcccccgtgactccctggtgacttcctggccatttgtatatgtttttttctgtgacatgattattgt

SEQ ID NO: 337663 - DNA, 122 bp, Homo sapiens
ctggtgaggggtaacacaactggtgaacagcactgaaaactcacttgagatcaatgatcacgaactgcaggtgagtcagcgcaattgcgtgcttcacccaagtcttatccagctgcagcaac

SEQ ID NO: 337664 - DNA, 122 bp, Homo sapiens
tcatcactgcgtttccgttttctgtgaaatcaaatggcgcctttccctttcccgggaagtcggtgtcaccgcccgtttgctgtgaaatcaaatggcgcccttccttttcccgggacttcggc

SEQ ID NO: 337665 - DNA, 122 bp, Homo sapiens
gggaaaatagaaaacaaatgtgctgctgaagcctatgttgtttgaagaaggccctggcagcggtgctcagtctctccctttagccaggcaggaggcccagtgtagccttgaggtagaggtgt

SEQ ID NO: 337666 - DNA, 122 bp, Homo sapiens
accttgcttccacagaacaacttggttttccaagggcagagtggtgggtggagctatgggcgttggatcaagagacttgggttcaagtctcagcactgctgcaggtcagctcttggggtttg

SEQ ID NO: 337667 - DNA, 122 bp, Homo sapiens
gttttcattacaaataagaccaccgagtgggctcctggcgtgggggcgggaccagccgcgcgcagtcttcagaggcagccccccaggctgtctctggagggtgtgtctctgcttccctttcc

SEQ ID NO: 337668 - DNA, 122 bp, Homo sapiens
ccagcctgagtgacagagcgagaccctgtctaaaaaaaaaaaaggattcaaatatggtggcggtggggttctagatctgtggttcccaaacctagctaatgatcagaattgcccaggtgttt

SEQ ID NO: 337669 - DNA, 122 bp, Homo sapiens
gaaataccaggcattcttaccatgcccctaaaggggtgactcaacctttccagctgtactcgcattcccagagcagcactgctgcccccttgcttaaaagcacggttgcccccaggaaccag

SEQ ID NO: 337670 - DNA, 122 bp, Homo sapiens
agtcctgataaactcctctactcgccaagctggacttgtctgggtcaatctttggtttctcggcttcctctcagtttgggggaaggtttttattaatgcaattctgggtttttcttgttaca

SEQ ID NO: 337671 - DNA, 122 bp, Homo sapiens
gggagcgcgctcctgcggcggcgacggcggcggccgtcctcatcccggcgcttgagaggacgcggggctgcgcaaatggcttgtcccgctctcggtctggaagctcttcagcccctgcagcc

SEQ ID NO: 337672 - DNA, 122 bp, Homo sapiens
ctggtcccagcgggtccaagctcgtgttggcttggtgcaagcctgtttgttagctctgcacgaccaattaattttctcctgcatcttccccccgtggtgggtggcggggtggggagggggtg

SEQ ID NO: 337673 - DNA, 122 bp, Homo sapiens
ttctcacaggacctagagctggggcctctgaggtcaaagagcctgaacatttccaaacggcgcttttgccttgatttccaaattaaccgcacgtgacgctttcctgtatttcgactgcttta

SEQ ID NO: 337674 - DNA, 122 bp, Homo sapiens
cctcctccacctcctaaatgaatttgtttcccgaatatttatttatttatttttttgagacgaagttgcccaggctctgttgcccaggctagagtgcagtgacacaatctaggctcaccgta

SEQ ID NO: 337675 - DNA, 122 bp, Homo sapiens
cgcggcccaatggtgaacgcgccggcttcgggctgggcggtactgggctggctgcggtggcgcgcgggcgcggcacccggaagtcggcggcggtggcggaggcggtgagtgcgcggctccgg

SEQ ID NO: 337676 - DNA, 122 bp, Homo sapiens
ctttattctcaggaacatttccctcatgaacacaagatggctgccagtagccatcaggcccgtgtggttgcctccttgttcatgccaaagagtgaagatgccaaaaattgctccacccaatc

SEQ ID NO: 337677 - DNA, 122 bp, Homo sapiens
tccatcgggagtccagagaggcacacgcccctgaattcaggccgctgtggccgcgacacacgccaagcccgagggccaggtatgcagagagggtccagaccctggacgcccaccctgggccg

SEQ ID NO: 337678 - DNA, 122 bp, Homo sapiens
cgtggtgcgttttgcctgcgcgtctttccactggggccggggcggcgcggagggttcagacgcgggctcttactcaaacgctgatccccgaaactaccgagcagtgtctgcgcgacgcgaaa

SEQ ID NO: 337679 - DNA, 122 bp, Homo sapiens
ctggcagtgggctcagtcgggggtgcggggctgtgacctagaggcttcagtgtcgatccccgaggtgttcgcgcgcgccagctgtcctcgcggccgcctgcgcgctggccgcctgcgcgctg

SEQ ID NO: 337680 - DNA, 122 bp, Homo sapiens
gctttaaaaggcactgcaccataatgtgttttaaaaagaccacagcaggttgaaaaacggcgaaatgcaaatgacagagtgcttgtgtgaaagtggagatactactcccaagggtggggact

SEQ ID NO: 337681 - DNA, 122 bp, Homo sapiens
atctcagacgatgggctgctgggcagagacgctcctcacttcctagatgggatgggggcccggacgaggtgctcctcacttcccaggtgggatggcggccgggcagagacgctcctcacttt

SEQ ID NO: 337682 - DNA, 122 bp, Homo sapiens
agaggagcccacagaactcctccttctgatacttcttctccagctcgggaggacactcctcgctggggatacagccctcgctccccggcgggcaggtgggcggcggcaggcagggagagtcg

SEQ ID NO: 337683 - DNA, 122 bp, Homo sapiens
ggcccacagctaaccttcagagctgcacaagcgccgggagctgtgggcacgtgaggagggcgagcgggtcctaggtgcgtagacccgtgggtggggggcggagcggaccggtggaggtgggc

SEQ ID NO: 337684 - DNA, 122 bp, Homo sapiens
gatgttaatctataattaaagaacaggtttcttaggctgcttattcaactacagaaacaacgaacaagaacttatagtgcttttccataataatgcattcataaattttaaaaaaccatttt

SEQ ID NO: 337685 - DNA, 122 bp, Homo sapiens
acagccacgcacaccggctagcacagtggggagggcagctccaggtgcctgcacacgtgccggctgcgtgcaaggctcctgctgaaccggatgtactgcacacggcttccgctgcaggcacc

SEQ ID NO: 337686 - DNA, 122 bp, Homo sapiens
aagatgtggagaaagcagaaggtgagggcgtgagggggaaattgaggccgacacaggtcgcggtttctttctatgctcgacagctgatttaatccaggacggaactgttaagtaggggaagt

SEQ ID NO: 337687 - DNA, 122 bp, Homo sapiens
cctacggtgccgtggcccgagctgtctgttgcatgcggttcagcggaggccggaggagggcggtgggcacgtgtgggtcccacctgacagccgtctgcctgttctacggctcggccatctac

SEQ ID NO: 337688 - DNA, 122 bp, Homo sapiens
ggagttctgagaagggaaaggagacagacactctgggaaaatctggggtcacctcgattccggctcctacgctggatgccgtgggcaagcatcggtctcctttgatctgaagatcctgccca

SEQ ID NO: 337689 - DNA, 122 bp, Homo sapiens
cgggagagaccgtggccagcatggagagcaggcagtggtgagcgccagctgaccgcaggccgcctggtgaggtgcccaggccagaggttgccaagcagaggcctgaggggagccgcggtcgt

SEQ ID NO: 337690 - DNA, 122 bp, Homo sapiens
gctctctgtgtgacttacatcacttggctcatatcccggccatcattaggaggaattccccgaaatgatgctgacgttttagttgacatggtggtcttctagtcgcatccttgaagactcgt

SEQ ID NO: 337691 - DNA, 122 bp, Homo sapiens
ggagtttgtagcaggccctccacccaggctccgcgatgcttggggccacgcactgcatggcggccacgcgcttgaagaacgcagacttgcgatggaagccgatcagctcatagagctcggag

SEQ ID NO: 337692 - DNA, 122 bp, Homo sapiens
aaaatcatggtggaaggcaaagcgggtgtcggtatttcacatggtgagaatgagggcaagcgacagggaagtgctatgcacttctaaacagccagacctcaagagaagtcactattgccagg

SEQ ID NO: 337693 - DNA, 122 bp, Homo sapiens
acagaacaaacagaatttttttttgcaactagagggggaagcacagagctaaaaataaaacgaaaagatcagtatctgtcagtctgacagctgattggctgctcggagatgcatataattac

SEQ ID NO: 337694 - DNA, 122 bp, Homo sapiens
ccggaggcgagctgccaactgaaccaaaaatgccgctgccgggagttgctcgcctagctgcgcagcagagatgtccaaaccctccacgcgggaggcggcagctcgccgagaaaagcaggcgt

SEQ ID NO: 337695 - DNA, 122 bp, Homo sapiens
cagattttaaaatgaagagatgttgccttggccagtgcagacgggggacacctgcgcacacggaggagcccgtgaggccgctgccgccctgtgggatgggaaacggggaaggctttgggggg

SEQ ID NO: 337696 - DNA, 122 bp, Homo sapiens
actcgccctagggccacggagcggttcctctgtctggccctgtgctgaaggtttcgtactcgttgtctgtctcctttaatccaggcagcattcttgtgtagtcggcagtgtagtggggaaac

SEQ ID NO: 337697 - DNA, 122 bp, Homo sapiens
agctgctaagatgtctttatgtgtaactgccaaagcttggaagctgctaagatgtctttacgcgtaactgccgaagcttggaagctaagatgtccttcaataggtacgtagataaacaagct

SEQ ID NO: 337698 - DNA, 122 bp, Homo sapiens
tcgaaactctgtggctttcagcaaatgctcctctgtccagcccgagcttccctgcagcagcgcgtcctgctgtccagcacacagctgggctgggactcactgctccatcgcccgcctccctg

SEQ ID NO: 337699 - DNA, 122 bp, Homo sapiens
tacagctctttggtttccgtgtgcagatttccaagttgatcgtgatgttgatccgggactcggtgtggtgacggcccgccctgagcacgaaagtgcacgctcttgacaacttccttatgttt

SEQ ID NO: 337700 - DNA, 122 bp, Homo sapiens
tgcgcagcccgccctggagctctggctgcagcagcagcagctcttcctcatcctcttcgtcgtcgggttgggctgctggagggttgggggcactggggacctcaggctccgggcccagctcc

SEQ ID NO: 337701 - DNA, 122 bp, Homo sapiens
gctggctggggatgatttctatcactagaagctgttaaaaatctcttcctcctgtcagtgcgattcccccaccccctagttaactcctgccatcttggctcaaagggtgtttggagtttgag

SEQ ID NO: 337702 - DNA, 122 bp, Homo sapiens
ccccctcctctgtgttctccagacatccttatactcctggatgtctgctttcggatggctcgtccttctcccttgctaaagccctggaatgcagagatcgcgtgctatttgtgttggtaact

SEQ ID NO: 337703 - DNA, 122 bp, Homo sapiens
gctaagtgttgccatctctgtgtgataggattgtgggatttttttttttttttttagggacgggagtctcactatgttgcccaggctgaaatgtagtgactactctcaattgtaattatagc

SEQ ID NO: 337704 - DNA, 122 bp, Homo sapiens
catgaagctgcacccactgcctggcctagagagagccactgggccccagtgaccaccaggcgacaagatggggatctcactgtgcactcaggtcacaacacctgtgacttagaggagtgact

SEQ ID NO: 337705 - DNA, 122 bp, Homo sapiens
taaaaaaaaattagctgggcatagtgtagtggcagacgtgtgcctgtgggcctagccacgcgggaggctgagttgggaggattgcttgggcccaggaagtcaaggctgcagtgagccatgat

SEQ ID NO: 337706 - DNA, 122 bp, Homo sapiens
tgtatgtttctctgttattgcaccctgaaagttagactccaaacccacatcctcattccacgcaaagactttattccagagacagggtcaggttcacttctgcatcttggatttggggaaac

SEQ ID NO: 337707 - DNA, 122 bp, Homo sapiens
aggtgtgtggcaggcagatgagggagcagagaactgctgaacagagtgagactcagaggacgtggttgagcatggctgcgaccctgcagttcctggtttgcctggtggtagccatttgtctc

SEQ ID NO: 337708 - DNA, 122 bp, Homo sapiens
ggcaggaaggaggctggacacaccctcggcctgcacggcctcccctgccgcctcctcccacgctggcacgcacacacccctgtccctgacatgcttctggcatgtgtctccttccctgccct

SEQ ID NO: 337709 - DNA, 122 bp, Homo sapiens
gagccccgcgggctatgctgtccacaggctccacggcttccccttctccctccgagatgacggtcatggggctgctctggatccggttccgcatgctgtacctgctgctggcggcagaaggc

SEQ ID NO: 337710 - DNA, 122 bp, Homo sapiens
gaaacatgaggagtcagggctttctggagaattgaaaactctagtcacccttacccaccccgcctgttagcctttaggctctgttttctctcaatgactgacaatattagctaacatttaac

SEQ ID NO: 337711 - DNA, 122 bp, Homo sapiens
agggcgggccgggctgcggggccgggtgctccggaggccgctgaagaggcagctccccaacgccaagagcccgtccagccccaggcccggagctgcttcctcagggagcccaccctgtgacg

SEQ ID NO: 337712 - DNA, 122 bp, Homo sapiens
catggactcttagggctctcagtcctgcctgggccccggctctcgttctctccaacatgacgccatctgctcaagcccttctggaatcctgtgctagaagagcacttcactttatagccaaa

SEQ ID NO: 337713 - DNA, 122 bp, Homo sapiens
caatgtttccaaccctatttccttatgctttgatgaggtgaaactgctttttttggggggcggagcgggggggctgcctctgttagatcaaggctacctagtttgggagaaagactgggagg

SEQ ID NO: 337714 - DNA, 122 bp, Homo sapiens
ggtggcgttaacaagttaacaaggtatagtttctggcctcaaggagctaactgcttaatacgggtagtaagatagaaacacaagtgtttataacttaaagtaataaatacttgcaggcagtt

SEQ ID NO: 337715 - DNA, 122 bp, Homo sapiens
tatcccccatccatccacaacaggcaggtaaaaaccgacagctggggcttaagggcctcccgggagctgggatggtaacaccaaagaaaccccaagctttgagcaaaggcatctgaaaggag

SEQ ID NO: 337716 - DNA, 122 bp, Homo sapiens
ctttgtttggaaacattcttggatcctcaggtgtcttgggcacttcccctccccagagaccgttctccaagcacaatccttgcacatgactttagttctttattaatgttttttgaagggat

SEQ ID NO: 337717 - DNA, 122 bp, Homo sapiens
ctattaggctggtagtaaaaagacttacatgagttcaggatgcattgaagtagagcccagcgtgttaaaaaggaacttggatgttcttcaggaaaagtccaaactctgcatttttctccagc

SEQ ID NO: 337718 - DNA, 122 bp, Homo sapiens
ctctggtgccagcctgcctaccccgctacccgctcacctgggactcccgttagctctgggcgccggaccttccgggctcgaaacctcccttgcgccccgccccacgcagagcgtcccgaccc

SEQ ID NO: 337719 - DNA, 122 bp, Homo sapiens
ggatcagctccgatgattgctctccattggtcattgtcaacttccgatggcctgccactacgctcctcatcttcaaggctctcatctcctttgcaaacttcttgaaccaccactgcgctgta

SEQ ID NO: 337720 - DNA, 122 bp, Homo sapiens
cgtagcgtacccgccggctgcgaggcgcagggcggaggcggagactgcgtggcgcaggcgcgttgctgggcttctcctgggtccccagacagctggaggagataaacagaggaggaggaggg

SEQ ID NO: 337721 - DNA, 122 bp, Homo sapiens
tctacatattcttaagttcagttgcttttaatttcttcaaagcctaaatatacagatacacgtacacaaatattttatgtactaatatatatacaagtagtaagattattcccaatttttat

SEQ ID NO: 337722 - DNA, 122 bp, Homo sapiens
ccctgtgcccacaggtgagaggcccttcgcctgcagctggcaggactgcaacaagaagttcgcgcgctccgacgagctggcgcggcactaccgcacacacacgggcgagaagaagttcagct

SEQ ID NO: 337723 - DNA, 122 bp, Homo sapiens
tacttgtagttttgcatggcgctggctgcggcgcgagcctcccgccccgcgaagacgtcccgcaacagcagccacacacccaggcgcccgggtcgcctcctggccgaggctgctgcggatag

SEQ ID NO: 337724 - DNA, 122 bp, Homo sapiens
ggctgggcttagccaaccatgtctcctctgcccctatgcccagtttcaaacagtccagcacgtctggacgaagatatagcataattcccatccaattctgatgtgcagatgagggctcataa

SEQ ID NO: 337725 - DNA, 122 bp, Homo sapiens
cacgtggagaggtgtgtgcacactcctatcccctgtcccatgtggaggggcgggtgcaaacgcatcctctgtcccacgtggagtggtgtgtccacacgcatgtcctctgtcccatgcccacg

SEQ ID NO: 337726 - DNA, 122 bp, Homo sapiens
agagctccccggccatggcaggcgcgcactaccctctgcactgcctgcactcggcggcggcggcggcagcggccggctcgcaccaccaccaccaccaccagcaccaccaccacggctcgccc

SEQ ID NO: 337727 - DNA, 122 bp, Homo sapiens
ccaccttgacctcccaaagtgttataattgcaggcgtgagccactgtgcccagcctcgggcgagctgccgcttaaccactcaagtcatatccctgcatcttcgaatgggaacagtgactcac

SEQ ID NO: 337728 - DNA, 122 bp, Homo sapiens
caacctttggatgggctgtctcacgcggatgtggttaatctgctgaagaacgcctacgggcgcattatcctgcaggtattgcgatcaacggagcacgcagctgtgcaaggcagataagtggc

SEQ ID NO: 337729 - DNA, 122 bp, Homo sapiens
gcagcacctgccagtaggtagcaggatgtgtcgtagagggcttgctgaccccaaacatgccgagtcacccacatcctggcctccccgcccactttgccggtgggacagagtggctgacggcg

SEQ ID NO: 337730 - DNA, 122 bp, Homo sapiens
gaaattcatgtgccaagtctcagggttcctgtcgtgatttccaagttgagtttctggggacgccacagaccgtggagtgtctgacccagggctgttgcagggtcctccctgaccccatgaga

SEQ ID NO: 337731 - DNA, 122 bp, Homo sapiens
gccgagaggaggaggaggggcgacggcggggatgttcccgcaggactggggacaccagggcggggaaggcacgggacttgaacctctccccgactcgcccccaatcgcgttccctcccttct

SEQ ID NO: 337732 - DNA, 122 bp, Homo sapiens
tgggcaccaagctgtgagttagttctacagcacaatgcttggctgctgtttcagcaattgcgcctctactgcttcaagtataatactaagaattcactttgatttttgatgtttctttacaa

SEQ ID NO: 337733 - DNA, 122 bp, Homo sapiens
ctgacctctctccacccccgcgttcacctccccaggcgtggcgttcagcaacggggagcgcgccaagcagctccggcgcttctccatcgccaccctaaggggttttggcgtgggcaagcgcg

SEQ ID NO: 337734 - DNA, 122 bp, Homo sapiens
ggcgccgatggagaggtgtgtgtgcaggaaggcagacagaaacggaaaaaggggcctcgtcgttgccaccttggtagaaggcagggtccaatcaattgttctcttatgtttggattaaacaa

SEQ ID NO: 337735 - DNA, 122 bp, Homo sapiens
ccccccgaggcgctgcactgggagcctgatgatgctcccatcccgagggtatgacaagcacgggcctgggagctggaagacaggcaggtgggggcctgggatcctcccttcccgcctggcct

SEQ ID NO: 337736 - DNA, 122 bp, Homo sapiens
ctctgtggtgggctgggggggcctggaagtgaggccccgccctctccccgaagctgtgtgcggcactggccaggtggactggggccatggctggcttccttccaaggtttctggagcgggag

SEQ ID NO: 337737 - DNA, 122 bp, Homo sapiens
ttccctcctcagcccctgatagttatagcagtaagaaaacgaaacgaaaagcagtcaaagcgttttggaaagttaacgccatgcgccaagatgaagctattactccaagcccctcttcatca

SEQ ID NO: 337738 - DNA, 122 bp, Homo sapiens
tggatgattctcaaatatcctgtggagtttaattccaaaaggacaagttgaattatccttcggggagggaaatgtgaatgatggctggtaacaagggcttcattcaggtcctggagaggtgg

SEQ ID NO: 337739 - DNA, 122 bp, Homo sapiens
gcgccggaaaagatggcggtggtgcgctgacgtcacttccgcttcaacactctggccgggcgaggctcgtgggctccagtttcagccacgtaggaccgggtagaacacagaaattctagttt

SEQ ID NO: 337740 - DNA, 122 bp, Homo sapiens
gtgagtctccctggagcccctgacgacagcgaagcggctgggcgctctccggggagtgggcgcggcacccaagaagggtttcttacagttccaagagaggaccccagccacagtcactccag

SEQ ID NO: 337741 - DNA, 122 bp, Homo sapiens
agcccagctaacagcagactgctctcggtgcttggcttggtacggtgatgtgccgcactccggcgtcgcgaggcgagccagagcagacatgtcccatgggacacaagagccgatgtcccgca

SEQ ID NO: 337742 - DNA, 122 bp, Homo sapiens
cttagttgggttccccatctgtaaaacccagacaataacacccatctcataaggtgtttgcgaggattacaggagatgtaaatgagaagtgccacttcccatacattctcttcagggaattt

SEQ ID NO: 337743 - DNA, 122 bp, Homo sapiens
gcggataaacaggaggtagaaggtgggagctctggggctttagcctaagctgcgttaaagcgctcagggaaagcccgcgcccagcatccatcgggctgcagactttggcaagggggcgaaga

SEQ ID NO: 337744 - DNA, 122 bp, Homo sapiens
gtagcctgtgcaggagacatggcggacgcagcatctccgtgctctgtggtaaacgacctgcggtgggacctgagtgcccagcagatagaggagcgcaccagggagctcatcgagcagaccaa

SEQ ID NO: 337745 - DNA, 122 bp, Homo sapiens
cgagggcacctggcaccgggggtaggcgggggatccctgcccttaggccttcagctttgacgaaaggttcttatcaataacccgagaaatagtgggagagtcacatctgggattccctttct

SEQ ID NO: 337746 - DNA, 122 bp, Homo sapiens
cttcctgctcttctaggtagtcacacttcactaaagtgtcatccaccagtgtgttgaatccgaagaatgacaattttctaccactggtgtaaaaaacaaacatttgaagacccttgtgcatt

SEQ ID NO: 337747 - DNA, 122 bp, Homo sapiens
tcttctcactggacacatggatgcacctctgtaatacccaatgtcttagccacaactgtccgcactttttaatgagatacatttcaacattattccttgtcacctcaatatcagatactttc

SEQ ID NO: 337748 - DNA, 122 bp, Homo sapiens
cactttccggcctcttttgtgtgagtgtgtgagtcaagccctgaatccgctggccacgtccggcctccatcccctttccccacgcctcctgggctccattccctgcctagtgaccactgacc

SEQ ID NO: 337749 - DNA, 122 bp, Homo sapiens
cgtttgctcatgagcacgcaggccaggagctgtttcgggggcagcggacagggctagaggcgcgtttgccaggcagcgcgctgcccctgcgcatcgccagccctgacagacgtgcaccacgg

SEQ ID NO: 337750 - DNA, 122 bp, Homo sapiens
ggttgagccagggattcagaatgaaatcttttcttttcttttttaaataaacggaagagtcgttctctgctcctcgctcagaaggtttcaaaggtcgtcacactgaagcccgggggcgttca

SEQ ID NO: 337751 - DNA, 122 bp, Homo sapiens
ggttcctattcctgtagggaggatattaacctggtaggtaggtgggagaggttcgtagcccgctttctaacaattggatggtgtttgcctcgctatagtcatgattagaatggcggtcacca

SEQ ID NO: 337752 - DNA, 122 bp, Homo sapiens
gcactcctcagcccttgggcggtcgatgggaccgggtgctgcagagcagggggcggcgcccgtaggggaggatcgggctcgggcggcgcgggagcccatggggggcggggcttgggcatggc

SEQ ID NO: 337753 - DNA, 122 bp, Homo sapiens
aggtgcggacctggtgcctgagttgggagccttgaaggcgcggacaggggggtcaaggtccgagggatggccggaaaggatgaagtgggtcgggggacgctggggaagacggtgtggaagtg

SEQ ID NO: 337754 - DNA, 122 bp, Homo sapiens
ctactaaaatacaaaaaaattagctgggcatggcggtgtgcgcctgtaatcctagctactcgggaggctgaggcaggagaatcacttgaactggaaaggcggaggttgcagtgagccaagat

SEQ ID NO: 337755 - DNA, 122 bp, Homo sapiens
acataaataaaaataaaaatatctctatactggttgatagaatacccctgtccctacttgcgtgtcccaccctcacctctgcccctcctgtagtagctcccaaacctctcatgatctcccaa

SEQ ID NO: 337756 - DNA, 122 bp, Homo sapiens
tgagacaatagcttgctaagcaggggcccagtggtgtctcagagaaaccatgggtgtcctcgccacttcccagggagggtgaggtgagctcgggaacataacgatgttttgacttacaatag

SEQ ID NO: 337757 - DNA, 122 bp, Homo sapiens
tgaagcctttcctaaccatcttccaaaccagcacctcagaaatagtctccctcttctgaccgcctgtagcattgtattgtacctaagatcttatcacagtcaaacttgtcaaatactatgtt

SEQ ID NO: 337758 - DNA, 122 bp, Homo sapiens
tcctcttgcttcagcccgggcccccctctggaggtcaagcggctggcgagaggcaagaggcgcgcaggagggcggcagaagcggcgtcgcgggccccgcgccgggcaggaggcggagaagcg

SEQ ID NO: 337759 - DNA, 122 bp, Homo sapiens
ttactggaatttaagaaaaataaactgaagggaatctctattgctttcttccctaaaagacgtgctttttaaaaggcctataagcattacgtaaaaagattaagagaggtgtaaggagctca

SEQ ID NO: 337760 - DNA, 122 bp, Homo sapiens
tgcgttcatccgagcgcagtggctcacgtctgtaatcgcagcactttgggaggtcaaggccggaggatcacgaggtcaggagatggagaccatcctgactaacgcggggaaaccccgtctct

SEQ ID NO: 337761 - DNA, 122 bp, Homo sapiens
agcccaggaaggggccatcccgcccgcaaacgagaatcgggtactccagtggaaatcgcccgcggaagtttgaggttattgaacttttccacagaaaccctgacctaaattcttgacctcag

SEQ ID NO: 337762 - DNA, 122 bp, Homo sapiens
gggcgtctctctctcagcgccagagccaggactcagagcgcaggggcgtggagaagactccgcgggctctttgaacgtcgcaccctcctccctgcagcgtgcctgattgacagttctcacaa

SEQ ID NO: 337763 - DNA, 122 bp, Homo sapiens
aagcagaagtggcagtatctgctatcttttacgtcagagactgccaactggcagacttcccgcacgcctgtcttaaacccactactagatatttctgttaactgactggcccttgctcttta

SEQ ID NO: 337764 - DNA, 122 bp, Homo sapiens
ttgtcctgttctatggtcaaggcggggctgcaaaccaaccacgccccctccccgcatccccggatgcctgtgggggctgcagagtgatcgaaatgtcaggtaattccacaaaaatccacatt

SEQ ID NO: 337765 - DNA, 122 bp, Homo sapiens
aaacttccaagtggaatgctggttatcagcaatgcaactgaaggagatggcgggctttatcgctgcgtagtggaaagtggtgggccaccaaagtatagtgatgaagttgaattgaaggttct

SEQ ID NO: 337766 - DNA, 122 bp, Homo sapiens
agtgatctgcccacctcagcttctcaaagtgctgggattacaggcatgagccaccatgctcggcctgaaggaagtttttgtcagcattgaagatttggggtatatgtctagcagctcctttg

SEQ ID NO: 337767 - DNA, 122 bp, Homo sapiens
aaaaggaattacctagagactaaaacctgcacctgcaggtaaaaccaaatgacatcaaaacgatttctacttgcaaattaaaagcagaatatggcccttgatattactgcttagaaaagcag

SEQ ID NO: 337768 - DNA, 122 bp, Homo sapiens
agatattaataggtgtttttttcctatgacagcagttctaggatggtcaaataagtgcgtcgggttaaacaaagttaagcagctttctttactgcaggacttctcaggtgttgaatttgcta

SEQ ID NO: 337769 - DNA, 122 bp, Homo sapiens
gtgcccagcctgcactttcttcttaactttagaggtaccatttaggaaaccatactccggcgacattggagcggttccgatgcccgcccggaagagagcgctctggcccaggcatcgcagct

SEQ ID NO: 337770 - DNA, 122 bp, Homo sapiens
cacagggggatctcttagcaaacatgtcagtatttttaacaacctatatgtacataccgacgcacacctgtaataactgcttaatgaatgagcaaatgaaaaaatggaggccgtgaggctgg

SEQ ID NO: 337771 - DNA, 122 bp, Homo sapiens
agcccgctgctttttctatcctcccagtcacctttgcagacaaagaccaggggcagctcccgagggcactgtgaaggctcccatgccacacagtgagaactgtagcctctgcgtccaaggca

SEQ ID NO: 337772 - DNA, 122 bp, Homo sapiens
ggccaggggcgagggctggaagacgcggcgctgcctgtccagcttggcgcgcacgggctccgcagccagcagctgttccttgtgcctctccaggctctggggctgggccaaggtggtctcgc

SEQ ID NO: 337773 - DNA, 122 bp, Homo sapiens
ttttgtgattgatctacagaggccagcaaactatggcccccaggccaaatcagctggccacgtttttgtaaatacggttttattggaacacagtcatgaccattcgtttctgtattgtccat

SEQ ID NO: 337774 - DNA, 122 bp, Homo sapiens
tcccatcgctgcacaaacctcaccggtgtaaatcgttagggtttgcataggcctttcacacgttctgaaggattggtgagacaatccaggagagcaggtgccactagccccactttgcaaac

SEQ ID NO: 337775 - DNA, 122 bp, Homo sapiens
tggctcctaaatgtgccaggtactgtactgaagcacctcacataaaatagcacatatatgcgctcaatttcagatgtggaaacagaattcctaaacatatattcatttgttcaaggtcgagg

SEQ ID NO: 337776 - DNA, 122 bp, Homo sapiens
tcgccgtgcttaccgtatggggggtggccctggaaacgtcggggatttgagccctacgtccgcctttgctaaggaggaaacgcttgagtttggtagccaggagatggccaaggagttgaggc

SEQ ID NO: 337777 - DNA, 122 bp, Homo sapiens
ttattgtatctgacctagcctttcctaatcttgattgtggacttcttgatttgttcacaacggtgcatcctccaaggagtttaagcaggactggatgaaactggcccatgatacaggcactt

SEQ ID NO: 337778 - DNA, 122 bp, Homo sapiens
gcaggccggcgccaggatagccctcaccgacagcgccccttcccacccggagagaggcatcgacccccaaggagggcttcgtcaggcagcctctgccactcctgcatggctgcgacccgtcg

SEQ ID NO: 337779 - DNA, 122 bp, Homo sapiens
gctggcctctcaggctagagacttaaatcctgacacaatgagctactatggcaactactacggaggactgggctatggctatgactgtaaatatagttatacctctggctttggtgccttta

SEQ ID NO: 337780 - DNA, 122 bp, Homo sapiens
tcatgattggcatgcagaaagctggtagaatgtcattggaattttctagggaggcacatgcgcaacacccaaaatgactccaggcttcgatagccgcaggtcagcccgtcgtgccaggcacc

SEQ ID NO: 337781 - DNA, 122 bp, Homo sapiens
ctcctgagatttctgtgcttctgcaggaatttatcctgcttgagaagctcacctggaaaacgtgcggctgaagatggaaattcaacgttaggccccagagctgtggaaggtgttttcagttt

SEQ ID NO: 337782 - DNA, 122 bp, Homo sapiens
atttaatgctggctctctactatcccagggtttagcatcttgttatttccatgcattagacgtgtaatagatattaccaaatagatgagctgctgaagaatgttctatttcccgtagaaaga

SEQ ID NO: 337783 - DNA, 122 bp, Homo sapiens
aaacttctctccccctggaatgtcggctcccggagaacaggaccaaggctgtcctgaacacggctgtgtcccccagcgcctggcactgagtaggcacgcagcaaactctcatcaaggattat

SEQ ID NO: 337784 - DNA, 122 bp, Homo sapiens
ccgtgttttctcctggatgtcctttgcagtggattacagccacctgctgagggagccatacggcttcaagcagggctagaatttcttctttgtttttgatagtctttcctgctgaggtgccc

SEQ ID NO: 337785 - DNA, 122 bp, Homo sapiens
actactgtaagtctgttgcagtaactttggaaacagatgatagtggtttggaccatacctcgagtgctggtagaaattggtcataatacggctatgttaaaaaataaaacttaataggtttt

SEQ ID NO: 337786 - DNA, 122 bp, Homo sapiens
tgaggcaggccagaaggatccagagggagatctcgaagggggtgcgcacgtgtgtgtagtcgatgcccaggactggaaaggccttgcgcggcttcatgccatgatcagtgacggaatgatta

SEQ ID NO: 337787 - DNA, 122 bp, Homo sapiens
cccagctggcaggtgctgggagatcaaaggttcagtgctgtagaccaggttgctggggtacgaggagccaccacgggagtagcctgagtagcacaggtagccctcacaggaatgggaggaga

SEQ ID NO: 337788 - DNA, 122 bp, Homo sapiens
ttatgaaactattttaacctctggtgggggttaaaaaacaagccttgtgaatttattacccggaagaaagcgcagagggctgggatttacagcaaagccgccttccaagctccgcgggggcc

SEQ ID NO: 337789 - DNA, 122 bp, Homo sapiens
gagccaaaaatggagacaggacacagcaaagtagcctccatcacagttaatgacagagtacggccaaggtaaaaacagtaaatttttccaaatgttttcattcactctcctattattttacc

SEQ ID NO: 337790 - DNA, 122 bp, Homo sapiens
caccctgtccatgggctcactttctcctgagcatgggccaagcgggagctgagcatcgcgcgggtgcccgggagcctatcacctggggctctgtctgagggcttgaaatacgggcttgtgtc

SEQ ID NO: 337791 - DNA, 122 bp, Homo sapiens
gcctgaggtgatgctggtggaaacactcttctgtgctgccagttgtgtaaaagtctagcacgtacaattatgtacagcacataacacttgatcataataataaagagctttgcagctgctct

SEQ ID NO: 337792 - DNA, 122 bp, Homo sapiens
agaaaaagagtatctcccacactgaacatatttattcctagttctaaggcaacaaataggcggtaaaatactgcagtcaattcaacagattctgtagggatgcttctctctatctacataaa

SEQ ID NO: 337793 - DNA, 122 bp, Homo sapiens
cacggcctctccgtgcaggtcggtctgaccagtgccagtcggatggttcctcaaggtccacgggccatgagaaccttcctgggaacttcacgaattcgtttttttctgacagattgggaaat

SEQ ID NO: 337794 - DNA, 122 bp, Homo sapiens
aatgctgaaaatagttagccatcaagaaaatgcacatcaaaaccacaatgaggccaggcacggtggctcgtgctaatcccagcactttgggaggccaaggcggaggttgcagtgagccaaga

SEQ ID NO: 337795 - DNA, 122 bp, Homo sapiens
acttcccctgctcctggccttgctctcattcatctaactagctgcttaggtgagtgcacccgtctcatctaacactcttctcttgactctcacagatttatttttgtgatgaagtctcttga

SEQ ID NO: 337796 - DNA, 122 bp, Homo sapiens
tcaaaaaaaaaaaaagatatttatttgccaaataaagttactgaacttgtgaacttcggccgggtgtggtggctcaagcctgtaatccgagcactttgggaggccgaggcaggccgatcatg

SEQ ID NO: 337797 - DNA, 122 bp, Homo sapiens
ggctctcccccagacccatccgaaacttgggtgccggaaagcttgcgaccctggagagttcggtgcatcttctggagatagctgatttctttagccatttttagtggcagcacccctcccca

SEQ ID NO: 337798 - DNA, 122 bp, Homo sapiens
gcccccacctttgcaggaaagcttcgtatttgcggcgataggcaaagccggctctgcgcacgcgcaggttttccaacagccccaggtacttcacctggtggcggatcagcacctcgtcaaag

SEQ ID NO: 337799 - DNA, 122 bp, Homo sapiens
gaggagagctggtgggaggagcttttctgcaggtgtctctttctagcctccggcagggggcggcaacagaagacggttcagaagaaagaatgtggccaagtatgtgtatttcaagccaaagg

SEQ ID NO: 337800 - DNA, 122 bp, Homo sapiens
ggaaagaggagcgcggggagtttccgacccgtagtgcgcctttgtccctgccggcaggtgcgacaaggctactgggcccatccggaggccagccgccgcgccccgcccaaccccgcgcgccc

SEQ ID NO: 337801 - DNA, 122 bp, Homo sapiens
agcgcgcactcggtttcgcaccagctttctctccctaagctcctttccagaaagttgctccgctgcttaattttgctcctgtgtttgtcttcaggtgaggccaagggcaggtacatggttct

SEQ ID NO: 337802 - DNA, 122 bp, Homo sapiens
cattctgatgacagatttatacaaaatgattcaaaccagtaacttagtaaaattgaccttcgcaaaacctcactgggggagtgccttgtagagctgtgggtgggactgcacattcttttcct

SEQ ID NO: 337803 - DNA, 122 bp, Homo sapiens
ccccttagcatgtatagctcatgaagcaagacaaagtacccatgaagagttcaacattagcgagcctctggggcaagtaagttggaaatcataacccatttatggatacctgcctagaactg

SEQ ID NO: 337804 - DNA, 122 bp, Homo sapiens
atgtgttttggttgatgtaaatatataagctataacatgtagtgttctctttagaacagtcgggtatgctgttacagttttagataaatgtgaagcaaatgatgataaactggatctgactg

SEQ ID NO: 337805 - DNA, 122 bp, Homo sapiens
gaaggtaaaaatggctgccacataggtgcccccttctgcttgggatccccgtctttacctcgtaatcactgacaatgccgcaagtcccagtacttcagagaattactgagtgcgagcggtag

SEQ ID NO: 337806 - DNA, 122 bp, Homo sapiens
tataatttagaactacaaataaatgaaggggtagaaaatcagtttgttgctctccctccccgatggactgggggacttcaagaatcttgaggaccagatttaggatacaagccctaaaccct

SEQ ID NO: 337807 - DNA, 122 bp, Homo sapiens
ttgctcgacaggacattcacagccgaaagttggaacaaacgtgtccacgtccaaaaggcccggatgctccaggcaactttcagcgcggctcgaggcggcttccgggagtcggcgactcggag

SEQ ID NO: 337808 - DNA, 122 bp, Homo sapiens
tctcctttttcttcttctccttatcctgcggggaaagcagagcgcatgagacctggagcgcggcccgagctccacgccccccggctccagattccgccgcgcgctcaccgccatcttgtcgc

SEQ ID NO: 337809 - DNA, 122 bp, Homo sapiens
ggatttgtacaaaatgcagaggaagaaatgaggcaatgtggtgctgagtcgaggggtagccgattggcagagtagtagtcagcaacagtgcagtcaggtcatgcctctttctcataagtgcg

SEQ ID NO: 337810 - DNA, 122 bp, Homo sapiens
cctgcccagccaaggcccagtgcctggggtagagtccagagttacacagccttatatacccgtggcctcagagatggcccagaggaaaggctgagttgatggcctggaggattggttgcttc

SEQ ID NO: 337811 - DNA, 122 bp, Homo sapiens
ttctgaaggagatgaggtctcggttgaaccttcaaggtagacgggattgaacaggcaaaacgaagaggacattttaatggagcaaatagcatgactcatgggaaaactgaagacagaaataa

SEQ ID NO: 337812 - DNA, 122 bp, Homo sapiens
cctctcagagcccggaatggccccttgcatctagcatgcatcaataaatgcgtaagcggacggatgaccagatccagagttggaagttacctttggtgaaaccctctacccagcctgaatcc

SEQ ID NO: 337813 - DNA, 122 bp, Homo sapiens
aaagaaacctcccgaataacagtctggggttgagaattgcatataacctacttacttctgcgaccatcccttccatttcacgaggtattccatgcgtccctgcgggtgcaaaggcgataatg

SEQ ID NO: 337814 - DNA, 122 bp, Homo sapiens
ttgggacgtgcagcccgccatgtctgagcctcccctaccctctcctgacgggctcctgcgcggcctgaggctcccctacgagcgccgctccctgctccatggggcgcccagtaccatcgacc

SEQ ID NO: 337815 - DNA, 122 bp, Homo sapiens
taaacacgaggagcgctacataaattagctgccagcctagatctttcctcgagaagatgacgccaatcaaagcaggtgcctgtctccgagcgtgtgcgtggaaagcaggtggagggtagccg

SEQ ID NO: 337816 - DNA, 122 bp, Homo sapiens
gctggtctccgcctggtccgaggagctgatctctaagctggctaatgacatcgaggccaccgctgtgcgagccgtgcggcgctttggccagttccacctggcactgtcggggggctcgagcc

SEQ ID NO: 337817 - DNA, 122 bp, Homo sapiens
tagtctggagttgtggcttcagaagcaaccacactctaggccattcccgagtgcatttttcgtggctctcccggacttcatcttcctaggttgggtttcaaggaccctggagttttgggaat

SEQ ID NO: 337818 - DNA, 122 bp, Homo sapiens
gcagcccaggtccccctagcggtgcttctcttcagattgaggacctattctttggagttccgaattcctagtagtccagccctcagatctccaccttgagactccaccctcaagattctcat

SEQ ID NO: 337819 - DNA, 122 bp, Homo sapiens
ctcgctcctagtggcgggaaagcgcggcggtgtgatgatgactccaaggagcccggcgcccggtcagggagggcactggcatccctcattacccgcccagcctggccttagcccttccccgc

SEQ ID NO: 337820 - DNA, 122 bp, Homo sapiens
ggctagagcgggactcggaaagttactcggctgttcgcggcggggctttgcgaggcagagcgagcgctgccgccacagccggggatccgggggatgcgtggccgagacgctgggcgaggcca

SEQ ID NO: 337821 - DNA, 122 bp, Homo sapiens
cggtctctcctgaggtcgcaaccctcttcccacgaacaacagcccacaggctccgcagctcgccttggtctcaacaaccgcgcagtacttgggtgcttaagcgagtcccctaccacatagtc

SEQ ID NO: 337822 - DNA, 122 bp, Homo sapiens
agggactccgcactcacggcactggacgaggagacactgtgggagatgatggagagccaccgccacaggatcgtacgctgcatctgccccagccgcctcaccccctacctgcgccaggccaa

SEQ ID NO: 337823 - DNA, 122 bp, Homo sapiens
ggccgcagccagccgggtgctgcagcagtgcgggcagctccagaagctcatcggcatctccgttggcagcctgcatgggctgcgcaccaagtgtgctgtgtccaaggacctcacccagcagg

SEQ ID NO: 337824 - DNA, 122 bp, Homo sapiens
ctgcctgctgcgacgccatacgctcttccactgcgtcctgggccctggtggggcggctgccgaggtgggtcccctgcccaaggcactgagggaagccgccccagttgacctcctggccgctt

SEQ ID NO: 337825 - DNA, 122 bp, Homo sapiens
tcgctatggtaatgccgcgcccagcttgggggctggcgggccgcagggccccctggcctccggaactgctcatggggttccagcccctcgcccgcgcaagttgcaggaccggggtctgggtg

SEQ ID NO: 337826 - DNA, 122 bp, Homo sapiens
aaaaaaaaaaaaaaaaaaagaaagaaagaaaaatttttcctggcacatttctatctgttccgttctggatgacttgctcttcaggcttatcccacagctgttatcataatatctctctttac

SEQ ID NO: 337827 - DNA, 122 bp, Homo sapiens
caggggtgcaccacgccccgcgcgcccgcttaggcgccgcgcccgggaccgggaaccccgcgtctcgcccggctcagcgccccgcgctgtgcgcccaggtgcctccaacccctgggcttcgc

SEQ ID NO: 337828 - DNA, 122 bp, Homo sapiens
cgtgcaaggctggaggtacaaggtgcacgcatttggggggcgcctgggaaccccatgagccgagcccaggcccggaggtgctgacccgcatccagcccggctttcagtgctcggtgtaaatg

SEQ ID NO: 337829 - DNA, 122 bp, Homo sapiens
atttcaggaggatctttcagaagatgcgtttccaattttgagggggcgtcagctcttcaccggagacccaaatacaacaaatcaagtcgcctgccctggcgacactttcgaaggactggagt

SEQ ID NO: 337830 - DNA, 122 bp, Homo sapiens
ccagaaggtggagggcagccacgacgtctacctgtacaagcagtccttcaaggtagcacccgcccggtccgattgggtgcaggccgagccaggccctccaagggggtctcggacccttgtct

SEQ ID NO: 337831 - DNA, 122 bp, Homo sapiens
agttctggttcgcagagggtctttggttctgaaaagcgttgccgtggttctagccttcctcgcggtggagggtgttttgctttctgcgcggtttctgtgtgggccgtgggaagcaacttgat

SEQ ID NO: 337832 - DNA, 122 bp, Homo sapiens
gaccctttccgcctcactgcattgtaaccccattcccgatcagcgggtgggagccatcatcgaatcccaagaggcgtccgcgcagccaagccagcaccccgaaggtcctccttcaccgggaa

SEQ ID NO: 337833 - DNA, 122 bp, Homo sapiens
cgtgccgaccgcagctccacgccagctctcgagccgcgcggccgtcacaggagcccgctccggccgggctttccataccccggctgcagcttttcccataaatatcgagataggaaaattac

SEQ ID NO: 337834 - DNA, 122 bp, Homo sapiens
gttttccttaccctcttcccctcccccttccccctccccaacttgtgaagtgtttgtcagcgatgtcactggcaagaaccgggttatctttcaggggaatgacccccttataattttaagtc

SEQ ID NO: 337835 - DNA, 122 bp, Homo sapiens
gtcgagggggccgggaggaggctgcgggtggtgggtgctccaggcgggccgtggggggtgcgctggagtcgacggtgcccgagggcatcgccaggcgcctttatgctctcgaatgccctgtg

SEQ ID NO: 337836 - DNA, 122 bp, Homo sapiens
actcacccctttagttaaggtttccactcacgctgccccctacccaaggccacgtgcgcgcgtgagcagtcgctagtcctggctgagaatgaagaggtctcatgagcctcagatggagcagg

SEQ ID NO: 337837 - DNA, 122 bp, Homo sapiens
ccgcacccggccctcatttttacaaatgtaattgagtacttgtttgtgtacactagtagacgatgtgcttcttgagagtaaagcccaggtgttctacatccatggttcaattaatgcattgg

SEQ ID NO: 337838 - DNA, 122 bp, Homo sapiens
ttcgaaggtgaagacccaggatgcagggtgatctgcacttggccctcaaggccaaggtcacgctgtggctgggccgggtggtgatcctggctgtcacctgcatgcagatgcacttgagtcca

SEQ ID NO: 337839 - DNA, 122 bp, Homo sapiens
gggaacctgccgggccacgttggtggggcctgggccgcaccttcggtcagtgtggaggcccggtggctctggcccgactgggtggcgggtgtgggggcaggctggggcctgggggaggggcg

SEQ ID NO: 337840 - DNA, 122 bp, Homo sapiens
gggccagcttggtgtcgccttcgttcttctgccaccccattcggtaggggctcccgttcccgccacgccccctgaagttgtggctcgcgcgtcttcccaggactcccccgcgccggagaggc

SEQ ID NO: 337841 - DNA, 122 bp, Homo sapiens
gcctagatcccgggcactggcggcccagcgctgacctggttggtggcattgtgttcccaacggcctcttgacgacctcagcacgggtttccacctctccccaagccacctagtgaccccaga

SEQ ID NO: 337842 - DNA, 122 bp, Homo sapiens
cccaggcctggttgcccaggcaggcctgacaggaactggcgagaagccaccctggagggccgggcgcaggccaaggcagggcggtggggcgctgaaccagctccaaactgctggcagagctg

SEQ ID NO: 337843 - DNA, 122 bp, Homo sapiens
ggggtctgagtcattgaacaagcgctacaggatagcacaatactaggtacacaaagtaggcgagcacaggctccctacctttgaaaagtttataagttcattaacagtattatgtttccatg

SEQ ID NO: 337844 - DNA, 122 bp, Homo sapiens
acccatagcaacagtaattttacctacgtaaataaatgtcgattgtgctgagtctggaagcgcggacgacccaccttgagatgcatctagcgactgctcccagcatgtaggagcagttgtaa

SEQ ID NO: 337845 - DNA, 122 bp, Homo sapiens
tggcagaggtgaattaatccatcccttgtcatctacaaaaatgtcgaggcctacgtaaggcgagtaggccaaggtcacaagccgggacttaggaacaccaagcccaaggtccacgctgagcc

SEQ ID NO: 337846 - DNA, 122 bp, Homo sapiens
acaccccaaaaccccgcacaaattaagggattacatatctgagtgacaagtacatacaaacgcattacttctagagatacttagatgtagataaaagaccacatttcaatagaaggatcaca

SEQ ID NO: 337847 - DNA, 122 bp, Homo sapiens
ctcataagtgggagctaagcgatgaggatgcattagcattaatattagttgtgcttgacccgacaataaattccactttccctgatctaaaaccttgacaattcatttccaagcatgcactc

SEQ ID NO: 337848 - DNA, 122 bp, Homo sapiens
accagataaaccaccctcaaacctcagtagactgaattacctacccttctaccaacacttcgcaaaatggcataatgtgaatctcacctccaccctttaaaggagttaacaatagctactga

SEQ ID NO: 337849 - DNA, 122 bp, Homo sapiens
tggcttcccggggccgggctgagctgagacgcccggctcgggctccagggggtgcgggaacggctcatcctgaatgcagctgggcggctccataactctcgcctcaccagggcaccgcggag

SEQ ID NO: 337850 - DNA, 122 bp, Homo sapiens
ttttaggttccaaaggaagctggagatgacctagagcctttggcttctccgcctaacatccgcttgggcaggtgggctgctctgagtctggaatggtctttttggaatggctagaggcagga

SEQ ID NO: 337851 - DNA, 122 bp, Homo sapiens
tccttgtcaggtgggggcagtgggtcccactcacctgcgcaggtgtaaggtccgcctgggcggctcctcctcctcctcttcctcctctgaagcagctgaagagccacttcccagcctgttca

SEQ ID NO: 337852 - DNA, 122 bp, Homo sapiens
gtcgagctcgctgggtgagcgccaggtctccccgccccacggattgtagcgcgcacagggcgatctgctgctcgcgaggtagagtggcttacttggggagaaaacagagctggtggcgctgc

SEQ ID NO: 337853 - DNA, 122 bp, Homo sapiens
ccgggccctctgtccgcctcatggagggacggagagggtccagcctgcgtgtaagccctacgtctgcccagaggctggtcgagcacagagcagctggtttgcttgtgcactcagcagatgca

SEQ ID NO: 337854 - DNA, 122 bp, Homo sapiens
cctgggcagatgaaagtgaggggtcgggggtcggggtcgggcgcggcgatgccgcagctgcggggctcggtggactcggcgagcaagagccccaggacgctgctggcggcgggcgaggagct

SEQ ID NO: 337855 - DNA, 122 bp, Homo sapiens
gattccgcggcggagaaaccagaagctagatgggcagtcgcagcggcggcggctcaacaccgcgaggagcgctgggctctccgcccttcccggccacgtgacgcccggggacgcgtagattg

SEQ ID NO: 337856 - DNA, 122 bp, Homo sapiens
ctcctgccttgaacctagatacctttcttggtggctccccctttcgttcacagctcactccgttcctttagctgagccagtagctgttgagtagttttgggtgttttatcttcagtaagctt

SEQ ID NO: 337857 - DNA, 122 bp, Homo sapiens
aatgtgagctggcagccccagactgggatcatggagaggtcacaaggctgtccctgctagcggattaacccaagggagaggagaggttctttattcccaaacagcacctcttgcaagccccg

SEQ ID NO: 337858 - DNA, 122 bp, Homo sapiens
cccggagtcagcgccaggaggggggggacgcgggagctgggggagggcttggggccagggcggggcgcttagggggtctctgagagccgagcaacccttcagtccatgaatctggccctggg

SEQ ID NO: 337859 - DNA, 122 bp, Homo sapiens
cctccaggccaacacacgtgaccacgtctgcctggggcagttgaagtaaaggacgcgaggcggcgctgtcaccgcattctgtgaaccgcagcgctctgggtccctcccgctggtctagtatc

SEQ ID NO: 337860 - DNA, 122 bp, Homo sapiens
gcttgcaggatcaccgaaaaccttcttagagttgtcttgacaccactgatgtcaagtgtccgggtgcttgtaggatggcctgccactcagtccacgggcaggagcaacggggagatcccaca

SEQ ID NO: 337861 - DNA, 122 bp, Homo sapiens
gcctggccccacgcccaccgccggcgtcccaccctggtggctgctgccaagcgccggccccgccccatgctttctaataacacacgcggcagcccgagggagcggtgcccgcaggcagagag

SEQ ID NO: 337862 - DNA, 122 bp, Homo sapiens
tgacatattttggaaagccaaatgtgtttttctgttgaactagccactcaaaccagtgcccgactacataactaatatttttgctagagtccaggagtgaggcgtttacaaagtctgggctt

SEQ ID NO: 337863 - DNA, 122 bp, Homo sapiens
tcctcctcctcctcctcctcgccctcactcctccgcctcattcactggctggagtctaggcgtcccacacaatggaataatcaatacccaggcgcccggggctgccccactgagcaggtgca

SEQ ID NO: 337864 - DNA, 122 bp, Homo sapiens
agtgttcagctcgcagcagagagcagacgctggggtgggtagctcctctccatagctggtcgtcccatcatccttttagctctcagcagagaggagaccctggagtgtgtggttcctctctg

SEQ ID NO: 337865 - DNA, 122 bp, Homo sapiens
ttccattccctccataacagcttctgtgcttatataatttttgggacccagaagaaacaacgacacaatcttagaatcactcctgagtatctcgagttgtggcatttgttatagagttgaca

SEQ ID NO: 337866 - DNA, 122 bp, Homo sapiens
ccccgcctcagtttccccggccaggtgcaggctctctttaaccccaggttggggggtcctcgctgctaggttgcaccccgggtctccgctcaggccagggaatcccctgggggctccgaacg

SEQ ID NO: 337867 - DNA, 122 bp, Homo sapiens
attcttcacacgattgacctgtcctctttgtgataattctcagtagttgtccgtgataatcgtgtcctgaaaatcctcgcacacactggctggtggagaactcaaggctaattttttatcct

SEQ ID NO: 337868 - DNA, 122 bp, Homo sapiens
cagtgaagtgggcacagtgttgcccgaaaaagggtgctctggggcttgcctgagacgggacgcgtggaaatgccctgccgaatatgaatggggcgatggcctcgcgggacggagcagcccag

SEQ ID NO: 337869 - DNA, 122 bp, Homo sapiens
gttccaatggcccattggaaccttttgctaggttttggacgcttagcagaactttgacatcgctggaggcgtggagccctgttgcactcgaataatggcctctctttgagatgattcacgtc

SEQ ID NO: 337870 - DNA, 122 bp, Homo sapiens
taaaaactcaactctcctcttttggaggttttctaggggctgagaggacggtcccgggaccggtgtccccgagggagggacttgccctccaagtcgtaacagtcagccctgggacttgccct

SEQ ID NO: 337871 - DNA, 122 bp, Homo sapiens
ccagcctcagtttggggttaaacttgtcctcctcacattctctcccacccaacttgatgtcgcctctgtgtcatcaccacgggattttcctcctctgggttctccttttccgagtggggtca

SEQ ID NO: 337872 - DNA, 122 bp, Homo sapiens
cccgcctcgatttggcttcttccaggccctgccccagcccagcacgtcacttcagccaggcgcaggccccgcctccagctggctctgcctccgccagccccgccccaggctctgacaagtct

SEQ ID NO: 337873 - DNA, 122 bp, Homo sapiens
cattcccctgggcagagtccggcggtggcgacggcgaggggcgaggcctggaggtgggaccggccggcgaggagcgccgcacaaagaagccccgtgggggcggggggtggcaggaggacgga

SEQ ID NO: 337874 - DNA, 122 bp, Homo sapiens
ccagcgccccagggtacttcgagaggcagcagggccctggggacaagggtacgtgagccccgggagactaagctcagagccccctaaagaaggtggaaggttaaatatccattcccggcctc

SEQ ID NO: 337875 - DNA, 122 bp, Homo sapiens
agtttgggcggaagagcgggtgagcaccggtgtttccgggggagaatggctgcccaccgtcgtggatggtggagttttacctacaactagccaatgcatgaagaaaaaacaaacaaaaaccg

SEQ ID NO: 337876 - DNA, 122 bp, Homo sapiens
ttgggggaacaagggattcattttcccggggtagttggaatgcaatgggacgcctcaggccgctgggacaggctggcctccgcgcgggggcgcccgagcagccgagccgccgggccttccgg

SEQ ID NO: 337877 - DNA, 122 bp, Homo sapiens
ctgcctacagcttataatccccttcttaagaaataatgctctcctttctaaatttataaacggtgtcatttttaagttaacactatcttttgctactaccaaaaatgtaggacaggaatttt

SEQ ID NO: 337878 - DNA, 122 bp, Homo sapiens
gcggatccggaagtcagaacgggacaccgcctttcactgtatcagcgagccgtgcgcctgcgagagtctccgagctgtaaaaagttcaagcacctcttccagcagctcccagaaatggctgt

SEQ ID NO: 337879 - DNA, 122 bp, Homo sapiens
ccgcggggtcggggccaggttctcacaccatccagataatgtatggctgcgacgtggggtcggacgggcgcttcctccgcgggtaccggcaggacgcctacgacggcaaggattacatcgcc

SEQ ID NO: 337880 - DNA, 122 bp, Homo sapiens
gggtgaacctggagggctctatgttaagtgaaataagccaagaacagaaggactatattacgtgatttcactcatatgtggaatctaaaaaagttgacctcatcgaagtaaagagtacgtta

SEQ ID NO: 337881 - DNA, 122 bp, Homo sapiens
cgaactgagaaaactcgtgaagtaacccctgtccttcttcgagatctgattcgtagatttcgaccgcccttatggatcggctcagacaacgggcctgcatttttggctgccttggtacagaa

SEQ ID NO: 337882 - DNA, 122 bp, Homo sapiens
cacccccggccgctctcgtccttggggctatgcgcccgccagacgctcatgatcacagcacgaggacgacttgctttttgaaaggagacctcaatcttgttgcttaacccccaaaacattca

SEQ ID NO: 337883 - DNA, 122 bp, Homo sapiens
ccgaggaccctgtgtcgctctccccgccactgaagtagcggccggggctcatgagggccccgccagcctccctggggcccccatcacccccgttggccttggcagctgcccggcggcgcccg

SEQ ID NO: 337884 - DNA, 122 bp, Homo sapiens
gctagaaaaacccttacaaggatacacattcaacttgcctccctaaagcactggtggaaacgctgaaaacctggaaacttccaagatgttcatcaacaggaaaggcaagacaaaaaaaactg

SEQ ID NO: 337885 - DNA, 122 bp, Homo sapiens
ttcaccactctcttttccatgattatagggacgctgcaggtgtatacgtatgagcctatgcgtgtccctggttagtcttcaggccgtggtcctggaagtagaattcctggattgaatggtat

SEQ ID NO: 337886 - DNA, 122 bp, Homo sapiens
gggtccgacatcccgagagaggggaaggggctggttggaaccggtggcaagaggctgtggcgggactcaggcctccccgcagtcggctccacaatctgcgccccaagttcgccttgcccagc

SEQ ID NO: 337887 - DNA, 122 bp, Homo sapiens
gctcctggtcgccagttaggaagggaagcagggacacatagggcatatattccagaacttcggggcttgtcccctcaatgtgcggcctaacaaataagccgcccgtggtccgcgctgtgggt

SEQ ID NO: 337888 - DNA, 122 bp, Homo sapiens
aagctggcccagatgaggccccgggcagcactgcttctgtgtgggtatggccagtcgggacgtggcgccacacactgctcctccgaactctggtgaagggctgcccagcctcacaggcctga

SEQ ID NO: 337889 - DNA, 122 bp, Homo sapiens
gattaaatgaagcacttaaatgcctaattgatgcagatggctccaagaatttaacatttacgaaatattcactatattttttaggttaagggtacaaaaccattgtgagtacactaaggaat

SEQ ID NO: 337890 - DNA, 122 bp, Homo sapiens
tagaactgaaaagctcctaggagctttcagtgaacaaaacttcatagccaaaaaagcacacgactgggccaggagttcagagacagtcttggtgctcaggggtttgcagccctagccgtgtg

SEQ ID NO: 337891 - DNA, 122 bp, Homo sapiens
taacattcctatccaccactgccacctaacgactcttttaggtactagcagctctggttccgtttcctgatttctgatttctgggattctggcaccaggcagaagaatgttgactgtgtaag

SEQ ID NO: 337892 - DNA, 122 bp, Homo sapiens
ctcagatatctctagggcagagtcctcagcccagggcacacacagaatcacgactctgaacgtgagcattctcactggaggggtagaggtcactgtggtgacccttttgagcacccaggaaa

SEQ ID NO: 337893 - DNA, 122 bp, Homo sapiens
ccgggcgggaaatggggacagctaggcgagacaatagccctttaagctattctcaagccccgggtctgggcatatttggagtagagatcaaggttccacttctgaaacgggaagagccagca

SEQ ID NO: 337894 - DNA, 122 bp, Homo sapiens
agtgtctaaatgaatggccgttctgcaagtacctgaggggctggtgagagcaaggcacagcgtgtttggggtgactttaggatttgggtttgggtagtcccccttcccctgctgcccatctg

SEQ ID NO: 337895 - DNA, 122 bp, Homo sapiens
ctcggtttacctagactccaagtgtccagggcctttgagcaggcgcagaggtggctgtaccgcgtggctccgcctccgcgcgacacttttccggggcttctcattggagagcaagcctgtca

SEQ ID NO: 337896 - DNA, 122 bp, Homo sapiens
ccactgcactccagcctgggcaacagagcaagatgccatctcaaaaaatagaattctgaacgtgggaggaatcccagactcacccaggaggcttctgacatgcctctttctttctttccttc

SEQ ID NO: 337897 - DNA, 122 bp, Homo sapiens
tctccccccgaccgcctccccgcggggcccccaaccccggcccccacccccggctctccccgcccccgccccatcccccaccggcgcaggttcaggccatcgctgccaggaccccccgctgt

SEQ ID NO: 337898 - DNA, 122 bp, Homo sapiens
cgccaagagcgataagaggccttatctttggccaccaggcccggccgggttggagaacagcgcgggggcgccgcgactggggcgagtgggggcttggaacggcccgggttggggccggggag

SEQ ID NO: 337899 - DNA, 122 bp, Homo sapiens
actgcagaatggatggcagatccacagtgcatcccccttccaaacccaggaggcatctgtcgccttctctttggtagacagtctggagacagcagaaaccctctgctctatttttttgccac

SEQ ID NO: 337900 - DNA, 122 bp, Homo sapiens
gccaccgagaagccgaggaggcaaggctcgcgagagttcagggaggccgccctgagattccggcgaggccgcgggtcccacctcccgggggcggggcgagggcggagcggggagaagggagc

SEQ ID NO: 337901 - DNA, 122 bp, Homo sapiens
accgattttgaggcccccggaaaatattgcgggtgggggttggagacggtctatatataacgggaaaacgagagcagctcagcaataaaataaagctcgactcaggctctcgggggtatcct

SEQ ID NO: 337902 - DNA, 122 bp, Homo sapiens
ttttttaaaataaagaaaacttgtggatttcatcaaatgctttatctgcatttactgagacgatcatgtggttttatctcttattcaataatatgatgtactgcattgattgattttggata

SEQ ID NO: 337903 - DNA, 122 bp, Homo sapiens
gagaggtgaaatagaaacacacattacagaagggacatgctttcttaagggcacggggaccgtgacacattgctttgatgaacggtgatggagtcacacatggggaaattcaacatggacac

SEQ ID NO: 337904 - DNA, 122 bp, Homo sapiens
aggcctgttgcgggcctggtctcctcgccgccgtcccgcccggggtcctgggggatgtcgcgtgtcctcctcaggagacagtgccacttccaagaggtcctaagacaaagggggccagtagg

SEQ ID NO: 337905 - DNA, 122 bp, Homo sapiens
cattgatgccatttgtgaattcacatcagtctctgcacatagaaataaggtacttccaaccgaacaagctcttttatctcctctgtcctccacagaaggaagatgggcatccccttcgccag

SEQ ID NO: 337906 - DNA, 122 bp, Homo sapiens
ccccgcccccagggcgaaataaataccgggtgtttggcgccgccagaagccgtgcgcatgcgttagcgctaagcgggacgttgcgccgggtcaaaggccagcggcgcaaaatggcggcggcg

SEQ ID NO: 337907 - DNA, 122 bp, Homo sapiens
taatcctagtctcaacccctgtcatctttttgatggattaggaatgccttctctgggtcccgggccccctctgtttcaccagcctggaattggcacaggagtcacagcattagccttgccct

SEQ ID NO: 337908 - DNA, 122 bp, Homo sapiens
cccaagaggtcctaagctttgttcacagacagccctggacttctaggcaaggggagctggcgagctttgagaggcagctcgcctgcccctcggctgagagcttcctgagggcagagatcctc

SEQ ID NO: 337909 - DNA, 122 bp, Homo sapiens
tggacttgtcgccaggcaacggtgactttcactgtgaggagagccatggctcacggctcgcgcctggtgccctgagcctgacgcatgtgcatttgtgaggcatgcctgggcaccgggctgtc

SEQ ID NO: 337910 - DNA, 122 bp, Homo sapiens
aacgcccaccccggcgagcagacagatggtgcccgcagggaggcagcggaacagaggctccggaggagccggagctgcgctgcgggcactgcgggagcccctccaaggaggccatgctggcg

SEQ ID NO: 337911 - DNA, 122 bp, Homo sapiens
gcgaggggtccggcatcactcgcgcgctccggaaacccgcgtgagccgctgttcctgccgcgctcccatctgagtgacaggcttgtttcagagctccgcagacctctaagcctggccctcac

SEQ ID NO: 337912 - DNA, 122 bp, Homo sapiens
atcaaacgcgccatagggcagagaaggacccctcccgttattttgaggaccgggctggtgcgactatactactgccggatggcaaatccgggatctcggctccgagaggctcatctggcaaa

SEQ ID NO: 337913 - DNA, 122 bp, Homo sapiens
gtaaaagtagacaaattctatcactgtgttcgtatcacccagacttctgaactaccaattcgtggctgaaattctttcatccatgctcggcttagtcctaactcctctctcccctgtgatta

SEQ ID NO: 337914 - DNA, 122 bp, Homo sapiens
gctgattctataaccaagcaaagccctccacctggaaaatgtgtagctattgcttattcccggcaatactaaggacctgctagcaatatcctttctctctctgggtatctgaggaggctcac

SEQ ID NO: 337915 - DNA, 122 bp, Homo sapiens
ctctgccctcagaggcgcagcctttcctcagccagcagagcggctgggctgcagagtccccgcccccggccggcccctgtcgcccgcgcctccctccctcgggcctcggaagtgacgcaagc

SEQ ID NO: 337916 - DNA, 122 bp, Homo sapiens
cgccagtgtaagtcgaggataatcccggcggagaagaaccgaaggagccgactcgccccacggccgccatcttggtcgggaatcacaccactcccggcaagactaaatgtgcgaggcggctg

SEQ ID NO: 337917 - DNA, 122 bp, Homo sapiens
gccgcgggcccagtagacacaacccagccgaggagcagcagcagcagcagcggcgccccgcgctccctggggccctccagaaagtttttttatggatatcagcaatctaattctacaattta

SEQ ID NO: 337918 - DNA, 122 bp, Homo sapiens
ggacgcgctggtacttcaggtaattcatttggacgaactcctcagtgatgagcttccgcacgtccccgaaggtggagtgcttcttccagggccgcagccccaggatgcgcagcacgttccag

SEQ ID NO: 337919 - DNA, 122 bp, Homo sapiens
atggtgagccgcacgcctttgagtccccatcagccctggcccatccctgctgaggtggcgcgacctgctcacagacgtgtgctcacaggcagcccgtcgcggggtcatgtgctagacgggga

SEQ ID NO: 337920 - DNA, 122 bp, Homo sapiens
ccggaggcggggaccccgcggcgggcacgggcagcgctcgcgcacctggggcgcctgtcgcgcctctagacccagggacccctctcacgaatgggggactcatctacgaacgaggaggctgc

SEQ ID NO: 337921 - DNA, 122 bp, Homo sapiens
aaatgcccggcgtcccgggagcgaactagcggaggaactcctttgccaaaggggtggaaccggcctctgcaactcaatttgacaaagccctgggagcggagccgcaacctgaaactaactca

SEQ ID NO: 337922 - DNA, 122 bp, Homo sapiens
ggcagcagtgccaggtctggcactcagaggttaggccgggcgcagggagggtgcgggctccgcagcgagcgcgccgggcggcctctaggagccgggtcagcgagtctgggctctgagcgagc

SEQ ID NO: 337923 - DNA, 122 bp, Homo sapiens
acacagaaatttacaacaaaactagtttatttgggtgggactatatctgggagtggggagcgcctgagccggaaacaccccccaagcgggcagccggagctctgcactcgctcgctcagcca

SEQ ID NO: 337924 - DNA, 122 bp, Homo sapiens
gaggatggagatccctgggcttctccaggtggggagtggtaccatggtctcttcaggtttcgtagcagacaggccccattgaccataggatatgtgtccccaaggtggttagaggccatcac

SEQ ID NO: 337925 - DNA, 122 bp, Homo sapiens
acctggcctgcagcgccatctgcgggccgcacggggcagagccgctgcgcccctctccaccgcctgcacaggttcccgagtcccacgaccccctccgcgctcaacacgccacccgcggccac

SEQ ID NO: 337926 - DNA, 122 bp, Homo sapiens
accagcctgcaaagtgagaggacggaaggctgaaagggtctctaagacactctaatttcccgacagcctggcttgcctgccacgaggagggaaccccagggctcaccccctgtgattcctgc

SEQ ID NO: 337927 - DNA, 122 bp, Homo sapiens
ctttcaagcatttagagaacagaggcaagatgtaactgagatttccaaacgagctgcttacgtgcatccccttcggggacttgcaaatgctttccgcccgtcagcctggactgtgcccggca

SEQ ID NO: 337928 - DNA, 122 bp, Homo sapiens
caagatggaccagacactggcagtctaccaacagatcctcaccagtatgccttccagaaacgtgatccaaatatccaacgacctggagaacctccgggatcttcttcacgtgctggccttct

SEQ ID NO: 337929 - DNA, 122 bp, Homo sapiens
atagcacattttcctgctttcttttctcccttctgctaaccattgaagaccagggtcatccgtgggagcagatgagtaggacacgcgtctgcacgctggaggccctgggggttgacatggga

SEQ ID NO: 337930 - DNA, 122 bp, Homo sapiens
agatggccagcagtcttgggtagttcagaaatctacacagggctagactggacgctctcccgacatcccatcaagtgtagggttctgtctgtctccgctgtcgccactgacaaggcctcctc

SEQ ID NO: 337931 - DNA, 122 bp, Homo sapiens
gagataaaatacaggaataccaacattgtaccttatacctttcagtgtcagagaggactgcgtagagcaggcagtatttgagctaacttggcttaaagtgttacgggaagggcatgggattc

SEQ ID NO: 337932 - DNA, 122 bp, Homo sapiens
ctcgttttcctccagcagacgtgccaaacagtggctgtgcaccgaaggttgccggcaagccgctaccagtccggacagctcatgctgcatgatttatgaagtgtttttgagcccagccccat

SEQ ID NO: 337933 - DNA, 122 bp, Homo sapiens
acgtgctcagaactgaactggggacttctggtccatgtccagcagaacctgactccatcgcggtctccaatgcccatgccggacaccccacggcccttgtcctgtgatcccgaacctcacgg

SEQ ID NO: 337934 - DNA, 122 bp, Homo sapiens
atatctgtgaggtctaacaacgtccctaagccttatccttttaggatcccagtcatccagcgcactgtattgttgcagctaggagtttaagacatagagtcagacagacatgtgtttgaatt

SEQ ID NO: 337935 - DNA, 122 bp, Homo sapiens
catgcaataacactctactttttaatccttacagcgactcagagataacaatagacattacgatcctcattctactcacaaagaaaacaaggcttggagaaggttagggattggtctaaaga

SEQ ID NO: 337936 - DNA, 122 bp, Homo sapiens
aaagtcctggtgtcaaggggcccccgggcctatgggcttgaggtgtcaagaacctgctcacggctggtgtgcgtggctaggccacccttcggggcggcgaggggtggtggtgctggcactga

SEQ ID NO: 337937 - DNA, 122 bp, Homo sapiens
tgagcttgcggaacacccggggggccagtcggccccgctcccgcatccatcgcggaggcgcggcccctttaaggctcccggaaacggtcccacaggaccggaagtgaccctctttatttccc

SEQ ID NO: 337938 - DNA, 122 bp, Homo sapiens
aggggagcgggctccgccgaggccctaatgcccggcctgccaggcagcggcgcggccaggcggcgcagccccgcccacccctcggcaacccctccgcggcccttgtgcgcgagccggggaac

SEQ ID NO: 337939 - DNA, 122 bp, Homo sapiens
atccttctccaccaccacaatactcctgttcattcttctcatcaaacaaggccagttttgcgagagttttgataggaaatcattacacatccacctcacagccatgatttggcttttcatga

SEQ ID NO: 337940 - DNA, 122 bp, Homo sapiens
ggcgtctccgaatctcttggctgaaaagcggatgagagaggcctgaaatagccggagactcgttcagggacccatgtcaagaactgtccgctttggactgtaccccggattttaactcgatc

SEQ ID NO: 337941 - DNA, 122 bp, Homo sapiens
cagaaagggaactccctgaccccttgcgcttcccaagtgaggcaatgcctctccctgcttcggttcgcgcacggtgcacgcacccatgacctgggcccactgtctggcactccctagtgagg

SEQ ID NO: 337942 - DNA, 122 bp, Homo sapiens
actgcctgggtccaaatcccagctcctctacaagctgtgcacatgaaggcctcagggacacgctgatggtacctacctcagagtgctggtataaggaataaattaattgggctgggcgcaga

SEQ ID NO: 337943 - DNA, 122 bp, Homo sapiens
gtctcacatgtcaaaggggaatcacattggcgtccatttcttggggctgctggggctgaacgagttaagacttgtacacggctcagagcagagccccgtggtcggcacttcgtaggtggtag

SEQ ID NO: 337944 - DNA, 122 bp, Homo sapiens
cgcggtgtctccgtcttgcacacaatgggttgaacactgcatgcatacagcgtgcgcccgcgacagtaaactaaaatctgctctaaaaactcggccttttctttgatgtgagggagaaaaga

SEQ ID NO: 337945 - DNA, 122 bp, Homo sapiens
attgagaatgataaagtatgtgaatctccagtgcacagcacatgggccaccatgattgttcggtattatttatttatttattttaaggtatctgcagagccacagctagaacccagatttat

SEQ ID NO: 337946 - DNA, 122 bp, Homo sapiens
tcccctccctttcccccctcccttctattgtctcctcagaaggcataaaagctcagggggcgtgaaagagtccaggcgctggagcgaggagccagagagagctgcggagagctgccagctgc

SEQ ID NO: 337947 - DNA, 122 bp, Homo sapiens
ttctgggctggggtgaaagccaggttgcccagggtttgggaggagggcgggtcgagcacacgcagatccaaagatgatcggagacaggattgtcctcagcgattccaccccgatgactctgg

SEQ ID NO: 337948 - DNA, 122 bp, Homo sapiens
ctggaaggaagagatggagctgacgctcgtggggctgcagtactcgggcaagaccaccttcgtcaatgtcatcgcggtgagcgcccgcccactcactcgcccggggctccgcagccaggagt

SEQ ID NO: 337949 - DNA, 122 bp, Homo sapiens
gagccgcctccggccgatgtgctccagactgaggaagtcactggacaggtccaaggagcccgtggccgaggccgcggagtggttgtgcagctccaagctgctgcggagaaccaccatcttct

SEQ ID NO: 337950 - DNA, 122 bp, Homo sapiens
cacctttcctgtagcttcccaggatccagatgcacctgccctgtgtgggcaccagggatacggccgtgtgcctgtgtccctaaaggtcctgtcactcacgaccttcgtgtgagagcaactga

SEQ ID NO: 337951 - DNA, 122 bp, Homo sapiens
tatataggagggaaatgcggagaaaggggatcataaatccctccaggacttcttgcacttcgtgattcacacagcaaaatcatctgaatgccaacctgactcctgtagcttttcaaaacacg

SEQ ID NO: 337952 - DNA, 122 bp, Homo sapiens
ccagaggatgtcttctgcagaggagcctgtgcacgggcagcgagaaggagagcggcgcggcgctcagttccagcctctgctggcctgtgcactcctgggaataactaactccttcaaaggcc

SEQ ID NO: 337953 - DNA, 122 bp, Homo sapiens
aggcattaaaatagacaacaatcaagtcttacttccctccttgagctatgtatttttctccggaaactgcttgctactgccaaaactagctgcactgggcacattagtgtccactgccccgg

SEQ ID NO: 337954 - DNA, 122 bp, Homo sapiens
ttgtttccttttgtactctctctccagctctttgcatataaattcacctgccctaggagccgttatgcctacaagctctccctctgcatattcattctaggacatgttatgatgttttgttt

SEQ ID NO: 337955 - DNA, 122 bp, Homo sapiens
gctcggagcagctgtccctcagccccggagcaggtggttgaccccaagggtgacaccatgcggccctgcacacctgagagtcctcgtggcaatagaagcctttcctgatcttgttctcgtcc

SEQ ID NO: 337956 - DNA, 122 bp, Homo sapiens
gcctgagttccccctgcagtcaggtcaaagcccccaagtcttactccaggcctgctaaggcgttcccatccccttcagcttcccctttgggcctctggcttctcactgtctgggctttcgtg

SEQ ID NO: 337957 - DNA, 122 bp, Homo sapiens
gcatggggttccacctggtgcaggccaggcagggtgggcttgagtcgcagctctgctgtgcgcacatcactcagcatccctgggcttcgtgtcaccagcagcctcatgtgtgaaactgggat

SEQ ID NO: 337958 - DNA, 122 bp, Homo sapiens
gaacagaagatggacaagagaaaactggcttgggttgcaggccacctctcccatctgcagcgctcagtcccatctcctcctccaaagtctctgcttagatcctctgattttaacctaaggca

SEQ ID NO: 337959 - DNA, 122 bp, Homo sapiens
cccaccccgcctcggctttttgcccccaccccgcctcggctttttgcccccaccccgcctcggctttttgcccgcctcggcttttggccccccgccgccgctgctttttgtcccccgccgac

SEQ ID NO: 337960 - DNA, 122 bp, Homo sapiens
gggaggtgcgagcgtggacctgggacgggtctgggcggctctcggtggttggcacgggttcgcacacccattcaagcggcaggacgcacttgtcttagcagttctcgctgaccgcgctagct

SEQ ID NO: 337961 - DNA, 122 bp, Homo sapiens
agctctggccacgatgggcggggcgcggcggggccaatggcagggcggccttcagataggcggtggggacattcaaatagctgctccccgctgcagtgattggccgaaaggagtgggcgcgc

SEQ ID NO: 337962 - DNA, 122 bp, Homo sapiens
cttcagcatgccgaacagtagcagcggcctatagggcttacaggactcggtgcacagcagcgctgaggaaggtggcgcggccggtccaggccggtgggcgggagccccgccatgcaatgcct

SEQ ID NO: 337963 - DNA, 122 bp, Homo sapiens
gcccccagcccgccggcgccgcggtcccgccccctgccgccgctcctcccgcccgcgaggcgcgcgctgcctttgtcgcccctcacccggtgtgtgaggattttgcttctttaaaggggagg

SEQ ID NO: 337964 - DNA, 122 bp, Homo sapiens
tactcgtgattaacattgattgtgtacacagcatattttaaaccgctaacaatccattgtcgtgaataagtgagtctctgtgtgctgctgcttccgaggctctggtagcacggctgccccgt

SEQ ID NO: 337965 - DNA, 122 bp, Homo sapiens
gccagcattttatatgtccatgcctcccctagtaaataatggcagagttgaactcaagggcgaccctctgcctccctctcttacccccagcacacccttgcgtacataggctttcctcccca

SEQ ID NO: 337966 - DNA, 122 bp, Homo sapiens
tagattttacttcgtttttattgctgatagtgtttataaaaatgttttatagtttatggtcggctgtgagaaagactaactcagatcatttgttaatgttggagcccattttgtagaattcg

SEQ ID NO: 337967 - DNA, 122 bp, Homo sapiens
tgctgtgctgaccgtggacaggtctccgccaagccgtggctcctgttgtcctgacatagacgctgccattttaacacagacctcaaggggctggtggctggacccacgcggccgtcactgcc

SEQ ID NO: 337968 - DNA, 122 bp, Homo sapiens
gagaagcggaagcagatcagcgtgcgcggcctggcggggctaggcgacgtggccgaggtgcggaagagcttcaaccggcacttgcacttcacgctggtcaaggaccgcaatgtggccacgcc

SEQ ID NO: 337969 - DNA, 122 bp, Homo sapiens
atttgtcttcagctggactgtccacttgttaaaaaattaaatccacccttgctcttccgtcggggagtattgaaaagtatgtgcacagaactgtaggtaatttcaaatttggagtttcaagt

SEQ ID NO: 337970 - DNA, 122 bp, Homo sapiens
cagttgattctttttctcaaatacctgatctttttgcttcctatttaatttctttcctgccgcctaaatatatgccaaatatgtttctccacaaatatttaaattttttctattcttactag

SEQ ID NO: 337971 - DNA, 122 bp, Homo sapiens
gcctccaagggagcccgggagggcagtggggagatcagagacgagcaggatctcctagatcgtgaactctagaaaagagaaatcggccaatgacggtccgcatgagtttcgcctacagagtt

SEQ ID NO: 337972 - DNA, 122 bp, Homo sapiens
attatctgaagataatttgttacatatgcgcagagaccagttaaaggttttcaagttaagcgtttggtctgcaacatttaatattgatcactaaatgtagaaagcaatgtagaaatgtgatt

SEQ ID NO: 337973 - DNA, 122 bp, Homo sapiens
ctaggaaactcagagatacatctcatgctccagaccagcaactttaaccctttgggtaggcgtgtgcttcttccctcttctgcatgttccaaattgtattttatcatatcaactctattatg

SEQ ID NO: 337974 - DNA, 122 bp, Homo sapiens
caaagcagagaattaatcccatacaggttttgggaagtgtgtggtttaaggatgggtcaacgtgtgctggttgatctttggcacagtcattggcatgcagctgttgccgactggttattttc

SEQ ID NO: 337975 - DNA, 122 bp, Homo sapiens
tgagctgtgatccgttcaggttgatcccagcatactatgggggctgacccctaagggagccgagcctagtggattcgtgggagttccagcccgcggggtgcacaggttgttgccatgagcaa

SEQ ID NO: 337976 - DNA, 122 bp, Homo sapiens
gtccagctgcagcacgatgtcggtgaagtccggtgtgtccagcgagaccctccattggtccgtctaccgggccagcagcaggacctccttggctcctgtggggacaggtgcagtgggccagg

SEQ ID NO: 337977 - DNA, 122 bp, Homo sapiens
ctcatggatcactcttttgtggtagggccacatctgccagagcctggagtctgcgaaggccgggacccggttccccggcccacagtgggggtgtgcaaacccgagagaactgggtaagttgg

SEQ ID NO: 337978 - DNA, 122 bp, Homo sapiens
ggcagatcgagccccgaggctcctcgggccgcgcgccccaacacaatctccacggcaacccgtctgcaggagggactccccattgagttttaacccaaattatattttccaggtctaaaatc

SEQ ID NO: 337979 - DNA, 122 bp, Homo sapiens
catcagccaggcgcggtggctcacgcctgtaatcccagcactttgggaggccgaggcaggcggatcacctgatgaagcagtaccattgcatacctcattttacagacaaggaaacggaggct

SEQ ID NO: 337980 - DNA, 122 bp, Homo sapiens
ttgttaattatggtgggtttttcaggaagacaaattataaacacaggtatattgacatttcgatctaagtggtcataaaccagataggtagttttattaaaagatttaccctaagaacactc

SEQ ID NO: 337981 - DNA, 122 bp, Homo sapiens
ctgggatcacaggcatgagccactgtgcctgcctgtgaaagcacttttaaaaagagagcacgtctgctgcctggtcacattctgtacctgttcccaaaccccgaagccagtgatgtcagtgg

SEQ ID NO: 337982 - DNA, 122 bp, Homo sapiens
agtgcgctctgcctgctgtgccaggcatgtccctcagggggagccaacaaggctttatttcgtcccggcagctggcccctgggcacggcccccagcccggcgtcccagttccagccgcgctg

SEQ ID NO: 337983 - DNA, 122 bp, Homo sapiens
ctgggcaaggcactgatccactgctggacagacccggggcagcctctgggtgaacagcagcgtgtccgccggcagcgaaccgagaccagcgagccgaccatgcggctgcacagacttcgtgc

SEQ ID NO: 337984 - DNA, 122 bp, Homo sapiens
tctggggtcgggctccccacgctgtctgccaccgtcacggggcgtctgcagcaagggctgcgacccgttgccactctgagctctggcctccatcaggtcttggaagtgtggtcactccagca

SEQ ID NO: 337985 - DNA, 122 bp, Homo sapiens
ccctgttacacgtactgcaagtgtaattctcaaaacaccgaagtctggtcctgtcgctggcggctgtgggacctccttcctcctgagtgtgaagaacgctccctctgctggacaatttggag

SEQ ID NO: 337986 - DNA, 122 bp, Homo sapiens
agagagatcttgcggatgcggcaagtggcggtgacgtgcggccgcgggaatgacgttggccgcggccccgcctcctgctttcgcggcacttgactggcttcccactatcagctgacggccgt

SEQ ID NO: 337987 - DNA, 122 bp, Homo sapiens
ccgcgagcgcgctggggtctccagccagtgggtaacgcatattgactgatctttcagagacgtttgtacccgttcaaaggtgacttaactccatggtgcgctgtgacactcggccctagctg

SEQ ID NO: 337988 - DNA, 122 bp, Homo sapiens
tttttacaccacgcctccttttgctctgttccttcccccacaatattgggacaccctaggcggtagaagcagccgcttttctgtcatgcgcattgcggagagtcgttcttccctctttcccg

SEQ ID NO: 337989 - DNA, 122 bp, Homo sapiens
gttgcggctgagacgcgcgccgcgcgagccgggggactcggcgacggggcggggacgggacgacgcaccctctccgtgtcccgctctgcgcccttctgcgcgccccgctccctgtaccggag

SEQ ID NO: 337990 - DNA, 122 bp, Homo sapiens
ccccgcgtggctccgcgtggccctcagcccctgcccacagcttccgcgcccgaaccgtgacgggcctaacatttcagatgagtaaccttgtcctgatctcaggaatgaaatgaggtcacggg

SEQ ID NO: 337991 - DNA, 122 bp, Homo sapiens
acacaatgtcctccaggatgacacgctgccgctggagacatcaccttcagagaggacggccgaggagacagagaggcgccgagtgtggcagcatggcaagcgagggggttttgtctttctgg

SEQ ID NO: 337992 - DNA, 122 bp, Homo sapiens
tttcctgttatcgggtcacccacacattccacaattgtcaaataggtgagggcacaggtacggaagcgtcccgcattccctccagattttatcacgctgagacacaaagagaaaaatagctc

SEQ ID NO: 337993 - DNA, 122 bp, Homo sapiens
gctttcgctttcgcttccccagccaaggccttcattctgggctgggccgccgggagggggcgcgcgagacccgcagacagcggaactggagcccgaactctggttcgcactgtacaggcctg

SEQ ID NO: 337994 - DNA, 122 bp, Homo sapiens
aacccctagggacagaggcttcagtgaagccctcggtgcctcggctcccagcatggggggcggcccgtagacatggcagtgccgcgtgcatggagagggcggcgtccacggcgacttgtggc

SEQ ID NO: 337995 - DNA, 122 bp, Homo sapiens
tgttgaactgctgatctcaggtgatccgcccacctcggcctcccaaagtgctgggattaccggcatgagaccgtaatcagcactgcgcctggcctcagcagatatttttctaatgaatgatt

SEQ ID NO: 337996 - DNA, 122 bp, Homo sapiens
agataaccttgatgagaagcaagattcaagtctgcctgaatcgggacaggtggaatgaatcgggacaggtcatcctacaggtgaagctaaaatgaggatccacaggggaggcagagatgagt

SEQ ID NO: 337997 - DNA, 122 bp, Homo sapiens
tcggtagtaatactcccccatcctccctagtaattcagaaagcagagccttctttttctacgtcctttgccctctcagaccagagctggcattgacattgacctcgccttccagccccttgg

SEQ ID NO: 337998 - DNA, 122 bp, Homo sapiens
tgcacggcgcggcacgtctggtagaagatcttcagaaccgtgtcgcacgaaagggggcctcgagattccattttcttcaaaaattccaccagctgccctaaaagagaatgaaactcacatgg

SEQ ID NO: 337999 - DNA, 122 bp, Homo sapiens
aaagtgaaagtctaataatgagggagtgcttgcagctttcaggcttcaagaacgcagcctcgaggccccgccctgctccccgtccggtccttcccagcacaggacaccccaccaggtgcatg

SEQ ID NO: 338000 - DNA, 122 bp, Homo sapiens
catgcctggaatatccccacgccagatggaggcctctacacagccactaggtatgaattccggagcattcctgacatccgccggagccgccacccacactccctgagaactgaggagacacc

SEQ ID NO: 338001 - DNA, 122 bp, Homo sapiens
agcactggggtctcagcaccctgcaggtgtctgagactaagtgatctgccctccaggtggcgatcaccttctgctcctaggtacccccactggcaaggccaaggtctcctccacgttttttc

SEQ ID NO: 338002 - DNA, 122 bp, Homo sapiens
atctcccctctagagttcacgaggatgttggagggcttcacatctggaggcggcaggctgcgggtgaggggcgcccaacagttgcctgccggcccccggggctctggggagggcgggctggg

SEQ ID NO: 338003 - DNA, 122 bp, Homo sapiens
atcccacgcaggagatgcaagagccaatgggcgggtctgctaagcccgcgaactctgccgcgttaaattgcctagaagctcccacccttctgactgttgccacgtagttcttagtttccggg

SEQ ID NO: 338004 - DNA, 122 bp, Homo sapiens
agggcggggcggcgcgggcgttgccacgacgcgggccgcgcgcgtccctggcagccaacccgtccacgtcaaggtttgtttaataatcgccagggtatctatggccgggctcaggcggctgc

SEQ ID NO: 338005 - DNA, 122 bp, Homo sapiens
gtgtgtgagatgtggggagagacgctcccgctgcagcccaagcatttaagggaggccgttcgcaggttaaagcccaagggcctcttccccaacagcaactgcaaaagaatcatgttctaggc

SEQ ID NO: 338006 - DNA, 122 bp, Homo sapiens
gtatttcacaaatcgtttctcaaactcaaaagtcccagttttgcaggcataaaggccctacgaatacagcctatgacaatgaaggcctgccaatcttcacaaagagggcaggttattattaa

SEQ ID NO: 338007 - DNA, 122 bp, Homo sapiens
ctcagcacagaaataaaactgtcctggtgagtcgctcacagcctgtcccagtaactgttccggagcgtcagcctgacgcagcacccctgaaggaccacgccgtgcgggctgcgagcctcgcc

SEQ ID NO: 338008 - DNA, 122 bp, Homo sapiens
aatctttatgtgttggattttgttggtgtctttcatttgctcaaaaattcagtcttcggccgggcgcggtggctcacgcctgtaatcccagcactttgggaggccgaggcgggcagatcaca

SEQ ID NO: 338009 - DNA, 122 bp, Homo sapiens
cggcgctcgggagggggaggcaggttcgagacacggatcgcattaaccccacaaagccggcgttcactgcggctcctacccagccaccccctccctggtgggggcattggcgctgccgggag

SEQ ID NO: 338010 - DNA, 122 bp, Homo sapiens
ctccccaggaggtgggaattgatggggaaactgaggcctggagtgtcccaggggtcctgccggctgccggagtccagttttagggtccagccctgccatgcccactcagagctggagctcac

SEQ ID NO: 338011 - DNA, 122 bp, Homo sapiens
ttactgcttctattggttcccctccttgcttttaacaatggcaagctttctaggatgtctcgttgttttgtgcaattaaaaccaccacaaggaaggcttgctatgggtctgtatgtcacaaa

SEQ ID NO: 338012 - DNA, 122 bp, Homo sapiens
cccatttgtaaaatggatgtcatgtgcaccaggctacagggagcctctgcgaaccggatccgaacaggatttggaaacgcatcacctgtaacgttccagacaaaagaatggagttgtttttg

SEQ ID NO: 338013 - DNA, 122 bp, Homo sapiens
gttatttatgaacatttttaccaaagcttttttttctctgtgtgtgaatctgtaaatatacggcttattattcttatttcagagcctgcgaggtcaagctgcagagaacatgagcttctacc

SEQ ID NO: 338014 - DNA, 122 bp, Homo sapiens
agacaaaaaaaacttggccagccgcggtggcttgcgcctgtaatctttgggaggccgaggcgggcggatcacaaggtcaggaaatcgagaccatcctggctaacatggtgaaaccccgtctc

SEQ ID NO: 338015 - DNA, 122 bp, Homo sapiens
tcctgggggtgggcataaggcctgttaaggggcacatttgcccagttcccatggaggctccgtttagatagccccacctgtgcttttctttggtggcacttggaactccagggtatagtttc

SEQ ID NO: 338016 - DNA, 122 bp, Homo sapiens
tgccagcctgtgggagaagccacatctggacagtgcgtgaagccagtccaggggccacaccgggacctgccctcagctctgccacgtcctggccaagtggccttggcatgccagccctggtg

SEQ ID NO: 338017 - DNA, 122 bp, Homo sapiens
ccgcgcggaacacctgcaagctccggtccgggtgccgcgctgaccacagccccggcatcacgtgacctcccgcggctctgtctgccccgccccctccagacgcctgctctgcgctgcgcatt

SEQ ID NO: 338018 - DNA, 122 bp, Homo sapiens
tcttggtgtaattactgcaatttattccttcactacccggctgccaggaccttcaagaggcgccacaaaacggaggcagggaaacccgtagcaacgaggccccacccttgttgggctgatcc

SEQ ID NO: 338019 - DNA, 122 bp, Homo sapiens
accagaaggaagaaactccgaacacatccgaatatcagaggggacaaactctgaacacgccgcctttaagaactgtaacaacgggagggtccgtggcttcattgttgaagtcagaccaagaa

SEQ ID NO: 338020 - DNA, 122 bp, Homo sapiens
gggtctagaggttgggggagagttgttggctccaaaggagcacaagaaaatcgggaggggcgagacagtatgttctagatcttaattgtgttggttacacatttagtggaaacctatagaag

SEQ ID NO: 338021 - DNA, 122 bp, Homo sapiens
taacttggttattacacacacgtttggagcccagtgtgcagacccgcagcgcagaggaggcggcggaacaccccgggttggtcgggtttccaagggctgacccgagctccagcactttttcc

SEQ ID NO: 338022 - DNA, 122 bp, Homo sapiens
ctcggggcgtgcaggtaaagggttacgcgtgtcgggaaggctcacccgcagcccgggccacgtgacgcgcgggcccaatgacagcgctggggcggccgctgcgagctcggcgggctcagggc

SEQ ID NO: 338023 - DNA, 122 bp, Homo sapiens
tgcctcctttcctacaagtggggagtcgagtaggactgtcagccctaacttgcaacatctcggggtggtttgtgtgtgggggggtgcttgtggctcggtttcattggtacttaaacctggct

SEQ ID NO: 338024 - DNA, 122 bp, Homo sapiens
cgtcgctgtcgaagcgcccgtactcctcgcggttatagatgtatctggccacaccgcgcacgcgctctgtcccgttggtgaagtagcacatgcccttaaactggaccaagaaatcctctgcg

SEQ ID NO: 338025 - DNA, 122 bp, Homo sapiens
cgtcattggctgtgatggccgggctgggacggggaggacgggggaggggggaggtctcagcggcgatgccgtcaattggcgagatttcctgtccatttcggccagggaaaagggggcggacc

SEQ ID NO: 338026 - DNA, 122 bp, Homo sapiens
ggcggggggtgggggggaagcgggcacgtgaccccggtcagccaatctgggtgctgctgacgtggccgcgcggccccgatgctctccccacccccccagcccgttcgggaagggaggggctg

SEQ ID NO: 338027 - DNA, 122 bp, Homo sapiens
ggtggtttaaacagaggtgcaaacagcaagcggatcttgtcgcctttggggggctgtggccgtgcccctcaaagtgaatttggaggttccacaactctagtggccagtgactgcagggaccc

SEQ ID NO: 338028 - DNA, 122 bp, Homo sapiens
gtggctgcctgaggagttcccgctgtccgaagctgggcagccagaatgcaggcttggccccgggccccaccaggtcgacgcctggattctgaatttggttttgtagaaagccttaaaaaaac

SEQ ID NO: 338029 - DNA, 122 bp, Homo sapiens
tgggggccgccgccctggccccgcgccctgtggttttctgaggcccccgaggaggaagtgcgggctcccggcatgcctcgcatccggccccagccctgagccacctcaggccgcccctggcc

SEQ ID NO: 338030 - DNA, 122 bp, Homo sapiens
ggaagtgatccagccggcccaggtgctgcctcttggcacactccaagccacagccttagccgtagccagcacgggcgtccccgcccacacctccaagttttgcattagtaagggggaggggg

SEQ ID NO: 338031 - DNA, 122 bp, Homo sapiens
gagcgtgaaccgggttaatgaatgctaattttcttaatcggcctccgtctcttcctcctccgcgagtcgtcggcctggggaaggagtaggcgacaggaaagggcggtgttttccggctggga

SEQ ID NO: 338032 - DNA, 122 bp, Homo sapiens
tccgctgccaggttaattccaaccggtggtcaattgtccccttctctaggaagccctccccgagtaagtcgggggtttcccggttccccgggatctccaaccctcggtcgggcgctcctgag

SEQ ID NO: 338033 - DNA, 122 bp, Homo sapiens
cccaccacatgccacgggacatgagcctctggctggcttcacagagaaaccaacacctaccggcctttgatggcgttgaagagccggatcccatctgcgggaccacagatctggaccaaatc

SEQ ID NO: 338034 - DNA, 122 bp, Homo sapiens
ctgcccgcacctccggctttgcagacagcctgagctggctcacttgggtgaaggggaccccgggaggaagtcgggtggacgcgagctgtccccagcgccggctgccctgccgcgtccgctcg

SEQ ID NO: 338035 - DNA, 122 bp, Homo sapiens
atgggcggagcttctgttccaaaaatttcccctaagtgcggttgacagtgtgcaggcaggcgggggtgcgcggggcggtcagcgatctgcagcttcgcggggacagagatgtaacccaactc

SEQ ID NO: 338036 - DNA, 122 bp, Homo sapiens
aggcttgttcccacttgctataaaagcaatacattccccaacctcaatgtttctctgctgcggtacaatccattgcatgtataaacacccgtgggtctggaggacagaggaaactggtataa

SEQ ID NO: 338037 - DNA, 122 bp, Homo sapiens
tgagggaaaacaatcctggtttctgtatatacagtgtgcctgcaacaaattgtgctctcacgcctgggaaggtggaatatatgtccccaaacagacaactcccagactgggacccttgaagt

SEQ ID NO: 338038 - DNA, 122 bp, Homo sapiens
taataaagaaatctcgttccctcttatcacaactcattattattttgacttctttccacacgcggtgagcagccagacccttttgccagttacaagtgggatcagcacctggtgatggggca

SEQ ID NO: 338039 - DNA, 122 bp, Homo sapiens
ttcctctgccaagagcacccttcccttcctatggcccctctgaagtgcctgacctgaggacgaaatgaggccaggatatgtcccatgagtcaactctgtccccagcattcaccactaccaac

SEQ ID NO: 338040 - DNA, 122 bp, Homo sapiens
ctggcggccggcttctcgctcgggcagcggcggcggcggcggcggcggcttccggagtcccgctgcgaagatgctcaaagtcacggtgccctcctgctccgcctcgtcctgctcttcggtca

SEQ ID NO: 338041 - DNA, 122 bp, Homo sapiens
gcccagtgcttctgttcagtcccccgagagcccggtccaggtgccaggtgcagcctgcaccgtggcaggtgagcctgggggccggctccatggaccatgcatcagaacccacagtgggaaca

SEQ ID NO: 338042 - DNA, 122 bp, Homo sapiens
gagccgactccgtgcactcgacacaggatcccgcacccagggcgatgccgggggagagggcgaccccaaccagcaatgactcaggagaggagcacgcaaagacgcttcggggacactgctgg

SEQ ID NO: 338043 - DNA, 122 bp, Homo sapiens
tgtccctccccgcccgccgcgggcagggcggatctgggtaggggccggagggggagggtccgcccagcgggtgtccggtgtcctccctgcagcctctcccaggcattggtcacttctccgcg

SEQ ID NO: 338044 - DNA, 122 bp, Homo sapiens
accgggtgagggagcgcttccgcccggagagagctggccgggatgaggcgccggctttcccgggtcttctccagctgccaccgctttactgcaaaactgacgggcgcaaaaacatgagtgac

SEQ ID NO: 338045 - DNA, 122 bp, Homo sapiens
ttgagctgatgggaaagaactctgaatgggaatattcctaaacccattaacttatttattcgggtgggagggaggggaccgcgggagggagaggagggattgatcacaggcttcttttattt

SEQ ID NO: 338046 - DNA, 122 bp, Homo sapiens
cactcgggcgaccctcgcctaccccgccgtaaaagccgcggcctttccacctaggtgctacgggacctacccccgtggcaaggaagagcaaacccgaacttgcgcacacccggcggccctgt

SEQ ID NO: 338047 - DNA, 122 bp, Homo sapiens
gacagaaacagaaacagagcaacactctgctcttcaggaggctggtggtgactatcctgccgtctcaggtgaaatttggcttccgtctgggtagtgaacgtgcagctgacagcacaaaaccg

SEQ ID NO: 338048 - DNA, 122 bp, Homo sapiens
ggggtctcagaggaatcggagggtgactcatcacgtgactcgctccggccgcagccccctcggaagctgctaggcggaagtagaagttcagaagagggctaggcggagccgagcccacatcc

SEQ ID NO: 338049 - DNA, 122 bp, Homo sapiens
tctttagggtgggaaaggacacctcaaaaacactgttgacatcacggtttcagaaaattgcgccatgtttgttacccttttcatgctgaagactccagactgctgcagaagaggcagaattc

SEQ ID NO: 338050 - DNA, 122 bp, Homo sapiens
tctttgagtcctaaggcttctaattggttagatgagataagctagtgaagcgctttcttccgagagggatttcgattggtcggtcagagaggttacctggaaatccaacaccgcccaacacc

SEQ ID NO: 338051 - DNA, 122 bp, Homo sapiens
tctcccactaatacagtcagttaggaatgtatagctaagaatgagccaaccattactattcgtgtctatggctacagaaactcaataaatcaactcactattctgggtcaataaatgaactc

SEQ ID NO: 338052 - DNA, 122 bp, Homo sapiens
tcagccactaacctcaggcatctgcacgggagacttggtacacaggctcacatgcatgcacgcacacaggcacacgtacaagcgcccgtgtacacacaacagtgtacacatgcgacacacat

SEQ ID NO: 338053 - DNA, 122 bp, Homo sapiens
cgcccagaggacgccgcgtgtggaaggaaaagcggcaagagaattggcacggggatgagacgtgcacacccagtttcctagggaaaagtacctgccgacctctagtaacagcaggaaagtca

SEQ ID NO: 338054 - DNA, 122 bp, Homo sapiens
gcgggtccgggaggctgtgcgtgtcttgtgagagctcttgaaccaagtcagcgctggagtcggctaggcggctggaaacggcggctgccgccggtgactcagggaggcgggaggcggggtaa

SEQ ID NO: 338055 - DNA, 122 bp, Homo sapiens
tcagaaggaaagcaaatggataggtcgattcccctccaggaagaccagaatagaataagtcgttggttttggatggaagctgcgtgaagaacacacttggtgggtggaagtgggagacgtag

SEQ ID NO: 338056 - DNA, 122 bp, Homo sapiens
gcagagccgggccgggagaaggcccggccatgcccagctgccccccactctccccggcctcgggcttgagagggtacctgtcctggcttagtcacctggaaaccaaaatccttcgcagcttc

SEQ ID NO: 338057 - DNA, 122 bp, Homo sapiens
gcctgcgcatggggatgtctgtgctcccaactcaacttttgagttcgccgtgttactggccgcccctagggacctgcagcgccgttcggggcagcagcacttccggcggggtcgtggcctgg

SEQ ID NO: 338058 - DNA, 122 bp, Homo sapiens
ctgcttccctctgttggtgtggagcgggaaggaaggaatcttcccaggcaaaaggggcagcgagcagggcaggtgaaggctctactatcctcagatgcaagaattcctgcagagtgactggg

SEQ ID NO: 338059 - DNA, 122 bp, Homo sapiens
tcgcgcccgggcaccagcgcgcgcaggggctgcggagcggcaggatgcaggaggagctggcgtgggagaccgacggccgtgagtctgcctggaggagggaggggggcgggccgaggccgaga

SEQ ID NO: 338060 - DNA, 122 bp, Homo sapiens
tgggcttgggggagtggcaggggcactaccgcgagtctggacgtgggagctggcagagggcgccctgccggtgctggttaggagcggcctccaggctccctgccgagcccacacaccggggt

SEQ ID NO: 338061 - DNA, 122 bp, Homo sapiens
ccctgtcctccgcccaccctggggcccttctgcaaagcactgaggttcggggcgcatggacgtcttcctcccagcccctcatccgccagcgagctgagccgcgcccgggcccctgtcaccgc

SEQ ID NO: 338062 - DNA, 122 bp, Homo sapiens
tacatcgtgattagccgcggggtcgctaattacagctgaagccattcattacactgtcagcgcgcgtcgcagcccgccggctgtgcgctccctcctagccgtgaaggggtgtagggggtggg

SEQ ID NO: 338063 - DNA, 122 bp, Homo sapiens
gttccttcttcccggtgggctcctggtcttgctgggctcaggactgaagctgcagatcttcgcggtgagtgttacagctcataaaagcagcgtggacccaaagagccagcaatagcaaaatt

SEQ ID NO: 338064 - DNA, 122 bp, Homo sapiens
caggtgcgggcggacaggtggggcgcacctgagtatatgtagggcgtcgggggcgcggcccgcgcgccccgggagcgcgggagggggaggcgggaccggaggggcggccgaggatgacctga

SEQ ID NO: 338065 - DNA, 122 bp, Homo sapiens
aaggctggactagatgtggtctctcttagttttaaatctgcttggattggggctttataacgttccctcagaagtcttgttggtgtcctttctaccagatttctttttctactgtttcactt

SEQ ID NO: 338066 - DNA, 122 bp, Homo sapiens
accgacggagagcggctgaggggcgaggggagctagacagtgccccccgtgggcggcccgcgggctgcggaaagcatctccaaggcggagctgtagttcgaaattgaagacccttgctgtat

SEQ ID NO: 338067 - DNA, 122 bp, Homo sapiens
ttaaaatcctgatttccaattggcatttctttcggttaggcagggaggccttctcgctcgcggtctcctactttatccgttgtactgactctctggaccccagtttttgcactgcaccattt

SEQ ID NO: 338068 - DNA, 122 bp, Homo sapiens
agcgcagcggctggtagccacgccctcgccgtttgcgcagcgcccctccgcccgccttcccggcggcgcccctgattggacattgcactcttggacccgccttcgttgcctgagtgacagct

SEQ ID NO: 338069 - DNA, 122 bp, Homo sapiens
acgcgaggctcccatggctctggcggtggccccgtgggggcgacagtgggaagaggcccgcgccctgggccgggcagtcaggatgctgcagcgcctagaagagcaatgcgtcgacccccggc

SEQ ID NO: 338070 - DNA, 122 bp, Homo sapiens
taccccacctgcagggaggggagtggccaccctccccaggttacaaagcctgagatctggcggggaagaagggccctcggcctcccatttggagctggagaatgccagccccctgcaccaag

SEQ ID NO: 338071 - DNA, 122 bp, Homo sapiens
gctactcatctggccagccctggcccaagatgcacagaactctaagagcgaaccctgagccgcggagtatactactgacagaaacatggcaggcaggaaaaatgaccctcacttcctctagg

SEQ ID NO: 338072 - DNA, 122 bp, Homo sapiens
agaccagccaatcggatacaatcccagtggcaagagctttctttttcctgtaggctccctcgccctttgcacgctgggaaatgtagtccagtagctgttgctggcggcgtctggaccgcggc

SEQ ID NO: 338073 - DNA, 122 bp, Homo sapiens
tccagatgtagcccctagtgagcatgtccctgatattcacagatttgtatagtgccctcccgtatttaacgtgggcttgcctgacttgcattaattataaaatacagtggaagagaaattgt

SEQ ID NO: 338074 - DNA, 122 bp, Homo sapiens
tgtgtaggggggaggaggtagggaggggcaagcgccatgtgctggcatattttaaggatgcgatgatggaattaattatatagcactggaagcattcatagcagcttactatagttcataca

SEQ ID NO: 338075 - DNA, 122 bp, Homo sapiens
cttccggaagacttcctctctcacccagcacgagcggatccacacgggggagaagccctacgcgtgcggggactgcggcaaggccttcagccagaacatgcacctcatcgtgcaccagcgca

SEQ ID NO: 338076 - DNA, 122 bp, Homo sapiens
atgaagaacgtcatggccggaggagtcgggggacttgttcacctgtggtctgtaaccagccgggacataaacccaggcctgagagatgccagtccccctctccgggtatggggctgttttgc

SEQ ID NO: 338077 - DNA, 122 bp, Homo sapiens
tacccaggccccaaaaggcacccccatgtccaggcctgggcacctgtgggagtggagcaccgttgtcagagtttgggcagacagtttagcctaggggtaggagttggtggcagtggggcctg

SEQ ID NO: 338078 - DNA, 122 bp, Homo sapiens
aggcaggtccctaaccgtatctggggtagactcctcccaggagcataggtagggatactgcgagatgagcggctttgttcactcctgatgccacatctggaaaagagtttgaagagggactt

SEQ ID NO: 338079 - DNA, 122 bp, Homo sapiens
ctaagttttagatcccaggatgttgacttgaaaaacttttaaagtagaaaaattattcctcgggttggtctaataagggaactaaaagttgggagaaacaaagtggtactttctaaactatt

SEQ ID NO: 338080 - DNA, 122 bp, Homo sapiens
agcaacgccagaacccagaagcacttactgccaggaacagggtactccagtgcgccatagcgtcgcggccgctgggcgaggggtgggactgcaggcaccgtgcagccgcggaccaatgagcg

SEQ ID NO: 338081 - DNA, 122 bp, Homo sapiens
attggacactgcttctctcactcctattccagaaccaatcactcgagttctagtggggagcgcctaagccaatggaaatgctcgctgcggcagctgccgggtcctgggcgctgggaggcggt

SEQ ID NO: 338082 - DNA, 122 bp, Homo sapiens
gacttccatccctctgaatccgccagggtgtctgctgtgtttctgatccagggaggcacccgctgctgctcctgatgggctagaggctcgccattgttcctgctaggctaagtgcctgggtt

SEQ ID NO: 338083 - DNA, 122 bp, Homo sapiens
actcctcgcaccgttggatcgctttgctcacggcgctatctctcgataaagttgttgttgcggcttccgccgcgggtggaagaagatggcgtcgggtggtggtggctgtagcgcttcggaga

SEQ ID NO: 338084 - DNA, 122 bp, Homo sapiens
ccacatccagtggtcgaactgttttcacgctagactagagggcggaaaagtctgcgcccgcggagaaactagaattctgtagaatgtacactgtgtagaaatcttttcaccccactcttcag

SEQ ID NO: 338085 - DNA, 122 bp, Homo sapiens
tcaaacaaaactacgttacagacatcatctacgtgggcacggatacacactaaacaaggacgtagtacacaattgaggggtgccccggggagcgcggcaggaatgccttccgggaagaatcc

SEQ ID NO: 338086 - DNA, 122 bp, Homo sapiens
aatctaaagctgagatcatctcctcatgattcgagatgttacaaaactacaaggcctccccgaccttctcccattgctcccgtgttcatgcccccatcccccaatcattctcccaccaacct

SEQ ID NO: 338087 - DNA, 122 bp, Homo sapiens
aacctgagattgtacttttgtacaggaggttcaaattacaaatggcaattttatgcacttcgccgtattaacgctgccgcccgggcagcgctcatgtgaccctccgtggattaacatcctgc

SEQ ID NO: 338088 - DNA, 122 bp, Homo sapiens
tcctggccagaggaggaaaatgctttgctctgactcgtctgacgccagccgcccttcacacgggacacacccttgcccctcgggcttatgctcccagcagccccagcctgagggacctacct

SEQ ID NO: 338089 - DNA, 122 bp, Homo sapiens
tcggggcttcctgtgagcaacagagcccggaccagggcctcccggggcatctgaggaatgcgaaacctgtgtccaaggccctgcccacctgaggtgcttttctgtgcaccactgtttacacc

SEQ ID NO: 338090 - DNA, 122 bp, Homo sapiens
cccgcgcgctgcggtgcccagccccgcgccagccctcccgggggagctggagcttggccgcgctgctcccccctggggccgctccggcgcccacaccccccacgcccaccgaccggcctcct

SEQ ID NO: 338091 - DNA, 122 bp, Homo sapiens
agctgagctctgcactttcagaaaagtcactgagcggccagggccttggggcggggaccccggggctgccctaatggggcggggctggatggggcggggtcgcggctcctcccccggccgag

SEQ ID NO: 338092 - DNA, 122 bp, Homo sapiens
gagcccctcctcccggcaggaagtaggcgtaggcgactccccagcaggaagagcgacggccgttcggccaatagctacgaaggttggctggccgcctcaccaatcacagagcggcattggaa

SEQ ID NO: 338093 - DNA, 122 bp, Homo sapiens
taaatttatttgttcctttctttctcagcaacagcgacgaggcccgaggtgcagctgtctcgcctcgcctgtcttttgcaggcaccggcatgcacagaagatggctctccgggaggaagatt

SEQ ID NO: 338094 - DNA, 122 bp, Homo sapiens
ccgatgtcggcttgggctgctgccagcctaagcagggccgctgcccgatgcttgctggcacgaggccccggggtcagggcggctcctccgcgcgacccccggccctcccaccccgagccccg

SEQ ID NO: 338095 - DNA, 122 bp, Homo sapiens
tccctggcccccactctttttgcactcttaacctgtctcttctcattccttcgtcaccaccggactttgggtaccctacaggtggtgttgaggctggtccccaacaccaggcactttgtaga

SEQ ID NO: 338096 - DNA, 122 bp, Homo sapiens
tgataaggtgtgattgtggctgggggtctactctagctaggatgtttgcagaaaacccctcgtagaggacctgaataaggagagaggaagtgcaccacagagaaaagtcagggcaacagagg

SEQ ID NO: 338097 - DNA, 122 bp, Homo sapiens
tcatgatccgaggcttggtgctgggggctgggtgggctgagggctacctccggctgcccccggacgtgagcctggattacgagacacagcccgtcttcaacttgacagtgagtgctgagaac

SEQ ID NO: 338098 - DNA, 122 bp, Homo sapiens
tggtttatattttatttttttaactttcggctggcaagtgctgaatcctaagcgcactatcgcacgccacctcgtggtggagggcaaaagcgcagtctccctgggatggagaagtcaaacca

SEQ ID NO: 338099 - DNA, 122 bp, Homo sapiens
gacatgggaatgggaaaaccattggatgaaagggctggccaggccgcgtgcggtggctcacgcctgtaatcccagcactttgggaggccaagtgatcacgaggcgaatgacggcgaatcacg

SEQ ID NO: 338100 - DNA, 122 bp, Homo sapiens
gcaaccgagtcctcccccatcgctatttaacagctcccaccaggtggcgccagaacactgcgaggcctggaattcctggcaggctcgcagtgcatcctcacctcagccgtttaaatctagca

SEQ ID NO: 338101 - DNA, 122 bp, Homo sapiens
agggcgcagggcgaggcagggccagagcgtgcacgggcgcagggcgatgagggcgcagggcgaggcagggccagagcgtgcacgggcgcagggcgaggagggcgcagggcgaggcagggcca

SEQ ID NO: 338102 - DNA, 122 bp, Homo sapiens
tgccccgcccccgccgccgcgccgcctcctcctcctcctcctccccgccggggtgaaactcgagcgccccacccgcgcctgacctccccgagcccctccccgggccccgccccttcccggta

SEQ ID NO: 338103 - DNA, 122 bp, Homo sapiens
ccagccccagaaggcctcgggatcaggggcagctttttaaggactcagagggtggatatccggattccagactttccagaaattttgcaaaaaagaggaaatgtcttcctgaaaggattcga

SEQ ID NO: 338104 - DNA, 122 bp, Homo sapiens
gcgccgttcaccttcggcgttatttccctgagggttgcaggtggttggtgagcgaggaggcgtctctgtgcacgcatgggtgctgttggaggcgtgcgggaggggtgtgttcgtgcgtgtgc

SEQ ID NO: 338105 - DNA, 122 bp, Homo sapiens
cggttggtgggcttctctaggcccagcttgggcctcccggtggcctctgcaggcccaaatcgtcccgaagtcggcctctccaggcccagctccggcctcccagcggcctctgcaggcccaag

SEQ ID NO: 338106 - DNA, 122 bp, Homo sapiens
tggtacatgctgaggattgaggagatggtgcccatgaggcccactagccacggcgggaagcggccggcccacagcacgccccggggcagccagtgcacggcgttggccaggtcggccaggtt

SEQ ID NO: 338107 - DNA, 122 bp, Homo sapiens
aaaactgaagaactcggagtctaatgtttcaagacgggttgggtgggtaccccacactgccgctgacgccttgcgctcactccgccattcgcgtgcgtggctgagagacccccggccccact

SEQ ID NO: 338108 - DNA, 122 bp, Homo sapiens
gaaaaggtgcacaacatcacttatattcagggaaatgctattaaagtagcaataaggtatcgttttacatccatcacaccaagaaacattaagaggtctaacagccaaagttacaagggagg

SEQ ID NO: 338109 - DNA, 122 bp, Homo sapiens
cggcgaagtgtggggtctgccgccccctgccggcttggctgacgttcgcttctgtttccacgctgcccagcagtgttccaggtggaacatttcaaaggcaaggctgagaataaatgctgttt

SEQ ID NO: 338110 - DNA, 122 bp, Homo sapiens
cttgaatgccaatcaatgaacaaaaacagtatttgaaaatgtgcactttgacatcacccacgaggcagcggggctttgagataagaggacggcctcccgcgctccggtgcctgcggccgagg

SEQ ID NO: 338111 - DNA, 122 bp, Homo sapiens
aaacaatcagagcgtgcgtactctgtggaaaaatcgagagagagagaaagtcagagcatgcgtactctgaacttaaagtagccaatcccagggtatgctttaggcgggaaaattagagtctc

SEQ ID NO: 338112 - DNA, 122 bp, Homo sapiens
agcacgaaggtcaccagggagatgcacaagaagtaggcgggggccaccacgttgagcagccgcagggccagcatcctcgattacattcctgcggggcccggggtgagaagaggactgactga

SEQ ID NO: 338113 - DNA, 122 bp, Homo sapiens
tacaatcctttagctagacacaaaagttctccaagtccccacccgtcccagaagcccggccggcttcacctctcactggcacttaccatggggactgtgcggcacctagcctgggcactctg

SEQ ID NO: 338114 - DNA, 122 bp, Homo sapiens
cactgcggtgggcatttgccccgcacgtggtgggtgaccattgggcgggtgggcaccccccgaggcctcagagcagcagacgcccctccctgagcctggttgggcctgcaccacaagcagca

SEQ ID NO: 338115 - DNA, 122 bp, Homo sapiens
atttcggagaccgaattcaaaatgaaaaaccgggctgctgtcccgcacggagcctctgggcgccgctgtcggccagtgcagagcaagcgctgacgccggggatccgtcagcctctggcctgg

SEQ ID NO: 338116 - DNA, 122 bp, Homo sapiens
ccactcgtgaggtcacccagggatcccacagtgtgtgctaaccacctactacatggggtacgccagttaaccaagacagatgtgcctccccttgtgaagctgacagtggtgggtaagaaagg

SEQ ID NO: 338117 - DNA, 122 bp, Homo sapiens
tacaaagaggtgttaggaaagaaaagaaatacctttggagcgccacataatacaaatacacgatatcagagtttagtgatttatcttggctaagaagttataaagtctctttctttatgtga

SEQ ID NO: 338118 - DNA, 122 bp, Homo sapiens
gccgggcatggtggcacgtgcctgtaatcccagctacttgggaggctaaggcaggagaatcgctggaacccaggaggcagaggtagcggtgagttgagatcacaccattgcactccagcctg

SEQ ID NO: 338119 - DNA, 122 bp, Homo sapiens
ggccgcggaggtgctggagcctttgcgctcagacgaagggccgaacggccagggccaggccgcgtcttcagagcctggcgagggtctcgcgctgctgggaaggcggagacgccggggcgcgc

SEQ ID NO: 338120 - DNA, 122 bp, Homo sapiens
gccggggggcggtggacaaggggagggagagaggcggcggtgagggccacgcggtgatcgcgggcccctccaggccctgcccacagggtcctttcagccctcggcgcccccgggggtcgggg

SEQ ID NO: 338121 - DNA, 122 bp, Homo sapiens
atacatatatttatgagacagacataatccccatacaacatggagcactctgggaagccccgtggagttatctgttctctcacactccccatttccccttacccacaggccctggcaaacac

SEQ ID NO: 338122 - DNA, 122 bp, Homo sapiens
atagccaagaagtctgtgaggagacgcccaaccgcaggtgtcatcaaggaaacccaattccgacaatgagatgccactggattggcggagagtaaaaagtggtcatgctgtgtgacggtgca

SEQ ID NO: 338123 - DNA, 122 bp, Homo sapiens
ccaggggagccgacagttagaatgcgcctcggggcgactagtcccaagtcacggaaacctcggcgcatccccgcccgcccttcccccggggtcgcccccgccgcctcctggcgcttcctcgc

SEQ ID NO: 338124 - DNA, 122 bp, Homo sapiens
agcactttgggaggcccaggtgggctgatgcttgaattcaggagttcagccttggcaatgcggcaaaaccctgtctctaccaaaaaaaaaaaaaaaaaatacaaaaattatctgggtgttct

SEQ ID NO: 338125 - DNA, 122 bp, Homo sapiens
gaaagggccacaaacactccatgggtagtgcagttatgtcagtttcagtgccaggtgttgcgtacagcacggaaaacataaccccttcctgtacgtgagaaaggcaacgactgtcctgggga

SEQ ID NO: 338126 - DNA, 122 bp, Homo sapiens
tggtttgcatctccacatgactgttaatctcctgcttggctgcagaaatgttggagaagtcggtagaaaagacttcagtctcatagagggtcttgacatcattcaagaactttgccagtggt

SEQ ID NO: 338127 - DNA, 122 bp, Homo sapiens
cgtcaccgtggaagcagcggccggaggagccacagaaagcaaaactcccaaagccgcccacgtacttcgggtcttagcttggatctcctggagacaggccctgcgaaggagctgggctggga

SEQ ID NO: 338128 - DNA, 122 bp, Homo sapiens
gggggtaaccagattttgcgactgttcttggtattctaccttctcctacacacctgtcttcgtcttggtggtactgaggtttcctcccagttcagagatgtgcactccaatgcctgacgccc

SEQ ID NO: 338129 - DNA, 122 bp, Homo sapiens
agaagctgcgtaagcagtcagccttcagcataacacgtaggttttgacgattagtagaaacgagaaaaataatctgagaaagaggttgagagaggagacatgaaggagaaaaatagaaaata

SEQ ID NO: 338130 - DNA, 122 bp, Homo sapiens
atgaggcccaggaagcttttggtcttggtggaagagaagaggagccagcatattacatgacgagaggaagcaagagagataccaggctcttttaagcaaccagttctcatgtgaacgcattg

SEQ ID NO: 338131 - DNA, 122 bp, Homo sapiens
cttaggaaacttaaaactgctgaggccttcggaacagaaaccacacacaaacagcttctccgtcgggagcacagcttcctgggacaggctgaccgctttaaagagcatgataatcctgtcaa

SEQ ID NO: 338132 - DNA, 122 bp, Homo sapiens
gcattgggtgaaaatgttttgttcttttgacagtagctgggtgagttaaaagaaaatgcgcgggagtcgtcaaaagggctattctttcatatgcaagactcccaatgactaaagggctcggc

SEQ ID NO: 338133 - DNA, 122 bp, Homo sapiens
ggcggtggcggcccaaggcagccgagggggtcctgctttctgtgcgtgggggctcaagctcgccacctgcccggcttgcggcgcagccgccggcagagctcgatctgcgggaatgagacccg

SEQ ID NO: 338134 - DNA, 122 bp, Homo sapiens
caaggctcccaagaaagggattggcttcacctcttcttaaaggagaggcacacagagttccgtggaaattatctgaggcaatgacccactctcaaatgtctctaccaggcaactcacgcctt

SEQ ID NO: 338135 - DNA, 122 bp, Homo sapiens
cagatttcataattcagatgatgcaacaggatggaaccattgtcaaagagaatgcagggacgtttgatgcttgttaggacatgactcctgtacttgcccatttgttcatcctccaacccctc

SEQ ID NO: 338136 - DNA, 122 bp, Homo sapiens
gaagtgtccgagagatacatgccaggcacacattaagaactcagtaaaggaggccgggctcgggagcgcacgcctgtaatcccagcactttgggaggctgaggtgggtggatcacttgaagt

SEQ ID NO: 338137 - DNA, 122 bp, Homo sapiens
cataaagtatacccagcagcagaaaaccaggaggttaacactcagtctcagacttctcttcgttttgttaaacactctaaaaaatgtaacagggcatgctatgtcttcctgatcaaatatta

SEQ ID NO: 338138 - DNA, 122 bp, Homo sapiens
aaagctaggagtcatcttttaatctatcttcaaaatatacctggaattcatccacttgtccgcattaccaaatccatcaccttggataacattacctgttatttgaactattatagaatctc

SEQ ID NO: 338139 - DNA, 122 bp, Homo sapiens
ctgtgtgtttgtagaaggagtatgaatctgtatagagagtgcttactgaagctccaggctcgccaggctcaccagggggaccttggaagccttggggacccttgagaagaaggaaaaagatg

SEQ ID NO: 338140 - DNA, 122 bp, Homo sapiens
agagcgagaccgggatatggcagacaccccctgtgagctcgccaagcgggaccccaagggcgtgggtgtgcggcggcggccggcgcggcctctggagctggacagtggtggggaggaggacg

SEQ ID NO: 338141 - DNA, 122 bp, Homo sapiens
agaggcagtcaaaggtatctgtgcatccgtgtaccgacttggatccactacagaattgcacggcccatcaggactgctgtcaccccggtgcagcacccgcaggcccatctgtaatatgaatt

SEQ ID NO: 338142 - DNA, 122 bp, Homo sapiens
ggctggaaacagagaagcggctgcacatggtgggcgagccggtggagttcagatgcatcccggaggctcagaatgttcccgaccgttactttgctgtctcctgggccttcaacagctcgctc

SEQ ID NO: 338143 - DNA, 122 bp, Homo sapiens
tgacctctaactgtaactgccttggcctcattccgtgggtgtggatgctcctgcttgaaacgcattttccagcccgccaaattcttgggagagtttcttccactctccaggcgctgagagct

SEQ ID NO: 338144 - DNA, 122 bp, Homo sapiens
gccagcttgcgatcattttgcacaaacgtcaagattaacgatgtgcacctcattcattgtcggggtcctgagatttggttactatagctgggcacatggcaggatgtgcctgcatatctagc

SEQ ID NO: 338145 - DNA, 122 bp, Homo sapiens
atgggaatgggcgagaactctagagactgaccacccgggagggaagtcacgcgcgcgcggcgcctaagcagctcagagccggagcccaggtcccagagctgacaattaagccgcgggacctc

SEQ ID NO: 338146 - DNA, 122 bp, Homo sapiens
ggcccaccgcaggccatcacttcctgggtgatgcagatggagccgcagcccatacctatgcgcagcccgtccaccgcagcgtcaatcaggtttttggcctgggcggctgtcatcccaatcac

SEQ ID NO: 338147 - DNA, 122 bp, Homo sapiens
cacctgaccccgccctcccgcgtccattgggaacgccaccggaagtaatgcgagacggagcgttttggtggagacactcactggggcaatctgaggtaatccaacagactgtggcggaggga

SEQ ID NO: 338148 - DNA, 122 bp, Homo sapiens
tgcgtcttacccgaggccgggccgcctcgcccgctctagtccagcggagcccgagcgcctcggaccaatccccagtgattatgcaagacagcggaccaatcagctccgccagctcatgaata

SEQ ID NO: 338149 - DNA, 122 bp, Homo sapiens
gtcccgtaatgtgtgatgttaaggtccctatggtccagtatgggcacatcaggaagcttgcgcaatctctccctagtttagcccttgggcctttggcccagcctgctctgtatttctctgaa

SEQ ID NO: 338150 - DNA, 122 bp, Homo sapiens
tttcttgcctagaactcccagaagcccatgcgacacttccgctggatgcgcctacggctccggggtcccgcttggcctacaactcccagaaacacttgcattgctctttctgccgctcccaa

SEQ ID NO: 338151 - DNA, 122 bp, Homo sapiens
ctcccggtcttatctcggagcattctgggctttgcttgttcagtgcagcggactggtgagcgcggtgctgcgcggctggcggtttattacccccacgtaagctctataccatcacccagaac

SEQ ID NO: 338152 - DNA, 122 bp, Homo sapiens
gcgtgggtgggaaccagggctgcccacggtgcttgccggccagcgccagttctgggtgggcgtgggctcggcggaccccgcactcggagtggccggctggccccaccagccctgggcagtga

SEQ ID NO: 338153 - DNA, 122 bp, Homo sapiens
tacaggggtgagccactgttcccggcccctggtcccttaagactaagggatttattaccccgggtgctctcaacccttttctgaaaattgcccctgtctaaagccccgccgacccagggcat

SEQ ID NO: 338154 - DNA, 122 bp, Homo sapiens
tgtagatctgggaaagggccgggccacaggtcgggaccaatccagaagcagcacccagaccggtttacccggttccaggaccttgggcgaagtccacccgcccgagggcagggacgacgcag

SEQ ID NO: 338155 - DNA, 122 bp, Homo sapiens
cctgggacaggtctcggactcgcgggcccgccgggctccaccttgtcggggcactacccgcggagccgcggtctcgggcatcatctggcggccacacagccttactgcaagccccgcccgag

SEQ ID NO: 338156 - DNA, 122 bp, Homo sapiens
aaaataagtttggcagcctgacttttgattatctgtaaaaatcagggccaatagtttgaacggaagagtaaatatgaaggttttctaaacagttttttctggaagagagggttggaggtgag

SEQ ID NO: 338157 - DNA, 122 bp, Homo sapiens
agaaattcaggaatgagctgcagcaggtcaacaggtgagaagggcccaagccctgattagcggttgggcaacacagcgagaaccagcacggggcgggggccttgggtagcctcagcagcagg

SEQ ID NO: 338158 - DNA, 122 bp, Homo sapiens
ctcggggctgccgcctcccgaggcccctgcggtgtcgccaccccgacgcggggtgtttggcggtgccttgggagaaatagggcactagtttctatttcatgttttcggccggaaaaaacagg

SEQ ID NO: 338159 - DNA, 122 bp, Homo sapiens
aatgaacatctgagccagtcatcacatacatcggagccggtcatcaatgcacatctgagccggtcatcacacacatgatctgagcctgtcgccacacatcgtctgagccggtcatcacgcac

SEQ ID NO: 338160 - DNA, 122 bp, Homo sapiens
gagcgaggaggagctggtgcggcgccagagcaaggtggaggcgctgtacgagctgctgcgcgaccaggtgctgggcgtgctgcggcggccgctggaggcgccgcccgagcggctgcgccagg

SEQ ID NO: 338161 - DNA, 122 bp, Homo sapiens
tcagggttgcgtgcctccggccctagcctgcgcaggcggcctgagcttggggctctgctacgccacccacgcccaccttggcggagggcggggccccacggctctcaaacttgcgcgccaaa

SEQ ID NO: 338162 - DNA, 122 bp, Homo sapiens
cattaagcgacagggcgcagccagtaggcagccgcgggaggggtgtcctcgtgtctggcacggtggagcggagcattgcatccgctcataaacaccgcagagtgtatgacaagaacagcaaa

SEQ ID NO: 338163 - DNA, 122 bp, Homo sapiens
ctgctccgtgtcctggactctgagcaaagccgcgggccttagaccctccccagcctcaggcgagccccagtgccgacacctgctaagagacggtgcattgcgggctaaacccgcagacactg

SEQ ID NO: 338164 - DNA, 122 bp, Homo sapiens
accagagaacactgcagtgagttagctatgtctcccatctaacaccttgctcattttctccgtaacacacattaaactgaaataacatttattgggcattagctctgtgttggaccctgtgc

SEQ ID NO: 338165 - DNA, 122 bp, Homo sapiens
agtccggggcagcctaggaggccgaccctctttggagtcctgctgtctgggtgccagggccggaacgaggtagtggccatctcatacctactctgaaatgcaaaacttctattctgttgagt

SEQ ID NO: 338166 - DNA, 122 bp, Homo sapiens
gggggcgaggaagagccaacctttgccctgggagttctacccagcccactcagctacgtccgggagcctccgcaactcgcatttcccagtcgcaaccctgggtcattcctgcctccgtccca

SEQ ID NO: 338167 - DNA, 122 bp, Homo sapiens
ccaggtcctacatccaggcctggctgacagcctcactgacaggtttattatcaagttttacgactttcaagcttagtcactgcttaagtcagcctgcccagaaacaaacacatagcaaagcc

SEQ ID NO: 338168 - DNA, 122 bp, Homo sapiens
atattttgatgtatttccttccaatattccactattgattttgagacagtcttgctctgtcgctcaggccagagtgcaatggtatgatcatagctcactgcagccttgacctcccaagctca

SEQ ID NO: 338169 - DNA, 122 bp, Homo sapiens
gcacttagaggcttgaggttgccagctgtggggggttgggcctgtgcagtgcctctcagccgcccacgctggtggggctctgcagtgttagcttcttgtttctctattttctacctaggttt

SEQ ID NO: 338170 - DNA, 122 bp, Homo sapiens
cattaccaataatttctgaataaaatttcgctccagacagacgaggcgtgcaggcgtgaccgccgtcgccttccgacagcaccgtgcccaccccccggagatggtctcgccctggttcctcc

SEQ ID NO: 338171 - DNA, 122 bp, Homo sapiens
ccctgggtctccagcctgccagccaaccctgcagattttcgacttgccagcctccataatcgtatgaccacttctttaaaatgaatctctctctctctctgtttctggacatacacacacac

SEQ ID NO: 338172 - DNA, 122 bp, Homo sapiens
tgattccaaaaccctaaccctaaagactacactaaaatgttcctcctaagccatgagagccgtttttacaaagcatcacaatagtccaccttttgaaaaaaaaaaatccataaatttccaag

SEQ ID NO: 338173 - DNA, 122 bp, Homo sapiens
tattatgaatagtgcttgcatgtgtgcgtgtgtgtgtgtgtctatagatgcatattaggccgttgaaaagttttattattctttcgaggagagagactgccaacttttgaacctaactagaa

SEQ ID NO: 338174 - DNA, 122 bp, Homo sapiens
tgctacttctgagcaggtggagacaggacagggtaggacgaggcgcagcgtggatgcgggcggattgtctgtatctccttggtgggagcagttggccgtggagtctacatcggtttccttcc

SEQ ID NO: 338175 - DNA, 122 bp, Homo sapiens
ggacggcagggcagcccgagccgcggcggggatgggggctcgaggcgccctactgggaggcgtcagggccacactccccgcccccacctcattggaatgccttgtccaggacttggccttca

SEQ ID NO: 338176 - DNA, 122 bp, Homo sapiens
cgaaaaggacaccgtttcaggggcgagtgacgccggggtgcccaggccgcgccccagttccgggtttgcacccggtcttcttgccctgccccgcccgcgggactacagttcccaggcgcccc

SEQ ID NO: 338177 - DNA, 122 bp, Homo sapiens
ttctgtgagacttggttgtactgagatccactacttccccatcagtgattccctgggatacggtgctatcagtccatccatttgtgacaccaacaggaggcacagtgacaggttttgtaata

SEQ ID NO: 338178 - DNA, 122 bp, Homo sapiens
agcgaggactccagcgtatccgccattgcgcccggcaacagaaagcggcgcgcgcagggacgtcacatcaacgcgcaccgccccgccctgcggctccgccccctgcccgccgctgagttggc

SEQ ID NO: 338179 - DNA, 122 bp, Homo sapiens
agagacagcgctgggctactggcgaggctcgcttaaaaagcgtccgtaccccagggtccccgtttgtgggtagaaattcagtctgggacaagaacaagaacaaaaacagaaatggagaaaaa

SEQ ID NO: 338180 - DNA, 122 bp, Homo sapiens
ggctgcggcgagtggccccgggcgggcgcgccacccatcttataggcggcctaccggccccgccccggcccgcccccgccccgccgcccgcaccccgcccggaattccccagtggaagcgag

SEQ ID NO: 338181 - DNA, 122 bp, Homo sapiens
gcgacaaaaccccacagacaccgagttaaagaacgaagtgctttattcggctgggagcttcggcaagactcacgtctccaaaaacgcagctcccgagtgagcaattcctgtcccttttaagg

SEQ ID NO: 338182 - DNA, 122 bp, Homo sapiens
ggccgatggaggtgacatctctgaaactgatcctttttctttccaccacctacctttccccgaagggaaagcaactgcatggagcacaggtgaggagcgaacaattgctcttacctgtttaa

SEQ ID NO: 338183 - DNA, 122 bp, Homo sapiens
cgcctccctgcagcggtggtggagtgagtggcccctccatgcggaggccgcagctcagggcgggcgggagcctggaggctcccggggccccggctgggcagtgagcgcagcccggtcgagtc

SEQ ID NO: 338184 - DNA, 122 bp, Homo sapiens
cgaggtgctccgtgggcgcaaaacagggacccccagggtctgctgggccctgcacatttgcggtggggaggcactttcacccgtagggggggaactctccctcgccctttacgttttccttc

SEQ ID NO: 338185 - DNA, 122 bp, Homo sapiens
ttcctcgagttaggtcctcggatgctgaagaccccagtcctgactcaggacaaaaagggccgccccgcgaacgtggtaaataccacgccccattccctcccgggggcccgccgcactgcctc

SEQ ID NO: 338186 - DNA, 122 bp, Homo sapiens
tgcacatgcgtggatctgattctactgagcatataaagatttagaggacagaactaataacgagatcattgaccaagtctcaaatccaccacagggtggcacacatgtgggcaaaatctgaa

SEQ ID NO: 338187 - DNA, 122 bp, Homo sapiens
tttttgtgtgtgtgtcattacagggcgccggagaaatttaatctacccagcgggcggttccggaaaggcgcctgccgtgtagtcaggctgtgaactggcagaagctcttgccgccatgctgg

SEQ ID NO: 338188 - DNA, 122 bp, Homo sapiens
tacataaatacaagagacagcttaccatgaaacacactgttgtccaccagaaaatgcctgcggtactgcacacagttccttttttccaagttccagtaactcattgtcagaagatttctggc

SEQ ID NO: 338189 - DNA, 122 bp, Homo sapiens
atggtagtgaaaatggtttaatggagcagctgtccaaaaaagtataatgtgaactacatacgtagttttaaaatttctagtagccatggtaaggaaaaatgaaaataaagaggtgaaaccaa

SEQ ID NO: 338190 - DNA, 122 bp, Homo sapiens
agagaactccctgaccccttgcccttcccaagtgaggcaatgcctcgccctgcttcggctcgcgcatggtgcgcgcacccactgacctgagcccactgtctggcactgcctagtgagatgaa

SEQ ID NO: 338191 - DNA, 122 bp, Homo sapiens
caattctgcattccagccccagcccgggctcactccaccagatctcacgcctgctcacggcgttacgtggtatttacaaacagtggacactagtgggtcagtgggggacaggaacggggacg

SEQ ID NO: 338192 - DNA, 122 bp, Homo sapiens
tggagtgaggctaagttttggttgcctttgctcacatcacaaaggcctttgcctttgacccgtcctgaacccatcactgtgaggcccttctctctctttccagcttctcaaactaaaaactc

SEQ ID NO: 338193 - DNA, 122 bp, Homo sapiens
agccagaggagtaaaagggagagaagcaatccattttgtgaataacacggccctccctcccgcccagatcgggcaatggaataataattccccaggcaatgaaagtacaggaataaaagtac

SEQ ID NO: 338194 - DNA, 122 bp, Homo sapiens
gacatgtacttgcggaatcaggaattctcaactctttctcagtagtttgtagggcctgtgcggtctttgaatttgaccttcatggttgacagttcggattgtttgtcattattataaacgat

SEQ ID NO: 338195 - DNA, 122 bp, Homo sapiens
cgccagcatcaccgtccctgccatgatcaccatctggaaatagagcatgctgctggtgagcgccgcgggcagcaggggcatgcacgcctcccgggccgggccgagccgagccgagcgggcgg

SEQ ID NO: 338196 - DNA, 122 bp, Homo sapiens
ggaaaatccggaacacagagatcgcttctggtctctgcggaggaagccaggcccccagggcgcccatatccaggtgaggagcacagagacctgaaccgaaaaccgctgggggagacctaagc

SEQ ID NO: 338197 - DNA, 122 bp, Homo sapiens
ggcttgggcaatctgcctacctcaatctcccaaagtgctgggattataggcgtgagcaaccgcacctggccctggtcatttccttaatagcatgtctatgtgatcttttgaatctcaaacta

SEQ ID NO: 338198 - DNA, 122 bp, Homo sapiens
ctcaaacaatcctcctgccttggcctcccaaagtgctgggattacaggcgtgagccaccgcgcccagccacagtttgcaattcttaaggcaagggtgacaataggggtcaggggtctgacag

SEQ ID NO: 338199 - DNA, 122 bp, Homo sapiens
acagtcccggagttctctgggcctgggcgacgtgtttcgttgaaagcgggcaggtggtgccgggcggggctgcgctgaggctccggtgcctccccacctgcccctcgtacctgccggtctgt

SEQ ID NO: 338200 - DNA, 122 bp, Homo sapiens
caccagctccaggccctggcggccggcagggcctacaacatctccgtcttctcagtgaagcgaaacagtaacaacaagaatgacatcagcaggcctgccgtgctgctggcccgcacgcgtga

SEQ ID NO: 338201 - DNA, 122 bp, Homo sapiens
taaagtgcacctcccactcccggaaaatggcggcccccgcacactgcctttcccatatcacgtggtattacacgcaacagttcccgcccattttgcgatcacgtgacagaaaacgcagctct

SEQ ID NO: 338202 - DNA, 122 bp, Homo sapiens
tctagaagcaaagcaaattctaactccaattcccatgtaggctcaagtaggctggaatcacggccagatcactgaccagagagtactgacctagctgtcacactcactgtgtgagtcttggg

SEQ ID NO: 338203 - DNA, 122 bp, Homo sapiens
attcctcattttaacctctagatcagctctgtccaataaaaatacaattgtggctgggtgcggtgactcatgcccgtaatcccagcactttgggaggccaaggcaggcggatcgcttgaggt

SEQ ID NO: 338204 - DNA, 122 bp, Homo sapiens
ctgggccagggggcccctccacgagcataccctgtggagtcaaaggttaaaaatcagaggcgacaggaccagcacactcaaccccacttgcttctcctatttccactgcctcagccctgtga

SEQ ID NO: 338205 - DNA, 122 bp, Homo sapiens
gttccggtcgatgtgagcaaccgccccggaactggctatgggcgggccccttgcagttgacgcgggggcggggagtcagcgagggcgagcctactggagtttgccgggggtgggaagaaggt

SEQ ID NO: 338206 - DNA, 122 bp, Homo sapiens
gaggcggacgggctcctcggcaggctccgattggggtgggagagcggccgccgaggggcccgcagtagctgcgctcccggggaaggagccccacagtccccaggtaaggaagccgcggggca

SEQ ID NO: 338207 - DNA, 122 bp, Homo sapiens
tgaggaggagtagacacacagcagttttctggatctctttaaaacgtgactcccactccccgggaaagaaaagagtagatacaatgacccgccgatgttggcacagcactgatggggcagga

SEQ ID NO: 338208 - DNA, 122 bp, Homo sapiens
acggccggcgtgggcggggctgcggactggcgcagcctggagggaggcatcaggcagtggcggaaaaggggcggagaaccggagaaaagggcggagaaccggagaaaagggcggagaaccgg

SEQ ID NO: 338209 - DNA, 122 bp, Homo sapiens
ccgccggcgagactgagcccgggacagcccagagctccagcgctccagcgctctgcagcccgcccagagcgcgcagaccacccccatgccccgcccgccctcctgccacacccgcccccagc

SEQ ID NO: 338210 - DNA, 122 bp, Homo sapiens
gtgttggggggcgtgactgggggtggccagaatgttccaggcaggaagtgcagtgagcatcgggctcccgcctggagatgctcctggtgcgtaattatgccagccagtgggcacgtctagca

SEQ ID NO: 338211 - DNA, 122 bp, Homo sapiens
aaaggcaggcagtactcttagactacaggggtggatctcatcatttgattttcccgactccgccaggaaataagaggggccttggcttggggagaggtgtgtggggaggcgtaaggggtggg

SEQ ID NO: 338212 - DNA, 122 bp, Homo sapiens
ggcggaggcgccggcgaggctggggccgggggcctagctggcaacgccgggagagggaagcgtagcgcggaaaatcccagtgctcggccttcgaaatgcaccggctcattcagccccgccag

SEQ ID NO: 338213 - DNA, 122 bp, Homo sapiens
atataatgaagacatagacattatcaaatacaactgatagcactaaccttccctttgaaccgtccctaaacatccacactcacatgtcctttaaatacaaaccacttttctccaggcttcct

SEQ ID NO: 338214 - DNA, 122 bp, Homo sapiens
ggttcatctcactagggagtgccagacagcgggggcaggtcactgggtgcgtgcaccgtgcgcgagccaaagcagggcgaggcattgcctcactcgggaagcgcaaggggtcagggagttcc

SEQ ID NO: 338215 - DNA, 122 bp, Homo sapiens
aacattagctgttggtattattactaacagagagatgaaaatgacaccttgtaatcattccgtgacctcagcgacattgatgttacatctacagtgcactaagcactgggaatgcaaacgtg

SEQ ID NO: 338216 - DNA, 122 bp, Homo sapiens
acaccccgagaatgcggtcaggggccgcgagacggtggcgggggacagcgctcagtacaccgctcggcgctgcacgcctggagaacgcccggtgccacgggacgccttgggcccggttcgaa

SEQ ID NO: 338217 - DNA, 122 bp, Homo sapiens
cagggccagggcccagagtgggaatgagagaggtggggtgatgacagcctcaggatactccgctcaagctggccttggttctagctcccaagctgcagccacctcttagggggttcctgctg

SEQ ID NO: 338218 - DNA, 122 bp, Homo sapiens
ttacttatttaacaatatcacagtccccatccccttctccttacctaatttcattgttaccggccccatgtcaaagattatttaaaactccccggctgtcaaaattccattaacaacctctg

SEQ ID NO: 338219 - DNA, 122 bp, Homo sapiens
gtgttcaaatacaacttaccacgcagtcaccgccatccaactgcatgtcactctccacttcgccacggtctgaactcttggccacaagatctaagccttccggatgccccagccagttcagg

SEQ ID NO: 338220 - DNA, 122 bp, Homo sapiens
tcgatgagcctttaccctgaggtttagaaaggcagctctttctggggcaaatacaaagagcgtgtttcttcctacaaattagtggcatcctcccgctgtatggattcagctggcaaagtaac

SEQ ID NO: 338221 - DNA, 122 bp, Homo sapiens
acattctttctacaccagcagctcaaacaatgtctgcctatgcaggccagactcagtattcggggatgcagcagccagccgtctacacagcctactcacagacaggacagccctacagcttg

SEQ ID NO: 338222 - DNA, 122 bp, Homo sapiens
gacctgggaagtaagaattaatggtgcaagtgaggcctttcatgccaacacaagtgtgtacgtctctcagtataggtttgtgaatcaaattctttttattctcttcactttctttctgtgta

SEQ ID NO: 338223 - DNA, 122 bp, Homo sapiens
agggcccgccccgcgccggaacagaggtgcgcgccccccgggcctcgggctgggaagctacgggcagccaatctgtttctattcatagtgaaccatagatgtatgattgagtggggccgcaa

SEQ ID NO: 338224 - DNA, 122 bp, Homo sapiens
gagctaggggttcctgcagggtctcgtcccgaggagctgacctctgtcctggctgagagccgggccctggggaaggggatctccaatgacctgcgcttgtcaccctcttcctctcggcggcc

SEQ ID NO: 338225 - DNA, 122 bp, Homo sapiens
acagtaactgctacatctgccttctccaaccccactgccatctgtggtcttgggtttcgacgaagtaagtggtttggacacctgtgtgccttcagatatgtttctgaaggagctgttgtttt

SEQ ID NO: 338226 - DNA, 122 bp, Homo sapiens
tttattgaagttatatattccaaaatcttctatatgcacatttgaggtaatcagtttgcacgtttaactcatgtgtattttaagtcatcagcttgtgttgcctggtttattaaagcacatgg

SEQ ID NO: 338227 - DNA, 122 bp, Homo sapiens
attcccgtcgacaaggcaccttctagggaaaacttttatcctcttctgccccccagtggtcgaccaccaagaccacggcaggacctacctatgttaggctgggaggaaaatggtttttttgt

SEQ ID NO: 338228 - DNA, 122 bp, Homo sapiens
gtgttagcacaaatcatatttcctgatgacgagcagagaccttgatctggtcttaaagaacgcgttttccaacttaccctgggacttttttgaattagccggccacatataccagggttctc

SEQ ID NO: 338229 - DNA, 122 bp, Homo sapiens
cacagcccgccttcttagacacaaggcaggcaggagtatgcgagagagaagacgtaaggacgccttgctcgtggtaagatcagagactgatcggagaacgctttcctccttccctcctttga

SEQ ID NO: 338230 - DNA, 122 bp, Homo sapiens
ctcatttcatgtttgtgtcttccttttctctgtatttcctcttgtgtgtgttaagacgcgcgcaccccttacctgtttttcactcctgtaagcaagtgccaatcttaatcaccgcttttcaa

SEQ ID NO: 338231 - DNA, 122 bp, Homo sapiens
cccgccccgacccagcccaggagccggagacccgggcgtgcggcgctggggaggtgcccacgccccctccgcgcccggggcacccctggggtgggacccaggctgacttctcctcggggacg

SEQ ID NO: 338232 - DNA, 122 bp, Homo sapiens
cggactctgcgtctccgggagtgtctgaccacggccgaggatcaggctgctcctgcactgcgccggccctgagcggacctgtggctcggactatctattacatcgcagccgagctggtccgg

SEQ ID NO: 338233 - DNA, 122 bp, Homo sapiens
ggcaagggagtggggaacaggcactggccatgttgttacactgagatcaaacctgacagccgtttttaaaggtttaaccccaatcccaagtgctgaaaaaccagaggctgagggagatgtgt

SEQ ID NO: 338234 - DNA, 122 bp, Homo sapiens
ggcccgcctcacggaatggccacggaatggtcagacaccccgtcactcctggctggtgggcggggccagggcgcctgggggcggcgaattggcggatggggcctcgggggcggggcagcggc

SEQ ID NO: 338235 - DNA, 122 bp, Homo sapiens
ataagaaccctttcagtttatttcggaatctcatctcagaggtagcttttgcctccctaccgtacctctcctacccaattcttacccctcaatcaccagaaggatggaatgcacacactata

SEQ ID NO: 338236 - DNA, 122 bp, Homo sapiens
tccctcaatgttggcgtcaagggtgattctgaaacctcaaagccccagtgaagccccaaccgcatctctaaccttttacctcttagtccatgatcttcctagctgccttacagaacaaaaac

SEQ ID NO: 338237 - DNA, 122 bp, Homo sapiens
tctggccgctccgcgagccccaggtgaccgccggcgctccgcgtactgagaggcggaggccgtgcctggccagccgctcttaaagggacgcccacagctcacacgctcctcctgctgcctga

SEQ ID NO: 338238 - DNA, 122 bp, Homo sapiens
gttacgtgccagccgccgggggcgggagtttcagcaagccgctggccaggggaagagacgcgctggggtgcccgagttcagtattggaagaggcaggtaatccttccccatggagcctgctg

SEQ ID NO: 338239 - DNA, 122 bp, Homo sapiens
ctgggaaaccccctcttcactagaggttgagtcagagacctagtgagttccttggactcccgcaggcagggcttagtggttggtgatcagtgcggatgggcaggagggtggactaagcagag

SEQ ID NO: 338240 - DNA, 122 bp, Homo sapiens
cagttccatctttcgggctctgcagacaaataaataggagccgggctgacctccgataaccgggcagatccgcagacaccccctttcttcacactgcgtgtgggacgggccgcagagctctc

SEQ ID NO: 338241 - DNA, 122 bp, Homo sapiens
ctcctcgtttctctccgtttctgccatctcctcctcggtagggtcggcatccctaccatccgcacagacccgtgggctcggggcctgaaatctttgtatttcttataaaatactctaacaag

SEQ ID NO: 338242 - DNA, 122 bp, Homo sapiens
cgctgaagagaggcggaactttgagtagcaggtggatccatagccaatgaagacgcgggtcgctttgagtgcggggcagagaagccaatggacgtgcggcattgagagggcgggtcttccgg

SEQ ID NO: 338243 - DNA, 122 bp, Homo sapiens
caagaccgggggtaaccggtcacccgagccgacccaccgcccgcactgccgaggctcaggcgccccagttcggtgccaagaggcacgccccggggccaacctggacaggtagcttcagcaaa

SEQ ID NO: 338244 - DNA, 122 bp, Homo sapiens
ccgcgcgcgtcatcagcagcggcgccgcggggcggggggcgcagagaccctccccaatcccggcctgccaccacctggctcgcgcgcagccccggcccagaatgccttaacctgcgccgatt

SEQ ID NO: 338245 - DNA, 122 bp, Homo sapiens
ccggcacgcctagctgggggcagcccttggcctggaagagctgcagcaccaggtccagcacgcgcccgttgacgcgccaggcgcagttgcccagttgggtgagggcgtccagtgcgccatgc

SEQ ID NO: 338246 - DNA, 122 bp, Homo sapiens
atggctcacttccatggggacggcccccattccctgggtcacccccgtgaggacggcccccgagccctggctcgcccccgtggggtcggtccccactccctggctcacccccatggggtcgg

SEQ ID NO: 338247 - DNA, 122 bp, Homo sapiens
cgcccctcgggcgaggaccccacgcaagcccgagccggtcccgaccctggccccgacgctcgccgcccgccccagccctgagggcccctctgcgtgttcacagcggaccttgatttaatgtc

SEQ ID NO: 338248 - DNA, 122 bp, Homo sapiens
tcaagtcccgatgcgtgtgagtgacagtcgatcggaatgatgaactgacactcggagctgcgtaattttctaaaggcaacgtagtaaaagattggagctccgcggggctgaggctgtttgtg

SEQ ID NO: 338249 - DNA, 122 bp, Homo sapiens
ggggacccctgtggagctctactacaccgtgcacccaggaaacgagcgaggggactgtgccgggggtgacttcaggaagggcaacgccatccgtccaggaaaggatgggctggaggaaacca

SEQ ID NO: 338250 - DNA, 122 bp, Homo sapiens
tgcgcgcgaactgtaagtgccagggtctcagggtcaggtcgcggctggtcactgtgcaggcgcttgggtgacgcgacgatctcagcggatctggtcaccttcgtctccccgccatggagacc

SEQ ID NO: 338251 - DNA, 122 bp, Homo sapiens
tcttcactacagtagattacagtcccttccaagatgcaaaagtcttgtcagcgtcaatttcgctctgcctactggtccataaagacagctgccaaggggcaggcagccatacgtcaccgagg

SEQ ID NO: 338252 - DNA, 122 bp, Homo sapiens
ccacaccccagccaaggtgacttggttgcaaatgtatcacctgccttctctgcacagagccggccctcccacctcagcacccagcctctgctgcattcttccctgtcaggggctcagctttc

SEQ ID NO: 338253 - DNA, 122 bp, Homo sapiens
cctggaaacggtccgcggcaccgggaaaagcgaaggcttcgtgtgtctcagcgtgggctgcggtctcccggttgttattgttggttgttctttttggactggggttggaatattccaacaat

SEQ ID NO: 338254 - DNA, 122 bp, Homo sapiens
acttcctccacacctgacctcctgtccccacctgtgccccgtcccttgctcccacctcctcgtgacctctgatgggggaggcttctgcagccccccaccccagtcccaggcaggggtgcagg

SEQ ID NO: 338255 - DNA, 122 bp, Homo sapiens
tggctgcctcacagcgatgctcagagccggtttcccaaggtccgcgcgccgcctgcaaggcgcaaacccaagccgctgctggttgctaggagatactgggccagccatctcctccaatcagc

SEQ ID NO: 338256 - DNA, 122 bp, Homo sapiens
gggagtggaagccccacagacatgcagtgaaaaatgatcctttcttcccctctgcgttctcgtccccttcccagagacaccgctgtgatctcgtgcctcgccccctccgcacacgcacaggt

SEQ ID NO: 338257 - DNA, 122 bp, Homo sapiens
gcctacccaggagcagctgctggccgcagccatggcagcagcccggggggaggatgaggacgaggtctccgaggcccaggagactccagaccacgccatcttccggtggcttgccatctcct

SEQ ID NO: 338258 - DNA, 122 bp, Homo sapiens
ccggttgctggggagggagtcggggctgtgtgggggcattggttcagccccagcggagtccgagtcggggtttgcagcatgttttgtggtgatgtttccaatctctttcccaaccaatggat

SEQ ID NO: 338259 - DNA, 122 bp, Homo sapiens
gagagctatggcggaggcagtagatgaggccagaggccaggaggacgcccaggatgcaggcgagggagaccagggtgagcgcgatgaacttggtggagtcttcttgctccgcctgaggaggc

SEQ ID NO: 338260 - DNA, 122 bp, Homo sapiens
ccttatgattggtttgctggctgcctcgggagaccctgttgccaggatacttggcgttcccgacccgacccccgttccccattggctgtcagggcaaaagccgccatctaatgaggagcgag

SEQ ID NO: 338261 - DNA, 122 bp, Homo sapiens
tcattcaaactgccttttgtgtttggctaatcagggcagcccaggttcccagcggaggtgcgtctgtggtgtcagacacctgtgtctcagctctgtcttcctcgggctggctcctgcggatc

SEQ ID NO: 338262 - DNA, 122 bp, Homo sapiens
gggagacagtatagtgcacctttggatgtggaaggggaagggagtagccagaacctcccacgacacccaacttcataggagtacaggcaggggtccccccagaaagctgagtgggttgggag

SEQ ID NO: 338263 - DNA, 122 bp, Homo sapiens
gaaaaacacacacgcagcccatagccacaacatcaacaagaccagaagccccgcagagttcgcaggaggtgggcagtggctgcgccacctgctcggcttccccaaactccgagcccacgccg

SEQ ID NO: 338264 - DNA, 122 bp, Homo sapiens
cagccaccccccaaatcccatgaatcccacttctcggtgcgattggagttgtgttgtaagcgcaggagaggctcctgctgagagcgagctcctgacatagtgacctcattccccacgccgcc

SEQ ID NO: 338265 - DNA, 122 bp, Homo sapiens
accactgggtgagcgcccaggaacgccggacgcgcgccttcacgcccgggtgcctggcggcgttttagaaaagctgtatttgaaaagcaaccgattggggtgaaggcgggggagcggaatcc

SEQ ID NO: 338266 - DNA, 122 bp, Homo sapiens
ggtggaggggcggggctgttagcagggacgcgtctgggccagtcggtttccaggaagtgacgtcaggcggccgcggagatggaggatttgctcgacttggacgaggagcttcgctacagctt

SEQ ID NO: 338267 - DNA, 122 bp, Homo sapiens
ccccacttaaggctcctgtcactctctccccatagaaggaaaagtggactcttctgtaaacgggaagaggagttgaacttgaaaccggctctttgctatctttttacagcataaagagacat

SEQ ID NO: 338268 - DNA, 122 bp, Homo sapiens
tgcctccgtctctttccgcgttgatttctccaagtggggagtcgtggcttggtcctgatgcgtctctagagccgcatcttccagcttcgagtgagcagagcagttggagtctgagggccttt

SEQ ID NO: 338269 - DNA, 122 bp, Homo sapiens
agatgctgccatggggttggaaccctacagcctggttgcttcccctagaggtttgagcagcggggcaccacagatgcaagctgcactaccatcgcatgcactgtgaggaggacagaggaact

SEQ ID NO: 338270 - DNA, 122 bp, Homo sapiens
tcacttacttacacccaaagccaactggtctgtcactttgccctggggtggtggtggctccgcagactggcccagcccaggccggagctctcctcctctcttccccgccctgggctggccga

SEQ ID NO: 338271 - DNA, 122 bp, Homo sapiens
ctgttgacactgcactctgcgtgtggagggaagcccggggcctggcggcagaggagcagccgcagccgcgctgtgcacccaggaacctgtccttcaggaaggaggcggcggtagaaattaat

SEQ ID NO: 338272 - DNA, 122 bp, Homo sapiens
aggacttctgaagacccgggatgaggttctgcctttataggatgctcagtgtgccattgccggggtctgctccagagcgcttccctgagaggaaaccaggagccggcattcagcacactccc

SEQ ID NO: 338273 - DNA, 122 bp, Homo sapiens
gcactccagccgggcccagccgccgccgcccgcccccggcccgccccccgcaccgccccccgcaccgccccccgcaccgccccccgcgccgccggcccgccccccttaaagggcccggcccc

SEQ ID NO: 338274 - DNA, 122 bp, Homo sapiens
ctaccagaactccgagctgctgatcagcaagctgccgctcctgcgagagctcggcggtgacgccgctgcacgagagcgaggctgaagaactttgtgacacaatagtccacctccctgcaaag

SEQ ID NO: 338275 - DNA, 122 bp, Homo sapiens
tagctgcagttagcagtaattacacatctgactaacaatcttcagaagtctccctgagaacggtgttcctcagccctgtgacgcatcagcccaggtaggcagggctgagggccgacggcctc

SEQ ID NO: 338276 - DNA, 122 bp, Homo sapiens
gcgtcattatcatgcacagcgctcgcagcttcaggctccaactctactcacttgctaatccgtgagagctgagcgggagacaggctcttgcagccttttctgcgttaatgcgacgatttctt

SEQ ID NO: 338277 - DNA, 122 bp, Homo sapiens
gtgcttgacaaggccacacccgctgctcctgcggggtctggtgcacaccccgctagcgtccgcagcaggctggggagcagaggggctctgaggaccaagaaaacctttctggagttgtccac

SEQ ID NO: 338278 - DNA, 122 bp, Homo sapiens
gcacccagcgattagcagcaaattctgggctttgtgccccgcagcttcccactgggtaaccgaccgggaagttctaactcccctcagcgcacaacacctccccaacacactcccttttcaac

SEQ ID NO: 338279 - DNA, 122 bp, Homo sapiens
ttctctgcctaggggttcgcttcccacccatcccctcctccaaggcatcttagcgctgtccgtggtgctgaccgccaatcccctggttgccgtttcgaccagctgggatctctggtgcgccc

SEQ ID NO: 338280 - DNA, 122 bp, Homo sapiens
aaagaaagtactaggagatgaagtcagtgatcatgtgggacttgtaagccatttaaagaacgcttgtgaataaagtggggagccaccttgggattttgaccagcagagtgttttgatctaat

SEQ ID NO: 338281 - DNA, 122 bp, Homo sapiens
gtctgttttcagagctcttagtccaaacccaggttcaacttggggtgccaccaatccttgcgggggggggtgcctggccccacccttgtgaattgggaggatctgggtcaggccgtctccct

SEQ ID NO: 338282 - DNA, 122 bp, Homo sapiens
gcggcgcggagctgctcgcgggaactggggtccctgggcgcgttccaccgcgcaccaacgcgacccaagcgctccaaacccgactgcttctcgccgacagcactgcgagcctccgaccagcc

SEQ ID NO: 338283 - DNA, 122 bp, Homo sapiens
cctttggagtgggctctctgtttctacccttccgttttccatcacacatacacacatacacgcatgcacacgtacacacacgcacgcacacgcgcacacacatgcacacgcacacatgcacg

SEQ ID NO: 338284 - DNA, 122 bp, Homo sapiens
gggcgctgcttccagctggcggacgacgcgctgccgcactgcatcaagggctacctgctgcgcagcgagcccaagcgcgacttccactttgtctaccggcccctggacggtggtggcggcgg

SEQ ID NO: 338285 - DNA, 122 bp, Homo sapiens
tgacgcgacttaggtcgtccgcgccatctttgttgagggcgattgccaggcctggaggggcggggcggcgcctgtggctggaaccctgggctaggcctttagggaagcgggacccccaccct

SEQ ID NO: 338286 - DNA, 122 bp, Homo sapiens
caacttcccatagtgcatctactgcagtgagtgaggcgaagcctggtgggtccctggtgccgtgggaaatcttcctcatcaccctggtctcggttgtggcggccgtggggctctttgctggg

SEQ ID NO: 338287 - DNA, 122 bp, Homo sapiens
cattatttcgcggacacacacacccaccctcatccttctgaattatgggaccctgaagagcggccgtggccagttccccgcacggggccttaggggatccccacgcacagcactcacagtcc

SEQ ID NO: 338288 - DNA, 122 bp, Homo sapiens
ggaggcttgggtctgccgctttccactgagtttttctgagcttcagcgttctctccaaaacggggatacggatctcctggggatgctttagagggcctaggagataaagccttgtttctttt

SEQ ID NO: 338289 - DNA, 122 bp, Homo sapiens
gtggggtctgtcacccacagctccccaaggcggggtggggcccctgggctggcgtcacctcgggcaactggagaggaaaggttcttgtgtttattttttccaaaacgactccttgactgcct

SEQ ID NO: 338290 - DNA, 122 bp, Homo sapiens
ccggccgcccaggcgcggagcctctcgggggtcacccggccgccgggcccgcgggacgcacggggccgccaggggaggacaacaagcctcaggccctgtccctgcgccccgcccggcctccc

SEQ ID NO: 338291 - DNA, 122 bp, Homo sapiens
gtgctgaggaggccaaggagggcactgggagctccgttccgggagagctgtctaaggacgcggaaccgggtggggaggccagggaggtaaccaagagtccgagccgggcctggaaattctga

SEQ ID NO: 338292 - DNA, 122 bp, Homo sapiens
aagccagccaccctgctctcctccagccccttccactgttccaagccccttcctcggaggcgtctccccaaccctcctgctggtggccgctcttgcactgcttgggtgggcgggcaccagat

SEQ ID NO: 338293 - DNA, 122 bp, Homo sapiens
gggagaggtctaattttatactgtagtgtagggacatggctctagccagaggaccttgtgcgattaaacatggttggggaagacacaagaccactctgctttgccttcttttttgctgtagc

SEQ ID NO: 338294 - DNA, 122 bp, Homo sapiens
ggaccctctgccttccaagatgcccaagaaaccaaagaatgaaaacccagtggactacaccggtaagcctgcggcggttgcctgatggctggggctccaggaagagtcaccatctgcatctc

SEQ ID NO: 338295 - DNA, 122 bp, Homo sapiens
tctgcggtggggcgaggttaagggttcacgaagctgttttgaaaacgctcaggcggcttgcgctcgtgaatggtcagatttatcatggggtctgtttaatttgtgtttttcgcagccattcc

SEQ ID NO: 338296 - DNA, 122 bp, Homo sapiens
gggctgcttccggcctcggccccgcttcgatgggcgtggcagagcgcaaagccgcatgggcggggtttgggagtgtgggccagcgggcctattcctccaggaagccttcccagacttccatg

SEQ ID NO: 338297 - DNA, 122 bp, Homo sapiens
atatgtgatcagtaaatgacactggttttgccacccctagtgggactacaaaaaccagcacgccctgcgcccccagtcggggcccctccacccggcgccggcgcgcagcatgccgggagttg

SEQ ID NO: 338298 - DNA, 122 bp, Homo sapiens
actcatgggaaggcaaagtactagatcaaagtaccaatttgaaggcagattcaacaagaccgattgattaccagacgagtgatggagaaagaaataagcagacccactagatgactgacagt

SEQ ID NO: 338299 - DNA, 122 bp, Homo sapiens
aatccgcctcctgggaacccgtggaatcgggttggatgcgcatgtgcgtgtctctttttccgggggaggctccgcccacggccccgccccgctcccaagtgcgcgcggacccctagctccct

SEQ ID NO: 338300 - DNA, 122 bp, Homo sapiens
tctattgtgagaacacagagcctactcctctttggattatatcatttaacttaaaactgtcgagacactgaagtgtttagatccaagacgtgaagatgagtaagtgcagtgctctcgtggga

SEQ ID NO: 338301 - DNA, 122 bp, Homo sapiens
cccctgtggagcccctgccgggaccattaacccattggctgctggcaccacccccacctccgcctcccgcgcacctgcatctgtcaatccggtcagttggtttcacgcttgtgggggagggg

SEQ ID NO: 338302 - DNA, 122 bp, Homo sapiens
ttattttcattttatttttaaaggatgagctttggtccttttcaggccgccggttgtttccgttcccgagaataaagacgaggatccgaccagccagaagccggagtctgtctttcgccagg

SEQ ID NO: 338303 - DNA, 122 bp, Homo sapiens
gggaactccctgaccccttgcgcttcccaggtgaggcaaatgcctcgccctgcttcggctcgagcacggtgcgcgcacccactggcctgagcccactgtctggcactccctagtgagatgaa

SEQ ID NO: 338304 - DNA, 122 bp, Homo sapiens
tcacctttaattctttgttcatcttagttaccatgaagtttttcatttacttacttgcttcgtagttactttgaagagtaaaacgtagatgagatgcagtatactgttaaggttttctaata

SEQ ID NO: 338305 - DNA, 122 bp, Homo sapiens
gggcatgcgccgcgggcgttttggcgggaagcgcggggcgggccggacaatgagagtgtccgcctcctgagccaataaagctgtactggttttgaatcgcggcgcgtttcccgccgctgggg

SEQ ID NO: 338306 - DNA, 122 bp, Homo sapiens
gaactcacagactggaaccgggagtcgtgtcagcacatccttgagaggcaggggtgtggacgcgtgcccagcccgttcaatcgcggcagaggccaagagctccgagtgggtgggaacaactg

SEQ ID NO: 338307 - DNA, 122 bp, Homo sapiens
ccttaccgtcctgcagaagttcccggactgtagctgcagccgctccagagcctcgagctccgaggccagctacagcgacgctgccgccgccaccttccatgttggcaggtgccgggttgatg

SEQ ID NO: 338308 - DNA, 122 bp, Homo sapiens
ctgggactccgggttgcagctccggaactgagcgacctcagagccctggcagctccaaggcgcctttgccagcagcagcggaggctcagctggagtcggacgatgatgtgttgcttgtcgcg

SEQ ID NO: 338309 - DNA, 122 bp, Homo sapiens
ccgcgggcggtgcgcaggccgttctctgcgtcctcgggctctgggtgaggctgggtgcagcgggagagacccggggcgagctgctgggggctgtgtggccggccccaagctggccgcgcgca

SEQ ID NO: 338310 - DNA, 122 bp, Homo sapiens
taagacattcctaatagtttatcacagagttgtcaggaaggtgacaaaacccacagccttcggtctggaggagcgcaggagctggtgaaggacgacccgtgtttgcattttttagatgattg

SEQ ID NO: 338311 - DNA, 122 bp, Homo sapiens
cgggggacgtgcagccagcaggtggcgcaggcggtgacgcagctgcgcaggtgcgagtggcgggggcacaggggtgggcaggggcgtgggcgcagaggtgcccggggctcgagcgcgggcga

SEQ ID NO: 338312 - DNA, 122 bp, Homo sapiens
ggtgtgtgaggaggagaggaaccccagcaaagagtagtaataataatggccaccgtcacacgataatattcgagtaatatgtgcggggactttacaaagcatctcatatgcttcattttaac

SEQ ID NO: 338313 - DNA, 122 bp, Homo sapiens
tgcgcccacgctggggctccggaccctgggtcctctgagcagacaagctcggggaactgccgggagaagcagaagggcacagcccaacccgaagactgcggtcatctgaacaaaactgacca

SEQ ID NO: 338314 - DNA, 122 bp, Homo sapiens
gacctcaggggatcgcctgcttcggcttcccaaagtcctgggattacaggcgtgagccaccgtgcctggcccagggttttttattttacagtataactttgctaatgaacatctgatcacca

SEQ ID NO: 338315 - DNA, 122 bp, Homo sapiens
cattaggcctgaggacgactctggacttggttgataaaacaaccaaattagaaggagaagcggggcctcagcacccggaggacagatcttggtggctgtcaagcctttggttttagctgagg

SEQ ID NO: 338316 - DNA, 122 bp, Homo sapiens
tcaggtgaatagaaaataaccatttgccaagatttggaaagacagagagctctctggacacgggttcgatggagcttgcacctctctgagagctgaagtcaagtctcaccctctctccatac

SEQ ID NO: 338317 - DNA, 122 bp, Homo sapiens
cgcagatttacccctcgtcatttctttctctctgcttcgttcatgttttcctagtcctttcgttcctatctggggtggcctggttttgtaacagtcactgcgttaggaatctagagactagg

SEQ ID NO: 338318 - DNA, 122 bp, Homo sapiens
aggccggattcaaatggactccagagcctgctcttagcccctacgtgtgtctgctgggtgcggctctgtgtgcaggctcactgcgattttttagctttctgtgctcaggctcgtttttctgg

SEQ ID NO: 338319 - DNA, 122 bp, Homo sapiens
ttgatacccagtcctctacaccaacaaagccgaggtccggaatgacagtccccagagaagcggagtcacccttctcccatccggctaggccacaggaacctgagaaaatcaagggttgctgc

SEQ ID NO: 338320 - DNA, 122 bp, Homo sapiens
tgctgcgactgtcatctttcagatcagagtaactctgagtctggtgggagtgtcttcccccgacaccccgtatacctccgctttaagatgagagaatcttctgtcggtgctagcgttcagcg

SEQ ID NO: 338321 - DNA, 122 bp, Homo sapiens
cctgggccaccggcgctggttccaggttttgccagctactagggacgcgtaaagccttcgcgctcctcccaccacaccccgagggaagaagtggcaggccttacccggagactacaaggaac

SEQ ID NO: 338322 - DNA, 122 bp, Homo sapiens
aggaactgtgtcctatttagccttatattccctgtgcgtggacaggatagctctatcgggcgcttattcatgtaagaggtagggtcctggctgagaggtgaaggatttggcgagagggcatg

SEQ ID NO: 338323 - DNA, 122 bp, Homo sapiens
aggaaacactttgagtcctggatcccagtcctaacccacatgaccttgggccccagtttccgcagctgtaaaacaaaagactgcagtgaaaaaaactggtcccttgaagatatgtgtgtgtg

SEQ ID NO: 338324 - DNA, 122 bp, Homo sapiens
gctttggcccggttgccagaagccttggcaggaaccaggctgaggcagctgggccagccacggagggcagcgcagccgacccaggcagggccgggcagcaccaggcggcaggtgtgatcaga

SEQ ID NO: 338325 - DNA, 122 bp, Homo sapiens
acctctccaccccagttcaactctgcacaggctcctcttccttccctaactgggaaaacacgaaaatagaaacaaaacaaaaaaccagagcctaaacgctttctaggagaccgaccttcaga

SEQ ID NO: 338326 - DNA, 122 bp, Homo sapiens
ctactaactttccttttggcttttatgactaggagtctgcgattgtggaataatgaacttcgaatgatgtgattctggatgaggacttggatcaagagaatcgcaaattaattgtgccagag

SEQ ID NO: 338327 - DNA, 122 bp, Homo sapiens
gctgcacctctaggctgggggtggcgccccaagctgtcctcctaggctccccagggaaggcggggaccaaccacccgaaatcacgccccttcctcctcccttccctagggagcttgcgaagg

SEQ ID NO: 338328 - DNA, 122 bp, Homo sapiens
atcatttagaagcagacgggttaaaatagacaagaaatagcaaagacacatccttcacatcgtacagaactgtattagtatccaccaccaccatcacaggggagggctagctgtcactgggg

SEQ ID NO: 338329 - DNA, 122 bp, Homo sapiens
gcatgggaaatgggccagctgggagcagtgctggctgtgagtctagagaaaagggggagacgagcctggtttgctcacttgccatgagctgtttttctccacaacagtggttctcacctgga

SEQ ID NO: 338330 - DNA, 122 bp, Homo sapiens
cctggcctccggatctgcagccactgatggccggactcggacgcggcaacgctaagtccgcgatcttcagctcctaagctgcgagctcagaacggaaaccacagcaactaccgtccgcgccg

SEQ ID NO: 338331 - DNA, 122 bp, Homo sapiens
gctgaatgcatcacactgggtggctgtgatgagggaggtgggattagggcatggaaaaaccgtgaaatcaagtgagagatacctccccacaaccaggtgccgcagcccaataggaagagacg

SEQ ID NO: 338332 - DNA, 122 bp, Homo sapiens
cagggccctggggcggacgcccggacactcccccagcagcctgctttccagaggccactgcgctgctcagctccgggggcccgtcctccgtggatccctccaggcccagcagagtgtttgac

SEQ ID NO: 338333 - DNA, 122 bp, Homo sapiens
actctggagtagctgagattacagattctcctgcttcagactcctgagtagcccagatcacgggcctccaccactatgcttgactaataatttttcttttttttttttgagatggagtatcg

SEQ ID NO: 338334 - DNA, 122 bp, Homo sapiens
ggggcgctggaggtcgggaaccgagtacagcgtcgggcgggggacagctcagtaagtggacgcagcctgtcacactccggcagggtatttgggattgtacggagttactgtaggggagaggg

SEQ ID NO: 338335 - DNA, 122 bp, Homo sapiens
cccctcccccacgtgctctcaaattccctctcccaggcatgtgggctgtggtgaaacattcgttagctggcacatccttccccagtgtgggctgcaggcttcccgcattacactgcttctgt

SEQ ID NO: 338336 - DNA, 122 bp, Homo sapiens
agtgccatggtcagggtttcctcagggaccccagatctgagtgcagcaccagggtttcctcggggaccccgggtccgagtgcagcaccagggttttctcggggaccccgggtccgagtgcca

SEQ ID NO: 338337 - DNA, 122 bp, Homo sapiens
tttgcaaacgaagggtctggctcctgtgtgcactggcatgtgacgggttaagttatagtgcgcattaaagaccttaaaattaaacacacgtagaacaggttagccgcacaagtaactttgaa

SEQ ID NO: 338338 - DNA, 122 bp, Homo sapiens
ctttctgtcttttggagcacatgttgtatgcgtttctgctgagtgtaaggctgggcggggcgtcggtggctcaaggggtccatggtgaactcacaggaacaccgctttgagctgcccagtgg

SEQ ID NO: 338339 - DNA, 122 bp, Homo sapiens
taacgatgcttaggaaagatcactggtctggtgttgcagcagccccagtgttgagagacacgctaggcttctaggaggagaaaaatagagagggaggaagaagtaggaaggggaagaaaagg

SEQ ID NO: 338340 - DNA, 122 bp, Homo sapiens
agcttcagctgcgcaataacagcatcaggaccctggacagggacctgctgcggcactcgccgctgctccgccacctggacctgtccatcaacggcctggcccagttgccccctggtcttttc

SEQ ID NO: 338341 - DNA, 122 bp, Homo sapiens
aaaagaatagctgtcccctgagcgggcattagtcgcgtgtgaggtcagggcccatcattgcgcgtgttgggagcgccgcgctggtctatgagcgagcgcctcggcttgtggctgggccgggc

SEQ ID NO: 338342 - DNA, 122 bp, Homo sapiens
taatgaataaaaagtcatcttggcgattaaacagtgtctggattcaggaagcaagacgctcgcagttaaaaaccgttgccactcgacggtggcaaaattgctggctgcactggagatcactg

SEQ ID NO: 338343 - DNA, 122 bp, Homo sapiens
taatatcgctgccactccagccaacggaaagccgcctttaagtagggtcgcgaaggaaggcgctgcctcgcgttggaggagcttgctctgagctgctgccacctgctgggctggagctggag

SEQ ID NO: 338344 - DNA, 122 bp, Homo sapiens
caatgtcgcgagaaaggttttcgcctcctgtttcagcggtgacggcttttgggttttcctcggggtggctttttaattttagtcttggcgcgaggcgggggatgctgtgtggcacctcctat

SEQ ID NO: 338345 - DNA, 122 bp, Homo sapiens
gtccaaaatcaaggtgctggcagatttggtgtctagtgagggagctctcaggagttcccccgccgtttttttttttttttttttttttttgagacagagtcttgctctatcacccaggctgg

SEQ ID NO: 338346 - DNA, 122 bp, Homo sapiens
tgctcgtcggaggacacagtcctgatgatgtggagcttccatcccagcagaagagagggacgtgcgtgggttccagagtcatgctatatcatcacaaaccacaaaggcccgtgagaggaagt

SEQ ID NO: 338347 - DNA, 122 bp, Homo sapiens
gctctggcctctgagcagcagagggcgatggtgggaaccagccccgcgcccacccacaggcgctggggcatccaccccaaagtcctaaaggggagcagccgaggatgaggcgggaggaaggg

SEQ ID NO: 338348 - DNA, 122 bp, Homo sapiens
cgccccgaacctgtagccagaacgccgaagcagttctcgcgataccctgggatgtgctctcgcgatacgtaggcggagcttccggccggtgctgggcaaccaagctcatgcgccgtagctct

SEQ ID NO: 338349 - DNA, 122 bp, Homo sapiens
cgcctggtactgtgggagagcggcggctgctcctggaagttgtggtgtcgggagcccagccggtgccgccgcagccgccgcctagggcggtggggaggaggagggagccgcggggcttggcg

SEQ ID NO: 338350 - DNA, 122 bp, Homo sapiens
tacacggcatgacgtttacgtggtgaaacgtgcgcggcacgacgtttaagtggtaaaatacgtggcatgacgtttcccatggcagccacaagtgcacggctcagtggcggtaagtacattca

SEQ ID NO: 338351 - DNA, 122 bp, Homo sapiens
agatgcaaaaaaatcctcccagttagggcttgctcatgatgagtgcaaaacactaacaaacgagcctgtttgtttccaaggaaatgatctcaatatagtgaaaaggccattaaaacagattc

SEQ ID NO: 338352 - DNA, 122 bp, Homo sapiens
ggggttgggtcattgtcttttagaatttgggagcctttgaaaagccgtgggccctcccaccgctattgtgcgggggaagatgtagcagcttcttctccgaaccaaccctttgccttcggact

SEQ ID NO: 338353 - DNA, 122 bp, Homo sapiens
cctcttagcagtcctctctcgggaagaaaacaccctatttctctccggattgctaagcgtcgttgactgtgcggttgccgtggaaaccgttactaggcaacgaggaagtggcaggcagcacc

SEQ ID NO: 338354 - DNA, 122 bp, Homo sapiens
gcatatctactttaagcctctcctcctgagcgggagaggctgtcaatgacccgcccattgcgttaagtgattggccttcttttctgcggtatccaatgttctgccctccttatatccccttc

SEQ ID NO: 338355 - DNA, 122 bp, Homo sapiens
ctgtgactggcttgccccggttacttactccaaggtgtaggggtgaagaacggaagaggacgaaataactagctggaggcagcagtgtcagccgatgccggtgccacggctcgaaacaccgg

SEQ ID NO: 338356 - DNA, 122 bp, Homo sapiens
cagaccacaagggattctctgtctcaaattcttaatagggctgctgttgagaaacccgcccgagaggtaagtgctgtaatgtcctcaccatttcacagattaagaaactgaggcaccaggaa

SEQ ID NO: 338357 - DNA, 122 bp, Homo sapiens
aaaaggaagtttacaagacatgatattgctgcttttacaaaaggacattctatttattttcgcagtaattctcatgtccccataagcagagctgtcacagtgtgcactaccttagattgttt

SEQ ID NO: 338358 - DNA, 122 bp, Homo sapiens
ccttactgcatgtgttgtcacatatgtgcaatgccatgctcctgagcctttgattgcagacgtgtgggaagtgggccccgtccccacccccagtgccaccctgctctgcttctcttcccttg

SEQ ID NO: 338359 - DNA, 122 bp, Homo sapiens
acacgcacgcacacacacacacacacacacagcggcgcgcggtggcgcgggcggctggcgcgttacctgttctgccagccctggaggaggttggtgtatttgctgagcacgccctcgagcgc

SEQ ID NO: 338360 - DNA, 122 bp, Homo sapiens
tctctggcagcaaggaaatgctgtgtggtttgaaaaacgctttgctatttagattgggatcggcctcttgtatgggaactacctgactttatgtaatatgttgtttggtgtgaaagagacct

SEQ ID NO: 338361 - DNA, 122 bp, Homo sapiens
actagtggctgaggtccaaaggaaaagctgcaggtggtagcgtggaaattgatctgtaagcggcagaaaaagagggggcaaaaatagagaggtgccaaggcacagccaacacctggttatct

SEQ ID NO: 338362 - DNA, 122 bp, Homo sapiens
ctatcatttattacaggatgacagatggccagtttgcagaattccaaagaggctccccgccggccagtcacctgggaacacgggagcatttacatttctccaaaacagatgggaaagggagg

SEQ ID NO: 338363 - DNA, 122 bp, Homo sapiens
tgctgctccgcgactgcgccacgtcacactcctcctgtgggtgggggccgggctcgtgcccgctcctgtttggcacagagctggctctgtctagtcctggggtatctgggacccccgttcct

SEQ ID NO: 338364 - DNA, 122 bp, Homo sapiens
ttttttttttttatttccatctacagcagtgtaatgacaatagtaaagtccaggccatttcgggaaaaacaagggaagatcctgctggaaggtcgcaggctcatttcagacgctctcaaggc

SEQ ID NO: 338365 - DNA, 122 bp, Homo sapiens
ggaaacccacacctacctctgtcgccataatattgtctgctagcagctactctccgggtacgttcgacaagtgatccctagctgtaaaaggagagcccccacaaccctcaagagcatactct

SEQ ID NO: 338366 - DNA, 122 bp, Homo sapiens
ccttcccccaggcacccaccatcttctgagctttccgggaaacgccactctgggaagctacgttggtgagagctaaagccaagacacagaggcttaaacaagataggctgaaggccgcttcc

SEQ ID NO: 338367 - DNA, 122 bp, Homo sapiens
ctaggacacaggtaagtgcctttgttaaccgtgagatgccagcggctgggctctggcgtgcgggcctgagtgctgctgcttgccgccaagtgcagaggttctcggaggctccgctggctatt

SEQ ID NO: 338368 - DNA, 122 bp, Homo sapiens
tttagcttcagtttgcagccaaccctttcgctttcagagtgaggattcagttcattggcgcggttgtgtctggcggcgtcagcacccctgtgacaggcagcctttctccgggcttagagcgt

SEQ ID NO: 338369 - DNA, 122 bp, Homo sapiens
gagaaaaacccagatcattgattgcataacagccttctttacacactggttaaaatataacggcatgttccctcttgttcctgtgggtcaatcaacttagcttccatttccactcccaaaaa

SEQ ID NO: 338370 - DNA, 122 bp, Homo sapiens
caaacggagtcgtctgagtgccacttcccctgacaacccgggacaaggactctgtcagggcggccccaggcggggtggggccaggacaattctcccatcgccggaggagggagactggcggc

SEQ ID NO: 338371 - DNA, 122 bp, Homo sapiens
aggaaaaccatagagctaccttcgacgcgctagcacgtctccgtcacttccgatctggggcgtggcctcgggtgccgctaaatatgcgggcaagccccgcccacccttccgctccggtccgg

SEQ ID NO: 338372 - DNA, 122 bp, Homo sapiens
agcattagttgctttgcatttctcttgagaatctccttcaccctttcataaaaccaactgcgggccacatttggctttcactcatggcaaaatgcatgcacggccaataaaaagtattacat

SEQ ID NO: 338373 - DNA, 122 bp, Homo sapiens
aactttgttaaaaattcatttgagcgtgagagtggggacaccagagtcactttgcagccccgtgacgtcaccgataacgggcatggcgtcactcaggagaccacgtgtgcgggccgagcaag

SEQ ID NO: 338374 - DNA, 122 bp, Homo sapiens
ctttcaagctttatcttcatttctgggaccttctgccacattggggtacacccgtgggcgcgacacacaccgtaggtgtgaatcagggatgccaggatcaccagggacctgcaaagcgtatg

SEQ ID NO: 338375 - DNA, 122 bp, Homo sapiens
tgggtgaatgggaatttgacagcatttttattcaaattagtatgtgccaggtatcgtgctcgctctgcattatccaagggagtgagcctctgtgcaagtatttgagacacgagggaaatagg

SEQ ID NO: 338376 - DNA, 122 bp, Homo sapiens
cataggccccgcccctatttcccaatctagactccgcccactactcggagccccgcccagcggcacatcacagagaggctttaatgtcagacattaaaatgagtttggggggtgtaaagaaa

SEQ ID NO: 338377 - DNA, 122 bp, Homo sapiens
gaaagaagtggtcagccacaagggtaggccaattcttcctccacgcagttttattttgatcgctacattctgccagtcatagagaactctgctctgaagaactagaagcactttgcaggcct

SEQ ID NO: 338378 - DNA, 122 bp, Homo sapiens
gggccactctatttagccagtcgcactgaggtctggcacctcctcggtccccatcccctccgtccccaccaccgctcacccctccagggtggtggggactcggctaggcctggagggcggcc

SEQ ID NO: 338379 - DNA, 122 bp, Homo sapiens
acgtgctcgcggcaagcctgcttgacggccccatagccagcatatgtttcttgtctcctacgcactttagcactggctctggggaatgcgtgtatttctgaacgtccctaaacacagctctg

SEQ ID NO: 338380 - DNA, 122 bp, Homo sapiens
atgatgacatccaattctaactctatgacctcttttggaactctgtagggcaagtttctgcgtgtctttgttgtttaaacaaaaacagaaagcaaatcggcatgattgctaaacaaagggat

SEQ ID NO: 338381 - DNA, 122 bp, Homo sapiens
ccaggaagatggagcgctcttcggcagcgacaccgagggcgacccggagaaggccgaggacgacgaggagatcgacctggaaagcatcgacattgacaagatcgacgagcacgatggcgacc

SEQ ID NO: 338382 - DNA, 122 bp, Homo sapiens
ttgttgttgtttaattcaatctaggcaacactcgctcacagaagaattcatgcacatacacggcgccacgctaggggctgtacgcacgcacggcgccacgcgctaggggctgaacgcacacg

SEQ ID NO: 338383 - DNA, 122 bp, Homo sapiens
ccgagaaagggaaagtgccctcctggctgtcaccccagcaccttcaccgccaccgctgcacgaggtgtgtcttaggcacagcaagtcctagcttgagagaaaacaaagattgttttgacgga

SEQ ID NO: 338384 - DNA, 122 bp, Homo sapiens
ggactggtgccttggtgtttggcctcttacctctgccacatggcttgcttacaagttaatcggattaatcaaacgcttttatgagaaagttttgttgtgtcacctggcagcctcgggtgttc

SEQ ID NO: 338385 - DNA, 122 bp, Homo sapiens
gcacgtcccctctccaccccgccctaggcacaccctagcgcatctgacacccgccagtcgcggtgtctccgtcttgcacacaatgggttgaacactgcatgcatacagcgtgcgcccgcgac

SEQ ID NO: 338386 - DNA, 122 bp, Homo sapiens
gtgctacaattggcagcttaaacagccaaacgggcacagccagaagtaaatacagctggacgttagccttaaaagctgtctgttgtgaatgaaaagtctgaggtgagtcaagcaaattgcaa

SEQ ID NO: 338387 - DNA, 122 bp, Homo sapiens
ggtctagcggtgatgccagcatctgggaagacacccgtcgccgagcagactgtggtctagcggaagcgtcagtgcagcggtcacgctcctggtccgctctcatgttccatcccgtacacctg

SEQ ID NO: 338388 - DNA, 122 bp, Homo sapiens
ctgggggcttagaccaaggggagctccggagcttgaaggtgcacatccccacacctggctcgtgcctgtgggctccaggaaggtgggcatccggtcactctagctctgcattcccttacctc

SEQ ID NO: 338389 - DNA, 122 bp, Homo sapiens
ctttcggcggaggcggtgagctcgggggacggggcagccagctggtggccactaacatagcgccatctgctgggtgccccggccagtataaaacgacccggggccctggccctctctttgcg

SEQ ID NO: 338390 - DNA, 122 bp, Homo sapiens
cctcccccggccctttcctgggccagtcttagggccctgagtacagacagcctggctacccgttaaccattctcagcgtgtggctgctttttacacacatgtgtacatatgcacggacacac

SEQ ID NO: 338391 - DNA, 122 bp, Homo sapiens
atttggacagggctcagaggagctgggcaacactaggaggccaagggcagaaggaggggccgggaaaggctgaaggatgtacacttctctgtgtctctaactcatctgcgccttttaaaaaa

SEQ ID NO: 338392 - DNA, 122 bp, Homo sapiens
gatccagggacttgctgaatttcattgcatattctgtttccctgggggaaaaaagcaattcgaatgtccagggaaacttggcaagcattcttgtctgaagaactgtgtgtgattgttctttc

SEQ ID NO: 338393 - DNA, 122 bp, Homo sapiens
gctgggtggcagaggagataaacagccatgtgcaactctccacactatatttaacagctgcggcggagaaggcagggaggcagccacggtggcggctctgggggcagctcttgtcttcgggg

SEQ ID NO: 338394 - DNA, 122 bp, Homo sapiens
ctccctgagcaccggggcaatgcagggagcttgtggagatgtcactcctgccctggacgccggccagggcccagagaggatcaggagcccctgcccaggctgcaaggaggggtggaggggct

SEQ ID NO: 338395 - DNA, 122 bp, Homo sapiens
aatggtaggtaatgctcccaagggttatacaactggtgagtgttgcattctggactgaggcgcagcactgatatcaggcagttgggttgcctgtgagtcaaagctgggctagggcctgcgtt

SEQ ID NO: 338396 - DNA, 122 bp, Homo sapiens
gtggagcctccgtccttgggcttgaagccaatgtccctcaatgcgcctgcgagactcccacgccctgggaaggatgcctatcgattcgctctgggctcggcagttctttctgatagcaggca

SEQ ID NO: 338397 - DNA, 122 bp, Homo sapiens
cttacccatttcctctatttcctgcaaatctaagggaatttgcagcttttgacctggacacgtcctaacatgcctcatttaacaagagtgagggctaccctgggaactggaagttttctcat

SEQ ID NO: 338398 - DNA, 122 bp, Homo sapiens
cagaaagcggcttatcgaacagagccgggagttcaagaagaacactccagaggtgaggcgcgtgaccatcgtgttcgctttgaagggatcttagaatgctggtgcatgttcaggcgacgctc

SEQ ID NO: 338399 - DNA, 122 bp, Homo sapiens
gagcttccctcggtggggggctcaggggaatagaacatgctctgggtgcagggccacgggcgacggagtttgggtttgaagccgggggtccaggttcgagtttgaggaacggaagactctgt

SEQ ID NO: 338400 - DNA, 122 bp, Homo sapiens
ggggaaacccggcacctttccattgtaacgcatcgaggagtttggcaaaacttctgagatcgctggccctacacacctctgcctctctggcctgggtagactcagtatgtgggcttagtcgc

SEQ ID NO: 338401 - DNA, 122 bp, Homo sapiens
catcaccaggtcccatccgtcagtcagcatcaccccacccgcaggtccccatctgtcagtcggctttaccacattagcaggtcccgtccgtcagtcggcttcactgcattaccaggtcctgt

SEQ ID NO: 338402 - DNA, 122 bp, Homo sapiens
atgagtgaggaaagcaggcagggccaattgctcttggcaaagctctagcagtaaccggaacgcagcaaccacagagaaggcaggagaacaactttaggggtgaacagtccaggctctagaga

SEQ ID NO: 338403 - DNA, 122 bp, Homo sapiens
ttgaagatgaagaaaatgtgggagccttgttttactagatagtaagacctatgttaaaaccgtattaataaaggcaaagtggcatgtggggcatagatagacaaattgagaagggtaaaaat

SEQ ID NO: 338404 - DNA, 122 bp, Homo sapiens
ccgagccccaccctgcccccggggacctggctggtgggttcctgaggatggtctccatctcgggaccggggcaggcaggtgagggtgggggatgggaggtgggcgcggcggagggagaggag

SEQ ID NO: 338405 - DNA, 122 bp, Homo sapiens
caggacagtgggtacaacgcaccgtgtgtgagtcgaagcagggcgaggcattgcctcactcgggaagtgcaaggggccaaggagttcactttcctagtcaaagaaaggggtgacagacggca

SEQ ID NO: 338406 - DNA, 122 bp, Homo sapiens
aagaggccacccacgaggtacacagcctgccccgggtcgccctcccggcgcagtctggcccggagagccccttatatcaaagctgccgcaaggacccagatctggctgaaaaggggcaaagt

SEQ ID NO: 338407 - DNA, 122 bp, Homo sapiens
aaaaaacatatattagaaataattaccagaaatagaaaatcacaagagattatctaatcccgtatatggggctactataaataacctcagaatttagaaataagaaaaaaatattaaaagcc

SEQ ID NO: 338408 - DNA, 122 bp, Homo sapiens
agaagtagtagttagtgaagtgggagaggaaccaaaacctaacagcgtcttgggaagccacgaacaggaagaaaacttcacacaaactgtgcaaagcaatgataacaatcttattgtttaat

SEQ ID NO: 338409 - DNA, 122 bp, Homo sapiens
ccagcttgatttcattaagagggtttggggtggggacagggggaggggaggggctactctcgggccacacgcaatcccacccttgctcacactctcgctctggggaagaccagatgcggcac

SEQ ID NO: 338410 - DNA, 122 bp, Homo sapiens
agtcatcactcagcaccaggatattgttggagaggacagccgtgcggcgtctggggctgacggggccacgtgtccttcgccacttcttccagcatgtccccccggggtccccaggggctggg

SEQ ID NO: 338411 - DNA, 122 bp, Homo sapiens
tccttggccacgtcctcaggggtgggcgagcttcggggggaggggtgggggtgaagactccgtgccaacgcaaaatactctgccaaaaggcttctcagacatgagtttcccagggcaatgcc

SEQ ID NO: 338412 - DNA, 122 bp, Homo sapiens
tggacacggaccctcacacgggtgatttagggtggaggttcctgtgggtgctggtgggcacggaccctcacacgggtgatttagggtggaggctcccgcgggtgctggtggacacggaccct

SEQ ID NO: 338413 - DNA, 122 bp, Homo sapiens
cctggggagaggctgagcccactgcccacagggcctcccggcctttattgcaggagggcccgagactcttccaggtgcttctctggatggctggtctcccaggcagcaggcaagacaggata

SEQ ID NO: 338414 - DNA, 122 bp, Homo sapiens
gtggcgcccggggccgggtggcagcggggtgtgggcggggagacgcggcgggcgcgggggcggccgggcaggcggcgcgcgctcggaagtgcccccgggcggcctccgcggcaggcggctcc

SEQ ID NO: 338415 - DNA, 122 bp, Homo sapiens
cgcgagcccacgagtctggtccatgagcaccgtgacagtgtctgtgggtagaggtggacccggccttgtgtcatcaccaggacctcttttgggaaaccatgtggacatcgcttgcgggtccc

SEQ ID NO: 338416 - DNA, 122 bp, Homo sapiens
agaccgatttaaggctgcaaggaaggagtcctgggagcatggctttccctgagccaaagccgcggcctccagagctgccgcagaaacggttgaagacgctggactgcgggcagggggcagtg

SEQ ID NO: 338417 - DNA, 122 bp, Homo sapiens
tcggtgacactaaggttctttacccactgcgaaagcgaatggcttggatctagcgcaggtcgaagttatattccttcttcctttgtatgcaagattaggttgttacaaaagagggtgtgtag

SEQ ID NO: 338418 - DNA, 122 bp, Homo sapiens
tgctttgcgaaagaagcagagatgaaggccacgtggaagcctctgttcgcttcgtgcacacgattctgcacccacaaacagccacggtgctaggggtttccacatggtgtccccttgacgct

SEQ ID NO: 338419 - DNA, 122 bp, Homo sapiens
gtatgtggaaaacctagcacagtatttgaagcaggcacagtaagtcacaatttctattttcgtcctccttcagtcttgcttttcccataataacctttttttggctttgtgtatctctctgg

SEQ ID NO: 338420 - DNA, 122 bp, Homo sapiens
ccctgggccttggaggtttcacaccggctcctgaagtgaagtctgaaatgcagagcgcagcgactgcctttctccaggcagggcttgcttctgctttgtttttcattagacatggtggattt

SEQ ID NO: 338421 - DNA, 122 bp, Homo sapiens
tcactggacttaaaggggatttcatggttgggtgcaccgccaggagcactgggttaatgacgaggggctgagtgggaagaaggtacatcccattttcaaggctatttgccctgctcctaatt

SEQ ID NO: 338422 - DNA, 122 bp, Homo sapiens
ggaggggagcgcggcaccgacacccttttgaagtgcgcggttggctctagtcagtgtgggcgcccccctccccggccgcccccatcccacgccccctgcggctggcggtgcgcggcgctcct

SEQ ID NO: 338423 - DNA, 122 bp, Homo sapiens
catctcaagtcaaatataaatttttaattttcattaactgccctcgtgcgtgatcagcaccgaactccacttcttcaatgacacaggagagctcagtcttcagcccaggggtcctgagttga

SEQ ID NO: 338424 - DNA, 122 bp, Homo sapiens
cccggtttcgcccgagcaggagatggggagtgaacccctttactgccaatcagcggttgccgctgcctaagcctctccccaggtacgccgctcacgccgtaagccctcctgttggacctagc

SEQ ID NO: 338425 - DNA, 122 bp, Homo sapiens
gcccttgttagtgcatcgtaccaggaggtacatggtgttcgtatgtctcattaattatagcgttaactcggctaggtcaccaggaattttaccaactgttgcttttgtaccagcaatgtgat

SEQ ID NO: 338426 - DNA, 122 bp, Homo sapiens
cctggagttgctgctagattgctactagccctattgggggaccccggtggtttctggacacgttggagtcatacgtggtgtccagcaacaacaccatatatgggaacacagagttggcacca

SEQ ID NO: 338427 - DNA, 122 bp, Homo sapiens
cattccttagctctttaataaatcgctaataacagcaaaaacagccttctccccgaaccgcgccacaccaaaggcttcccaagttgggctgcgaatccctgtttggttttccaacgccgaaa

SEQ ID NO: 338428 - DNA, 122 bp, Homo sapiens
tgcgccaggaggattcggaacacagggacatcttgtgtccactgagaacaaagtatgagtcggagttatttcctcagtaccaggctgaggattgatctttgtgaggaccgtagaagccatgg

SEQ ID NO: 338429 - DNA, 122 bp, Homo sapiens
ctatgacaaaagcagtttgagctcaattctgtgtggagtatagggaaggagggttgaggacgtgcatttagaagggtacatagttctcaagaagttttgctgagcacatctgtaatcccagc

SEQ ID NO: 338430 - DNA, 122 bp, Homo sapiens
cgtcagagtttcctgtttgctccccactcctggtggaagccggctccagtggaggatcaacggcacctgcagctgcaggttcttggagagcactcttaggtggcaccgggtctcacatctgc

SEQ ID NO: 338431 - DNA, 122 bp, Homo sapiens
gaatttagtgcgtcttctcttcagatgagcaactacaggcgaagactggatggtgtgagtcggtgtctcatattagaatttagtgcgtcttcgcttcagatgagcaactacaggcaaagacc

SEQ ID NO: 338432 - DNA, 122 bp, Homo sapiens
tccacgtgcaggggcgtctcctcaggacgcatgttgcctactgaccgctgccagcctgcacgagactctcacggcgggaccctgtctgccttgctcggtgctgcccagagcctgcacagtgt

SEQ ID NO: 338433 - DNA, 122 bp, Homo sapiens
cacgcccatcgggtttccagcacctgctcctcctgcctgtggcctaggccccgcccctcccgctgcttattggctgctacgtgaacgagacaaacgcaagcaacaaccaatgggagtggccc

SEQ ID NO: 338434 - DNA, 122 bp, Homo sapiens
atcgcttcttccgttactcagtgcccgggggagggacctggcgcactatccaatcagggccgcggggcggggtcgtgagaactgtcaatcaggcgcactgaccggaggagggtgcaaggttc

SEQ ID NO: 338435 - DNA, 122 bp, Homo sapiens
tggcacccagcgagggccgcgcccagcccccgctggcacctaggggtgtgggttcccgcgcgcccctgggtgcagacctcctgtgtcgggcctccgtccttctcattggctgccgtctcgcc

SEQ ID NO: 338436 - DNA, 122 bp, Homo sapiens
ggagggtgcagtgttcaatggccgagggcaggggtcctccccagggagaagcagcagccgcgtgggcggagaggctaggaggccgggcggggggcgaggacttgggaagagcggggtgacgg

SEQ ID NO: 338437 - DNA, 122 bp, Homo sapiens
tcaacttgataaaaaacaccaacaaaaaacgactcctaacatcactctgggtggtgaaagcgcacttttccctaatgtgtgggcggcaagaaggcggacccgctcgaagctccgcccaccca

SEQ ID NO: 338438 - DNA, 122 bp, Homo sapiens
cccccaccgcagggacacggatcgaaagggtcgcagcaacgcctcccccgcacccaggagcgttttccaggcctttgcaccaacctcgttggctaagccccctgcccggcggcggcccggct

SEQ ID NO: 338439 - DNA, 122 bp, Homo sapiens
aggatcccacctaattaggagataagaaatttttgccttcacctgcacaggaagggtgcacggaaacacgtcatttagaacatcccgggcccgaacatcgcgggccctaacatccaggtatc

SEQ ID NO: 338440 - DNA, 122 bp, Homo sapiens
ccccctgctccacggggcccagtcccatcgaccacccaagggctgaggagtgtgggcacacggcgcaggactggcaagcagctccacctgcggcccagtacgggatccactgggtgaagcca

SEQ ID NO: 338441 - DNA, 122 bp, Homo sapiens
cgcttcaaggatcaggcaggattttcctcccaccaggaaaagccggcgcgggtctaaggccggaggagggacccagacataggagtcaccttctaaggggcttcctggagcacattttcctg

SEQ ID NO: 338442 - DNA, 122 bp, Homo sapiens
acgtatatatacacgaccatgcccatgtgcacttacataatacacatgcacatacgcacacgtgtacgtaacagacgcacatgctgacaaacacacacgatacacacacacacacgcataca

SEQ ID NO: 338443 - DNA, 122 bp, Homo sapiens
tcataacaaccacgagaaccacagaagatggctggtggccccaggaggcagctgagaccccgggcagggggttggcctccaggccaggctcaccttggggtttttcttcaggtgcaggcggt

SEQ ID NO: 338444 - DNA, 122 bp, Homo sapiens
tgagggaagcacacattctgcaaggccgtggaaacaaagggaggaactgtttgtagccctcgtccagacgccccaaacaaacagtaagtcagaagggaacagagcacagcacagtccctccc

SEQ ID NO: 338445 - DNA, 122 bp, Homo sapiens
ggaaaatgtgaactgaacgctgaagtcaagcctctgaaccttgtgtgtgtgtcagtctcacggtgtcagtaacttagaattgaaaagcagatgtgagctttcctcttgcttctttctagtat

SEQ ID NO: 338446 - DNA, 122 bp, Homo sapiens
tcaagctttgattggcagagccacccggtgactgacagggggtctccatggcgcccgcgccgccaatccgcccaccccaatagcggagccagctcgcctgccggcgtgcctgagccgagccg

SEQ ID NO: 338447 - DNA, 122 bp, Homo sapiens
aactcggcaatgctggctgataaaacagccatctcaccctttctgggggttacagacatccgggtcaccttcctccagtcactcacttctgtcctgatcagtgaagctccctgaagcactga

SEQ ID NO: 338448 - DNA, 122 bp, Homo sapiens
gcgggagggcctcggtaggggccgggccaggagagcagggctgcgccggctctcgtcctccgcggcaaacgtcccaggcacaggctcgcccaagactccagctccccgccccagagccataa

SEQ ID NO: 338449 - DNA, 122 bp, Homo sapiens
ctctggagcccagctcagaagcatcaggaggagccactgtccaggcacctggctgccctccgcgcctgagactccagggatgcctgcaccccattattcagttgaagacacttaaaagcgta

SEQ ID NO: 338450 - DNA, 122 bp, Homo sapiens
aacagatgtaaggcgtggccgaaccccattcagctagcagtacccagcctcagccacagtcgctgcccttacccaagatggcggcccacaccgcttccgtcgctgctgtagtcgcttcctgc

SEQ ID NO: 338451 - DNA, 122 bp, Homo sapiens
tgtatccatccatccacctcagaatcagaattcagatgtgagatggtagtctcaggttcacgtgattatttgcattgaaagtgaagtcagacttatttgtcatagggaagccttacttggca

SEQ ID NO: 338452 - DNA, 122 bp, Homo sapiens
tgccggcgggcgctgcgggactctctgcaatgggacccgagcagctctagagggaggcggcggccccagaaggccgttggctgagagagaccaggagccctcggagccgccgcgcgcatagc

SEQ ID NO: 338453 - DNA, 122 bp, Homo sapiens
tgtaccactgtattcctaactcctaacttggatataggagcttgactatctgcatagatacgtaaggggatatggctgacaggaggaattacaaatgtacttatttaacaattaatgctgac

SEQ ID NO: 338454 - DNA, 122 bp, Homo sapiens
acatttctgaatattttttaatccatttatcactgagtacttgcatataactagaagcaccgactatattgttatcaactttggagcaattttcatggggaattgtacaaatgttctctgat

SEQ ID NO: 338455 - DNA, 122 bp, Homo sapiens
ttgacttccccgccccccagaaagccaaaaacaaatatgcagcccggagattttcctcagcgagaatccgaagctcagatttgaggatgagacagatcctgggaccacggagaagtgaaaat

SEQ ID NO: 338456 - DNA, 122 bp, Homo sapiens
ttgggttgaaaacatcctaaatatggctcctgccggaggctgaatgccgaggacgataggcgtttgcagaatttggctcttcccaggggccggcaggcccctttccttgacagaggctgagt

SEQ ID NO: 338457 - DNA, 122 bp, Homo sapiens
aggcaagactcagctctggaccccaactgcagcaccccacagagactcagccgcattcaccgcacctgccttcccgtttgagctcagaacataaactattagaggcaatcaatccagaggca

SEQ ID NO: 338458 - DNA, 122 bp, Homo sapiens
gggacaggatggggtcgtagttgctgtgccaggccctctggagacgcatgtgcagaacggcgtgtggaaggccaggcaattgcctatagggtaaactggggacgttgtgctgggggtgtaca

SEQ ID NO: 338459 - DNA, 122 bp, Homo sapiens
aagagcagggcctggattcaggctctctggctccagcatctgccacctctgtggggatgccgttttgcctcttgtgaaaagatgacaccactgtataccaacaaggatttccagggcttcgc

SEQ ID NO: 338460 - DNA, 122 bp, Homo sapiens
agtttctccactccagagcctggagtgggattttatagtgtcgaccctcttcaaaaaccacgcagcatttgcctaataagctgacgctctcttgacagctcgattgcgtgctgcctctgctc

SEQ ID NO: 338461 - DNA, 122 bp, Homo sapiens
aactattttaaaaattaatcaatccgtaatgcatgtatgaagagccttctgcctaaagcacgcagattgcagggggagcatttcacagggtggacccaaagctgtgtgcaacggtgaggaaa

SEQ ID NO: 338462 - DNA, 122 bp, Homo sapiens
ctcccttggcgactccgcctcgggccgctgccggggctccgcccacttgagccgccgccacgtccccacctcacgctccacacgcctgcctgcgtcctggtccccagctccggtggctccgc

SEQ ID NO: 338463 - DNA, 122 bp, Homo sapiens
ccgcccccagcctaggccggggcgacaacctagtgccctagcccgccggctgcgctcacccggcttcacgtacagctccgccatctccacttccgcttggccagcggggcagcgcgtcattt

SEQ ID NO: 338464 - DNA, 122 bp, Homo sapiens
ggcaacgcgctgtccccatgcctctcgcggggcccatcagtcatccctgagcacagactccgcttgccctgcacttacagccgtcacgtcgctaaatggctctgcctgttaccgcagcgcaa

SEQ ID NO: 338465 - DNA, 122 bp, Homo sapiens
cggattgagccttctccctccacccgcttccgtcggccgggcccctcccgcccggccccgcgggcctccccacccggccccggcgctccccaccgccccccctgcgcccgcccctccccctt

SEQ ID NO: 338466 - DNA, 122 bp, Homo sapiens
gcacccaaacatttaatttcactggtgggaggtagaccttgaagacaatgaagagaatgccgatactcagactgcagctggaccggcaagctggctgtgtacaggaaaattggaagcacaca

SEQ ID NO: 338467 - DNA, 122 bp, Homo sapiens
ccagttacattttcttcaagtcttcagatgaatggcagttgaatgagatctgcaatgagccgaggctgaactccatgtacaactctacagggattagataatattccttggtatttggccaa

SEQ ID NO: 338468 - DNA, 122 bp, Homo sapiens
gggatcgcaccactgtactccagcctcggcgacaaacaaacaaacaaacaaaaaaaacagcgcgctgcagatggagccagcacccgggcttctcgctcccagccccctcccgaagccccgcc

SEQ ID NO: 338469 - DNA, 122 bp, Homo sapiens
tcaattcacataagaatgatctcaggttagggctgagggacttcctcttcaataggccctcgctgcagcttagctttcagggaaaattataacctgttgggaaaacatgaattattagagaa

SEQ ID NO: 338470 - DNA, 122 bp, Homo sapiens
tgtcaaggctggacctgcatggccacgtgtgcctgcgagaaactccaaggcactctgaggcgtgcagcgtgagcgcttgtccttcttcacagtaccagggaggcccttccaggaacggctcc

SEQ ID NO: 338471 - DNA, 122 bp, Homo sapiens
aggagccgccggcaggggtggggcggggccggcgggacggggcagagggccctgcggcggcggacgcggcgggctcggccacaggtaacccgcaggagccgagagcgctgcctggcgcgcgg

SEQ ID NO: 338472 - DNA, 122 bp, Homo sapiens
tgatccaggacaggctacttaatcacttttgtggcaattgcttcctcttaaaattggaaacgctgtagtgttattgaatacatttgaaaatacggttctcacgtttgtaatcccaacacttt

SEQ ID NO: 338473 - DNA, 122 bp, Homo sapiens
ccaatgaaaagcctcactcggcctccgctcctcccacttcttgctgaggtcaaaggcctgcgtcagttgcactgtagcctcggcagtgaaccgggaggtactaccaggtaaggaaggtgcgg

SEQ ID NO: 338474 - DNA, 122 bp, Homo sapiens
acaaggcggaaattagctctttaaacacaaaccagacccacgggtaggcaagaggagccccgcctgcctcctgctcctcctggagtgaggttgagggtgagcaagggaaggtctgggccagg

SEQ ID NO: 338475 - DNA, 122 bp, Homo sapiens
cggtaggacgaggcaaagaactgcttgaactcgggaatcagaggttacagtcagcaaagacggcgccactgcactccagcctgcgtgacagagcaagactctgtgtcaaaaaagaaaagttt

SEQ ID NO: 338476 - DNA, 122 bp, Homo sapiens
catggacatggtgtttgagtctctgggcttgccgaacaccaagtcctctgagttccgcagcgcagcaccggaagcggccgagcgcgctcagcccggcgacccctgcgggctccagacccctg

SEQ ID NO: 338477 - DNA, 122 bp, Homo sapiens
cctgggaaagtgcactgtctcgcctcctggcctcgcggtggttccgcagtcaccaggacccgaaattcacagctgtgcgtcctaagcttgcagctccacaaacgataaaatcagacttggcc

SEQ ID NO: 338478 - DNA, 122 bp, Homo sapiens
atgctgctaaccatctcccaggcctcctgggccaaaccgcacccgaatcaacccagaccccgcctcacccgtcagttccccagtcaggtaagtggccattttggagaacatgtcccggcaga

SEQ ID NO: 338479 - DNA, 122 bp, Homo sapiens
cccacaccacttcttgacacacctccacaccatcctctcctgtgtagccacagcgggtcacgcggcagccagacacgccaaacacctccatcacagcactggtcatgaagggcagtttcctc

SEQ ID NO: 338480 - DNA, 122 bp, Homo sapiens
ccatccccgcgggcctcagtttcccccctgtactgtggggggccggtgggctgccgggaccgctgggggctcgcagcgggtcgggggaggccacgtctccctcgcggcgcgctgggagcagg

SEQ ID NO: 338481 - DNA, 122 bp, Homo sapiens
ctcaatgtcagcttctcctgggccactcccaggagcacacacacatgctgtaagagtgcccgccgtgaaaagaaagaaaagaaaagaagaaaagaaaacaaaagagaagaaaagaagagagg

SEQ ID NO: 338482 - DNA, 122 bp, Homo sapiens
tggttcccgcaaaaggagtttcctgctctctgccccgaatctgtagacctcttcaaattccgggtgcaagggggctgagaggctctttttcatgcggcggcgaggcgtttcgggtagcttgt

SEQ ID NO: 338483 - DNA, 122 bp, Homo sapiens
acctcagttgatccacctgcctcagcctcccaaagtgctgggattacagacatgagccaccgtacgtggcccactttaatagtgtcattggcaacacaaaagtatttaattttgtttaattc

SEQ ID NO: 338484 - DNA, 122 bp, Homo sapiens
atgcagggtaggtccccccgcaagccctggggactctttccggagctcagggaaggaaaccgctcacctcctaaatgttaaaacacgaagggaactacgcacagcccgcctggagatgggat

SEQ ID NO: 338485 - DNA, 122 bp, Homo sapiens
taaacaccgcagccacccgaggtagcttaggttcaatgcttaggcatcctgcaggcggcgcgcgccgccgcccctagttgcagccgggactggcggagtgcctacaactcccgacgtgccgc

SEQ ID NO: 338486 - DNA, 122 bp, Homo sapiens
cgagctcgcagcctgcacagcctactgatccagagagccccggctgggctggtcctcaagcgcgttggctccctgtggagcagcaatccggcgactgctggaaagcgagggttcgaggcgca

SEQ ID NO: 338487 - DNA, 122 bp, Homo sapiens
gcttccccctatggccagaccagttccagttcttcctgcaaccccagccataggcttctacgaaggggggcgggggctcccctcggtgaccacgtcctctgccccccccgccacttggctcc

SEQ ID NO: 338488 - DNA, 122 bp, Homo sapiens
gctctactccccttcaaccttcccagtgccccccaaataactttgtaaatcccagtgccccggcctggaatgccctggcttccaccctgccgcagctggtagcctctctctgccaataagct

SEQ ID NO: 338489 - DNA, 122 bp, Homo sapiens
gtaaaaggaaagtcagccctcatgattcaatctcctcccactaggcccctccttcaacaccgggaattacaatttgacatgatatttcggtggggacacagaaccaaaccatatcgtttggt

SEQ ID NO: 338490 - DNA, 122 bp, Homo sapiens
cacctactggctgaccacgtgcaaaaataaggtcctccttttcccctcaagcaacctgtacgctggggaagaggcttcatgaatcccagccactgtaacacaacctgggttgaaacggtaat

SEQ ID NO: 338491 - DNA, 122 bp, Homo sapiens
atcctcaaatggaaagtgatgggctcatgagcattctaaaacctcctggaatatgccccacggctgtccaacactacaaatacccaaggggccatgggctcatttccctgaaactctaaatc

SEQ ID NO: 338492 - DNA, 122 bp, Homo sapiens
acaaacaaaaaaaaaaactcgatcgaatgagtaagacgtgggagcccccggaatggcaggcggaagcctctggcagggccaagagctcaggcagagctcaccttccccctcctgtcacgggg

SEQ ID NO: 338493 - DNA, 122 bp, Homo sapiens
aggttatccttgtaagaagacttctttttaaatggtgcgggggctcagcacaccaatgtgcgggattaaataccctgaccagccacctttgggttgtataaattcaaagtcccagctaggga

SEQ ID NO: 338494 - DNA, 122 bp, Homo sapiens
tcccgaaaggtctctctcaggcctcccacctccactgcacatatcctgtgggagggggaacggtggccacactttcgccagggcttgtgatccctcagagccctcaccaagcaaggatcacc

SEQ ID NO: 338495 - DNA, 122 bp, Homo sapiens
gtgtgacctctccgaagcctccagggatgatactactccctggggtgcttatgccaaccacgttagagacaatggtttctgtacccattgcctggggctgccataataaagtgccacacact

SEQ ID NO: 338496 - DNA, 122 bp, Homo sapiens
aaagaaaaagaattcccaaatgacaatgacacaggacatacacacagttctgctgacacccggcactttattagtggggaaactcgccttggtctggcagagactgggatcaacaggaccag

SEQ ID NO: 338497 - DNA, 122 bp, Homo sapiens
gggtgccaactacacgtggctgctggtggagggcgtctacctgcacagtctcctggtgctcgtgggaggctccgaggagggccacttccgctactacctgctcctcggctggggtgagctcc

SEQ ID NO: 338498 - DNA, 122 bp, Homo sapiens
gtgagatggatggagctctccgttgctaactggcccataaccacggtcattaatcacacacggcacgcccattgccagtaatggacttcaccccggaaaactccaactcgtggtgccaatgg

SEQ ID NO: 338499 - DNA, 122 bp, Homo sapiens
agtgggtggtggaggaagccaaccatagtgtccttggggctggagaaagggaagcaagctcggatcacacttttgctacgtgaatcacctaaccacagataacagggtgacaggaagtcaat

SEQ ID NO: 338500 - DNA, 122 bp, Homo sapiens
tctgcagctaaaaagaggacaaagacgttactatgccgaacagagccacttggcaaggaacgtccatcctcactgccacatgttcccagagacgcgaggaccagagcggacaattctcagga

SEQ ID NO: 338501 - DNA, 122 bp, Homo sapiens
gttacattgaagaattctgctttcactatgatggagaaacttgtattgcacttgcactcccgtaataaacaagaagaaaatgggacaaatgaaacagcagtttttaaacattggataacagg

SEQ ID NO: 338502 - DNA, 122 bp, Homo sapiens
tctgcgcgctcctctgcgctggaccctcggcccgcgggtccctcgcgccccggcagggaacgcccgcaggagggcacttgcctcccggactcgtctttaagaaagtttggctctttggccga

SEQ ID NO: 338503 - DNA, 122 bp, Homo sapiens
gccgggacagtggctcgaagaccactttctgctgcggcaggagcaggtgtgggggcagcacgcccaccagctccacccactgctcggcgcccggctcgtaatggggcggcggcggctcgggg

SEQ ID NO: 338504 - DNA, 122 bp, Homo sapiens
ttaacctcaaacttaaatccaagcctaaccacctgcccagcccgccccagcccaacctgacggaagcttgtcagggaagagtccatagaaggcgtcacctttaggagacatcctctgtcata

SEQ ID NO: 338505 - DNA, 122 bp, Homo sapiens
actgattcctggggagtcagtccctgtaaattgagtggagagagggatagaggcctatttcgcagagaaaagggatggtcatcggcttccaggctgagcagacacttaaaaaaatgatccga

SEQ ID NO: 338506 - DNA, 122 bp, Homo sapiens
cccgcctggcttaggttcggatgcccaacccagttgccccgtgagtcacatcaaacgtcccgtccctcccaacccacagccagactcccaggaggctccgcagcacctgaagctgcggctgg

SEQ ID NO: 338507 - DNA, 122 bp, Homo sapiens
ccagctctaaggagctcaaaacatcctgaggacagtgcctggaggtgagaaggaagcccccggcctggtccataccccaccaccaacttgcataatggggggtgatgtcacccaccctccac

SEQ ID NO: 338508 - DNA, 122 bp, Homo sapiens
attggggaaggattacagtgtgcaggtctcgggcagggcaggcgccagaaaggggcatatcgcagggtagcaaggtggccacctcttcacaggtctatggtgtcgctgcccacgctcagctc

SEQ ID NO: 338509 - DNA, 122 bp, Homo sapiens
tggtcagctgccaggatggggactcccagctcagcaggatgttctttgggctcccagccacgccaagaagtgttcaggcagacctggttcaggccagtcccttcctggctaagagctcttgg

SEQ ID NO: 338510 - DNA, 122 bp, Homo sapiens
cgcctttgaggttggatccatgaccttcatataactccatttatttaaatgcgtgcacaacgtgcacacacacacacacggtgtggtctttcataggttatttttttccccaacaactataa

SEQ ID NO: 338511 - DNA, 122 bp, Homo sapiens
ttggctggggcatcttacctaccttttcagtccctgcattaatcccctctaggaactctgcgtggatcgtttggaaatgtgaatctcttaagtatttaatttttttggtatgtctaatttat

SEQ ID NO: 338512 - DNA, 122 bp, Homo sapiens
ctggatgctctctggtctctgtctgcagaggctggctcctctgaggtatgcatgcgtcggcgtggagttactatttaaagttctgaccagaaaggaacacagctctcttcctgccacctggg

SEQ ID NO: 338513 - DNA, 122 bp, Homo sapiens
attggtagttcgctttctctcatttagccagtttctttctctaccggggactccgtgtcccggcatccaccgcggcacctgacccttggcgcttgcgtgttgccctcttccccaccctccct

SEQ ID NO: 338514 - DNA, 122 bp, Homo sapiens
ttcttggctactggcagggctgtggagggagtctcgcttgggttcaggaggttgaggctgcggtgcactaggataccaccactgcaatccaacatggggaagagagcaagatccctctctaa

SEQ ID NO: 338515 - DNA, 122 bp, Homo sapiens
accaaatacttcctgtcccagctggcgcagtgcaccgcctgggctgcggatctgggctaacgtgctgtcttcctctttccagtgcgccggtccaaggcggctgatgaggagaggagccgccg

SEQ ID NO: 338516 - DNA, 122 bp, Homo sapiens
gcgtcatctgccgccgaggcttgcccccattggttgtctgcgaggcaataggggcggagccgagtgggagtgtggaaagcgccgcatcccgggtgggaggcgaggcttccccttccccgccc

SEQ ID NO: 338517 - DNA, 122 bp, Homo sapiens
ctctgaccctgagggccggctacctgagtggcagcagctctgggtatctatgctaatgcacgaaggcttgggtggtagctccggctgcaggcaagctgcagtgccgtctcatgctcttattt

SEQ ID NO: 338518 - DNA, 122 bp, Homo sapiens
gaaggtggtactagtcccctttccgaagcgtcaacattcaaatattgcaagttaaaatgacggctctgatgcagtaatattttttgtgtgttttgttaatatttatcaaacctttcttgtgt

SEQ ID NO: 338519 - DNA, 122 bp, Homo sapiens
gctattcatagtcctgaggcttcaacactaagacaagccactcccacactctgtaggtgacggcaagggcaggcacacagggagggaaccagctgctggaatgccagcccggttgatgcacc

SEQ ID NO: 338520 - DNA, 122 bp, Homo sapiens
tgtgtgtgtccttttaaatatgcaaaaccagattagaaaattagaggagagcaggtgtggcgtgccagcggaagataggtgccggtaagcccacttctggtctcagccggacacggggcaag

SEQ ID NO: 338521 - DNA, 122 bp, Homo sapiens
gaggcttggaggtggatgggaagggatttccaacggaggcggctcctctctcagcgtcctcgctgctgatccccttaccgacggctgaagaagcagattcatcccttcaacaaatctctgtt

SEQ ID NO: 338522 - DNA, 122 bp, Homo sapiens
tgaaaactttctcaaaacattacatgtggttttctttttttttttttttttttttttttgcgattttctttaagctcatcagctatggttagtgttagcgtatttcatgtgtggccccagac

SEQ ID NO: 338523 - DNA, 122 bp, Homo sapiens
cccggagttctgctcacttcagccgtgtgccgggcactgcaaatcaggaagtgttggcgccggctggcgacctcccgcctggggccaggggaggagggtggttggacgctgccaccgctgcc

SEQ ID NO: 338524 - DNA, 122 bp, Homo sapiens
acagcaatacctggggaggagatacctacggcattctgagattcgggaaagcaccactgccgctgaataaaacgaacccagcaacttccgaaaacagaaaatccgccaaaggaaacgccaag

SEQ ID NO: 338525 - DNA, 122 bp, Homo sapiens
gaggccaaagggcaaagtgatcaaggacagcgtcaccctcctgccctgcttttatttcgtcgaggtgagttggcccagtgccttggcataatgcagatcctctgggcatctcctgagcgaat

SEQ ID NO: 338526 - DNA, 122 bp, Homo sapiens
cgacctgtttgcataaagaaatgcaaacctgaaacaccgggcacgtgcggtttaggggagcgggcagtctcacacactactgagttgtttcccagcagccgtcaatacagaccttccactgc

SEQ ID NO: 338527 - DNA, 122 bp, Homo sapiens
caccggacctgcacactcaggagcaggtgagccagggacaagcaggagccccgccccttccgaactggtggagcaggagctcccagggtgcagctgcagccaccttgccgcggctgtggaca

SEQ ID NO: 338528 - DNA, 122 bp, Homo sapiens
caccctctgtctccttccttctcgggcctcacccctggccctcgctttcagtgcccagcccggaccgcagcactccagttccgccccaacccgggaaccctggactgaggctcccgtttctg

SEQ ID NO: 338529 - DNA, 122 bp, Homo sapiens
agatctccacggagcccttctgggcggctgcatgcaggggcgtgcgcttgctctgctggtcgctctggaagttggggtccaggttgtccactgcggggagagcccgccacaccgggagaggg

SEQ ID NO: 338530 - DNA, 122 bp, Homo sapiens
tagctgggactacaggcacctgccaccacgcctggctaatttttgtatttttagtagagacggggtttcaccgtgttagccagcatcgtctcaaactcctgacctcgtgacctgcccgcctt

SEQ ID NO: 338531 - DNA, 122 bp, Homo sapiens
ctggggagggggtggccggcgacaatgtggtcccgaagcggccagcgccgggagctgcagcgctgagacccccagcccgccccctcgggctcccggccggggccccatcatgttctccagga

SEQ ID NO: 338532 - DNA, 122 bp, Homo sapiens
tatggaggaaaacacaacacaacacagctacaactccgtgacaactgagagcgtagtcttcgagtacccagttgcctactgacagccgtctcctctaaggcgcttcttttagccaagaaagc

SEQ ID NO: 338533 - DNA, 122 bp, Homo sapiens
aacttaatctatgggtgtttcctaagaaaatcagtcatatgaacctggcgcggctgctctcgtcctctcagtcctggcctggtttccattgccacacaggaagcccacacccctatggccta

SEQ ID NO: 338534 - DNA, 122 bp, Homo sapiens
tcgccccggggcgagacgtgcagagagctatctgggcatcgcggggaggttctgggactccgcggccagctggaaccagccgcgtaacgggaaccctgggctaggggccgggcaggcacgta

SEQ ID NO: 338535 - DNA, 122 bp, Homo sapiens
tcccctcaatgcgtcaacatccacagggcttgcagaggctgtctctgaagcatcacgagccggtcccaacacgaacgtggaggagcacgcagcagcatttcctgcaacaccagcctcgcttt

SEQ ID NO: 338536 - DNA, 122 bp, Homo sapiens
cgcggccgccgtccctcgcctgccgtcctcccgcgcgggcgcccccgttccctcccaagccggaaagagacccaccgtcccccaggctgctctctggcccggagccgcaaagcccacgtcag

SEQ ID NO: 338537 - DNA, 122 bp, Homo sapiens
cagctgtgaagcagagatgatcaaatccctgccctcaggtgttgagatgcagctgggggccgggggagcgctctgcaggagggggaagccgatgtggaaacccctcagctacacccaggccc

SEQ ID NO: 338538 - DNA, 122 bp, Homo sapiens
ctccttatttctttgctttcttatatacagttcctcttgtacacattgtgaaagcaatggcgtgtgtcgtggagtctcctcactgctccacccaacgccaaaatgggtgtttgcgattggaa

SEQ ID NO: 338539 - DNA, 122 bp, Homo sapiens
ccactctgcagagggaggcaaccgcacaggtaatccatcctctctaggcttttctgttcccgtgcagtaagtgaagtgaagcaaggtgaagaagtgaagtgagcattcaggacatgaattgg

SEQ ID NO: 338540 - DNA, 122 bp, Homo sapiens
cctttataaatacacgtaggtttggaaatcaaggggaaaagcggctttgggctcataaaacgctgcgtacgctttccctgcaagtgtgagggaaggtgcctggcaggtcctcggcacgggac

SEQ ID NO: 338541 - DNA, 122 bp, Homo sapiens
gaactgtgcagggtagggagctggcacagtccgattaattgtccttgggtcgaggtgtctcgtcggaccctttggggctcagtggaggtaggtgaaggcggctcccattgagggaagcccac

SEQ ID NO: 338542 - DNA, 122 bp, Homo sapiens
cagtgatacctccctgacatggttcatcatcaggctgcaatgacagaatgtggtgagcagcgtctactgagactactaacattttgcactgtcaaaatacttggtgaggaaaagatagctca

SEQ ID NO: 338543 - DNA, 122 bp, Homo sapiens
gaagactgcatgttcttttcttgaacaaaactatgagtatgcaagctaattgccacacgtcggctactctgctaaactccagcaccaaagcagttagggagcttctttgctactagatttcc

SEQ ID NO: 338544 - DNA, 122 bp, Homo sapiens
cccattctgttttcctacacaattaaataattttagttccgtaaattgttctttttacaacgctttcttgcattttctctctttcctgtgctttatccaattttgtctttggttcatcatgc

SEQ ID NO: 338545 - DNA, 122 bp, Homo sapiens
caggaaaagctaaaatgtgatgggtctgaaggttatgctaaggagcttaccttaggattacggttacaatgggggaattttaagcaagggataaaacaaacagtcctacatttttaaaagac

SEQ ID NO: 338546 - DNA, 122 bp, Homo sapiens
tatgtcgatgttgcacaaaacctccaccaccactaccctgcgttctaaagacccaaggcacgaatggaagacgttgaccaccacgcagctcctcctgcaaccaggcccaaggggttcctggg

SEQ ID NO: 338547 - DNA, 122 bp, Homo sapiens
aagataaagccagaagaaaccgggaattttccagattctctgccccagacgcccggggggcgaagaggtatgccctcggcgcggccgggcgggatccacggccagacccccgccccgggtgc

SEQ ID NO: 338548 - DNA, 122 bp, Homo sapiens
tccgggctgggcaaggagcgcttggccatgagccgcgggacagcccaggcgggacggatgcgccctccagggcccaggcgaggccgcgcggtgcagaaccgccgggatttctccaacccggg

SEQ ID NO: 338549 - DNA, 122 bp, Homo sapiens
accctaccactcgcttgtcccccctctgcagcctcctgcccgaaggccacctgaacctaacggctccctgcaacgctgcctgcagctgccagccagaacactacagccctgtgtgcggctcg

SEQ ID NO: 338550 - DNA, 122 bp, Homo sapiens
agaagtcaccgcggccgcccccactgcatgaccttctgggatttgtagtagtcagggccacgcggctgggcgcgccctctagcagcagccctgagtgaccgcagcgcacgagcgcgggaaaa

SEQ ID NO: 338551 - DNA, 122 bp, Homo sapiens
ccttggaaaagcaaagaatcctctcccggttgaaattgaaacttaaaatcctttgagtaacgatttaactattcagccaacgaaagaaaaatgcatgtttaaactgcattaacctgtcactg

SEQ ID NO: 338552 - DNA, 122 bp, Homo sapiens
tcggcaactcactcacccacctggagtcctataatgtatatatccttaaaccccctgtgccgcccttgcccccaacatattctttgtattttctccacttgggtcaacttttcctctcctgg

SEQ ID NO: 338553 - DNA, 122 bp, Homo sapiens
aggggcggggcgggctccggtgtcagcgaccaagccgcaggtggcggcgagcgcggggctcggcccgagctcaggaggtgagtgttgccccccggaaccccctgggataccctggcccgcgc

SEQ ID NO: 338554 - DNA, 122 bp, Homo sapiens
acatgtccaaacctttctgggttgcaaatactgagtgggaggccagccttcatcaccaggcgagaggtcttgttccacccccgagcttgaccgcatgggaatcaaattcatgactcagccaa

SEQ ID NO: 338555 - DNA, 122 bp, Homo sapiens
aaaagggcaaagacagtacagacttaccgcggggaagtacaaaaccattctagaggaccacgtcgaagtccacatggacagaaacattagggtgttaaaggggatgataaggcttggatggg

SEQ ID NO: 338556 - DNA, 122 bp, Homo sapiens
ccaacatggcaaaaccctttctctactaaaaaatatataaaaattagccaggtgtcgtggcgtgcacctgtagtcccagctactcaggaggctgaggcaggagaatcacttgaacccaggag

SEQ ID NO: 338557 - DNA, 122 bp, Homo sapiens
tttccactcagtggcttataatcttacagacgttatgccagagatggtcactttcctccccgtatgattttcccttcttatagagtagtagggtcagcaaactatggcccgcatgccaaatc

SEQ ID NO: 338558 - DNA, 122 bp, Homo sapiens
cccaagccccagtcaattcctgttgtgtggctcttgcctttcaggggaagactaacaaatcggcatatacaggccccaaggtaggcatctgtgatgttgtcttatgtctttgttcctttttg

SEQ ID NO: 338559 - DNA, 122 bp, Homo sapiens
agtaggtgatcaataaatgacagctatttataaagtggttcttagtaataagtgatgatacgtgtgtctggtgcaactgaacaataggaatggagcatttttctgtgccagagtacaactga

SEQ ID NO: 338560 - DNA, 122 bp, Homo sapiens
cctttaacttaaaccaaaacaaagacggtaacctttaatactagttagtctatttataaccgttccatctacaaacatttttctaatacaaacatgccctgatagcttatcttggtgcacat

SEQ ID NO: 338561 - DNA, 122 bp, Homo sapiens
tgcaaatgtccttgggatgtcttggccctgaaactggaattgctgtgttttggggcagatcgaggagtccgtgcgctacatggttatgcgctacggcagccggctgtggaaactccgtgtgc

SEQ ID NO: 338562 - DNA, 122 bp, Homo sapiens
aggagcgaggcgaggggcgctcccggccgcggcagcccctcagcctccgagccgacgatgcggtctctcggccactgacaacaggaagcggcgccccggcccctgacgccatcacgttggct

SEQ ID NO: 338563 - DNA, 122 bp, Homo sapiens
ctatactcaagcgatccgcccgtctaggcctctcaaagtgctgggattacaggcatgagccgccgcgccccgccccacgctcagtcttgaaattgtctggaacgggaaacggcaaacagcga

SEQ ID NO: 338564 - DNA, 122 bp, Homo sapiens
cggctgtgctgccatgcaccgcccacggcactgggactggacccactcaggggtcagaggcggctgtgctcccacgcactgcccacggcactgggactggagccatctcaggggtcccatct

SEQ ID NO: 338565 - DNA, 122 bp, Homo sapiens
aacccttcccgttttcctctgtgtgtgtgtctactttgccgtgttccctggtggcggcggcggtggcagtgttggtgcatgggcctcccaggacaaggggaaagtgagtatgcccctttctt

SEQ ID NO: 338566 - DNA, 122 bp, Homo sapiens
gttaggtgaccaagggggtcggggacccagaggataggacccaaagacgcaagcgtcgcgcgcccaaggctcagcgcgcctgcgcagggtagcggccgttcagccagcggctcgggggcgga

SEQ ID NO: 338567 - DNA, 122 bp, Homo sapiens
ctcagcagctgtcccctccgtgtcaactgcatcatcactggtgaaagcaccctggatcaccgcctgggaaggggagcaagaaaactgattctggtaacagtcaaaaacttcttcccactaca

SEQ ID NO: 338568 - DNA, 122 bp, Homo sapiens
gagagtggcgcgctcgccgagaggcggccagtctggtccaggatcctggtggagctgcggcgaggccgcctcgtcagcacccgcgtcctctgagcacgtccagtgtccccagcctggcgatc

SEQ ID NO: 338569 - DNA, 122 bp, Homo sapiens
ggtgatccacccacctggggctcccaaagtgctgggattacaggcgtgagccaccgcacccggcctccattcaagttttatcatgagattgcagcaacaatttagtcacatcttcaggcttc

SEQ ID NO: 338570 - DNA, 122 bp, Homo sapiens
tggaaatggtttgaggtagaaatctaatcatttatttcccttttggaaaaaatgtctcatcgccatttattgaagagtctgtcctttcgcccactgacttgtaatgccgtctgtatcataaa

SEQ ID NO: 338571 - DNA, 122 bp, Homo sapiens
acagtggggcttcaacaacagaaattattgtctcagttctggatgttagacatctgacctcgaggtacggacaggcgtggttacttctgaagtccagatctctcccatggcttctggaggtt

SEQ ID NO: 338572 - DNA, 122 bp, Homo sapiens
gccaacatggtgacaccctgtttctactaaaaatacaaaaaaattagccgggcatggtggcgcatgcctatagtgtcagctactctggagaatcgcttgaacccgggaggcggaggttgcag

SEQ ID NO: 338573 - DNA, 122 bp, Homo sapiens
tctcgacccacagtttgtcctgagccctgacaaaggtctggccccctcctgcactcggaacgcggaggacccgcagctcgtggattcgcgcctcagtgcccaagctggtgttgatgggggtt

SEQ ID NO: 338574 - DNA, 122 bp, Homo sapiens
ggtggctcccacagccaatcgcggccggtagagttgcccggcagcgcccgccccccagtccggcttctaccaatcaaaaggaaactagaggcgatgactcgctaggattttccctcgtggct

SEQ ID NO: 338575 - DNA, 122 bp, Homo sapiens
agaaaaaaaaaaaagcaaacacccttagacaaaagaaaaaagctccactctttccgcgagcgggaaaaaaggtttggttcagcaagtgatgctatttcagtgaatcagacgctctggggctc

SEQ ID NO: 338576 - DNA, 122 bp, Homo sapiens
ccagcaggatggagatggtgcctctgttcttgaccgaaattgttttcaggactgtacctgcgtgagatagtgagagggagaggggcgaagggacgaaggcgcgcccggagaggcgcgcggga

SEQ ID NO: 338577 - DNA, 122 bp, Homo sapiens
atgatggtcaacaaagcattacttgctataaggaataacctttaaggcgtgtttaaattacggttatgttatatgatagaactctgtgaaaccattataaattgttttcaaataatatttaa

SEQ ID NO: 338578 - DNA, 122 bp, Homo sapiens
cttaggtaattattttattgttagtgaactgataaattaatcaataaaaacacgtagacacgaattaagaaaaggaggtccaagcttgagcaagcgatgacagccggtggtgtgtgagtcat

SEQ ID NO: 338579 - DNA, 122 bp, Homo sapiens
acctaacaggaaatggaaatagactctgttgtaattgtgcttgcagcaatgaggttgacccgacctggtgaatttagtaccacggcaacacttccatgatgttctgcatggtaagagtgcag

SEQ ID NO: 338580 - DNA, 122 bp, Homo sapiens
tccctgactgaaaccccaattgctacaccttccaaatccaacttacctcttcacttgtaacgaagtagcacttgcaaaatatattactaaccttcatgccaaaactaaaggacacatctcta

SEQ ID NO: 338581 - DNA, 122 bp, Homo sapiens
ctgattgattttttagaagaaacaaaaataacagcaaaatatgttaattgtaaccttcagcgagagctgaaggagttttttgggcagttataacctttcaaagcatgacatcttttggggga

SEQ ID NO: 338582 - DNA, 122 bp, Homo sapiens
catggctccgctcatgcgccattcataattctacctccaagttccgcctgagccagaccgcgtttttgcctcgatcctcagccggttcggcttcccccgtactgcctccctctgaagaagag

SEQ ID NO: 338583 - DNA, 122 bp, Homo sapiens
cggccccgcgtggccgcctcgccctcgcgtccccgctcccgccccctctttcctctcccccgccccctgctgctttcggttctgcagcgccctggcctgagaagctccggcaccagctcctc

SEQ ID NO: 338584 - DNA, 122 bp, Homo sapiens
ggggatgggggagaatattgagatgattaataatcgcgcggcagggttgctgatgtaaagcgatttgcagatctaaagggcaataagcattcctgggagaaatccagcgagattccagaagt

SEQ ID NO: 338585 - DNA, 122 bp, Homo sapiens
tttcattctccacggagatcttgaacctagagtttccaagttccgaagagatgcggttgtcgacagctctcctagaatctctgatggctctgaacggggacaaaggtctagggcagagggat

SEQ ID NO: 338586 - DNA, 122 bp, Homo sapiens
cgtggagcgcgcgggggccgggggctggcgctgggagcgcgccgtcggcgtggactgcagcgccccggaaccgcgctgcctctggctgccctgcctcagccacagcgaccgccgcgcgcccg

SEQ ID NO: 338587 - DNA, 122 bp, Homo sapiens
ggattatagaatgttctgtttcttcattactactggaccagcctggaggccaaagacgcacggagccttcccatgtgggtcaagtgcccccccaggattccagactgcctacttctcagagt

SEQ ID NO: 338588 - DNA, 122 bp, Homo sapiens
gccagcctcacgaatgggtcccgtgggtcaggccccgagggtccacaacctctctgggtccgaccatccggggtgctctgcctatgtgcggacgcagcacggcgccccgtgagagggaccgc

SEQ ID NO: 338589 - DNA, 122 bp, Homo sapiens
ctgaccgcagcaaatgaaccgtggcctgcaaaacacacatgcggtgggaggggtcatgggcggagcacgggcccagcaccagataggaaacacacacgcccttccctcagctctgatttgaa

SEQ ID NO: 338590 - DNA, 122 bp, Homo sapiens
ggcagagctgggagaacaggcccagggaagtgttacaggttgtacacagaacgtgcctaccgagatgaaatgctgaccaccaacgtgccggaaatccagagaaccaacttagcaagcacagt

SEQ ID NO: 338591 - DNA, 122 bp, Homo sapiens
tctccctcttagtgggttgccttttcactctgttgtgtcctttggcttcttactataaaacgaaaataaaattctaagccccccaaccaactgaataggcccatcctctcagccaagggcat

SEQ ID NO: 338592 - DNA, 122 bp, Homo sapiens
ctattcagaatttcctttcacaggtcattaaaactataaattcaatttttcccagaataacggggctttctgtggcagggccagcaggtttcatatctgcaggatccaacttctccttaaca

SEQ ID NO: 338593 - DNA, 122 bp, Homo sapiens
cacgagttgcccagagattccctgaagtggagtagatgagcctctcaagcaagtaaggctcgcgatctttcccctggtggcacaggggaccccggggcccttcctcccggggactgatcaaa

SEQ ID NO: 338594 - DNA, 122 bp, Homo sapiens
cctcccgaagccccgccccgcctccgggtctggaggaggctgggaagccccgcccctccacgctagcgccgcccaggctggcacaaaggaggaagcctagtcccgcccctgcgtgcggcgct

SEQ ID NO: 338595 - DNA, 122 bp, Homo sapiens
tctttcactttcctgtcataaaatcacctctgaaaacacaacttctttacaaaaaagtcacgaatgacacgaactctcaggaaaacacatttctatggtctctggaaacacctgtaactggc

SEQ ID NO: 338596 - DNA, 122 bp, Homo sapiens
ttagggggggatctccgcaagaccccgcccgcacgtggctcctgtgaggggcactgcgcgcgaaggctgtggtctgccctcctgggccctgggggagaagacaaggctcccacaattacaag

SEQ ID NO: 338597 - DNA, 122 bp, Homo sapiens
agacacacagacacacacacacatgggtcacagcccaaaataacaccttcctggagctaacgcctctccttccccctcaccccgagtgtgtatggattcctccagcccaagcctccctcccc

SEQ ID NO: 338598 - DNA, 122 bp, Homo sapiens
gagagaagcagtctccccagcttcgtctccgaacttgaaagcattctgggtggtaacaaccggcaggacttctggcagaagtggtggaatctttgggagctctgaagcaccaaattgagact

SEQ ID NO: 338599 - DNA, 122 bp, Homo sapiens
tcaaagaaatggagatgacgataatacctacctcagtggggttattgtgaggataaaatgcgattaatagaaaataattagaatggtgcctgggatacatactgctcattaaacattgtata

SEQ ID NO: 338600 - DNA, 122 bp, Homo sapiens
agctccacaggttgccctccaagtgtgattaactttctgtaagctggctgcacaggagcacggattcctacgtggtgaatgttctcggctgactttttaagtcgggccacggggctctgccc

SEQ ID NO: 338601 - DNA, 122 bp, Homo sapiens
cagctttccccagcctctgggagtcgtttcggtggtgcatgctggtcctgctgccgccgccgccgccgccgccgccaccgccggcggggaggatcgccgaggaggaggaggcggaggaggag

SEQ ID NO: 338602 - DNA, 122 bp, Homo sapiens
gggagggaagggggacgcgggctctgtcggggtggcagcagcctggctcatggccaagcacgggccacgacagggcagggagcgcagcccaggccgggaggccgcggaggccccacgcggca

SEQ ID NO: 338603 - DNA, 122 bp, Homo sapiens
agacaacgctcatcgtcattggctgagcccggctgtcagtcctttcgcgcctcggcggcgcggcatagcccggctcggcctgtaaagcagtctcaagcctgccgcagggagaagatggcggt

SEQ ID NO: 338604 - DNA, 122 bp, Homo sapiens
gaccctgtacagttcaacttcaacaagatccggcccggagaagtcctcttccgtttgcaccgggagcctgatctccctgggactctgctgcaagaagacatcctggtggtgatcaacgtcag

SEQ ID NO: 338605 - DNA, 122 bp, Homo sapiens
cgggcactgcccagctacctggccagctccccatcgtgggaattcagccctgtccccatacgggaactggtgggctctggccttgagagttggcccttgaggttccgtcccgcctttcagac

SEQ ID NO: 338606 - DNA, 122 bp, Homo sapiens
gccgtccctctggctgctgcgaatccccccgccagcctccaggaccccgggctggctcaacgcccccaccggccccgccgccccagggcccgctacgcgcccggcataatgggagaaaaatc

SEQ ID NO: 338607 - DNA, 122 bp, Homo sapiens
ctctgacgggccgggagagtggggtgccctggggactggccatggaagagtgtgcgtgcacgcaggccccggggagtctctccctccgctcccccgacctgacgcagcctggcgcccacctt

SEQ ID NO: 338608 - DNA, 122 bp, Homo sapiens
gggattggggttgtgaaccaatttaccagggtctgattccctggttgggagctgatggagcggctgctgaccctgcagagctgaagtccgcatggggggctgcagtgagagccacaaggctg

SEQ ID NO: 338609 - DNA, 122 bp, Homo sapiens
gtgcctggagcgatgggtggcgaactctgctccagagacctgctggggatcctggccatccgcgtgtgcctgaggcttgcgaggacgcctctgagcactagcccagaacgtggaggtgtggg

SEQ ID NO: 338610 - DNA, 122 bp, Homo sapiens
ccagcaggcccatcctccatctctgacgtcacaggcatctgagggcagggccatgcactacgagtccatgatgtaccaggcgggggagccagtggctattctaggaaaattccatctccagg

SEQ ID NO: 338611 - DNA, 122 bp, Homo sapiens
agcttacacatgcgtgttcacttaatgaacctagttgtaagatttgactaaggtatctgccgtatcattctaattcccttctgaactggcataaccataatccaccttaatttttcttcaaa

SEQ ID NO: 338612 - DNA, 122 bp, Homo sapiens
cacctgctccatgaggcacacaccaccatttcctcttctacaagatgcttgagaattcttcgtgaaaagaagtaatgtatttggcttacttttcatatgtaatagttctggaaggcatattg

SEQ ID NO: 338613 - DNA, 122 bp, Homo sapiens
agtaagaactcagagggagctcggcgctcccgcagcgggtcccccacccaggcacgcccccggcccggccccgcccacagcactccccactcggccccgcccacagtgcggccacgcccgta

SEQ ID NO: 338614 - DNA, 122 bp, Homo sapiens
aagtagagcttcacaacatgaaattagtgccggtggtgaataacagactatttgacatgtcggccttcatggctggcccgggaaatgcaaaaaaggtggtggagaatggggcccttctctcc

SEQ ID NO: 338615 - DNA, 122 bp, Homo sapiens
tgtgtagctagcagacaaaaatatatccagcattgcacaggatctgtttttagctctcaacggctgagcatttgaagtgttagacactgtttcctggcttaccatgagcagaaggaagagtg

SEQ ID NO: 338616 - DNA, 122 bp, Homo sapiens
agacagtctagaatgaatgaaagcaataaattaagttctactcaaaacctatctattccacgagaacttccttgatcctcccagtcaggattaatctctctatgctaatttcccactttgtt

SEQ ID NO: 338617 - DNA, 122 bp, Homo sapiens
tcatcgacggcgctcaaatgaaaataccttatcctcagatcacaaacactaatgaacctacggaactctttcttaaacactcacatttcctccttccatttccccagcaaatccctcctagc

SEQ ID NO: 338618 - DNA, 122 bp, Homo sapiens
acgcgtaagactgcgacggtaccggggcggcggggaaggaccgagaggcgggaggagcagcggctcaggcgcctgcaaactggtggcctgaacgaggtagaccatgactgtggtttcagtgg

SEQ ID NO: 338619 - DNA, 122 bp, Homo sapiens
ccctggaaccggcacagggtgcttgtgttggccgcaatgaacgtgggcaggggcgtgtgccgtgagtgcccctgccgggagctgctctgagctttattatctgtgagtctgcacactattca

SEQ ID NO: 338620 - DNA, 122 bp, Homo sapiens
gttgtgaaactgtaaatgggatgtgagcactgtcagagtcaacttgctacaactggtctccgcagttacgctgaaagctctggcacgtgtgaaactggcaaacgtgaaaacaacccaccttg

SEQ ID NO: 338621 - DNA, 122 bp, Homo sapiens
ccccgccccccgcctaaacagattggttcgcagggacctttccgttctctccacccctcccgccaagtcaaaatatttagcctgacaactgaggggaggacaggtctgttggggaaataagg

SEQ ID NO: 338622 - DNA, 122 bp, Homo sapiens
gcagagagagagagggaggaaggggaggagagacaaaaggaccaagcttaattgttggagcgactttcagcacgcttggagagatactcgtgccagaccggcctgaaacggtccagaccctt

SEQ ID NO: 338623 - DNA, 122 bp, Homo sapiens
gagggtcccttactacagctaaaaggcaattcatgcagtccaaaggctcctttcccctcccgttctgcatgcccttctcactgtccccaaatgctcatgacatggccttgagagcagcgcag

SEQ ID NO: 338624 - DNA, 122 bp, Homo sapiens
tgctaggagactgctagcagtagtacaaattcacagtgtaaaagaatcagcaggtgccaacgtcttcatactgagattctcaaagttaggggaatatcaacaaacacacccagtattaagta

SEQ ID NO: 338625 - DNA, 122 bp, Homo sapiens
ttcagtgagctgagatcgtgccactgcactccagccttggtgacagcacttcagcctcagcgacagagagagatcctgtctagaagaaaaaaaaagaaatcaatacctttggctgtttctag

SEQ ID NO: 338626 - DNA, 122 bp, Homo sapiens
caaaaacaaaacgttatgaaagccggcttcgaggcattcctctgaagggaagggactccccgacccagcgcctcccccgtcacgtgaccctgtgacccggagcagccatcttaggcatcgcc

SEQ ID NO: 338627 - DNA, 122 bp, Homo sapiens
cttccaggtgtgtcagacttgggatgggacgctgatataatagggtagaaagaagtaacacgaagaagtggtggaaatgtaaaatccaagtcatatggcagtgatcaattattaatcaatta

SEQ ID NO: 338628 - DNA, 122 bp, Homo sapiens
ttagcagtgagaacctccacatgcgtgggtaggggtcgggtgacctggagacgcctcctccggtctggtctgggtgacaaaggtgaaggtttatagtctaccaccctggcagcagcctgcag

SEQ ID NO: 338629 - DNA, 122 bp, Homo sapiens
agcgcatttacggcatttcctactctgtaaaatggccgcgcccatagccgtggctcctgacggcagccatgtttgaaaattggacgcacagaaggcagtggcaggtttttgagccaggagcc

SEQ ID NO: 338630 - DNA, 122 bp, Homo sapiens
aggctgtgtctgagatgctgtgaatcttgaggctgagccttgctgagggcactgaagctccggggagtttatagctggaggctcgggcccgccccgaggggagagggagggggagagaattc

SEQ ID NO: 338631 - DNA, 122 bp, Homo sapiens
tgggtgccacgatgggaaaccagggggctatgggcgcccagagtgcctgatgcagcctgacggggtaggggccgggagtgggggtggtatttatttaatcttcatgattaggaggggctgtg

SEQ ID NO: 338632 - DNA, 122 bp, Homo sapiens
cctccgagcactcccttggtgtggggcgggggcagagacccggagaagacgttagcaatccggggaaactgcccctgggttcaaatcccgacactgccactggccaagctgtgtgatttggg

SEQ ID NO: 338633 - DNA, 122 bp, Homo sapiens
catatgaccttacacacaaggttcaatgcaaacaccctctagggtgggcctggctcagctcggaggaaagcctgcctgaaaaggctgcagctaggctgtcacgcttcattctgcccagcaac

SEQ ID NO: 338634 - DNA, 122 bp, Homo sapiens
gcattcatgtcccttcaaagtgggcaacttggcatttactcccgctctctaaagagtcaccgagggcattggaaatttcggctgcgaacccggagagcggctggctctgctgcggccgggct

SEQ ID NO: 338635 - DNA, 122 bp, Homo sapiens
cctgtgcggggccctcactttctggtgtgtaaacctggtcagcctggacctgagaagccccggaagtttcctcagcaaccccttgtccctgcctggcctttaagctccttggtttgccgtcg

SEQ ID NO: 338636 - DNA, 122 bp, Homo sapiens
tttctgagtgacttgtcgtcagctgctttccttgatatgtctaaagacagggcagtgacccgcatcgtcacccagagattctgtctctgtgccacatgaagattaggtgcccgcttttgatt

SEQ ID NO: 338637 - DNA, 122 bp, Homo sapiens
cgtttatgctactctgtaggggggatttccaaaatcaaagtcagtgaacattttcattatcgaatacactgagttgtgctaataaggtcatatggtatggcttcaggtcagcaattttcctc

SEQ ID NO: 338638 - DNA, 122 bp, Homo sapiens
agagtgactcatacaacatgtgtctcctttgaagatggccatgcccttgagccctggagccgacggctgtttccttaacacggggtggtggttactgtacttggttagtgtaatatctgact

SEQ ID NO: 338639 - DNA, 122 bp, Homo sapiens
tggcaacttttcttcctgttcttctatgttcttagcaaacccacatcaagggtgtctgttcgtgtttgaaactcatcagcatcagaaagagctaacatgttggcagtatctagaaaaccatc

SEQ ID NO: 338640 - DNA, 122 bp, Homo sapiens
tgcagcagcaccgggacgggggtaagacggtggccaggccgtgacatcgagggtagcacccgccgtggccagggtgaggctctggtggaggagaggaggcggagggctgaccttttgatctt

SEQ ID NO: 338641 - DNA, 122 bp, Homo sapiens
ggtgatcctcccacctcatcctccagagtagctgggactacaggaatgagccactatgaccggctaattttttgtatttttagtagagacgggatttcacatgttgcccaggctggtctcga

SEQ ID NO: 338642 - DNA, 122 bp, Homo sapiens
cacccacccgtccacctccccctgctctattcaccccagccccagctaacccgctccctccgcccttcggcccgcctcacccagcacacggagctcagcggctgcagtggcgaagtcgcgcg

SEQ ID NO: 338643 - DNA, 122 bp, Homo sapiens
ggcggacacaggggtgggcgccagggatgcggcgttaggggcgtcctctggaggcaggggcgccggcacaccctcttcagccatcaggatctggcagaagacgatggtgagcagcagaaaga

SEQ ID NO: 338644 - DNA, 122 bp, Homo sapiens
tttgaggagagcacgacccagccctctggggtggggtctagcggggtcagcgaccaatcgcgccgaggtctagtggggcggggccctcccgggggcggggcctgtgccagttccgggccgcc

SEQ ID NO: 338645 - DNA, 122 bp, Homo sapiens
tttcatgaggagggttttaaatatcatcattttcattaggatggttacgcatcatccttccgtggaaggctcagcctccaattcctttgaataaagctgctccacaggttaatggcccattg

SEQ ID NO: 338646 - DNA, 122 bp, Homo sapiens
gcagtgcaggggccatggcgagaaatggaggggtggggaaaggggcggggtcgggattcccgctgccacaggccccgcccgcggccccgcccccggctgaatccagcccaggagggcggggc

SEQ ID NO: 338647 - DNA, 122 bp, Homo sapiens
aagaacagttattaaaggtacatggtcttcttttcaaatatccatgaaaacatttaacgacgggatggctagtacctatagaaagctccaaagcaataatctggcctttaagtttcgacggg

SEQ ID NO: 338648 - DNA, 122 bp, Homo sapiens
acaccaccttgtgtctctgttggggaactgcctctcctgggggacaagacgatgagaatgcgccccaaaacagactgaagttcaggacccctgcctgaaatcccagcccccaccattgaccc

SEQ ID NO: 338649 - DNA, 122 bp, Homo sapiens
ccttatcaagaaccccgggagttggaaacctgcctccttgcggagccgagtgagaccaggcggaccctggaggcaggcagcccccggcaggacctcgagcccgcttgccatggggcgaggaa

SEQ ID NO: 338650 - DNA, 122 bp, Homo sapiens
ctggtgacggctctaataggcacttcacctgctctgcggaggcgcctgcggaatggtggtcgctctcattagctctgctcacccgcccagcgttacaggcagctggggagggattcaggggc

SEQ ID NO: 338651 - DNA, 122 bp, Homo sapiens
gacagaacgtttgatcagccctagcaggtcataggagaggagcatgatggactctagagccgaggtgatggaagccttgaaggttttgctgcagaaatcaagaactgagctgtgatgtcaga

SEQ ID NO: 338652 - DNA, 122 bp, Homo sapiens
atgttacccacaatttgagaacccctttttgtgaggcctcaggaggtaggaagaggtaggcgttgttcttcccacattagagcaagaaaagcagccccaggaaggctcagcgatttccctaa

SEQ ID NO: 338653 - DNA, 122 bp, Homo sapiens
ccaaggtggtcgcccaagtaacaggagcaggagtctcagcgctccagtgagtagcgacagcgacctctcagacttgtttgtagtaacagtatgaccacccttcgactgcatccatcccgcgc

SEQ ID NO: 338654 - DNA, 122 bp, Homo sapiens
gccattcgggcgcagccgcaggacctcatccagtggggggccgagtacgtgctcctttctcgccttcatctcttggaggacgggcggggagagagggtcctgtaaaaccgcggaggttgtca

SEQ ID NO: 338655 - DNA, 122 bp, Homo sapiens
cgtgctggagatcagagatgatgatggaaagggagaagatttctattatgttctgtgggccgtcagcatgaaattgcacatgctacccaggcagggctttgcatttcacattttaacttgca

SEQ ID NO: 338656 - DNA, 122 bp, Homo sapiens
gtgacctggtattggagccagtcagcccatatggagagccagcagggtctgggagttctccgtcctcttggccaaggccgctgactgactgggctacgagtcaaaagcccagctcccttgcc

SEQ ID NO: 338657 - DNA, 122 bp, Homo sapiens
agcaccaggagcaccacagacagtgagaggcagagccaaaggatcccagagctcgcgggacgccccttaatccagcgccaaaggatcccagagctcgcgggacgccccttaatccagagcca

SEQ ID NO: 338658 - DNA, 122 bp, Homo sapiens
gagagagacacactaatgttgttatttttgtgcaatgatacagtatagaggtaagaaattcggaagcagtggtctcgctcaatgaggctgattccatagcttaagaaatgagaatgaacaga

SEQ ID NO: 338659 - DNA, 122 bp, Homo sapiens
gctctccgggccactgacagagcaagccaggccctcacttctgctggagtgaggcgctcccgccatccccggcctgtcctggagagtgatgcctccctctggggtgctggcctttgccttca

SEQ ID NO: 338660 - DNA, 122 bp, Homo sapiens
accaagagtaggcagtgaaagacaaatgaaggttgaacaggtaaagtgaggaccctacagcggaaaccaagaatcctgtgtgcctgagagtaatgaagaagcctctgcagaagagtcttttc

SEQ ID NO: 338661 - DNA, 122 bp, Homo sapiens
gggccggggccggggagagggcgcagcgaggtgggggccagtccagaccgacggcagcgacggagcgggcggcggcggcggcgccggcggcggcggggtggctcagtccccagtctcagacg

SEQ ID NO: 338662 - DNA, 122 bp, Homo sapiens
catttggcgtcgtgtctagctgtggcgagttattctactgtgcactaaagtcgggagaaacgctgaactagactaaaacaacaaaagggaagtctttatggggatctggccagtttgccctt

SEQ ID NO: 338663 - DNA, 122 bp, Homo sapiens
tgttgtgcaaagtcatcagatcagcagaggaaaggatttacaaagaaatatatataacaccgcacagggttgttgtcttgtgaggattaaattaaatacacacttaaaacatccggaataca

SEQ ID NO: 338664 - DNA, 122 bp, Homo sapiens
taagcaagtgctccccatcccccacccccttctaccttctgtctctgtgaatctgatgaccgtcagtctctgagcacagccataccatcgtgggccttttgtgtctggcttacttcaccgag

SEQ ID NO: 338665 - DNA, 122 bp, Homo sapiens
tagaaaggagtcaaagaaggttttctttatatatgttctaaataacacaaaacctagctccgcattaaagccttagaattagtttctgggattaattaaaaaagcagtcgacttcagactgt

SEQ ID NO: 338666 - DNA, 122 bp, Homo sapiens
gggatccggagggagccgggacaagttgtgggcttggggcttgacaggagagacggagcacgagctatatgaggggttttcctgaagtagccagatagatcgtgtttacattattagcattt

SEQ ID NO: 338667 - DNA, 122 bp, Homo sapiens
gacgagccacggtgttacaggctccagcctccaactcccccttctcctggtcctctaagccgggaacagagcagctcagcgggagataccagagaccctaaactggcgtgaggcctgctcgg

SEQ ID NO: 338668 - DNA, 122 bp, Homo sapiens
gcccactcctttcccaggctggcctccttgtctcatccctcaagggaagggccaggggcacggaccagcaggccagttgttcagtgttcaggaatctcaggagacattgttaaacattaaat

SEQ ID NO: 338669 - DNA, 122 bp, Homo sapiens
agacactggaaattttagatgttagcaacaacaatctcaatttattttctttgaatttgccgcaactcaaagaactttatatttccagaaataagttgatgactctaccagatgcctccctc

SEQ ID NO: 338670 - DNA, 122 bp, Homo sapiens
aactttcgttttgtgttgctttctttctgtgttgcttcctctctatatttctccctttcccgtgccttggtttctgctgaaatctacatctcaatcaccccaagaataggctgttgccacct

SEQ ID NO: 338671 - DNA, 122 bp, Homo sapiens
tcaggaaatgctgatattggagcttctgagggagctgcagtgatttcccgatttcctgcgcgcctgtgtggaaagttagaagcggaatctaccggcagctttgagactaagcatgacggtgg

SEQ ID NO: 338672 - DNA, 122 bp, Homo sapiens
ccacggcctggggacccagctcagccacacacttctgggagccctctatgaggtggttcacggggatgcccaggctgctcagcaggagcttcagcgggttgagggtgccgagggggttggcc

SEQ ID NO: 338673 - DNA, 122 bp, Homo sapiens
ttttcgctgacttttggcaaaggaaggactgaaattagccccgccccgctgcggctgattcgtctagttaaaccctggtgttcctgacacaaacttcaggaaaggattttgcacttgtgcag

SEQ ID NO: 338674 - DNA, 122 bp, Homo sapiens
aaacgaaataccagattcagaaagactaagcaggttgccaagctggagagctggatctgccgacctctctccacccccccccgcccccccccggagcctcaggccaacggaattaacgttcc

SEQ ID NO: 338675 - DNA, 122 bp, Homo sapiens
tccgtgctccctggctcagtgaagttagtgtgcataaaccccgtgagcctcgaggcttgccggaactgatctgttgggttggttaggaggcccttcccctttcattcttgcaaaacaaaaca

SEQ ID NO: 338676 - DNA, 122 bp, Homo sapiens
atcgggtgtaatttttatcaccagggagcactggcctggagtatttccatttctaaagagcggttcccgctgtggtttcattagcatttggggctcatcctccctccccctcccttgaccca

SEQ ID NO: 338677 - DNA, 122 bp, Homo sapiens
tttttatgaatgaaaggaatcctgtgagtgagtaattccgggaagctcgccttacaactccgcgcggcctcggccccctgcgccgcccgccccacaacaaaactcagcgcagcgctcccggg

SEQ ID NO: 338678 - DNA, 122 bp, Homo sapiens
catgttcccacccctgatgggggcacctgggagcgcccgtggggtgggggcatctgggagcgcccgtggggtgggggcatctgggagcgcccgtggggtgggggcatctgggagcgcccgtg

SEQ ID NO: 338679 - DNA, 122 bp, Homo sapiens
tggagcttgtgtagacggaggggcggcgggccgtgtagtgcaggctgcgaagactcaccgcggtgaagtgcggccaggtgcgcagcaggtcgaagagcgcgtcgccggggcagtcggtgcgc

SEQ ID NO: 338680 - DNA, 122 bp, Homo sapiens
caagcctgcgcaggagaggttccccggagccctggagatgtcctaggggaccaggctaatcgccggcttgcgcccaagcgaagggaagtcctgcaggcacggcgcctccttccctgagcccc

SEQ ID NO: 338681 - DNA, 122 bp, Homo sapiens
tccgttcgctccggacaccatggacaagttttggtggcacgcagcctggggactctgcctcgtgccgctgagcctggcgcagatcggtgagtgcccgccgcagcctgggcagcaagatgggt

SEQ ID NO: 338682 - DNA, 122 bp, Homo sapiens
cctggtgctagtacttgactgctcacttctgaaccaagtacttggcaggactgagcattccgcagggactttcaggtcacctcctccaggggtaatggatccgagttcctttgtgtcctgta

SEQ ID NO: 338683 - DNA, 122 bp, Homo sapiens
tgagtttggggcttcccacctgcatctaggccttggaaactacatgctcatcagggcccacgtggagccttgggcttgctgagggtcattgtgaagttcacaggcttgtcctgcacacacag

SEQ ID NO: 338684 - DNA, 122 bp, Homo sapiens
cgcccccagcgcccctccccggggcagggactcacctaacaggttggggtccttggagtgcgcggggccgcgtggggaagcggggaccctaccccccccacgcgccgcccagcactgggcaa

SEQ ID NO: 338685 - DNA, 122 bp, Homo sapiens
ctctcggcctttgttttcctccagtgccatcagcagttcccagcgtgactgtcccgcagccgcactgggtccaggcggctcctgccgcagtcagtcgctccccctacccagcagcctttttt

SEQ ID NO: 338686 - DNA, 122 bp, Homo sapiens
ccacttctgcttctgctgctgctcagccagcatcaacatgtcatggagactgtgacaccacgacctccagacctgaaggacttcggccactgggcgggcagcaagatctgggacaatctgga

SEQ ID NO: 338687 - DNA, 122 bp, Homo sapiens
tcccctcccccacaggggtgtggccgcgccccgggcctagctgggcccattgcttcccagcgaagcggcagtggcccacgtcagcacctttcctgaaaggcagcggttcccaaacctgccat

SEQ ID NO: 338688 - DNA, 122 bp, Homo sapiens
aggtgagcctgagggactgccgcaacgtgtctgtgttcctggcccctagcgtggtaggtgcggggttgccagccccgctgggaagccccagccacaccccagggtgtttgctgctctgaggc

SEQ ID NO: 338689 - DNA, 122 bp, Homo sapiens
ataacacacacacgccaccacgagaggaggtgtcggcggggcgctgagctgcatcccatccgcacatccatccgcagtgtccaggtgcccccacccacacagccgcccgcagcatccaggca

SEQ ID NO: 338690 - DNA, 122 bp, Homo sapiens
atctcgggccaggttttctttcacccggctccgcgaggagcgaggcggaaagctcgggtccgagtgttgatcgaggacctggagatagtaaccccccacgtccagagtgctgggggtgggtc

SEQ ID NO: 338691 - DNA, 122 bp, Homo sapiens
ggccatctataggggtctgctgggaccctttgagagccaggaacaggccctgttatctcccggttccctgtgaacactgcctgaatgggacctaagttgacagctgggacttcgtaggccat

SEQ ID NO: 338692 - DNA, 122 bp, Homo sapiens
tttgccgccgctgcctggatattagcacagagatagcgccaggccgggcttctaagaattcgcgcttgtggctatccaagactccgtctcgaaaggtgcttgtcggactccttcaccggagt

SEQ ID NO: 338693 - DNA, 122 bp, Homo sapiens
gttgagccttctgggaggtccccgaggaggatgcgagcctgggaggttgttccatttccacgcgcccctcacgcccttggacgaggccctcacccctggttccactgcaggagacctgttaa

SEQ ID NO: 338694 - DNA, 122 bp, Homo sapiens
gcacatcctccagtttttcctttagttcgctgttgatgcccaagctttccaatgtggcctcgatgcacttgggcctttcttgattgaaggaccgggctgcccagaagtgaatggctggctct

SEQ ID NO: 338695 - DNA, 122 bp, Homo sapiens
aggcgggtccaggggaccggagcgtcggaggcttgctccaggcccagagctctcgggctccggcggaattcaatggtttacaagctctttgttcttagggcagatgggaggggtagaaaggg

SEQ ID NO: 338696 - DNA, 122 bp, Homo sapiens
cgctaaattctgtcaggcccagtgtccaagtgtccgtttatctgtccgtttgcatatgaccgtagatcggcacgccctgctccagctgcggcatgtgcagggttaaggcgagaggaggtttc

SEQ ID NO: 338697 - DNA, 122 bp, Homo sapiens
tcgttcctgtagaagatgaggcttctccgcatgaactcgtagctggggaaaagggtggcacggggtcaaatgcccgctctgcatggctgctgtgcccaccccagcagtgcccaccaccgcct

SEQ ID NO: 338698 - DNA, 122 bp, Homo sapiens
gaaaaataaatttctgtcatttataagctacttagtctatggtattttgttatagctgctcgaatgggctaacacagagacaattcccagcctgcccaaatagcaccaggaagtgttgggta

SEQ ID NO: 338699 - DNA, 122 bp, Homo sapiens
tcttcctcctgctccaacatggagcagctgctggctcagtctgcaactcagccttcattccgggacattcactaacggctcagaagaggagaagtgacctagtggggagatctaaaagctca

SEQ ID NO: 338700 - DNA, 122 bp, Homo sapiens
ccctcgcggcgcccggtggggccgggaacggtgccacccggacaatccgggtgagacccgcgcccacccgcctccggaccgaccctcagcctggagccgcgcagtcctactacccggcgatc

SEQ ID NO: 338701 - DNA, 122 bp, Homo sapiens
caggatacagtcctcaggtagatgataaaaaggaattggacatcaagtcattaaaagacacggagaaaccctaaatgcttattgttaagtgaaaaccaatctgaaaaggctttctattttgt

SEQ ID NO: 338702 - DNA, 122 bp, Homo sapiens
agctcgctcgcgctgtcagcatcgcagaaccagggccaggtgtcccagtggcattctgaccggcggcggcggctgcacaggagcgagaactgagaagccgccgctcaaccccacacggggtg

SEQ ID NO: 338703 - DNA, 122 bp, Homo sapiens
aagcgggttctgggagttcacgatctttccattttcagaaacaagaatgtttccttataacggccctgatccctgttcctctgcacccacttctctttctccaaccacaccctgcctttgca

SEQ ID NO: 338704 - DNA, 122 bp, Homo sapiens
agagagagagagagacagtcagccatggaggcttcaggagctctgcatcctacttgtcctcgagtttccagtcagttcctcggagccgggaatatatcgccattgggctgggcccatagtaa

SEQ ID NO: 338705 - DNA, 122 bp, Homo sapiens
cagaggctcggctctgccctggtcgctgtcagtgccatctcccttaacgagaaacttgggcgtgatgtatgcgaaacaattttgatgcatgatggtttctaactccttaggaaaagataagt

SEQ ID NO: 338706 - DNA, 122 bp, Homo sapiens
gccggggtcttgaggtgggtggagcgtgctggggatggtgtgtagctggcccgcagggcccggtctgtgtacttgctggccgtcctgctcacaaggcgctgtagggctggcgacatggctgg

SEQ ID NO: 338707 - DNA, 122 bp, Homo sapiens
acacggtgccccggcacaaaacatatttcatagcttgggttaggcaacagcaaagcatcacgctgagcgccgggaccttctgagtgcaggcggtgggcgaagccccgagtcacacacaccca

SEQ ID NO: 338708 - DNA, 122 bp, Homo sapiens
acccgacctccgtaggggacaccgagccaaggcctgcagcgagtgacctgcccggggaggcgcgggaccgaggctcacctacccgggcccgcgagtctcgcccagccccagcctcccaaccc

SEQ ID NO: 338709 - DNA, 122 bp, Homo sapiens
ccaccactcccatgctctgtgcagtggccaggggcagaatgaccaccatggggtccaagccgcgggcatgcgtcccacacacggcactgtgaggatcccgcaggggaggagagcccccgacc

SEQ ID NO: 338710 - DNA, 122 bp, Homo sapiens
ctattaggttttgtccagacaacgttttgctctttcagaagagaaagagcgttctgcgctcgtcgtcttggattcgacaaccataagcatcccgttagggcaaccaccgcagcagactaagt

SEQ ID NO: 338711 - DNA, 122 bp, Homo sapiens
acgtggtcaggagtcagatctgggcaaaactttcccaggcgattccaccacttctcacaccgaagcgcatcagcccggggtcccgacctcttgggtttcacgcctggcaggtggtagctgtt

SEQ ID NO: 338712 - DNA, 122 bp, Homo sapiens
agacgcaacacaaataggcttctgaccttggtgtctgagtcctggatctgaagtccttcacggcactcactgtgagcccctcttagacgcactgcacgaagtgagcttgccagctcttcctt

SEQ ID NO: 338713 - DNA, 122 bp, Homo sapiens
aatagattgtgagttgtgtgggaggcaaatagattgtgagttgtgtgggaggcaggaacccgggtggtgttggtcaccacaggatccttgacacactagatactaaaaaaatatgaatgaat

SEQ ID NO: 338714 - DNA, 122 bp, Homo sapiens
gggacccgagttccccgcgagcccctggcgctgccttctccgctcaattaactttctcaacgtctcctgctgggcctgaggctgggaaccacctgtcgcctcttgtgtctgtttccctctct

SEQ ID NO: 338715 - DNA, 122 bp, Homo sapiens
cttgaggggtgggaggctggagctcagccgcaggaaagcaggattggcgagtggggcaaccgcagtccccctcccaggctgcctgcggcgggcccctgggccagccgagggacttctgcccg

SEQ ID NO: 338716 - DNA, 122 bp, Homo sapiens
tggtattattcaccattactgaatttcagtacttgacggcgtataacaagggaagcattacggttaaagctgaagcccctgaattttaaagtcaatgacttaatagagaaaatcccaaactt

SEQ ID NO: 338717 - DNA, 122 bp, Homo sapiens
acctgattttctataatagcttgttaattgtctctctgcctctgtcctttcctcctcttccgcctttgtccattgtcaaaagcatggcctggatgattcttttgaaatgtgagtcacatcac

SEQ ID NO: 338718 - DNA, 122 bp, Homo sapiens
tggtgcttggggttaggacacaggtggggaaggtgcttctgttgtctgtgatgagtaacccgaaatgacaagtaggaaagacaggtacgggggaatccttggaagtcagtgtaccttggaag

SEQ ID NO: 338719 - DNA, 122 bp, Homo sapiens
ggaacaatgtcggcagctgggtttgaagcagcccacgcccgtgcagctcggctgcatccccgccatcctggagggtgagtatggcccagggccttccccaagaggcctctccgctcctctcg

SEQ ID NO: 338720 - DNA, 122 bp, Homo sapiens
actccctacatcaactacgcatgcgttgcctgcctttctccaccgccggcctcgtttgggcgcgacgcatgcgccgcaggagtgtctccttgtcagcttgctacaaagggaaggggcggtgt

SEQ ID NO: 338721 - DNA, 122 bp, Homo sapiens
gatgactcacccccaatccagtgggggtgcccagacaagccctcaggccatgggtcccgccggccactcctgtgattcagccatctgtctggtgggcctcctgggccccacccggatctcct

SEQ ID NO: 338722 - DNA, 122 bp, Homo sapiens
cctccctcaccctaccctcacttataaagcaaatgcactcgactcccatcacagctaagccggtcggggggctcagggggtcccctgggcaggcccccagagggttctgggggtgtcggtgg

SEQ ID NO: 338723 - DNA, 122 bp, Homo sapiens
caaggaagctggaagtggctccaatcatctccccttcttggtaacatctctatgtgtttccgtaatactaataataatatagctgacccacaaaatgcacttaacatgtttatgccactgat

SEQ ID NO: 338724 - DNA, 122 bp, Homo sapiens
cgcggtcggaagccaccatgcccaagaacggatggctgctgattacacccgcttgcccgccgaatccttacccgctcccgcttcggtgatggccgcaaaagggaagagaactacacgctgct

SEQ ID NO: 338725 - DNA, 122 bp, Homo sapiens
gagccgcaaggcgagagctgcaaaggtaacgcagcgtggcggggtcgcgggagcggagcgcgtggccagctgactggagggaaaacgccgcctccctgcagcggttcccggaatcccctccg

SEQ ID NO: 338726 - DNA, 122 bp, Homo sapiens
gtgcggggcaggaacgcgccttacaaaactgggatgcgctgggggtggagggcgctagttcggactggatcctgggcccgaggcctgcttatttgcataatcctagcgcgggacaatgaaag

SEQ ID NO: 338727 - DNA, 122 bp, Homo sapiens
catttggtgcatgcagactcagttccaagtgctccatagtttatcaccttataacaaccccgcaaggtagattatctcagcctgatactagctgtgtgaccttagcaaattcctcaccctct

SEQ ID NO: 338728 - DNA, 122 bp, Homo sapiens
ttgcccagggctgctggaggcctgctcctggggcccgtgggggccctgttcccgcagctgcggcccgggcctggcctctcgctctgggtcctgcccctgcctgatggccaaggccgacccca

SEQ ID NO: 338729 - DNA, 122 bp, Homo sapiens
ctaggccctcagattatacattcacaggtacatgcacaagggctcacaaaaccttgccgccgtacacaaaagcccgtatcttcataagacgcccaaaagtatgtgtattctcacagtaatac

SEQ ID NO: 338730 - DNA, 122 bp, Homo sapiens
cacgagacgccacagcggggtagcatcagaggcgggaggaggagggttggagagcagggccgtgttgcaaggctctctgggtggccacagcagcttgcgctgcgcccacattgcttctgcgt

SEQ ID NO: 338731 - DNA, 122 bp, Homo sapiens
ctcccccgcgcggtgtttcaaagagcctgagcgactccgtgcagcgaaccgcgtgccctccgccacctgttcctggcttctcatttaatgaagttgcgatcccagttctcattattcttctc

SEQ ID NO: 338732 - DNA, 122 bp, Homo sapiens
ccagtgtttactgctgtaaacggagcaggacgcaagcggcgggtggggagctcagcgcgccgaggggcggacggggacgccgcggggggcggggaaggcggtgtctgggtgggcgtccggag

SEQ ID NO: 338733 - DNA, 122 bp, Homo sapiens
ctcacacctaccggaggaaacagctgcgccaccactccagtgatgccggcctctcgactacgagtaactccattggctcagctacagtgcgcgagacaagccgagagcgctagcagtcaatc

SEQ ID NO: 338734 - DNA, 122 bp, Homo sapiens
tgagccagccgagcaaggagtcctgactgagaactgctcggccttcctggtttctcttaccgaaggcagaaagtgaacgaagtgtggaccacacagtggggcaggtggcgaattgaactgac

SEQ ID NO: 338735 - DNA, 122 bp, Homo sapiens
cattccccggttcagcaattttcagcccagacgcagaagcatctgtttccctggccagggcgccttaacgatcccccgaattccgcgtctcccggaggccagaggtttgggtacccaggaag

SEQ ID NO: 338736 - DNA, 122 bp, Homo sapiens
caggcatcaaaagccactcaagggctctggggggctgacatgggagggtctgccttttagcgagaccaccggacctttgaacacacgagttcggttgacagagacgtcggtgtgtgcttaaa

SEQ ID NO: 338737 - DNA, 122 bp, Homo sapiens
tagaaacgcctggacctgcttccacgcaggccctgccatggtcttggttccgggtctcttcgggcacagggtgaggagcgttcaataccttcccagacaccaactgttccctttgtcctggg

SEQ ID NO: 338738 - DNA, 122 bp, Homo sapiens
cctgcccgactcccacagaaggtttggacttgttacacccacatgcctaggggagcgcagcggcgatcacacccagatagggaaggagttgggccaggacagacagggctggagacagacgt

SEQ ID NO: 338739 - DNA, 122 bp, Homo sapiens
ggatttcaacatatacatcttggggagggggacaacaaacattcagaccataacactatgcgtgcccctgagttcctctgtgagttcccctgtgggatctggctgaggccagacacaaaact

SEQ ID NO: 338740 - DNA, 122 bp, Homo sapiens
tggctcccagttagaccgctgctcccaggcggaacgtctgccacaggggacacgtacatgcggccaccatggggactgaatgagggtgggcccacaaagctctccaacgcggggttctgaca

SEQ ID NO: 338741 - DNA, 122 bp, Homo sapiens
taaagtttagagcaccctggcggacagggaaccccattcagatggttgctggggggccttcgaattttatttttggtttacaagccttcccatcagctgcgccagggtcagcaaaccacagt

SEQ ID NO: 338742 - DNA, 122 bp, Homo sapiens
ccctgacacagagcattcagagcagaatttcaataagtcttttggagcagacattaaaaacggtttttggcatatggagctatattattcatggcagtcaaatacatccttggagccacttt

SEQ ID NO: 338743 - DNA, 122 bp, Homo sapiens
ttccttccacccactctttagccactcagcagtccgacccctttcttttctgggactgagcgtccaacctcacgactcatcacactttctattctgtctcccaggtcatcaccacctccctt

SEQ ID NO: 338744 - DNA, 122 bp, Homo sapiens
taggcttgaagaatgaccaggtccaaacagtctggcctcgtgcatacccagagggacactcggaccttggcagacagatggggaagtagatggaaggtcagaaacaccaacactgcaaaatt

SEQ ID NO: 338745 - DNA, 122 bp, Homo sapiens
cgggcataactgtcacgctgacaccagaacgccatacctgcaggcgtgtgaggaggcgcacgcgcagagaagcctgggagcgaacggagagcgacgtgggacaaacgtcatcaagggcgctt

SEQ ID NO: 338746 - DNA, 122 bp, Homo sapiens
gggccctgctctcagagcccctcctatgccctctggctgtcagatggacttgttcctgaccgggcccaccggtgccagcctgcggcatcacccacgcccctccgcccccatggctcacagga

SEQ ID NO: 338747 - DNA, 122 bp, Homo sapiens
agaaaaattccactgaacagatctcacagctgttacgagtttctgagcttccgtgggtcccgtgcatttacgactgtgacgacttagactcaggacgtgcacgtgatgccgtactgggcttt

SEQ ID NO: 338748 - DNA, 122 bp, Homo sapiens
gtattctttttcgctttttggcctgtggtctcagtgaacgtcacagccaggcagggctcacggtgaccctgtgaggtcgactcctagaaagggcatacaaggtgacggtgaactccacctca

SEQ ID NO: 338749 - DNA, 122 bp, Homo sapiens
tttgtggagtggcccagagccaggcgggagcgtcagtaccgcgcactgttaacagcggcccgacaaacccagcaaatgcagaattggccaggggatccccgaaagaaccaatccttccccag

SEQ ID NO: 338750 - DNA, 122 bp, Homo sapiens
gcctccccgcctcgctcctcgaattgttgttgcttggcggggaggcaggagagggaggagcgccgccactccgattggtgagacccaaagctctgccccgcccatttcctctggtgcgcact

SEQ ID NO: 338751 - DNA, 122 bp, Homo sapiens
accgctccagccgctccgcgtccctaccggtggcttgggggtccccttggacgcgccaagcgacctctcctacccggaaagcctgcgccccctgggcttcctggagcttcccagatcgaaac

SEQ ID NO: 338752 - DNA, 122 bp, Homo sapiens
ttttcacatctgtggccgtgaccctgccgtgaactcacagtcgcctcctgaagcctgggccgtgcatcggctacacacggccaagctcgcagcttgaatttttcatgggaccacactcaaca

SEQ ID NO: 338753 - DNA, 122 bp, Homo sapiens
caggctcagggcggtggacagctggctgctggcgaagcagtacagggccaggtgcatctgcgggcggggcggagacaggtcagggtggccgcggacccagcccctcgcatcccccggcgcgg

SEQ ID NO: 338754 - DNA, 122 bp, Homo sapiens
tacattcttctgcagagattacagtattcctcagcttgagggatagggtgcaagcccatccgagtcactgaggaaacagatttgcagaattcctaagctctagaaggatgcaggtttgcttc

SEQ ID NO: 338755 - DNA, 122 bp, Homo sapiens
ggagcggcaggaacccaataagctgcttcgcctcggagctgaagcccgtactcaagatggcggctccgggcgggcgtggccagtgactagaaggcgaggcgccgcgggaccatggcggcggc

SEQ ID NO: 338756 - DNA, 122 bp, Homo sapiens
agcgagttatccatcattttagttgttttctctggggtcgttggactgagggtcttaccccgctgttcctggagacagttctgtacttgcatggtttctctcgcctttccctccctttctta

SEQ ID NO: 338757 - DNA, 122 bp, Homo sapiens
tgttcctctttccttgcaaagctgtaagagttagaggcccctgcatggccaggggctggccgtcttgctgcctgcccactttagggtgtgactgtcttgttccccgcccactttgggggtgt

SEQ ID NO: 338758 - DNA, 122 bp, Homo sapiens
accttttggtcatttcctatcacacttcccaaaaatgacagttcagatgtgttccagtcacgttcagtgttgtgtgactgtgtgttaggaatatccccatttaatagctgagaataagaaaa

SEQ ID NO: 338759 - DNA, 122 bp, Homo sapiens
actccctccaggaagccctgcttaatcctgcctgctctttcctcttcactgctctagggtcggaggtctgtcctttactttgcacaaattactaaacgagtcttcgctccaggggacaaaaa

SEQ ID NO: 338760 - DNA, 122 bp, Homo sapiens
gagtgggtcatgtgctccttgcaatccaggcacatctctttccatctggcaggggtgtggcgtatttccagagggcttcaatgcgcaatccggcagcgcactgctgggagccccggcacagg

SEQ ID NO: 338761 - DNA, 122 bp, Homo sapiens
atctagctactgggatagtaattatacactttataaatgcgcaaaaaaagtcctttcatgcgatggaggtttaagggaaaatcctgtcagggaagtttctgtctgcccatgagtatgacacc

SEQ ID NO: 338762 - DNA, 122 bp, Homo sapiens
tgacctcgtgatccgcccacctcggcctcctgaagtgctgggattacaggcgtgagccaccgcgcccagcctcggatggacattattgaactgacgcaactgggtcattgcccagctctgga

SEQ ID NO: 338763 - DNA, 122 bp, Homo sapiens
gccgcagaaactgcacacttgcctttcaaaaatggatttcctctcctgggattcagcctgcgagtgcctggcccctcaccttgatggaaaggatggtcattttcctccgagctcagctgctg

SEQ ID NO: 338764 - DNA, 122 bp, Homo sapiens
gatgctcccattggtctctgtggtgctacctgccactggcctgccaagacctcagaccctcgctgtctccttgtcccatttcccctgaggcttgtggctggttctgtggttatgactgagtt

SEQ ID NO: 338765 - DNA, 122 bp, Homo sapiens
tgatgcgacccacttatcccaggaggaagcggagagacgaaatggcagctcccgaccccacgacacagcaagattccaaccccatgatgtcagtgttaactccatcctatggatgagaaagc

SEQ ID NO: 338766 - DNA, 122 bp, Homo sapiens
ctccaccataggctgctttggggcgggaaataacaagagctggcggatgcagcctcacctcgctagagccaggcattgttctgcaccgttctggaggtgggtaaacccgggtaaacacaaag

SEQ ID NO: 338767 - DNA, 122 bp, Homo sapiens
accaacattccccttctaccccccaggcaagaggtctctcgttgcctaaggcaatttcatcgcatgcctcagagtaagcaaaaactgacagataaatgtcctaggctatctttttgagaaga

SEQ ID NO: 338768 - DNA, 122 bp, Homo sapiens
gctcatctacacttcagggaccacaggcatacccaagggagtgatgctcagtcatgacaacgtacgccaaagtccctttgctctggagtggtggcctttgggctgtttctcttgttggcttc

SEQ ID NO: 338769 - DNA, 122 bp, Homo sapiens
aaaagatcctaggaaaaatccgggagtaatatcaccccccctctccccacctggatattacgatccacatcgcaggggggcgggcgcctcccgcgatgcggggagtaatatcacccccctct

SEQ ID NO: 338770 - DNA, 122 bp, Homo sapiens
gggtccctgggagcccccccacccaccgcctctgccctccccacgtcgagagccgttgcccgtcaggggaagctgcactcccacggcccatacaagtgggaggcctctggggaagcggccct

SEQ ID NO: 338771 - DNA, 122 bp, Homo sapiens
actgagcagctctcagcagggtgagctggcccctctccctgctctgccttttttcaacttcggcgaggtcgggaaggtgagctccgagcttccggaagcactgggttcccaactcaagtatt

SEQ ID NO: 338772 - DNA, 122 bp, Homo sapiens
caagccaaagatacagagaaataaagagtgtacaataagagcacagtcacttcccagccccgattgtcccagagccccccagagcccgggcagcttacggaagctggaggcggcaccattcc

SEQ ID NO: 338773 - DNA, 122 bp, Homo sapiens
gagaggggggtgtcgctgtcttggacagctgaggcagcgggatggaggctggatcccgggcggtgggtgggaaagccggagggagggtctggctggcggcagcgcgcaaggccgcaccgggt

SEQ ID NO: 338774 - DNA, 122 bp, Homo sapiens
taaagcagccagaagagagtgggttgaggaaaaatgaagtcctgagctggtcagcccaggcggaagagccacccgaatccaaccccacagtgaatagggaaggggctgagaaaacaacagga

SEQ ID NO: 338775 - DNA, 122 bp, Homo sapiens
ccccgccgcatcgcggggccccggcgtcagcgcgcgccgcgccccgggaccgccccgcgccggcccccaccccagaaccccgcgcccgcctggcccgtgtcctcccgagccggggcgccacg

SEQ ID NO: 338776 - DNA, 122 bp, Homo sapiens
ctcgcaggccagctaattggacgcaatcagaacccagcattctttcttcgtgttcctgtgcgggattggtgtgcccaggggtttggctttccaattggctaacgccggggtgggtggggaat

SEQ ID NO: 338777 - DNA, 122 bp, Homo sapiens
attacaggtgtgcgtgccaccatgcctgacctttttttttttttaatagtgatggagtctcgctccactgcccaggctggagtgccgtggccagaccatagctcactgtagcctccaacttc

SEQ ID NO: 338778 - DNA, 122 bp, Homo sapiens
tgagctcagccatgttctctcggttgcaagattcactagtaccaatcccttgccaccgcacgcccaggccctccctagacccaccctcgccccgggtcccgtacagcccagcgggcgcctga

SEQ ID NO: 338779 - DNA, 122 bp, Homo sapiens
ttggaatttatctaaaacctgaatatctgcagagtcgcatggtggcgctgcaggataagacggtgaaatttttgtaaccgcagatgctctggttttccttaaccatgggaactgaaagcgct

SEQ ID NO: 338780 - DNA, 122 bp, Homo sapiens
caactaatggagtctgttcactccagccctggttcttccaggtcctcctccctcaagacgcggaacccaggctggagacccagacctcacaccctgactctaccgactggtcagaggcagtt

SEQ ID NO: 338781 - DNA, 122 bp, Homo sapiens
cctgaatgctgcgacaagcagatttttgtaaaattttatattagtttttaatgtcagtggcgactcggttcctggggctgcagccagcctgggacttttgtaagaatttttgggtgactcac

SEQ ID NO: 338782 - DNA, 122 bp, Homo sapiens
acctcaatacagtgcataagataaatgcagtgagtgtcacgggcacgtgcgaatgtcacccgacccagtaagggcaggtacagagaatcaggcaagccttccctgaggaagtaacatttaag

SEQ ID NO: 338783 - DNA, 122 bp, Homo sapiens
tgtgatccgcccgcctcggcctcccaaaatgctgggattacaggcgtgagccaccacgcccgtcccaaaggaagtgtttaagtcaacgttaataagtattataaacactccacaggtctaga

SEQ ID NO: 338784 - DNA, 122 bp, Homo sapiens
agccaagcaagaggcagaggggaaggagatgaggtcagggaaatgatggagggtagattgcgcagggccttggaaatgacaaagaagactttggcttatgccctgagatggaagcctcacgt

SEQ ID NO: 338785 - DNA, 122 bp, Homo sapiens
ccactgaagcgatagccgggagggtattcctaagccaccactacaaccacccctcaattccggaacgcccccaatacctgcccggccgctgctgctatcgcgataattctcgggccagtctc

SEQ ID NO: 338786 - DNA, 122 bp, Homo sapiens
tgggaccgtgccacccccccaccagtgggcgcggcagccgaaaaaaaggggaagcgccggcgctggactctgctcagggcagcccgcgaggacctagggctccggccacagcggcccgagcg

SEQ ID NO: 338787 - DNA, 122 bp, Homo sapiens
gcaggggcagggctcaggctgtgggcgcctgaggcttcagctggggcaggcttggcctgtcgaggacctgggcaagggtgtccctgtaaggggtggtgggtggaagggcctggggagggagg

SEQ ID NO: 338788 - DNA, 122 bp, Homo sapiens
taggatttttctcagcttctggtaacatgacagtattctggttgaaaaagtgtccttctccgagtaacaggtcaagaaagaagaaggaaaacgctattttctccttcttgacttcttgcagg

SEQ ID NO: 338789 - DNA, 122 bp, Homo sapiens
cgctcgcttttttaatttggcatggcttttttctcttagcctctcccctcccatacttaacgccgtcgacagtagtcgtctgtcccggtgcccggtaattgatacaaaataaaatgcattct

SEQ ID NO: 338790 - DNA, 122 bp, Homo sapiens
gcagggtggggaggagattgttcttgaaaaactaggctggggccttgctactcaaactgtcgtccctggaccaacaggattggcaccagaatatatattttagcaaaatccccaggagattt

SEQ ID NO: 338791 - DNA, 122 bp, Homo sapiens
aggaattaaagagacattgcatggcttagccattgtactcttttctctctgtcacagtaacgaatgtctttcatctgtgttactccgtcaacctggattctgaaatgaatacccattgagct

SEQ ID NO: 338792 - DNA, 122 bp, Homo sapiens
gggcggcgggacggtgggtgggggccaccaggcggcgccggagaccaccaaactttacagcgagcgagcctgcttcctggagggagtgcagacaaggaccaggagcgggagccgagcctcgc

SEQ ID NO: 338793 - DNA, 122 bp, Homo sapiens
tgtcatcgacaaggcgcctgagactcagcgatgttaggcagcaaggccaaggtcacccggcgggaaccttgcagggctgagatttgaacctgggtctgtctacagccaaggctctctccatc

SEQ ID NO: 338794 - DNA, 122 bp, Homo sapiens
agcctttggtgcaggggtcccgggtgcaggagcttttggtgcaggggccgtgggtgcaggcgtcccgggtgcaggggcccctggtgcaggagctgcgggtgcaggagtctcgggttcagggg

SEQ ID NO: 338795 - DNA, 122 bp, Homo sapiens
agagcggttgtcgggccgacagatccgggcggggcaaagccgggcggggaaagctgggctcgtcccgtcccggccccgcccccaccccgggagcccgataccggtttcagagtcctgggcag

SEQ ID NO: 338796 - DNA, 122 bp, Homo sapiens
tgcccagaaagagacaggaagtgagggaacacgagtgcacgtcgaggcaccacgttttgtcgtttgcgttgaggagctggcctctgtctgcacctggctgccctttgagcctgggcgtgctc

SEQ ID NO: 338797 - DNA, 122 bp, Homo sapiens
aggcaatttcatctgggcgaacatcatagcgcatacttagaacaaacctagatggcaccgcgtactgcgcacctaggctgtgtggcagagcccatgctcccgggctacacaccacagcgtgt

SEQ ID NO: 338798 - DNA, 122 bp, Homo sapiens
gatgatgtagggcatctggtagaaaaaatttccaagcagcaatgtgttcaagagatgacccgagcaatgttataaacattcagccttatgtaatcacaaaatacgtgaagggaagctgagca

SEQ ID NO: 338799 - DNA, 122 bp, Homo sapiens
gaggaggagacactcaggtcacaggaggaaggctgcggatctgggcggggacgtggattgcgaggccactgaacaccccagggatggatggatgaggtcctgttaactagggacattaggag

SEQ ID NO: 338800 - DNA, 122 bp, Homo sapiens
caccgtccgggagccgccgccaccgccgccgaggagtcaggaagttcaagatggccgccgcggagacccagtcgctacgggagcagccagagtaagtagtctctgtgagtgggccagaagct

SEQ ID NO: 338801 - DNA, 122 bp, Homo sapiens
tgctgtggaccccagcatttctggctgttttcctcttgtctatgctctcagaccacactccggcacccacctgactgttgagcagacagagaagttgatgaaagtgggcatcctgtatgagc

SEQ ID NO: 338802 - DNA, 122 bp, Homo sapiens
aagtactaagtacattcagctttcactaagctgaaacagcaaagcgctgaaacagcaaaccgcaggcataacagaaaaacctcaacttaaatagtgctgagctgcaacttgttttccgcggc

SEQ ID NO: 338803 - DNA, 122 bp, Homo sapiens
cctctccccctgtatcggggcagcccggcttagggccgcagaaccgaggctggggagccccgcaggctgttgctaagagtccaggggaggcacggacttaccttatctgcccctggaaacag

SEQ ID NO: 338804 - DNA, 122 bp, Homo sapiens
ttgagtacgagctccgcctcccgccttggccggagaggctggtccgcccggctctgcacgcgcctggcgctccacccccgccaaatcgaccacaccgggcgctggaaggagcaccgggaggg

SEQ ID NO: 338805 - DNA, 122 bp, Homo sapiens
ggagcagagccgagtcagagaccggctgcacgcaccttggccgccgagcagcggatcagccgctgccgccgcaagatgctggagctgcagcagcagcagcagcagcagcagcagcagcagcg

SEQ ID NO: 338806 - DNA, 122 bp, Homo sapiens
gtcctccagccgtgagcattggataggctgatgtacacctctgccccgaccaccctgccacgcctttccacgggtgctcctccctccttgatggtctcgtcaaacagcggccgtccacgagt

SEQ ID NO: 338807 - DNA, 122 bp, Homo sapiens
aaaattcatattcaaaaaattcaataatgagtggcgtgagccactgcacccagcttcccccgcacccgagacagaatcttgctctgttggagtccagtggcaagatcacggctcactgcaac

SEQ ID NO: 338808 - DNA, 122 bp, Homo sapiens
ccgcccctcctccgcagggtcccctaccccacacccgctccccgacccctcagccgccgacgagcccagctggcctccagagtctcccagccccggccccggcccgtggaagtgggtgcgct

SEQ ID NO: 338809 - DNA, 122 bp, Homo sapiens
ggcgtgcaggccagattgcagcgcaggtcagacagtgcaacaaaggtgttgcccagcagtcgcaggctctcccctaccaagttgatcaaccgctgatcctcctcccggccctcgtgctgcgc

SEQ ID NO: 338810 - DNA, 122 bp, Homo sapiens
cggatcgccaaacacctgaagggattagacagtaaaactcccatcagtgctggcgaggtccggcgagctccacctgcgctgagaggtggaaaggggctgggaggctgaacacggctgaccag

SEQ ID NO: 338811 - DNA, 122 bp, Homo sapiens
tgtatcacatttcatatagtagctgcttcccaaatgtcaaatggatggagaatcatctgccgaattcagtgatctcatagtaggaacttcttcttctgctccaagattttaaaacctagaaa

SEQ ID NO: 338812 - DNA, 122 bp, Homo sapiens
ctcttcagcataatgtaagcctcaattaaaccacaccacaccaaacagggcccagagcagcgtgtgtgcacgtgtgcagtttcgacgtgcccgcacgcacatagacgtacgatggggaaatt

SEQ ID NO: 338813 - DNA, 122 bp, Homo sapiens
taaattttctatctatcttgtaaggctttttttcagaattaatgggacccctctacaatgcgctgtgcccggggagaggaagggggcgcagctgcatctgcagctgcggttgtggtcgggag

SEQ ID NO: 338814 - DNA, 122 bp, Homo sapiens
ccaagccctgccccacagggaggcagcaaaggtccagcgagaattcgagtgcaccacgggcgggccggcactgctgggggacccggcgcaccctccaagctgctggcccagttactgagccc

SEQ ID NO: 338815 - DNA, 122 bp, Homo sapiens
cctattcagaaagattaattacgcatgttcaatttcaatttacgaacttcagatatggtacgcatgctcactgtccaccgaacgctccagctgacaatgcgcatgctctagtcctccaagcg

SEQ ID NO: 338816 - DNA, 122 bp, Homo sapiens
aggggcgtcccaggggacctccgccaggccaggggaacccggcctccgggcctgggtgaacgtgccttccagaccatcctggcaggccgctgctccctagaggcctaaggcgcttgggacag

SEQ ID NO: 338817 - DNA, 122 bp, Homo sapiens
cgcgagtgtctggcccacacttctgttcttaacctcgcaatgtattcaggtttccccaggcggagcgctcagcatatcgacagctaaaaatccaaccaaggccgggcgcggtggttcacgcc

SEQ ID NO: 338818 - DNA, 122 bp, Homo sapiens
gcacggccgggtgaggccagagtcctgggggcgcaggcagggggtcggcagggccccaggcggaaggactcgctggacgcaccgtgctcctcatgttaccgcccgctattgcttctcgcagg

SEQ ID NO: 338819 - DNA, 122 bp, Homo sapiens
gcaaagatgttgatgtggttcccaagtggcctggagtctctctgggtacctatggggcttcgtggctctggagaggcaggctaaggaggatgctggctgaagatgaggctccagcccagaag

SEQ ID NO: 338820 - DNA, 122 bp, Homo sapiens
cccgtgggatcgtcctggagctctgccagagctgtgggagaacaaacacgtgtggcttcacgtcactgagctgcggtcagtgacccacgtgtggccactcagaggggcgttcccatcccccc

SEQ ID NO: 338821 - DNA, 122 bp, Homo sapiens
gcctagcccctgagccgtttccagcgctccctgccgtgagacgagggtggcccgggtttgcgcaggcaacctttggccaggaatctgattcctgggagaattcacttcaggcttaactgctc

SEQ ID NO: 338822 - DNA, 122 bp, Homo sapiens
gatgtggaagtgaaagctacaaaggctggaaataccccactttggtgaagctgccttttgcggggcaggatgtggggcgggggggctccccaggcaggtagaaaggccagcacgatcccatt

SEQ ID NO: 338823 - DNA, 122 bp, Homo sapiens
cctgaacgtctccatggtaacctggggacacgactcgacatcgcctgggtaacccggagacgcggcgggcgttgaaaatgcaatggggcatgtgggatgaagaggtggggaagggtactggg

SEQ ID NO: 338824 - DNA, 122 bp, Homo sapiens
cggcccacaggccgcgaagtccatcccccgcagccccagcccctacctcgcccccgttggcgtactccatgacaaagcagaggcggtcgtgggtctggaaagagtacttcagggcctgcaag

SEQ ID NO: 338825 - DNA, 122 bp, Homo sapiens
cccctcctggagccagcagagagcagagcacagagctgggctgtaagaactgttggcagacggaatgactgagtggcagactcggtgccacgttggatggggggtagaagagggcagggtga

SEQ ID NO: 338826 - DNA, 122 bp, Homo sapiens
aaatgctactagctacttcagacctctttcagcctaagaggaaagcctgttagcagagcacggaccagtgtctccggagaatgctattctcctacatttccgaacaggttatcaacgcacag

SEQ ID NO: 338827 - DNA, 122 bp, Homo sapiens
cttaggaagggacaggccttttcccagccgcggtggatggctggattggcgctttcatctcggttactctgtgtgtggtgtcctggaacggttgtgtgacagccctctcccctcaagagata

SEQ ID NO: 338828 - DNA, 122 bp, Homo sapiens
aggccgccccggcaaagcgtgggttaagggggcgggcccgggggaagccacgtgccggggcggaaggctattggttcgcccggagttgtttgtgagtggccattggcgacgtcgaggcgcca

SEQ ID NO: 338829 - DNA, 122 bp, Homo sapiens
cctcgtcgtctgctccccggatggccgacccggccagcgtgggcccctgtgaggtgcacccgggccagccaggccatggcatctgcctgctgggggctgttttactgctgcagggcagaagt

SEQ ID NO: 338830 - DNA, 122 bp, Homo sapiens
tcttggcctcgctgcagcatctcatgacctcggctttcgggctccaagcctgagaaaagccgaagcatcctctcactgtgcgtcctgtggccggggtccctgcacagccctcccttccgggc

SEQ ID NO: 338831 - DNA, 122 bp, Homo sapiens
gctctagggacctcactaagtgggactgtttggcactcgtccttttgtgactgtactattcgcttggcataacgccctccaggtcagcccatgtggcagcatgtgtcagcaccgcattcctt

SEQ ID NO: 338832 - DNA, 122 bp, Homo sapiens
ccaaggttacggcacgcgcagccccgcgcctactgccccgtaggcatcccgggggacaaacgctgggtcgtcctgagtcgctcccactcgccaggtcccataaccttgaagactgccagact

SEQ ID NO: 338833 - DNA, 122 bp, Homo sapiens
cgctcctccttccgatcacaaagctggcgtcaggcagtctcctgtatctgcttcccacctcgccccctcccctctgcggagagctggcaccgaggggcgggccaaggaaaagacaaacaccc

SEQ ID NO: 338834 - DNA, 122 bp, Homo sapiens
ctgaggggcctttcttccgcgagccggctttcctccatcgcttcccacaggctttgcccgcgaccgaacagggcgagcaggcattttccttcacgtaggcctgaaaagccacgtcacccgca

SEQ ID NO: 338835 - DNA, 122 bp, Homo sapiens
ttctctaacctccctcggtggggcctccgagcccagcccctcccccaggacagggagacacgggacccagctcaagttctgcagaccagcattaaggcggaaaggcggaaaggcgaggctgc

SEQ ID NO: 338836 - DNA, 122 bp, Homo sapiens
tagagaaatgtcggtgaatacccagtgaataccacgctgtgaaactctgcatctgaggcacgcagtggggctttggttctctcctctcaccaggggtttgacctttcaaccacctcagaaaa

SEQ ID NO: 338837 - DNA, 122 bp, Homo sapiens
gcagccccgtccactcacgtgggtctgggggtgcccacgctgcagccccgtccactcacgcgggtctggggggtgcacccagcacatttcacaggtgtttagtctttgtactcatctgtagc

SEQ ID NO: 338838 - DNA, 122 bp, Homo sapiens
aaccataaataaagtattactgcaatctctttactgagctcatggaaaaactcaagtcatcgaatgttagttttgcagactggagaagtgaggtccagtgaacttgcttgacttgccctaaa

SEQ ID NO: 338839 - DNA, 122 bp, Homo sapiens
ttctctgctcttgccaaattttgttttcctcttttagcccgtcggttccgcaatttcgggcgcaaataaagaccttctggcatttagtggaaagagcctagttgagcacgatccgcagaagc

SEQ ID NO: 338840 - DNA, 122 bp, Homo sapiens
cgtatcctgttgcaggcgctgcctacccagtgctgggagaaaaagaaacagtcgcagacacgcacactcacactcgcaggcacctggggctccaagagagagttaaatctccttcgtggagt

SEQ ID NO: 338841 - DNA, 122 bp, Homo sapiens
ggcgggcaggccggcgggcggtgatgtggcgggactctttatgcgctgcggcaggatacgcgctcggcgctgggacgcgactgcgctcagttctctcctctcggaagctgcagccatgatgg

SEQ ID NO: 338842 - DNA, 122 bp, Homo sapiens
ctctccttcccaacaccgtacttggggaggagaggggtaaaaagtcccgtttccactgaccgtccttcatgcagttctgacagttgagttagctacattcagagccggttcagctgggagta

SEQ ID NO: 338843 - DNA, 122 bp, Homo sapiens
tcacctcatgatccgcccgcctcggcctcccaaagtgctgggattacaagcgtgagccaccgcgcccggcctaggatttaatgttatgcgggaaagacaggatacaaaatgtcacctgcaat

SEQ ID NO: 338844 - DNA, 122 bp, Homo sapiens
ctagctaccacttgactgagtttatagtgagagagagagacaaagagagagagaactgcccgatggacggttggccacctccagcagagtgtagttcagcttcaaacttggggcgcccggac

SEQ ID NO: 338845 - DNA, 122 bp, Homo sapiens
tggattcgtccatacggtttccacggcagcacacagaacgccggaagaagctcaggaagccgactggctgtgcagtttccgttcctgttggctggggcccggaagtgagagaccacgagggc

SEQ ID NO: 338846 - DNA, 122 bp, Homo sapiens
caagcagaggggttagcttacattcatccatcaagtgttaagctttaaacccaagaacttcgggtgagtcagggccaatgaccggtaaaggaatgagacaccttatctctaatcaaccctgc

SEQ ID NO: 338847 - DNA, 122 bp, Homo sapiens
cagaagaggggggaggcactgttgaatagtctgccatggttgcactataagagccgctgccgcctgttcagagacttcctctcagctaacagctaagaaagaaagaaaatggcggccgtcga

SEQ ID NO: 338848 - DNA, 122 bp, Homo sapiens
cacacaactactactacaaccacccacaggagcgatctctctctttctcccttagaaacccgagcttcaggcacaaagaggaaccaaaggacatgaaagcacatttcccagtggagacttgg

SEQ ID NO: 338849 - DNA, 122 bp, Homo sapiens
ggtatccacaataattacaaataaaaaatgtttaaaaagtggaaggccaggaatttatggcggctctcatccacagttgtttgatcttctgtatcaacacctgtttggaggtaggatctcag

SEQ ID NO: 338850 - DNA, 122 bp, Homo sapiens
ctctctctctctctctctctcgggctcacaggtcagcccagagcatctgaacatgacccacgtggcccaagactcgtggtgacttctcacggtggcatggctctgacttggaattcccctgt

SEQ ID NO: 338851 - DNA, 122 bp, Homo sapiens
agagcggctggatggctcccaggaggtcacagagtagtgcatggcccagccaccacacctcggctgcccatgaagagatgagccaggtgcctcagcccagcgcgccctcaccacccacacag

SEQ ID NO: 338852 - DNA, 122 bp, Homo sapiens
gcactttggggcccttgggcacgctgagaggcagtgtggtatagtggttaggtggaaccacgtgggttggatttgagtctggctgcagcatttattagctgtgcaatagaaaaagtatctca

SEQ ID NO: 338853 - DNA, 122 bp, Homo sapiens
atcaagtatctgcatctctctgttcctctccgggatttactgtcaaaagccatgcttgcccggtcacagtatcgcctggtcagtctagcttctgtggaagtctgttattttccttgatttct

SEQ ID NO: 338854 - DNA, 122 bp, Homo sapiens
atggactagtgctgtcatgggagactcagcaatacacatgcacggcccctgccttcctgacgggcacacccagtgacgtgatgagggaagagtgcactgagggagcatcagacaccacagcc

SEQ ID NO: 338855 - DNA, 122 bp, Homo sapiens
caatgcttcctcctcaccgctggctccacgaggcctcttcatcctgggtcaccggggactcgcctttctgcggagtggctcccgcacagcgtctctgctcggctctttccgctgcagtgtgc

SEQ ID NO: 338856 - DNA, 122 bp, Homo sapiens
accctgatcccggccggggcaacagtggcgcagactcacccatgagcccactgaggaagacgccgtagagggacagcccggtggtggccgcgttccacacggtacccacgacggcgtacaac

SEQ ID NO: 338857 - DNA, 122 bp, Homo sapiens
ctcagaaacagcgggcagaagcagagaggaatccgtgtgtatggtgggtaggggaccaaccgcgggatgctgaattagtggaggcactgccctgacacctggctacccacaggtggaggatt

SEQ ID NO: 338858 - DNA, 122 bp, Homo sapiens
cgctctgcccacctttagcccctctgcccacctccagccggccgctgctccgccccaccacgatgaggttgccctgcagctccaagctccagatggaaccctcggcactgggggcccaggcg

SEQ ID NO: 338859 - DNA, 122 bp, Homo sapiens
gagaaacgagggtagacacgtaccaactgtgggtttctcgtcactgtcccagctcagtggcgagccctgctcctcccctgctgtgggcctgggcctctttctctgtcttccctgaccacggg

SEQ ID NO: 338860 - DNA, 122 bp, Homo sapiens
cttccgagggccaggtttcgcgtgctggggctcggggagaccctggaggtcgtcaagagccgcctcgctcctccagaccgggccgctcctcgcgaggggcaggcggccgctggcccgttcca

SEQ ID NO: 338861 - DNA, 122 bp, Homo sapiens
gccagaaaggtgggccggttgaagaagccagcagccacaatgcctccaagaagccagctgcgccaccgtggacccggcgccggctccttgcgtgtagggccccacgttacatgggaggatac

SEQ ID NO: 338862 - DNA, 122 bp, Homo sapiens
tgcacgtgcccttccgcaccgcgtcctcgtctgcctgccactggtgcgggcgcgacgcctcgggcacgtaggctggcttcctccgccgcaggctctgccgtaacttgttcatggtgcccgcc

SEQ ID NO: 338863 - DNA, 122 bp, Homo sapiens
aaccggggctgcgcgcggcacttgcgggccagctggagtttcgggggggcatgggcttggcgggccccgcactcggagcagccggccggccctgccggccccgagcaatgaggggctttagc

SEQ ID NO: 338864 - DNA, 122 bp, Homo sapiens
tatgacctgtgtcgtcttgtcccatgacttagaatgccttaactgtccaggaatgcagcccggtaggtctcagcctcattttacccagctcctacgcaagatggagttgctctggtttacat

SEQ ID NO: 338865 - DNA, 122 bp, Homo sapiens
gactgctctgcacggttaggaaactcatagtaaggacccactgtgagataggtactttcgcggacactttggggaggttggaagccattggcctactcgtgggtaaggtctagggctgtcga

SEQ ID NO: 338866 - DNA, 122 bp, Homo sapiens
attcccagtcacccctgcttgcacctgcagggagagctgagctcagtccacacccaggtgcggtgagtcaggggatggcaatgtcttccctgcaggccaaggcaagccccggctcccgcgcc

SEQ ID NO: 338867 - DNA, 122 bp, Homo sapiens
cgacgcggtccggggggtggagcgttggcgtcgtgcgaggggtcgtcactggcgcggagacgccccctctcccccctcggctcagccgggctgctgcccgagcccggggggtggggggcgtc

SEQ ID NO: 338868 - DNA, 122 bp, Homo sapiens
tatttcctttttgcccaaaactcagttagcattgttgaaagactaacgcaatttctccttcgggcagttgtctgctcagtaacgtccggcgatattaaccgtggtgttgtaactttacatag

SEQ ID NO: 338869 - DNA, 122 bp, Homo sapiens
atggcgctcaccttcccctgtcggaagtttgaatggtatggtcggcggcagccagaggttcgctattcagtgcctgccagccaccaggttaccctggagaggggctacaagccatggcagga

SEQ ID NO: 338870 - DNA, 122 bp, Homo sapiens
tgtgacaagggctccatttaacaatttaacaccaaaggacaactaggtgctaggagaccgcggccacccggcagtgccaggcccgttcagcagttcccgggaccctgaagaccgcaaatgct

SEQ ID NO: 338871 - DNA, 122 bp, Homo sapiens
aaaccaagacagaaaaatgggcaaaagggataaaactggcaattcgcaagaaaatccaaacggctggccgacctgcgaaggaaacatcacgacctgtttgcataaagaaatgcaaacctgaa

SEQ ID NO: 338872 - DNA, 122 bp, Homo sapiens
cgccgcagtcccattaatcacagtgccgcagtccagttggggatcccgggcgcccagggccgcccgcagccccagggacaatgggattatttccggggagagaggccgcctcgggccggggc

SEQ ID NO: 338873 - DNA, 122 bp, Homo sapiens
tcacccctcatactttaagtcagtgccttgtctctcacgcacaaaaagcgtctggtacttcggtggcaaggagtgcagtgacagatggaggtatcctgtgtaccattatagaagcttttcct

SEQ ID NO: 338874 - DNA, 122 bp, Homo sapiens
cgttgtggacagcataggtgaagttcaccactgtattgaatgcagccatggaggcctccgcgaaggccaggttcaccagaaaatagttcgtcactgtcctcattcttttgtgggctaagatg

SEQ ID NO: 338875 - DNA, 122 bp, Homo sapiens
cactaacttcacctatacacaggtctgtatcctcctgttaaaaccactgaccaggactgccgcttctgggtgcgatacagtaacaggcattggattcctcctcttccctcaaacaactagaa

SEQ ID NO: 338876 - DNA, 122 bp, Homo sapiens
actccctctgactaggttccagttttcctgcattactttaacacccctcatttgccatgtcgtttctcatttcatgcctcatacctttgctcatactgccctgtctagaaacccttcacatc

SEQ ID NO: 338877 - DNA, 122 bp, Homo sapiens
gggagccgttatgccaaggcttggcattggaatggatacttgtgtcattcctttgaggcacggtgggctttccttggttcaaaccatagattacgtttacccgatggtagacgacccttaca

SEQ ID NO: 338878 - DNA, 122 bp, Homo sapiens
gaggctacagtccagcaagctctgggctccaagcgtggggacggcagcccccaagcttggcgcacccctcgggaagccccggaacggtcctcgccagacatagccggctgtcctggtcctta

SEQ ID NO: 338879 - DNA, 122 bp, Homo sapiens
ccgctggggatctcaaataggtgcccagcaagctgtgtgccggattggggcggccggttccggcaatacctggtaacctctgggtgtctttaggcgtgtggctgccggcccatcttccgagg

SEQ ID NO: 338880 - DNA, 122 bp, Homo sapiens
cgcagcagtgcgttgacgactacgagcagagcccttagctgcggcggggctgccatagtgcgggctgcgcgcagggtcggggttaggaactgtaagcgcactgacagccggaggttccagct

SEQ ID NO: 338881 - DNA, 122 bp, Homo sapiens
ttttacatagaatagaacacatagaaaatagaggtttcaacagtggatctgtctagagggcgtagggcctttatccatgtgcaaacaggccagttttcacctcttagggccagtcctatgct

SEQ ID NO: 338882 - DNA, 122 bp, Homo sapiens
acggtccagggctccgggacaccctgggggctctggggttgcagccaagtcctcagggggcgatgtcagcatgtcagcatggccccagagccgagcaaggcaagctcctgggtattgtgtgg

SEQ ID NO: 338883 - DNA, 122 bp, Homo sapiens
cagaagagaacgtgtttttgcaaaagtcattcgcagacgaggcatcccttctgtccccagcgccttctttcttccagcgcccgctttaaattggctaggtctgagcttttccagatgccagt

SEQ ID NO: 338884 - DNA, 122 bp, Homo sapiens
acttgccacagggcatataaactgagaaagttatgtagaaattcaagatcagaggatgagcgcaaggatgatctttgagaacaaaacagtgaacagagccctttgtggtggcaagcagtgac

SEQ ID NO: 338885 - DNA, 122 bp, Homo sapiens
cgaactcccgacctcaggtgatctgcccgcctcggactcccaaagcgttggaattacaggcgtgagccacttactagtcccagccagaaaggttttctgagaagagggcactgcatgtgcaa

SEQ ID NO: 338886 - DNA, 122 bp, Homo sapiens
gacgcccagcctttgggatttggggtgggggtccctgagtcaagagccaagcaccagtagcggtggcgctggccccgccgcggggaggcgcggggtgcgcggccggcggctcagctctcccg

SEQ ID NO: 338887 - DNA, 122 bp, Homo sapiens
agtgccagtttgcagaaacaagactagatccttccgcagacacatcacactggagttcagcgtatgaatcagagatgcctcaatctcattgcatgagtactatgaggaaagcactggctagt

SEQ ID NO: 338888 - DNA, 122 bp, Homo sapiens
gcccccttcgactggttcctgagggccgaggtgctccatgggtgggaactaggatggcctcggtcccctgggccccacgcatgtgtggtggggagacacttttgcccgtggtgggggacctt

SEQ ID NO: 338889 - DNA, 122 bp, Homo sapiens
taacgtgacaacctggtgcctggtgcagagctctcgcactcccattaggtaacctggatccggaacaacaacgcctgcttcaccctgaattggttctaccatgaacgcagccacatttggat

SEQ ID NO: 338890 - DNA, 122 bp, Homo sapiens
aacaacatgtcattcctgggaaccatctttggtattgcaaagaaggttcttcatgatcatcgtcccccatcctcaccctcctgcttcatttgaaaggccctccagaacaatgtgtcactacc

SEQ ID NO: 338891 - DNA, 122 bp, Homo sapiens
cctgcaccgcgccgtccagtttgctgacttctgcaaaggtagctgggtccagcagtgagtcgctgtaggagaccaccagaagcgagacgaaattggcttcggtgctcctcctggaggcggag

SEQ ID NO: 338892 - DNA, 122 bp, Homo sapiens
tggtttttctcaaaagatgtgttttcatcagaaacgggcacatttttcctttctcctaatcgccaacttcccctccattttttgtgagtcccacactccggagcttcactccatttcccctg

SEQ ID NO: 338893 - DNA, 122 bp, Homo sapiens
gcacagagcaagaaagggcttcagagaccaggcacaggttaattttagaactggagcacacgtgagagttgtagtttcaccaccaagaagcttattctctctaagcttttgaatttgcagca

SEQ ID NO: 338894 - DNA, 122 bp, Homo sapiens
cctaacggcgctgggctagtgctaggccacttcatagcttcggggatggtcaatcaggtacgtgggggtggcggtggtgtcatcaagggggtgcccaaggtggcaacaatatggctgtgagt

SEQ ID NO: 338895 - DNA, 122 bp, Homo sapiens
gcagcaacagcataaataggaacggtggtttggaagacgcccatccccatgacagtgggccgggctgtgtacgcagaaagccattcaatccccgcaacgccgctgccagctactccttcctt

SEQ ID NO: 338896 - DNA, 122 bp, Homo sapiens
gagcaaatcctctgatgcctggaggagtatctcacagcggggtctaaaaaccacctggatcgcagtctccgtgggaacttattaggagcgtgaattccagtgccccattcacacctgctgac

SEQ ID NO: 338897 - DNA, 122 bp, Homo sapiens
tgaagaggagaaagacccctcttatccaagcattggctttttctggaaggggggcagaaacgcagacctaacactgtattttactgtgatttgtgatttgtgctatggcagagggaagcaca

SEQ ID NO: 338898 - DNA, 122 bp, Homo sapiens
cggggaatttctctgagtcattctgagaaacaatagaggaagctgcagcagggtaatcaccgccacttcttggcctgtgggtacttcctgtgacaaatcgagttgaccacatgttcaaactg

SEQ ID NO: 338899 - DNA, 122 bp, Homo sapiens
tccccaccgggctgttgcagttccacacatggccagtagatgacaggtttgttcaagaaccgcctccaagattttactactgcaccgcgatttcagagtggcgggaaggactgagagtccca

SEQ ID NO: 338900 - DNA, 122 bp, Homo sapiens
ctcaggtgatctgcgtgcctcggcctcccaaagtgctgggattacaggcgtgagccactgcgcctggactgtaattatttttagtgaggtattttatgttcactctaggacacagataacaa

SEQ ID NO: 338901 - DNA, 122 bp, Homo sapiens
agtacagtaggctatagcaggggttctgaaactgtaaaatgcgtgtaatgacctggtcgtcgtggtaaatgcacattctgattcagtaagtctgggctagggtcggagagccgacattccta

SEQ ID NO: 338902 - DNA, 122 bp, Homo sapiens
cacctctctgcttctgctggctccagtgcagatgggacttcttgatgtgaactcacacagcgagtagagctgtggcaaggccacgtggtattcatgacaattgcctcatgcccatcactatt

SEQ ID NO: 338903 - DNA, 122 bp, Homo sapiens
ccgaggaggcacgagaccaatccggcaagtttgcgctgaaagtgcgggccaagctcacggcgcttctgccggccttttaaagagagagcacctggagcccaccccctaccccacacctccac

SEQ ID NO: 338904 - DNA, 122 bp, Homo sapiens
ggggcactgagactagccttgaagtgcactgtgggtactcgaatggacttaggagtcagacgcccagctttgtattaaggtgcttgatctctcattgcttcactttcccctgtatatggggg

SEQ ID NO: 338905 - DNA, 122 bp, Homo sapiens
ggtggccccacaggacagtctatagagcaggagacctgaggtggccgagggcggccgaaccggggagggagcgagttagggcacatggggacgcttttaggttgtctcctccttaatttttt

SEQ ID NO: 338906 - DNA, 122 bp, Homo sapiens
tgactcccctggttctcacaggcgctcagggaccgggtgggaggaggagaggaggaggtgcggagattccctccgtcagaaaagaaaaagggttcaggaagcgaggcagcaggaggaggggt

SEQ ID NO: 338907 - DNA, 122 bp, Homo sapiens
gtttctctctgcaagactcctttggaaatcttgcattgccttcccctttctgagtaattccgcggggcttcatttagattgtgctcatttgcattaactctcataacgaagaggtgtattac

SEQ ID NO: 338908 - DNA, 122 bp, Homo sapiens
acagcttctgccggagatctgcagggcctaacataaagcaagaagccgtgctcgttaggccggcggccagcaccgcagagcgcgcagaaggaaataaacttccactagaaactgctggctgg

SEQ ID NO: 338909 - DNA, 122 bp, Homo sapiens
aaaacgtgatacttgcaagagtttaaaacaacttgtaacaactggcagtgaggcggggcgcgtggagagagcaggataccaaaaaagctgtgtgtggcaatgcggggtggaggctgacctag

SEQ ID NO: 338910 - DNA, 122 bp, Homo sapiens
taattcaaagaaggaagggaaaacccagggacacagttccaggaagactggaagaggagacgcagagcagggaacacagctcccagccacaaattcttcataacaactctttttatttttag

SEQ ID NO: 338911 - DNA, 122 bp, Homo sapiens
caaccctggctcaggggaagcgaagacttggggagcagcagggcccggcaccaggagggacgtggtgggcgacggcaccctaagacaaaggtgggacctgcaggatcccaggaccaggcaga

SEQ ID NO: 338912 - DNA, 122 bp, Homo sapiens
cagaaagtaagtaatgtgtttcaacaccactaaagtgttaaaataggcctcttttcttctcgccagtatgaaaagttagacaggagtcactcccaagaatagtaaaggacactcactgggga

SEQ ID NO: 338913 - DNA, 122 bp, Homo sapiens
aggtggccatgttgtaaaatatgtaaagtggatagccaattctgttttgaattcttataacgagccagtattataaaagtaatgcacatccttgccaggtgtggtggctcacgcctgtaatc

SEQ ID NO: 338914 - DNA, 122 bp, Homo sapiens
gatggctcctggagtctggctacaacctcaattctggcacaggtagggtgtgcctactagcgggccagcacctcatgggttaagggcagctgccagcttgcctgcctgccagccaagctccg

SEQ ID NO: 338915 - DNA, 122 bp, Homo sapiens
ccctccccggccgtgcgtgctgcgcaagcacgtagccggcctctgcggaactgggcgttgcggccccgcctccatccacacccaggccacgcccccaggggagctccgcccctcgcccggct

SEQ ID NO: 338916 - DNA, 122 bp, Homo sapiens
gcgtggtggtccgggccggagtcgggcgggcggggaagtgcgggccgggtcaactgtcaccggctgcacccgggcttcagcgcctcgctcccgcccctggtaaacttcctgttgtcgggagg

SEQ ID NO: 338917 - DNA, 122 bp, Homo sapiens
cgaacgacagccctagcaaatccgtcttcaccagcagcctcttccagatggagccctcgccgcgtaaccagcgcaaggcgctgaacatctccgagccctttgcggtatctgtgccgctccgc

SEQ ID NO: 338918 - DNA, 122 bp, Homo sapiens
tgcgaagaggcagctcggggttgggcacagtagcgcttacctaccagcctccttccttgccgcaccagtcagatgccaagtccacaggttgctagcaagagagggagaattaaaataaataa

SEQ ID NO: 338919 - DNA, 122 bp, Homo sapiens
cctcttcttcctgggtcatcctgagctcggcagtgagagcacctacgactagggagcggccgagcagagggaacaaggccgtgcccgctaaggttctcccgggacggtggcgagcccacgct

SEQ ID NO: 338920 - DNA, 122 bp, Homo sapiens
tccaaagctatagacctttggtgtttcccttggtgcacacatgtgcatctgctgtgccagcgtgctgtactgctttgactcaaatgtcctccatatccaggcattaagtcactatactggac

SEQ ID NO: 338921 - DNA, 122 bp, Homo sapiens
tctgcgcagcaaggtttgtctccatggcaaccagactggcggcgcaagggggaggaaacgcgagccgctggctgggaccccggggcactagtaggcttggcacctaagaagccgaaatgcaa

SEQ ID NO: 338922 - DNA, 122 bp, Homo sapiens
gccccatggctcgtgtaggacgctaaaagcacggtaaatcccagggcgatctccagcagacgccctcgacgcatgatgccgagccgccaccggctcccgccgcctcttgccgcgcccggggc

SEQ ID NO: 338923 - DNA, 122 bp, Homo sapiens
cgttgtcgatgcagtaggtctcatccgtattctccaccagctggtgcacagacagcgtggcgttgtagggctccaccaccgtgtctgacactttgggcgagggcaccacgctgaaggtgttc

SEQ ID NO: 338924 - DNA, 122 bp, Homo sapiens
tctcccaagccagagagtgcacgtcccggcccctcccccgctgcgacccccgcccctcgccgccctgcagctgggggggcttgtggagcctcccaaccccgtttctccgggaaccctccgcg

SEQ ID NO: 338925 - DNA, 122 bp, Homo sapiens
aacgaagggttttccaattagtcacaggttaggtcgggcaatgttcctgcaagacaggcacgtgggctggcttctgagaacataggaactggaaaaggaaggtgagtaaatgttgagctcca

SEQ ID NO: 338926 - DNA, 122 bp, Homo sapiens
tcccacacacactaagctcctggctgggacggtccacctgcgggagccctgcgagcaaaccgcctgagatcctgtcctttgtttcaacagggcaggaatttccgagcctgaggtatttgcat

SEQ ID NO: 338927 - DNA, 122 bp, Homo sapiens
cggcattgggtgtagtatcatcctctcccacgttgaaattaggaacaatataactgggggcgtgtccaccccatgccatattgaaagtaacatcttccgcttctcgcctggatcatgggaac

SEQ ID NO: 338928 - DNA, 122 bp, Homo sapiens
tggcttcccgggccagcctgtgaattaggccttgtctgctgctggcagccaggtggggagcgggaccgggcggaaaggggctgcctttgtcggcgcccacgttccaggtgtggtggtatccg

SEQ ID NO: 338929 - DNA, 122 bp, Homo sapiens
tgaccttctgatgccgtccgcgccattttggagactggcatgtagagaaagactctatagcgaatcttttgaaaagggaagaaaggataggtaccatgtcaaaaccgcaagtttaagcagtt

SEQ ID NO: 338930 - DNA, 122 bp, Homo sapiens
ccgcgcccgcccgcccggcccgcggccccgccacggccgccgccgcatcccgcagcgccgcgcctcaccgggcccgggggctcgacgccccacacacctcaaagcgcagccgagccagcgag

SEQ ID NO: 338931 - DNA, 122 bp, Homo sapiens
gcccggggcctcgggcctctagagagcgggagtgaccctcggtttctggcctccgaggggcgggagcgatcctcagccatgtccctagtctctggcttgcggctgatttttaaattttttgt

SEQ ID NO: 338932 - DNA, 122 bp, Homo sapiens
gggatgggggtcggtggccaagggagggaaagtaacgggatgcgtcgtgtaaatatttcacgttggaatcactactttttataacaggacgtagttgcgaataaataaacatcctgtgcctc

SEQ ID NO: 338933 - DNA, 122 bp, Homo sapiens
ggatgccgtgatgttaacacttttaccacagagtatgttgcagccgacgtctgttcattccgtggtgaagcttggggttttccagttctcggtccacgaaaattagctgtaaaggttttctt

SEQ ID NO: 338934 - DNA, 122 bp, Homo sapiens
aaaaaatagatgcggtaatcttcgagagctcgaagggccgagttgggccaggacgatttccgagcagagccctcggctcggatgctcgttagggatgttagtggttattggaagcggcgcgg

SEQ ID NO: 338935 - DNA, 122 bp, Homo sapiens
gccgggggcgtggctttaggcaaggccggaccagggacaggctgggggcggggcctgggacgagaccaggctgagatggaccagcctttggtgaagattggatcgaaatcagaccaatggac

SEQ ID NO: 338936 - DNA, 122 bp, Homo sapiens
gcgccgcgcagccatggggaggctgctggccttagtggtcggcgcggcactgggtgagtgcgcggggggcgcgcgcggccggggggcaccgcgggggcactggcggggcggcgggagtggcg

SEQ ID NO: 338937 - DNA, 122 bp, Homo sapiens
ctctgcgaaagcgctgcggagcgtccaagagctccccgtggagctgaggcaggaagaccgcgcactggctgagaccccaggagcccaaagctggacctggcgcaggcgcagggaggaaggcg

SEQ ID NO: 338938 - DNA, 122 bp, Homo sapiens
gagttaaaggcgttccgaatccctttggccaacgacggagttgaaggtgttccgagtccccgtggccggcggcgacagagttgaaggcgtttggagtccccgtggctggcggtgatggagtt

SEQ ID NO: 338939 - DNA, 122 bp, Homo sapiens
ttcttcctctggagaatcaggcagaatgaagaagaggcagggtagtgaaaacaattccaacgttacagattgaagaccagcaaaacccagtcatcccaacacgcctgtatgctctttgcctc

SEQ ID NO: 338940 - DNA, 122 bp, Homo sapiens
acattaagtaaacatgattctttacacagcacaccaactgccagatgcaagaagtcaagacgacaaacgtgtttctcccagctaataacagtggcctcctcatctgggctgtttactcagcc

SEQ ID NO: 338941 - DNA, 122 bp, Homo sapiens
cattcaatgtagagctttctgggtaatgtagttccccaggttccaaggtagtaaagctgccgcttcccaaaggcgcttctgcagggaagtcccagccctacctcagggggttcattaaagcg

SEQ ID NO: 338942 - DNA, 122 bp, Homo sapiens
cactgctgtagcgctcacccacactccggagtcccagatcatgcctatatagtttgtgtgcgcaccagaacatccccagagctaaaaatactgagacatgcttggaacagttgagcaataga

SEQ ID NO: 338943 - DNA, 122 bp, Homo sapiens
agggttctggattatttttttcaaggagtccatatgcacttaggagtcatcaatcccggtcgcagctgtcagaatcctcccccccaagtactattcataccggggctctgattgctaatgat

SEQ ID NO: 338944 - DNA, 122 bp, Homo sapiens
attggctctttgacgctttcggaccaattgtgttgctgcataggcgtggttttcacaggtcgagtgctgggggatagagctgagttataaaaagaaggtgtcggaaactgtaacgtcgcagc

SEQ ID NO: 338945 - DNA, 122 bp, Homo sapiens
taaggacagcgcggccccagctcccccaaccacagctgcccaagtttaggagcccgcactcgtgagcgatggctactccgcacagccccggggtcctctacggaaatccctggcacctatca

SEQ ID NO: 338946 - DNA, 122 bp, Homo sapiens
tcccagtcggttaaagaagaggggatagggtcaagggatgcgacagagctgtgtggtttccggatgggaaacctcagtcgtttaggcacccctccgctcgagtcacttccgaagcagtcgat

SEQ ID NO: 338947 - DNA, 122 bp, Homo sapiens
cttcggtgtacaagtcgatgacgacgtcgcctaaagtggtctccagtagaaccgccatggcgcccgctcctcctccgctacaaaccccgggaggaggggggtgacaggcgcaggccgacggc

SEQ ID NO: 338948 - DNA, 122 bp, Homo sapiens
ccctgtctgaaaaagcaaaacaaactaataaacaaaacagtagccgggcgtggtggtgtgcgcctttgctcctacttgggaggttaaagtgggtggatcctctgagcccgggagttctaggc

SEQ ID NO: 338949 - DNA, 122 bp, Homo sapiens
ttaaatggattcattcaccagttaaaggacatttgggttgtttccagtctttggctacaacgagtaaagtcactataaacacttgccagaggtttctggacgaacaggttttcatttctcgt

SEQ ID NO: 338950 - DNA, 122 bp, Homo sapiens
cccgctgctcctgcgaagctggtgtccacacccgccggcctgcaggcacctcggggcccacgtgtcctccggccacatcccaccctggggccacctgtgtccatcccagagcgtgcgcgcaa

SEQ ID NO: 338951 - DNA, 122 bp, Homo sapiens
tcactcccagggcagagggtgggtcaagctggcctctgtccatgtggccctcataccccgcgggtcccacctttggttttggagatggttttctcgatgggggctgggagggctttgttgga

SEQ ID NO: 338952 - DNA, 122 bp, Homo sapiens
ttagggaaggaggcttgagacctgagttccttcaactcttagagaggagcccaaaggccacgccccacattaaatactgatgccaccccattaccctaggttggagtccagagtcttcgacc

SEQ ID NO: 338953 - DNA, 122 bp, Homo sapiens
tgcccaatatcccaatggggttcagaagcttaacaccatcttgaggttacagaaagaacacggacttggatcctggcaaaacagattatggtggggggatataaattctatttaggggcaat

SEQ ID NO: 338954 - DNA, 122 bp, Homo sapiens
cagagcctagatcatttctgcctttgatgtgcatctcctagacgtcagcaggagactagacggcttgtcaggaatgagattagaaacctgcaaagcaagaaccttttcctaagatttttcaa

SEQ ID NO: 338955 - DNA, 122 bp, Homo sapiens
acgagctcagggtcgaaggtcacatcacggggccttagtgtatcacaggcatcatagctgcggaggacaattcggcagtggcagtggtagttgttctggtttcgggcattgatgacgactga

SEQ ID NO: 338956 - DNA, 122 bp, Homo sapiens
gggggcgccatttcccaaaacagagattgtccctttgaggttgcaagtcaggttcctttacgctgagatcccttacatttttacttttaggaaggttttttcgaggggtggggggatgacct

SEQ ID NO: 338957 - DNA, 122 bp, Homo sapiens
ctggccggcagccagggtgagaatccccagcgccaggaactgggtgtaaccccagagctgcgccctcagggcggcgtccacttcggggggcctgcctgggtcacagtcgtttgtgagcgtga

SEQ ID NO: 338958 - DNA, 122 bp, Homo sapiens
aaggaggccgtttcgggctcgaggttagaggccctgttagggtgaacaacctgcgcaaggcggcgccatacacagtgttaaaatgaggaagaagacaagctttcgctgcgcaagtagatcca

SEQ ID NO: 338959 - DNA, 122 bp, Homo sapiens
cacggtttggggtgtggtcagggcgcagcatgagggaccccgggagccaggtgcacccttcgagggtcactggacaaggcctggaccctacaaccagacgccaagggtgtacgggggccaga

SEQ ID NO: 338960 - DNA, 122 bp, Homo sapiens
acttaagtccaggagttgggagatgacagtgagctttgactgtgacactgcactccaacccgggtgacagggcaagatcccatctctcaaaaaaaaaaaaaaaaaatgctttaactccacgt

SEQ ID NO: 338961 - DNA, 122 bp, Homo sapiens
aacttgaagatgtaaatgccctgacgaatataaagaggtatttggaaggcacaagggaggcgctgccaccaaaaatcgaatttgtaattacactccagattgaagagcccaaggtaggtacc

SEQ ID NO: 338962 - DNA, 122 bp, Homo sapiens
tctgctaggttttgggaggtgccggtatttatgtcacataaaacagtttgctcggctgggcgcggtggcccacgcctgtaatcccagcactttaggaggcagaggcgggtggatcacgaggt

SEQ ID NO: 338963 - DNA, 122 bp, Homo sapiens
gctgtgggagcatgttgagcccttcagtgacagttttccaggtggtagggcagccctagccgggagaacagcatgtgcagaggcaccgaggcttaaaagtgctggatgtttttggagagcag

SEQ ID NO: 338964 - DNA, 122 bp, Homo sapiens
aacttagggggcaggcaaacaaacgagttctttccagcctctgtaaccggatcgctagagcgaaataaactcgcacaagtgtccagagatcgtagccagacagccagcctgcgcttgaagca

SEQ ID NO: 338965 - DNA, 122 bp, Homo sapiens
ggatggcgctcgccggaacccggcccctacccagcgctgggagcccgctctccccgccaccggagcggttcacctcccaattctttgcatggcttgccctagcgatgcaaagaattgggagg

SEQ ID NO: 338966 - DNA, 122 bp, Homo sapiens
ccgattctagtgcgcctgcgtggccgcgaatcaccagccagcctctgggtctgtagcaaccgcccagcgttgaggcgcggctcatgcccccagtatcccggtccagctattccgaggacatc

SEQ ID NO: 338967 - DNA, 122 bp, Homo sapiens
ggaggaccccacagctctgggcgctctaggaggagaagccagaacccggagcgtttccagcgagttcccaggtgatactgatgctgctggagccagcacttcactttgagaaccactgtctt

SEQ ID NO: 338968 - DNA, 122 bp, Homo sapiens
ttttcatcaaagccacacaaaacaaggactaacatgcatgtttcacttaaatggtttttccggtttgtataatccattaatttggcccttgtggtttcccttagctagctgtgtgtaacgtt

SEQ ID NO: 338969 - DNA, 122 bp, Homo sapiens
attctttttttagatgagacagagtttcgcccttgtcacccaggctgtagtgcggtggcgcgatctcggctcactgcaacctccgcctcccgggttcaagcaattctcctgcctcagcctcc

SEQ ID NO: 338970 - DNA, 122 bp, Homo sapiens
gaaccgcttccttccactcagctacagtcctcgctccaagatcgtcaccattgctccctgcggttcctttatggtaggcctggactccaccgtggagccagaggggctggcatgcccctccc

SEQ ID NO: 338971 - DNA, 122 bp, Homo sapiens
aaagccatgttcccgatactgcagacttggcgagatggcggcgggctcctcccacctctgcggcagcgtcacaatcaataatgcagggctctgcggcagaggaagcgcctgcttttatatag

SEQ ID NO: 338972 - DNA, 122 bp, Homo sapiens
tgtgcggggtatgggggtgggtttttaaatctcgtttctcttggacaagcacagggatctcgttctcctcattttttgggggtgtgtggggacttctcaggtcgtgtccccagccttctctg

SEQ ID NO: 338973 - DNA, 122 bp, Homo sapiens
gatatgggcaagtacacacacatctaggccatcgttcccgacttttaagtatgaaagaggcgtggctaggggctagatacttatttttaacacttccattgaaacacccggagtctcccaag

SEQ ID NO: 338974 - DNA, 122 bp, Homo sapiens
cgttggggagctgatcgacgaggaggagtgcatggcgagaatcaagcacgcacacgagaacgacatcacccacttctacatgctcactatagacaaggtaatgcggaactccactgtgagct

SEQ ID NO: 338975 - DNA, 122 bp, Homo sapiens
aaatctttgatcgccatgttaatgtttctttttctacctttcatttgcattttaatctatcgaatctttacagttttgctgcctcctatttcaatgattgattacagatctgaaataagaaa

SEQ ID NO: 338976 - DNA, 122 bp, Homo sapiens
acctcaggtgatcctcctgccttggcctcccaaagtactaggattacaggcatgagccaccgcgcccggccttgaccaattttgattgtggtattagcagtgagagagagagagagagagag

SEQ ID NO: 338977 - DNA, 122 bp, Homo sapiens
gagtgagccttccaccttggggagcagagccacgttcccgggttactgagctgagctgggcggttactcagcctacaaacacaggtttcccagcacttgaacttgagactcctgaaaccgac

SEQ ID NO: 338978 - DNA, 122 bp, Homo sapiens
atttcctgacctcgtgatttgcccgcctcggcctcccaaagtgctgggattacagacagccgcggcgcccagcctcgaggtcttatagctagttgcaaagcaggtcttttaccagcatgtgg

SEQ ID NO: 338979 - DNA, 122 bp, Homo sapiens
tgagccaagagcagtggggcagtgggcctgggcagcccttcagtgtcagctagtcccaagcgtttgatttatagttggagattcagagagagaaggtggcttactggggactgtacagtccc

SEQ ID NO: 338980 - DNA, 122 bp, Homo sapiens
cggaccgcccgggtccctcagagtctccggatccgaaatctaccccgaggcagcgggacccgcccagaccctccacccgggagagtcccaggcgcctttacccaggttcattttcagtttag

SEQ ID NO: 338981 - DNA, 122 bp, Homo sapiens
ctgaggtcagcctgagctgagagggccggcagatcacgccgcagccgaagtgaacgaactcgagtgaggtgtgttaagaaaatcaaaatgtataaatttggaaaaggagaggaggccgggcg

SEQ ID NO: 338982 - DNA, 122 bp, Homo sapiens
caaacgagtcacaaagccgtgctgacttggtgcttccgtggggctgggccgagttctagccgcctgtgaccgtgtctgcatctgtagacagatttaattgtgtgtgtgtgtgtgcgaggcgc

SEQ ID NO: 338983 - DNA, 122 bp, Homo sapiens
acttggggaagaggaaggacccggcgcgagcggcctctcggctgagctggggcatctgagcgcgggctcggtgggtccgcgcggcgcggagctgggcatcggggccggcgcgggctcctccg

SEQ ID NO: 338984 - DNA, 122 bp, Homo sapiens
taaaagggtgtcacttgactgaagtaccctgagaaagggtgcaagcccgggtcccacattcggcggcccaagagaaaaggaattggcccatccaagtgacaacagatatggggcagctctgg

SEQ ID NO: 338985 - DNA, 122 bp, Homo sapiens
aaggatctgtcgctggccaagcaggtccctggctaaggcactgctagggacagctcgcggcggttcgggggttaattctcggcagccctccgtcacccggtgccccacccccgccctgcgcc

SEQ ID NO: 338986 - DNA, 122 bp, Homo sapiens
ggacaaccccctgcggccccgcccacgccgcatgacgaaggcaggccccgcccacccgtccgcaagccccgcccatgccccgcccgagcccggccgcggctagaactccccgctccccagct

SEQ ID NO: 338987 - DNA, 122 bp, Homo sapiens
agacatccgggagggaggcgtccgcggtggctgtgggccgccaaggcggagaccggctgccgctcccaggcaccccccagagaccgttgctgaccccaccgagaaggcaccgcctccccggg

SEQ ID NO: 338988 - DNA, 122 bp, Homo sapiens
caaggttgggttttgtttttctaggaaagagtgtaaaactggagtgtctgactagtgccccggatagggaggcttaataggtttggggtaactcatccccatgagctctgctctactctcat

SEQ ID NO: 338989 - DNA, 122 bp, Homo sapiens
cttaagccgaagcctcctggaacagaattgctgtactggcatctatctccaagtggtccgcgaacgcttctgcgccggcgatggtttctgttcctcagcaatagttccttgaggcattttta

SEQ ID NO: 338990 - DNA, 122 bp, Homo sapiens
ttattattattattacagaacaatcttagactctgtccgcaccctgcactctaggtcccgcgactctcagacctccaagtaggactacaaaacagaggtttctgggggaaggaagtgacgat

SEQ ID NO: 338991 - DNA, 122 bp, Homo sapiens
gacggggcggcggggcagaggcgccccccacatctcagatgatgggcggccgggcagagacgctcctcacttcctagatgggatggtggccgggaagaggcgctcctcacttcctagatggg

SEQ ID NO: 338992 - DNA, 122 bp, Homo sapiens
gggtgaaaaaaaaatgccgcagctgaacggcggtggaggggatgacctaggcgccaacgacgaactgatttccttcaaagacgagggcgaacaggaggagaagagctccgaaaactcctcgg

SEQ ID NO: 338993 - DNA, 122 bp, Homo sapiens
tggcacctctcacagagtacagcttattaacagatgttccagaaactgttactgaacattcggcttgatgctgtgggcttgtctgcatcttgcaactgtcacctggctgagaaatttcttct

SEQ ID NO: 338994 - DNA, 122 bp, Homo sapiens
tgtgttacctataggacttatctaagaccataatcactgccgcgtgtgctaagtcccgcgcgcgtgcactcaggcccctctggatagacactggggacccctgaccacttatgtcagggaaa

SEQ ID NO: 338995 - DNA, 122 bp, Homo sapiens
agtagtcatcacgctgtaaacttatctgtagctgcctgcctcactcttggattcaggttgcgtctccattagggcaggtcgggaattctgaactacaggaaagagagtggtcatttttggct

SEQ ID NO: 338996 - DNA, 122 bp, Homo sapiens
ctggaccagtcgccacgacgagctccggggcgccaccggtggcctctctgatggcccgctcggcgaggggtccccagctatgaatcaaagggggcacttcttgaatataaagaacagcgttg

SEQ ID NO: 338997 - DNA, 122 bp, Homo sapiens
agctgagctacagttggctggggcacaaaaaaaccagggggtgccaagagttttcaggtacgtaagcgggaaaggggtgccaagtctcagctaaaaaatcccctatggcagagatccgagta

SEQ ID NO: 338998 - DNA, 122 bp, Homo sapiens
tgctggaggctgctgcgttctcactctggtctgggccaggcagtgaggttctgtgcgggccgccggtggccaactggagccggtcactctggccctttggacggcttcctcgaggcttgctg

SEQ ID NO: 338999 - DNA, 122 bp, Homo sapiens
aaaggggctggagctacgcagctgggggccgtcatgccccagcccacagccctggagcaccgcccagggaggactcctcctaaaggataagggggccctgatggagtgcccgggctgcccgc

SEQ ID NO: 339000 - DNA, 122 bp, Homo sapiens
tgaaagcttatgtgtattaatccttccaaaaagtcaatgtggcagaatgattattttacccgttttgcagatgaatgaccagaggcttgaaaaggtgaagtgacatcccggagtgacatggt

SEQ ID NO: 339001 - DNA, 122 bp, Homo sapiens
cattctgctagtttccaggaagggctcaatgaagtgactgctgtcagcatcttttttcaccgcgactgatactagagaaggtagaggatgtttaggagcttttaaaggaaattatgtttagt

SEQ ID NO: 339002 - DNA, 122 bp, Homo sapiens
gtgaggactggacctgggctggggaggcgggcttggctgggggcggctggaggtcccccacgtcgcactgcacggccgtctccttggtctcccgcaggccgcccccctcggcctccaggccc

SEQ ID NO: 339003 - DNA, 122 bp, Homo sapiens
tggaaaggggcggaggcaggagtggagacggcttagagcacccggggaggtcggaaggcacgtctgtctgccctcccctagcttcaagtttctggagcccctcccttaactttcatgtctcc

SEQ ID NO: 339004 - DNA, 122 bp, Homo sapiens
cacattctgtttctcatcaggcggagaggcggggaggaagagtgaatggaggtcacccatcgaggggagtgtataagtcatccctgccggctacctctgcagctcacaggacacacgttcac

SEQ ID NO: 339005 - DNA, 122 bp, Homo sapiens
tttgtttttcccttttcccaaggaagctcgtgggacagcatgggcactactcttcatgtgcggtgacaccagcccccagatgccttgaattaagtgtcctcacctttatgcatgactgcaaa

SEQ ID NO: 339006 - DNA, 122 bp, Homo sapiens
ctaaccttagtaacgtactggggccaagccaagcgagttggaccaaatatgcaactctttcgttgaaccacatatcacttcaaattcacataatcccaatagcttcctacctgggttctttg

SEQ ID NO: 339007 - DNA, 122 bp, Homo sapiens
ccccaaatgttagtggaaagacaacctaatgaaaatggccctgatgacaaagagaaagaccgtccagaaagtatgccatgagcaaagacaagaaacaagactataactgcattctagataat

SEQ ID NO: 339008 - DNA, 122 bp, Homo sapiens
agctgaggggacatagtgaggtgtgaccagaagacaagagtgcgagccttccgttatgcccggacagggccaccagagggctccttggtctagcggtgacgccagcgtctgggaagacgccc

SEQ ID NO: 339009 - DNA, 122 bp, Homo sapiens
ggacacggggggcttcaggcaagctctcaggcttccagcacaagtttctggctaaagcagcgctgccttctgagggaaaaacaggcccttcatcacccattcccgaagtgacctcatcccaa

SEQ ID NO: 339010 - DNA, 122 bp, Homo sapiens
gcaataggctcagggagagacacacggcccaatcagagccaggagaggttggctgggctccgggagacaggacgtgaggctggagtggctgcagcctcttgcagacagtggaggctcaggct

SEQ ID NO: 339011 - DNA, 122 bp, Homo sapiens
aggaagaggaggtatgagcacggttctggtctttgggtttccttgactgcttcccttcctcgcgattcctcaggtccctgtccccgaatcctcatcatcccctgccagccccggaagtttcc

SEQ ID NO: 339012 - DNA, 122 bp, Homo sapiens
tgtgccttctgatgtgcggatatgttcggaatttcttccttctggtggggttcgtgatctcgctggcttaggagtgaagttgcggaccttcgaggtgactgttacagctattaaggtggcgc

SEQ ID NO: 339013 - DNA, 122 bp, Homo sapiens
gccctgagaaaaaagactgagagacctggggcgggagaggggcctgggcggggtgcgacccgcaagggaaagggcagaaagactggccagatttgggaaccctgaaagggtggggcaaggct

SEQ ID NO: 339014 - DNA, 122 bp, Homo sapiens
agaggaagaggggcctggagactggatcctgctccagcctcctgcttttgtccttggccccgggttgttcctggacaaaagcccaggggcccccagtgggccctaatggatgcttattgggg

SEQ ID NO: 339015 - DNA, 122 bp, Homo sapiens
tcaggaaaactgttccacggtaggaggcatacgatcctgatctctgtattttggagaagacggaggggactagcttacgtcgagacagaggagttcataactattaactatacacaacgacg

SEQ ID NO: 339016 - DNA, 122 bp, Homo sapiens
gttcggaaagtgccaaatccagcaccggttcgcccaggcagtctgtgtctctggaagagacgcagtccagtacaccagcctcagcccttgcagggatgtagagactgccctctgagcttgaa

SEQ ID NO: 339017 - DNA, 122 bp, Homo sapiens
tgcacctctgcccggaatagaccagggagacgtgtgcgcgagtggagtagcttcttctagcgctggggataggatggttataaataggtccggtgtaaggaagccactgccttagggaaggc

SEQ ID NO: 339018 - DNA, 122 bp, Homo sapiens
ccagtcttggcagggagtggtggctcacgcctgtaatcccaccatgctggtaggcccaggcggatggatcagctgaggtcggagttcgagaccagcctggtcaacatggcgaaacctcgtct

SEQ ID NO: 339019 - DNA, 122 bp, Homo sapiens
cagcacgccgaccacagccagctcagccttttctgatatatttacaactacaaaagataccgttaaaaaagaaaaatacctgggtgcagtggcttacgcctgtaatcccagcacttggggag

SEQ ID NO: 339020 - DNA, 122 bp, Homo sapiens
ccgggaattgcgcagggctggcggggcgggggaccgggagagcggcctgctcccggggcacgaagggggccggatcacagacccttaacccctgacctcatctcaggtgcctccctctcccg

SEQ ID NO: 339021 - DNA, 122 bp, Homo sapiens
tgtgcatgggtgaaggaccgtggctgcagatcttggtcttggcatgaggtgtgggaggagcgtagggctttaagccaggagactgggatcgtccttaacgtgatactttctagctttgtgac

SEQ ID NO: 339022 - DNA, 122 bp, Homo sapiens
gcggactggatagttgtatcagagtcctggacggaaacagatggcactcaaaaggtggcgcgcagttcagagaaatgcctatgtacggatttggtccaatgcctcagcctgacctcagggac

SEQ ID NO: 339023 - DNA, 122 bp, Homo sapiens
gagctaactccgacccgggtaggagtgtgcgactgaaacttctaaaccatagaagagtgacgatgtggagagggacgggctgcatgtgctccccgcccccgagaggcctgcgtcatgcggtc

SEQ ID NO: 339024 - DNA, 122 bp, Homo sapiens
gcagctgccgactttcctgttaagtgccagggcctgggaggtgcggggctgcagctcaggcgctgaagggggcctagggtccaggaacctcctgccaagccagtggtcctcagacgctggtc

SEQ ID NO: 339025 - DNA, 122 bp, Homo sapiens
gtctcagagttgaacaaatgtacaatcgggttttacaccgcgacattcagttcccagcggcgagcaggagacagtggacttctctctctcaactgcaagaggctttcgtcttttactaaccc

SEQ ID NO: 339026 - DNA, 122 bp, Homo sapiens
cctaaaagcaaatgggtactgaccctgccctgcttaaaattctctcagggctctgatttgcgtcaggataaaatccaaacgccatcggccttgcgcggttttcttccagttccagagtgtca

SEQ ID NO: 339027 - DNA, 122 bp, Homo sapiens
gtaggctgggggaggggcacaggtaataaagtaaatacctgcctacctggttcctgaacacgtgattcattgccaggtgtgggtgcggggacgttcccggaagtgggggcctggcgggaaat

SEQ ID NO: 339028 - DNA, 122 bp, Homo sapiens
cacctggaccgcctggtgcccctggtggaggatttctgcaacctggatgatgatgagctccgggagtcctgcctccaggcttttgaggccttcttgaggaagtatgtatggtggggttgcct

SEQ ID NO: 339029 - DNA, 122 bp, Homo sapiens
agaggacgctgtggcaaagagtgtcgctacacaagctcctctctggacagtgaggactgccgcgtgcccacacagaaatcctacagctccagtgagactctgaaggcctatgaccatgacag

SEQ ID NO: 339030 - DNA, 122 bp, Homo sapiens
agcctccccagtccccatgccagcgctcccacttttctctgagctttcggtggcagacagcgccttgggcactttttcatgctcataattcgaattacctgtttaagtcggtcaaatgaaaa

SEQ ID NO: 339031 - DNA, 122 bp, Homo sapiens
tgagcacacacagaaccgcctgcctctgtatctaaactgtgggctgaaatgctgctttggcgcagtctaacagaaactctctgaaaccctctcccagggtgcagtcctcagtaagactcaat

SEQ ID NO: 339032 - DNA, 122 bp, Homo sapiens
gcttccagtcaatgcattcaccatatctgaaaatacttcagttatacaaagggaacacttcgagagtaaggatatattataaataagtctctcagcaagatgaacggatgaacagttcaatt

SEQ ID NO: 339033 - DNA, 122 bp, Homo sapiens
ggggaccccgtgaggctcggcttgccccgcccgtcttcggcgaggcgggggtcctcccggcgatcggcagcgcggcccaggacacgtcagtcttaccacttccgccctcaccggcggcgacc

SEQ ID NO: 339034 - DNA, 122 bp, Homo sapiens
cttaaatgaggatgattttacaacacaatggggcatttggcaatgtgagacatttttgatcgttccaacttgggggcaaaattaccagtggtgctgaggttgagaagccttgtgtcaagggg

SEQ ID NO: 339035 - DNA, 122 bp, Homo sapiens
cgcccctcctccctcattcccagcctgggtttggaggcgatttccctctattgactgagccgactgcatctctgggcaagcggcgctttgcctctctcctgtctttgtctgctcttcctgca

SEQ ID NO: 339036 - DNA, 122 bp, Homo sapiens
agagccctcctccccgctgagaggctgggaccagcccgaggaggagccgttttggcttcccgctctggctcttcaccaccgctgcggcgaacgctcttcagaacccacagcggcgcctgcct

SEQ ID NO: 339037 - DNA, 122 bp, Homo sapiens
caccctcaccccgtgggctccgggacccctcgactagctccatcacccattccgactacccgccctacgctccacctcttgacccgtcatcaccgaccggggggcgggactgcccgactttt

SEQ ID NO: 339038 - DNA, 122 bp, Homo sapiens
ggcggggaggcggctgaggcggcagcggcggcagccagccggtgctccgacagcccggggcgcaccctagcctcgccgccctcagcctgggacttggggatcgggcgcttgcccagcccgcg

SEQ ID NO: 339039 - DNA, 122 bp, Homo sapiens
gctttcgggagctggaactcacatcgcttctgcgccgctgcaacatgcctggatgctctgcgctgtgggcgctggctcatcgcccctctgattcacaccgttattaaaccagcactcgggca

SEQ ID NO: 339040 - DNA, 122 bp, Homo sapiens
agcgggttccccctgaccggcccggccggcgcaagggtgggggtggagggggaatggccgcggccccgccttatagttggccctccgccagcgccgccattttgttctcgacggagatggct

SEQ ID NO: 339041 - DNA, 122 bp, Homo sapiens
cagaacccaaaagcccatgttcttcacctggtgccaatttatacaacgaaaacgcaaaaccggactgggttcttggggcagcaggtcagaacattcttgtagatttaaatctggaagctgat

SEQ ID NO: 339042 - DNA, 122 bp, Homo sapiens
gagacccactgtgtcggagaaataggagacaggatccagaaacacagccacctgcaatgccgcctggtgatacagcatgaggattttctccagcaggatcacagttacacaggagaggttga

SEQ ID NO: 339043 - DNA, 122 bp, Homo sapiens
gaaagtggttttagcccagctggaggaaatgggccgaagcgggattcgaaccggcggattcgtttctctgcagcccggagccgcgtagccccgccccggtctccctagaaacaggcacccgt

SEQ ID NO: 339044 - DNA, 122 bp, Homo sapiens
ttgggcggtcgatgggaccaggcgccgtggagcagggggtggcgcccgtcagggagccttcggccgtgcaggagcccacggggttgggggttgggcttgcccatggcaggctgcaggtcctg

SEQ ID NO: 339045 - DNA, 122 bp, Homo sapiens
tgcagcaggcgagggacggggctgggcccaggctgtggcgagtcctttcgggttgtgtgacggccggcggtcacacatgccacacccccaagcctgggccgagggccatcccggtcacacat

SEQ ID NO: 339046 - DNA, 122 bp, Homo sapiens
gggtacaggtctcgggagcgcggtgattgggtacaggtctcggccagcgcggtgattgggcgcaggtcccagccggcgcggtgattgggcgctggacccggcccgtgccatgattgggctca

SEQ ID NO: 339047 - DNA, 122 bp, Homo sapiens
tgctgggacacagtggaggtctaacctttggtttgcggagcggtcgggtgtattctccgccgcccccacgccctcgaggtccccgccaccgaaccagcggcggagcccgcccgcgcctcccg

SEQ ID NO: 339048 - DNA, 122 bp, Homo sapiens
gaggaaagacaaagacgttggcaaggaactttcttctggatatcagggtgtatttgtttgcgtgggtgccacaacaaagtaccacgagcttggaggcttaaacagcagaaatttatcttctc

SEQ ID NO: 339049 - DNA, 122 bp, Homo sapiens
ccttttcactccctgcttagcctggtctctatcctgggtcactgccactgtgagtagtttcgcttctaattctggccatctggacctctacttcccagttcctgatttttgcctccacaaag

SEQ ID NO: 339050 - DNA, 122 bp, Homo sapiens
aaaatagaatttcccttaatctcgttgattactggtggaatgactcatcttccagttgtacgttgctcttgagttactcagatatttgtataagttagacagcggagggaaaaccactgatg

SEQ ID NO: 339051 - DNA, 122 bp, Homo sapiens
gacgtactgaatcagaatgcccgggagccaggcccaggaatttgcattttaacattaacccggtgagtcttattggcactgagtttcagtcccacagcctggggttcgtggttgtctcctat

SEQ ID NO: 339052 - DNA, 122 bp, Homo sapiens
agggtcgggtgtgacccgcggagccgctgccaggcttcccagctcgtcttcgcggggaggcgggaggcaggaccagaccccagcatttcagcgtgaaagtcttcgcctttctttccgcgctg

SEQ ID NO: 339053 - DNA, 122 bp, Homo sapiens
ctgaagaaggaacgaggaataaactctgggagtggaagcgcgcctcggcagacagatccgcgggcgctggggcagccaggagaagccccggcatccgcttgtgaggtccggggctgtggtct

SEQ ID NO: 339054 - DNA, 122 bp, Homo sapiens
ctgccctccaacttaccctctgccttacatgagaggtaccaaggactgagtggccatgctcggtcaccctgaattggttcttctacagttatggtccccaccagtccccgggttttggttgg

SEQ ID NO: 339055 - DNA, 122 bp, Homo sapiens
tcccacgttactcagcaaaaaccaaggaattccagtgggcacagacgttactaaaaagcacgagttcggactagaagcagcctcgtccgtgagctacgacgttttcacgccttcccacgcag

SEQ ID NO: 339056 - DNA, 122 bp, Homo sapiens
accctgctagcacgtgcagattccgggccctcggagcccggcgcggacctcgccttgcctcgcgcttccctttgcacgtcccgtgccatcccaagagtttgcgtggccctgggtgggcgcct

SEQ ID NO: 339057 - DNA, 122 bp, Homo sapiens
gggattttgctgaggccagctttggaacaggggaggtgagtctggagaagagagtttccacgttgtcatcataggatctggactcaagtgaccaaaaccttgcttggatttttacctgatga

SEQ ID NO: 339058 - DNA, 122 bp, Homo sapiens
tgccccgaaagagctgtcctgtttgcttcaggacaccggctttggcgcttgggacaaccacgctgggaactcccactgcgctaggttctgggcaccagccccgctgcccgcgggcgcctgct

SEQ ID NO: 339059 - DNA, 122 bp, Homo sapiens
aacttgaaagggggagctggccgcgtaggaggtgagagccagccgcaaaaatccgttcggcggcattttctcttcaaacccgcccggtcggatgtggcatttgaagaaagaaggcgtgggtc

SEQ ID NO: 339060 - DNA, 122 bp, Homo sapiens
gacgaggctgtgtgcagacatcctgacgcaggagccagtagacaatgcccagctgcccagcgctggccccgcatcacactggcatcgtgcccaggcagccccagctctgaggctcctcccac

SEQ ID NO: 339061 - DNA, 122 bp, Homo sapiens
accaggactccgaggacagcgtggcctccttctggctccagagccctgtggggtccgccacggcacggacctgcctttggtcaccgtgcagcctcagaaccctgctgtgctttctgagcccc

SEQ ID NO: 339062 - DNA, 122 bp, Homo sapiens
gtgagtatgtatctatcctctgataaaacaagtctacttgtatgtatacaaggtctgttccgcatgaaactcctgctggggaaggacttccctgcctccccacccaagggctacttcctgac

SEQ ID NO: 339063 - DNA, 122 bp, Homo sapiens
caggctaaggggttgccagcaggtgaggggcctacccggtgcggcagccttgttggacagcgaggctacctcctgccctctgaacttctgccagcatcgggaccaccccggtacccacagcc

SEQ ID NO: 339064 - DNA, 122 bp, Homo sapiens
aaccctcacccccgtgccgcctgtctcctttcttccccaggcccgcccagagctgagctccgtcctccggctgctgcccaaatcaggggtcgtggacaaaggatgcctggggcctgcggccc

SEQ ID NO: 339065 - DNA, 122 bp, Homo sapiens
aagatgcccccaaagatcctggtacacctgatactcacacccttatgtagtgccctttcccgatgaaccagggttgtgtgtgtgaccaacagaataaagcaaaagggatggtatgtcgcttc

SEQ ID NO: 339066 - DNA, 122 bp, Homo sapiens
cccatcctgaaggcagggggcagtggtgtggtcaccttaataatgcttcgtggccgggtgcggtggctcacgcctgtaatcccagcactttgggaggctaaggctggtggatcgcttgaggt

SEQ ID NO: 339067 - DNA, 122 bp, Homo sapiens
aacccgtgtacaggtggtctatggtgcccaggaccgtctggcccctgtggctcctgaagccgaacaacttcatggtggtgacttctcagactcccaaccaactgctcttgagaggaggcagc

SEQ ID NO: 339068 - DNA, 122 bp, Homo sapiens
atgttaagtgatgggaaacatggttccgaacctggatttagtcacccagctactgagcttcgtcctgtaacctgactccatttcctttgctacagttgatgctaatgccttgtgaagggatt

SEQ ID NO: 339069 - DNA, 122 bp, Homo sapiens
cctcactgcgcttctctagccccaggctcagcctgactctcacctctttgtctcttatttcgataacgagtgtttcggcgtgggccaggttgcagggccggagccgcagccgcaccccccac

SEQ ID NO: 339070 - DNA, 122 bp, Homo sapiens
caagaaaacagaagaattaaaaatcctccttccggggtgcaccagaatcctcccatcgctcggtcctgtcacgtgaccacgcctactacaccagccacgtgagcttctgagccggcttccgc

SEQ ID NO: 339071 - DNA, 122 bp, Homo sapiens
ctaaacatctcccctaaagggaagcagggtgggtgggggtgagggggctgccatttcttgcgtacctactttgtattcttgagtcagcagtccatagccttggtgaccaatatgggtcaaag

SEQ ID NO: 339072 - DNA, 122 bp, Homo sapiens
actccttttgccttgacccgcctcctagaaggggtagaccaccgtcctttcgttggtattcgaggcccccagacttcccagggacccagcctctcagtcctgcctggcccagttcagcccag

SEQ ID NO: 339073 - DNA, 122 bp, Homo sapiens
taattcacattgaaaaaccccaggttggatgcaacaatggtgttttccttttcctccttccgaaccacatttggaattatcctcaaattgagcgttctgagaaatctgccaatgttctgcta

SEQ ID NO: 339074 - DNA, 122 bp, Homo sapiens
agactctgaaaggtcagaaggctgtcttagtatgcattttagtacccaatccactcccgacgttacataaagctccaaaaattagaattcggccctcaaaccccacaaaaggaattaatcaa

SEQ ID NO: 339075 - DNA, 122 bp, Homo sapiens
gattttttttttttttttatgtgtgcctctccccttcccaagtgatttacatatgttccccgctcctttcagggtaatttacatgtaatgccccgcccctttccgggtgatttacgagtgcc

SEQ ID NO: 339076 - DNA, 122 bp, Homo sapiens
tctcccctggagagtggctagtggatcgtgcacccaccctcggaggcccggagtggatcccgcgcgaccgagcagccactcagcaccgctgttgagtggtgggccgcgccgcaggctcaaca

SEQ ID NO: 339077 - DNA, 122 bp, Homo sapiens
ctaagggaggggagcagctcatgccgaggaggaagtgtgcggaaacgggtaccctggaaacgggaggagcaggcaggaatccaacacccatcccagccccgcgggcactgacagtcgctgca

SEQ ID NO: 339078 - DNA, 122 bp, Homo sapiens
tttttccagactatcaacatacttcattcttcccagtaggagaacccagggcctgttccacgcccacagactttggtcaggcaaagcggccgcagggcgtctgggctaaacgcaaccaggaa

SEQ ID NO: 339079 - DNA, 122 bp, Homo sapiens
gggcacccccatgtccttttctcccccaagtggctatagttgctttctgttgtttattcccgagagcccagactgatataccttctttgaggaggaaaatacgaaatctgaaatacgaattt

SEQ ID NO: 339080 - DNA, 122 bp, Homo sapiens
tttaagatacgcaccggctcagtggatttacatctaaaaagctgagcatttcaacaaagacggagtggggttttttgctttcagaagcagaataaaagcagttaatcatataatgataggtc

SEQ ID NO: 339081 - DNA, 122 bp, Homo sapiens
agccctgcatggccacgaggcaccggcgcccgctgggctgcgggtcagagggattctggacggtgaggttaccttgtccttggcgtccagtggtttgatctccccaggctggacaggaagtg

SEQ ID NO: 339082 - DNA, 122 bp, Homo sapiens
cttaacaatttactcttttctatgtgtgagcatggatatagtgcaccattcaaataaacccggccttacataggtttctaagtttgctctccctccactctcaataaagccctaaaccaccc

SEQ ID NO: 339083 - DNA, 122 bp, Homo sapiens
gaatggagaaacacgtagacttaataacattggcagactaggaaggggaagaagttaggtcggttttaggaaaaacaccaagatgttggggggcacgttggccttcagtcagtggaaagagt

SEQ ID NO: 339084 - DNA, 122 bp, Homo sapiens
aggaggaaacaggtccggacgggcgggccgacctcgagccgccggcactcggggcatctgcgctggtgctgggtgcaagccagaagccactgaggcagctggggtcttcagggaaaggagag

SEQ ID NO: 339085 - DNA, 122 bp, Homo sapiens
ccattggatataacacttacacccactcagctccctagctggcctcctctcagctgtgatcgcctcttccctgaagagctctctgaatttgagtaatgacatggctgtaccattcattttgt

SEQ ID NO: 339086 - DNA, 122 bp, Homo sapiens
acaaaagggaacagtttcaaagttctgagctttctcagacaaacctatcatacatccaaccggcctaaattggtgcccaaaaatgttcaatgagaattgacacacggtgtagtgctctaagt

SEQ ID NO: 339087 - DNA, 122 bp, Homo sapiens
tatccccgtttctctgcgctagtctaattagtgcctggcaagttgaaggcgctcagtaaacgtttgtggagcgaagaaacgacggatagggcgtaatgagcacgacacacgcaatcagagag

SEQ ID NO: 339088 - DNA, 122 bp, Homo sapiens
acggcgggagtacaaggagcaatggcagcgggagctttgtggctgctgggccgcaccgcacgggagtcaaacctgcggccgcaacgccgccagcagccggaacctgcggcgcgcagcctcag

SEQ ID NO: 339089 - DNA, 122 bp, Homo sapiens
cctgcactgccctctctgaaaacacccacattctttggtcactgtgatttcttaggcctccgtctgttgtaccactagcatctatatgacttttgtgtaattttctctcttgaactctggtg

SEQ ID NO: 339090 - DNA, 122 bp, Homo sapiens
acctcaaatgatcccccgggctcagcctcccaaaatgctgggattacaggcgtgaaccaccgcacctggcctcatgttcttaaatgtaaaagattcccagtgaagtgttctacataatgttt

SEQ ID NO: 339091 - DNA, 122 bp, Homo sapiens
ccacggattaggtgaataagatatttataatttggtgtgttcatctcaagttatggattacgagtgcggggcactagtgctttagattggtaaatgaatcatcaacagtcgccttgaaaatc

SEQ ID NO: 339092 - DNA, 122 bp, Homo sapiens
cattctcacatcgcatcactctcatgccgcctcttgtgtctccctcttcctttctgattgcgttgggcctacctgggtaatctaggatattcttgctatttcaggatcagccaattaccaac

SEQ ID NO: 339093 - DNA, 122 bp, Homo sapiens
aagtttttttttttttttttgtagtcaccagaggatatctctttatttcctttccaggtacgtattaattgacatgttacccatcatctcttgtttgtgcaggagagatgtggtcccggctt

SEQ ID NO: 339094 - DNA, 122 bp, Homo sapiens
agcccccggtcatccaggatgaggctgcggtgacactgggggcaggtgatacaggagttgcggggcaccggggccagggccggtgacaagtgggtggccggtggcggcatagccgggggaaa

SEQ ID NO: 339095 - DNA, 122 bp, Homo sapiens
gttttttttgacaactcttgtaatccgtcactaccctcctctcagtgctgggagcaagcacgcctcagggaggaggcaagatttcctctatgtatctattttgagacagggcctcactctgt

SEQ ID NO: 339096 - DNA, 122 bp, Homo sapiens
ggcacaagacacaggtcataaagaccgtgttgataaaacaggttgctgtaaagctggccacgacccaccaaaaccaagatgatgatgagagtgacctccggtcgtcctcactgctacactcc

SEQ ID NO: 339097 - DNA, 122 bp, Homo sapiens
ggcgggcagaggcggcggcgcacaggaacctggctgaacaccggcacgctcaccatgctgcggtcctcctgcatggtgaaggggttcacacagcccagacacaggcaccgtgcctccggcag

SEQ ID NO: 339098 - DNA, 122 bp, Homo sapiens
ttggttaaatcatttttgacggacaggcccacgttattgacttcttttcgacgacgccagcgaccggaagcagaatagaggcgccagaagatgcgccatcaggatacacattggccaatcag

SEQ ID NO: 339099 - DNA, 122 bp, Homo sapiens
tcctcaatttccaacttagcatcttggcaggacctttgcaaaggcaaaagcagagccccccggtgcaaagagcgaggggaaaaaagagaaagcagcaagggaggggaggggaggggaaaaaa

SEQ ID NO: 339100 - DNA, 122 bp, Homo sapiens
actgtaaatctatcagagcagagccgggggcacgggcacaggtgggagttgggagcaaagcggaggcccgggctgcccgccgtcccccttcatctccccacggactgtaccaggcagctggg

SEQ ID NO: 339101 - DNA, 122 bp, Homo sapiens
gaccaggtgtcacagggcagaggccaaaccacaactcccagcaggtcacgcggagtagggcgggtaagcgcgccttcttattggatggcgatggacagcgtgctcttacgacccaccccaga

SEQ ID NO: 339102 - DNA, 122 bp, Homo sapiens
tgcatcctgggagttatagtttccggctccctccttcagattacaagctccacagagccgcgggaggacggttgcctggtattattagcaagcagcaaatatggcggtggcgcgcgtggacg

SEQ ID NO: 339103 - DNA, 122 bp, Homo sapiens
ctcgtctctagacccccttagcctggggataatggacttgtctggggggccccttcattgcgacgcacttgaaccggagctggaagctccgccactgagaccctctgggctgggagatgtct

SEQ ID NO: 339104 - DNA, 122 bp, Homo sapiens
ttgagtctcagctcctggcttagttagtcataaggcctcaagaaagtcattcacctcttccggcttctcttagcttgtttgtagaatgggaataacagtttctatctagaagggctttggga

SEQ ID NO: 339105 - DNA, 122 bp, Homo sapiens
gtccaaaagaatgctgcattataaccaccagggaaatgataaaaagttcatgttcacgatcgcccggccacatgaccggcgccggccaatcgctggattcaaccactcataaacttctatca

SEQ ID NO: 339106 - DNA, 122 bp, Homo sapiens
ggacttcctttttccactaggcggcaccacagccaaagtgataagaagtcaagcgtggggcgggtggctggagattgtctcttcccctccttttgctcaagaattcgtccattccttctcca

SEQ ID NO: 339107 - DNA, 122 bp, Homo sapiens
ctgtaattgatgcattgtggcccctgatcttccctgtctcacacttcttttctcccatcccggttgcaatctcactcagacatcacagtaccaccccaggggtggcagtagacaacaaccca

SEQ ID NO: 339108 - DNA, 122 bp, Homo sapiens
accttgggcaaattacttctcctgtctgggcctctatctctcatctgtacgacaaggaggcgacttcacggcctcctcttgccccctcggttccaacaatttcattattggagtcgtcttcg

SEQ ID NO: 339109 - DNA, 122 bp, Homo sapiens
ctcactcaggaagcagcatggccaagtggcttggagcttggactctggaggctgactgcccgggttcaaatcccatctctgccactcgttggttatgttaccttgagcaagacaccacttcc

SEQ ID NO: 339110 - DNA, 122 bp, Homo sapiens
gtgcagctcccgggaggggtgagaacagccagccacctggctgaacttgctgggaaccgacgtcaggagcaggagctaggctgcagtgggcctcacgggggcctggacggggagagcggctc

SEQ ID NO: 339111 - DNA, 122 bp, Homo sapiens
cagccacaggagtcctccaagccagatgagcccgccctgcggcactgccagcacttgggacgccagactcccttcaggcggcgggccccaagggcactgcgacagctcagcacccaccacag

SEQ ID NO: 339112 - DNA, 122 bp, Homo sapiens
cccaaccaaaaaaagactactgacaagggaaaccactcttctgcaagtggccacctgccccgaagggccccttcccttctccgccagatccagcacatctgtgctccctcccctgtgccctt

SEQ ID NO: 339113 - DNA, 122 bp, Homo sapiens
ggagagggtcccaccctttgtgttcgctccctccctgccctcatctgctctgttgacaaacgttttctgccagatgaagtgtttctgctgtgcctgcctctctgggagggaacgtggagcag

SEQ ID NO: 339114 - DNA, 122 bp, Homo sapiens
cccaagtcctcagggaggcatcattgtctgctaaactaagtactgcacgcttgagctgggcgcacagagcccttgctaaaggggcctcaacctcgagctttctctgccatatcttctctgct

SEQ ID NO: 339115 - DNA, 122 bp, Homo sapiens
gggaacctgctgaggtggggtgggggctcccgggtgggcggactcgggggtgatagccgccggttctgccttgcagcagcagtggacgtcagctcagcgaggtcttcatccagctgccctcg

SEQ ID NO: 339116 - DNA, 122 bp, Homo sapiens
tcctctagatggtgacagcgcgtcttctcccccacagctggggatgttcgtgctgcagctcggcgtcttgtccacctttttgtccgagcctgtggtcaaggcgctgaccagcggggccgcgc

SEQ ID NO: 339117 - DNA, 122 bp, Homo sapiens
tgatgttttgaaaattcatttggaaatagaaaaagtgacccatagatttcaggttagtgtcgtgggatgaagatgagctcacctgctggagacaattctcttctggaaaaaatccgattccc

SEQ ID NO: 339118 - DNA, 122 bp, Homo sapiens
ccgcccgtctgggtcctcactccgccctcccgccgttggatttgcgcccggggcggcccccgactttgcgccccgtagttgagttccgtttatggtctgatttccggcctctcgcctgctcg

SEQ ID NO: 339119 - DNA, 122 bp, Homo sapiens
tgtgatttatggtgaacatgtgtttttgctttgggggtttggagtctgagcagctgaggtcggtgacacaggcactgaatgctctgcctctacacaaagcccacatagccctctacacaaaa

SEQ ID NO: 339120 - DNA, 122 bp, Homo sapiens
gccggagagaaggggctcccagtgaggctgattgaatgaatgatgtttgcagtcacttaccggcggagggtgaagtagctcaggcggccgccaggctgcgtgcggccggcatcccggggcgc

SEQ ID NO: 339121 - DNA, 122 bp, Homo sapiens
cggccctcgctctctgccctaccagcccccggagcgggagtgatttatgcgagggtttgacgtggcagcccaattaaaagtttgcaagtgtgttgagctggcacagaggagggatcccccgc

SEQ ID NO: 339122 - DNA, 122 bp, Homo sapiens
acctcatttgcatgacgtaatataataactggaaggccccgcccctctggtgcatttccccgctccaaccacctcctcaaactcacggcaaagggatgcgagagctggaactcttaccaggc

SEQ ID NO: 339123 - DNA, 122 bp, Homo sapiens
ggcacatggcgcgggactggcaggcagttccacctgcagcccccatgcgggatccccatgcgggatccccatgcggaatcaccatgggtgaagccagctgggctccagagtctggtggggac

SEQ ID NO: 339124 - DNA, 122 bp, Homo sapiens
agcatagtttccggcggatatttctaacgagagcctggtgggggagaggggttgtctacgcgtcccgagggtgtcactgatcagctgctgttctgagtcctgattttctttttctttctttc

SEQ ID NO: 339125 - DNA, 122 bp, Homo sapiens
ggtaaagaccttgtgaagtttagcatatatggagtatgcagtatcagcttgaagtgacttcgcagaaataatattttatattgattaaatgtgtgcatgttttgtttgttttttgagacaaa

SEQ ID NO: 339126 - DNA, 122 bp, Homo sapiens
tgctgacccctcatctaaaaaataggctatactacaattgcacttccagcactttgagaacgagttgaataccaagaattattcaatggttcctccagtaacttctgctagaaacacagaat

SEQ ID NO: 339127 - DNA, 122 bp, Homo sapiens
cactgtggtgctcctgccaacccagatgccctggggtgttgctaaatcaacctcagcaaccggatagtttgttggaggcgggaaggtacgccgtgggttccgccgcagccagcgctggggct

SEQ ID NO: 339128 - DNA, 122 bp, Homo sapiens
ttggtcagaactcagtcatgtggctccatctaactgtagtggacatggagaaattagtctcgctgtgtgtcaggaggaaatgaaatggatttgggggacacataacagtgtctctggcacaa

SEQ ID NO: 339129 - DNA, 122 bp, Homo sapiens
aatactgaacaggtctatgaaatggtgtgggtaagagatgtgggtgtgggtaaggggcaacgcaggaggctcacggtcccctccctgcagcagagcaacagagggtaaaagaagggggaggg

SEQ ID NO: 339130 - DNA, 122 bp, Homo sapiens
gctaaaacaatgagggacagcgttccagtagccctgccacagctctctcatcctctggtccgccctcactcaagatggctaccagcaagaatggtgcaatggcgtgacagctcggccctggt

SEQ ID NO: 339131 - DNA, 122 bp, Homo sapiens
acagagtaaacggtgaatccatgcatctcagagaacacagaacaatagcataacacccctcgacacacacacacacatttaggtgaatcttattaaaactgctgaaaaccaaagacaaatag

SEQ ID NO: 339132 - DNA, 122 bp, Homo sapiens
actccttcaagaattttacctacctacagttcaagcagttactgggatgtcctgactaatcgaagatgctgccgcgcgcgtgggtcgctctgcgcaagggcctcttcgaaaacccgactagg

SEQ ID NO: 339133 - DNA, 122 bp, Homo sapiens
tcctagaggatcgcttgagttcaggagttagaggtaacagtgagctatgatcctgccaaccgcactgaagcctgagtgacacagtaagaccctgtctctaaaaacaaacaaacaaacaaaca

SEQ ID NO: 339134 - DNA, 122 bp, Homo sapiens
cccctagaggggtccctgttttaggacagaaacaaaacccctgaatgacttccttactttcgaaaacagcctcccatcgaattctgtgaaggagctcagccactgattagaaataaaggttt

SEQ ID NO: 339135 - DNA, 122 bp, Homo sapiens
atgggtggggcaagcaggtggtgaggctttgagtatacagcacatcatacttgtaagatacgggatgaaactgaggtgactgtggctgattataaatgcaaagtaccttgtaacaaggagcc

SEQ ID NO: 339136 - DNA, 122 bp, Homo sapiens
tgcactgccaggaggccgggagcccagcgtgcgagcgtgaggtcagactgtgcacggtaccgaggactagttccattcctgagtatgaaagggtgaaaccgttcacctcaagtttcaccccg

SEQ ID NO: 339137 - DNA, 122 bp, Homo sapiens
gggccggatagttcctacgattacgcggggccggatggttcctacaataacccggggccgcggagacccgacgtcatctcggggctgaggctgccctaccattacagagcggcccgggggcg

SEQ ID NO: 339138 - DNA, 122 bp, Homo sapiens
ttgtcttctgagaatatcacttgaagatttagatgaaagtatttggaagattgctgtctacgatttgtcaaccgtggctgacaactaggacgtgggaaagtagagaagaagctgataaagat

SEQ ID NO: 339139 - DNA, 122 bp, Homo sapiens
cagcctcactccctaaaacaaacggatatttggctttgagccacattattctgcagcccccgtattttcttccaggcaggcccttcctggtgtagacaagatcgggcttgagtgacactcct

SEQ ID NO: 339140 - DNA, 122 bp, Homo sapiens
aaggattttccagccttgcagagaagcctagtaggtaatcaatcatgagaatataacatgcgaagtgccatcaggctctgaaggggtacagagaagaaagcctttgcccagggatctaagcc

SEQ ID NO: 339141 - DNA, 122 bp, Homo sapiens
caggaactagacggtgcgggggcaccgaagttcacacgggaagaggtgggatgatgttcgcgtattaaacacacagaacgctgacacaggcgcacgggacagccacggctcctctgctgggg

SEQ ID NO: 339142 - DNA, 122 bp, Homo sapiens
ctacgtctccgtctggtgcagtttctctttgtctcagtggagaactttggggactctctgcgcgcacgcacgtgcgccgcacggtgccgggctcagacctggcggccctgagtatagaaagg

SEQ ID NO: 339143 - DNA, 122 bp, Homo sapiens
gtaagaccacgggtgcctcgacccggctggtgcacaaggagcacagccatcaacgcctcccgacagcgctcacaggtaacgccctcctctggaccccacgtacgcagtgcaccgaaggcacc

SEQ ID NO: 339144 - DNA, 122 bp, Homo sapiens
gctggctgctccgagtgcggggcccaccaagcccacgcccacccggaactccagctggcccgcaagcgccgaacgcagccccggttcctgctcacgcctctgcctctacacctccctgcaag

SEQ ID NO: 339145 - DNA, 122 bp, Homo sapiens
tgtgcgcatcgcgttctccagccaaatcaaaacatgctccgggcccagggtcctgatttgcgctttgtacccgcatccctagcaacatgcaaggcgcacagcaggagcccgacgagtatttt

SEQ ID NO: 339146 - DNA, 122 bp, Homo sapiens
agagggtgccgctgtgcagggtaactgcccgcctgctcccttcctgacctcccctgaccccgaagatcactacctctgtcattcaggcattggggtacatcctgataagtcgtgtcagaact

SEQ ID NO: 339147 - DNA, 122 bp, Homo sapiens
tcctcctccaccattcttatgtgactcattcgtgcccacagctcctctgggatcctttaccgcttttgtgcacacaggctcctggtatgtttttcctcctgacagctggtatctggggcttt

SEQ ID NO: 339148 - DNA, 122 bp, Homo sapiens
aattaacagtggctataaatgtgagtgcagccctgtcctgtcctcagctgctgccctgggcgcactgccttgcgggtcactgtggctgctcctgtgcttcagcgggactagaagctgccgcc

SEQ ID NO: 339149 - DNA, 122 bp, Homo sapiens
tccacttctccgcgttctccgactcctctgatgaggaccgcttctgccgcctccatttggcgcggcggttcttaaaccagacctgttgcgcaacggaggacaaaacagttcagatcaaaggc

SEQ ID NO: 339150 - DNA, 122 bp, Homo sapiens
cgctgcgtgtccggggccacgtgcgccgcctgcgcctgcgcgctgccctccagccgcgcccgtctggccgggctccgcctggcacccgccaaggtgaccctgtccctttctccttgctgcgg

SEQ ID NO: 339151 - DNA, 122 bp, Homo sapiens
ttggacctgctgatctgaaagatagcgttaattccacactgtatttcatagatgggatgacgtggccagaggtgctgcgggtgtactgtgagagtgataaggagtaccatcacgttcttcct

SEQ ID NO: 339152 - DNA, 122 bp, Homo sapiens
agaacacaaagcattcatacactcccgagcagggagagctggaccaggagcgcccctccgcgctgcccttgccagaacgccagtggagctggcagccgagtgtgccgctcccgccctcagag

SEQ ID NO: 339153 - DNA, 122 bp, Homo sapiens
ctgttcttccctggctccagcattaccaaagcacacagtaagaggactgacatcggcctccgacccagtgaggattactttcggggtggagggggaactgctaaacctcgaatctccgggac

SEQ ID NO: 339154 - DNA, 122 bp, Homo sapiens
gggtaccgtgaatatttagtgcctccttggtctttctgtcccttttgatctctgtacacacgaatatgttgtactatctacagatgactaatttagttatctatgtgtaacacttcttttga

SEQ ID NO: 339155 - DNA, 122 bp, Homo sapiens
attcagcaaatatttgctaaatgtaatttaaacgtgattatttaaatcacaaagatttagcgacacaccttttagggaaaaagagataaaggtaaacatttctggcagaaaacccaatttat

SEQ ID NO: 339156 - DNA, 122 bp, Homo sapiens
agggactcccgggtccatagagatctggggagggtggggggagcaaggacgagtgcctgccgggacccccctggctcctcgctcccaaggagtcgaggggaacgtctctaccgcgctgcaaa

SEQ ID NO: 339157 - DNA, 122 bp, Homo sapiens
catccagtttagcaacagcagagatgacgactctgcgattctgagagtccctggcgagcccgggctagcgaaaagtgggggcagaacgaactacatctcccatcgtgccaggaggcggtccc

SEQ ID NO: 339158 - DNA, 122 bp, Homo sapiens
gctacctgtgctcttacctgtcggcgctgagggcagtgagagtgaacacggaaacccccacggaagtgagctggatgacagggatcagtttgcagcccaccttgccaaacatccactcgtcg

SEQ ID NO: 339159 - DNA, 122 bp, Homo sapiens
ttaacctaagtttcggtcgtgtttctaaaatggcctctgtaaatctatgaggcttatgcgcgagtactggttgctgcattaaaagacaaacttgtcacgattggctttgatagcgataaagg

SEQ ID NO: 339160 - DNA, 122 bp, Homo sapiens
tgtcgtgcaacgtgtggacccggcctagtagaaggtaggcctgtcgcgtaaggtgcggcccgccctagtagaaggtaggtgctgcgtaatgtgcggcccggcttagtagaatgtaggcctat

SEQ ID NO: 339161 - DNA, 122 bp, Homo sapiens
ggccccatctattgcagggggctgaccattgggcagggctgctgctcagacacttaggcacgtgctggaacacaaggtccggaggttccctgctgagccaggcccatgctcagcaccttcca

SEQ ID NO: 339162 - DNA, 122 bp, Homo sapiens
atccgcagcatccacccaccgaatctggcaggattttctttctgccaccggctcctcggtcgggagttgccttttgatgctgttaacattcagcttcgaggctccctgccattccccttcgt

SEQ ID NO: 339163 - DNA, 122 bp, Homo sapiens
caactgcccggctgccaaacagaaatgctgatgcctgggcccactctagccatttggcctcggcatcacggtgcgggagcgtggggcgcagactcgcattgtcacaggaacctcccggcctt

SEQ ID NO: 339164 - DNA, 122 bp, Homo sapiens
gttagagaagacctgtcacaaaacgatgcaatgcacaaactgggccaatgggatcttctacgtggtatcctcaaggagggttcgtatttacaggactgtacaactgtcaaaattgagacagc

SEQ ID NO: 339165 - DNA, 122 bp, Homo sapiens
tcccattcactcgttcatcttgtagtcattcagcaaacatttggaagcacgtatggcgggcgttaggagtgaagtagggccgggcacggtggctcacacctgtaatcccagcactttgggag

SEQ ID NO: 339166 - DNA, 122 bp, Homo sapiens
tccctcccagagtttcccctgtgagcatctgcgtaaggtgtgggtatttgtgacagtcggcgaacctgcatcgctgcgtcttcgtcacccggaggccatcgttacaggagggttcacgcctc

SEQ ID NO: 339167 - DNA, 122 bp, Homo sapiens
cccctccagctccggaggggagcgaggagggggcggggcgcgcctcgagagtgacaggcccggctgccctatcaaagagccccttgggagctgcgagccgcaaccattggcgcctggggcgt

SEQ ID NO: 339168 - DNA, 122 bp, Homo sapiens
ctccaacttggacaatgtcgcctccacctcagacaatggcgcctccagcttggacgatgccgcctccaagtcagacgatgccgcctccagcttggacgatgccgcctccagcttggacgatg

SEQ ID NO: 339169 - DNA, 122 bp, Homo sapiens
agaccctctgaaccaggctcctcgaggccatctggacactgtggcaacatgggcaggaagcggcttccgttgcaaatgatgtccagggaggcgccggcctggcaacggggccacggcccccc

SEQ ID NO: 339170 - DNA, 122 bp, Homo sapiens
atgggtgagctgtgaactcttgtgggcaggaatcttatctgcagcctctcaggttggcagcgctttgggaagccctccagaggatgtttgcgtgtgccacctggcacagagtgggctcttag

SEQ ID NO: 339171 - DNA, 122 bp, Homo sapiens
cccggcttcgcctcccgctgccgccgccgccgccgccgcagccgctaccgccgctgcagccgctttccgcggcctgggcctctcgccgtcagcatgccacacgccttcaagcccggggactt

SEQ ID NO: 339172 - DNA, 122 bp, Homo sapiens
ttctcaggcagggtcgcccggggcggactacatctcccgggatgctgcgcggccgccccgcggaagattgtgaatatgtatcagaatgttaatgattagctgctgctaaatttggtcaaaga

SEQ ID NO: 339173 - DNA, 122 bp, Homo sapiens
ggcaggggtgggcactgcagagaccctccctgggcttagggcgtttactgggtgagggggcggatgccaacacaaaagccctgtagtgagggagtgaggggcgtgggtagtgtggcacctcc

SEQ ID NO: 339174 - DNA, 122 bp, Homo sapiens
ggaggcagcgagagtacgcgtgtgcctcgcgccggtccacgcggggagagcactggggaccgagacccggcaccacctcccggtccgccctccaggtaaggaagcgggactggcggcgcggc

SEQ ID NO: 339175 - DNA, 122 bp, Homo sapiens
agggaggagaaaggcgaagggaggaggtaacagcaggcgggcaactgtaggtaacctaagcggaaaacaaaccaggacgcatgcgcctctagagaacgggttttgaagatgcttcaaaggga

SEQ ID NO: 339176 - DNA, 122 bp, Homo sapiens
cacaaagcagtacttacctttactgtttgcagtatagtctgatatttcattctcttatttcgtgaaaaaacaaatggtggttgaggcccatttcatgacccagtttcagtcgtgatctgcag

SEQ ID NO: 339177 - DNA, 122 bp, Homo sapiens
gcgcctccatcacagggaagtgtccctgcgggaggccctggccctgattgggcgccggggcggagcggcctttgctctttgcgtggtcgcgggggtataacagcggcgcgcgtggctcgcag

SEQ ID NO: 339178 - DNA, 122 bp, Homo sapiens
ggtggcccctgaggagggcaagccttctgctccacaggcaaggacagtcacagctaagtccgcggggggcggcagagagcgagggctttccaggagccaatgagtctttaactccaagagga

SEQ ID NO: 339179 - DNA, 122 bp, Homo sapiens
gggtgggagttggggggggaaactcacgcggcccgtacttccaccgcatctcagattgaccgccgtaacagcaggatgagagggaatgcccctctgctgcacctatattttgcacgctatct

SEQ ID NO: 339180 - DNA, 122 bp, Homo sapiens
ctttgctccacgtcaggctggcgtctggctggggacagtgtccttcccagggtgagaagccggggggaggtcgggcgagggaagggccgtccacattcctggtttctgcgcatccgctccag

SEQ ID NO: 339181 - DNA, 122 bp, Homo sapiens
ggctccttggccgagaactggatgtttcattttgtttaactgacatagctccatgtggctcgtagccactgtactgacttaaacatttgcaagcccaggtctcagcagccaggtcagtggtg

SEQ ID NO: 339182 - DNA, 122 bp, Homo sapiens
tgacaagctcgcatagcaaatgaacaaggagggaaagcaccgcgctcgcacggctttgtccgtgctacaaagcagcctgttaaactattggaactaatgcgccgcagctgcgcgagtgactt

SEQ ID NO: 339183 - DNA, 122 bp, Homo sapiens
cctggctgcagcaggccccatcctcacaggggcccgtgtgagcccatccggccctcacgccgtggtccaggctgttccctgccaggaccactccccttgggggctcgccctccggccctctg

SEQ ID NO: 339184 - DNA, 122 bp, Homo sapiens
cgcgccactcgctcgctcagagggaggagaaagtggcgagttccggatccctgcctagcgcggcccaacctttactccagagatcatggctgccgaggatgtggtggcgactggcgccgacc

SEQ ID NO: 339185 - DNA, 122 bp, Homo sapiens
ccaggtcccgccttctaaatctccccaggtctccagcccactggaattttctcttccaagcgtggccccgccctctccgctcgtgattggccctaagttccgggccccagtttcattggatg

SEQ ID NO: 339186 - DNA, 122 bp, Homo sapiens
aagtctgaaacaatgactcaggcaatgattctcaatatggtgggtggagatttcggggtccgggggagaagtagctgtcagaatctaactatgtcaacattttcaaaccacagagcaaccat

SEQ ID NO: 339187 - DNA, 122 bp, Homo sapiens
gctcatttcctggtatgtggctggggccagagactggctcttaaaaagtgcagggtctggcgccctctggtggctggctcagaaaaagggccctgacaactcttttcatcttctaggtatga

SEQ ID NO: 339188 - DNA, 122 bp, Homo sapiens
ggcgcgggcgcggctgggttcagcacctcggaaagcgcccctcgcggcgccccgggattacgcatgctccttggggcccgccgccttggccgtgcaagtgccaccgtaactggtgagagccg

SEQ ID NO: 339189 - DNA, 122 bp, Homo sapiens
agtagctcccataattatggatattgctattattttctaattactgtttttcttcatatgcgtggaatttgagaataacaatagctaacatgggataatttacaaaatggtgtgagataaac

SEQ ID NO: 339190 - DNA, 122 bp, Homo sapiens
gacatctaggccaggcatagcagttcatggctgtaatcccagcactctgagaagctgaggcgacaagatcacttgacaccagtagttagagatcatgctggacaacatagcagagaccatgt

SEQ ID NO: 339191 - DNA, 122 bp, Homo sapiens
aatttggagatggagtgaactggagatggcaaggaacacttgttggtgctgccgtcttggcgctgggcctgtgcatctgttcctccctctccacagccacctgcagccttggggcaccagag

SEQ ID NO: 339192 - DNA, 122 bp, Homo sapiens
atcccagccagaatcttcgccggccctcagtaaactggattcccactctgccttagttttcgcaggttctccggctgactcaagaaaactgagggcctgtattttgagccaaatattaaaaa

SEQ ID NO: 339193 - DNA, 122 bp, Homo sapiens
gctcaaagcgctgtgtgcccggctcaaagcgcttccgcggccggaacgtcttgtccttggcgaacacctgcttcaggcacagggccatggccagctgggcctggggctgctgtccaggggct

SEQ ID NO: 339194 - DNA, 122 bp, Homo sapiens
cttatctaatgctttcagtccctgatccttcatggttctgtcagcttcttattacagagtcgcatgattcctttcccatttcacgttccgctgactttctgtggggccccaacagccccact

SEQ ID NO: 339195 - DNA, 122 bp, Homo sapiens
ggaggtgctcactgcattgttgctgctgagacatacgcttgcattggatagattcttccacgtgtgtatttcaaatttggcttcatcacaaggcttgtgggggagtgacaaagcagtgtatt

SEQ ID NO: 339196 - DNA, 122 bp, Homo sapiens
agtcagctgctcgcctcatagagtaattgggtgaggaacagaccatttgaattcaccccccgatgattgccatgtggagaaacccttactttcatttcttgttaaatatcaagtgtgggatg

SEQ ID NO: 339197 - DNA, 122 bp, Homo sapiens
agagaggctgggggaggggcgcccgccattgccgaggcttgactaggtaaacgaagtggccgggaagctcgaactgggtggagtgcacggcagctcaaggaggcctgcctgcctctgtagac

SEQ ID NO: 339198 - DNA, 122 bp, Homo sapiens
gaatcgggttggaggactgtggaattccgatgacaaaaacgaaagcagattttcactctccgtgctgcaggagccacagaaagtccgcagtgcaatgaggtttggatgtgactgagaaatgt

SEQ ID NO: 339199 - DNA, 122 bp, Homo sapiens
aatttacagttttattccttttattagtttcccattgctgtgataacaaattaccacaaacgtaatgggttaaaacaacaggaatttattctctcatagttctagagaccagaattccaaaa

SEQ ID NO: 339200 - DNA, 122 bp, Homo sapiens
tgttaagtgagctcagagacagcttgttcagttcttcactcggctatgatcaaagctatacgtttcacataatagccataatagataacactttataaatacaacctcgtttaatcctcaaa

SEQ ID NO: 339201 - DNA, 122 bp, Homo sapiens
cgctgctcccgccgccgcctctgacggggacccggtggccctacaggctacgtccccgggcgcccggctctagcggctcccaccgagtcgagtcctcccgcccgcccgcccgcccgcagcgt

SEQ ID NO: 339202 - DNA, 122 bp, Homo sapiens
ccagccggccctggagtggtgcgtggcggtgtacgccatctgcttcatcctagcggccatcgccatcctgctgaacctgggggagtgcaccaacgtgctacccatccccttccccagcttcc

SEQ ID NO: 339203 - DNA, 122 bp, Homo sapiens
ccattggccgaggctcgctgagacccggatgagcacggggatgcggggagcttgcgggcgcgcgcgctgctccgttaggcgcgcgtgcgctctcgctgcgttccagagggtaagggggcggg

SEQ ID NO: 339204 - DNA, 122 bp, Homo sapiens
ggtgggccctaaatccattatgactggtgtctcatataaagaagagaagacgcacagagacgagacatccagggacaacaccatgtgatgacgatggcagagattggagtgatgcatctaca

SEQ ID NO: 339205 - DNA, 122 bp, Homo sapiens
aagcccacgtgagagggcaggacgcctgagagcttgaggccacacgaggctgtggagcggcgtgactcaaacgtggcgcgcatcagctcgcacacttccaaacctcgcgatagctactggcc

SEQ ID NO: 339206 - DNA, 122 bp, Homo sapiens
gcccactctccggaccctgcactagcggccccggccgggagggcacgaggactgcgcagccggacccccgcaggtccccaagccaggggtcccgtccatccgcccgcccccgcggccagcgc

SEQ ID NO: 339207 - DNA, 122 bp, Homo sapiens
ctttgcttcgggtttgtctaatacaacacagggggaaatcatttgatcgtggacgtttcacgtttctttgtcttcaaaaatgaagaggacattttgtaaaattatcacacaaagatgagaaa

SEQ ID NO: 339208 - DNA, 122 bp, Homo sapiens
gggtccctaagactttgactggttagagcaggcgacgccgagagccaggccgcctacaggcgtctccagccctaccccatcgccggctacagagcgggagccccgagccccagcgccgcgcc

SEQ ID NO: 339209 - DNA, 122 bp, Homo sapiens
ctgaggtcaaggagccccccaggtggccttcccaagacaatgttctgggacagtcactagcgccgacgcagcacctctggagagcctgtctttgataatgtacctgcttcgtgccgatagag

SEQ ID NO: 339210 - DNA, 122 bp, Homo sapiens
ttgtgagcatctgaaggattagagcaggcccacctcgtgagggatgagtgcttctaagaccgtcaatggtagacacacaccgatattcccctcgacatgctcgatttcaggtttttcatttt

SEQ ID NO: 339211 - DNA, 122 bp, Homo sapiens
ggtcgcttcctgttttcaggaggaaatgctcctggagctggggagggctgtgctgccgggcgggcgaggctcccatcctctgagtcacccgccccgctgtctcccctggggaccacacgccg

SEQ ID NO: 339212 - DNA, 122 bp, Homo sapiens
gctgaaacggtaaaggacgccccggggtccctgcaccggaggagagtgagggctgagctgcggggcactcaggctcacaagaccgtcccgccaccgccatttctggcgcgtcccaaagaggc

SEQ ID NO: 339213 - DNA, 122 bp, Homo sapiens
aagtatgaccacaaatgtttcagactaatctcttccaaagatggggcctaatttccctcccgagtgtgggctggacttagtgacttgcttctgacaaagtatgaagccagtgacagtgtatc

SEQ ID NO: 339214 - DNA, 122 bp, Homo sapiens
actgctacaggaggccagatacaaggtagaacttccagtcaagaaccttgaacaggcgctcgttgtgtgagaggggtgatgcggactgtcaaaggtcatcccctaacggctttaaaatcaag

SEQ ID NO: 339215 - DNA, 122 bp, Homo sapiens
caccctcagcaaggaaggccctctcctgatcttcacgctcaagagaatgggtgcgctccccgagggagacaccctcagacccctggaaaccccttccgccctccactcaccacagtcaaaac

SEQ ID NO: 339216 - DNA, 122 bp, Homo sapiens
tccctccctctccgctcccctcacgtgacccacactgacactccgcctgcgcgagatggccgcttacctgcacgcatgcgcagcgagctaccaatcccacccaagaaccgaaatccaggctg

SEQ ID NO: 339217 - DNA, 122 bp, Homo sapiens
ccccagaacaaatgtttcatgttcaggaatctcatgttcctcagaaggaccatatgtggacgtaaaagggatgctccatggcagcatctcctggaaccccatcctaatacagggctacaact

SEQ ID NO: 339218 - DNA, 122 bp, Homo sapiens
tacctaggtgatagcggagcggctgggtaggaagcaattgttctcaaacttcactagccccgtcggcgcggacgcttgtcgagaatgcagattcctgggtactgccagatacggttggtgat

SEQ ID NO: 339219 - DNA, 122 bp, Homo sapiens
cgtctggaaaggcggctccaccctcccccttcacacactcggtggcttgggcctaccgttcgcctgctccacacgcctgctcggggcatcctctggctttttgctttgcgggacgcggaaga

SEQ ID NO: 339220 - DNA, 122 bp, Homo sapiens
tgatggggttgtcctgggtggtcacgggggtgatgagaaaaatgcagaatggaattgctgcgaggatggatgagacgaccgtcagcacagaacagacacccggtgagtgttcagggattccc

SEQ ID NO: 339221 - DNA, 122 bp, Homo sapiens
tcagagcctgcgctggccagggcccgggcacccagggattgctgctgccccagggctccccgtgccagggctccaggccggcccaggcctcgtaggagacaccacatgcttctatctagtcc

SEQ ID NO: 339222 - DNA, 122 bp, Homo sapiens
aagcagcatatctgtcatattgaaggatgtggtaaagtttatggcaaaacatctcatttacgagcacatcttcgctggcatactggagaaagaccttttatatgcaactggatgttttgtgg

SEQ ID NO: 339223 - DNA, 122 bp, Homo sapiens
gcccctgttcccaaggagcagagtccttctcagggcctcttctagaaggagccttggtgccgatggaagggtaactgagcgggaggaggaacctagggttgtgttgtgttctctagttgttg

SEQ ID NO: 339224 - DNA, 122 bp, Homo sapiens
ggttatcagaactgcgtagggagctgtgtgggtcacctgtgaggcccggagcctccctgacgcaggtggtgggtgtcatggctctgctgtcttgtgaaagagtcgtcagtcaggcggcaggg

SEQ ID NO: 339225 - DNA, 122 bp, Homo sapiens
ctcttgggcagcgatgcagaaacggaggttgaccaagggtacgccactccatcattagcccggctccccagggactcacgcagtggcaggaaggaggacttctgccaactgtcagcccactc

SEQ ID NO: 339226 - DNA, 122 bp, Homo sapiens
gacctccttagtcagaggagtccccaggaactgctcttgctctccctctccaggtccccccgctcatcacccctggactgctccccatgccctaaatgggcatcttgccttaccagggtgga

SEQ ID NO: 339227 - DNA, 122 bp, Homo sapiens
gtttcattagcatttggggctcatcctccctccccctcccttgacccacccccctccccccgccggacctctgccaggggcagaagagaaaacagccagttattatacaaacatcctcagtt

SEQ ID NO: 339228 - DNA, 122 bp, Homo sapiens
cgttgactagcggacctcctggtcgtcatggcgactgtgaaatgtagggtggggcgcatgcgttggaagccattcgcgcgggcagtccctgcgtgtccccccacgtgctccccagcgcgcgc

SEQ ID NO: 339229 - DNA, 122 bp, Homo sapiens
tgttctctgcccgtaattgtgagtccccgggccccgaggcagcagggcactgagactgtccggccgcggatgcggggcgggaagggtggagcggatcgggatggacgcggcgccaggcgagc

SEQ ID NO: 339230 - DNA, 122 bp, Homo sapiens
tggtcctgtcaccaccttcctcttccccccgcacccacgccgcggggcggggactagcgccgcctcaaatatttagggcaagggagtgtcccacttctggggaggggtgccgttcgggcttc

SEQ ID NO: 339231 - DNA, 122 bp, Homo sapiens
ccccagtgcactcgaggcggtccctgctcgggtgcccctcccacaggcaggcgccgttgccgaccaaacgcccaggttcacccaacgccagaggctcgtcctcaattcccgcgaggcccccg

SEQ ID NO: 339232 - DNA, 122 bp, Homo sapiens
ctgctccctgcgtgttctcctctgtggagatgagcctaggatccagaatcttcctgagcacggctgtcagctgtgctgtccttcctccttctgcactgagcctcttcccggggcaggagcac

SEQ ID NO: 339233 - DNA, 122 bp, Homo sapiens
cctgcccctccccggcgtctgccccctctcagggtactggggctggtgtcagggtcttcccgagtccggtgcctgtatgtggcccagtttgagatctgtgtgtgtgctttggagacgccatt

SEQ ID NO: 339234 - DNA, 122 bp, Homo sapiens
tgcaatacattaataaattaatgctgttaatttgaattttattgatttgtactttcatgtcgaatttgtaaatctgcttttgttttagagctgtgtaacagctataggagaaaggagtttat

SEQ ID NO: 339235 - DNA, 122 bp, Homo sapiens
aagtgataaaaatggaagagaagaggagctcatgggggaaccgcttggcaggggcacttacgccagtgtaaacctcagaccagtctgggcaacagaatcccctcaaagtcactctgcattct

SEQ ID NO: 339236 - DNA, 122 bp, Homo sapiens
ccagacggcggcaggcgcggaggcgttggtccgggcgggctgtgcagcctctagtggagacggtccgaagactacatctcccaggctgctctgggccgccctgcgtcgtaaccctggcgcgc

SEQ ID NO: 339237 - DNA, 122 bp, Homo sapiens
cggagtggagaagacaggcctcaaggccaatgagcccacctacttcacggtggactgcagcgaggcggggcaaggtgcgcccagccggaaggggtgggtctgggagggggcgggggtgagtc

SEQ ID NO: 339238 - DNA, 122 bp, Homo sapiens
cctttcggggttctttgtccttcgcttctgctggtaggtgaggtttaacagacggaaagacgccgggagcgcacgtgggctgccttgagccgctgcggacgagcaccttgtctctcaggttg

SEQ ID NO: 339239 - DNA, 122 bp, Homo sapiens
gacccaggcgactgacatgttcctctcctctcagctgaaaagctttgctagctctgtctacgcataaagtaaggttaaacacagattttgccccgaagggcattaattagggaccaatttac

SEQ ID NO: 339240 - DNA, 122 bp, Homo sapiens
atggcaacacaacaggatttcctcctagactaaactcctgaacccgaagaaaaaattatacgtgctgctagctgcaaattgctgacaaatgctaaggcgctgtaggaaaagacatgcaaccg

SEQ ID NO: 339241 - DNA, 122 bp, Homo sapiens
acattcccttctgcctgaaattcttagatgcttttagatcttgcagcttcgcacctgccccgagttgtagtcaaagcagtccttcccttctatgaaaccttcctccatctgtagaaacatat

SEQ ID NO: 339242 - DNA, 122 bp, Homo sapiens
cgttttccgtttggtaactgacaggaagcggaagccgtgcgtgggaggccgattctagtgcgcctgcgtggccgcgaatcaccagccagcctctgggtctgtagcaaccgcccagcgttgag

SEQ ID NO: 339243 - DNA, 122 bp, Homo sapiens
actacccttctgggtgtggctgtaggggggtttgtcctctggaaaggcatccagcgccgccgaaggagtaaaacgagtcctgtgacccaacagccacagcagaaagtgctgggcagtagaga

SEQ ID NO: 339244 - DNA, 122 bp, Homo sapiens
gagaggctgctctgtgaggagcagtgttttccacagctgctctgagaattcagtagaaatcgagccatttgttactcagaagtctagctggatggcaagtggaaatcgttgcagcataaagg

SEQ ID NO: 339245 - DNA, 122 bp, Homo sapiens
ctgggcctgcgcgtcaagtgcctgccgtcggtggcagccgcgtccatccgctgctcctcgcggcccagccgggactctgacaggctccagctccacacaggtgagtgaggacggcagccgcc

SEQ ID NO: 339246 - DNA, 122 bp, Homo sapiens
tgacactgttggagccaatagtggccttgtctgatcccacctctgtacagaggcaaccaccgtcatcagatttatttatatttatttatttatttattttcgagacggagtctcactctgtc

SEQ ID NO: 339247 - DNA, 122 bp, Homo sapiens
taaatcaatatatgactgccaagtataaacagaattgaatctagttcaatgtgcatttatcgattacttattatactgcaatttgccaaagggtattagaggaggtaagccggttataagat

SEQ ID NO: 339248 - DNA, 122 bp, Homo sapiens
aagacccttggtatcaaagattctccctaacctttagagaggccaagccccacaccaaaacgtaagttcctgactacctcacctccatcagtggcttcatccttgaatagttcctcagtgcc

SEQ ID NO: 339249 - DNA, 122 bp, Homo sapiens
tcccaaagtgccgggagtgcagcctctgcccggccgccaccccgtctgggaagtgaggagcgtctctgcctggccacccgtcgtctgggacgtgaggagcccctctgcctggctgcccagtc

SEQ ID NO: 339250 - DNA, 122 bp, Homo sapiens
ttagctaaacaaaatatttctttcgttaagggctttctccacacggagactttctagccacgtgagactttgacctcccagtcccccagattcagcgctgggaccgagcgtctgctgttatt

SEQ ID NO: 339251 - DNA, 122 bp, Homo sapiens
ggaacgtcacagtgcggagaggggcggggaggcggggacgtgcaaaggaacgtgacgtgacgtcagcgcgtcgccctgccgccctcagcccactggtacctggaaggagtcttattcaggga

SEQ ID NO: 339252 - DNA, 122 bp, Homo sapiens
gatgacccatactctgttcttccctgcaaagctggcaaggatgttgggagagctggaccccgaagggaaacgcaacattcttgaccgagctgaggacccctcatctctgatcatctcacgcg

SEQ ID NO: 339253 - DNA, 122 bp, Homo sapiens
gggtaagggggcttctttcttttactaaggtatgtatattggggctaggaagaggaaggacggtgtctggcattaggcctggggaataacttcatctctgaaattaggaccttggatgcttt

SEQ ID NO: 339254 - DNA, 122 bp, Homo sapiens
caaagatctgggattacaggcgtgagccactgcacccggccagaagctttttcatttattcgtccagcagcatcttgtactagtcctgactggttagtatagaaacagcactcctcttctaa

SEQ ID NO: 339255 - DNA, 122 bp, Homo sapiens
accaacatcaccaccgtcagcctctgggaagaattctcctccagcgacctcgcagatctccgcttcctggacatgagccagaaccagttccagtacctgccagacggcttcctgaggaaaat

SEQ ID NO: 339256 - DNA, 122 bp, Homo sapiens
gcttctaccgtgaaggagccgagcaggatggactcctgaccgcagcatctcaaagaggaacgaaggctcgcacgagctgggacagcggaaagagcagaagagtgggcacagaaaagcgcctg

SEQ ID NO: 339257 - DNA, 122 bp, Homo sapiens
gctggcatgccctttcctcatctcactccacacacgaacaggtttagcaaataatatgcacgctgctgggacgggcccaagcatttccctcccttgatagggcggaactaaaatgcaagccc

SEQ ID NO: 339258 - DNA, 122 bp, Homo sapiens
tttaagccagcaatggtgcatcaaatacttctctgacttctggacaggtgcggtgactcacgcctgtaatcccagcactttgggaggccaaggtgggatgatcacctgtggtcaggagttca

SEQ ID NO: 339259 - DNA, 122 bp, Homo sapiens
gtagaaactaacaggattccgtgggacccaccctccagctgactgaggactggcccgcagcggtgaaaggcctttggggtccctagctcctcagggactcctctgcgcgctccgggatccat

SEQ ID NO: 339260 - DNA, 122 bp, Homo sapiens
agtgtctccgggagcatcatcttccgcctttcctgaggagtttcagggcgctgttgacctcgtaggtaaggaggagccgtatcccaggaggccacagctgggctgagagatttagcaagtgg

SEQ ID NO: 339261 - DNA, 122 bp, Homo sapiens
tatccaagaactggagaaagatgatggcaagaataagacaaaagaagcaaggctaccatacgctacggaaggtaaatgcccaaagccagacagaaaggataccagatcaaatgacgcgtggc

SEQ ID NO: 339262 - DNA, 122 bp, Homo sapiens
caaccctcgtgcaggcccgggtccacgtttcgcggactgatcctgagcctcagtataactcgctgtgccaggtgcgcgcgcgcagccaagtatccgcgcgcggacgccggggaggcttcacc

SEQ ID NO: 339263 - DNA, 122 bp, Homo sapiens
catctgtgaaagggggttcacaagcttcttcagcttttcccttaagagtcagtaagtgaacgtagcaaagggtgttttgagcatcagatgtagtgtggatgggtgtttttatcaccatcaac

SEQ ID NO: 339264 - DNA, 122 bp, Homo sapiens
ggagttactttaaaatggtgagttccacctcttaaaaattaatgagcttagggccgggcgcggtggctcacgcctgtaatcccagcactttgggaggccgaggcgggtggatcatgaggtca

SEQ ID NO: 339265 - DNA, 122 bp, Homo sapiens
ggccgcactgccagcgagacacggagcgagggttcagagtatgaggaaatccccaagcggcgccggcagcggggctcagaaacaggcagcgagacccatgagagtgatctggctccttcaga

SEQ ID NO: 339266 - DNA, 122 bp, Homo sapiens
cctgaagctgataggccaggtcagcctgtgctcggcgggtgttgacctcgatgtcataggcggccttcttcagttcgtaatctctctgtgccttggccatctcgatctcactcaggtactga

SEQ ID NO: 339267 - DNA, 122 bp, Homo sapiens
gcaggggaaggcgagacttctgaactctgcttttgccaaccacttcctgtctctcttcagcgggggctcaacccccagacctccagaaatgacgtcagaatcatttgcatcccgctgcctct

SEQ ID NO: 339268 - DNA, 122 bp, Homo sapiens
cttgactgggcttctgctagagtcagctgcggcaatcggggcaacaaaattcaggcttaacgtcagcgtgggcatctttggacttcaggatgtattctcaaccagtccagtagaaactaaac

SEQ ID NO: 339269 - DNA, 122 bp, Homo sapiens
gcgatggacagccgctcctccgggttcacctgcagcatggcgcctgcagcagaagcacagcgcgctcggccccacggttccccaggcgggtcagcaccccctgcactggcagaggtcacaga

SEQ ID NO: 339270 - DNA, 122 bp, Homo sapiens
acttcctcttctcactgttcctcttagaaaagatctgtggactccaccaccacgaaatggcggcaccttatttatggtcactttagagggtaggttttcttaatgggtctgcctgtcatgtt

SEQ ID NO: 339271 - DNA, 122 bp, Homo sapiens
tcaagctctcaaactcatttttttcaatgataattcctgtcgttggagttattagacctccgtggtagattgtttctacatttctgatataaaaattcttagtgaggttaatcttctttaac

SEQ ID NO: 339272 - DNA, 122 bp, Homo sapiens
cacctggcctggctctttggtgtttatgatctgaagggtgttggttgatatgcatgaagacgaggacatgggttccagaatgcaaatgtgaagtccaggtccttcatctctgacctgggagg

SEQ ID NO: 339273 - DNA, 122 bp, Homo sapiens
ttggtgacccccgcccccctccggcctcagggtgggtggcggccagcgcgccaagaccctcgggagccccgcccagagcctgctccgctctcaggccgcccaggctagccagccgccagccg

SEQ ID NO: 339274 - DNA, 122 bp, Homo sapiens
ttcttagtgtcttggctcaccagactcataggggaacatggtggtgttttgaggagacgccgcttttcttttgtcatagtgcggacactcgtgctttttcagccctgcaacacaatgtgtag

SEQ ID NO: 339275 - DNA, 122 bp, Homo sapiens
cgcctgaccaaaaaaatttcttttaatgtaaatcatatttgtgccaaccacacaagtcaacgagaccacttgccagccacttgcaatttttcctacaggatggggtaccagagctgaatttt

SEQ ID NO: 339276 - DNA, 122 bp, Homo sapiens
cccgaggagaccccagaaccgacccagcccccgaggagatcccagaaccgacccagcccccgaggagatcccacaaccgacccagcccccgaggagatcccacaaccgacccagcccccgag

SEQ ID NO: 339277 - DNA, 122 bp, Homo sapiens
gggaagcacctggttgagtggggatcagagcagccgctctcttctcagccagctgctccacgtggcagagtactcaggacaaccaggagggccgccttgttgcagctgccttcctcggtgaa

SEQ ID NO: 339278 - DNA, 122 bp, Homo sapiens
tcactggagcgcatttcaattccctgcatcacaggaggtgtggaaggccgcctcggggaccgggcgcgggaggtgcgcccgagaaggccccgggccggcctgcagggcgcgccgctccgcct

SEQ ID NO: 339279 - DNA, 122 bp, Homo sapiens
ccccatccccatgtggcctcttctttgggtctggcgctctccgggactgaaggctacccccgaccctgtaccccgcgctcccgctctcgcctcctcctctcaggcgaccctccactcctcag

SEQ ID NO: 339280 - DNA, 122 bp, Homo sapiens
ccaccattaaatttctctcgtcttgagtcgatcagccaaatttcttctttctgttcctgccgaggagggagggcaggtggaggtgggtgtgtgtcggggtgcctggctctggcttgggactg

SEQ ID NO: 339281 - DNA, 122 bp, Homo sapiens
gtgcctgtaatcccagctactggggaggctcaggcaggaacactgcttaaacccaggaagcgaagggtgcaatgagccaagattgtgccattgcactccagcctgggcaacgaacaagtgaa

SEQ ID NO: 339282 - DNA, 122 bp, Homo sapiens
gctcagattaaaataccttttaaagataaaagactccagttcgcagtctcataatcttgtcgaattgtctcaaacgcttggaaaaggaactcgctaggcagataaccttttgttcattaaca

SEQ ID NO: 339283 - DNA, 122 bp, Homo sapiens
gccaaggaggacaaattcagtaatagtttcgtttcctgtggagacaatttccatgtcgatcgtccaagtttctgcttggcaataattgggggagaaattttagcatgtctctgcatcttcta

SEQ ID NO: 339284 - DNA, 122 bp, Homo sapiens
aacctgactgaggtgggtgccgcgtcccagggcgccccgcccgatccctcctccgagtgccgaagccccgaggaggggccctgcaggtcaggcccctgtgtcccaaagagaggagcgttctt

SEQ ID NO: 339285 - DNA, 122 bp, Homo sapiens
gccgccagcttcgccttgaaatcataatccattgtctgcttcccccatagaggcacgggacgcgggggccgccgccgctcagtccctcctcctcctccccccgcgaccgccgctccacttct

SEQ ID NO: 339286 - DNA, 122 bp, Homo sapiens
agtgtgagagagctaatggaagtaagctgctgaagaaaccgtattcacctgcctatggcccgtgagtgttcttgaagctatctggcgttcatccacccactcccctcggacctcagcatggg

SEQ ID NO: 339287 - DNA, 122 bp, Homo sapiens
gtgctcaggagttctttggctgtgtccggatccaccaattccccgcttccctaaggatgacgggtaaatctggtgagacccgctgccctcctaatgttggaggaaagctggagcccctcagt

SEQ ID NO: 339288 - DNA, 122 bp, Homo sapiens
tgattgagttccgtgttcccgtaaaacacttagagaagcctaactgaagatttctagaaccgactgacaactgatttcagttgtaaacacacagtaagccagcctagttaggcagacattca

SEQ ID NO: 339289 - DNA, 122 bp, Homo sapiens
accccgcagcagcgttagagacgagtcctggctccgtggctgtgtggcccaccagcctgccgtatggaggcgggcacgcatgtgcgtgagacagttggcatgtcccaggcagagaaccatct

SEQ ID NO: 339290 - DNA, 122 bp, Homo sapiens
cgaggaacccgcccgggcgcaggaggtagttgggtgtgggagggagggcgggaggcttcccggggtgatgtggggcctctgtcctgtcgttcagtctccatgatgcagcagcaggcggccac

SEQ ID NO: 339291 - DNA, 122 bp, Homo sapiens
gaccagcctaagcaacatggtgtgaccaccacgccacaaaaaatttaaaaattgatcacacgtggtagtgctcacccatggtcccagctacatgggaggctgaggagggaggatcatttgag

SEQ ID NO: 339292 - DNA, 122 bp, Homo sapiens
ttaggcggaggcggccgagctgacaaccggatatgacgttaaggactgccctgtagtgcccgcggttgccagtcctctatccgacttgatcgtgcagagttggttcgcaccgcccagtgagg

SEQ ID NO: 339293 - DNA, 122 bp, Homo sapiens
agtagcagggattacaggcatgcgccaccatgacctgctttttgtattttcagtaaagaccgggtttcaccatgttggccaggatggtctcaatctcctgacctcgtgatccacccgcctcg

SEQ ID NO: 339294 - DNA, 122 bp, Homo sapiens
tgaggggctcagcacccgggccagcagctgcagagggtgcgctgggtcctccagcagtgccggccagcccactggcgctgcttctcgctgggcctcagctgcctccctgcggggcagggctg

SEQ ID NO: 339295 - DNA, 122 bp, Homo sapiens
ccactctctcagtcctctaggccctcacctctctcccccaaagaaatactctatccaccccgctcccccaaaccgctgctccaggtgggtgtcccgcagcctgcaccagcctagacaggcag

SEQ ID NO: 339296 - DNA, 122 bp, Homo sapiens
cctgctcagcgcagggctgggacgcgcatgtcgcggggggtcccggctgggctgggccgacgcgcggggctgggacccggcgaggacccggcgcgctccggtgccggtaccggctacagtcc

SEQ ID NO: 339297 - DNA, 122 bp, Homo sapiens
aggctgggtgcagaattttgtggaaagccacgggcctgcagcaacctccaaggtaacagccgctgccaccatcgccagcgcatggctgccatgttgaattgattcggcaggcggtgcaagag

SEQ ID NO: 339298 - DNA, 122 bp, Homo sapiens
tggccggccggggcacccagggcttcgaggaggtagggccgctctccttagaggcagcagcgggagtcccagcgcggcggtggggccggcccgagggcggccagtgacgccggtagcgcccc

SEQ ID NO: 339299 - DNA, 122 bp, Homo sapiens
acaggtggacccagggtcagctcgtgcacctgggaaatggctcccgccgggtagcaggggcggaggggcggggctgggcggaggggcgggggggcggggcctgcccgggagccacgtccggg

SEQ ID NO: 339300 - DNA, 122 bp, Homo sapiens
tcctgggcaaatcaggacaagttggtcactccagtgccaaaactcttccttattcaattacgacaactttggggcctttgcctgccagtctaaagagggcttttcattaagtgtaaagcaga

SEQ ID NO: 339301 - DNA, 122 bp, Homo sapiens
aaagaaccccgatgttgttaattgcagctagaggtgaccttgtgatataattctggccagcgatacataagcaggagtatgttggggatatctcggactgtttctttcttctgacataaata

SEQ ID NO: 339302 - DNA, 122 bp, Homo sapiens
gctgtgcccgagctggctgcaccccgggccaggcatccagcaaccttgagcagtggggtccggcttttcagaaggggccaggaacccgcgtggctgaggtgtgaccgaagcgtggggcagag

SEQ ID NO: 339303 - DNA, 122 bp, Homo sapiens
gacagtgctatgagggccttccagaacacggcaactgcatgtgcaccagtatcacattatcgagctgttgaaagtgtggattcaagtgaagaaagtttttctgattcagatgatgatagctg

SEQ ID NO: 339304 - DNA, 122 bp, Homo sapiens
ccttggagctgccccacagcggtagcggaggtgagtcatggccataaaatctggaaagctcgtagggggatggagggcggtggagaaatataaattattgtgatcgtctttcaggagcgctc

SEQ ID NO: 339305 - DNA, 122 bp, Homo sapiens
tcaggaggggaggcatggctgggggaggtgtgccctgtggtggggtctcaccaagcagatcgagagagctctggtggttggagacaacaacatagggctgcgagggagggaagtggtgagcc

SEQ ID NO: 339306 - DNA, 122 bp, Homo sapiens
cacgaggccctgccggagtctctgccagcactgcgcctgccgctcttccctcagccccatcggcaggaagtcggctctttaaagagttttaaatcagcagtaaatcacagtttctaaagctg

SEQ ID NO: 339307 - DNA, 122 bp, Homo sapiens
cgccgccgcctcagccccggcgcgggagggcgaaccggcgcgagagagcgagcgcgcgcgcgcccccgccacagccgccaccgcccacaacctccgcccccggccggcggcgcacgcgcaag

SEQ ID NO: 339308 - DNA, 122 bp, Homo sapiens
taggggacagtcgggtactgtcggggatggtcgcagatggtcggggacagtcggaaaagtcggggacggtcggggagactcagggacccagctcctaccttgcgtgcctggtcgttatcttc

SEQ ID NO: 339309 - DNA, 122 bp, Homo sapiens
gaaacttcctgcagaagaggatctggaggcgcattcggcccactgcaaagccacacacgtcggtgagaccaaagaatttgtcacctcagattctttcgttaacagacagattcattatgtaa

SEQ ID NO: 339310 - DNA, 122 bp, Homo sapiens
gggtgttcccggctccgatgtggggaggcctgcgcggggactaggttctcgagaggcgagcgggcgcgccagagaacccgagactgctgcggggccggatgcgggatccctgggctgcggtt

SEQ ID NO: 339311 - DNA, 122 bp, Homo sapiens
ccttaggtcctactgagtagactgttcccagatgagagctatggtaatcttctaagtctgcgtggttagttgaatctaaaaagaccatatcttcacccagtgggcattgcagttaataatcc

SEQ ID NO: 339312 - DNA, 122 bp, Homo sapiens
tgctacccatgttggccagcttcgaggtcttcagcgtccccgtctcggtcaggtcgatggcgatctcactcaggctgcgtgctgcatggattttggactggaatggaaagggaagcaggtca

SEQ ID NO: 339313 - DNA, 122 bp, Homo sapiens
ctaactttggcctcgcacctccagagaagaggcgcgaactcgcaaaaggaaaggcgcgcacggttcctggagagaggtccccctgaacttgggaaggacaaggcaattaattctgctcgaga

SEQ ID NO: 339314 - DNA, 122 bp, Homo sapiens
gccccaggtggagccagggaaatgaggagggagggccgccacgcccggcggggcagggcgcgggtcgttaccttgaggatgtcctgcagctgcttcaacacagcgtgcacctcgtcgtgcag

SEQ ID NO: 339315 - DNA, 122 bp, Homo sapiens
ctccctcgccccaggcccttccgggcagtggctggcccgtgtgcagcgggctgaggtggacgtgtgggagctgggcccagcccctgcaaggtggggaatcgggccagccgccccgtttccat

SEQ ID NO: 339316 - DNA, 122 bp, Homo sapiens
gcctgagctccgagcccggaagcttcaaaatcagaacgaggaaggtcggtgaggaggccacgctcgcgggacgggggcaggaagcgcagccggagctgcagatctcggccgcgccccgcggg

SEQ ID NO: 339317 - DNA, 122 bp, Homo sapiens
tgcactgataattaattctggtaaggaataatgaatggcaagatgaatgaaacccagccacgctctgtgagcaggtggatccagtttcactctgagcatcctgactgggcctcctccctcca

SEQ ID NO: 339318 - DNA, 122 bp, Homo sapiens
tctaacacgtaggctaattgcaaggaccttaaaatcgcaaataaaaaggcgcctgtaggtcgggcgcggtggcccacacctgtaatcccagcactttaggaggcgggcggatcacctgagac

SEQ ID NO: 339319 - DNA, 122 bp, Homo sapiens
tcaaagactggagcgacgttcactgaaatgatacaagaccagcaggggcgcagggcgctgcggccctcagaatgcggtgacagcgccgcctcgcgtcccttccccgacctgccccaggcgga

SEQ ID NO: 339320 - DNA, 122 bp, Homo sapiens
taaaaagccatcacttcacactagctttattatctgaagcataatcaaaataataaactacggttgtgggactttggaatttctaattaagttatggagacttaaatcaagaaatatgaata

SEQ ID NO: 339321 - DNA, 122 bp, Homo sapiens
gcggtcgctccagtgcctgtgtgcccaccagcacatccatgaggtagtccaattcggcctcgtccagctccggagcttcctccttgcccggcccatcctcagggcctggtttgaggccctca

SEQ ID NO: 339322 - DNA, 122 bp, Homo sapiens
tcagagagtttttattcctgaaaatgttagcagttgtgtgtgttagctgctgccaacatgcggtgatgtgagaggcgttctgctgaaagcctgtctgctttgagtgcctgagatccacactt

SEQ ID NO: 339323 - DNA, 122 bp, Homo sapiens
gctgaaggacaaggacacggtcgtgcggtggtctgcagccaaggggtaggtgtctgtggccgcagaagcaccccggggggtgggccggcctctcctgtgcgattcagcagctacaaataccc

SEQ ID NO: 339324 - DNA, 122 bp, Homo sapiens
cagcagccagggtggtcctcttgcgagggaagtcagatccactcttcccgctcgggaccccggagtggccccacggccctgagagtcagccagtgccttgaacggccctcatgacactgcag

SEQ ID NO: 339325 - DNA, 122 bp, Homo sapiens
gaaggctgaacagaccctgggaggaaaagtgggcctgcaggcaccccgggctccccccgccgcctgtctcagataccgagcaggtgggattccgggaagccacctccgacttacgtaacggg

SEQ ID NO: 339326 - DNA, 122 bp, Homo sapiens
ttgtgctgaggagtttaggttgggaagggaaagaagtctaagtgtcaggagagaagtaagcgcttttttgcacttaagaaaaacaatcagctgggcgggtggctcacgcctgtaatcccagc

SEQ ID NO: 339327 - DNA, 122 bp, Homo sapiens
gccctgccccaggcggcgtgctcgagcccgggtcctgcccccatccctggcagggcccggcgccccgctctcagaccagcgggtccccacgcggtgctgtgggacctgacacgctatccctc

SEQ ID NO: 339328 - DNA, 122 bp, Homo sapiens
cggacaaaaaaaggcagagagcagcgctgcggtcggacgggctagaggcgcaatccccttcgctcccaggccggggtcctggagaaggcggacgagaacacgcacccccgtcaccctctccc

SEQ ID NO: 339329 - DNA, 122 bp, Homo sapiens
taataggagaggggacgggcatccattaaccttttcttgcctgcagcctgtagggtccagcgtcaaagcgaatcatggggtccagggctgagctgtgcactctcttaggcggattctccttc

SEQ ID NO: 339330 - DNA, 122 bp, Homo sapiens
ctgtcgggatcatttttcttagcatgacgacctccaggtcagacacaaggtcacaggtggcggtttctgccttcctctggctgaatatatttcattaaatatatattccgcattttctgtat

SEQ ID NO: 339331 - DNA, 122 bp, Homo sapiens
tgggcattgttttcacttggcccatcttcccttctgtttccaagagcacaacatgacagccggagcaacagtagctatcttatgaatgtgagaatgtggatcatactagattgatgaactgc

SEQ ID NO: 339332 - DNA, 122 bp, Homo sapiens
aggggcttgggcgcagaacagggcttgggggcgggtagcggggcaaagcgtcttcgggggcggagatcagtgacccggcagggaggccgcacctggtccacgaggccctcggggttgagcag

SEQ ID NO: 339333 - DNA, 122 bp, Homo sapiens
gaggtgggaggatcacctgagcccaggatgtcgaggctgcggtgagccattatcgtgccacggcactccagcctgggtgacagagtgagatcctgtttcaaaaaaaaaaaaaaaacaaccat

SEQ ID NO: 339334 - DNA, 122 bp, Homo sapiens
aggtctagatgtaagaaatcccagaggattccattaccagagttttcctttttctcttttcgtttctttctttctttctttattttttttttttgagacagaatctcactctgttacacagg

SEQ ID NO: 339335 - DNA, 122 bp, Homo sapiens
agccagcccccacccttttaggaatcagagagcatctcctttcagatccggtcccttccccgctgggaaaagcaaatctaaattcaagaaccgcccagacttaggctcctcctcccatatcc

SEQ ID NO: 339336 - DNA, 122 bp, Homo sapiens
cggccatgagcccagccctgtgaaagatactgttgtgggagagaaaaggggtctaaacgacggtccccgctttccaggagtcagctaaccactcagtttgagagcagctcttcacagtaaac

SEQ ID NO: 339337 - DNA, 122 bp, Homo sapiens
cccgttacgttctgctggtctggtgctccgccttgcggcgttagtaccacgtcttagttccgacactctaaagcacatcctgacatctcgtcgtctaagttctacaacttccttctttccct

SEQ ID NO: 339338 - DNA, 122 bp, Homo sapiens
attctctgctagcttttatctccaggctatgaaggtacccaaagataaagtactgggcatcgacttttctttttaaataccaacttctttgaagacatgacttcaactactaccttcaaaca

SEQ ID NO: 339339 - DNA, 122 bp, Homo sapiens
atgccctggaccccaggaggacctgacctttattaaacacagtggggctgtcaagggcctcgcgtcaaggctcagcgcttcaccgacgcacccagcccgagaccctccgttgctctctgact

SEQ ID NO: 339340 - DNA, 122 bp, Homo sapiens
agcacttccggtgtgtgagcctgcggttgctacataaccgcgtagtttgagccatttctgcgtctggcgggtccttctgaacttgtcaccttcgcttggggtcgcaacgacccgatgatcga

SEQ ID NO: 339341 - DNA, 122 bp, Homo sapiens
agaactcgggtgggcgcccccactttcccgcaagctcgcagagagcatcctccgcccacccggcaagcaccacttcatcacgccaccgccagggtgtcaggcggggctgagcggttgtcatt

SEQ ID NO: 339342 - DNA, 122 bp, Homo sapiens
tataggcagcggcctagccgagagaaactacaactcccggcagggttcgtgcttgctcgtcgcgatttcgcggggtaatatgggaactgtaggcgcaggcctcgtgatcgctgcaacccgcc

SEQ ID NO: 339343 - DNA, 122 bp, Homo sapiens
tttcagagagagagaaatgtgatattagtctaccctgacatcacatcagttcacacaatccgtgcagaccagttcaaaaagtagcctgcgttttattcaacatgtatttacacagtgccaac

SEQ ID NO: 339344 - DNA, 122 bp, Homo sapiens
actgacaggccatcatttgtccttataaactatctgacaaagataaaccagctcaataaacgacaccctctcttcctcataacttgatgctgatctcattctgagtcagttctaagtcattg

SEQ ID NO: 339345 - DNA, 122 bp, Homo sapiens
cgggaaggaactattgttctttacatccattttatttcccaatctgcccccgacatctggcgcaaacttaaaaaggctgaagatgcccctcagaccccacaacgagacctccttaacttggc

SEQ ID NO: 339346 - DNA, 122 bp, Homo sapiens
tgtaaagctcctcctgtggctggcttttctgtgccacatcaccatgactcagaccctcaccgacagcctccaagttcaagaggctattcttgggacactttggcctgacagtggctctcccc

SEQ ID NO: 339347 - DNA, 122 bp, Homo sapiens
aggggctggaggtggtgctgggggtaggtgaccgctggaccgtgaccaaagccatctaggcgctgctgggttgttccgggcagggcattcttgtcctgagtgtgggggacgggagggtgacg

SEQ ID NO: 339348 - DNA, 122 bp, Homo sapiens
agacttattaaacagggccttagaaagttgttctttcataaaggaggctttccctggcaccggaggcagaaaattcaaaacagggatttctgacagaatccttgataaccatggtacagatt

SEQ ID NO: 339349 - DNA, 122 bp, Homo sapiens
gccgctcagttaccaacttcaacccggagccggctacggagcctcccgccgcccctaccccgcgtccccatcacccccgcgcccccggcacccccggacccccgcgcccgcgtcacttactc

SEQ ID NO: 339350 - DNA, 122 bp, Homo sapiens
attagttatgtctttttaaataagattaaactgaaatgacttggctgtcctctctgcagacggggccggggcgggagcctggagtgggcaggggacagcggagtctggaaacccgccgcgca

SEQ ID NO: 339351 - DNA, 122 bp, Homo sapiens
ggaaaatagtgtctcagaataaattagaccaatatttatgactgaaagttatgagtgacacggcaacttcaccttaagtttgtatgattggtggagcttccagcttatgaatgacatgtatg

SEQ ID NO: 339352 - DNA, 122 bp, Homo sapiens
ttccgttccagccgccttcagccccgccgcgctcagttccgcccctttctcttccaactccgcctacgccccagagagggaaggccttgacacctacgctagagagacaggctccaatgaaa

SEQ ID NO: 339353 - DNA, 122 bp, Homo sapiens
tcgtgagttgggagggagccacgttggggtgcctgcctgctcgggggcccctgcccactgcgtgtgcgcagcgcctgtcaggatgtgacggggacctggacatgtgtgtgctctccgagctg

SEQ ID NO: 339354 - DNA, 122 bp, Homo sapiens
ggctgttttaggcggccttctgctccgcccccgaagctcctgcagggctggcaccttctgcgcctgacagagagcatgtgggctctataaatgaaagtgaatcatgggctccatttaaagcg

SEQ ID NO: 339355 - DNA, 122 bp, Homo sapiens
aagtacctgtttgagtggactgttgatgtaaatgtgatgctaggtgccctacacagtgcccggcacagtaagcactaagaagtggcagctgctcttctcttcccctcctctcctggctcctt

SEQ ID NO: 339356 - DNA, 122 bp, Homo sapiens
ttgttaacacacttgcacaactcaagttcagctctatcttatgttgaaagtccttgtttacgatcctcgtaggaggttcttaaatatctgcctgcgaactcccaaagactgggcgcttacta

SEQ ID NO: 339357 - DNA, 122 bp, Homo sapiens
ccaagagctcggccaggataaatgagcgggctgccggctgcagacagtaggtcgggttagcgggcagcatctgcagccttttcgtggtgggagggaggtcctgaagcagaggacatcttgat

SEQ ID NO: 339358 - DNA, 122 bp, Homo sapiens
gaaacagatcttgcctatcgcacgatagtaacatttccccttctccagcccttttcatctcgaagcacttacaacgttttagaaatctcggaaccccctccaaaggagaggaggtgctctga

SEQ ID NO: 339359 - DNA, 122 bp, Homo sapiens
cacgaaatgtttctatgaacccatgacgttcgtccggctttggcctgagtcaggtcccagcgggggctttcttcagggtgtctgtcaactcttagctgggcttttttctgagatggagtctt

SEQ ID NO: 339360 - DNA, 122 bp, Homo sapiens
tggttggtggttttcataatcttatttctgtactggaactagtactttcttctctcattccgccaaaacagggctcagttattcatttgccaagcttcgtggaggaatgtaggtgacatcaa

SEQ ID NO: 339361 - DNA, 122 bp, Homo sapiens
ctagacacatgtggctagtggctactgtactggatagcaccactgcaaaattttccttatcgcagaaagttctatcagccagcactgttccagaaatgagccccaaagttgactttgagttc

SEQ ID NO: 339362 - DNA, 122 bp, Homo sapiens
cctgctctccctctgtgctagtgagggtttggggttataactgttagaccgagataagagcgtaagttttggcttcagacaaacctgagtttgtgtccaagctctgccacttaagaacagta

SEQ ID NO: 339363 - DNA, 122 bp, Homo sapiens
tgggggatgtgtcactggtaggcggaggtgactgtgacacacacacacctccacccaacacgcacacatcttctggctttctactcttaaacttttctcctggatcagagaaaaaggagtaa

SEQ ID NO: 339364 - DNA, 122 bp, Homo sapiens
acaaaaggagacggtgggtcacagggcgagtgcccaggtgacttcgggcctcagtcctctcgccagcaaagggcggacaatgacccctcccgtcccgcccgggaaggcgatcgaggaaacgc

SEQ ID NO: 339365 - DNA, 122 bp, Homo sapiens
acaacattctgaatactcacgagtagttatcttgcacacttaaccctaggccagaggacacggggcaaccacacaggaaaaggataccaggacagagtccatgtagttttgcttataccaca

SEQ ID NO: 339366 - DNA, 122 bp, Homo sapiens
gttgggaggcggccggacgcggagatagcggcacggatacgggttccaagtgacaggagccgacgagggagaggggcgccgggacagaagaaggggatgggggtagcgggaggatgggggca

SEQ ID NO: 339367 - DNA, 122 bp, Homo sapiens
cacagtctgctccttttttttggtccgccacacggaattgagatgctcctttaaataaagcgtttgtgtttcaagttaaaaaaaaaaaaaaaagctaaaaatagaagtgtcatatgatccaa

SEQ ID NO: 339368 - DNA, 122 bp, Homo sapiens
ctcttttttaaaaataaataaataaaaaataatcaagcggcgaaagttgacgtccgcccacgtgaatgtattatataaagcagctacaggaccagctggcttgagagccctggtacctcggg

SEQ ID NO: 339369 - DNA, 122 bp, Homo sapiens
gaaatacgagctacagaatcacatcaaccgcctaacttgtctgtagcctaaactctagtccggagttcatctgcaagcggaattgggaagtatttcagagccagcatctcctcgcgccatcc

SEQ ID NO: 339370 - DNA, 122 bp, Homo sapiens
taggatggctttctgtaccgcgtctgatgatggagagtcccggggacacctccgcggacacgtgttggactcagggctttaggcccgtgacagctggtaatcccccagcccaacaacgtccc

SEQ ID NO: 339371 - DNA, 122 bp, Homo sapiens
tgagatgtaaattctgcaggagaacttagaatagacctgtcgtactagagtggttcacagcgtggactctggagtcaaataatcaggatttgcatcctgattctgtcacttccagctgtgtt

SEQ ID NO: 339372 - DNA, 122 bp, Homo sapiens
gggagaagacatgaggtcactctccccggccacacgcccgggccagggccagcctcagggcggagctcagctctggacaccgctcccgcaggaaggggccctggacgactccgggtggctca

SEQ ID NO: 339373 - DNA, 122 bp, Homo sapiens
attatttccaaatttgtgtcacctctggtgacagcacaaggaagaaacacaaaacaagaacgcagcatagggagttggggctgggcattgcaattctcaataggatgttgagtggatggcat

SEQ ID NO: 339374 - DNA, 122 bp, Homo sapiens
gggggcatggtccgggcacaatgctgttcggcaggggtcgggtcctcggatctgggctcccggccccctcctttccctgcgtgcttcttcagcagcatcgtggcggggtcggccgtctcggc

SEQ ID NO: 339375 - DNA, 122 bp, Homo sapiens
acattttacttttcagatggaggctccactttttagtgtcagctgctttttcaccggtcccgttccctctaccaccaaccttgtcatttgacttgagtatcctggtcttcgtcatttggctt

SEQ ID NO: 339376 - DNA, 122 bp, Homo sapiens
tcaccgaacgtgaaagctgcaggccgggtaccaattaaaggcagcgagcgagcggagacgcgcccgggcgctgctgttacataagcgcccggggccaccgcgcctccgcccgctgcgcagcg

SEQ ID NO: 339377 - DNA, 122 bp, Homo sapiens
aaagcaccgtgagtcgggggcagagctgcaccgtcacctgcaccatccagcgcacactggcgcaggcctgcccaaggtcaaatctgacccatttccaagtcaaccctgggggatactttgca

SEQ ID NO: 339378 - DNA, 122 bp, Homo sapiens
aagtaactcagtgggccagtgctaaaatctttgcgaaggagatacaggcacccgcgaacgcgcgcgggcgcgcacacacacacaaacacacacacaaatacgcacacgcacagccaatctat

SEQ ID NO: 339379 - DNA, 122 bp, Homo sapiens
caaataggaacttttgtccctgccacagatatttcagaaagcaagtgaatacagcatagccgatcaactgatgcaagcaccccctacaccacaaataggctttgccctatagcatttgccag

SEQ ID NO: 339380 - DNA, 122 bp, Homo sapiens
cactttgaatggattaaacactacaggggccaatgggggaagttttgagccttgccaggtcgatattgggtgctgaggggggtggctagtgtctgtgttttgtcaagtgcactttgttctgg

SEQ ID NO: 339381 - DNA, 122 bp, Homo sapiens
tattagcatgtagggcacctgagaaatgaacaagcagaatgttcatgatgagctctaccacgatctgggggccctggaactcctcaatgaactgagagccctggacagtgtaactgggtgct

SEQ ID NO: 339382 - DNA, 122 bp, Homo sapiens
gcccacccaggggtagccgtgctgccagacagagctggagtccaagtcaggtagcaggatcgggtggccggggtatgtaccagggtctgggctatcctgagggcagcatcacagctggaaac

SEQ ID NO: 339383 - DNA, 122 bp, Homo sapiens
tccccagagactgggcggaaaccggagactcgcctcccgaacccgcgaaactatctcccgcgagactgccccgccccaaccccgccccgcaactctactccctgattggctggaattacggc

SEQ ID NO: 339384 - DNA, 122 bp, Homo sapiens
gttcttttcacgttggcgcaaatgagcaatgcgcacgaagctgctccatctcctctgctgcgatttcgctgccgaagagccgaggaaggttaggatgcaattaacagagcggagtgacctgc

SEQ ID NO: 339385 - DNA, 122 bp, Homo sapiens
ggtggatgggacccacttctgggtaacctgatgaggaagctctagtgaagaaattcaggacgcggtcttcagagcagagggcttggttcaagtccctgttctgccacttactaactgcatga

SEQ ID NO: 339386 - DNA, 122 bp, Homo sapiens
accagcgcccaccacccgcatctgcccggtgcagagtccccagtgcgttcctaggggtggcggcaccacccctcagacccggggatttgggcagcatccctccctcggcacagtccttaata

SEQ ID NO: 339387 - DNA, 122 bp, Homo sapiens
gttgctgtgaggattagaagaggtagtttggctaaggtgcttgggacagtgcctggcacacgttcatgcgtgtttatacttaacccacatctttgcagtgtcagtgctgtgtagagcctccc

SEQ ID NO: 339388 - DNA, 122 bp, Homo sapiens
gaagaaatgaaactgaaggagtgtgtttccatcctcccacggaaggaaagcccctctgtccgatcctccaaagacggaaagctgctggctgcaaccttgctgctggcactgctgtcttgctg

SEQ ID NO: 339389 - DNA, 122 bp, Homo sapiens
tcaagcgtttgccacagggctgggacacagaaatgctcaatcgatgttggctattattatcgtcagctctcccacagagggctaagggaaggttgcttgtgatgtccatctgaaaatggaca

SEQ ID NO: 339390 - DNA, 122 bp, Homo sapiens
gcacccgggccagcggctgcggagggtgtactgggtcccccagcagtgccaacccaccggcgctgccctcgatttctcacccagccttagctgccttcccgtgggggcagggctcgggacct

SEQ ID NO: 339391 - DNA, 122 bp, Homo sapiens
agcagtgggacaacatgtcccttccaactcgttggcattgctcttttctttcataagacacgcactcagtctaaagagtgtgggcttgggttcaagtgctgacttgctttctagctgtgtgg

SEQ ID NO: 339392 - DNA, 122 bp, Homo sapiens
ctggaggggtcaacaggaagaacttgggaaactggagggaactaaaggagccccacagagcgaaaaaggatcttagaggccaacttgcagacatggctatttatttttttacaaatatttat

SEQ ID NO: 339393 - DNA, 122 bp, Homo sapiens
agaaacaggctacagagaggccagagtggccatggagctgcatggtcagcattgcatctgcgtgagttcccagcagatatgcagttcacctgcaccaggctagcttaggaagctccataatg

SEQ ID NO: 339394 - DNA, 122 bp, Homo sapiens
acaccttgaaggccgggtggggttgtgggggtggagggaggcttccagcttccaggtcatcggtggataagagacaaaagattgcattcttttgagtcctttcactgaatacacaatttggt

SEQ ID NO: 339395 - DNA, 122 bp, Homo sapiens
gattagacccgttaccccgtgggtctggccgaccgtcctgactcggagatccctgagctgcgccgccgcttccttcgtcaacatccagcagctacttgatgagcgccctccagtgggcctta

SEQ ID NO: 339396 - DNA, 122 bp, Homo sapiens
gggtcctactgctccggtctaaactacacagcaacactaggcacgcagctttggagacgccgaggggaaaatggatttaattgattcgttacctctggtattgtaatgcctgctgcgatgtt

SEQ ID NO: 339397 - DNA, 122 bp, Homo sapiens
tgcacttacaaactgggaccttcatactgctttagcacaatttgttgtaagtggggtttccgaattataaaaacaataaagtcattttataggaaaaaaactaagatatatggcctatttaa

SEQ ID NO: 339398 - DNA, 122 bp, Homo sapiens
tagacaaacttactttaaaacaacaacaaaaatattaacagaaataaggatattttataacgacaaagggtaaattaatcaggaaaatgtaaaacttattgacatgtatgcactcagggaaa

SEQ ID NO: 339399 - DNA, 122 bp, Homo sapiens
tgacggcgactatccagggtcggaggcgttcccagcgtttgcgcagatgcaagatggccgcgccctcgtcgccttggctccatgggggccgccatctttgagtatctgacgtacacaaggca

SEQ ID NO: 339400 - DNA, 122 bp, Homo sapiens
atggtgcccccaaccagctgtggcgccatgatctgggcggctggtccagggcgtgggttgcggatcgtggagggaagaggggaacggcagtcgagaccctactccaagtacccatcaaagac

SEQ ID NO: 339401 - DNA, 122 bp, Homo sapiens
agagcgttaacccttccagtcccagagagcgacaaggcgggggaggaaaaacgcgccggccggggccaagatgcccatggcagccccgcgcgggctgcctctgacatttagggaggctccgg

SEQ ID NO: 339402 - DNA, 122 bp, Homo sapiens
gcagctgagagcctacctggagggcgagttcgtggagtggctccgcagatacctggagaacgggaaggagacgctgcagcgcgcgggtaccaggggccacagggcgcctcccggatcgcctg

SEQ ID NO: 339403 - DNA, 122 bp, Homo sapiens
ggtgatccacctgcctcggcctcccaaagtgctgggattacaggtgtgagccactgtgcccggccaagactgagctttttcacagcagggatatggaggaggcctcctgatagtccccttca

SEQ ID NO: 339404 - DNA, 122 bp, Homo sapiens
ggctcttcattagcttggagtggccgcaggtcccgtgaccagcacccgcgagaccctgtgcgacagctgggctgatgctccgtttctctgggaattggtgattttttactgtgaagatgaaa

SEQ ID NO: 339405 - DNA, 122 bp, Homo sapiens
cagtctgtctgtggaccagccctgacctttctgtggtaagccagtgcaatgaactttaggcggtgcttggggatacttagaaatgctgcatagcctaaatatttggttattttttctttagt

SEQ ID NO: 339406 - DNA, 122 bp, Homo sapiens
cttagaagctttaagattcatcgtcttgaacttgatacacatagtatagcaccttaaaaacgaatcatctgctagttcagtattttctacttacaatcactccctcccagggcatgtaatta

SEQ ID NO: 339407 - DNA, 122 bp, Homo sapiens
tatcttctctcaaaccctgtttcctgatgtttatcaatgacagtgcctgcacagcgggaccgggaacctcattagtaattctagttttgctctggccttgtgaccttgccctgtccatttgc

SEQ ID NO: 339408 - DNA, 122 bp, Homo sapiens
tagaatggaccccggcagcggcgaggaagcggaactctctgcggctccctctccgcagtgcgccggcaaggtccaggtcccagcctccccaccgccgcccgcgccctcctaggcctcggagc

SEQ ID NO: 339409 - DNA, 122 bp, Homo sapiens
agggtttgaaagatagtcccgcaaatgtgacggcctaaggaagcccctccgcccaagaagcgatattcatttgtatcctgtagccacccacgagggagaatcgggctctctacagaccccca

SEQ ID NO: 339410 - DNA, 122 bp, Homo sapiens
cacaagaagcggaagtatgagttggagcgcccagctgccaacaccaagattggcccccgccgcatccacacagtccgtgtgcagggaagtaacaagaaataccgtgccctgaggttggacgt

SEQ ID NO: 339411 - DNA, 122 bp, Homo sapiens
aagatgtctgtgagtaggacacacagctaactctgcggccaatatactgcctcagtgaaccgtggtattcaaatgtatgaaacacaaggattttttgttgttttttattttttttgagacag

SEQ ID NO: 339412 - DNA, 122 bp, Homo sapiens
atcagatcgcgctaagtagggcacaacgcagaggcgacaaagctcctcggccccagggcccgcggagcagactccggagcgcggtcccgcccacgctcggctccgcagttagcgtcctcctt

SEQ ID NO: 339413 - DNA, 122 bp, Homo sapiens
ctgcctggcagcaggagcatccaggaggcctggggtggggagggaggtgtcaaccaggaacgctctcctagcaacaagacccgcatttcccggtaggtccctgaagctatgcatcctggcca

SEQ ID NO: 339414 - DNA, 122 bp, Homo sapiens
aggtaccccttagtgccgttgatctccaggggcattgttagactcgcctgttatgccttccgagggggcctctgctttttaaacactgaaaagagtctgagttccccaacttccttgggtcc

SEQ ID NO: 339415 - DNA, 122 bp, Homo sapiens
agggagggagaacacagacagtcccctcctgggcattcacctttaagaaacccgcccaggcgcagccagagacctgtgcagaatgttcacaccagcgctattccgaataacaggaacattgg

SEQ ID NO: 339416 - DNA, 122 bp, Homo sapiens
agtcactttctttcaaccaggcctccctcttgattactggactctgcaagtggtgaggaacggaacttgcgttcggttacaattttggtggcccgtgtggggaacgttgtgtgctttggggg

SEQ ID NO: 339417 - DNA, 122 bp, Homo sapiens
ccaactcgccccgggtgacaagcgcttcaggaaagctcctgtgatcaaccctccttgccccgtggcggttcggagctgcagaagttagaagagagtcagagccctccggagcggctgcctgg

SEQ ID NO: 339418 - DNA, 122 bp, Homo sapiens
aagtccccttccccaacctgtgccgcccacttcacagaacgttgggggctctaatggacccgtcctcatcatggacgcgttttgtaaactgttaggggctgtgcggtcacaaggcttcgcta

SEQ ID NO: 339419 - DNA, 122 bp, Homo sapiens
cgcggggcggggaggaggggccgaggcggagctgctgcgctgggagccggctgggggcgccgctctcagtctggggcgggcgctcgggctgcgcgggctctgggcagcagcagcagcagcag

SEQ ID NO: 339420 - DNA, 122 bp, Homo sapiens
tctatgacacggccggtcagtgaagagcagtctttcagctcacatagtcgcccaaagaggcggatcagcttacgcttcaaccgtgcctcctgcaggtatgcggagtctgggtcatccaattc

SEQ ID NO: 339421 - DNA, 122 bp, Homo sapiens
gtggtggccggaggacgtccctgcatggccagcttcactgctgcccttcggtgtcctgcccggccgcccaggtccagatccaggcaacctccaggatcacctgctggttcccggccatggct

SEQ ID NO: 339422 - DNA, 122 bp, Homo sapiens
gggcggggacgggggggtgtgcgaggcagcggggctgagctaagccgagcccacgtgtgacggctctcgccgctgccccggctccgccgctcgcagagagattcggaggagcccgggcgggg

SEQ ID NO: 339423 - DNA, 122 bp, Homo sapiens
tgggcccccaagctgagggctgttctgtggtgtgagtgctgtctccatagcctgcactctcggagactgctccggtgctcccctacccccatctcatatatctttccctttgtgggcttcct

SEQ ID NO: 339424 - DNA, 122 bp, Homo sapiens
cggttccgggccgtgtttggggagagcggcgggggaggcggcagcggagaggtaagggggcgaggaacccccaggtccggggtctcgaccctctgcggagccccctcccctcccccatccgg

SEQ ID NO: 339425 - DNA, 122 bp, Homo sapiens
caagcgtcctattccatactaccggcccagcccctcttcctcctccagctgcttgagcagcgactactcgacccggagccacagccgcagccccagccccggccacagccacgggagctaca

SEQ ID NO: 339426 - DNA, 122 bp, Homo sapiens
ttgacagcggagaagcgtcatgaggctgcgggggtggcgtggcatcaggggccctggcggcgctgcgcctctgtcaggctggggtcacaccctccagaggaaggcctgcagtggccccagag

SEQ ID NO: 339427 - DNA, 122 bp, Homo sapiens
tcaccaaagatcttgcttgagagcaagggttcaagatggttctgaagacaggaaagaggacgatcacgtggtcccaggctggcgggtcactgagcacttgaaagtcagcctgcacctcactt

SEQ ID NO: 339428 - DNA, 122 bp, Homo sapiens
agccagcttccccagcaccttcagccctgccggctcggtggagggctccccaatgcacggcgtgtacatgagccagccggcccctgccgctggcccctaccccagcatgcccagcactgcgg

SEQ ID NO: 339429 - DNA, 122 bp, Homo sapiens
ccggcccctcccgaggctctggggccgcagtgggctcgggggtgggagacgaggtccaagcgccggcgagacccctgccagcccgggacctgggctcggaggctcccttccggatttccaaa

SEQ ID NO: 339430 - DNA, 122 bp, Homo sapiens
ggcgcgcagctgtcccgagctccacagcctttttctggacaacagtaccctagtgggcagcgtgggtcccggctcagtgctcgagctactggaggcctgcccgcgcctgcgcgctctcggcc

SEQ ID NO: 339431 - DNA, 122 bp, Homo sapiens
gaccaccacgcacctggacagcagcccctcctaccagcccttcccgagtctcgccccacacggtcgccagttgctcagggcatctgtttgtaccttgtgcacacctctcttaaagcactttt

SEQ ID NO: 339432 - DNA, 122 bp, Homo sapiens
ccccgtcggcggtggggagggaggactgggtggggtagggagctggatttaggcagagcacggggaccagggcttaattgactagaagctagaagcttcccacgggtcatcgctcactaatg

SEQ ID NO: 339433 - DNA, 122 bp, Homo sapiens
cgcggcctcgggccccgccccgccccggggcctcgagcgccaggccggcccggcgaaccccgcccaaggccaacaaggagccttgtccgcgcattccagcggcagaaacggaatgtctgggc

SEQ ID NO: 339434 - DNA, 122 bp, Homo sapiens
ggagagcctggagcccagtggggcatacccaccctgtcatctttcccctgccaagtccaccggcagcattgaccagctcagccacttccataacaagagagactcggcttacagctctttct

SEQ ID NO: 339435 - DNA, 122 bp, Homo sapiens
gatgggggtcctaagagccaggaggggaagagggggagaggatgatactaatttcagcatcgccggctgtgttcacccagcctgtgaaattattaatatcctgaaagggagagaatgatatt

SEQ ID NO: 339436 - DNA, 122 bp, Homo sapiens
aatcttgctactgctcgctctttgggtccacgctgcttttataagctgtaacactcaccgcgaagatctgcagcttcagtcctgagcccagcgagaccacaagcccaccaggaggaatgaac

SEQ ID NO: 339437 - DNA, 122 bp, Homo sapiens
tagcctgtccgcttcggcagctttgcgaagagtggcgcgcagctagggctgaggctcttgcggacctgcggtcgaagcaggcggctgagccagttcgatcgccaaggcctgggctgccgaca

SEQ ID NO: 339438 - DNA, 122 bp, Homo sapiens
aatagagtgggctccatgtttctcccccagtgtggatttcttggattcccacaggtgaagcgcctgctcctgcctctctgggggtcatgtctccaggccccctgggagtgggagccgagtct

SEQ ID NO: 339439 - DNA, 122 bp, Homo sapiens
ggagctccctggtggtgaagtagaagaggaacagggcgtagagggcgaggctgacggaggcgttgtagatgagggtcacatagaggtagccgctgcggacactaggacagacgggggctgtg

SEQ ID NO: 339440 - DNA, 122 bp, Homo sapiens
cggggctgacatctgcgaggtagcagaggaccccaggtaatcaaagcccctcgggtctgccgggggagtaagcgcatggggagattcccacgggagatgggaggagcgaggagcgggaagac

SEQ ID NO: 339441 - DNA, 122 bp, Homo sapiens
cacacactcctcctttttgtctcagatgttatcttacgaaaccttcccagaccccctcgccggcactctcatgtgttttacaacgcctatcatgccatccttgtattcgctttatcagtttt

SEQ ID NO: 339442 - DNA, 122 bp, Homo sapiens
gacggacgccttctccctgaggagaacgcgcctgaaaaatggagccaccggacgggaaggcggcgggagtggaggctgggggaagcaggaagaagccccgggacagggtcccgccgcctcct

SEQ ID NO: 339443 - DNA, 122 bp, Homo sapiens
atgcagcttttctctctgaatccgcgaaacggcagcttggtcaccgcgggtaggatagaccgcgaggagctctgtgctcagagcccgcggtgtctggtgagttttaacatccttgtcgagga

SEQ ID NO: 339444 - DNA, 122 bp, Homo sapiens
cgtgcccacgtccagtgcggggcgcagagacgcagcagcgagtgcgcaggcgctggagtgcgacgtatcactccccgactgcgcgcactctgcgggccaccgggatcgtcgtgctgtttgga

SEQ ID NO: 339445 - DNA, 122 bp, Homo sapiens
aggcgtctggtgcggtcaggcgcacataagcagcctttgcaggaagccgtggctgggcctcgatccgagttctagcgccccaccgtaagggagagccaggtgcttcctgtccctcccggcca

SEQ ID NO: 339446 - DNA, 122 bp, Homo sapiens
tgttgctggtgatcgttgtgcttttttttctgtgttggttgccagtttatagtgccaacacgtggcgcgcctttgatggcccgggtgcacaccgagcactctcgggtgctcctatctccttc

SEQ ID NO: 339447 - DNA, 122 bp, Homo sapiens
gagtgccctggtgacatggagcagatctgtggcataaatacaggtgtcataaagacagggcgggactcacgcttacaaggggcacgagtgtctcggagctgccagaatgacttccgctcagt

SEQ ID NO: 339448 - DNA, 122 bp, Homo sapiens
catccgaggggaaaacgtgcacgggctctgcaaattgtaaccgcccggggtgggagagtccgtgcctgggggcgtggtgagccagggccggtgctggggcgcagagcagggcggctcagatt

SEQ ID NO: 339449 - DNA, 122 bp, Homo sapiens
tgtgccctgggccagggcgctgagtgggcttggccctcagtttgtgcctgcagatgggaacgcagcctgcgtgaaggtgctccgggacattgagcctggggacgaggtgacatgcttctacg

SEQ ID NO: 339450 - DNA, 122 bp, Homo sapiens
agtggcgctaagccgtgccaggcgtgtgtgcagggcactaggatcatctgtcacgctggccggctgtacagtcaggaagtatacgaaggctcccgtgtggaagctgtgcacgtattcaatac

SEQ ID NO: 339451 - DNA, 122 bp, Homo sapiens
cttataccacaataggtctagcattttaaaaagttaactagtttgcacatagacacttggcgaatagttgattggttatataatcccatcaaggtatgcaaataaacatgtattatggcatc

SEQ ID NO: 339452 - DNA, 122 bp, Homo sapiens
acgaaggagaagccctggagacccgccggcgcccccgccagggtccccggagcacctggccgcctgggccaggtgtgggcacgccccgcctgacactcactccgaagcagaggcgacgtctc

SEQ ID NO: 339453 - DNA, 122 bp, Homo sapiens
cttttctttcgcgtttgcctccattgcaacgcctccgctgatgggaaaaactactccctccgctactgcggggtggcagtgacgtcaacgaattagctgacctgttttttcgggcttcgcgg

SEQ ID NO: 339454 - DNA, 122 bp, Homo sapiens
caggcttgagtgcagtgactcgatctcagcttactacagccttaaactcccgggttcaagcgatcctccaacctcagcctcccgagtagctgggactatggcacgttgccaccacacccgac

SEQ ID NO: 339455 - DNA, 122 bp, Homo sapiens
ataaaactggcaattcgcaagaaaatccaaacggctggccgacctgcgaaggaaacatcacgacctgtttgcataaagaaatgcaaacctgaaacaccgggcacgtgcggtttaggggagcg

SEQ ID NO: 339456 - DNA, 122 bp, Homo sapiens
cagcctccgggtccgccaccagcgagcgcccgcagccccgacctcccgctcggcctagagcgccgccccgccccgcccccctaggcgcaggccccgccccgcccccaagcccaggctccgcc

SEQ ID NO: 339457 - DNA, 122 bp, Homo sapiens
ataattacttctgagaagtggcactgcgggttagggaagggagagataatttacttatcacgtatctctggtatgccttttttgctatgtacatgtattactgcaataattttaaaatattt

SEQ ID NO: 339458 - DNA, 122 bp, Homo sapiens
gcccagtgtttccagggcctttccttttcttgttgtttttgttaagaacagccagaaatacggattttctgtgaaatcttacaatctttggcaattattggcaactgactctgaagcttttc

SEQ ID NO: 339459 - DNA, 122 bp, Homo sapiens
agctctaccctgagtctgaggaggacaaggaggcacccactggcagcaggtaccgaggtacgtctctgcttccatgcatccagctggcatgggcttggatccacccacccccattgcactgt

SEQ ID NO: 339460 - DNA, 122 bp, Homo sapiens
ttggggagctccagcctcggagcctcttcccgttctcagacctcagtgcgaggaggaaatcgggtgagttgaggttaatgtttccattaaacctggatggattttccctgcgtggaaggagc

SEQ ID NO: 339461 - DNA, 122 bp, Homo sapiens
ggagaagtggagaaatatcaacagctacagaagggtaagggaacagggtcggtatggtctcgcccaatgcacttacaacccaaagccattaccgagataaggtttgttgccccatctgggcc

SEQ ID NO: 339462 - DNA, 122 bp, Homo sapiens
tacttttgcacagtcatcagagttaaggattaatgatttcccagaataaggctgagttgacgtacaaacctacgtcacggacagctcatctacagccaaaggtcttcatctagcctagataa

SEQ ID NO: 339463 - DNA, 122 bp, Homo sapiens
cagtgaggggtctccctgggcctcatggtctgtctcttctagcctcctgctcatgctgcacgggcctcccctccatcctgcaccagctgtgcttttgcctggtcatcctgagcccctcctgg

SEQ ID NO: 339464 - DNA, 122 bp, Homo sapiens
gctctaccccgtaggcctccacatagccaggattccattagaaccccatggatgctctcacgcagagcttgcaaaatgacccacagaatccctgataggaccctcaccctggagagtctgag

SEQ ID NO: 339465 - DNA, 122 bp, Homo sapiens
cgcggagagctcatcccgggaccacagggcccggggcggggctcggggcggggctcggggcggggctcgacagggttccacaccccggaagtggccctcgccccgcccacccgcctaccagg

SEQ ID NO: 339466 - DNA, 122 bp, Homo sapiens
cgtgatccgcccgcctcggcctcccaaagtggtgggatggcaggcgtgagccactgcactcggccttttcaccgcttaacaagaaaaactgttgcctgttttcagagtcagatagacctgag

SEQ ID NO: 339467 - DNA, 122 bp, Homo sapiens
cttggcgctgatggcgaaatcaatgcaggccctctgcgggagagaggccagtggtgagagcggcagaggcaggaggaaggtggctgtacaccgggcaccctctgtctaactcgtcgcggttc

SEQ ID NO: 339468 - DNA, 122 bp, Homo sapiens
gcccccagctgccttttcggcacccacacccggatgcagcctcaccactggctgaacactcgccatccctgatttcattggctgcagtcgacgctggtcaagcggacggaaaaaaggccgac

SEQ ID NO: 339469 - DNA, 122 bp, Homo sapiens
gaagatcccaagggcagcaggccccttgcgggagcccaggaacactgttgccttgcagaccgccacacctcgcctcacccgcctccctccacacctgcttgcgtgcccacctcctcgtagtc

SEQ ID NO: 339470 - DNA, 122 bp, Homo sapiens
ggaggggcgcagggacagccgcccagggccgaagtaaggggcagctcccctaggggccctcggggcacagcccacagcccgttttctgaggagactgaaaggggcaaatgtggccaggagag

SEQ ID NO: 339471 - DNA, 122 bp, Homo sapiens
aagacttttactctgtgacattccatttgtccttggctgtacggaataaaagccctttgacgatggcggcctccaatatcataatccgtatgggtgcggccatgccgtcctccctaccaagt

SEQ ID NO: 339472 - DNA, 122 bp, Homo sapiens
ccgttgggggcggggcctcgggttaacactgcagccgctagaccagctccctggcgggcgcggagcaagctttgacctttggaactgggcaccgcagccccaatatctgccctgcggtcaga

SEQ ID NO: 339473 - DNA, 122 bp, Homo sapiens
aaatgttcatcagattaaaaaactgatatattcttacaacaggctgggtgcagtggctcacgcctgtaatcccaacactttgggaggccaaggcgggcggatcacttgagatcaggagttca

SEQ ID NO: 339474 - DNA, 122 bp, Homo sapiens
aatggttattaatttggtgcctattttgccaacttagaacactcacttagaactcaacttcgaacaaagcttttcacaaatatctatatcccccgttactcttatcatagctctattgttgg

SEQ ID NO: 339475 - DNA, 122 bp, Homo sapiens
ctcagtctccgggaggcggggcagggggtggggcacccacagaccaatggggaggccccacgactagctcattccctcccaacaactccctgctggagggcattggtgggttcctgatgggg

SEQ ID NO: 339476 - DNA, 122 bp, Homo sapiens
cgtgcagccggagcgcaacgcgcagccgagtgcgccccgcgcccagcccaccgccccgcgcgccccgcgcagcgcccccgccattggctgccgccctcgccccgccccctccccgcccccgc

SEQ ID NO: 339477 - DNA, 122 bp, Homo sapiens
aacttctgaaaagtgtggcgtgtttcaaatacgtcttaggcaacgtcctatagtgcaggccggtcgctctcagactgtctcctcttcaatattcggaagagactgtgggtgaagctgcagta

SEQ ID NO: 339478 - DNA, 122 bp, Homo sapiens
acgtgccggcagcttggtgcgacgtgtcttgccattggcctgcttcggtagccccactgccgtacgccgcccccattggccggcgtaaccgtccgtcagcgaggggcgggcccggcgtgccg

SEQ ID NO: 339479 - DNA, 122 bp, Homo sapiens
aatttgatttttctgtcaatgaggttttcttttaggaataaaatatatcattaataagttcgtctgaacttccaggcacccaatggacatgtgagaaatcagactccctggaaagcactctg

SEQ ID NO: 339480 - DNA, 122 bp, Homo sapiens
ccaattgatctattcaaacagctgcctgttcccttaacttgtcttcagattttgtcgacccgagatgggtcctggcactaggaatgtaaaaccgttcctattattttggcttgctccagcaa

SEQ ID NO: 339481 - DNA, 122 bp, Homo sapiens
caaaattcggctactgaaagcggggcttgcaggactctctctgctttccctaacctccttcgcctcgggtctctgaccccgcgcggctctctgcatccccgggttcaggactcctccggccc

SEQ ID NO: 339482 - DNA, 122 bp, Homo sapiens
gccaaagacagccctgacaaccagggtcaacaaaccaaaggacccactcctcactgccaccgtggtttggcttagctgatcctgaagtatgaataaagcacggccttggctaaggaactgcc

SEQ ID NO: 339483 - DNA, 122 bp, Homo sapiens
ctccatatgtggatgaggggctcagcctcctctctggccagagatgctgcttgctccactcgggcccaggttgcccactggtctggttcagcctctctcggactcatcccccaggaccccct

SEQ ID NO: 339484 - DNA, 122 bp, Homo sapiens
gaggaggtgtacttggttaagaaggctgagagtgaggaatgagagaaggcttcatggaggcggtgacctttgagctggcacttggaggatgtccagagcttcactgtcagagaatcagtgac

SEQ ID NO: 339485 - DNA, 122 bp, Homo sapiens
aggacacacgaatggagtcttttaagattcgggtgctcctagaagctgggctgttgacagcggccttgcgcctgatacagtggtgggtacagtggggcagccctgccacactgtgagaaccc

SEQ ID NO: 339486 - DNA, 122 bp, Homo sapiens
tagaggagatgactaaataccataataatcagtctgaggggctgggactcttaagatgtccgagagccggaggaggcttggagcaagaggcaggggaggcagggccatctccaggtgtagaa

SEQ ID NO: 339487 - DNA, 122 bp, Homo sapiens
attggagcctgcgccggagccctttgcaccccaagctcctgcagcccgacctgggggccccgctgtctgaactcacagctccctgccgagccccctctccggggtgcacataacgctccagc

SEQ ID NO: 339488 - DNA, 122 bp, Homo sapiens
ctcccgcccgagttttatggggccgggaagcgcctggtcagccccgctgcccgtgcgctgcggtcagtgcgagtggaacccctccacctgtccgcccctccgccgggactccgagctttgcc

SEQ ID NO: 339489 - DNA, 122 bp, Homo sapiens
tcgagtttgtaaagatccagaaagccaccccagcagacggcggttggtctgccagcttcccgccagcctcccgccaagcttcctgccagcttctcaccagcttctcacccccgcctagtaac

SEQ ID NO: 339490 - DNA, 122 bp, Homo sapiens
agatgttgagacacttccaggtgtgagagagggaagttacaaaaaggtcttgttctttagcgatataagtgataaacttttagaatgagtgtggagtgatgttgggacttaggatagaacct

SEQ ID NO: 339491 - DNA, 122 bp, Homo sapiens
ctccctatcacaggaattttcttttttgaactaccatgcccactaacatgctggccaacacggtgaaaccctgtctgtactaaaaatacaaaaaaaaattagccaggcatggtggttcacgc

SEQ ID NO: 339492 - DNA, 122 bp, Homo sapiens
cagcatgagaaacaagaactcttggtcaagaactgagttcagattccaatacttccatctcgagaggacctgtcattttattataaacacttaacagagagaagggcaatctgcctagtata

SEQ ID NO: 339493 - DNA, 122 bp, Homo sapiens
aataattgttgaacagatgtaagtgttggagactcggctctggcagacctcacgaaacctcgattagcaatttaaccctgtcctccctcctgtccgcacgccggggaagaggagttgcagtt

SEQ ID NO: 339494 - DNA, 122 bp, Homo sapiens
ccctgtcccccgcccaaccgtctccatggcaacggtgcagccttgagctggggtctgcgtcgctgtggcctgagacgcttttcttaaaggtcccgatgacaaggacttggggcctggaagca

SEQ ID NO: 339495 - DNA, 122 bp, Homo sapiens
cccgtgggaaactgttacaacagctgcaatgcagaaatatccaagccctgtgaacccgagcgtggtgtgggttgacgtgttaaacagacgtatagatccctccagagagttgcacagacttc

SEQ ID NO: 339496 - DNA, 122 bp, Homo sapiens
ggttggtcgctcctgctgcacaccgggccgggggagatcggatccttatcttttgcccgacgaggaacattaaacttgtatttcaagtttggcctccagcactcttgaaggaacaggagccg

SEQ ID NO: 339497 - DNA, 122 bp, Homo sapiens
attagatcaaatttatcagtgtcgttgcctactacgacgtttgttactgtttcctggggtcgggggtggttgtgattggagttgccctaaaggggagaaaaaccgcaggatttgcccgccag

SEQ ID NO: 339498 - DNA, 122 bp, Homo sapiens
ccatccagggtaaggcccctgcagacagcacgaaggtgttttggagagattgttctcccccgacccaagggtaaggcttaccttggaattacctggagcctcactatgacagcgtggccttc

SEQ ID NO: 339499 - DNA, 122 bp, Homo sapiens
ttctgacactaaactttactgagccctgcatcctgcccacgacccccccagaaacacctacgcaccactctcctagccgccgcagccccgccagtctcgccgggaggaacccccagcgccgc

SEQ ID NO: 339500 - DNA, 122 bp, Homo sapiens
ggggctcgagaggatgaagccgggaagggtgcgacggggccgcgagccctgggcggggttcgggaagggaggctctgcagtcttggaggggactcagaccggtcccctcccctctccgggcc

SEQ ID NO: 339501 - DNA, 122 bp, Homo sapiens
ttccagtctgggtgacagaacccctgtctctaagaacaacacaaaaaactgggcgttggccgggtgctgtggctcatgcctgtaatcccagcactttgggaggccaaggcgggtggatcaca

SEQ ID NO: 339502 - DNA, 122 bp, Homo sapiens
tctgccagcgccacgtcatgaggaagtgccggcccactgaagccgtggggacgcgcccagcggagctaatcaggtgccactgaactgaaggggtgaactagaggagaagagggtgactgggc

SEQ ID NO: 339503 - DNA, 122 bp, Homo sapiens
gccccgcgctccacggaaggtccacacacagcctgaggaggttcccccagcccacagtgacgcccggggtggaggtcacaaagttttcagagtcatccaaactcattaccttgctaactggg

SEQ ID NO: 339504 - DNA, 122 bp, Homo sapiens
cctggcccccaccccatccgcagaacgccaggcatgccagggcggccgggcaggggctcccggccagcgtcctcccccaggcaggcagcacctctcggccgtcagcagtgcagccaggcgcc

SEQ ID NO: 339505 - DNA, 122 bp, Homo sapiens
agtccttgagggctggagggggcctcccggggcagggcataggccactgcagggatggcacggaacagggcagcggaaaaggcaggagtccgaggcccagggccctgcctctggcggctggg

SEQ ID NO: 339506 - DNA, 122 bp, Homo sapiens
ggagatctacctgcacatcccgctgcactggatctgcagggagctggggctgcccttggacgcctcaggcacaggccctcatcctctgcctaactgctttttacacccatcccttgagtcca

SEQ ID NO: 339507 - DNA, 122 bp, Homo sapiens
ggctcccggtttaattaaattccgtataacgactatccaaatgggcagcacgcggcacagcgaacccccgccagcctgcgcgtcagctcagaggcggagacccgcgagcgctcaccctcggc

SEQ ID NO: 339508 - DNA, 122 bp, Homo sapiens
tatctttggtaagcaagattgcaacacagcagggagtttacccagggcagtgctgactcacgctgggcaaaatttgtacttcccaaacaactcagcctgaaccaaccgcagtcaactgcaac

SEQ ID NO: 339509 - DNA, 122 bp, Homo sapiens
actcaggctccgcgcacctcgagccctgggctccgaggctgggtctctgcagctcccgagcgcgcctctgattggctggcggcgcctgtctgcctgatgctgcgctctcccggtctctcctc

SEQ ID NO: 339510 - DNA, 122 bp, Homo sapiens
aaatacagaaggtattataaaggtatggcagaaagaggatcaatacaatattcacaggttcggcaaatggagagaaacagacatagccaacttaataaatacatgaggcagaagatgtttgt

SEQ ID NO: 339511 - DNA, 122 bp, Homo sapiens
cccgccggaagccgacatctcgagttctggcagaagcaatttgcgcggcgaggagcggagcggcaggaacccaataagctgcttcgcctcggagctgaagcccgtactcaagatggcggctc

SEQ ID NO: 339512 - DNA, 122 bp, Homo sapiens
aagaaagttaagtgtcaaagaggcatgtagattatactctaaggtaacaaaactctattacgttgtatttcattagagctgaaccaagggcattttggaaagaaatcgtgctgtgtaataag

SEQ ID NO: 339513 - DNA, 122 bp, Homo sapiens
gaggacctgctgcgccctcccagggctcgggggactccagcattcacttgcacgcacaggcgaactctgattgaaagcccgggatgacaccgagtctggagaaagagggaccggggggtggg

SEQ ID NO: 339514 - DNA, 122 bp, Homo sapiens
cctggactggaaagacagcggggataagcgtcacccggttctggctgcggctgcgcggaacgaacaagcccaccccgcttcggcgacaagcacaactccgcgaggtccagtcccggcttttc

SEQ ID NO: 339515 - DNA, 122 bp, Homo sapiens
gacttgaggtagagttgaagggaacctcagtgtcccttgcagatgggatgtgcattgcttcgcaagagcacagaggtggagtgcatgggctttgagtttttattgggtaaatgaagctgaaa

SEQ ID NO: 339516 - DNA, 122 bp, Homo sapiens
agcccatccttgcagcacggctgccactgggtgccacagctcatgctgtggctgcatagccgctccgggagcctgggggctgaagacccactcacctcatcttgctcactatgccaaatgtc

SEQ ID NO: 339517 - DNA, 122 bp, Homo sapiens
acgtgtcccccagccccaggtctcgcatctggaaccccaaggcggcaaaaagttccaaggcggggacgcgcagccggcgcagccagggtcgtccggtcggtggccgtcctctgcagcccggt

SEQ ID NO: 339518 - DNA, 122 bp, Homo sapiens
cactcgctggtcgcgtcgcggccacgaggaaggttgagcgcgagctgggcgggcgtcccgcgcagcccggagagctgaccctccacggaggggcattttaataaccgcctgtacacatccag

SEQ ID NO: 339519 - DNA, 122 bp, Homo sapiens
agtaggagcaacatctaggattctccgtttgggtttctaatccggggccggcacctgtctcggcgtcctgccgctgtcccaggccggtggtgctggattccgcggcgcttgggcagaaacga

SEQ ID NO: 339520 - DNA, 122 bp, Homo sapiens
tcttgatgccaagtgtggcatctctatctgaagagctgcttctgttagacccaggggccccggcctctgttttaagggggcagggcgtctgcaacaggagtggcacacggtgaagtgctggc

SEQ ID NO: 339521 - DNA, 122 bp, Homo sapiens
tccgggatctgcaagtctggaaaggccacgttgtggaccttggcgcagaggttatgggggcgacccggagcggatggtttcaggaaaactagaacccaccctcatggcctgaacaactggag

SEQ ID NO: 339522 - DNA, 122 bp, Homo sapiens
tccctgccctctggagactcagccattaaagttgaggtggggggatgaggatgtgggcggcgtccaggtaactctgaggggccctgatgccttccctagagccagccatcaggagtaacacg

SEQ ID NO: 339523 - DNA, 122 bp, Homo sapiens
gcagctgccccgcaaccacctgttccacgatggctgcatagtgcaccggctggagcagcacgacagctgccccgtctgccgaaaaagcctcccgggacacaacacggccacgaacacccccg

SEQ ID NO: 339524 - DNA, 122 bp, Homo sapiens
agagtgcgccctctactggaggggtgaagaaacctcatcgtaacaggcctggtactgtggcgctccgtgaagttagacgttatcagaagtccactgaacttctgattcgcagacttcccttc

SEQ ID NO: 339525 - DNA, 122 bp, Homo sapiens
gggacaacctttgcccagacctagaaggcacccctcctgggtgacacaaaacaacccatccggatgttttctccatttggcagccactcaggccaacccttgtgatgctacccactccactg

SEQ ID NO: 339526 - DNA, 122 bp, Homo sapiens
tcctagagggaaagcgggagatgagaaatctacgagatccgcgaggcggcgtccggggagcgagcctcatagtggccaccagggggaatgcggagctcaccttgggccgcttccgcggggag

SEQ ID NO: 339527 - DNA, 122 bp, Homo sapiens
agaaggcttatcttagcagtcaaataagggtggaaaatacaggtaatttcatactttttacggtagttactaggagaaagtcttctctggtaatgaagtctgacccagaagcctatgagtca

SEQ ID NO: 339528 - DNA, 122 bp, Homo sapiens
cccctctgtagagagaaggggcctcctgtcctatggaaagctgagtttctgttttatacccgcctgctgtgagaagaatgttaggggtcagaagatagtccaagttagcactttgttcaagc

SEQ ID NO: 339529 - DNA, 122 bp, Homo sapiens
cgcgcggtgggcggtgaagctccggggggcggagcctgggcgacctgcggcggcggggagcgctcaggtgggagggagcccgagaacgcgggcgcggagggtcgcagctgcgggtccctcgc

SEQ ID NO: 339530 - DNA, 122 bp, Homo sapiens
caggccacccggagcaccacaccacccggagcaccacaccccccggagcaccctgccacccggagcaccaggccacccagagcaccaggccacctggagcaccaggccacccggagaaccac

SEQ ID NO: 339531 - DNA, 122 bp, Homo sapiens
cggactgtgtctgccttgttgactacaggtcctcaaaaaacgtcattttattcagttcaacgtcctttccttataacattgatgagaaaaaaaatcagttttcagctggagttgtttgggtg

SEQ ID NO: 339532 - DNA, 122 bp, Homo sapiens
ccaagttccgttagcaggttcggttgctccagaatgccttttcgccccgaggggcgggaccgacgggatgggccctgtggctggctcctccctctgtaagcagcagccactgacccgcgggg

SEQ ID NO: 339533 - DNA, 122 bp, Homo sapiens
cctccttttggccgtgatagaaatcgggattctgacaaaacagatacagactggagggctcgtcctgctacagacacctttgatgactacccacctagaagaggtgatgatagctttggaga

SEQ ID NO: 339534 - DNA, 122 bp, Homo sapiens
caacacaagggaaaggcaaagtctccttagtaaaatgaaacactgacatttttagtgctacgcggagaggactcttacagtgcaatggtagccattttccaggtgtccagctgtccctcagt

SEQ ID NO: 339535 - DNA, 122 bp, Homo sapiens
ctcgtaagatcgtggcaagcatcaacgcatcaaactccaggcctaagctgggtgtgaaagcgcccccctgagagtggggcggaattcccacgtctctccccgcccggtactgcctttcctca

SEQ ID NO: 339536 - DNA, 122 bp, Homo sapiens
accacatgatccacccgccttggcctcccaaagtgctgggattacaggcatgaactactgcgcccagcccataagtactcttagttcacaagttaggaagccactataatgagttctaccag

SEQ ID NO: 339537 - DNA, 122 bp, Homo sapiens
ttttatttgtggaataagaatgtattatcacaggggaaacatagaattttgcttaccaaacgttaaaaagaaagttgaactcttgtgctaaggtaaaggggtatagatatagaagaaagttt

SEQ ID NO: 339538 - DNA, 122 bp, Homo sapiens
ttcttctgtcttcatgtttgttcctaatgaaaaaatactgtaacattttttattttcttgcggacatactgattttgtgatgtgttcgtttttaccttactaaagatatgtgttttagaaga

SEQ ID NO: 339539 - DNA, 122 bp, Homo sapiens
agaatttcaggggaactctaaaaagatttctctttctcctattttataacaatgttttgtcgccatactgattgaaaaaataatgctgagttgatctttaaatgtcctcctgggaggacaag

SEQ ID NO: 339540 - DNA, 122 bp, Homo sapiens
ccctctttttgaaacaccctcttctcttcccttcagctcaatagactctactgggctggtcgctccttctctgttgcattggtttttgtcttctgattttctgaactttaaaagcttgagtg

SEQ ID NO: 339541 - DNA, 122 bp, Homo sapiens
atccctgttgaccggaaactccgcctcccagcttccggcgattctcccacctcagcctgccgaatagttgggaatagagatgcccgccatcgtgtcctgctagttattatttttattgttgt

SEQ ID NO: 339542 - DNA, 122 bp, Homo sapiens
cagatttggtgaaggatgcaggtctcataatttacagagcaatcacagccttctttgaaacggagaaattagattctatgaaattttgtcagtgcagatagatatgatgtggagaaacgggg

SEQ ID NO: 339543 - DNA, 122 bp, Homo sapiens
gagcttcaggctgaatgaacaccaaatgcaaaggccctggagtagggaggtgcctggcgtcgtttgaggaacagtaagaagcagtgtggctggagcagagggagtaagtgggaggcaatgag

SEQ ID NO: 339544 - DNA, 122 bp, Homo sapiens
ggcgagtgtgtgtccttatcctagcaattggggcgcgggcctgtgagccagttggagttgcggcggcgggaacgattgggctgagcagaggacgacatgttgcttttcgtggaggtgagtgc

SEQ ID NO: 339545 - DNA, 122 bp, Homo sapiens
gaatcatgctacggaacactcaggcaggtgccggccattctggaaacacgtgtatttcggcgtatcgtgtactggcatgctgcggggaatagcaatgaatagcgtggaggacaatcgtgcat

SEQ ID NO: 339546 - DNA, 122 bp, Homo sapiens
aacccctccctccctccactgtcctacctataaagtggaaaaaaataacagactccctcacggtggctgcatatactgcgtgcacagagctcaactggaactacgttgcccagaatttcctt

SEQ ID NO: 339547 - DNA, 122 bp, Homo sapiens
ccgaccggaaaaaggcaagcgtccttcgttctcgcgggtctgttagaccagatgcgaacacgactgtgcctccggcggccgtgtggtcaaatgcgctgccgtttgacgcaggcgcagagctg

SEQ ID NO: 339548 - DNA, 122 bp, Homo sapiens
gaacgtagaaagagtgaaatccaagctgcagggttctcagggaagggcttcctccctgaacggaccaggctcacaccagagagtatttgcatataaccctgcgtataaggtcgtatgccttt

SEQ ID NO: 339549 - DNA, 122 bp, Homo sapiens
gccggcctgtctgccgcgatggatgacagtaaggtaagtcttgtggtttgcacgcgccgccgccttcttgtcgctcaatgctagtcccgcggctgaacctccgctatgtagtccacgccaac

SEQ ID NO: 339550 - DNA, 122 bp, Homo sapiens
atcggcatttataagactaatatgacagcagatgtgctttcctctgacgcccgtacgctgcggaatcgcattatggaaatagagtgccaaatggatgccttgacctcggggcccggcctatt

SEQ ID NO: 339551 - DNA, 122 bp, Homo sapiens
aaggatttgagtaaacggagcttctcaagtcagcggccaggcatggaacggcagaatcggcgccctggcccagggggcaaggctggcagcagtggcagcagcagtggaggaggcggtggggg

SEQ ID NO: 339552 - DNA, 122 bp, Homo sapiens
gtggagctgctgctgggggaactgtctgagtccatatgctgccgctggaatttcttggcccgggattccttgcccagggaaggctggacccagcccagcaccagcagtatcaggacaagcag

SEQ ID NO: 339553 - DNA, 122 bp, Homo sapiens
tgcgccccccgggagagcctcttgggctttcggagcgggctggagagctcccctgagcttcggcgactctgtggtgcaaacttggtaccttccgcgaaggagaccgatggccgcttggcccg

SEQ ID NO: 339554 - DNA, 122 bp, Homo sapiens
gtgtggtggcaaccatgggccgtggatctcccagacagccctgctctcccaagccagggccgcatgaagccctgcccccgcctggctcagcgctgctctgctctggcccaggttccacctcc

SEQ ID NO: 339555 - DNA, 122 bp, Homo sapiens
tttaggtacaaactcgtgagctggactcgcagtccggagttcgtaccccacagaactcttcgcagggagtgtcttactcgctacagccggaccctaagcgcatccgccttcccaagttcatc

SEQ ID NO: 339556 - DNA, 122 bp, Homo sapiens
tttggtgcagcaatttggtgacttattttgattgtcccaaagcctttttgtttagttccacgttctctattaccctttggaaaagcaacatttcaggacgaatgaggtgttactgtagcata

SEQ ID NO: 339557 - DNA, 122 bp, Homo sapiens
cgaccaaaagagagaactggcgcgccgcaacgtcacttccgtttggggcattggaaggggcgtggctcgttgtgtgggcagttggacaggatggaactcttcaggattctagtttccctccg

SEQ ID NO: 339558 - DNA, 122 bp, Homo sapiens
ctcggcgcctcccttcccgatcccggctcgccccagacttggagactgcgtttgcaggcgcgaaaggtcttggggaaccaagcaaaagaagagggaattgttcagagcaagcggacttcccc

SEQ ID NO: 339559 - DNA, 122 bp, Homo sapiens
aggttcctatagggtaccttggatctcagggactctgggtcctagggactcggtggggcgcgtctcagcagtggtgtgcacggcttgggctgagaggcccttcctcagatcccttccttcct

SEQ ID NO: 339560 - DNA, 122 bp, Homo sapiens
gttctgactcttccacagctaaggctgagagcgtgcccactctgcccagagaggccccggcgtctgagagcagagcccaatttgctggcacaacctcggccaccaaggcaggaagggcccta

SEQ ID NO: 339561 - DNA, 122 bp, Homo sapiens
aatctctcgcgcccggcgcagctccccttctcagggaggctgaggtgcggccagacccaacgaggccacgtaatcattccgggcccacccgctcagtgtctccagccccggccgcgctctct

SEQ ID NO: 339562 - DNA, 122 bp, Homo sapiens
cccaccaaatattttggttgtgagctgggagcacagacccagtttgatgttaagaatgaccgttacattgtcaatggatctcatgaggcgaataagctgcaagacatgttggatggattcat

SEQ ID NO: 339563 - DNA, 122 bp, Homo sapiens
tgccaatgaggaagaggaaagaacggctgaatacgagatcacagaacgagaaagcggccgcggagtgggactggagactgtgaatcacgcaggtgaaatcagaatgggatcccactcgagac

SEQ ID NO: 339564 - DNA, 122 bp, Homo sapiens
cgtttcaggggcgagtgacgccggggtgcccaggccgcgccccagttccgggtttgcacccggtcttcttgccctgccccgcccgcgggactacagttcccaggcgcccctgcgcggccgcg

SEQ ID NO: 339565 - DNA, 122 bp, Homo sapiens
cccacccctcctgctgtgtgggaggccctgggatttgcctccgtggccgcaaagccccagcggtgacaggaaggagtgacccagaccccaaggggaggagccctcgcctcgatacctcgggg

SEQ ID NO: 339566 - DNA, 122 bp, Homo sapiens
gtccccgggcgcgcacggccggcgcggcggcccagaagggaagagctcgtcgcgcagccccggcccgcacccccgctcctggagctccagccgctcgccctccaaatctcgctcgcgctctg

SEQ ID NO: 339567 - DNA, 122 bp, Homo sapiens
atgcctcacggacggccctggtcccctgagtctccgggtccaagatcgaccccgaggctgcgggacctgcagagatcctcgacccgggagagccccaggcgcctttacctggtttcatcttc

SEQ ID NO: 339568 - DNA, 122 bp, Homo sapiens
cgccgtcttcatggtcaggctgaaatgtcacagtctggttatccagcaggacacggattgcgtcgtgaggctcaaggagccattggacctggaaggagatgggagggggcctgagcccgacc

SEQ ID NO: 339569 - DNA, 122 bp, Homo sapiens
tggaagagaaggctaggggtttaaggttggtaatctctcagaagatctgcgtctcggtgacggaaagaactaagggtaagtgctgagaagcctctctttacagccagagaacgagccagagc

SEQ ID NO: 339570 - DNA, 122 bp, Homo sapiens
gagctggccatggcgggtgtgactctgccagtgccctgggcagtagagacaggagggggccgaggaagctgcatgaagtggtgcttggtttctgcgcccacactgccaggaggcccccagag

SEQ ID NO: 339571 - DNA, 122 bp, Homo sapiens
cctgctgaaatattggtcatgtgttctaatgcaggataacctctgcactgtgtccatcctcgtacagccaggttcccttgctgtggtgagtgtgtcggagggaggtgagggaagtgtagggg

SEQ ID NO: 339572 - DNA, 122 bp, Homo sapiens
cccgcccgggccgcttaagtgtgcgctgttggtcccgccccgccccgccccgccccgccccgccccgctcggtcccagaggcctcaccctatattcctgacaaatgccagacaagggcttag

SEQ ID NO: 339573 - DNA, 122 bp, Homo sapiens
agacgcggactgcgtggagaaagcacgcacccgggccgcagtagccgggcagggggacggcggaaagcagccctctctggaacattttattctgatccccgcaggactcccccgcgagcccc

SEQ ID NO: 339574 - DNA, 122 bp, Homo sapiens
aactgaggtgggcccagggcttgagctgagttggcgagggtggaggtggtgccggtcccacgccgtggtggggaccgagctgcgggctggagggaggggcagcgccgagggggcgggacggg

SEQ ID NO: 339575 - DNA, 122 bp, Homo sapiens
ctgtggaccagcgtgtcctgcactgagacacacaccacgcacaccaacagggacgaagcacgttgcccacattgtatcgatgtatgcgaatgtggataagtcagctcattttctccttcccc

SEQ ID NO: 339576 - DNA, 122 bp, Homo sapiens
tgcttgtgtttttagtcaagtctattattattactattttctttgcagagacgagggctacgttgcccaggtcttgaattcctgggctcaatagatcctcccgcctcagcctcccaaagtgc

SEQ ID NO: 339577 - DNA, 122 bp, Homo sapiens
tctcatctgtggccactttgtgaaccctcgggtgtttgtcagtttcagtgcgggctcctgcgggatttaggtgggagtcttaggagcgtttaacaaccgcgggctccccatcagcagcttct

SEQ ID NO: 339578 - DNA, 122 bp, Homo sapiens
taatcttggcaaaatgactatcttcaatcagaagcatgtacaattggccctctgtctcagcgagttctgtatccacggattcaaccaaccatggattgaaactatttgggggaaaaaaaagt

SEQ ID NO: 339579 - DNA, 122 bp, Homo sapiens
aaggaacgtgctggccgcaagtgtgtgccctggcaaggagtggaacgcagccagggaatgcgctagctcagacttctttcgactgtttattttctgtcctgctattttcaagtatgctatgt

SEQ ID NO: 339580 - DNA, 122 bp, Homo sapiens
caattctgaaatgctggccgggttcttgctgctcaaactgccagttgcaaccatggtcaacggctctgtttccttcgcgaggcgcaacggcctttcctgagcgctggaaaaaatgaggcgag

SEQ ID NO: 339581 - DNA, 122 bp, Homo sapiens
caagggtgggcctagctctctactgccacctcctgtcagctagaaacatgcagagcggtccgtaagaaactgctcaagccttaggcagagcaggagccgtgatggctcactgaaatacagtc

SEQ ID NO: 339582 - DNA, 122 bp, Homo sapiens
acactgctcctaagcttagagagggctggtcgcaggccgaggggaggcagctgccctcctcgtcctctggctgctttgtcacagccctcaagggcgtaggaagagaaggagaaagtgcccca

SEQ ID NO: 339583 - DNA, 122 bp, Homo sapiens
ttcgccgccgcggcctggcctgtgtgggaatctccttcccttttgtggggaactgtgtcccgctgtgtgcagggaccgcatcgaccgcgtccgctcatctgtgggcatcttgatggacacct

SEQ ID NO: 339584 - DNA, 122 bp, Homo sapiens
acgggcagcctgcggagaggcgggaggcggcgccaatcggggcgagcagctggagcccggcggagcagttggctgagttgttgcaacttttttcgaaagctgggtttcccgggagatcccag

SEQ ID NO: 339585 - DNA, 122 bp, Homo sapiens
taaaatgagaccaacaatcttttccacacagaatttgcatcaagtttgctcttttgtaagcggcttcacctgctatttaaatagtctgttttctttgtggtcctgctttttagactcaagag

SEQ ID NO: 339586 - DNA, 122 bp, Homo sapiens
ttccccttatccggaatcttgccagccccccaagcacagcaaacagagaggcacaaaggacgaggatggaacgcgattcacaaacaccacagtcacaactcaccatctcgcttctgcggccg

SEQ ID NO: 339587 - DNA, 122 bp, Homo sapiens
gcaatcagagaacaccgccaggacttccaggacttggtctccaggactgaggtcaactgacgtgggcgtggtctgactgtgtgggcgtggccagggaatgaactcacggctctggcttaagg

SEQ ID NO: 339588 - DNA, 122 bp, Homo sapiens
ggccctacgccagccctgcttccaggagccacgtcagcgcagcagcgtacgggtccgggtcggaactgacgcgacccgtcaccaagggccagcagggaccactgtaagagcctcagtccggc

SEQ ID NO: 339589 - DNA, 122 bp, Homo sapiens
gctgggaggttgtgcggggcacgccagcatcggggtgggatcccaggcatgtagagcagccgggtgtgtcagggagctccgtgtcccggaatagcactttgacaccttgtttcttactttcc

SEQ ID NO: 339590 - DNA, 122 bp, Homo sapiens
aggacagagggtggctgttctaagccaccgagggagtcacgcggctttaaggcagtagcccgcagatgtgcctgctcccaacctcacagagagaactaggctccttctatgtgcctggtgtt

SEQ ID NO: 339591 - DNA, 122 bp, Homo sapiens
tgcccagaactcttctgttcccaggagaatcaggggagtcggcgccggaaggggcgggtccgagctgagatttccagagccatgggagccggaagtccaaggaactgtacctccatcatgac

SEQ ID NO: 339592 - DNA, 122 bp, Homo sapiens
caccatgagtaaaagcttccagaatcccccaacagaagcagatgctagtgccatgtttcgcgtacagcctgcagatctgtgagccatttaaagctcttttcttcgtaaattaggtaacttca

SEQ ID NO: 339593 - DNA, 122 bp, Homo sapiens
taaagcaagggcaaccagctccttcgccgcacttcccgctcgaccctcggttctggacaacggagatcgtccccagtcaaggtgattatatcgcagatctcacttgggagcttctcttaacc

SEQ ID NO: 339594 - DNA, 122 bp, Homo sapiens
tgtttttgcatcccctgtctcccccatcctttgcatatttttctctagtggattttcattcgcagttttccaggaaagctgagctcttggcttccttcctgatccctctgtcccaccccacc

SEQ ID NO: 339595 - DNA, 122 bp, Homo sapiens
cgggaacagggagggacctccagggaagcgaaactgaaactttgcgcccagtccgcagggcgggccgcgcctttaccgcccagctgcctcccggagcccccgcgccctcccgacgcgcagag

SEQ ID NO: 339596 - DNA, 122 bp, Homo sapiens
cctgcctaagttcaaattccagctctgctatttcctagctgaatgactttgggcgacttacgtaagttcagttttcttacctataaaatggaaataataaaaataataggccaggcacagtg

SEQ ID NO: 339597 - DNA, 122 bp, Homo sapiens
ccggacctcagcagggggcaccgcgggccggactgtggaggggcgcacgcccggaagcggcgagggtagccatgacggcctccgtgctgcgaagtatctcgctagccctgcgcccgactagc

SEQ ID NO: 339598 - DNA, 122 bp, Homo sapiens
aaaagagaaacgctagcgtttacgcaggcggagggcaggctggactggggacgctcctcccggccgcctcgttgctggcagcgcttccgcccgccggcgcaccagtcagtaccgcgcccggc

SEQ ID NO: 339599 - DNA, 122 bp, Homo sapiens
gcccagcgccggagggggaaaaaaaaaaacacagaccagagaaggaaccgtaaatcaagtcggaggggaaaagagccgcaaagccttctgcggcagccgtaaagcaacctggaggcgcggtg

SEQ ID NO: 339600 - DNA, 122 bp, Homo sapiens
gggaaagatcgcgggcgggcggggctcctggggagcgggaccgaagctgggggcgggcgacgggccggagcccagcgcctttggggattcggtgggcgagccctggcggcggccagaggaag

SEQ ID NO: 339601 - DNA, 122 bp, Homo sapiens
agcaggagctgcgggagcgggccttcttctcgtgggccgagttcagccgcttcttcgacgcgtggtgccagcagcggctggcgctcttcttcgtcaagagctccatgcacctggcgcgctgc

SEQ ID NO: 339602 - DNA, 122 bp, Homo sapiens
cttgacccgcagccgcgatgggcagaaccacccgcgtgacaggcagcagaattgacaggtcggaacaagggaggccccaggacacagcagacacagcgctgcgctgctgcgagcctggctat

SEQ ID NO: 339603 - DNA, 122 bp, Homo sapiens
gggtctcagtttctagcaggctgtgcagggtaccgccggcggcgccacgcaggtagattacgcaagcgagcacctcgcacgcgcgccctgagtggcccctgtcagtcacgcgcgggggcggg

SEQ ID NO: 339604 - DNA, 122 bp, Homo sapiens
gcaccacgtcccgtaacatccagcttcttctctgctctcatctcccccagcttcctccttcgcttgcttcatcccagccacacaggcctcctcgctatgcctccagcgcacctggcacggtc

SEQ ID NO: 339605 - DNA, 122 bp, Homo sapiens
gttctgtttaccggatggtgccaaacagttccaggctcttggtgcccggtagaaattggacgacacacacacagatagcaaagcaaagcagcaaaagtttagtaaacagagtattacactct

SEQ ID NO: 339606 - DNA, 122 bp, Homo sapiens
ttcaagcccagccaatgcggccggccaggatttacagctcttatcaagggttagattttgcgaaagatataaagaaaggagtttcctaacacaccgggtcttctcacagcaacaagacaccg

SEQ ID NO: 339607 - DNA, 122 bp, Homo sapiens
gatttgttttccttggtatttatttgtaaactattggcctgtctgaggtccatttagaggcgagactaaatgacccaaggtgaggaggtgtcagggttgcctgtagataggtgttgatatgg

SEQ ID NO: 339608 - DNA, 122 bp, Homo sapiens
cagctgtgccagccccgggctgacccccaccgagagccggggctctgccttcgccggccgcggaaccgggctccactcagccctcagcccgcctccagggccccagagccaccaactggggc

SEQ ID NO: 339609 - DNA, 122 bp, Homo sapiens
gcttgagtcccctaattcggctcggcgctgacctgtaaaactccccttggtcggactgcgcgcttagggcctctcgcgcctgccagcctccgctctgcgggcattcctcctagcaccgggag

SEQ ID NO: 339610 - DNA, 122 bp, Homo sapiens
aaaagattgtgtacatcttgctggaaaatgctgcccagggctctggagacggtggctgcccgggctcccttcactgtccaggtcctgaaagactcttgttcatgaactgtctcttcacaaag

SEQ ID NO: 339611 - DNA, 122 bp, Homo sapiens
caatggggagaccctcgggggccctacgtgtgcctctctgtgctcccagggcccccgccacgcacgccgcctgctctgaatgctgcctgcataaaccggtttttctaaatgtctttggggcc

SEQ ID NO: 339612 - DNA, 122 bp, Homo sapiens
ctgtctcctgggttcaagcgattcttctgtctcaccctcccaaggaactgcaattacaggcgcatgctacgacacctggctaatttttgtttgttagtttgtttttgggacagagcctcagt

SEQ ID NO: 339613 - DNA, 122 bp, Homo sapiens
caggctggtgcttgcgggaggtgagcgtgaatgccagacttcggtgcaggctggcacttgcgggaggtgagacgtgaatgctagaggcctcggtacaggctggtgctcccaggaggtgagac

SEQ ID NO: 339614 - DNA, 122 bp, Homo sapiens
tacagcgtaacttacagcacctggctataaggcataataccattgttagagaatgccaatcgtagcatttaaaaactaaatgaaagaaggaacttgtttagaaggaagtggagttaaccacc

SEQ ID NO: 339615 - DNA, 122 bp, Homo sapiens
ggacgcgcctggtagccgaattcagaggccgctgctgtcaggcagggcagccccgggcagcgcggagaaactgctgatacttgtttaccaagtgttgctttcaaccatgataccgcctttac

SEQ ID NO: 339616 - DNA, 122 bp, Homo sapiens
ggcaaaggagatctgccagaagtacctggagaagggcgcagggaggcttccggaggactgcgccgaggccctggccacggctgcctgcctgtgcctgcggaggcgtaacaccagcctgcagg

SEQ ID NO: 339617 - DNA, 122 bp, Homo sapiens
ctccagatcttatgtggaaatgtgatccccagtgtgggaaggggcctggcaggaggtattcgggtcacggggacagatccctcgagaatggcttggtgccctcctcacagtaatgagtgagc

SEQ ID NO: 339618 - DNA, 122 bp, Homo sapiens
aaggagggcttccgcccgggtgagcgcggggctgctgggtgacccggctcctgcttgccccgcagccccggccccctgcccaccatgaacgccagcggttctggctacccgcttgcctcgct

SEQ ID NO: 339619 - DNA, 122 bp, Homo sapiens
atggttgtctgcaggatttagttcttcattggctgttggactgagtcccaggtctttgctcgctgttggctggaagcctttctttgttccttgccatgtgggcctctgcgtatagcagctga

SEQ ID NO: 339620 - DNA, 122 bp, Homo sapiens
ccaggggctgaccgaggggaccggaagtgcccgtgatcctaatcctcgggaaccatctggcggcgacttgggtccactgcagggggctcccgagctgcgcccagccgggagcggccccaccc

SEQ ID NO: 339621 - DNA, 122 bp, Homo sapiens
tcctctggttttatgcagcattgtgacaagactcaagattcttgagtccagttgaacttccgcatgttcatcattccttttttagatgctgtctacatttagaccccaaacctgcacattca

SEQ ID NO: 339622 - DNA, 122 bp, Homo sapiens
ctctggctctgatttctcggcctttccgttttttctctccaggtagagacagctccgggccgggggtggaggatggtgcggtggggaggaggcaaggaaattcccagccttcctgcgcgaac

SEQ ID NO: 339623 - DNA, 122 bp, Homo sapiens
taccgcaaggttgaccgtggacatacttgggaatctctcatcagctgttctcaatgttcacgttcttagcataccttcaccctagagaaaggccccagattgggcgccagatgaaggggtgg

SEQ ID NO: 339624 - DNA, 122 bp, Homo sapiens
tgcccatgttgcgggggttcccagggcgtggggtcaggagttaggggtgtgcttctctcccgtccccttgctgccggggtctcaggtccgcttttccccgggaccgggctccccctaccttc

SEQ ID NO: 339625 - DNA, 122 bp, Homo sapiens
cattccatccgtggtttccctgggtcagggattctgtctttcgtccctggcgtgccgcgccgcgtgggtgttgacggctttttcttcctgctcccgtcctttgagggtgtgccttttgctgg

SEQ ID NO: 339626 - DNA, 122 bp, Homo sapiens
tggttcgatgccagattggcaggtccccgccggcagtgcgtgtggtgaggcaggacatggcggaggcaggaaaagtgcccttgagcctcgggcttaccggaggagaagcggcagagtggcct

SEQ ID NO: 339627 - DNA, 122 bp, Homo sapiens
cctgcctggcccactgtgcaggcccagtgtgtcaggattaaatgcagtgggagagagtcccgcattcctgagcaagtcctgtgttctcagagccttaatggtcagacagaagaatattttgt

SEQ ID NO: 339628 - DNA, 122 bp, Homo sapiens
aatcacccgctgcgggctcccgtaagcacagcttcctggcgggaccgaaccagccctcagcgcagatttgagttccccgcaggaagcacaccccgccttgtcatcccgaactgaccaccctg

SEQ ID NO: 339629 - DNA, 122 bp, Homo sapiens
gcccaggccaagagggcgggggcgtcaggggcagccagcgccgcctttgcgcaactgaagcggatgaagccgcctgctctcaggtcttctaaggagaaggtctttttatcactcccatttta

SEQ ID NO: 339630 - DNA, 122 bp, Homo sapiens
gctatggactcccaagactctcactgcaggactgagctgctggggactggcagctgggggcgggggctaaggggcggaggcttggggacgggggcgggggctgggggcggagaaaagtagga

SEQ ID NO: 339631 - DNA, 122 bp, Homo sapiens
tccgacctcctccctgacgccgcgctccgggcccagtctgcctctctccagcccggagcccggactccgtggcagcccctgcctaactcgagcccggacagcttccccccgcgcccgccggc

SEQ ID NO: 339632 - DNA, 122 bp, Homo sapiens
aagcaatgcgcacgcgcagtggctttgaaggcggggcaacaaagcctgtggccgatgtggcgctcctcggcccgcgcttcagtggttatgacagtgttcgctctaaggggagaaggaatgtg

SEQ ID NO: 339633 - DNA, 122 bp, Homo sapiens
gtggatgtaagccctacatccaggaccttgaaggcctaggaggagccatggcaggagccacgggcacctaccagcatccctgggggtgggcagggcttggtgccgtgctagcatctaaccca

SEQ ID NO: 339634 - DNA, 122 bp, Homo sapiens
gagagctaatgaagtggaacagctgcccgtgcgaaatgatgctccagggcccccacggcccgcccccccaatgaccaggccaggcacatttgcaaattaatattgttcctggtaacgttgtt

SEQ ID NO: 339635 - DNA, 122 bp, Homo sapiens
atcaccccggtcccgcacgtgttcctgtgctcccctcacccccaaccccgacacagcaggcgctcatgagtaggggcgaaatgaatgaatgaccagcagtacattcattccgtcctttggag

SEQ ID NO: 339636 - DNA, 122 bp, Homo sapiens
aagagatgtcatgtgtaaaaatttcaggtacccagtgcctcactaaatgttagtagactccgaataatactcaacttatgcaaccctacttagctttcctggtgatgagcagagttaacttc

SEQ ID NO: 339637 - DNA, 122 bp, Homo sapiens
ccttcatggcagcagccaggccctccctgcacaggccttgaagggagaggaaaaatggaacgctagcctggcttcttgacttccttcaggcaacgaatccatcttgaaggcccactgtgtgc

SEQ ID NO: 339638 - DNA, 122 bp, Homo sapiens
gcctgtcacagagacaaggggccagtgcagcgctagtgcggagagacaaggctccaggcacggaaaagcagatgccgggccggggttccagcgccgcagtcacggcggtggacggcaagctg

SEQ ID NO: 339639 - DNA, 122 bp, Homo sapiens
ccttgaataagccgtgatgttacaacggcaccagcatcatccctagtgctgttgacactgcgtagagaagaatgctcactgcatgccaggtgctgctcctgtcatactcacaacactctatg

SEQ ID NO: 339640 - DNA, 122 bp, Homo sapiens
gtcctcagtggctgctaacatgcaaggagggaagggggttgatattactctgcgcatcagcggagcgtgtccacgcccctgagatgtggctcctatatccatggggaaaggggatagatatg

SEQ ID NO: 339641 - DNA, 122 bp, Homo sapiens
gtgccggactggctgcgagcagaaactacttcagtcgctttaaatctcaacacttgtggtcgctgggagcagagcttttaggctgtagctcagtcttgtaattctgagctaggagtttcagc

SEQ ID NO: 339642 - DNA, 122 bp, Homo sapiens
cccggctagagtggcctgtgaacaccggtcgggcgagctggcagttgggagtttccctagcgactcagttcgggtgggcgttgggcgcctgagtcagccaaacagcctactcggggttcttg

SEQ ID NO: 339643 - DNA, 122 bp, Homo sapiens
tgaacccaggaggcggcggttgcagtgacccgagttcgcgccaatgcactccagcctgggcgacggtgagacttcgtctcaaaaaaagaaaaaaaagtaaaatgtctgctaggttttgggag

SEQ ID NO: 339644 - DNA, 122 bp, Homo sapiens
tcagtaaatactaactgactaccatgtgttgggcactgctgcaggcacaaggataaggcccggccacaattcctggtccacgtgcagctggcattccactgggtgaagacagatagtaaggg

SEQ ID NO: 339645 - DNA, 122 bp, Homo sapiens
gcctggaccggagcttttgctacgaaggactggggggcgtggccaggaggactgtgcttccggcagggccgggccgtggccgggggtgtggccgcggggagggagatgggcgcggagctgca

SEQ ID NO: 339646 - DNA, 122 bp, Homo sapiens
taattctctttggcttaattttaatgccacagacttatctgtgcattccctttgttctatcgtggcttagttctaaggtgagaagaagaatctaggtaaggattgactaaagaaaatgacac

SEQ ID NO: 339647 - DNA, 122 bp, Homo sapiens
ttcccgcacttccctgacccctgcatgactcagcagagggaaccataatcctactatttacgcaattccagtgacctgggaatctcacccccattccccacagcagccacagcaagacctgc

SEQ ID NO: 339648 - DNA, 122 bp, Homo sapiens
ggagtcttgggccaggtagtatcagcttaacctctaaaggctggacactgaagtcagccacgtgggctgtcagccatgcctacatgactggcccccaataaaaaccttggatgccatggctt

SEQ ID NO: 339649 - DNA, 122 bp, Homo sapiens
gcgctccagccgcaggaggggcggtggccgccgcgtaggccggggagcccccgcccgctgcgcaccctgcctgccgcaccccgcctcgcggtcccggagccccgggaccacgccgtgccccc

SEQ ID NO: 339650 - DNA, 122 bp, Homo sapiens
cttctcctcaccacatcctaaccatggctgtgtttctgcagctgctaccgctgctgctctcgagggcccaagggaaccctgggggtaagcgatccctgggagagttgtgatagacgcagagg

SEQ ID NO: 339651 - DNA, 122 bp, Homo sapiens
ccccccgctgctggggtcctcggccaagcccccttctcactggactggtaagtgtggccccggagcccgggggagagggcggtgacccgggacaaaggggatcccccggggcaaggaagata

SEQ ID NO: 339652 - DNA, 122 bp, Homo sapiens
agaacaaaagaaaactccataattgagaaatgctcctgattttttcagtgaatctggcctcgtggagctgcaggaggcccccaccaggcccccacccctttccaggcctagaggaaaggcca

SEQ ID NO: 339653 - DNA, 122 bp, Homo sapiens
gggggaatttccctgatcccagggaaggggaaggaaatgaattctgacgagccacgtagccgcctgctcgtgcattctagcatttgttttcagcagccttacgacttcaagagatttttata

SEQ ID NO: 339654 - DNA, 122 bp, Homo sapiens
aggccaagccaagtgctacctagagaggccagcatgtgggctccacatttctgctgaagacgcctgtgcccacaagtgagtaccatcaggctgaggtcccagggtacgctcacagttcattt

SEQ ID NO: 339655 - DNA, 122 bp, Homo sapiens
tattcatccataatatgggaatcataaaagcatcaaccttaaagaattaatgtaagcctccgtttaatgccctttaatcacttagaacaaggcctagcccctagtaatcactaaccgttgat

SEQ ID NO: 339656 - DNA, 122 bp, Homo sapiens
tccaagttaaggtacttcttataacttcaccatttgatttccaggagctgcaggtggagccgaaagtgtggctctcaattttttcccctgaggatgaatcttggaacaacgtagtgggtgaa

SEQ ID NO: 339657 - DNA, 122 bp, Homo sapiens
gctcggcacatacgagccatggtgctcattggccacagtggcatgagaagggtgtggagacgtggaaacacttgcacagccactgcctccaaggagcttggagagaggggacagcccagcat

SEQ ID NO: 339658 - DNA, 122 bp, Homo sapiens
tgaggcagagagagagtggagctggacttggatggggagttttggtgcaaagagaggccacgtggctccccagagcaccaggagagagcagtgatctgctgatcttctgagttttaaagtag

SEQ ID NO: 339659 - DNA, 122 bp, Homo sapiens
gccgttcgggaaggaccccggggcgcttcgaggtctgcggctaaactccgccggtggccgcggacaatgggctgtggccggagtcacctgaggaaggtacgcaacctgcttagatcacactc

SEQ ID NO: 339660 - DNA, 122 bp, Homo sapiens
ggccaacgtgtccaagctgcacctgcacggctcaccccgctatcccggcgggcccctgcccgacttccccaaccactcactgaccctcaagagggacaaggcgcccaagtcctccttcgtcg

SEQ ID NO: 339661 - DNA, 122 bp, Homo sapiens
cagccgctaaaaaagcatccagcttacaacggaacctggagggttggtaaaggccccctgcgctggccccgccccatgggaccgggcggcgtgggcgtgagaggcggggcggggccgcgctc

SEQ ID NO: 339662 - DNA, 122 bp, Homo sapiens
tggcttcatggaaaaggcagaacttagtgggaatgaacctcttttcactacaagcttgttcgtcattgaggattcacctcaactgaaattgtagggtcaattccagcctcaggtggccaagg

SEQ ID NO: 339663 - DNA, 122 bp, Homo sapiens
attaccaccaccccaaagttccatttccttgtcaattttgtcctcctcctgtgcatgccccgctgcccatgcctaacgtgtttctggccccggataatcacagatttagtttttggcactac

SEQ ID NO: 339664 - DNA, 122 bp, Homo sapiens
accctccctaccagacttttcctccagcagcctctcgtctttgtaccacacgatgctgggcgcgtgcgctccggccaccaagcactgcatctccagcgagtcgctcacgttcaccaggaggt

SEQ ID NO: 339665 - DNA, 122 bp, Homo sapiens
acaaaattgaaaatttcattcattgcatgttcacctttaatctgctcatcctgtattttccgtttcagtaaatgacaccaccatccaccaatttgctcaaggtaagacacttgaaatcacct

SEQ ID NO: 339666 - DNA, 122 bp, Homo sapiens
aactactgagtaattggcaggcaggccggactgacctgcgccacacacagagccagagcccgctgccaatgcttcaggcccaagggctgtgctcctgggtgcatagcacagaaaagactgcc

SEQ ID NO: 339667 - DNA, 122 bp, Homo sapiens
aggctgcgctgggtgtaagagccgctgagtgactctgtggctgcggctctggacacggctcgctcacagacaccgggagagtgaaaagtgggattaaatgactgccccagaaaggagccagc

SEQ ID NO: 339668 - DNA, 122 bp, Homo sapiens
acgcaggagccctggcttgccggtgagcagagccggcgcagccacagcgcggagccgcggcgcccactggtcctcggagctgccaatcggcgtgtaatcctgtaggaatttctcccgggttt

SEQ ID NO: 339669 - DNA, 122 bp, Homo sapiens
gactggcctttcttcagtatggagcacaccctggactccttgccccttgggtccatggcacgtcctctccgtctcctggagcttgttcctcacccatcctcctttgcaggagcttcttctga

SEQ ID NO: 339670 - DNA, 122 bp, Homo sapiens
ccgggaaccaactgcagtggtacaccccacggaaagctacgtctccttaccgactgcgcacgcccccaacagactacaactcccagaagcccccgcccgcgttccggcgactgcgtggcagc

SEQ ID NO: 339671 - DNA, 122 bp, Homo sapiens
cagtggcatgctcaccaggccaaagtagcactgtggtttgggctggagacgatactgcttcgacttggaacctttctttccagccgccttgttggctctgagggctccacagttgcttttca

SEQ ID NO: 339672 - DNA, 122 bp, Homo sapiens
tcccatgggtattcagaggcttgaggttgcttggactctcaattcaatactccctttctgcgggttcgtgagaattaggtgtgaacgtggtgtccgcggatttcagcagctagcgggcaagc

SEQ ID NO: 339673 - DNA, 122 bp, Homo sapiens
taccggactccactctactcactgtattgacagttagatctgctctaacctttgtagtgacgccagttttaatggtgcattcagtccattgacagagctgtgttttctcccccagcctctct

SEQ ID NO: 339674 - DNA, 122 bp, Homo sapiens
tctcccccttcctggctctcagtatcttggtcctgtaccaggcgggcagcctccaggcggcgccattcaggtgagacagcctggagccagaggcgccttctgctcccactgcccctaggacc

SEQ ID NO: 339675 - DNA, 122 bp, Homo sapiens
gtttccatggctgatgtgagggctaagcgagatactgcgtctctagcactgggcacagcacgtgataaatcagccgactggcagcaccatcaccatcatgatgatcatggcatgacagctgt

SEQ ID NO: 339676 - DNA, 122 bp, Homo sapiens
atataggtgatttcatttaagtttactacatacaaagccaatgaaagaagtgttacaattcgtctattacatattaagaaccaagtttcagagaggttaagtaatttgccctaggtgttgta

SEQ ID NO: 339677 - DNA, 122 bp, Homo sapiens
tgcactgttgtatctgcctggcgacacctgatgaggaggtgttaaacagacaacagcccacgctatgacacaaagaggaagaaggccagagaggcaaagaacaaagaggaagaggagaaaag

SEQ ID NO: 339678 - DNA, 122 bp, Homo sapiens
tctgattggcctgttggaggtcatgttcccctccatgggcctatcactgaagccagggggcgggttctacaatgggctcaatgtgggtcacagaagaaaggagagggaagaggtatcaggaa

SEQ ID NO: 339679 - DNA, 122 bp, Homo sapiens
cgtgcccacagtggctggagacgcggctgttccagagggcatccagtctgaattcatgtccgcccatgcccgcccccagctacttccagaggcatttgaagggaggacctgtgccctgcaca

SEQ ID NO: 339680 - DNA, 122 bp, Homo sapiens
agattgagccggcgacgtggaggcagtgttcaaggattgattctgtagtaggacccggggcgattctgtgctgaggtagaggggcagagtcccaggccaaagttagaacctgcggatggggg

SEQ ID NO: 339681 - DNA, 122 bp, Homo sapiens
agggtcctgggactggggctcagcagaggccttgacctgaggagtcttggctgtgatgggcgaggagtcctgcccggggcagcatagatgacctgtgctccaggtgagcagcgagcctgatg

SEQ ID NO: 339682 - DNA, 122 bp, Homo sapiens
caaccacaacactctggttgattttttatctacatttatgcccacgtggcagtctacatacggctttaatgcagccgctgtaccacagagtcgacgttcctgtttcgtgaagatcccagctg

SEQ ID NO: 339683 - DNA, 122 bp, Homo sapiens
agggcgagaaagcgagggccggaggacccacgatagagacagagtgaccatggctgtctccgcatctccagtgatctctgcaacttccagcggcgccggcgtcccggggggcttattccggg

SEQ ID NO: 339684 - DNA, 122 bp, Homo sapiens
tcactgaacaacaacaacaacaaaaaacccagagtctccaatgatctagtattccagctccgatttctagatagctaggcatgaagcctgacactgaatcctaagcaacctaaaatgcaaac

SEQ ID NO: 339685 - DNA, 122 bp, Homo sapiens
tcaccaccgctccctcatggccagcgctgaaagaaggggcgtttccgtttttgtggggggcggtggtggttgtggtttttgtggtctgagaaactcatgacagttacccacctcctgccagg

SEQ ID NO: 339686 - DNA, 122 bp, Homo sapiens
ctcggggcaaccctccctcctccaaaggctaattctagaagaggcaggtcctctttccttcgatgtcaatgtccattatgaaacagtaatttttaaatattcaggtgacacggagatgcgcc

SEQ ID NO: 339687 - DNA, 122 bp, Homo sapiens
aagtaagagcatccctggtttgcaagaagatcaaatgcttgggcccggtgcagtggctcacgcctgtaatcctagcattttgggaggccaagatgggtggatcccttgaggtcaggagttcg

SEQ ID NO: 339688 - DNA, 122 bp, Homo sapiens
tgtgtgactggtgttgcggggtggacccactgccgccgcctcctcctgggctgctctgcgcgcctgccaggctcttccagtgccttcacccaacacgcgggcctttggagctcagacctggc

SEQ ID NO: 339689 - DNA, 122 bp, Homo sapiens
tcggtgtttatggagatgcagcccttctccctccagcttcgtgcgtgtgtgcacagacagcgagtgaggccgtcagggtgggctcctgccacgtcttggcccctccccagagtcgctggact

SEQ ID NO: 339690 - DNA, 122 bp, Homo sapiens
gccaccacaactgggaatgtgctgagtcatacctgaagccagcacagttctgagtcttatcgaaggcccctggcaagtactgcctgactaccactgctgattattcagggctgaagggctcg

SEQ ID NO: 339691 - DNA, 122 bp, Homo sapiens
ttaaactgagagaaggtgaaaggggtgactggttgatttcggataatacttttagagccacggggaactgtgaaagacaagaaaatgtaaaaaaagcacattgattgcaggaccggtggtcc

SEQ ID NO: 339692 - DNA, 122 bp, Homo sapiens
cccgaatcctagtaagtctgttctccactgaactgagctgagtgcagctgacagcaggcacggcggtgccccatttgccaccccagggaggccgagcagcggagagtgtgtggccacggccc

SEQ ID NO: 339693 - DNA, 122 bp, Homo sapiens
acttctgctttgggggtatctttccccagacatcacaaaaagctcaattgtttattgcctcgaagacacattttctcttcaacaagcgctttccttaagtctgaggtagagtagcataagtg

SEQ ID NO: 339694 - DNA, 122 bp, Homo sapiens
cgcggggagggcgtcacttacagcgatgacttctagccgctgccggtagagggagctctccgccatgggcctgttgggagagggcaggggcttcgaggggctcccatcttgaacgcccccct

SEQ ID NO: 339695 - DNA, 122 bp, Homo sapiens
ggcgtcccgtcaccctgcgcccagcttccccggcccgttcccgcagggccggcctcccggcgccatgcccggcctgtactgcccctccagctggacgccgctgccgctcacggactcctggg

SEQ ID NO: 339696 - DNA, 122 bp, Homo sapiens
ccagggccctcggctcactgacctcgcccatcggctcgctggctctgccccctcggcgcccggttcccttgctgtcgcctggccccgctccttgtggttagctctgcccactctcgcctctc

SEQ ID NO: 339697 - DNA, 122 bp, Homo sapiens
aagcatgaccaggaactgtttacaaataagtaatactggggtagaggtgaagcttggtcacgggaagagagctcaaaggttgtctgtgccctaactgggctgtcctccagagggaggagcct

SEQ ID NO: 339698 - DNA, 122 bp, Homo sapiens
tgatgaccgaggtctcaatgtcgattgggtggtaccgcatgccccgcagctccatggcttcgtccagtgcccctaccacgtagagggcatcatggcgctctgtggagtaatgacagcctgcg

SEQ ID NO: 339699 - DNA, 122 bp, Homo sapiens
acctcaggtgatccacctgccatggcctcccaaagtgctgggattacaggcatgagccaccgcacctggccacttggctgttctttacttgggttggttttattttgttgtttcctttttct

SEQ ID NO: 339700 - DNA, 122 bp, Homo sapiens
gctacgcgcaggcggtttctgtgcacggagccgtagctgtcggagcggttagttcgatttcgagctcgaggtttcccccgccgccaggctgacttctcatcgcttgtttttctttttgcatt

SEQ ID NO: 339701 - DNA, 122 bp, Homo sapiens
ctgtctcaaacatccatccaacaccattctattaggacagatatgtctggtcagctaaaacgaaggaggacaggattctcaggaaatggcattgtaagtggagatgtaagtggatgaagggt

SEQ ID NO: 339702 - DNA, 122 bp, Homo sapiens
attcacgcttcagctgtaacaggaaatatcctctccatagggcgttaactttggtttcctcgtctataaaatggagagaacagtcatttctgctttggaacatgcttgttaggatgagtaat

SEQ ID NO: 339703 - DNA, 122 bp, Homo sapiens
cccgtccggagtagggccagccccagttatgcatctccagcctttagctgactactaaggcggatccgacttctcccccataaccaggttttgattcgcttccccaccgcaggggttcagtc

SEQ ID NO: 339704 - DNA, 122 bp, Homo sapiens
cttccgcgtggagatgatcaaaggcggcggcaccttggagaagccgccgccaggcgagggcgtcacgctgtggaagggcaagatgaagccgcccgcctggtacgcccgcctgccgctaccct

SEQ ID NO: 339705 - DNA, 122 bp, Homo sapiens
tgcccgctccagccgcgctgctctctccgtcactgccaacaaccgcagtgaggcgagccgcgctcccgcggctccagccaccagtatacggccaccgactcctgattcctagtcctctacgt

SEQ ID NO: 339706 - DNA, 122 bp, Homo sapiens
aaggggcctcaagactggtcactgcactcggttctaaaccaagtaccagggccttaaaaacgccaaactgaccaggagggacgctagctccaaaatacagcccaagagcacgcttcgaggaa

SEQ ID NO: 339707 - DNA, 122 bp, Homo sapiens
ctggatgccatagtggggcccttcacttacctgaagggaggccttttaatttaagcctgtcgaatcacaggtgctccgaatcgaatcccaggtgctctgaatccgaaattaagacgccctct

SEQ ID NO: 339708 - DNA, 122 bp, Homo sapiens
aggttgttaaaggcctactgtgggtggtctaggaatggaagccaacagcaatttcataaacgggacaaggttttgcactggcagaatgctcaggcagaagaggcaccagagagggagggagg

SEQ ID NO: 339709 - DNA, 122 bp, Homo sapiens
agctctctcagaggagagagagcctatgagctcttcaactctcgttagctgtaatcaacacgagatgctttgtcaattagcaaaaggaatgttagaaattaaattttcattagtgaaatgaa

SEQ ID NO: 339710 - DNA, 122 bp, Homo sapiens
tgtagccagaggcccagcggtccacgcaggcccagtgtgtccaaggctgcccgcagtggtcgtgagcacagggccagcagggcagaggccagcagctccagaagatgcagggtcaggttggt

SEQ ID NO: 339711 - DNA, 122 bp, Homo sapiens
ttttccaaagtagaaagggcacatcgtctttttggagcctcaaaggtgcagacactgatgcgttgggggagatcacagtgtgacaaggatggggtgggagtgtgtcacccccctttctaccg

SEQ ID NO: 339712 - DNA, 122 bp, Homo sapiens
aggccgtgaacagcggctgtcacgtgggccgcccaggccaataggggtgaggctttgggtcgagctcagtcctcccccggcgcctccgactggcagtgggactcagcgggcgtggaggtcgc

SEQ ID NO: 339713 - DNA, 122 bp, Homo sapiens
taacattaaaagttatcccctgaacagctgttccctggctgtttccaccaggctgattcccgttggaataaacaataatttttttttgaacctggtcactaggaataacaacagagaccttt

SEQ ID NO: 339714 - DNA, 122 bp, Homo sapiens
agccattatgttagaatgcaggcagtgtctgaatatggctgttaaattatttctaaataccgaaccagaacagcttaacagttctgcagtttgagactgacacaaaaatgacaatctgccac

SEQ ID NO: 339715 - DNA, 122 bp, Homo sapiens
tttggctctaatattcgccagcgctctgctcagaacattctctgttcgcatttcatacagcggtgccagcgcacaaccaggcaacgccctcaggagcatcattgttttctggacctggttct

SEQ ID NO: 339716 - DNA, 122 bp, Homo sapiens
tatctgttacactttgacatcagcaccttgggctttcaaaacacaaatggtagacaaaatcgcctaggcaagactgaagtccaactcatagagtggctctgaccaagttaacccctacatcc

SEQ ID NO: 339717 - DNA, 122 bp, Homo sapiens
ccccggccccggccctctggcccgcggccgctgctgtccccagacatagcgccaattcaccgtgcaacttcggaacggcggaagttcgcgccagaaactgaaacccctgctctgcgccagcg

SEQ ID NO: 339718 - DNA, 122 bp, Homo sapiens
aatcttgttttagattttctaaccttaaaccctatcacatctatttttcatttctgtgatcgatactttctaaaatgcttttaaatttccttttacatggaactagtacaactcgactatat

SEQ ID NO: 339719 - DNA, 122 bp, Homo sapiens
cctccggcccgcaccccgccgctccccaagtcggctccgcactccgcacacaggcggcggcgctggggccgctccaagtgcgttgagaagtgtaatccctccgctaagtacttggctctcag

SEQ ID NO: 339720 - DNA, 122 bp, Homo sapiens
tgctggctctcaggggttggggggcactgagacagccaggggccacggagctggagaagccgggagttcagcagggagcatgtctgtgtgccaggatggttctgcagtggccatgtggggcc

SEQ ID NO: 339721 - DNA, 122 bp, Homo sapiens
ggaaagcgggccgcagggggctgtattggaagccgccgggctggctgcaggcgccaaagtcgccgtaggcggacgcctccatggccgccacgcacgagtcgtacgaattgaggtaggagtag

SEQ ID NO: 339722 - DNA, 122 bp, Homo sapiens
tcccgcttcctagagaatcagagaatggatgcgcgagctcgctgctgacgcactaccggccgcgccaccattcttccggtttcagaagttaaggctggtgtcctggccccagtccacctctg

SEQ ID NO: 339723 - DNA, 122 bp, Homo sapiens
caagggcttgtaatacaatctctccccgtttgaagggtaaatcagtgtcaactgcatttgcgtccaccaaaaaaagtaagcattttacttccgctcggtctatgaggactgatgaaatgtag

SEQ ID NO: 339724 - DNA, 122 bp, Homo sapiens
ggaaagagggacactcacccgcttcagccccgagccttcactgcaccggaagtagtcacccgcccgttgccagggtgaggaagcggggctgacatcaagtctccccattggtcattcggggt

SEQ ID NO: 339725 - DNA, 122 bp, Homo sapiens
tgcgcatgacagctgggcgaagacagagggcaaacttaaaaggaccaagcgcatagaccacgcctctgaaattggggaacgaggaggggtttgatcttgtcgatgattggctggtctctgac

SEQ ID NO: 339726 - DNA, 122 bp, Homo sapiens
gggcttgtggccgagttgttttagttttcctgtaggattcacgggtggctgaggcaaacacgcttgaaggcctaagacttttaagtctcttccgcaccctctcttctgtctcttccacctgg

SEQ ID NO: 339727 - DNA, 122 bp, Homo sapiens
cttgtgcttcgtgtatatgttttactatttatgaagggtgtggaggtgagggtaggaggacgtgggctcctgaatccctctgaaccagccagagagtcggctgcatggaaacatttcgcagc

SEQ ID NO: 339728 - DNA, 122 bp, Homo sapiens
cagccaccatgcggggagcctcggcggggcgtggggcttcaggaaggcgtggggcttcggcggggtgcgggccctcagcagcgtgcggggctgtgacctcctggtcatggctggcctcactc

SEQ ID NO: 339729 - DNA, 122 bp, Homo sapiens
gtgtagatgtacaccccagcacagtggtgtgtgcccgggctggctctggccaagctggaacgaggccccgcccacctccctggagggcacctcttcctgcctggagaagccagtggacgagg

SEQ ID NO: 339730 - DNA, 122 bp, Homo sapiens
aggtcctgcaatgagtctcggcccatgttttagggagcctgggtctggagccccagtgagcgtgtgggtcaggaaggtgcccgagctccgcgcccgaccgcgcaggcgcgaaaccgggagag

SEQ ID NO: 339731 - DNA, 122 bp, Homo sapiens
caaagactcaggaagagagacggacgactcacagggtcacagtccacattccccaccaggcgctcagagatatggaatacgttcccggtgggcactgcggtgtgtgtagtcaaggaccaccg

SEQ ID NO: 339732 - DNA, 122 bp, Homo sapiens
agtggaggattcagatccagggatgtggagctctcaaatatatacataaaaccctagcaccgggtccaacacatagtaagtattcaatatatatgtattgaataatcatccctgacctctag

SEQ ID NO: 339733 - DNA, 122 bp, Homo sapiens
ccctgcgccgtgcccaccctcctccggaatctcccttcccttcctggccacgaatggcagcgtcctccccgacccccagtctgggcgcttctgggagggctcttgcggtgccggcactcctc

SEQ ID NO: 339734 - DNA, 122 bp, Homo sapiens
cccacgcgcattccccggctgtgttcagcctcagtgcgcacgctgcctctcccctacccacgcgcattccccggctgtgtttagcctcggtgtgcacgctgcctctcccctacccacgcgca

SEQ ID NO: 339735 - DNA, 122 bp, Homo sapiens
ttgagggagaagtcccaggacagcccgaagagagggtacgggaagctccatcctggggcgcggggactcctcttcgtcatttttgcacccactggaacgctgggcgtgcagatgcctcccca

SEQ ID NO: 339736 - DNA, 122 bp, Homo sapiens
cgggcgcctcctcgcctccctccatccttcctacggcctcaccctccgggaggtccgtgacgatggcttcaggcgagatgcacacgccacggtcatagacaggcagctcgtcgcaggccagg

SEQ ID NO: 339737 - DNA, 122 bp, Homo sapiens
ggcgggagagcggcgcgggtgagtgggagcggcgggtgtgcgcgagtgcgagtgtgcgagcgcgccggtggcgctgcccctgcccgctccctcccgctcgtgcagctccggcatcagtttcg

SEQ ID NO: 339738 - DNA, 122 bp, Homo sapiens
cgggggcggtcgggggcctcgaacccggggatgctcgcggggagggtcccgagcccgcgccggcctggcccccccgtccccggctgggcctctccgggacactccccgccccgctgctggcc

SEQ ID NO: 339739 - DNA, 122 bp, Homo sapiens
ggctggaagttacccggtgtgggctgcagtgcactttgaattgcttcctactcatgaccacggggacttacagggctgtggtagtgcccagggaagtacacaggttttcccccaaatattat

SEQ ID NO: 339740 - DNA, 122 bp, Homo sapiens
ctccgccatgcccgacccggctaaatctgctcctgcccccaaaaagggctccaagaaagccgtaaccaaggcccagaaaaaggacggcaagaagcgcaagcgcagccgcaaagagagttact

SEQ ID NO: 339741 - DNA, 122 bp, Homo sapiens
cgcctccacagtaccgcacacgcagcggccacccctccacgcggtcccccacacacagatcgctccccacgcacagcactggggcgggagcccggcccaggcctagccctcctcgcagcgcc

SEQ ID NO: 339742 - DNA, 122 bp, Homo sapiens
cgaatgcttctgtgtagtttttatgggaagatatttccttttccaccataggcctgaaagcgctcgaaatgtccacttccagatactacagaaagagtgtttcaaacctgctctatgaaagg

SEQ ID NO: 339743 - DNA, 122 bp, Homo sapiens
taactgagtgagctcacactaacaggaagtgttttgattttgcagtctgagagttaatcccgtcgctggccagacatgtttgcttttaggttctctggtggcccacaggtcccagttctgaa

SEQ ID NO: 339744 - DNA, 122 bp, Homo sapiens
cctcatattgctgtgatgccttacaggtcagttatcctctccgagcacagtttcctcctccgtaaaatgggaacaataataattcccttcttacaagacttgtgcagctcaaaaagaccatg

SEQ ID NO: 339745 - DNA, 122 bp, Homo sapiens
ggactgggtcggccctggggcaggctctcaagggcccaagggctgccatcccgcgaatcccggctgcagtacaagctggaacctgaagggcagagagtacctgcaggaggagaccggaggag

SEQ ID NO: 339746 - DNA, 122 bp, Homo sapiens
aacaaccccgtccctgtttaggccacgccccccattcaaagtctgtccatccttcaaggccggtgctggagccttgagcttctcggccaatggaatctgataatggccctctattgttattt

SEQ ID NO: 339747 - DNA, 122 bp, Homo sapiens
ggatccagatactttgcaatccccgggctagtaggaggaaaagtggctcctctgggaacccggatgggccgaacagcagcttccggcagaggccctcaggtttcagagttctccaagtgggg

SEQ ID NO: 339748 - DNA, 122 bp, Homo sapiens
gccggccgcggctgtctcctccagggcctgctgttgtggcgtctggccgcggcccagcaccgccgtcatctgggctcagctctctctgtccgcggggctgtctccctggtggtgccggcccc

SEQ ID NO: 339749 - DNA, 122 bp, Homo sapiens
cacccgtaagcgctacgcgcacctgagcgcgcggccggccgacgagatcgccgtggaccgcgacgtgccctggggcgtcgactcgctcatcaccctcgccttccaggaccagcgctacagcg

SEQ ID NO: 339750 - DNA, 122 bp, Homo sapiens
actcaaagtgcggagtcgggggtgggattccggtcccaagcccttcatgagggtgctggccgcgccccgcgtaccccctcgctgatccccgctcccttctcccacaggctgtcgagaaacgg

SEQ ID NO: 339751 - DNA, 122 bp, Homo sapiens
tccctatctactctgtccaccactgcccagggcccatcagtgggcccaatggctatttggcgagtaaataaatggggtcaggagaaacgaaggggaaaggatgtgtcagaggccaggactgc

SEQ ID NO: 339752 - DNA, 122 bp, Homo sapiens
gaaaacaagttgttccacctggagatttatgctgaaataaccactttacatcacaacccacggagtccttgatgttagcttggtttgtcaatcccaccaccagataccatttagaaaattgt

SEQ ID NO: 339753 - DNA, 122 bp, Homo sapiens
aggttatttcatttaagtagaatagtacaatatttgttcgtttgtgcctggcttgtttcacgtggtgtgttttcaaggttcacgtattttgtagcacgtgtcacaacttcattactttttat

SEQ ID NO: 339754 - DNA, 122 bp, Homo sapiens
ctttcagaccaggaggaggatgaggaggaggaaagtttatatgacgtaaattcatttgaccgtaagatatgtatttaaacatcgtggaggatcttgggggtctgatggggagtggggttgct

SEQ ID NO: 339755 - DNA, 122 bp, Homo sapiens
gcaaaataaatgtctgtaccttttctaagtcacacatatctaagccactgacccggcttccgctttaaagggagatacagaaagaaagtataaaatttggggccagacaagccaggttcaaa

SEQ ID NO: 339756 - DNA, 122 bp, Homo sapiens
aactttgttcatttgttttcttttaattcggcttttttggttgcctttcacctactttttcgcagagccctccgctggggccttcacttgggcaaacaactatcgtagtcgaacagctttga

SEQ ID NO: 339757 - DNA, 122 bp, Homo sapiens
caaaggaccagggtgcgaggggtcctagagtggccaggtgggttgggggagggaggctggcggaacgtgctggtgagcgcaggtagatgctcttgcagatcctgtgattccagagctaagga

SEQ ID NO: 339758 - DNA, 122 bp, Homo sapiens
tgctcagcccttctccatcagtggaagaatgggtacgtgcatcatggtctattcacacaacggaacgtcgctcagcccttctccatccatggacgaatgggtacgcgcactgtggtctattc

SEQ ID NO: 339759 - DNA, 122 bp, Homo sapiens
ggatcctttgagtctcactcgctgcctggccccgcaatgatggagactgttcagcttttacgggtgctcgtgctaggctcagccagcaccgggacagccggttcctccaggtggacggggct

SEQ ID NO: 339760 - DNA, 122 bp, Homo sapiens
gccgtgatgacgtcctcattggtccgcccaaccacgattggtgaaggggttcctgcgtcgcgcgcagtctaggaaagagacgacttgggacgcaacgacacctgcgcgtgtgcgtattgcct

SEQ ID NO: 339761 - DNA, 122 bp, Homo sapiens
ggatctgaccacggagcctgaccgcctgagggactcacgcacgcactaggaaaccgccgccgggaacttctgagcttgcgtgctctatcagtacagggtcacttattttgggctgtcgtttt

SEQ ID NO: 339762 - DNA, 122 bp, Homo sapiens
aaggaagcagccaaaacattaaatatacacagctcactgccaactgcaagtggcagcatgcgccctggttcccattccatcacatcctcaaatctgaaatgagtaagagtacctactgcata

SEQ ID NO: 339763 - DNA, 122 bp, Homo sapiens
tcacaggatggggctgccagtgtcctgggcccctcctgccctctgggttctagggtgctgcgccctgctcctctcgctgtgggcgctgtgcacagcctgccgcaggtaggtccctcagccgc

SEQ ID NO: 339764 - DNA, 122 bp, Homo sapiens
tcaaagaggagagtggggtgcagaaatgcctcagcatggctcatgcacacagcattctcccgtggggcagggttccctcatgcaacaggcctccctgtggccagcctctctgcctgtctctc

SEQ ID NO: 339765 - DNA, 122 bp, Homo sapiens
ttcttggagcctcggagacacctctgccatctgagtcttagttttctcatctgtaaaatgcgagagacaagaggagatcaacctttcccaaaagctagtttatgagctcaggggttcattac

SEQ ID NO: 339766 - DNA, 122 bp, Homo sapiens
tcttaaagtcccgtccggcggcggcacctgcgcgggcaggcgggaggtgggggagagaaccgcagaatgcacgttaagcctgggctccctgcgggtccctgcgcccctctccaacctcgtca

SEQ ID NO: 339767 - DNA, 122 bp, Homo sapiens
tgggggaaagcccattgaggaggggccgagttcactgggactcttccctccttggcgtggcgtcatacgtggccctcaggtttctcttcttccattgcttgactgtctgttcctttttcatt

SEQ ID NO: 339768 - DNA, 122 bp, Homo sapiens
tgcagagtctcagaggaagcacggccctgctcaccctgctgacaccttgatttttaccttcgagcatccaggactgtgagacaatccatttctagtgtattaagccacctagtctgtggtat

SEQ ID NO: 339769 - DNA, 122 bp, Homo sapiens
agagatggggtttcaccgtgttagccaggatggtcttactctcctgatctcgtgatccaccggcctcggcctcccaaagtgctgggattaccggggtgaaccacatgcctggcctctttttt

SEQ ID NO: 339770 - DNA, 122 bp, Homo sapiens
cccacgcagctgcttcattctgaggtgggagctgcagtccgtctccgcctttctccagggcggctggtgttctccacctttcctgactctaggtgtgtctcccggtctctggcttcatctcc

SEQ ID NO: 339771 - DNA, 122 bp, Homo sapiens
ggggcatcaatcatcttttgataaatggatcagttttaggactttcagaaaataaaagatcgctcttgaaaagctgttgacatagcatttgtcttttatttggggaaaggaggaaggtcttt

SEQ ID NO: 339772 - DNA, 122 bp, Homo sapiens
ggatatgcctccgctgggcctgcaggcggcgagacttacttgggtagcgatagtagaattcgttctccatgtcgctcaagttcttgtgcgtcctctctgaccaccagtgggcgtcggcctcg

SEQ ID NO: 339773 - DNA, 122 bp, Homo sapiens
tgggctcttgagagctgacagtggaagcttctgtgttccacgatgctaaggttcaggatgcgaggttgaggccctaggatttggccacatggaactggagacacccacttcccaggctcaca

SEQ ID NO: 339774 - DNA, 122 bp, Homo sapiens
ccccatgagtgcccccaagttcctcacgtgtccccctacatacttgttatggtagaccaccggtgtgaaggcctcgcgggtaaattcactgcagctggacttgccaaagatgacctgggaga

SEQ ID NO: 339775 - DNA, 122 bp, Homo sapiens
attgcaaggctgtgtcgtcctgtgtgggtttaattactgaattccgcctagactgcggtgcggccttcatgtgcacgcccctgccgccgtttaccgccaggtggcagcgtagaccaagtaag

SEQ ID NO: 339776 - DNA, 122 bp, Homo sapiens
ttatagatggaaaaaaaaagtagcttgtattttcctttctctttctcgtctgttgttagccgctttgctgacactggctcgcgcccggagtcacggcgatacacaggctttcattgtgctcc

SEQ ID NO: 339777 - DNA, 122 bp, Homo sapiens
aaggacgcggcgcgggtgcgtctgggagagaccgggggagcctccaggagggaccctgcccgggaggacgaggcctcctgccgcagcctcgcggacagctcagctcgccctgctcagaaaga

SEQ ID NO: 339778 - DNA, 122 bp, Homo sapiens
tcctgcccgcggaccttgccgccccgcctccagcccgtgccacggcggccgccattggcgcgggcccatcccagaacggcgcccattggcccggtgcgaagccattcacccagcgcattccg

SEQ ID NO: 339779 - DNA, 122 bp, Homo sapiens
tactggatatttttcttcctttttttttttttttttttttttcgagacagcctaggctgtcgtctaggctgctggagtacagtggcacaatgacagctcactgctgacttgacctccctggg

SEQ ID NO: 339780 - DNA, 122 bp, Homo sapiens
acagaaactgaagtccagagaagttaggtcactggcatgagggtttcaaagcgtatctgacgtgataccatatagattgcaagacagttcagagttgggagtctaaggaattacaggagaaa

SEQ ID NO: 339781 - DNA, 122 bp, Homo sapiens
tccggctgcaccgagtggtcaggacattgaggccgggtcagggagcgtgagataccgggacgagcgggcccagggctgagcccagcggcgtccgggtgggcggtggcgttgagatgggaatt

SEQ ID NO: 339782 - DNA, 122 bp, Homo sapiens
tcagtccgcatccggcagctggtgatgccattcctgcagagcgaggacagtggggagggacgggagacaaagaagggacacagttagacgtcctcagatgggggcacccggcagcccgcctg

SEQ ID NO: 339783 - DNA, 122 bp, Homo sapiens
caacttgtcactcctgagcaacagtgctgacatcactgaggtctgtaaacagtcacttttcgcattcatcctgagtgaaagatggaatgacttaagtacaaatgcaacatataaacaatttc

SEQ ID NO: 339784 - DNA, 122 bp, Homo sapiens
gttcgtgttgggaagtggacgcccagtcagggaccacacctcccagtagcacatatgttgcgatcaacatccctgaaggggaagggagggaagcagggtggacagatggagatgctgagctg

SEQ ID NO: 339785 - DNA, 122 bp, Homo sapiens
gctcgccctcgggtgtccgggctgggcacaggcgccagcgtccccctggagaggagaggtcgcccggcacctcccaggacaggcccaagtgggagtgggaccctcctaccttcctgcagcct

SEQ ID NO: 339786 - DNA, 122 bp, Homo sapiens
gcagccagagaggaggggttggcttccgggatctggcgcggcgttttcctctggctcctgcgagggcttggtttagggcttcagctctctgcgttctcggctccgggaggcctcggtgattc

SEQ ID NO: 339787 - DNA, 122 bp, Homo sapiens
gagcggagtcctatttatttccattgatgactcccctggttctcacaggcgctcagggaccgggtgggaggaggagaggaggaggtgcggagattccctccgtcagaaaagaaaaagggttc

SEQ ID NO: 339788 - DNA, 122 bp, Homo sapiens
aaggcgtcagtttggagctggaggggccttgggcgggccactcgtccttcaggaattcttcgtcttcctctgagtccgtatctgcagtcaaagtagtttttaatagagataagtcacagggc

SEQ ID NO: 339789 - DNA, 122 bp, Homo sapiens
aatccggaactgctgtgcgaaagataaaatcgagaaaggcaaggtttcggtaggaggacgcgatgaggggcccgccccaggcagggaatggcaatgctctaaagaaaagagacttcgtcaac

SEQ ID NO: 339790 - DNA, 122 bp, Homo sapiens
cttaggcagggaagtgtaagaaacacactgaggcagggaagtccccaggccccaggaagccgtgccctgcccccgtgaggatgtcactcagatggaaccgcaggaagctgctccgtgcttgt

SEQ ID NO: 339791 - DNA, 122 bp, Homo sapiens
ggtgggtgatccctctctcccgccagaggaggatttatggaattgaaccagatgtcttcacgcatgagtggacattgccttgttctctagtttttagtcctagttccccagactcagcagcc

SEQ ID NO: 339792 - DNA, 122 bp, Homo sapiens
ggcaccttcttgggcttgggtctgtcctcgcttcccgggggcattggtacttggttgggtcgcgtctcacctggtttcagggtttccggggctctgagctcgcccactccgccccctgcacc

SEQ ID NO: 339793 - DNA, 122 bp, Homo sapiens
gacagtgcaactggaagaactcagggcaggtaccagccacaaagtcctgggaggtggggacggggcttttatcagggcctcagggaagactccctcccaggaaaggagtggacagtagagga

SEQ ID NO: 339794 - DNA, 122 bp, Homo sapiens
ggttggccagccttcagtggccttcagcatgaagaagagtgaaaagatggggtcaagaagcgtagacaacctttcctaagacttggcttgggagaagccatggtgaaaggccatgtctggag

SEQ ID NO: 339795 - DNA, 122 bp, Homo sapiens
cgatcttaggggcgggccccgcgccccccacgccggccattccggtggtccagcccggagcgcccccaaaccgaccccgggcctcaccttgaacgaacggtggaaaccctgaagttcggctg

SEQ ID NO: 339796 - DNA, 122 bp, Homo sapiens
agcgtgagcccgattggaggatgggctctaccttcttccttccgcctacggagaccatagcgggatgcagggcggggccgggctgagggggcggagttaggggcggggcacggtgactctgg

SEQ ID NO: 339797 - DNA, 122 bp, Homo sapiens
aggcgattcaaatccgaaggaaaagttgtcaattatcagaaagagagagcgcgagagaggcgaaggcagataaaagcgatgttatcaaaccgaccagcttgttgcttttgtgtgtgtgtgtg

SEQ ID NO: 339798 - DNA, 122 bp, Homo sapiens
cgcccggccacacctccttcttctaggccggacatcctagcctgtattgggtgggtcacccgacctccttgaaggcttgagggaggttctggtggagcttggctgaatttggatggggtcaa

SEQ ID NO: 339799 - DNA, 122 bp, Homo sapiens
cccacagccacacgtgcctgcttgctcacgggatcttcccactctcctcgggaaggcttccgagctgcttcctcaggatgtcctgtgatagcagcctgacctgtcaaagccatgcgaatacc

SEQ ID NO: 339800 - DNA, 122 bp, Homo sapiens
atcgctgattcaccaagcctctcctcctgcgctcgccctcttctgcacttcggtctcaggcgcaaacacgttcaaagtcgctaggccaaagcgctgagatacggtttcccaagccaattaga

SEQ ID NO: 339801 - DNA, 122 bp, Homo sapiens
ccaaaatttaagagtggagaaagccagaactttgcgcaactctccttccaaagatctttgcgcgcgttcctgagctaccccgaccatcctaacagtttcagtggcaaaatctccccaagttg

SEQ ID NO: 339802 - DNA, 122 bp, Homo sapiens
catttaacagatgagccccagggatgttaaacaacccttccaagtcacatggctggaccacggtgctgggcctgtacctaggtctcctggctcttcccactacagtgtactggctaccacct

SEQ ID NO: 339803 - DNA, 122 bp, Homo sapiens
acagctgtaaacccctgcgtcatctattttcacatcagtgatgaaaaacacgtcgtcatccggcatgacatgcatgcgtcgctcacgggcagcggggaaatccgtgcctccatccttctgcc

SEQ ID NO: 339804 - DNA, 122 bp, Homo sapiens
atcagaaaacaagaattagctagcttacacattccactgaatagtgtcaaaaaagataaacgtatttaaaataagttgtaagtccagcaaatataagcttgatgggttaactaacatattaa

SEQ ID NO: 339805 - DNA, 122 bp, Homo sapiens
attacatgacaactcacaccagcatgttctataccaagtcacaagaaaatttagagtaaccgttcatcctttatttaactctccattcattaatataaattattgactcatctatttggaga

SEQ ID NO: 339806 - DNA, 122 bp, Homo sapiens
atgcctgtggttaaaaaaccccgtgagctgcggccccggaggcctaggggatgaggtcatcgctgcggcttcctcccctctgctgaggctccctccgccccgcccggtggcccacccctccc

SEQ ID NO: 339807 - DNA, 122 bp, Homo sapiens
gcgcgcgcctccccgtcccggatcatcgccctcagagcgcagggcgcggggtagcccaggcgcgaggcgcttgcagccccaggccaatgactcttgacctcgccgctgggaatcaccgcaac

SEQ ID NO: 339808 - DNA, 122 bp, Homo sapiens
atgcccatgtgtggaggtccctgtgtgcacagacacatgccctctaatccgagctgctctcgctccgtgtgctgcaccccactccgagtgccaagaatctcagtctcaaaacagccttggaa

SEQ ID NO: 339809 - DNA, 122 bp, Homo sapiens
ggcggggcctgggcgaggtgggggcggggcgcgaggcggagagaccttcccctatagaaccggcagggggcggggcgcgaggcggagagaccttcccctatagaaccggcagggggcggggc

SEQ ID NO: 339810 - DNA, 122 bp, Homo sapiens
ctcgatctcctgacctcgtgatctgcccgcctcggcctcccaaagtgctgggattacaggcgtgagtcaccgcatccggccaggaaaacctatttttaaaagtctcttacgtattttccaca

SEQ ID NO: 339811 - DNA, 122 bp, Homo sapiens
ggcggcgcgtacccaagcctgaaagtgatggcctaggcgggagggacaattacaggcctgcgctccgtcccggggacagaacgccgtcccctgccatccacggctgagtgcccggcgtacac

SEQ ID NO: 339812 - DNA, 122 bp, Homo sapiens
aagcagctgggttatcagtggatacagcgctgctcaccctgtaaaagattgcgggaaaaccggcaggcccttttaaggacttctgctcatttcacagaggtaattattgtttgaagctctta

SEQ ID NO: 339813 - DNA, 122 bp, Homo sapiens
tgacctcgtgatccgcccgtctcggcctcccgaagtgctgggattacaggcgtgagccaccgcgcccggccagaccagtggttcttaaaccatggtgcctacccagccgcaagaccattatc

SEQ ID NO: 339814 - DNA, 122 bp, Homo sapiens
tcaactgtactgtgaagcactgattgcaattccatgatgaggaacagtgtcttgctctgtcgcccaggctgaagtgcagtgttgtgatctcagctcactgcaacctccacttcttggttcaa

SEQ ID NO: 339815 - DNA, 122 bp, Homo sapiens
gttggtgagcagggagactctacagttcacgcattccatagcttattgcagtttcattgtcgggggccattaaagcaggagagcagagacaaaggaaaggtggccactgtccttagatctag

SEQ ID NO: 339816 - DNA, 122 bp, Homo sapiens
ggggaaaggactgcgcccttttgctcctggttccagggagtcctgggcatcctgcggtgtcgagcaatagcctggcttcagagctgagagtgcctggggccacaggaaaggcaggaacagga

SEQ ID NO: 339817 - DNA, 122 bp, Homo sapiens
cgcagactctccagagtcaatgtctacttcagccagctcaagggcgcgacaacctggcgccgagcatctcaggccgccgcggggaccccccctaagggactcgggaacacctgcctacccta

SEQ ID NO: 339818 - DNA, 122 bp, Homo sapiens
agcggacgcgggggttctgtgaacttggaacctggcggtgcgaggttctcgccggggatgcggcggcggcagctgcttcctggtttgaagctcgccgagtgggggagagcgtgagccttcgg

SEQ ID NO: 339819 - DNA, 122 bp, Homo sapiens
gggctcgctcggcgcgaagttcgggcccgggaattccgaaggaggggtaggcgctgcccgcgcgcagaggccgcgcccctcctggccccggcttcttggctgtcaaacagatgcagcaacgt

SEQ ID NO: 339820 - DNA, 122 bp, Homo sapiens
aactgtacctaataacggcaaataagttattcagctccccacagctggcaaagtgcaagtcgcagatgctgccacacagcatttcctgacagccctagggcagaccgttgatccattctgca

SEQ ID NO: 339821 - DNA, 122 bp, Homo sapiens
ccactgtcccagctcttccctacgtgaccaaaagggggaaagttgggcgactgtcggggacggtggaaggcacgcccccttcaaccaggccgcctcgaaagccaatttccttcgctcccccg

SEQ ID NO: 339822 - DNA, 122 bp, Homo sapiens
cccatagctggtcagccactcgattgtcaagcgtgaggttgagagggatcccagaataggcgagccttttatctctccaatattgttgaaaatacatggttaaggtataatcctggggggaa

SEQ ID NO: 339823 - DNA, 122 bp, Homo sapiens
aactgagccttttgtgtcaatctcccatcctctcctgccttgtgaagtttctggggtggccgagttggaaccaacttcaaaccctcttatgtctctgattcactttccaaaccctccctctc

SEQ ID NO: 339824 - DNA, 122 bp, Homo sapiens
acaccttccaggtggaccacctgctacatggagttagaagccaggaatcacgtgactgcccgcccaatcgtgacccatcacaggctctgtgcacaaggcgagtggtattgaatgaagctcac

SEQ ID NO: 339825 - DNA, 122 bp, Homo sapiens
tttttttttttttgagaggagtctcactgtcgcccacgctggagtgcagtggtgtgatctcggctcactgcaacctgcgcctcccgggttcaagcgatcctcctgcctcagcctccccagta

SEQ ID NO: 339826 - DNA, 122 bp, Homo sapiens
gagatcagagtgggctgaagggctgctctccccagacctttcgagctgcagaaggagctccggccagggacagggaacaccaaccctagtgatgttggtttgctaccagctatgcaacgaaa

SEQ ID NO: 339827 - DNA, 122 bp, Homo sapiens
acgagcagaatggctggcaccacctcaggttagcgcactgggacgttccagttctcacaccgcccaccccaccccacccaagtccctacgcacggagccaagccgcacctctcccctcatga

SEQ ID NO: 339828 - DNA, 122 bp, Homo sapiens
tccgggcccagcggtgcaggagggcgcgcgtgaggtcgtcactttttagcactacctcaccggaaaaccagcaaagcaaaatcctgttgccacctagacaatagggaaggagggtcttccaa

SEQ ID NO: 339829 - DNA, 122 bp, Homo sapiens
cttgatctcctgacctcgtgatccgcccacctcggcctcccaaaatgctgggattacaggcgtcagccgctgtgcctggctagcaggccaactttcaatacttttggaccttcagggatcca

SEQ ID NO: 339830 - DNA, 122 bp, Homo sapiens
agggggggtgtgaactgaggtcctgcagtggaggagatggctaggggctgggcacagcagcgacacccacctggatgcagatgcctggggcacaggcctcctccctgggaaggtctaggaag

SEQ ID NO: 339831 - DNA, 122 bp, Homo sapiens
gaagtatactttggaatatcattgccaagagagcccctcgaaatagcttataaatactatcgaaatagcttataaatactacctctccatgtgtgccaacaccattcttcctccatccaaga

SEQ ID NO: 339832 - DNA, 122 bp, Homo sapiens
ccgccgccgcgcacgtgagcggcaccaggaagctggctgggcgcagccttccctgaggctcgctggcaccggccgcacgcgtccatcccgggcctctgagcggagggggagccgaggctaga

SEQ ID NO: 339833 - DNA, 122 bp, Homo sapiens
aattaaattactgcgcgcctatactacatagaacacatggcagttaaagttttaggccgtcgcgcaagaactagatgtatgctgagtgaacccacggagcagagcacagccacggaagggga

SEQ ID NO: 339834 - DNA, 122 bp, Homo sapiens
tgcggggacgcgggcgctggaatgggcacgctgggctgctcagaccccgcggggttctggcgccttctcctctgggaccggaataaatcaggcggctcagcacctcccactggccgtgcgct

SEQ ID NO: 339835 - DNA, 122 bp, Homo sapiens
gttctggggtggagaaggaccggccgtggggagtgactggctggggagaagctcagctcccgcccacctctgggaggcccggggctggacgggaggtgcagcagacaaggctccgggcgggt

SEQ ID NO: 339836 - DNA, 122 bp, Homo sapiens
acagccactgccgaggtatggctagggaaggaggggaggagatgatgccctgaaccccatcgtcattctcactgggcaagcccaaccaggagccaaagcacagggcagcccattggatgcag

SEQ ID NO: 339837 - DNA, 122 bp, Homo sapiens
aaggtcgctttccatgcaaggtaacagattgccaggctctagggattggggtatggacttcgctattttgcctgccatacttctctcataaaaccattatgaaaatataaaaagagcatata

SEQ ID NO: 339838 - DNA, 122 bp, Homo sapiens
cttcatctcatttatcacaagtcttcatatatttattgcgttggatacattcaattctgtcgattttcttagaatgtaaggtttccaagggaagggacttcgttttgttcacttttgtattc

SEQ ID NO: 339839 - DNA, 122 bp, Homo sapiens
gtgggtccccgctgcctgctgtagcagctccaagctcattagcttggcccacaatgccctcgtgacctgcctggctctccagccacattcccttctgcctctatcatgcaccctgcactcag

SEQ ID NO: 339840 - DNA, 122 bp, Homo sapiens
cggcgaatccccgggctcgcgcaacgagttgtagccgcggagagcaggcgtcgatgctggcgcccaaagcctccagcctgagagtcgcctcactcgtgtgacggtgcttagaaacccccttt

SEQ ID NO: 339841 - DNA, 122 bp, Homo sapiens
tgggctcttcctaacgcccctttacagccacagacagtggtgggtgaagtcgaaatgctccggtatgccgtattgatttaaagacatatttgttctcctctggtcagaaagagtactgaacc

SEQ ID NO: 339842 - DNA, 122 bp, Homo sapiens
gtagtaaagccaaagagaaaaactaacattccaaaccacagtgaccgtgtcagtctgtttcgtctggcttttgtcatttcttcggaaaaacatcattctaaaatgtataactgcctttctgc

SEQ ID NO: 339843 - DNA, 122 bp, Homo sapiens
tcattaatgtgaacactatatgccctgtatttttgcatctgtgtatatagtttataagttcgagttacatcatccaattttatatactactttttctatgtatatatcatgtgtattttccc

SEQ ID NO: 339844 - DNA, 122 bp, Homo sapiens
tggcgtgggctgcgcgctcttccctgggccccggggggcaggcccagccctgccgcactacggcctctgcagtcagccgtggaactcagagccagacagcgccagcagtgaacccggtggac

SEQ ID NO: 339845 - DNA, 122 bp, Homo sapiens
agcataaagataaagctcttctcaggccaccacagagctcccctcagctcacgggaccatcggcctcccaccacccctcagcagaggcaggtcccggaagggctaggaaaagacttgggggc

SEQ ID NO: 339846 - DNA, 122 bp, Homo sapiens
ggtgcagggcagtccccattacaccagattgctgagggcagctgggaaataagctaaggacggtattgactggggtcttccttcgataacgattaagaagttggaaacaggccaggcatggt

SEQ ID NO: 339847 - DNA, 122 bp, Homo sapiens
ctggcaccagcggcctccccaccaccccgaaggcgccctctgcagagccggccccagccccgtcatcctgagtggggtgcaggctccaggagggcacagctttcccagccctaagaacagca

SEQ ID NO: 339848 - DNA, 122 bp, Homo sapiens
agagggcacagcgcagagcaggcaggaagcccctgaacagtgattggcgctggaggtccacgattcattcacaaggcgttgcagggcagcgggatgggcgtgttttggataaacgtgccggg

SEQ ID NO: 339849 - DNA, 122 bp, Homo sapiens
caaaagaagcaaagtcatgaagtgggaagtcatgaattgggaatgggtgtccttgttaaacgcacatctgcacactcagggctggggccctgtgcccccttgtggagggttaggggacaacc

SEQ ID NO: 339850 - DNA, 122 bp, Homo sapiens
ttatcagttaaggtgctttcagcagcaaataacaggaatttcaatgaaaattatataaaccgaaaaggagtttattatctcaaccacaagtgtggaagtcaagtaagcccagaattagtcaa

SEQ ID NO: 339851 - DNA, 122 bp, Homo sapiens
cggctccggaaaaggggtctagttctgtcgaaggcggggctgcaggcccgggggcggtaccgcgtcctccgaagggcggtgccaaggagccaagtgaggagcctggcccgagtaatggcccc

SEQ ID NO: 339852 - DNA, 122 bp, Homo sapiens
ttctcgtcccagtctccccatcacctaatccccacccctgtctctcccttacgaagtccccggcccccggttcccctcaccgagaccctgccctgtctgtcatcgagtccctgtctccccct

SEQ ID NO: 339853 - DNA, 122 bp, Homo sapiens
ttcatgacctggggcaaattaataggtactgagaggatgtggcattcagatgctaccatacgaaagaaagcagaatctaattcaagatgatggtcaggaataggtgaaaaccgaatttagtt

SEQ ID NO: 339854 - DNA, 122 bp, Homo sapiens
gttctgcctggatcccagcaggtttgtgtgtggatgggcgttgccaggggatccctgcggcgcgggcagtgaaccgtggaggccgaagggggagcacagttcactttctccaaacccttgca

SEQ ID NO: 339855 - DNA, 122 bp, Homo sapiens
gagggcctgggatcctgaaagcgtttctgcccggcttagacactaaccacttcaagagaacgggagagcaccggaaaaaggctttccagccgcaggccttcgcggggtcttctccttttggg

SEQ ID NO: 339856 - DNA, 122 bp, Homo sapiens
ggtcataaagagctgggttgctacctgccgacgcatgcgcgctggcccaggaattcactccgccagctgcagtcccagcgccgcacagagctgacctgggaagtgatggatttatagccgcg

SEQ ID NO: 339857 - DNA, 122 bp, Homo sapiens
gtccctcgtgcctcacctttgattccacatctgcattgttgtcattctgcagcagcagggcggcggctttcgtgtcgtcttttcgggccgcgatatgaagagctgggagacgcacttttcct

SEQ ID NO: 339858 - DNA, 122 bp, Homo sapiens
cctgcacgccgcgagagcctcaccaagaaagccaagaggttcctcgccaacctggtgccgcgcaacgccaagttcttcaagcagcgctccaggtcgtgtcacgacctctcggtgctctgagc

SEQ ID NO: 339859 - DNA, 122 bp, Homo sapiens
aggcgacgcgcaaaagttcccggtccctgggacccccgcccgcgcccgcgtcgagtccctcgaacctgctagttctggacaccctgctgcagactaaagggctgggaggaaacctcacaaaa

SEQ ID NO: 339860 - DNA, 122 bp, Homo sapiens
ggagccaggcgtcccggtagtcgcgcttggaaggatggggtcggggggagtcagtctccccgaccggctttcccccaagctcgaggtcccaggagcctcctccaggaccccgtaaacgcacg

SEQ ID NO: 339861 - DNA, 122 bp, Homo sapiens
ctggagggaggaaggtgtggggggacccaggggtcctgtctccaagcctggttgctcttacgcgaaaagttgggacactgaggtgtcacagcttctcttttgaaatggagaggaggtaggag

SEQ ID NO: 339862 - DNA, 122 bp, Homo sapiens
caggtggtgctggaggccaggccggggccctgcaggggcaggcacacagtggggctccgtcgccgcagcgccccggcggcctcctcctggccgctggccctcccctaaggcttcctcatcct

SEQ ID NO: 339863 - DNA, 122 bp, Homo sapiens
tattccgtttctccttccttttcgctcctcctactgccgtaaatggcctactagagttgtcgtgaaatgctcctccccgccctccatgtggcgaaaatgcaatcacgcttgacggcgcgagg

SEQ ID NO: 339864 - DNA, 122 bp, Homo sapiens
tctgtattagagtcacatgcctgtctttattaggggattcaaccaggtttattaagtggccgtttctgattaatctttgtactactgctcctcttccaccttattgtatgcataatgataat

SEQ ID NO: 339865 - DNA, 122 bp, Homo sapiens
cggccggcacctgggggcacacacatgcaggcggcgtggtctccctgctctgtccccacacgttcctcacatacaggcaagaggcactgccgggtcccggacggctccgggtgacaccagcc

SEQ ID NO: 339866 - DNA, 122 bp, Homo sapiens
ggggcggggaagagtctggggtgggcggggccgggcggggcggggcggggccaggcgcaccgccctcggctgagtctccccggggagggcggcgggcggcgggcggcggggaccgggtgcgg

SEQ ID NO: 339867 - DNA, 122 bp, Homo sapiens
tagcaaatgcagccccgagccttcctgttgcctctagggcctgtccatcccgtcagcccacggtgcctctacaaacacaggtccctcctcgccgtggtacaatcgccacggcacaggaccga

SEQ ID NO: 339868 - DNA, 122 bp, Homo sapiens
agctcggcgtggtcgggcggcggctgctccggactctggccaaggcagcaactcagtaaccgaacaaaaggcgaagagacctgacagccaagccacgcccctcgccacctcgaagctccgcc

SEQ ID NO: 339869 - DNA, 122 bp, Homo sapiens
acctgatggctgttcggcacctgtactgactgaagttcagctcccccagcactcactttacggtggctcttcggggttctctgaggttcccttctgcctttgttaagctgcctggtacccta

SEQ ID NO: 339870 - DNA, 122 bp, Homo sapiens
acgtgctcccccttgcggcgggaccgcgaagctcccactgcgtcgtcgactcagttgtctcgcgaggtttgttgcttggtcttggagccacaatttgagaatgacgtatctgagttagagtc

SEQ ID NO: 339871 - DNA, 122 bp, Homo sapiens
gatcgccgtcagagcaaagccaggctactaccgcaggtaccaagacagtggcaccgcccgcgcctccggaacaggaaaccgagggaattaaaaagcaaacctgagaaagctgggccaaggga

SEQ ID NO: 339872 - DNA, 122 bp, Homo sapiens
cccccgcgcccctccctcaacaagcaatgggaagttagatcttcgctggccctttaagggcggggagggcagggaggctgcgggatccgtgctccaagagacgggggtggagtggaggggac

SEQ ID NO: 339873 - DNA, 122 bp, Homo sapiens
gtgaaggttaaagtggctactgggctcccgccagggcctcccgagaagcccaggcagggccgagtgctctcagccagcacgctcgaggggtgtgctccgccccctcagacacacacgaaggc

SEQ ID NO: 339874 - DNA, 122 bp, Homo sapiens
aagcttttcttccttgtaatactgccttttccttcgtaactgaggtggttgaatcagaggcgtgtgaataattgacttccaacagcaccacaggagagcgcctcacacaatagtaaacattc

SEQ ID NO: 339875 - DNA, 122 bp, Homo sapiens
aaagaaataaaacctcatcttcccctggccctgagccctttggtgaaggaagacagcacccggtgaagggctcagaggtattagtgtggctgagattcgacacccactctgccatcctctgc

SEQ ID NO: 339876 - DNA, 122 bp, Homo sapiens
ggagaccaaatttcagcaaatgcacggacttgagtcctcatgagcagggtggccatggtgcggaagcagctggcacggccccctcaaccccggacccctggggtcctcactgccgacccgcg

SEQ ID NO: 339877 - DNA, 122 bp, Homo sapiens
ctgtcgaaagggcctggggcaccccccccaccgcgggaagacaggaggactgcaggcccacgagaggcactcccggactcagccctagctgagatggaggcaaaaacatccacgtggcttaa

SEQ ID NO: 339878 - DNA, 122 bp, Homo sapiens
actcgtcacccacaccggaagttgcccgcgcacccgctcaggcagcccatcgggagcccacgcaaaggacccctcgaggtccccggcgctggttgccactcaggcactgccgcggacagcct

SEQ ID NO: 339879 - DNA, 122 bp, Homo sapiens
tgtttggcccgcataatccacccaaaagcacatctgtgacaagtatggggtaacttggggcggggagctgtgccagcagtcgagaaggccttgctgacctgggtggttttgtgtgtcggtgg

SEQ ID NO: 339880 - DNA, 122 bp, Homo sapiens
tcaaggggtcaacccccggggagaggatgaagaagattgacgtggaggggctgctctcctcgtaggacttagaaaactcaacactccggccttccacgaacttgctgcccatcttttcctcc

SEQ ID NO: 339881 - DNA, 122 bp, Homo sapiens
aggaaaggggaggggtggggaactttgagaactggagacagacccctctgggagtctgagcgtgcgtcgcccaggctggcactttttagggcgccgccaaagtgcccagccaccctcccgcc

SEQ ID NO: 339882 - DNA, 122 bp, Homo sapiens
gactggggcagatcctggggactggcaggagctcagaggaggcagcatctgggctgaaatcggtgagaaggatttggccggaagcaggggaggggaatggtgtaccaggcagagggaactga

SEQ ID NO: 339883 - DNA, 122 bp, Homo sapiens
gccggcgggagtggagctcagcctctggccatggggagtccgcccaacagagaggggctccggcctcgccgcccctccccgctcaggccagtccccgccttggtgggttttcttttctgcgc

SEQ ID NO: 339884 - DNA, 122 bp, Homo sapiens
caaagacgggaggggctgttcctgcacaaaaactctggcaagctgggcagatctatttgtcggttcccaagccttgcaggaagaatgtctacaatgcctttgggtagacctgaaggactcag

SEQ ID NO: 339885 - DNA, 122 bp, Homo sapiens
tccactatggtcctgcctggccaggagtgcctatggctcttaggcacgagccagcggttccgggcaaacctctgtgtggctgctgggcctgactttgcagagctggcgcccgggtctgggcg

SEQ ID NO: 339886 - DNA, 122 bp, Homo sapiens
tgtgcttttggctggagcccctgcccagcgtccctgcgcctggagtggagcagcccctggcgtctgtgtgtagcacttgcagcccttcctggagtgccctgtcgcatgtggcgtgtggccca

SEQ ID NO: 339887 - DNA, 122 bp, Homo sapiens
tgtattactggttcattctgggaagcctgggcccagctccagcttgctgaggccacgctacggggtccacagcgtcgactgtccctgactctaaccagcgtctcccagagcctgcaaatgtg

SEQ ID NO: 339888 - DNA, 122 bp, Homo sapiens
gtggatgacgcagtacctataccccaacgtgcacagaaacctaataccgtgtggatgacgcggcacctatatctcaacatgcacagagacctaataccgtgtggaagacgcagtacctatat

SEQ ID NO: 339889 - DNA, 122 bp, Homo sapiens
tatgtggcaggaacaatgagcgtcaggtccaggggcttctgctgtttggcttacagagcgcggaagccctcacacccactcgtagtgggggtcggacaagatggcacaggggtggggtttgc

SEQ ID NO: 339890 - DNA, 122 bp, Homo sapiens
caatagaatgatgccaacacccaccagatagggctgtgttacgaattaaactgagcaatacgtgcaaagttcttagcacagtgcatggctcagagtaagtgcttaaacatttttgttgataa

SEQ ID NO: 339891 - DNA, 122 bp, Homo sapiens
ccatacagggtcaccaggtatctgtggtcggattccaggccagagagggtgatgtcattccggtcacctcctatgcggaccatttggagttgcccgtctctatctgtgtactggatttcgaa

SEQ ID NO: 339892 - DNA, 122 bp, Homo sapiens
gctccgtactgcgtgccaacacctccccttacccctcaatagtaggggtggggacccccacgcagacctcccagatagagcagcgtggactgtctgcgcgcccctctccaaaagcaaagcgt

SEQ ID NO: 339893 - DNA, 122 bp, Homo sapiens
aactgaggctcagatgagtcaggagcctgcccgcaatcacacaggcaccaagtgttggtgcgaggcttccatttccagctttactaaggagtggctcccctccctcctaagagaagacactt

SEQ ID NO: 339894 - DNA, 122 bp, Homo sapiens
ggagaaccagagagagagaacggttaggcaggcaggaggtccacagtgagtggctgcaggcgccgcgctcggccagccgcgggcggaaggcggaggagggaggagagtgatttcctggccct

SEQ ID NO: 339895 - DNA, 122 bp, Homo sapiens
aattaaaacctattccttctaaaacattcatcatatttctaacacaaaatcagttgctttcgcttttaacaagataactgaaaccaatctgatgtcaattacagactgagctgtaaatcaga

SEQ ID NO: 339896 - DNA, 122 bp, Homo sapiens
tgcccccagtacccgggagtcgcttcttcacggcgcagagcattctgggaaagggacctccggcgcttgctccaaaggatccgcctcatcgactcagaatttgagaattggaaggcgccaga

SEQ ID NO: 339897 - DNA, 122 bp, Homo sapiens
ggctgctggcggaggaggaggcgcggggcctgcgggccgagctggcccagcgggaggaggcgcggctggagcagagccgggagctggaggttctgcgggagcagctggccacggccagggcc

SEQ ID NO: 339898 - DNA, 122 bp, Homo sapiens
ctaggtggttgggacacaatggttcaatccctgtctagtaaataaaacggacaccttaagcgctacaatcaaggtgcgcacggggtgctacagaacaatacgcagacaggaggaggtggggg

SEQ ID NO: 339899 - DNA, 122 bp, Homo sapiens
gggagacaaagggctatttcgctgttacttcaaagagcattaaagcctcggtcagacccacggggaggagagaggatcttgaagccgtggactccagactaggaaggcacatgtgtaacgaa

SEQ ID NO: 339900 - DNA, 122 bp, Homo sapiens
ggaccgaggggaaggggccgggtgcgagatggggaaccagggctgcgggatcactgctgccgccctctctccccaggctggctcgctccacgctgacgctggtgcccctgctgggtgtccac

SEQ ID NO: 339901 - DNA, 122 bp, Homo sapiens
ctctcccaggagataacaggactgttaatgatattgttagtcggctcaatgttctaatcacgtggagaccatgtcagggatgtggcttaagtatgctaagcagaggcagccccctcctctgt

SEQ ID NO: 339902 - DNA, 122 bp, Homo sapiens
acagagtggtgtctccctagggttacagattggagcaggtggtgggcactccaggacccccgctgcagggcccgcacctctctgctcacctctctagggaggggtgagctggaggcagcagg

SEQ ID NO: 339903 - DNA, 122 bp, Homo sapiens
ctcagggcgcaggcagcgcgtcgcctccgcggcccgccggggggagggggagctgcagcgcgcgccaggcacccgcctttcgcgcctgcgtcctgcgttacctgggcaaccggagcccgggt

SEQ ID NO: 339904 - DNA, 122 bp, Homo sapiens
ccttttcctatatactttccttttgagcttttgctaaaatctggagacgtggaatccacccgcggaaactccgagcccctccgactgagcatgcgccatcgccaggcggcttttggtcacag

SEQ ID NO: 339905 - DNA, 122 bp, Homo sapiens
tgtgggtgactttgctccccacaaccaccctgccctgcatcctttgctggacattctttgcggtgtttaggaacattctaaatctctttatggaatgcatcatcaagagcagtgaaacttta

SEQ ID NO: 339906 - DNA, 122 bp, Homo sapiens
cgcccggttcccgcgggcgactccactcggcatgcgcggcggggagcctcggcggtgaggcgcaaagccgcgggctcgtgggacggccacccctccgcaaaaccgccaatgggcgggcccgg

SEQ ID NO: 339907 - DNA, 122 bp, Homo sapiens
gatggagtcagggtccctggagaaggagcctcttgggactcagacagggccagtcccgagcgaaggtacggaataggtgagtgaaccttgggaactccggaccctgttatctaccctcaatc

SEQ ID NO: 339908 - DNA, 122 bp, Homo sapiens
ataacggtcactaagcagacaactgacgtgtcagcgattagaaggggtaaggtttcggggcgagtgtggaaagatactgctgtaacacgatgttttactcggtggcttcattgtgtaggtgg

SEQ ID NO: 339909 - DNA, 122 bp, Homo sapiens
atggcttcggctccgctgagtctgatggcgcataagggcccgtcccagcgacccaccggccggggctctcctccggcccatggcaacacgaccgctggacgaagcttcccggctcggcgcgt

SEQ ID NO: 339910 - DNA, 122 bp, Homo sapiens
ttgctcccagggaccggcttgttgttttatggcatgtacttatttaaaagcctcttttgtcggtgttgaaatggtccaagctcccaaaccctgtgccgggctatgagcgtggaaccagccga

SEQ ID NO: 339911 - DNA, 122 bp, Homo sapiens
acccagaaaagtacagcaaagcacagggacgcagaggggcgcgctactcccaccctggtgcgtcactggaacctcacacatccgcgcgcacgtggcgtatgcccccatgtggcatgttcatt

SEQ ID NO: 339912 - DNA, 122 bp, Homo sapiens
ctggccccttccagatcccagttttctaaagtgacttcgcaccaaagtccggtataattgcggaatggggaacgtgctgctaagtttggggggagggtgttgcgggggcttgcttcgtcctc

SEQ ID NO: 339913 - DNA, 122 bp, Homo sapiens
agcccagagctcagctttctcttcaaaagctccgctaatgagaagcacatttgatttcctcgggggaggcagctgtgggatgagagccggaagtgtaaactctgctggtggctgaatcatcg

SEQ ID NO: 339914 - DNA, 122 bp, Homo sapiens
caaggtgacggtgttaagtgtacggagccaaagctccagaggctgcgatttgtgttttcacgcttgccttcttcacggagatctatttcatgcagctgaaatgcatggacagtgtagcaagg

SEQ ID NO: 339915 - DNA, 122 bp, Homo sapiens
gcccataggccacagccgcggccagcaggggacccccccagctctcttcgccgcccaccacgggcaccagccccaccacccacagccccagcccagtcagagccccgaatacggccagcagc

SEQ ID NO: 339916 - DNA, 122 bp, Homo sapiens
gttacttgacctctccctgccttttttcctcatctgcagaatcaggctggtcatgcccaccggttacatggggcattgataagtcctataactgccggtggctcctgggttcgtggcactca

SEQ ID NO: 339917 - DNA, 122 bp, Homo sapiens
actagctgtctttctttcaaacaagacttacttcaaatgtgatggtccagcacctcagtccggcttgatgacttgtgcttttgtttttcctctctgcatcagttagctggcacctcgggttt

SEQ ID NO: 339918 - DNA, 122 bp, Homo sapiens
tagctgctgaacaataaagaccaaaaccataactaaaaaacaaacaaacaaacaaaaaaacgcagcccgagacagatcagaaactaggtgtatgtagggcgccaggttatgacactgttctc

SEQ ID NO: 339919 - DNA, 122 bp, Homo sapiens
gagacgcccagagcaggagcaaggccaggctggggactggactggaagagccagggcagccggctctcctcgtgatttatgggcccctcctcatccaccaaactgaaatgagctgccggccc

SEQ ID NO: 339920 - DNA, 122 bp, Homo sapiens
atgcaagcctggaaagcaagctgggactcgtgaactaagccgcccagatagtgagttctacgggggaagccttcaggaagcacacacgggccaggtgagcgaactgcaatgacacgtcgcca

SEQ ID NO: 339921 - DNA, 122 bp, Homo sapiens
gcatgactcctgtgggagctgtctgcagagggattgctgggtgcagagtcactgcctctccgtctgtcaactgctgctgctccagaataaacaggcagccgggcttctcgcggttgtggaga

SEQ ID NO: 339922 - DNA, 122 bp, Homo sapiens
ccggagtgatggatgcggcaggagtgttcaagcagtgcctctcccatctgcagcttcgtccggtttccagtcaagcactactgcacgcccagcaccccagctcctccaccattcctctgcct

SEQ ID NO: 339923 - DNA, 122 bp, Homo sapiens
atgcatagtttagcatccggcgtgcttctgaacctagtgtgatagaatcagcattttccacgatgacatgacctgcgtagaaatgacgccatgcctgtgcgctgtcctgcggggacacacct

SEQ ID NO: 339924 - DNA, 122 bp, Homo sapiens
tggattttcataggagagtgtcagctctttctttttggtagattattaaagcttatggagcgacctcttacctggaaacccggattatttgcatcccagggtcctaccagaaaatataacct

SEQ ID NO: 339925 - DNA, 122 bp, Homo sapiens
tgtggcatgggtatcatcagataatataattatccacaccatttttaacaaaaagatttgcgtaagagattcacagaggcaacctgaggccctgcaactacatttcccagagatccctgagg

SEQ ID NO: 339926 - DNA, 122 bp, Homo sapiens
ccctcactgaggtctgaccgtgcaaatacgcgtgggtgtgaggaaggctggagggaacaccgacatgctaacagcagctcccaggcatcctgcgtccaaattccctatcatgagcctacgtc

SEQ ID NO: 339927 - DNA, 122 bp, Homo sapiens
caagtcagggtattttcccccctcacatataaattttaaattgaatacacccctaatggccgggcatggtggctcatgcctataatcccagcactttgggaggccgaggtgggtggatcact

SEQ ID NO: 339928 - DNA, 122 bp, Homo sapiens
gctccccgactacgcctgcgcagcggggctgagttggagaacgtcttagactacaagttccgggaatcagcgcggcgaggcctgagaagaagacgtttgcgcctgcgcgtcgcgggcggggc

SEQ ID NO: 339929 - DNA, 122 bp, Homo sapiens
cattaaaaccttgaaggaagcaatggatgtcatcgccccaagtcttcgtttactaggtcccgatctccattctatttattcaagactaccacagctccttcaaaaaatcagaaacatcaacc

SEQ ID NO: 339930 - DNA, 122 bp, Homo sapiens
ccttaagagctgtaacactcactgcgagggtccgtggcttcattcctgagctagcgagaccgggaaccccaccagaaggaagaaactctgaacacatccgaacatgagaaggaacaaactcc

SEQ ID NO: 339931 - DNA, 122 bp, Homo sapiens
ccgagcaagccaccactgccttcccggctgcagcgccgtgatttatcggcggctcctcctcgccagggcccacggcaggaggagttcaaacacccgcgagaaaagccacccgctattgatcc

SEQ ID NO: 339932 - DNA, 122 bp, Homo sapiens
catggcgagctgcttcttggtcctgccgtccgcccccagctgaagcatccccaggaccgacgcaatcccatggggagagatcacgatgttgtcatgaggcctcgacttcacaatctgattga

SEQ ID NO: 339933 - DNA, 122 bp, Homo sapiens
ccttgccctcaaccagttgtgtgagtacatccgccatctctctggttgtggcattgcatacgcatatcagtactaagaatgttccaggaccttccctccttcacagctacgttttagggata

SEQ ID NO: 339934 - DNA, 122 bp, Homo sapiens
atgagggcaatagatgcataacacttgttgaggaagaatggcaacagctgggaagccttacggctgagcccttcttgcagtctttcatgccaaccttggattctttcagagatgacagttaa

SEQ ID NO: 339935 - DNA, 122 bp, Homo sapiens
ttaggggaatctcggcgacctgggcaagctgctgatgcagggctcgttcagcgtctggaccgaccacaagaggggccacaccaaggtgaaggagctggccaggttcaagcccatgcagcggc

SEQ ID NO: 339936 - DNA, 122 bp, Homo sapiens
atacgctcaggtggttgtggtgtagactgtgtcaggcctacggagtcagccagtggctagcgcaagaccagtcactccctctgccttcaggcttctgtcaatttcattatcatcaagcagga

SEQ ID NO: 339937 - DNA, 122 bp, Homo sapiens
cccactgaaaaaagtaaataagacccttcaagaattttgcagtcgctccacctcaacatccgcgtaaggggcgtggctatacttaggggcggggctaggcaaagattgccctatgaggcgag

SEQ ID NO: 339938 - DNA, 122 bp, Homo sapiens
tgaatcactattcactcaaatagatgttacatgtttattgtgcctcagtttgctttttaacgatatgcagcaacagctttgctggatgaaagtacaatgatgggccaacccagaaagcagcc

SEQ ID NO: 339939 - DNA, 122 bp, Homo sapiens
gcagcaccttttgtgtgtgtatttgagttactttatcatataggcattttggccatgagacgggggaaaaaacatagaacccatgttcttgctgaaaacaaacctgtgtagattcccgtgaa

SEQ ID NO: 339940 - DNA, 122 bp, Homo sapiens
tgttaccatcaccacaacaaggagacagacacatccatcatctccagaagtttccttttgcgtgtctgtgtgagggaagaaaacttaacataagactactgatacagctccgaagactggag

SEQ ID NO: 339941 - DNA, 122 bp, Homo sapiens
attcctgtgggcccctgctgtggcgggcacatttctcattcccgggagctggaggtgcctcgccgagagcggtggagtcggtgctgatcggcccaaggaaaacccgaaggctgcgctcacgc

SEQ ID NO: 339942 - DNA, 122 bp, Homo sapiens
aggcaactgtcctcagggggccccagctgactgagcaggtctgctaggtctgggaggcagcgcagcccccgccagctggagggggaggaggggggcgtgagcccaaaggagcagagggggct

SEQ ID NO: 339943 - DNA, 122 bp, Homo sapiens
ggggtcagggagttccctttccgagtcaaagaaaggggtgatggacggcacctggaaaatcgggtcactcccacccgaatactgcgcttttccaacggacttaaaaaagcggcgcacaatga

SEQ ID NO: 339944 - DNA, 122 bp, Homo sapiens
atcttaacctaccaaattgttggcacagcctgcagtttgagaaatgtcactgttgaccagcgattttcaaacgttcgtgtgcatcagactcaactgcagagtgtgctaaaacaatctgctcc

SEQ ID NO: 339945 - DNA, 122 bp, Homo sapiens
actctagcttttggagaaataatttattcttgagctacctcagttacagctattcaaccacgtgcttggtcaccttaggcatggtcacctttggaatttgccttttatataagcgctgttca

SEQ ID NO: 339946 - DNA, 122 bp, Homo sapiens
gcctctgtggcgctgtgatctggttattgggagattcacagctaagacgccaggatcccccggaagcctagaaatggtgagagtgctgggtccgacatcccgagagagggggagggagctgg

SEQ ID NO: 339947 - DNA, 122 bp, Homo sapiens
taaccacatttccctggcttcccttttgcttggagtggacttacaactgaagaagctagacgacctccttgtgaattgttttgccccctcaacagacattttagtctttctgctgaggaagc

SEQ ID NO: 339948 - DNA, 122 bp, Homo sapiens
gtcatggtggtttgctgtacctctcaacccttcacctaggtattaagcccagcatgcattcgctatttgacctgatgaaggagctgccttttatacctcttgcttttgcatatgctgttccc

SEQ ID NO: 339949 - DNA, 122 bp, Homo sapiens
gatccagagctgtccaggtcacgcccttggcccctctgctttctcggggtacttcttgatcgtcttttcctcctgcccctgccttctacccctgtctgtctccactcccctttgatcgctgc

SEQ ID NO: 339950 - DNA, 122 bp, Homo sapiens
ggaggagcgactgttcctaggtaattcgtggctacagtggacactttgaagtctgggggacgcgaaggtaatgaaacctgaagagcgcacaatctcacacgatcgacgcctctgggctcaaa

SEQ ID NO: 339951 - DNA, 122 bp, Homo sapiens
aatggtgcctcagtcacctctgtatctccagcacccagtgctgagtagtgcttaagagctcggctaattctctaagtgagggggtgaagcgcatgtctatgggagacacaagttccagagtg

SEQ ID NO: 339952 - DNA, 122 bp, Homo sapiens
ggcaaatctcaaaataccttgacatgaaacattttgtttttctgatcaatttaacgcgcacgtttccccacatcgatgcgctctcccaaacaccctgcattagatcctaataatgatccatg

SEQ ID NO: 339953 - DNA, 122 bp, Homo sapiens
agcttttctcaactcagacctcattttaatatagaggatgtgtgtgcttgaaaccctggacgttattttcattgcagttagaaagtttgttatcaaatcctatttataatgtttttgaacgg

SEQ ID NO: 339954 - DNA, 122 bp, Homo sapiens
gttcgggagaccagggtccagcatgggtttcagcacagcagacggcgggggcggcccaggcgcccgggtaagagggggcacggggactgcggcgggtgggggcgcgagcggacgcgggagta

SEQ ID NO: 339955 - DNA, 122 bp, Homo sapiens
ggccacgcccctcgggcccgggcctggctgacttggagtcagtgggtgccccccgcacgccgggacaccctacagccttctggggaaggcggcgcccttgggacccccaggccaccggtggc

SEQ ID NO: 339956 - DNA, 122 bp, Homo sapiens
acagcactgcccagaaggccgtcttcatgcggttgtgctgggagcacaccaggcggatggcgccgtggatggtggtgttgttgcagaagaactcgaagagctctcggtaggagcggtggaac

SEQ ID NO: 339957 - DNA, 122 bp, Homo sapiens
cctcaaatacctcccagccctgcagcagccccagagccctgcccgaggctgaggctgggccggcgctgcccctcatcttagcattgggcagacaccagggcaacctgccctccgccatccct

SEQ ID NO: 339958 - DNA, 122 bp, Homo sapiens
tctacaccctgcagaggagaagccatggagtgggaaggcagtgatggggaaccgagcaaccgagaggggtgccagactagcccagatccttgcaaactttcccatgacagccctgaaggcag

SEQ ID NO: 339959 - DNA, 122 bp, Homo sapiens
gctggaagcgcttaggacatcctaaagctggaagaagggccatgttgctggaagcaacggcgagaaggatgctagatgggctctttctcaaggagtcaggatgccagtgcacttaggccaag

SEQ ID NO: 339960 - DNA, 122 bp, Homo sapiens
ctagaggttagcagaactgactcaactccaggttgatacttgtttgtggatgagcttgcacgacttgcttaatctctttgtatttcagttactccatctctaaagtggtgacaatgggatcc

SEQ ID NO: 339961 - DNA, 122 bp, Homo sapiens
cttgcaggacccggggccgtggatccagttgtcgtggtgcaggaagtagtccacccacagcggcagcgtgcagatgtacagcaggtcggcgatgctgaggttcatcaggtagacgcccagct

SEQ ID NO: 339962 - DNA, 122 bp, Homo sapiens
agtcaaatcagactctgaggtcgacgttattccctagggctctttcatagacacccttcccgtctgtcccaagacaccttcctgggtttggattcatgccagctggcactgggcttttggct

SEQ ID NO: 339963 - DNA, 122 bp, Homo sapiens
gggggcatctgcagggggctgtggaaggagagatcaggaaggaagatgactcaggggaagcgatgcctgaatcttgaaagatggcaatgtgaaaatccacaaactcatctgggatagctgag

SEQ ID NO: 339964 - DNA, 122 bp, Homo sapiens
agccactgcacctgtccttttcaccccttaacaagaaaaactgttgcctgttttcagagtcggatagacctgagtttgagtgctgttccacccctactacatctgtaaacttgggctgcttg

SEQ ID NO: 339965 - DNA, 122 bp, Homo sapiens
atgaaagtttctgacaaagttataatgtattattattcaattccagaaaagaacaattagcgactggtggtagctagtcttcaaagatggcccccaatgaactaaacttcccagtattccag

SEQ ID NO: 339966 - DNA, 122 bp, Homo sapiens
tcttatactgctctctgtgctaaaagtagaatgctgaatgcttaaaacaaacaatttttacgttgtgtaggatctagtatggtacctgacagagtaggctattataaatgctggttgaatga

SEQ ID NO: 339967 - DNA, 122 bp, Homo sapiens
cccgccttggcctcccaaagtgctgggattacaggcgcgagccaccgagcgcggcccatacgggaaaacgtcaaagcctgacaggtgtgacaaataatgggcccctaggcaggctggggctg

SEQ ID NO: 339968 - DNA, 122 bp, Homo sapiens
tgactctagccctcacttcccctttcttagcagaggaggaagtaagctggggcagccagccgcctgtctgtctgctggggcaagagtgccccagcctggctcaccccatcctcctgaggacc

SEQ ID NO: 339969 - DNA, 122 bp, Homo sapiens
acgagcgttgggggatgggtgaaggaactacaagttccatggtgccgcgcggcaagcgggcgcttggctacctgggagcgtgtgtgttagggatgttgagggggaccaagcgtgctcctgga

SEQ ID NO: 339970 - DNA, 122 bp, Homo sapiens
ctgactatactgtgtagtggcttcaagaaggaagtgggtaagtatgaagtgaccaaactgcgaaggaagcttgaagtgacaactgaacaaccccaggccccagcaggagagaaacctgatgt

SEQ ID NO: 339971 - DNA, 122 bp, Homo sapiens
agggcagcatttcagttgtatctgcatagctttccctagaaaatctgaggctgaggtgggcggatcacgaggtcaggagctcgagaccatcctggctaacacggtgaaaccccatctctact

SEQ ID NO: 339972 - DNA, 122 bp, Homo sapiens
ccagtcagatttgagtctagagctgtcagttcttcacattttggtacatagttttacctacgaatgggaatctactgacattttctcatgccttctgcttctggcatactgaagcttatctt

SEQ ID NO: 339973 - DNA, 122 bp, Homo sapiens
gccaggtacaccggcgctccggcaccgacccgctcagcgtagttgcccttgcggagcagtcggtgcactcggcccactgggaactgaagacccgcccttgaagaacgggtcttagccttggc

SEQ ID NO: 339974 - DNA, 122 bp, Homo sapiens
tcgggggagaatgggactaagagacaggagagcagaagtcagaaaaaaacttagcttctgcggctgcttctgaagcctacagtttggggattgttttctgagctccagtagatgtttagcag

SEQ ID NO: 339975 - DNA, 122 bp, Homo sapiens
gagccgcccccctttttcaggtctgcggacggaagtgtccagcagggccccagctgcccccgacgttgccacgtgtccgctcctttcgggagctaggggggcgttggcttggacatcccgtt

SEQ ID NO: 339976 - DNA, 122 bp, Homo sapiens
tggggaagcacagaggaagctaaaataccgagagggaggcgggggacatctcccagccaccgtttatctagagcctaggcagctcaacagagtttccgttttccactgcttgggatcagccc

SEQ ID NO: 339977 - DNA, 122 bp, Homo sapiens
ccagctttgctcccttttcttgaccttctgtagcactcactctgcccaaagccagtcttgcgtaatcccatttgaaagagcactttgttactagccatattctaaatgttttgtgagcctac

SEQ ID NO: 339978 - DNA, 122 bp, Homo sapiens
taatgcccgtaagcccgtggggcagattccacaggaggctacggaggcaggaagccctcccggcagcaggggcggccagtgctgcagaactcggaggcgagggaggcggcgattcatccatt

SEQ ID NO: 339979 - DNA, 122 bp, Homo sapiens
agtggtctcctagaatcaattcttatggtatgattctctgaaattatggagatttgttggcgctgagtatgtgttataaagttcagagtgcaaatgggtataattaaataaatgttcactaa

SEQ ID NO: 339980 - DNA, 122 bp, Homo sapiens
attatatctctgtgggagaaaggaaaacgcgctatgggaaagtggagggcgaagaacccccgaataatttcggactgatgtttcacaaatcatttcgccagggaacaacccgcgagcctccc

SEQ ID NO: 339981 - DNA, 122 bp, Homo sapiens
acgacgccggaccaggaaacccagcgccaagggccgggttggaggcggggactggcgcagcgggcggggcacgcgtggaggcgtcacctaaggcttcgattgcagacagcgggatgctcatc

SEQ ID NO: 339982 - DNA, 122 bp, Homo sapiens
gaatttccatgggtttgctcagagaggctaagtcagctgcctaaggtgtccggcacagggcgggtgccactggaaatcaaaagcaaatctggcggcttccctggctggtggcttttctgcta

SEQ ID NO: 339983 - DNA, 122 bp, Homo sapiens
tgtttcttctgcatcccctgccttagctccctccccataccacaactcaaacacaagctccgtgagagctgtgaatctggctacttcatttataagactgagtcttcagtgcccagataaca

SEQ ID NO: 339984 - DNA, 122 bp, Homo sapiens
caggaaataaaaggggcgaaaagggggcaagtccgcaccttgaggatggcgtgcccattgcgatgcgggtgttcacagccacgactctcaccagccacgctacacggagaggaagtcaccgc

SEQ ID NO: 339985 - DNA, 122 bp, Homo sapiens
acgtggtttttatgtgctctgtggccttggatgagtcactgaaaggccttcatggtctctcggtctcacaaggacctcttaacccctcaataaagtgttacatttctaaacattggaaattc

SEQ ID NO: 339986 - DNA, 122 bp, Homo sapiens
aattgatggtggatgagaagaccgggccgcgggtggcatgtaggcacctggcacacacgtcgtctttgacctgcttttaaagcacattcccgtgtgtcgtgaacaacgctgtccccggcgtc

SEQ ID NO: 339987 - DNA, 122 bp, Homo sapiens
tcctcatctccccggggttcactaccgctgtcctgctgctcttcctccgcagctcccttgcgtcttcgctgcagcagcttctggagctgaggttccacccgggatccacagataggatgggc

SEQ ID NO: 339988 - DNA, 122 bp, Homo sapiens
aaaagtggcgcctaaacaagcacagtgcggcggccgcccaggacccgcccggctgccctccggctccacatggggcccatggtaaaatcgcatgtgttctttgtatacaaggaacatcccaa

SEQ ID NO: 339989 - DNA, 122 bp, Homo sapiens
tctacagtcacggtggtccacctgtggggctcacagtgcgcctggcagctgaggtctgtacggaagcgtgtggtctgcaagcgtggggtctgcgtcactgttcgcggagtttggtatcagaa

SEQ ID NO: 339990 - DNA, 122 bp, Homo sapiens
gaccgtcaacggacgcggttgcgggtgggtggcggcggcaggattggccgggccacgcgccggtcaccgagaagcagcgactccagccccttccgcaaaccaagacccgccacctagagccg

SEQ ID NO: 339991 - DNA, 122 bp, Homo sapiens
tccccctctgccccctcccccttacctgccccctttgggggcgggcctcgggacagtggacgaaggtgactctctggatggaccagaatacgaggaggaagaggtggccataccgttgaccg

SEQ ID NO: 339992 - DNA, 122 bp, Homo sapiens
taccacagtttaccataaagtttatctagtgataatagtcacacctacaaccattttttccgtatgacctggtggaagaagcactgatttggggagtcaagaggcttggtctaaagttttgc

SEQ ID NO: 339993 - DNA, 122 bp, Homo sapiens
ttctaaacttttcccctttatttttattttcaatgtaaagtaggactttgctataaaacacgtgaccctagggaaacttttgaagttagcggtatagagagtaccaccaccagacgccacca

SEQ ID NO: 339994 - DNA, 122 bp, Homo sapiens
aaatatttaatagaaacttaaaattcctgtatcagaggacagaaatatatttttctcacacgtgattagtctaattgccactattaatcctattaatattctgttaaataatagcatttctg

SEQ ID NO: 339995 - DNA, 122 bp, Homo sapiens
agctgcagctgcagcatctggggcgtttgtggctcacgcatattctggtgtctctcaggccgcctttgaacagaggccgtgtctgcattggcatcgctacctgcagcacggagccccgtggg

SEQ ID NO: 339996 - DNA, 122 bp, Homo sapiens
gataatccatgtgaaaagaccaccagtggggctgagtgtagtgggtcatgcctgtaatcccggtactttggaaggctgaggcaggaggattgcttgagaccaggagttcaagaccagtcttg

SEQ ID NO: 339997 - DNA, 122 bp, Homo sapiens
gggccggcaggaaagagactcgtgttgcggcggatgaaggctcagcgcggacctgcatctcgggccaggttttctttcacccggctccgcgaggagcgaggcggaaagctcgggtccgagtg

SEQ ID NO: 339998 - DNA, 122 bp, Homo sapiens
catctgctgccaagaggccatgtgggatgagagcctccagcggctaccctttgggatccacggggagcttgcactagggccatgcttcctccaggctgttctcagacaatgactcagtaggg

SEQ ID NO: 339999 - DNA, 122 bp, Homo sapiens
ttttcataaaagcgatgctctggggaggggaccttatttgtccaggagcttcatggccagcgcttacttgccacccccagcccactgtcatggctgacccccaacatttttagccctccctc

SEQ ID NO: 340000 - DNA, 122 bp, Homo sapiens
taggctgagaagaaaagtggcctcctgtacagcttcgccttctggagcctcaggcggaatcgggactgctgggaagctgtgcgggggcgggtccagcaagccctggcaacggagatcttccc

SEQ ID NO: 340001 - DNA, 122 bp, Homo sapiens
gaccccaccaaatccctccgcagctgccggggcggggccttccacgctagccctccccctcggaaatgggggctcccaggcctctgccttggatccccagcggcatcttagatcccagaggg

SEQ ID NO: 340002 - DNA, 122 bp, Homo sapiens
aagtaacataaaggagaaaaagcccagagcctgctgggaaggaccctgtgtcccgaggcccgtggtccccaacatttataatgtgctgagataactcctctaagtgggttgtgttcacaaag

SEQ ID NO: 340003 - DNA, 122 bp, Homo sapiens
caggttctttagggctaaggatcctgtggacttcctggaggagtcatcttcagtaggaaccgggtcagagagccagactgagctgggaacacccaggctggactcctacagccctgtcgggt

SEQ ID NO: 340004 - DNA, 122 bp, Homo sapiens
cccgcgaacccattgggactcagattctccccagacgccgaggatggggtcatggcgtcccgaaccctcctcctgctgctcttgggggccctggccctgaccgagacctgggcgggtgagtg

SEQ ID NO: 340005 - DNA, 122 bp, Homo sapiens
acatcccacagaagcgatagaaacagagccaaaactttcctttttcctctgactggtaggcgtggaaagagctgctgaagatgagcaagtgagcaagtgagctggagacgtgagtaagtggg

SEQ ID NO: 340006 - DNA, 122 bp, Homo sapiens
ccctgagcggagggagagtggctgacaccaagcggcccatgagcgagtccttaccactttcggccggaacggtgggtcaatctccttccgttcaagttcctcccagttgatctcccgaaaca

SEQ ID NO: 340007 - DNA, 122 bp, Homo sapiens
ttgctgggtcctcctacctgggacatggtgggtattgtgtaagcgctgggtctctgaaggcgcctctctggcaggcagcagctgctggaaaagatctgagtggagcccagccttctgaaact

SEQ ID NO: 340008 - DNA, 122 bp, Homo sapiens
ggagggcggtggcgcgtccccgcgcatcctgcggctcgagctcctccgaaggcgggggcgcggggcccctcccgcagtcctggggacgacaaaagtctcctggcactgggggcaagagacca

SEQ ID NO: 340009 - DNA, 122 bp, Homo sapiens
ctcaagtatagcctcccacagccaaccggaagaaaacatgacaaaacatttcacatgattcgcccagcctcagtcaggctcagttagaaagaactaagttccaggaagaaggtgattgagaa

SEQ ID NO: 340010 - DNA, 122 bp, Homo sapiens
accgggcctccggaggcaggttcggctggaaggaaccgctctcgcttcgtcctacacttgcgcaaatgtctccggtaaggggaagtgtcgcttaaatcccagagataacccccaccgagaag

SEQ ID NO: 340011 - DNA, 122 bp, Homo sapiens
gctgaactgcagtccaatgggcagactgaggagcctcattcctttcccctgcctctgaaccggccccatgtgctggaccacaggggttgagagctgggccgggcgccagcatggctgtgggt

SEQ ID NO: 340012 - DNA, 122 bp, Homo sapiens
tttcttttcctgcagtcgcgatgtgtgattgcagatggaaaacaaagtattttatgcctacgtttctaagatagaagaaatggacttgttgaaaagaagccagtttgtaaaggacacagtag

SEQ ID NO: 340013 - DNA, 122 bp, Homo sapiens
agccagaaggctgtggaggctgagggagatgaggggagctgagcacctcgctctggtgcccgtctgtgtgggagcccccactgtaacactctaataaatcagtttgttcagatgtgcctagc

SEQ ID NO: 340014 - DNA, 122 bp, Homo sapiens
gttaggagaaactacatttcccataatcctttgttccagggctggagcggctctgggctccggaatcgcccgcagccggtactgcgggacccactgcggatatggctgtcttggctggatcc

SEQ ID NO: 340015 - DNA, 122 bp, Homo sapiens
ggcccgagccaggaggtccttcccttctagggccagtgggatggccttctcctggatcagcgtaggtcgcgaccagcccagatcggtgacagcctaggagaccaggagtgcggtttaagcgg

SEQ ID NO: 340016 - DNA, 122 bp, Homo sapiens
gggtccctcggcaggaccctcgccgcgacagcctcagcaggggatcgtcgagcaaaagcccgcaggaatgctcctttctggggccccgccctcccggccgacagcttttaggtagacgtgga

SEQ ID NO: 340017 - DNA, 122 bp, Homo sapiens
gattttctgaaaccgtgtgatttccaccatatgtactatgtaccctgagagtgagttcaacgcagaactcatgtgctgcccacccaccaagtgccctacactctgccagcattggcgacccc

SEQ ID NO: 340018 - DNA, 122 bp, Homo sapiens
ttcggttttcactggaaacgacaccaccgggggttgatggtccctaaggtgttcagcctgcgaaagagggctgtggttaaaaagataaaaatacactagtgccttaccgggtcctgagcaat

SEQ ID NO: 340019 - DNA, 122 bp, Homo sapiens
gagcagcaggtcccgctggtgctgtggtcgagtgaccggtgagcgggccggggtgggatgcgctgtggcggctgaggcgccctcgcccgactccggcgctgtcctaggcgaggggtggtgag

SEQ ID NO: 340020 - DNA, 122 bp, Homo sapiens
tcacagagacagctgctcagaaccctgtttctcacagcacagccctggaccaacagtgtccgaatcgcctgggagctctcaggccttgccccagatccactacctcaatatctgcttcgtaa

SEQ ID NO: 340021 - DNA, 122 bp, Homo sapiens
taactttccaaaaagtggctcttaatctttctgggtgatgattcaagcccacttcactgacgaatctgatgaagactggaaaactgcagctgtacacaaagttagtttaggctgaaattttg

SEQ ID NO: 340022 - DNA, 122 bp, Homo sapiens
tgcggggagggatgcggggtgggaggtctggtagggtgacaagggactgccgctttgaggcgtccccgaggcacgtccccaccctgtccttgggggcatagcagaggaacccattcccaggc

SEQ ID NO: 340023 - DNA, 122 bp, Homo sapiens
cctgtgcactaacaacctgtcatctcttccttgattgaaccatagatggtccagcagcatcggaagtactatcaagacaagacgggcacagtgcctcgagtcccctactttgcgatgcccgt

SEQ ID NO: 340024 - DNA, 122 bp, Homo sapiens
ggcgccgcatctcgttccctgccgcagcggtctggccgggcgatggtggtttcgcctcagcggttcccagaagcttctcgggtggaagaaggatccagccagcctcccaaacttccaccgaa

SEQ ID NO: 340025 - DNA, 122 bp, Homo sapiens
agacaaggagcgcccccaagtggccatgcggtgtcctcacggaaggcagggagggcgtcacgggccttggggaccttgacacaacctggagcacgaggctgagaaacccaccacgcaggcca

SEQ ID NO: 340026 - DNA, 122 bp, Homo sapiens
tatgaagcaaagcgaaaaccaatacctaaaaaatttaacaaacactgagggaagcatcatcggagagatatagcaccaactggatcaagtgaaacagcaaagaacatacagtctttatgcaa

SEQ ID NO: 340027 - DNA, 122 bp, Homo sapiens
ccgctcatcttgtgacccggcttgagctgaacttggcgaggtggccccgcagagttcactcggatgtcacggtccggcctgcaggggtcacaggcgggtcaggcccgaggattgggaatggg

SEQ ID NO: 340028 - DNA, 122 bp, Homo sapiens
gggagtttctgctttcgcttctgcgtcatttttttcttgctgccgccatgtaagtagtaccgttcgccttccgccatgattgtgaggcctctccagccacgcagaactgtgagtccaatcag

SEQ ID NO: 340029 - DNA, 122 bp, Homo sapiens
aattctgtcaaaaaaaaaaaaaccttaggcctgtagaccttaagctctcaccatctcaaacgtattaaaccagttacacaatgccaaatgctgtataagaggcacttggaggagtcaaattc

SEQ ID NO: 340030 - DNA, 122 bp, Homo sapiens
catgtatgatatgcatggcaaatgatttgttaccaacagcaattaagtactatagaccagcggtccccaacccatttggtttcatggaagaaaatttttccatagaccaggtagcagggttg

SEQ ID NO: 340031 - DNA, 122 bp, Homo sapiens
cagtctacaaatactatcaaggactcgcgggatgcggtggatcccggaagaggctgctggcgcaccgaccccgtgagccaccaggccctgggccgtcctggcagtgcggtctcccgccgtaa

SEQ ID NO: 340032 - DNA, 122 bp, Homo sapiens
cccccacccccaccccaaggccattccaaggtcccattcaagaccactgcgcaggggtggcgccagaatgatcaaagtcatcatggggcactcatctttgtgtgggtcaagcactttgtggt

SEQ ID NO: 340033 - DNA, 122 bp, Homo sapiens
ttgggccatcttccccttcagtgtagaccacagaggactttgcttctgtcccagggagcccgcaggggctcacttctccatgttcatctgattcttgtcagccaaggtttcaaatgcttttc

SEQ ID NO: 340034 - DNA, 122 bp, Homo sapiens
gaagaggcaaaatttggtctctagcaacccctacccctttaatatagcaggaaaagatcccgactacatacgtgtaaagcaagaggaaggagcacttacatttctcatcactgttttactta

SEQ ID NO: 340035 - DNA, 122 bp, Homo sapiens
ttccggttccctgcgccgccccgtgattggtttagggccatagagtccattttacgtaatcggcgttgattatggttcccactgaaaccccacccacaggaaattaatgtactaaacatgcc

SEQ ID NO: 340036 - DNA, 122 bp, Homo sapiens
tttgttcacttaggtccccccctcacattaattccctgtcaccagcccagcacccagattcggatcccagctgcccatctgagcctacgccctattcaagaccggcatctggagggcactga

SEQ ID NO: 340037 - DNA, 122 bp, Homo sapiens
ctcaaggagctagagctttgctttagtaaaattagacaagtcattcatttctgggtgtcacggaatggagtggccaatggcctgcagagcaacatgcccaagttttattgtgactactgcaa

SEQ ID NO: 340038 - DNA, 122 bp, Homo sapiens
ggacagagcattggttctgcttaaactcctggggctccaaaacaaaagatcctcatcccccgtctttcccctttggctctgtgcatactgtttggaatctgtaaagtgattccttctgtttc

SEQ ID NO: 340039 - DNA, 122 bp, Homo sapiens
tttgtaccacattgtgagtgtgatgaatgctgctgaactgtacactgaaaatggctaaaacggaaaattttgtgctctacatattttatcccagtaaaatagaaaggaaaaagggagtctgc

SEQ ID NO: 340040 - DNA, 122 bp, Homo sapiens
caccttgggagctatggctcgcttgccataagtatggttgtcgtaactgttgtattcaaacgaggtcttggaatatttctcgagctccttggccaggttggaacgcggcgtagttgtgggga

SEQ ID NO: 340041 - DNA, 122 bp, Homo sapiens
agggtggggggcgcgtcagaaggagagaaagccggaaactgtcacggagagagagatggccgtgatctttaatccagaaatcccactttggggactttatccccaggtgagaaacggagaga

SEQ ID NO: 340042 - DNA, 122 bp, Homo sapiens
gagactgggacccaccgacaaacacaggatagtcaggtccaaggagatgcaaatgggggacgcggttagggagtcccagagccgaggtagagggggagcagtggtaagatgagcgagcagtc

SEQ ID NO: 340043 - DNA, 122 bp, Homo sapiens
tgaggcacaaggaatccagctctgttccctagaagccatccacaaggttttccttgtagacgtcatcactgtagacaatctgggtcctcttgtcccggtggcaacccttagggctgttctgg

SEQ ID NO: 340044 - DNA, 122 bp, Homo sapiens
gttgagagggggaggaggtcttgaggtcaccgaatttacaaacagctcccacctcccttccgcgaccttaaactctgcattaatacaaggcaattgaaggcattcaataatgtaagtgttat

SEQ ID NO: 340045 - DNA, 122 bp, Homo sapiens
ccacactcaggagcaccagcatgtttgacatgcggtgtgaggaggaggccgcggtgcagccgcacagcagggcccgccaggagcagctgcagctgataaataaccagctgagggaagaggac

SEQ ID NO: 340046 - DNA, 122 bp, Homo sapiens
aaaggcaggttgaggcaggacatctggtcagtcttctcaccgaacttggacattcagctccgtggttccactgctcaccggagtgcagagtcccaggacggggagatggtgcaggaggaaga

SEQ ID NO: 340047 - DNA, 122 bp, Homo sapiens
cggaccactcaggagccgaggagagcgagtgggcggggccaggctgaggctggccgggggcggggcgcagggataacgtgggagggtccgcccagcctttcttctacccaatagaaggccag

SEQ ID NO: 340048 - DNA, 122 bp, Homo sapiens
aatctgattgctagcagccctgtgcatacaaaagcagtgccagctcagcttggagggaaacgaggaatcccagaaagctgtttgctcttgtgtgggaatcaagtcccagaagaagtgggtag

SEQ ID NO: 340049 - DNA, 122 bp, Homo sapiens
aggagcaaaggctgggaagtgggaatgtgctgacaagaggcgtggctggagtgtagtgagcgagactcccgggcagtactgtgccctgcaccccagtgccctcttgccttctgcccggtgca

SEQ ID NO: 340050 - DNA, 122 bp, Homo sapiens
aaaaggcaaaaggttattcaaagctcaaaaagaacattttaagtatatgtattacatcagcggcttagttgcatgtgtattaaaatgtgaagggcagtatattattaatcaaaagatggtta

SEQ ID NO: 340051 - DNA, 122 bp, Homo sapiens
cggggaagggcgcgggggagggggagggggcggggggaccctttaaagcgaccgctccagcggcagcaactgacaaggaggcgattatgaaattttgatgttgaaaatggggggcggggtgg

SEQ ID NO: 340052 - DNA, 122 bp, Homo sapiens
ggccttgaggtctctttcctgatgacttctatttgcaggcgtcaggcttgttgcttcccacgtcccccccgacccccatcagaccggactctggctctcctctcctcccgcacctcccccac

SEQ ID NO: 340053 - DNA, 122 bp, Homo sapiens
gtatccttgttttacagaggaggaaattaaattggaattggtgattttgggccaaggtcacgacttcaggaagtctgtctggattttagagtctttgtaccaacgcttacaaagcatgtgta

SEQ ID NO: 340054 - DNA, 122 bp, Homo sapiens
ctgggttgcatagtgaatgtagaagaacttcttaaatttcaaaatgattccaaatggtatcgaagctttggaattgaattgggctctagaggcaaaaagagctgcccagactttccccactg

SEQ ID NO: 340055 - DNA, 122 bp, Homo sapiens
agtcatccccattttagtaaacagccacacgaaccactcaattgctcaaaccaaaatccccgatgtcatttcattctcatcctcacatctcacctatcacccacctcctttaccgctaaagc

SEQ ID NO: 340056 - DNA, 122 bp, Homo sapiens
cagctcgttctctgccctcaagcgaggagtaggtgggcgcagtgagcggtggggtggacgcgtgctctcctaccagaccctgcttgtaacctggagtgggtcagttggcttctctttgcttc

SEQ ID NO: 340057 - DNA, 122 bp, Homo sapiens
atctttccttgtgccccggactcttccagatggcaggaagttcctgcttaggcctctagccgggcccgtctccacgagctgacccttgctactgtgcaggggtaagctgccaggccagcagg

SEQ ID NO: 340058 - DNA, 122 bp, Homo sapiens
ttgtgtctccgtatgggcggaggccccccatctctgcctcagagtttcttctaagagtctcgttgcgccacgccctgagcgactcccttcacttcctgtaggtctcaccagctcggctctcc

SEQ ID NO: 340059 - DNA, 122 bp, Homo sapiens
gaatgatgttttatttttttttccaactccacatgcctgtctagacttcaagctttattacgaataaagagaaaatcggctggatggcataaaaaatatttcaggcagattaacacatgatt

SEQ ID NO: 340060 - DNA, 122 bp, Homo sapiens
gcggtgccacacttgcacatggaacgtgggagccaggcccgagatgtagagctggggtcacgcttcaggggaccggggtgggaagtgggagcagtgcccgcttcgaggacccagccagcaac

SEQ ID NO: 340061 - DNA, 122 bp, Homo sapiens
atcgcgccgccagtcgccgccctgcgaaggtgaacggaaggaaacgagttgtagggggctcgcggagctgtccttgcccgcctgtccacctgccagcctgcctccccggggcgggccgccgt

SEQ ID NO: 340062 - DNA, 122 bp, Homo sapiens
ctttattgtccctgctgtaacaatgctcatccttcctgagagcgtctcctgagggggcctcggccaaggctgactggagaaggggctggtgacccctagcaggctctgccacctgaggcctg

SEQ ID NO: 340063 - DNA, 122 bp, Homo sapiens
gaagcccttcctgagcttattcagtgcctggggccgcggcgatcgatgacagctgggcgccggccgagccccctccgggccgcgcgggggcgcatgcgcggggccgcgggatcgatcggccg

SEQ ID NO: 340064 - DNA, 122 bp, Homo sapiens
agccttaggaccacacagagaggtgcaccgaattgtgctgacttcaaataccactgtttccgaggcacagggactgagtctccaaatactaagccacatctggaattctgcttttacagcac

SEQ ID NO: 340065 - DNA, 122 bp, Homo sapiens
tcaggccgcaggtcggcaatggggaagcgcagccgcagcgtggcccggggtgcagagagccgaaataccgtctgctgctccatcgccggcaggggctctgtctgcaggaggattgggggtca

SEQ ID NO: 340066 - DNA, 122 bp, Homo sapiens
ccgtgaaaaccttagcccttaggtctaacacagtaggaacagaagttaatgttttcctgacgtagaagtttctcttgctgcttctggtcacatttctttcttgtgtggttcttctatggcta

SEQ ID NO: 340067 - DNA, 122 bp, Homo sapiens
ctagcatttatatttgccttgtgtttttcccagatctaggtgcaaacagcacctgaaaagcgtttgtttatttcatgagagaaaaggggttccttactctctcctcctctccctcttcatgc

SEQ ID NO: 340068 - DNA, 122 bp, Homo sapiens
cgtcgcaggccagcgactcacagtccttgggcctcttctcctcagctgtgaagatgattgcgcccccgggccgctctgggtgcgggaaggggtagccgttctccttgagctggtcctgggtg

SEQ ID NO: 340069 - DNA, 122 bp, Homo sapiens
ggctgggggcctgctgggccagggtgggggaaccgggctgcggcgcgcatgcgcaggtaccgcagcccggctcctgggaggccctgctgccgccaccgccgcggcccgcgctgtaaccgcgg

SEQ ID NO: 340070 - DNA, 122 bp, Homo sapiens
tatcactgaagtctctgcttgcttagctttgtggtcacctaatgattcaaaagacatttccgtaaatgcctggaagcaatcagtcttctagccttcgctgatgggttctgcatatgagttca

SEQ ID NO: 340071 - DNA, 122 bp, Homo sapiens
ccggcgccccccagcaacagcagggtggtgccatattggtcctgagccaggcctagccaccggtgacggcgggactctctgggaggccggcggtcctcgggtgtagagggagacagctgccc

SEQ ID NO: 340072 - DNA, 122 bp, Homo sapiens
gggacttccggcaaggcgcggaagcggcggtagctgcagctggcgaagttgggcgactggcggatgcaggccttgcggcacgtcgtgtgcgccctgtccggcggcgtggacagcgccgtggc

SEQ ID NO: 340073 - DNA, 122 bp, Homo sapiens
cattaagaggctcaaacaaaagcacaggtgcgtggcctgaagacccagactgcatcttcacgctgtgtgcgaggccttggggaaatggcttcccctctgagcctcagtttcctcctctataa

SEQ ID NO: 340074 - DNA, 122 bp, Homo sapiens
tcaaattcaggtgatacatcttggtcttggttctcgtctctttagctcatgatagatgaacgtgtgtcagctacagacttctttcctctctctaagccgtatagttcacatcagctttagcc

SEQ ID NO: 340075 - DNA, 122 bp, Homo sapiens
ggggagcacgccggaggccactagggtggatgtgctgtgtgcatgcaagtgcccaccctacgttgtgtttcggggcacacaagctacctgtgcctaccgggatgagcatgcaagtgtcaccg

SEQ ID NO: 340076 - DNA, 122 bp, Homo sapiens
gaccttgatggtggggtgggtcttggtggtatctgtgctcctctcgcctgggatgctgcccgcggagcgcccctcgcacttgtagcggaagcgcatgccccgctgcttgggctgctcaatga

SEQ ID NO: 340077 - DNA, 122 bp, Homo sapiens
ggccacccgacatagtgcagagaagcggaccacaatgcggcgactcccggcacgaggctgcgtccgcgatggcggaagcggaaacgcgcggaggcgagcatctcattggacccaatccgagg

SEQ ID NO: 340078 - DNA, 122 bp, Homo sapiens
tgggtaacaactcttaccctgtggataataagtgttgcctcatgggtaaccactgtgacccggtggatattaagtgtcgcctcgtgggaaaccagtgttacctggtggatagtaagtattgc

SEQ ID NO: 340079 - DNA, 122 bp, Homo sapiens
agggggagacctgctctgcaaaacagcacttagattcccatcggaatggtgagtgccctgcgtgcccatccagaagccccgggaatcccctgcatgaggccttttcttaaagagctggcgct

SEQ ID NO: 340080 - DNA, 122 bp, Homo sapiens
cctgtgggcggggcgaggcagcgtcgccgcgaggccacccggaagaccaagccgggtaggcgctgtctccgtcgcctccaacccccccggtccgaccagggaaggtgggatgctctgatggc

SEQ ID NO: 340081 - DNA, 122 bp, Homo sapiens
agctgggggtcacagctctgagccacctcgccaggctgcaggcaaatttcttaatcttgccgggctccagtcttccagtctataaggtgggaataacaaaatttgcatataggaatttgggg

SEQ ID NO: 340082 - DNA, 122 bp, Homo sapiens
ttggtgttgtagaatgacaggattaagttgcaggaggtagaatcatgctctaaagagctacgtcaaaataagaagtttggactgtattctaaaggcaacaagagccagcagacactttgaac

SEQ ID NO: 340083 - DNA, 122 bp, Homo sapiens
ccaaggctgaggacccagagccaggagatgcaggagacgccccagggatgctgaacaaagcgctgtcccctgttgcagctctcctgggtctccccatagaaagctcatgtgggggctgtcct

SEQ ID NO: 340084 - DNA, 122 bp, Homo sapiens
tggcttgggagacagaaatgctgagagcctcccctgccacttgtagaggactgagtcatccgtgtccctgaagcctccagctctgctacttacgcacgaaaaacacagcaggccatgccaga

SEQ ID NO: 340085 - DNA, 122 bp, Homo sapiens
cagggcatggaagcccctccccacagccaagggaggtggtgagtgaatgtgctacccagccgggtgagacgagaagtcttcttccaatcgaaggtttttctcagtcggctcatggtctcacg

SEQ ID NO: 340086 - DNA, 122 bp, Homo sapiens
gagacgggcagcggcctctcctgatcctttcctgcggtcatacaagttcctagggtgggccgaggacagagcgcctcaggcatcgtcggcttcccacggctgcggcccaggcccagcctgcg

SEQ ID NO: 340087 - DNA, 122 bp, Homo sapiens
aagatgcctgccatgcccaccaagatttaaaggactctgataattctttctctccccaaacggtgttttccttatctaatcctaataaccaagcctggaggaatccctgacttcgtgattga

SEQ ID NO: 340088 - DNA, 122 bp, Homo sapiens
gacccagccgtctctgcctcttctgcagccactttattgccttcgcccctgaatgaagcccgcaggcggcggccccggggagagccgggaatggccgccgtgcccctcagccagccgctgcc

SEQ ID NO: 340089 - DNA, 122 bp, Homo sapiens
tggaagggtaccagcagccagtttccttccaccacccagagaacagctgagaattctgtccggactgagggaaggagatttcccaatggcagatggcaaccagagaggaaagcctgccccct

SEQ ID NO: 340090 - DNA, 122 bp, Homo sapiens
catggtttctgcttttacaagtgttatatggtattttcaaaaaggcaaaatcacttaagtcgggaaattaatgaggaaatcattaagatattatgactgcctcaaagaacatttgaaaagtt

SEQ ID NO: 340091 - DNA, 122 bp, Homo sapiens
tcactgttgatgaggaaagtaccaattccccagccagatactgctacacacgcatccgaacggccaaaaccagagagaattactgacaacaccggtgtcagtgaggacatggggcaagtaga

SEQ ID NO: 340092 - DNA, 122 bp, Homo sapiens
ggggattttggcctaaaccgaaaatgaaaccgggtaaaggcgactggggctctctccggtcgagggtctgggcgggttccgcagatccaccttggggtggatctcagacggggagactctgg

SEQ ID NO: 340093 - DNA, 122 bp, Homo sapiens
ctagagattcttcagtccaagaataaaattagctcttttgtttcactcacaacccacaagcggaaagagccaaaaagcccccttcctctctcgcccaccccttccctcctcccctccttctc

SEQ ID NO: 340094 - DNA, 122 bp, Homo sapiens
gggatgcgcagaggcgggggcttagaggcctctacgtgattggctaacagcgcagggagccgggcgctgtcccgatgattggcaggcgctagacagccctcggaaaccgccttggcttcgcc

SEQ ID NO: 340095 - DNA, 122 bp, Homo sapiens
aaggtcatgcagctggttagtagaaaacgttgtatcagaacgttgctaggacattgtctacgatgacgtcatgcctctacaatctcctcattgttgggaaaacctgtttctaagaagtttgt

SEQ ID NO: 340096 - DNA, 122 bp, Homo sapiens
ctgccactgagtcctcctacagcaacagcagaccacagccgcccacctccagacagcccccggtctcactggccacagacttgctccttagaggcaaggccactggcaggctctcagttcct

SEQ ID NO: 340097 - DNA, 122 bp, Homo sapiens
tcatgctgggcctgttttccgattcctggtgctctcttgtcttcacctgcagttcacttgcgggcagtggaggctgcactgtgacgttagtaactgtgaaggtgtgacccatggtggaaagt

SEQ ID NO: 340098 - DNA, 122 bp, Homo sapiens
agctgccttcccacacttctcccactaagacatgccccgtccttccaggtggtgggcccacggctggcaccaatctgaaaacagatccccaaaggactttgtgccctgaaactgatacttct

SEQ ID NO: 340099 - DNA, 122 bp, Homo sapiens
acattcagttttaacctttggtgaaatttgcagtgttgggattttttatgctagagtggacgcaggaaatcacaggtgcaactaatttcagctttgacttacaatcactgtgggccccttga

SEQ ID NO: 340100 - DNA, 122 bp, Homo sapiens
ggagactcccgtcagatcatggactagctaatgttaaaaggacttaccggctggtagctccgttgcctcccgcctgcccgcgctcggtcctacaatctgtctccagctcctcctttcccccc

SEQ ID NO: 340101 - DNA, 122 bp, Homo sapiens
tgagatcgggggcaaagggcacaggagccagaaaggtcactaagagagggaaccaggccccgaaggtgttgcgggacccacagagtacaagacagatacaggtgatgaattcggcagggcca

SEQ ID NO: 340102 - DNA, 122 bp, Homo sapiens
gaaggaagctttgtgaaggcgcttgactcaccctgagggcaggggtgctgccctcagtcccgggtttaagtggggggcgctattcagaaacacctcccactgctgtgtggggcacaggagag

SEQ ID NO: 340103 - DNA, 122 bp, Homo sapiens
aggattctccaatctagctcttctgccagcccggaagtgctgggagggcagagccactgacgcaagcagcagggaagctgagtcaccatggggacgtgagactgacttacagatgacgagtg

SEQ ID NO: 340104 - DNA, 122 bp, Homo sapiens
cgctcgctcccagcgcccagagtcagccggttccaccttcggctgcgagagccgccgccccgcgccacccccgcccggcccggcccttgtcccagcccggctcccccgccagctgcgccgcc

SEQ ID NO: 340105 - DNA, 122 bp, Homo sapiens
ggggatgacccccgaccccggtcctacgccttagccctaccccgcccccatcgtgacacacgcactaatgacacagacattgatccccgagtgctccccattctgatctcacccctggcccc

SEQ ID NO: 340106 - DNA, 122 bp, Homo sapiens
cacttccaacctagatctcttgggctcaacaagtagccctctttttcggacagagtctcgcgctgtgaccctagctggagtgcagtggcaggaacttggctcactgccacctctgcctcctg

SEQ ID NO: 340107 - DNA, 122 bp, Homo sapiens
agaaaggcagttgtgaaggaatccatctccatctcccaagtacactgtgaccacgtactccgcatagagagcttattccttcaagagaaggcttagggcagaagtacatccatcacagtggt

SEQ ID NO: 340108 - DNA, 122 bp, Homo sapiens
ttcctgtcccgtacggtttttctttcgattctcagcccaaactagagctgaaaagtcagacgaagtcaggtgaagagtagggcgagctccagcttaccactctaaaacttcccagacaatga

SEQ ID NO: 340109 - DNA, 122 bp, Homo sapiens
agcaagtgagtcgctccgagaaagcgaaggagcccactcttgtgcggcgctttgggaagacgcctgttggttttgaccccgaataagaagaggaagctgagagcgggctgactgtggtccag

SEQ ID NO: 340110 - DNA, 122 bp, Homo sapiens
ttccttcagagctctgggacgggacagtgttgttccctcggccatcgtcgtggactctgtcgattgctttcgccccttcgtcaaggtgacaggcgttgtggccactgtcttgcacatgccgg

SEQ ID NO: 340111 - DNA, 122 bp, Homo sapiens
gctctggggttgtgtctgatgaaataggccgggcccgggctacactcggtggtggtggaccggcgggaggacgagcgctacctcagtactacttctgggtctcccgcgcgggctgaggaagc

SEQ ID NO: 340112 - DNA, 122 bp, Homo sapiens
gcactgagcgcggggcggaggcttttgctgggctccaactttcactcctcccactcgccccgccccgtcccgcgctccccgccccaggcccgccccgatggaaatctccgacgacgtgacgg

SEQ ID NO: 340113 - DNA, 122 bp, Homo sapiens
cgctgcggcgagcttggaggcccacgtcggggacatcctggtggagctgcggaccatgaacggccacctggacagcatagcgcgggccctcaccaaactggcttcgtccctggggccccagc

SEQ ID NO: 340114 - DNA, 122 bp, Homo sapiens
agttggcccacagcgggcccctacgaggctgggcggtgaggggacggctcggaccgcccgcgccccaggacccctgtgtcggcctcatcctgcgcctcagccccaaaccctgcagctcccgg

SEQ ID NO: 340115 - DNA, 122 bp, Homo sapiens
gcaggtcaccatgaagcatcgccctgggcagcaagtgggatgcaggggcacagcagggcacgtcccaggcggctgagaaagtccacggagggcaagggcaggggcgtgcgccatcgtcggag

SEQ ID NO: 340116 - DNA, 122 bp, Homo sapiens
aggttccaggagtcaaggacattgaggacatccaggcccaaacgggatgggccaactacgcgcagcagaacctttctctaccgggcccgcgtgtgcccgccggtcggcttaggcggagacac

SEQ ID NO: 340117 - DNA, 122 bp, Homo sapiens
tcccacagaatacagttctcctcccctttttgcctacctccttgccaacagccagggtcacgctgatcctttacagacagggaagccttgggaagagagaatgtacgtgtgttggggtggtg

SEQ ID NO: 340118 - DNA, 122 bp, Homo sapiens
accaaaaaccacatgttctcccttatatgtggaatctaaaacaactgaactcaatagaagcggagagcagtaggtggttaccagaggttgggtggggatggggaggaatagggagatgttgg

SEQ ID NO: 340119 - DNA, 122 bp, Homo sapiens
agagctagaggcaggagcttacctggctgcggtagctgcaacggccgtgtggagcctcctcgcttccagccacaggatccctctgcagactggtcctttgacccagaagcctctcccagtat

SEQ ID NO: 340120 - DNA, 122 bp, Homo sapiens
ctactgtgatttctgatgagtccaagccagacggcaacttggcaccttacacaggtgcatcgacctatacaggtccatgccagaaggaagagcgaatgcgaggggttgggaacgtactcctg

SEQ ID NO: 340121 - DNA, 122 bp, Homo sapiens
ttagaactataaattccacaattccctgcggttaaggtagccgcgccaactacggacacccggtcgggtcaataagtacctgcgcggccaaagtgcctagcatggtgacaggaggagccggg

SEQ ID NO: 340122 - DNA, 122 bp, Homo sapiens
tctcggaggacggcagcttggggcggcggatggagaactgcatgcatgtcttatcgggggcgacctgctggacgggaggaaaactgggcaaaggtcaggatctcagccgcgcggcttcagag

SEQ ID NO: 340123 - DNA, 122 bp, Homo sapiens
cccggtagctggttgagagaggaaaaagggacccgccgggaggtcctttgagggtaatgccgcctttgtgcccagggcgtggcctgcttgctcactgacagaagaggggacagccgagggct

SEQ ID NO: 340124 - DNA, 122 bp, Homo sapiens
gctattggtgttttgtatgtcagctgcaaaaaaacaagtattagtgggacttcatggccccggagtgccgagttcagctcgtccggcagaggtgccaggcggccaggtgcagctgtccttgg

SEQ ID NO: 340125 - DNA, 122 bp, Homo sapiens
tgccctaaaggggagctcctcacagcctaattgttgacgagtgatgaaagttcaacagcacggcaactctacttctcgctccagctaaaaagtgcttataaaggtagctgggctattttagc

SEQ ID NO: 340126 - DNA, 122 bp, Homo sapiens
tctggtcagtagaaggcacaacatgcaaagaggctttttagtggcaccacatggtacaaacgttcactacgattattataacctcagtggagctgctgtttaatgcaaaaggagagaacatg

SEQ ID NO: 340127 - DNA, 122 bp, Homo sapiens
aagcggaggcatggctgccggaaggttactgctctacactggcctctcgctagcgctctgcgccctcggcatgctggccgtggccatctgctcggaccactggtacgagacggacgccagga

SEQ ID NO: 340128 - DNA, 122 bp, Homo sapiens
acgagcaagcggaggccgagcaggtgagactggctgagtcagacctgctgccggggcagacgcaggacaaggctgcttttttgcccctggacctcaggatccaggtccgggacgccgcgggc

SEQ ID NO: 340129 - DNA, 122 bp, Homo sapiens
cagggcgcagtctccagggcggagtcccggggcgcttcgggcagggagtctgggccaaagcgccaaaatccgccgctgtcgctcagctgcagcacgtttcgcgctggggagcctctcctggt

SEQ ID NO: 340130 - DNA, 122 bp, Homo sapiens
tctgtcatgctgccccagtgagatagtgagtggtcaccaggcttgcaaatgaacttcagacggacctcagggtaggttctcgggactgaaggaaggccaagccattacgggagcacagcatg

SEQ ID NO: 340131 - DNA, 122 bp, Homo sapiens
gactggagccggttcattcataaagaaacagaaaggaacccggggtcctaaaggcgtttgcgcatttacagcctagctgaagtggcttcgaagaattatggatggaaaatacccgttttgtg

SEQ ID NO: 340132 - DNA, 122 bp, Homo sapiens
ccatgatcgacgatactttgggggcggcgtgatcagaggattccccttcccgggaacttgcgtctagtcctctgacgcatcctagttcggagtgggtggaagggcatgtggagtccacagcg

SEQ ID NO: 340133 - DNA, 122 bp, Homo sapiens
gatgaaaaggagggcgggccgcgggataggagtttctacaattagttttttctgcctttacgttcccaagaagaagccgaggaagtagaaaggagagagatctgggaaaggcaagatccaga

SEQ ID NO: 340134 - DNA, 122 bp, Homo sapiens
ttggagcctgggaccccacaggaagtgacttcgtgctgagctaatgttgcttcatcctggcgccagtctcaggccaagagctgcaggctggcatggctggggggatgtcagcggagtgccct

SEQ ID NO: 340135 - DNA, 122 bp, Homo sapiens
cagctcatttctccccaacaggcccctgattcaagagaagattaaagttctggcagaagccgggctttctgagaccaatttttcagaaatgacagaatccactgattacctctacaaggtaa

SEQ ID NO: 340136 - DNA, 122 bp, Homo sapiens
cccaacctttccctgagttcccagctcacagcaactacagactgagcttagtttgaattccgtagcacacaactgggatatccacactgtacaacttttaacgatttttaaaattttggtac

SEQ ID NO: 340137 - DNA, 122 bp, Homo sapiens
actgcataacagaaaaagcctgtattggagaatataagaatccgcggcagaaacggagtgcgcgacgattctaaggtttttacccagcacggctcccccatcagactgcaaatcccagcatt

SEQ ID NO: 340138 - DNA, 122 bp, Homo sapiens
aattaatggtcatgagttcgtatatggtgaactccaagtatgtggaccccaagttccctccgtgcgaggagtatttgcagggcggctacctaggcgagcagggcgccgactactacggcggc

SEQ ID NO: 340139 - DNA, 122 bp, Homo sapiens
acctcaggttatccgcccgccttggcctcccaaagggctgggattacaggcgtgagccaccgcgcccggcctgcagccgactttcatgattgtattgttgagtgttatgtatgtatggctat

SEQ ID NO: 340140 - DNA, 122 bp, Homo sapiens
gctccccgcaggccgggtgctcgcagccgggctggctatgcctcgcctggcagcccagagcgccgctccccgggaacagcacacaaaggcagcctcccctggcctctagcccttaggcttct

SEQ ID NO: 340141 - DNA, 122 bp, Homo sapiens
atgatgggacgggaagtttcagtgggtgtggggcatgatgggacggggtgttccggagggcgtggggcatgatgggacgggatgtttactctgctccatggccttacagtgttaagtgtaag

SEQ ID NO: 340142 - DNA, 122 bp, Homo sapiens
ggcaatccgcccgcctcagcctcccaaagtgctgggattacgggcgtgagccaccgcgcccggccaaattcgcctgtttaaactgtaaattcagcctgggcgcggtggctcatgcctgtaat

SEQ ID NO: 340143 - DNA, 122 bp, Homo sapiens
caggtgacttaatttaaaattgacttcaaagtagctcccatatggactgaatataggatacgagcctctgcctagccttcagtcctttttgtttggtttaggtgttggttgtctttgtaaac

SEQ ID NO: 340144 - DNA, 122 bp, Homo sapiens
gcccaagaaggcggcggcggcggcgaaccagcagaagggactttcctggcagcccggcgacgaggagcgcggacagtgagtttgctctgccccggttcatggttcctgcaagccctctagga

SEQ ID NO: 340145 - DNA, 122 bp, Homo sapiens
gagaaaataactgaaaaatatttctgccatctatctccatggtgttccctctaaagcagccgtgtccgaccctttgaatgcaagaacttttttgcctatctgtggtggtggatatcatgaaa

SEQ ID NO: 340146 - DNA, 122 bp, Homo sapiens
ggtgggtgggcccaggcctggggcgtggggtggcggtggaaggtctggggtctcacccttcggagttttgagtcttgtctggctccagggagggagatccaggggagatatttacgaacgga

SEQ ID NO: 340147 - DNA, 122 bp, Homo sapiens
aaacatggaaggagaaagtccagcacaggcgtaaaacctagactcgccaggcccttccaccgtccgccgccccagcgccaaccaatcatggcgtcctctttcctcgcctgcccggcgaacat

SEQ ID NO: 340148 - DNA, 122 bp, Homo sapiens
gacgcaggattggcgctgagctcgggatctctgtgtgcacctgcatcgctggtaggaggacgcccaggaaccaaggagtgaggcaggagcagcccccggcatcatcactcccagtgacccag

SEQ ID NO: 340149 - DNA, 122 bp, Homo sapiens
gcagatcaggaccacatgctcccgcgtcaccacacacagcagatcaggaccacgtgctcccgcgtcaccacacacagcagatcaggaccatgtgctcccgcatcaccacagacagcagatca

SEQ ID NO: 340150 - DNA, 122 bp, Homo sapiens
ctgaggtgggcaatagggtgacctggggatggatgttgggggcaagaggataatgaactccgggtctgatcgtggattgaactattcctgctgtgacagggtatgacctttgaggatgtggc

SEQ ID NO: 340151 - DNA, 122 bp, Homo sapiens
cggagcccgcgggggcggcagagacccgccccggcccgcaggacaccccctcggaacgcgcggccccccggctaagtcatgtttaacagcctcagaaattatcttgtctccgcgttctttct

SEQ ID NO: 340152 - DNA, 122 bp, Homo sapiens
gttcatgacaatggcagatgtaaagttattcttgaagtcagattgaggctgggagacagccgtagtagatgttctactttgttctgctgttctctagaaagaatatttggttttcctgtata

SEQ ID NO: 340153 - DNA, 122 bp, Homo sapiens
cctccctttccctgaggtggccacaggagtggccgaagatggcttcttcttggtcccttccggccgctctgccttgcgccgggggctgctggcctgcgggcccttcttgtccgcacggggct

SEQ ID NO: 340154 - DNA, 122 bp, Homo sapiens
caggggcctggctggactccgcaagctctaggcaagattctgcccaggagttcaccttttcgtagtaccaattctcagggactggaggggcccccactgagaggagtggggggaggggaggg

SEQ ID NO: 340155 - DNA, 122 bp, Homo sapiens
cacagctcctatgagccattctgagtactcgtgatctgccttattcgtgacttttcccatcggtgccctggggagccctgcaggacagctgggcccagttcctctgggacctgggaagccta

SEQ ID NO: 340156 - DNA, 122 bp, Homo sapiens
acaagatctgatagttttataaagggtaattcccctgcacaagttctttgcccgccgccacgtaagacgtccctttgctcttccttcatcttctgccaggattgttaggccccccagccatg

SEQ ID NO: 340157 - DNA, 122 bp, Homo sapiens
aaagaggcagcggtcgagaagcagaacaaaggctattgttttatttcctccttcggattccgcgtcctaaccggaatggcccttcatagataattactttcgttgcatctgcgcttagtgaa

SEQ ID NO: 340158 - DNA, 122 bp, Homo sapiens
gtcaacagaacccctctttcccagacaaacttggcacgaaaggccgtgagccacttgcttcgtgagaaggctcacaggagaacccctttctgccgcggggggccgtgtgcatgctagagccc

SEQ ID NO: 340159 - DNA, 122 bp, Homo sapiens
gactttgtctccaaaaataaatgaataaataaatatatcatttaaaaatacataaataaacgtgaaaggatagactttttggtaagttctgccaagtctaattccggttcttccattacaag

SEQ ID NO: 340160 - DNA, 122 bp, Homo sapiens
cgccgggcttccggtcccgctggaaaaggttctttccggaattcagagagttgctgtcgccgctgggggtgggactgtctgcggtgtccgcggcgggcgtccagcctgggaggcgctggttc

SEQ ID NO: 340161 - DNA, 122 bp, Homo sapiens
aatgctcctcacaactatataaaacagaatgttctcttagatatacaaacttcccctttacgatgttatgataagcaaaatatttaactcccaaaaacttgacagaaaatgaaagtgcagtg

SEQ ID NO: 340162 - DNA, 122 bp, Homo sapiens
acaccctcagaccccatgtaatgttcccaggatcccagcaggaaagacccgggagctgcgcgccagggaccagaacagcgaggagaagtcaccagaccagacctcacgtgtgtgtgtgtgtg

SEQ ID NO: 340163 - DNA, 122 bp, Homo sapiens
tcaaatatgatttaacatatttgctgaaatatgaggaatgggctgaaaattattattggacgtaatccaaggcagtatttttagtcattctcaggtatgaaatattatagacctctagaatt

SEQ ID NO: 340164 - DNA, 122 bp, Homo sapiens
ggctcggcggcttcagagtctgcagtgcgcaggcgcggcgctccctggccaggcctggtgcggccctggccgctggctctgttcctggttagaactacgccagacaggccgggcgaggtggc

SEQ ID NO: 340165 - DNA, 122 bp, Homo sapiens
gtgatgatgataataataataatatagcaactctcagcttttctacagcactctgctttccgctgtttccaactcattttgtgactggaggccaggaatctcacttctgaacctgctttttt

SEQ ID NO: 340166 - DNA, 122 bp, Homo sapiens
tcctgatctcgtgatccggccgccttaacctcccaaagatctgggattacaggctacaggcgtaagccaccacgcccggcctttttttttttttttttgagacagagtctcgctgtgttgcc

SEQ ID NO: 340167 - DNA, 122 bp, Homo sapiens
aagaacgatttgtgtgcacagttcccagttggcgaaattcataaatgtcacaccttggcacgtttctgttgaagtgtgaagaaaacatacacaaccagctgggaacagagagcatgtgtcca

SEQ ID NO: 340168 - DNA, 122 bp, Homo sapiens
gatgccaagatacgctgatgccgagatacgccgaagccaagatgccgagatgtcgagatacgcagatgccaagatacgccgaagccgagatacgccgatgccgagatacaccgatgccaaga

SEQ ID NO: 340169 - DNA, 122 bp, Homo sapiens
aagagtagctgtggttgtaaagcagtaccctaccctgattgtagggtctcattttctcaccgatattagtcctacaccaattgaagtgaaattttgcagatgtgcctatgagcacaaacttc

SEQ ID NO: 340170 - DNA, 122 bp, Homo sapiens
gtcagctttatgtaaggtcaggataacattttctagtttgttccatactcttattcgtcacgctcaatatttttgttgacttctttggccagaagagtttactgctccagcatcttcctgga

SEQ ID NO: 340171 - DNA, 122 bp, Homo sapiens
catgccaccatgtcccggcaaagcctgctttctacaaaaaatatgcttgagcccaggaagcggaggttgcagtgagctgaaatcacaccattgcacaccagcctgggcgacagagtgagatg

SEQ ID NO: 340172 - DNA, 122 bp, Homo sapiens
gcagggagaaagggtcagcacggacacgacggtagtcttcaaatatgtgaaggggccattcgtgtgaaaacggggttatacttggaaaaagcaaaatacagtgagaacagcatgggctatga

SEQ ID NO: 340173 - DNA, 122 bp, Homo sapiens
aaaggagataacctctttctcctgcccggagatggcgcgtctggattcagggagatcgtgcggccagcttccctccctctgctctggatgggggccggccgccgccgctcactcacggctct

SEQ ID NO: 340174 - DNA, 122 bp, Homo sapiens
ggggtactcggttataggggcctcactctgatttctaggccttcacaagttctgaaggaacgggtgtctccatgggcagggactgagtcttactcccaagtgactttggaattcctgagtgg

SEQ ID NO: 340175 - DNA, 122 bp, Homo sapiens
cgctgtgcttggctgggccgcggctgggactagcgcccactagacgtgcaggagccaccccgcaggagggaggaggtggtatccatgttccctgaaaaacaggctctgctgacaaatctcag

SEQ ID NO: 340176 - DNA, 122 bp, Homo sapiens
tgacttcgcgggacagagctggagctcgtgggtggagcgggccgacctgcccgcggctgacggtgagtaaagccaccctaaagtccggggaccccatcactatctcccctccccccttccgg

SEQ ID NO: 340177 - DNA, 122 bp, Homo sapiens
ccaaataccacatgttctcactcataggtgggacctgaacgagatcacttggacataaggcggggaacatcacacactggggcctgttagggggtagggggctggaggagagatagcattag

SEQ ID NO: 340178 - DNA, 122 bp, Homo sapiens
atactcagctgcagcctcacaattcagctaaagtctgctgtttggctttagctttgtcttcgtcctcagattttggaaggaaaaggaactgaagcttgctttaaggtcatttctgagatcaa

SEQ ID NO: 340179 - DNA, 122 bp, Homo sapiens
cctgctcgcttgggggctttgcacctgcttgggagctctttggcttccctgcctggtcagcgactcactcgttgcatcccgcgcccccttcccggcttcccacgtctgcgcgcccccggcct

SEQ ID NO: 340180 - DNA, 122 bp, Homo sapiens
tttggccatttgttcatctgctaacccatccattcattcatttcaatacaagtgggcacccgtcatgttttccagccctgctcaggctctaaggagaccaaatgaataagatggagcccctg

SEQ ID NO: 340181 - DNA, 122 bp, Homo sapiens
acggacagaatggcgttctcttatctctgagtcggggcctggctcgttttgacatttttgcgcccacgagtcttcggagagggcgtcgccactccagaccttccagcaagcttgaagtcatc

SEQ ID NO: 340182 - DNA, 122 bp, Homo sapiens
aagctccgagtcctaaacgaatcacaccaggatggagattgcaggatggcgtgtttccatcgcgtgtccaggcgcagtgcctgggagcaaatatctccatgtagaaagagaccgacagtgtg

SEQ ID NO: 340183 - DNA, 122 bp, Homo sapiens
ctgtgacacaggaagcctcctagggacaaacttcggtcagcatttgaatcagccctgactcggtgacagtgtctcataaacgggtcagctggttagggacttggaaagagagcggggaaacg

SEQ ID NO: 340184 - DNA, 122 bp, Homo sapiens
aaatgatatgtatcaaacagtaattttgaggaaaggaaaaaaaagacagcaaaactcatacgatctcatctcaggttacagaatcttaggcgttaactagctgatctcatgtcacaaaaagt

SEQ ID NO: 340185 - DNA, 122 bp, Homo sapiens
tataaagagtttaattttaaaattttttaaattaaaccttcaagggaactagcatgtgaacgccaaggcataatctgttatttaattacgggtctccataggaccgaggcggagagagctcc

SEQ ID NO: 340186 - DNA, 122 bp, Homo sapiens
tgcagaaacagctcctgccagagcggcgctcggcgcggcgcggcgggcccggagcggcggcggcggctcttcctgcctccgcgcccaggagttgccggctccctttgacagcagagagccgg

SEQ ID NO: 340187 - DNA, 122 bp, Homo sapiens
acttcacctgaagtccttatcctgtgacgtcacagtcagttgccatagtgaccaattgtccgtcacaagcagaggattaggacttcggatggagaagacacacatttacgatgcacaaaggt

SEQ ID NO: 340188 - DNA, 122 bp, Homo sapiens
gagcgagactccgtctcaaaaaaaaaaaaaaaaaaaaaagaataggcatatagcattagccggtgcctcgagaattctccaaaagaaagatgttgctctcctcaccagacttcacatatcac

SEQ ID NO: 340189 - DNA, 122 bp, Homo sapiens
gacttggactcctcaggagggtgggccttttcagctcctcccacctcgcctgatggaattcgcacacacccctcccagcccagccaccgcgctcacccagcagtgaagggagaatctccctc

SEQ ID NO: 340190 - DNA, 122 bp, Homo sapiens
aattaaagtcctcagttgcaaaatggaaacaataccctccctacagaatgttaaatgaggcgacgtgtgcaaaaacatactttgtaaaatgtaagtgctgtagaaatatctttgaattcatc

SEQ ID NO: 340191 - DNA, 122 bp, Homo sapiens
gctccctgaggacaacccgaaagacatcagattaaaaagtcacaatgagataaaccagcacgacgcggctctctgcaaagcgacaggtagtaaacagaccttaacgcacgtcatgaggtttg

SEQ ID NO: 340192 - DNA, 122 bp, Homo sapiens
atgggggagaggtgggaaacaggtgaggagtaagcacctaggggcctgtgcccaggctgccgcctgccctgccctcctcctcggcacaggtgtctggaggctggggagactgtttgaacagt

SEQ ID NO: 340193 - DNA, 122 bp, Homo sapiens
tcaccgcatcttccaagtttttcaggggctctgcaaaggctgagttgcccatcatcaggacgctgatttcatagctgccattgtggcagttctgactcacctgggaactaaaggacagccac

SEQ ID NO: 340194 - DNA, 122 bp, Homo sapiens
cccatctctccaggcaggggaccccgcttctctaggggaacgctgcctctctagaggatccgtgcctttctagaggatccccacctctctaggggaccccgtctctctaggggacctcgtct

SEQ ID NO: 340195 - DNA, 122 bp, Homo sapiens
tgagggggtgcactatggggcaggggaggggcagcgaggggccagctctcacctgcgtgacgtcatccctaggcgtcacacaggtctcaccccctgctgtgaagttgcagaaaactcggaag

SEQ ID NO: 340196 - DNA, 122 bp, Homo sapiens
ttcctcagcccactgatcctaatatggaattcagcaggaaacccatgatttcctgacactcggcaagctggaggaagcaaagggaaaaaaactccattaaaaagcccagctttcctccatgt

SEQ ID NO: 340197 - DNA, 122 bp, Homo sapiens
agcgcgccccgcaagaacccgagtggaaacaaccgaagaccagaaagggagcaggaaggacggctgctctggaagcagatgtcaccagtaccgcccacctccccaaaatcagaagaaaaacc

SEQ ID NO: 340198 - DNA, 122 bp, Homo sapiens
aggcagaggaaggacagcgtgttcccagttgatatgtcctttgacctctgacccctgacccgttctctctgctctccagaaccacatgccctgggaagaaccagcaggtgagaagcccagtt

SEQ ID NO: 340199 - DNA, 122 bp, Homo sapiens
catttaacagacaggttccctaaggccattaaggaactggtccgattaagtgacagaacgcggccttcaccaagattcagtgacgcccagccccatcccctgacagccatttctcacgggct

SEQ ID NO: 340200 - DNA, 122 bp, Homo sapiens
tccacctgcctcagcctcccaaagtgctgggatgacaggcctgagccaccgcgcccagcccggcaggtcttcacctttcagtgggagcgttcttagtggcaaagttcaggtcgtaaattgca

SEQ ID NO: 340201 - DNA, 122 bp, Homo sapiens
tagagagaaaggtcagaggctctaagaggactctttctagtccgcagtgtgaagggtttgcggctcgaggcagattctcgagaaaaaacatcctggaagagcccagagattggcatccaaag

SEQ ID NO: 340202 - DNA, 122 bp, Homo sapiens
tcactcgtggctttccgaaggctgctggtgggtgctggcctagggagaacgggcgtgaagcgggtgcggggcgagaaaagggaggacgcttccagggtgaccttggtgggatccggagggag

SEQ ID NO: 340203 - DNA, 122 bp, Homo sapiens
gaccttttctgctattcaggaaataacccagttctgcaccactggtttttgtagctatctcgtaaggctgctggctgaaaactgtgtctatgcaaccttccaagtgcggagtgtcaaccaac

SEQ ID NO: 340204 - DNA, 122 bp, Homo sapiens
agatccttttgaatctacatctcacaggatttatcctaagtctactcttccaaggagattcgtaatggccaggcaaataagtccatgatctgcttttccaacaattacaaggaaataaactc

SEQ ID NO: 340205 - DNA, 122 bp, Homo sapiens
tggacagcgctgcggcgaacatggggtgcgggtgtctcttctgcgtactgatgtggcctccgcgtgtcacgcccgggagtgggacagctggattacgtggtggttctgttttcagttttttg

SEQ ID NO: 340206 - DNA, 122 bp, Homo sapiens
ggctagttacccagaattctctgggggaaccagaaaaatcggttatctagaattctcccacggcagcggtgaggagggggatagggcaagggtcagatgtgttcctgggatgcttacgggga

SEQ ID NO: 340207 - DNA, 122 bp, Homo sapiens
ttgttcccccaactgtcctggtgaaatcaaagtactcacaggtcctaaggagatcaatcccgctattgtggtttccgggatcaacaaatttctccatgaactgctcagttagtgtgaaactc

SEQ ID NO: 340208 - DNA, 122 bp, Homo sapiens
acagagcagcaccaccagcaggcggtacacggcgccctgcagttctgcccagtcctcgggcgccaggaagagcacagaggcccacagcagcaccatctgcaggacagcagggtcagccctgg

SEQ ID NO: 340209 - DNA, 122 bp, Homo sapiens
tatacgcatcctccgtggctttttttaaacccgtagtttattatttccaccaattcggctcgaatgctgaaattttaacagtagttaaatctcactgtgaaggcgttgccacgtttaaacaa

SEQ ID NO: 340210 - DNA, 122 bp, Homo sapiens
gatgtccgcatcctgaaggagagctggctgcgcgggctgtgagtgagacctccctgaccccgcccttttttgttcccctccaggatgctgccggactggaagagctccttgatcctcatggc

SEQ ID NO: 340211 - DNA, 122 bp, Homo sapiens
cgttgtgcaagagggctgcaatcaaggctggatcggtacctccttccaggtctccacgcccgcccctcccctcccctcccctcgctggtgctgggaccttttaaactccaggcacccggaac

SEQ ID NO: 340212 - DNA, 122 bp, Homo sapiens
cacggaagtctcgcgatgtttgcgtttgaacctcttggcgggtgccggccatggcggcttcgctcccgggacctgggagccggcttttccgcacatatggggctgcggacggcaggagacag

SEQ ID NO: 340213 - DNA, 122 bp, Homo sapiens
ggccgaggtggcggacactcagctgatgcttggagtcgggctgatcggtgaggacgtaggcgccctgcctggaagcccgcaccctggttctgcctctgctccacctcggcccggggcagccc

SEQ ID NO: 340214 - DNA, 122 bp, Homo sapiens
ggttctgctgtggggcagtgcaaagaaggtctcttgtggccctgtggccaccagagctgccgcatgctgtgactgcaccaatcccactggctaatccagaatgactttagaggacagcggct

SEQ ID NO: 340215 - DNA, 122 bp, Homo sapiens
catgagaactcaacatctgtcctatggactagtttctttgtcttcctagtattcccttcccgttgtctctgtttaaaatgccaatttccgtgggacgtggaactcctaaagtcccacatcca

SEQ ID NO: 340216 - DNA, 122 bp, Homo sapiens
cagaaccgggcttcaggaccgctgagctccgtagggcgtccttgggggacgccaggtcgccggctcctctgccctcgttgagatggacaacgcctcgttctcggagccctggcccgccaacg

SEQ ID NO: 340217 - DNA, 122 bp, Homo sapiens
ttactgcctgagcgctgcctcccgtcagatcagcggaggcattagattctcacagaagtgcgaaccctattgagaacggcacatgcaagggatctaggacgcacactccttatgagaatcta

SEQ ID NO: 340218 - DNA, 122 bp, Homo sapiens
gctaagctgctcactgcccaggccgctggggccagccggcggctccgagtgcggggtccgcggagcccacgcccaccgggaactcgcgctgctggcctgcaagcatcgcagcgcagccccta

SEQ ID NO: 340219 - DNA, 122 bp, Homo sapiens
ccatgaacttggtggtgagggggttttagatagcagctttgcccttggacctctgcatcccggatgcccgggcaagaccgccaatatcaataacccaacttattatataacagcctcggaga

SEQ ID NO: 340220 - DNA, 122 bp, Homo sapiens
agtatcactcttatcataagtcagtctgttttggagtctattctgttctgttggtgcattcgtctatgcttgcaccagtatcacgctgtcacagttattatgatggtgttcgagtttatata

SEQ ID NO: 340221 - DNA, 122 bp, Homo sapiens
ggaatccccatatactttccctccggtgacagtttaccttttggaaagctgccggatctgcggaatccccatatactttccctctggtgacagtttacctttcggaaagctgccggatctgc

SEQ ID NO: 340222 - DNA, 122 bp, Homo sapiens
ctcacctcctggctgagatgccactctttgtgggaagcggtcctcgaaacgcgttcaaatcggggagaggtcgggcgcgggctcacgcccgtaatcccagcactttgggaggccgaggcggg

SEQ ID NO: 340223 - DNA, 122 bp, Homo sapiens
atggcttcctccctcttcctccatttggcctccaggattgcacccaccctccctgcccagcggagcgcagtgcagggatagagggaatgctgtatgggatagctcccctttcctgtgggcca

SEQ ID NO: 340224 - DNA, 122 bp, Homo sapiens
ttgcgcttgttagagaaaattatgtgtaaaaactgagccattcagctttactttccaccccgcgttgatgtaaaacatgagttcctatggaagatgaggggcttcgtcaagtgtgtaaaaac

SEQ ID NO: 340225 - DNA, 122 bp, Homo sapiens
tgagatgcatcagtagatcttcccaggcaaattgaaacatgtctttttcaaaactgaactcgtgttcattctcccaatctgttctcccccagtctttgcctttcttttttttggtggatatg

SEQ ID NO: 340226 - DNA, 122 bp, Homo sapiens
tcagcaggtctcaagcccgcgctcactcgggctccggctgctgacagctgcgagcccgcgcgtgtatacccgctcaacgctgggacgttacagccagggccaatgggcagagcgggactcga

SEQ ID NO: 340227 - DNA, 122 bp, Homo sapiens
acccaccacgcggtctgtccccggcacactggctgagtgcacaggcacacacttccaaaccgtcggaatgtagtgccgagaagtgtatgtgcagaacaacatcacccttctaccacaggaga

SEQ ID NO: 340228 - DNA, 122 bp, Homo sapiens
acaagcatctttcgcctacactgaggacacatctaaacacagaatttacaattgtgcatgcgaaactttacacttacgttagttgcctcaacctttcccctttcccagtatgctgcagttag

SEQ ID NO: 340229 - DNA, 122 bp, Homo sapiens
ggatcaaaagtaaaatagcatcatgtgtgatctcgtcttccagcgtgccgctcagttccccgaatccgtgtgcacacgtgtgatctcgtcttcagtgtgccgctcagttccctgaatccgtg

SEQ ID NO: 340230 - DNA, 122 bp, Homo sapiens
aagaatgtattgtaaagagtaaaatcacgcgcaatccatcccaatataaccgcagttgttcgtgggccttcttgcagagaaaggctgcccaaccttgacggggccatgggcgctgcgggagg

SEQ ID NO: 340231 - DNA, 122 bp, Homo sapiens
gggccggggaggtagggacccccgcatctgagcgcggcacccaccctacccccaccacgccggcgccagcaccagaagccacaacagcagcgcagcgatacccgcgacatgcctgcaattct

SEQ ID NO: 340232 - DNA, 122 bp, Homo sapiens
gccgccgccgcctcctcccgtgggtagccactgggggtgcgctaggcccacggggtggcccgcgcccgcgcccagccactcgtggtgcatcagcttctgcacttcgcggtacgcggcccctg

SEQ ID NO: 340233 - DNA, 122 bp, Homo sapiens
tgcacgtggaattcggaattgaaaattgaggtcagaatctccctttttcttccagttatccgcgccgctgccccacgcctagcggcttggatctgcatagacatctatctacccgcaacaag

SEQ ID NO: 340234 - DNA, 122 bp, Homo sapiens
tcagctctcccagatgcaagtatctttacctccagccagctccttgtaaccctggcaacacggcccgcccgcgaatcgtcacgctacgattggtccgtggtgctaaagcctgaaagcgaatt

SEQ ID NO: 340235 - DNA, 122 bp, Homo sapiens
gttggatgtgtgctttaacagcaccaagtagatgcccctcagctattgcactaacacaggcggggctgttgcccgggactttgcgggactgtgtatgtgtgtgcacaggggtcacatatgga

SEQ ID NO: 340236 - DNA, 122 bp, Homo sapiens
agttgtacttctctgtggagagaggccatgtgaaaagaggagcccctgccacaggacgcccggaaccctagagaccaggccctccccacgccctagccacaggctctccccatacccatgtt

SEQ ID NO: 340237 - DNA, 122 bp, Homo sapiens
ccagcgaacatgtttgcaatgcactttcgcaggtttgacaccagctgttaggcttggccacgttgtgtgttgggcactcgtgggtccatgcgccaccactgagccacgtagctggaaaggct

SEQ ID NO: 340238 - DNA, 122 bp, Homo sapiens
gcctcgggcgcggctgcggtgggaggtccagccgtagggggtggggcggggctgcggacgcgcgcctgggcccggcaccgcacagctggctgcagctggcgtggctcgggacgcggctagcg

SEQ ID NO: 340239 - DNA, 122 bp, Homo sapiens
ccgtaagcagtatgggtgctggacaaacagcgtgatcgggtcgtaaaacttggtggaaaacgaatattagagcacaaggaaggaaaaaccgggctgggtgggactgaaatagttgatgtgag

SEQ ID NO: 340240 - DNA, 122 bp, Homo sapiens
gccggggatgcggccccgcctccatcaggagccggggacgcagagtcgccgccgcctcgacggccccaacaacagccacccgcccacagagctccgcgccgccccttgctcagcttccggcc

SEQ ID NO: 340241 - DNA, 122 bp, Homo sapiens
aagtttgagtgaaaccagagtcattaaattgtgactacccagtccacaggagttcacagacgcaaattacctacttggatgaatctgtccccaggataattttcaaaacactgagctcaatt

SEQ ID NO: 340242 - DNA, 122 bp, Homo sapiens
gctgggccatctgtctccacctgggttgtgtgcgagggcgtggagtgttccgagggggaccgggggccgaagggctggagcagggcagggagttctgcacctccagaagttgtagggtgagc

SEQ ID NO: 340243 - DNA, 122 bp, Homo sapiens
agtgccccgacgctggcccggagggcggtcgctgactgtcttgagactgaagctcactttcggatcctgggcgttcttgccaggttttttttattaatacagagaaaaccagtggctttgtg

SEQ ID NO: 340244 - DNA, 122 bp, Homo sapiens
gtgccgggaacacaacccaggaacaaggacttccgtgcgacggtgccccggccaccaccacgcctcccgcagcagccaggcccgggccttgaggtcagcagtaaaccccaggacacaggcag

SEQ ID NO: 340245 - DNA, 122 bp, Homo sapiens
cgccattttgtcctcctgctgccgggcctgcttgcccctccccctccggtacctctactccgggacccgcacctccggcagttcattcaggatccgtagtctgcccctaaccacccaccgtc

SEQ ID NO: 340246 - DNA, 122 bp, Homo sapiens
aaacccagtatgttttagtaaagttgctgttctaaaaatcccacctgtcaccaggataaccgaaactgctccctctacactccaactgtatttttagtttttacctcaacaagtagcaatgc

SEQ ID NO: 340247 - DNA, 122 bp, Homo sapiens
tggactatttccaggatatgggaggcagcagcctctaaatgcttaggggttttaggggcacggtctcctaagacaagcagcaaccagagtaaagaagtcagccctgagaagatagaatctca

SEQ ID NO: 340248 - DNA, 122 bp, Homo sapiens
cttgtgatccacccgcctcgacctcccaaagtgctgggattataggtgagccaccgcgcccggccaggacaaatgttttaaacctgttgtgtatgtccaagtacatgagagctgggcatggt

SEQ ID NO: 340249 - DNA, 122 bp, Homo sapiens
agcaccttgggagtgagaagcagtgaggctgttttactgccctgagtcgaaatgaaacctcgtatcagcccccatttccttataaatggaggaggttccagctagaatcctgcttagagcag

SEQ ID NO: 340250 - DNA, 122 bp, Homo sapiens
gcctggcggagcgcggcttccgacaacgggcggggcggagcggcccagggaggcgtagcccgagactccaacgccgcccgctccgccccggcttcctggagccgcccccactgccagccact

SEQ ID NO: 340251 - DNA, 122 bp, Homo sapiens
cctctcccttctactctctgtacctggtctgcagcagttctgcagcatgaagaatggtaccgggggcagcccctcacccctcctctctctgctctccttgctgaagccggccatctgcatac

SEQ ID NO: 340252 - DNA, 122 bp, Homo sapiens
ggtgctcacctccagttcttggtgtgggggggaccgtgctccacgcgcagcagggcgtagcgggcggcgttcagggataggccacggatgccatcgccccactccttctcggccctgtggga

SEQ ID NO: 340253 - DNA, 122 bp, Homo sapiens
gccccggtcttcctcctcgtcctgccgcagggccagaacccctgacggtattcagctgcgcgtaagtctggccggtgccatctgtctccgcaatgccccccaagaaacaggctcaggccggg

SEQ ID NO: 340254 - DNA, 122 bp, Homo sapiens
ctaccccaggccatttgcccagtctcctgttgttagatgtgtgggttgtttccagcttggcgctattacaaacagggctgcacattctggaacaagtccttcggtgatcataagcacacgct

SEQ ID NO: 340255 - DNA, 122 bp, Homo sapiens
cctctacaataatcaatgaagatgcaagtttctttcaccagggaggggtccctgctgcttcggctaataacggtgctctgttgtttcaaaatttcccccatcatgtcagccctggctttgga

SEQ ID NO: 340256 - DNA, 122 bp, Homo sapiens
cccggcctcctcaggctgtgccggggccggctcccgcctcccgcggcctacctccgcctgcgggacgtctctgtcaccattcgccgcgcctgtctgcgggacactgctgtctgcgggcagct

SEQ ID NO: 340257 - DNA, 122 bp, Homo sapiens
ggagagcaaaacaatagttcagatcaagtaatcttagagccaggaggcagccaggacttccgcctgctgggccattgttgcaggaccacagcttcgaggttgcgcaacacctttagtaaaca

SEQ ID NO: 340258 - DNA, 122 bp, Homo sapiens
ccccgctgggcggcaggctggccgagcccggaggcggaggtaggctcgggaaggcggcggcggcggcggcggcagcggcagtccaagcggagtcgagcgccgggtggtgcggagggaagggg

SEQ ID NO: 340259 - DNA, 122 bp, Homo sapiens
gctgggatcacagcttgcgtttccttatgtgtcttcccacatccttttcaccatcctgcccgccccactactcttgggggctatttcccctgctgggacctgagcatcctcacttgataaga

SEQ ID NO: 340260 - DNA, 122 bp, Homo sapiens
cggcgcgctggcaggctgcggctcctgcagtcggggagcgggcgggggcggaaccctgggcgtgctcggcgtgtccggggccactcagcgcacgctggcatccgccggggggcatggggggc

SEQ ID NO: 340261 - DNA, 122 bp, Homo sapiens
caaaataaatatccctagatatgcataatttatatatgagattaagttatatgtattatgcgtctataaaacatgtatgtttttgctgtcgcagatttaatgtaagtatagattggtattgg

SEQ ID NO: 340262 - DNA, 122 bp, Homo sapiens
caagtctggaggatgtggaggcagagcggccaccacagcccttgctgtggcgagcgtccgcgtccagcactccagctctgggcagccgctgctgggagcatgcagctggggcacgggaaagt

SEQ ID NO: 340263 - DNA, 122 bp, Homo sapiens
tctggaagttctgccactttttacccctttggtcattaaattgtttgttttccttattttcgtttgtttgttttaaagcgtttttcctcccttagatggtttttccaaaaccaccctttggt

SEQ ID NO: 340264 - DNA, 122 bp, Homo sapiens
caaaatagcagcaagattcctctttaaaagtgtaagtcagagattatacatccgactctgcgccctcctcccctgacaatggctttccattacattaagaataaagtctgaatttttaaggc

SEQ ID NO: 340265 - DNA, 122 bp, Homo sapiens
gctcgccctcgccccgctccccattgttctcggcggcggcggcggcagcgctggcgctgccgcccgcgctggtgttacagtccccgctgccaggcattctcgccatattgccgtctctctgc

SEQ ID NO: 340266 - DNA, 122 bp, Homo sapiens
gaactgacctgtccaatgagcattatctgccctggtgatatggcaaactaacacccttctcgttttttttttcagagcatcatttctcataaattagctttctcatctcaactgactcactt

SEQ ID NO: 340267 - DNA, 122 bp, Homo sapiens
gccggttgaggtctggcagtagcgttgggctgaagcagcggagttcgccatggtaaggcccgggtcactcccgccccgcagatgcccaggcagacgaagttggcctcgggtggacagaggga

SEQ ID NO: 340268 - DNA, 122 bp, Homo sapiens
gcggtttccgaggccctctccagccaaggaaaagctacacaaaaagcctggatcactcatcgaaccacccctgaagccagtgaaggctctctcgcctcgccctctagcgttcgtctggagta

SEQ ID NO: 340269 - DNA, 122 bp, Homo sapiens
tagaagcccgctccccaccaccatcgcaggtcactgcaaaacctgctggactcctagttgcgtgccctgtttgcatctgccaaactagcgaagtcaggatcctcagccatgactcagcaaat

SEQ ID NO: 340270 - DNA, 122 bp, Homo sapiens
gaagggctgggagttgcttcctgggatggggagctccgaagccaattcagaagacggccccggggtctggcggggaggcccaccgctgcccagagggctcggccggccgggagggggcgctg

SEQ ID NO: 340271 - DNA, 122 bp, Homo sapiens
tcagagggccgtgacgtcaaagatgtcccagagggggcacttccggcgggggcgtgggggcggggcgggacctgggaggccccgcccccccggtcctgagaggacagctccgctcgcagagg

SEQ ID NO: 340272 - DNA, 122 bp, Homo sapiens
tttatagatgcaatttgtaataataggtttagaaggcttcctgattccctgattgctctccgacctaagccaactgcaacatttaagatttagaggaacaaaatccctgcaaaaggtcacag

SEQ ID NO: 340273 - DNA, 122 bp, Homo sapiens
gaatgaatcaccgagttagagaaacagattaaaggaaaagctaaaatatacaaatgtacccgttgcaaggtcctggcagtaaattttcaaaatagctctgtgcaacggacagaattaacttt

SEQ ID NO: 340274 - DNA, 122 bp, Homo sapiens
cgccggccaccgcggccggggccacaatcgctccctccgcctccttctccgcctcccctgcgagtaccagcgccggccacgcgccacgcctacaccacgcccaccaccactaccaccaatca

SEQ ID NO: 340275 - DNA, 122 bp, Homo sapiens
ttcacgaacaaagaaactgagcaactaatagaggaatgggccacgctcctactgggaggccgggcaggtctcccagccctgaagacttttcctcccaagatttagatgtgaagccccttttg

SEQ ID NO: 340276 - DNA, 122 bp, Homo sapiens
cactcaccctggcggacatgtagattgtttgcatagcgtggctgttgtgggtgaaatgaacgtgggagtgcaggtgtcccttcaacacagtaatgtccgttgatctgtatatatacccagaa

SEQ ID NO: 340277 - DNA, 122 bp, Homo sapiens
tctcaggtaaacacctcttccctatttgtttctatgagttcaattgttttagactccacacgtcagtaagaacattcagtatttgtctttatgtgtttagcttatttcacttagcctaatgt

SEQ ID NO: 340278 - DNA, 122 bp, Homo sapiens
tttttgccttggcctcagcagtgctctcccacttcgtcttccctcctttctagtgcttctcgcctgaaagcttttccacgtgcgtgccgtgttcagtgagaactctgattcatgctcttcag

SEQ ID NO: 340279 - DNA, 122 bp, Homo sapiens
gctgccaagaacaaaggccgcatctcccgatacctggcaaacaaatgcagtattgcctcacgaatcgattgcttctctggtatgggtgggggggcgttggcaggtgtgagaaggggctgggt

SEQ ID NO: 340280 - DNA, 122 bp, Homo sapiens
gaagtaagccacctactcacactcgtacttcctattgactggcggatacttggccttgatcgccttctgttcttcagtcaaattgtaatctctaacatcttcctcttcctgcgccatgactg

SEQ ID NO: 340281 - DNA, 122 bp, Homo sapiens
gaggagctgcggaggggccgggtgctccctgaggggcggggtcaggctcccaagcttctccgaggacccagacccaggcgctggacagcacctcccagaagcgagctcaggcccctgctgcc

SEQ ID NO: 340282 - DNA, 122 bp, Homo sapiens
gcagccccttaaccgtcagtcaaatacatttttgtagttaaaataaatgctgaaggtcatcgtttgagagggcagcctccccttcaaggcaacaatgccttgcagtttataaaaatgtacgg

SEQ ID NO: 340283 - DNA, 122 bp, Homo sapiens
aagatgatatccacacagtagatcacccggccatagcccatgtagggctggttctgtaggcgaagaattgctccaatcatgaatgtggaaatggccacgagatctgtgatgttccagtactc

SEQ ID NO: 340284 - DNA, 122 bp, Homo sapiens
cctgccatagagaggaagcttagcaaagagatttagatcagtattcagaggaagttgaggcgtgagaaaagagagagcacgtggcagtgttggctcccagttgcaggtgtccagggtcacac

SEQ ID NO: 340285 - DNA, 122 bp, Homo sapiens
tccaaggaagaaggtaaactacatgtatgaacagttatttccaaacacttagaatgacatcgtggtgtatatatattcacacatatacacaacctacacattcatactcaaagtcagaaggt

SEQ ID NO: 340286 - DNA, 122 bp, Homo sapiens
tggagtggttttgctctgggggaccgaccccgtgatcgtccttaataaaactctcctaaccgggcagtaggccttcacctaggtgaagctgtaatttatctgcaggtctaagtgaaatctgc

SEQ ID NO: 340287 - DNA, 122 bp, Homo sapiens
aaggctgtccctggacgcagtcgtccccagagccccggaacccaccagtgccctggacggcggccccagcaactttggagctggccgcagtgtaccaggtatgtgtggaggcccttgctgtg

SEQ ID NO: 340288 - DNA, 122 bp, Homo sapiens
cggcggcggcggctgcggcggcggcggctcctcctcagagtccggctcaggctccggctgcggctccagcccgcgatgccccattccgtgaccctgcgcgggccttcgccctggggcttccg

SEQ ID NO: 340289 - DNA, 122 bp, Homo sapiens
aaagtcaagctgcagaaatctaacttggaaattctccatgggttccgcatcatcggttagcgcttggtgctaatcgcctccaggttgggtgtctgcacccctcatgctttggtgtaaaatcc

SEQ ID NO: 340290 - DNA, 122 bp, Homo sapiens
ggagattttacaaactacaatccctggattccacccttagaatgtatgactcactgagttcgggctgggtccctgaaaccctctggtatgaatacttatgttcacttctaatggtgaattag

SEQ ID NO: 340291 - DNA, 122 bp, Homo sapiens
tccaggagtacctggcaacaccacagactgcgcggcccaggccaagccaagcgtggagaccgcgcaaccccgcccttggccctggcccaggtgtcccggccacagtccccagtcttgcaggg

SEQ ID NO: 340292 - DNA, 122 bp, Homo sapiens
tcactgtctatattgcactgattgatcttatctatcctggcaggaagcttgagcagcgcccgcctcttcctggctgtgcctcggcagtgcccccaccccagcctcccaccccatcttggtct

SEQ ID NO: 340293 - DNA, 122 bp, Homo sapiens
atctacagctcatgtcctggcccacccagcatgagtcatgcctcaagaacctcaggcactcgctcactccaaggattttccattctttggagaacctttcactcttcaaatattgtctttct

SEQ ID NO: 340294 - DNA, 122 bp, Homo sapiens
tcagcggtaagtcagccacgtgcaccggctgcagcggggcccatccccgcctgggggtcccgtgcctggggctacacagaaagccttcgtgccactgctttccagccaaagtgagcccctag

SEQ ID NO: 340295 - DNA, 122 bp, Homo sapiens
ggggttttgggaagtagaattcaaacagaaaaaagccatgttttaaacggagccctgcaacggatatgcacttgatgcggacgctgccccacttcgggctccagcggaactcccagaaacac

SEQ ID NO: 340296 - DNA, 122 bp, Homo sapiens
gggcgcaccggccttcaggcgggggatcccggacgcccccaccccagcccgacaggcggacgcaggcgacagaagaccatgtccaaccgcctgggccactccccgaaatctcgcctctgtca

SEQ ID NO: 340297 - DNA, 122 bp, Homo sapiens
ttcaggctttgccgcttcatgctcatgaggaagcgcggctcctttggcctcagtttcctgcgctgccttcccgtctgtggctgactgttgcagggtagtcagacaaaggcccagcttctatt

SEQ ID NO: 340298 - DNA, 122 bp, Homo sapiens
tgggggagcgcggaggtggcgcggaaatagaaggcttcctggaagcggtgacccttgagccggtcttgcccctcagtccctgtatccttttaagccagccacgctgacccctccgcgcctcc

SEQ ID NO: 340299 - DNA, 122 bp, Homo sapiens
aaggatgaggctctttttaacaaccagctcttgggggaactctcatgggaactgatacagcgagaactcactcattactgccaggatagcaccaagccattcaggaggtatctgcttcatga

SEQ ID NO: 340300 - DNA, 122 bp, Homo sapiens
cggcgtcgcagcgtccggagctttgggttccggcctacgaactaacgcgttacactcggacgttccctgcagcgcaggctgaggtcagaacattgaaatcatcccgcaaagatgcagtgagc

SEQ ID NO: 340301 - DNA, 122 bp, Homo sapiens
catcctcataagattatttaggatgcataggatcccagattagattttttttaaatcagccgttctctgtattcttgtccagatgctgtggacagtgatgatgggaaaatagtccctgctgc

SEQ ID NO: 340302 - DNA, 122 bp, Homo sapiens
cctctggctctccagagattgattcattaggcagggttgtgtttaggtgacgcccacaaacgagaacattcatagcagccatcatttctcagtgaatgcggtcctgtaaatgctggcgatct

SEQ ID NO: 340303 - DNA, 122 bp, Homo sapiens
tgaagaggcacttgctccctctaaacccaattctaggtgactagagatttatgaaggtgtcgggatgtttgttcatgatgcatagtggcctcatagggtctccctacttcttctgcaagaag

SEQ ID NO: 340304 - DNA, 122 bp, Homo sapiens
ggcgtgtcccacaccggaagtcagaaagcggagcctttcttacaccggaagtcaatgaagcgggtctttcctacgctaaaaaccactgagtggagtatttagtacacaggaagtcggccaga

SEQ ID NO: 340305 - DNA, 122 bp, Homo sapiens
cgcacgccgcccggagcctgctgggacatgaagtcccgcccctagggtcgcactacccgccgggaagtggagtctgggcccacccctgccccgctgagcctggaaatagtggcgggccgggc

SEQ ID NO: 340306 - DNA, 122 bp, Homo sapiens
caaaatttaatcatgcagaaaaagcaaaatttagaacagcgtatagattattttttaatgcgactgcttgacagcggagaacaaggaagttgaatacttggtgcagccgagtctagaccgct

SEQ ID NO: 340307 - DNA, 122 bp, Homo sapiens
ccctgctttcccctttcctctgctggccagcgtggagtgcggatagaaggacgtatctcccgtgatggctgtgaggatgcagtgaggcagtgtggaaactgtgaggtgcagggcacgtagaa

SEQ ID NO: 340308 - DNA, 122 bp, Homo sapiens
tgtaaaattcaatttctttcctgtatatatatattctttagggcttctaaaagttgcttccgctttctacatgataggtggctgtatttactggtgggtgacatatttatgtcatgtaaaag

SEQ ID NO: 340309 - DNA, 122 bp, Homo sapiens
tggacattcctctgatagttcatcaaactcaacaagtatattgtttcttaatagttgcaacgtagaatctgaaaccattccaaatgaacattttacacattgttacatcaaaatccatttgt

SEQ ID NO: 340310 - DNA, 122 bp, Homo sapiens
cggggggcctcggtgagccagacgacggcggcggcggcggctactgctgcgagacgggggcgcccccaggcggcttcccctactcgcccggctcgccgccctcgtgcctggcctacccgtgc

SEQ ID NO: 340311 - DNA, 122 bp, Homo sapiens
ctgatctggggtgattgggacttcggtgtcgctctttttccaaagttggagggtcgggagcgccgagacaccctggcgaggaggaggaggaggaggagggaggctgcgctgagccgggtgca

SEQ ID NO: 340312 - DNA, 122 bp, Homo sapiens
cagtgtccccttggcaccatgcctgccacatactgtgggctatccccattggcaccaggccgcacacgggaggactcagacaccctgctggactctagccaagctctgaatggctcttccca

SEQ ID NO: 340313 - DNA, 122 bp, Homo sapiens
gaaaagggacgttcttatctggctctgtgagcttgggcaagccctcagccaccccagcctcggtgtccccttccataagaacgaggaatggggcttcgccgtgcgtcccccgaggaccccgt

SEQ ID NO: 340314 - DNA, 122 bp, Homo sapiens
agcctctgggccctaatacaaagcaagcacactctaaagaagccagaagaatgcaagcagcgaagtcgccgctccccacaggcaagagagtaccggcagacagcggcgcgagacaggggcag

SEQ ID NO: 340315 - DNA, 122 bp, Homo sapiens
ccgggcttctcaccgtgtggcggcgggtgtcgtaggagtggttaactcctgacggtgcagcgctagacgcggggcaagcctccaggaagcactgtttatagaaaccctgttacaattattcc

SEQ ID NO: 340316 - DNA, 122 bp, Homo sapiens
gaggccacaggagtatcgttccacatattagcgttgagatgaactgtttctttcatgatgcgttttggaagtattctatttttgtttcttccccagtcacacacatatattcattactcttg

SEQ ID NO: 340317 - DNA, 122 bp, Homo sapiens
tagactggactaacgccgaaagccggggcgtggtgaaccagccgccctacctgcaatgtgcggcctggtaggatactgttccagaagtagcttgggcttttcaaatccatccacttgttgca

SEQ ID NO: 340318 - DNA, 122 bp, Homo sapiens
aggagacacaagaagcggatccaggtagcaaagccgagctctgggcagggggcttcggcgcgctggatagtggaaggggcggggaaagccccctaaaagggcgagcgaaagcaagggcgagg

SEQ ID NO: 340319 - DNA, 122 bp, Homo sapiens
gacccaccacgcgacattccttccgctttccccgtctgggtcgccgccgaagctagcgggcgcctggactggctgcctcccgccggctgcagcaggacggagaaaccatgccggcgaccggg

SEQ ID NO: 340320 - DNA, 122 bp, Homo sapiens
gctgcagcctgcaccgccatgaataagcttttcagcttctggaagaggaagaatgagacccgcagccagggctacaaccttcgagaaaaggatttaaagaaacttcacagagctgcttcagt

SEQ ID NO: 340321 - DNA, 122 bp, Homo sapiens
aaccccaggtccaagctcacccgtgaatcagaacttaccggaggccacggaggctgttaccgcgaggaaactctagtcctggcggaagaccaacttctagcagatccccttaccctggctct

SEQ ID NO: 340322 - DNA, 122 bp, Homo sapiens
gcattttcagacttgtgttttcctggacagctgcctagtggctgtaatccataataagggcgtgtaattgacagtaatgtgaatcactcactgaaattctggcaaaaaaaaaaaatagagga

SEQ ID NO: 340323 - DNA, 122 bp, Homo sapiens
gggagtagaaagggggaacaaactgggagtggagggaatcacatctccagtcccagaccacgttcaggagtggtcggcacctggacggacatcctctgggatctgtcaccagccccaccttc

SEQ ID NO: 340324 - DNA, 122 bp, Homo sapiens
agaaccaggggcggcggctgtgatgaggtcagagatcatcataagatttgtgaaccacatcgtcaaggccccgtggacgacagcaaaaataacaggtcacagggaatgacgtgacctgattc

SEQ ID NO: 340325 - DNA, 122 bp, Homo sapiens
ggcagggggagaatcagcgcttctgcgggacaaaggaacgatgcagcggtgagaaggcctcgcggccccttgcagggcacctctctttcgtcactgttgtcctcacgaaagatgagtttccc

SEQ ID NO: 340326 - DNA, 122 bp, Homo sapiens
ctcggatgctttcgtgcgacccagcaaagagcccaggcgcgagtccgaggcggcgggtcgcgtggaaaccctttgctttgaagtttagctcagccttgtaaagatgaaggggcattcgcggc

SEQ ID NO: 340327 - DNA, 122 bp, Homo sapiens
agtccagcctctgggaaccatgcagcggctcccagtggccctgcacccaccaccagcatccgtttcacctgcagttgaagatcagtgaggtgcccagaagatcatgcagtcatcagtcccac

SEQ ID NO: 340328 - DNA, 122 bp, Homo sapiens
gcgggcggcgggtgggggcgggaggctctgcccgctcggtggctgccgcggcctcctccgcgctgctctccacgcctggcttattatgcacgaggcaggcaatttgccttcctccccgggga

SEQ ID NO: 340329 - DNA, 122 bp, Homo sapiens
ggctcccgcggcggttcgaattctgtgctgccggggttcgctggttctccgagttgtgtccgaggcttccacgcgcaggggcccgggaaagggtcagaggcttcctaacgcagactcgagtg

SEQ ID NO: 340330 - DNA, 122 bp, Homo sapiens
agggagaaaccacccaccggtcacggggaggggcgaactacctgaagagtcgagagtgggcggggaaaatctagccctctgtctagcaaatgggaagaaaccatttgctgtacagagtgaaa

SEQ ID NO: 340331 - DNA, 122 bp, Homo sapiens
acggcaaattatagccgaagacggcgcgataataatctaaacaatcaccacaagaagaaacgttctctaacgctccagttgcggaagcctgcgtttccaagactcgcggccctgcgttccca

SEQ ID NO: 340332 - DNA, 122 bp, Homo sapiens
tccagcttgtagcgctccgcttccgctggcttccgcacccgggcctccagctccttctcccgccgggcgatctcctgctcctgcactgccacctgctgggcccgctccaccacctgcacctg

SEQ ID NO: 340333 - DNA, 122 bp, Homo sapiens
gatgaattatctcacttaaccctcaaactaacactggaaggcagttattatcgttccatacgataggtgaggacatctgcactctgaatagttaatcgcttatctgcatctatacaactaag

SEQ ID NO: 340334 - DNA, 122 bp, Homo sapiens
gtaccacgctgatttgagctacagggcaaatgggtgcaccatggtgggcgaggtcattcacggaaaaaagaatgtgcagtggtgccgaggttggtaagagcaggcggcttgtacatgtaaat

SEQ ID NO: 340335 - DNA, 122 bp, Homo sapiens
ccgaccccgcccgccctgccggctccccgtcgcccgccgcgtgtgcagacgcaatcgcaccggaggaattctctggtctctttgctaacctcgggacccgcagttgcaaaggctgagggacg

SEQ ID NO: 340336 - DNA, 122 bp, Homo sapiens
aaggcttttctacatagatgacatgtatatggcctctctccagtgtgagtcatcttgggccgtctaaggtgaaagcaattagtataggccttttcacatagattacattgatatgatttacc

SEQ ID NO: 340337 - DNA, 122 bp, Homo sapiens
gtgggtgcggagaggagggtgctggggaggcggcgcgtgagctagaacccctttctcccccgcctccacggtggaggttggctttgggagcctccctcccccaactccccagaggggtcggc

SEQ ID NO: 340338 - DNA, 122 bp, Homo sapiens
ttcaccatgacgaaaccctgtctctgttaaacattcaaaaaaattagctgggcgtggtggcgggcgcctgtaatcccagctacttgggaggctgaggcaggagaatcacttgaactcggaag

SEQ ID NO: 340339 - DNA, 122 bp, Homo sapiens
ccgtcggcaccgtggccgccccctctcaccgacgacgaggagcactgcgaccgtctgcaccgtggccgccccctctcaccgacgacgaggagcactgcgaccctctgcaccgtggccgcccc

SEQ ID NO: 340340 - DNA, 122 bp, Homo sapiens
cgccgcgtcgggacaggtggacttctccaggtaatctgtggtctcaggctcgtcactcggcgacctgctggaacctccaaaacagaaatgtagggaaaggttgaagtgccccgatgtccggg

SEQ ID NO: 340341 - DNA, 122 bp, Homo sapiens
ggtcaggcccaggggcaccaggcagagagcacaagatggtagatgggagggtgtgggcagcgattaactggcctgaagcccccagggcaaggaagaaacaagagctgccccttggggtcccc

SEQ ID NO: 340342 - DNA, 122 bp, Homo sapiens
tgtaattccttcagcagccagtgcgatatcaatcaaacagaagtctgatcagcccatcctcgtcccaacctttccaatggctcctgtctcattcagagtcaaagtcaaagccctttggatgg

SEQ ID NO: 340343 - DNA, 122 bp, Homo sapiens
aggtgtgaaagacgggctgcctggattcagcctctggatcttagaccggggtgagagacccgaggcagaatgggcctggggggtggtgtccctctatcccatctcccccggagcggccccct

SEQ ID NO: 340344 - DNA, 122 bp, Homo sapiens
gccacggtatctttgtccacacacgtgaagatgtacttctgggctcttctgttccattgacgtgtctctctaaccttcagcctactgtcttgattactgtagctttgtagtaaactttgtta

SEQ ID NO: 340345 - DNA, 122 bp, Homo sapiens
cccgggtgtggcaggaaggggtgccccgcgttccagagccagtgccagtccctatcctcccgggaagccgagactcagggggaacaggtttcccagagcccagcctgcagggacgcggaggg

SEQ ID NO: 340346 - DNA, 122 bp, Homo sapiens
gaaacccagacagcgttactgacctggttggcggaggtcaccgcgggcgccaggcgtgcgcgggagctggagcttaacacccagccgctgtcccgcaaaagactttcccggatctgctcacc

SEQ ID NO: 340347 - DNA, 122 bp, Homo sapiens
aggcaggaccacaggagcaggtaccgggccacggggacacgacctcagggccttctaggccggggttgtgtctgtgtgtgggccggggacccagcagcccctggccaggccgcccaggccag

SEQ ID NO: 340348 - DNA, 122 bp, Homo sapiens
gagcacctggcaccctccacatggaagccaatcccagaggcaggccctccaggaaacgagcgcagagagcttcggcaacttgcctaaggacacacagcccaacagctccaaatcggcccctt

SEQ ID NO: 340349 - DNA, 122 bp, Homo sapiens
gtaccctgagttttattgcgttcacttttgtgcatttctttatgttttatttcacccaagcgtgcatccctgggctctagttagtcttacccattttaaaaatctgatacactttaaaattc

SEQ ID NO: 340350 - DNA, 122 bp, Homo sapiens
ttccatacacggtgctggtggttcaatggatttaatttgtaagagcaaagccagtcttcacgtgcaaaagctttttctcatgtctgtgcactaaaaacagtatagagaaaaatgatactttt

SEQ ID NO: 340351 - DNA, 122 bp, Homo sapiens
caggggtaatttcacgtacccagtagggacatgctgtgctaagagcgtgtgagaaaatagcgtgtgagaaaaaatttacctgatggtgctgctataggtcttattttcttccatgttttgtt

SEQ ID NO: 340352 - DNA, 122 bp, Homo sapiens
ctcctttaccatcaaatcaattggccatcaatggtactgaacctacgaatacaccgactacggcggactaatcttcaactcctacatacttcccccattattcctagaaccaggcgacctgc

SEQ ID NO: 340353 - DNA, 122 bp, Homo sapiens
agcaggtagaacgtcaaagaggacgttccaacagttggacaagttaacgacaataaaatacgcaaatgttaactttccccctaactgctgagcgctccctaaatcggtatcccagtgtaacg

SEQ ID NO: 340354 - DNA, 122 bp, Homo sapiens
acagccactgacaggagcacaggtaaggctaacaagatcaccatcaccaatgacaagggccggctgagcaaggaggaggtggagaggatggttcatgaagccgagcagtacaaggctgagga

SEQ ID NO: 340355 - DNA, 122 bp, Homo sapiens
cagtccaggaggtgaaggttgtggagatcgcgccactgcactccagtccaagcaacatagcgagaccttgtcaaaaaaaaaaaaaaatgaatgaatgaaagaattatgcagtgatactgccc

SEQ ID NO: 340356 - DNA, 122 bp, Homo sapiens
atacgtactcggtacccagcacatcctggacgagttaacttccttaatttccatatttgccggagaaccagctggttcagagcgcacagcaaacgggagaagttaaaccaggttccgcgacc

SEQ ID NO: 340357 - DNA, 122 bp, Homo sapiens
actcctctgccttccccggcaaagcccccgctgcaggaagaccttggggcagggggcacacgaagaggctgctgaaaaagctcctggtgaagctgagcagccacaggctgttgggagggcca

SEQ ID NO: 340358 - DNA, 122 bp, Homo sapiens
agtgattcatcagtcaggtagctcacactggaagtgggtcagggctttccctaaggagcacgagggagaggcttttataggtcgaacatggaagcagagcagagaaagcatttgctgggtta

SEQ ID NO: 340359 - DNA, 122 bp, Homo sapiens
gcgcgcggggtgaagttgcggggctggcgggcgcgagggtggcggagcgcggagctagagcggcggagcgggcggaggggcgggagccgtgaggagggggaggcgcggcgcgggggccggcg

SEQ ID NO: 340360 - DNA, 122 bp, Homo sapiens
tgaagatcatctaaggaggcttcagtgaagggaccatttaccacggatgagacagcagggcgtgcgggcggcacgaggggccgctgtagcatctggagctgctaacagtggagctgtcactc

SEQ ID NO: 340361 - DNA, 122 bp, Homo sapiens
ttattgctttaaccattttgatgaagtagctttccggccgcaccttccccttttttcccccgctcccaaagaaccgctgatagcatgaaagtcttttaaactgtatggacgagatctatttc

SEQ ID NO: 340362 - DNA, 122 bp, Homo sapiens
cctgaagaagcgcatgcgcaagggactgctccggcgaccctcccggacgccagttccctacgctgccaacgttcggcctccagaacggcggttatgccctgccccgcccccggctcccttct

SEQ ID NO: 340363 - DNA, 122 bp, Homo sapiens
tctctctgccttggctgcgcagtatcaaagccctccctatttacggggaaacctttacctcgcgaatcttggaatcccaccgcccaccacagcaggtgaaaacgtcagatgctggctttccg

SEQ ID NO: 340364 - DNA, 122 bp, Homo sapiens
tccccgggcgccgccctcgcgttcggctctgaccgccgtccacccctgcccccgcgtcgccgcctgcccgcgctcgcccgccagccctccgcggcctctctgccaccgcccctccgtccccg

SEQ ID NO: 340365 - DNA, 122 bp, Homo sapiens
atttttttccggctactttcaaaagcttttcatctgtagttttcagcagtttgactttgacgtgctcaggtatggctttctttgtatatttggatggggcaggggagcagggaaaaagaggg

SEQ ID NO: 340366 - DNA, 122 bp, Homo sapiens
gcggaccggcgagaagcgaggtccaagtccttggctcctaagtatgctgtgtgcggggcgcggctgactcagctctcccgggctgaggacaccccagccaccgtctccgggtctccccagcc

SEQ ID NO: 340367 - DNA, 122 bp, Homo sapiens
cactacatctgctccccagagtttattcttgaaagatcatcgtgaattagcaaggggaagcgcattccaagccaaggaagtttgtggaaggtagagatgtaggcaagcctgactggtcccac

SEQ ID NO: 340368 - DNA, 122 bp, Homo sapiens
attggccagttcgccctccggtatgcagatacggtgggagtcacgtgctaggggccgggacgacttcctgttggaggccaacgcggggcggggaagggggcgcgagcgccccgtctggctga

SEQ ID NO: 340369 - DNA, 122 bp, Homo sapiens
cctagcaagtaatgtaaatgacacgtgggatgggacttgacaccagccacttggcagcagcggagggggcagagttttggaaagccagcctctgcagcctcctctgccgggaggtagaggtt

SEQ ID NO: 340370 - DNA, 122 bp, Homo sapiens
tttggctttcatggaagctaccattggctttcattgatgtcaacccattaagggaatcttcgagtccaagaacggaagctaccattggccttaatcttcacctcccgcttttcttccctgct

SEQ ID NO: 340371 - DNA, 122 bp, Homo sapiens
aggactcacggccccgccccgagtgatgtcagctgcctttccatccctttcccggcgatgcgaagcttgaataagctagcaacccggcagagtggcccttcattgctgtaaatgtgctcatc

SEQ ID NO: 340372 - DNA, 122 bp, Homo sapiens
gtggaagacagcagagggctgggtgagagagaaaaacaggtagctggtactctctgcctacgtggagtgggtccttgtgtgttcctggcagtattgggaatgtaactgaagtttagtgagtc

SEQ ID NO: 340373 - DNA, 122 bp, Homo sapiens
tttcttttgctaatctgttttatgtctaaaacttatatcctacccctttcttggcctcctcgctctggggttctcattgcccaagatttcacaacttagttaataaaagtacacttgttggc

SEQ ID NO: 340374 - DNA, 122 bp, Homo sapiens
tgtcctcgtgatctgcccgccttggcctcccgaagtgctgggattacaggcgtgagccagcgcacccggccaagaacattatttttaaagaagtgttaactttgaggacatatctgttccct

SEQ ID NO: 340375 - DNA, 122 bp, Homo sapiens
cctcccggaatcgcctttttgttttggagctgccttctcgctggcggagcggagggtctgcgagcgccggggaaggcaggctgggggcgcagcccgccccccactggccgggccccgcaggg

SEQ ID NO: 340376 - DNA, 122 bp, Homo sapiens
cacaaggtgcctggtgtgactgactgtgttgctgaaatccaaaaaaataaaccatatattcgacatgaacctattggatatgatagaagtcggaggaaatactggttcttgaaccgaagact

SEQ ID NO: 340377 - DNA, 122 bp, Homo sapiens
tctcctgctgtgaagatcccagggatggctccaagccaagaggactcccaagtccgggcgcggtggctcacgcctgtaatcccagcacttcgggaggccgaggtgggcggatcacctgaggt

SEQ ID NO: 340378 - DNA, 122 bp, Homo sapiens
gagtgtgtctgcgtggacagggaaaagccgggcttgtgctggctttccttgttttgtgagcgcatggctgcctttgctggggctttccataaagagaggacccatgagggttgggagagaca

SEQ ID NO: 340379 - DNA, 122 bp, Homo sapiens
ctctgccgccactgccgcctcctcggccccggaccgccgagggttaacaaaaaagccccacgccccctttgacggcttagagcccacctcgccgaatttgaaaaggcggccccggagaggcg

SEQ ID NO: 340380 - DNA, 122 bp, Homo sapiens
gtctcttgcacagccgcagccaagtccggtgggttcgggaacctgtggcccggctctctgcgcgtccccatcccccgtggccccgaccccggccatgaagcgtatcttctcctgctccagca

SEQ ID NO: 340381 - DNA, 122 bp, Homo sapiens
gtatatgcgggggttggggtcaggccccccgggcgcaccgttgctggtatatgcgggggtcgtttgtggtgtcatcactgctatcttccaggccgggaggaaggaccgagggtgggcccggc

SEQ ID NO: 340382 - DNA, 122 bp, Homo sapiens
ctggtgcctgcctcccccttcatttgggtctcttcttcagggccagctccacagagaatccgtccctcatacctcatcactccctccccattctctggccctgatttagttttcttcctaac

SEQ ID NO: 340383 - DNA, 122 bp, Homo sapiens
agtgcgcgtcttccctagccgctactgtcctctttctgcgccgccgggctgggctcagtccgcagtgacccagtctcgtgtaggtgggaccagcatcttcaccggccgaggagacgcccctg

SEQ ID NO: 340384 - DNA, 122 bp, Homo sapiens
gctgcagtgcccccatcttcaacctttggagagactttggatctgatgctttgatgtgtgcgtatccgacatccccagacagcatgacactgaaccaccctgactatgttccactgattcct

SEQ ID NO: 340385 - DNA, 122 bp, Homo sapiens
cgccgggcgccgacttcccctggggcggcggccctggacgtgcggggggtctctctgggccggctgctgcgccttggccctgccctctagctcccgcgctcgctcccgccctcctggctctc

SEQ ID NO: 340386 - DNA, 122 bp, Homo sapiens
atttactacaaacaagctgactgttcttgctcctctttaaaagagttgaaaaatccaaaccgtgtactgtatattcaaaataaactgaaaggaaatatgcatttctttaaaagttgacccaa

SEQ ID NO: 340387 - DNA, 122 bp, Homo sapiens
gaggagacggtggcgggcagtgcttcttcaactcctttaacatctcccaggacaggagcacgctttcggaaacgctgctacagaacaatgttaggcaggagcagcatgggcctgaggcccct

SEQ ID NO: 340388 - DNA, 122 bp, Homo sapiens
atccggcctcctctgtcctcctccagggccagctctgggggccggcgcgtggggcaggtgcgcggggcccgggagccccgcgcctttcggggggcggggagggggtgggacgaggggctagg

SEQ ID NO: 340389 - DNA, 122 bp, Homo sapiens
tcctgggagcagaagctacgtgaggaatgtgtgggtcgctggcgatgccagcccccttcccgctgagtgtcccagactcagtgctggcctcaagcggggagggctggatggcaggggacgca

SEQ ID NO: 340390 - DNA, 122 bp, Homo sapiens
ccccaaaaggaccagaattccagggagaaagcctcaccccaataggcaattgctgtgtagcggtcaatttcgtgagtcacaatgcaggagaaaatgtcagaaggttctggtgtgaagtttaa

SEQ ID NO: 340391 - DNA, 122 bp, Homo sapiens
tccgggcgcaggaggggcggtgtccggggcgcgtggtttgggtcgtcgggacctggatcccggagcaggcaggctgaggtctgcatggtcagggcggcctcaggtgctggggagccaccctg

SEQ ID NO: 340392 - DNA, 122 bp, Homo sapiens
tggctgcagagagggtgcagggaaggtcaccggcaaatttctaccagcggccccacatcacgcctccccgatggatgcagagagaggtttcaggagctgctagtaaccttgcagggggttcc

SEQ ID NO: 340393 - DNA, 122 bp, Homo sapiens
gccaaggacctgggtgtccacctagatgtggccttcaggaggccaagcagtccttcccctcgcctttgtgtaggacactggcacctcggctgacttcggggacaagaaaaggcaggctcccg

SEQ ID NO: 340394 - DNA, 122 bp, Homo sapiens
tctttctctgcctatcctgttctttctcctgagcgcaccccggcagtgccagcagtgcggcgtcttcagcatgccaggagcatgtctggctccttggtgctccttccggagtcctgtggaag

SEQ ID NO: 340395 - DNA, 122 bp, Homo sapiens
aggactcagcgatggagcccgcgggtggggctcagtccctgagtccctgctccagacggacgccctgtctatgcatgggctaacctcgcctgacctcatcgtccaacaatgtcgggtcaggg

SEQ ID NO: 340396 - DNA, 122 bp, Homo sapiens
acactgtttgctgtgggctggtgaatgttcactttcaagagcagggagtagatggcccttcgtggaagtttaattatacagaagagtttgaaaaggccaagtttgttactttggggcatggg

SEQ ID NO: 340397 - DNA, 122 bp, Homo sapiens
gcacagggcagggccctgggggcacatggacaggaactggctgtgggtggagacagcacccggctgaggtcctggggaagaggccatgcccggagctcctggacacaggaggtggcgctggc

SEQ ID NO: 340398 - DNA, 122 bp, Homo sapiens
tgcacgcatgcgcagcgagctaccaatcccacccaagaaccgaaatccaggctgccgctgcgcaaaggcagctagaaacggagcatgcgctctgtgaccgagtgagaatttacccaaccccg

SEQ ID NO: 340399 - DNA, 122 bp, Homo sapiens
ccgggttcctgctctttccagatatggaggcctgacctgtgggctgcttcacatccaccccggctccccctgccagcaacgctcactctacccccaacaccaccccttgcccaaccaatgca

SEQ ID NO: 340400 - DNA, 122 bp, Homo sapiens
gggagaggccccgttaccatgacaacacccttgtcgtcccacaccccaatggctccttatcgtcccactggtacttccaatggtaggctcgctaaaagcactaaaagagtggggagggtgca

SEQ ID NO: 340401 - DNA, 122 bp, Homo sapiens
gccctttagggaatacacagcccgatcatagccttcaaaaatgattcccccccgccttcgcgttagctcaagagccagatgtactagtgtgtttatgtagctttttttttttttcacttttc

SEQ ID NO: 340402 - DNA, 122 bp, Homo sapiens
taaactataccacctctggggaactcccagcccaagggggaagactgctgaatgacagagcgcttttcatgatacttggctagggctgtgctaacttaaacaatgagcacagttctcagtcc

SEQ ID NO: 340403 - DNA, 122 bp, Homo sapiens
caaacatctgaaattggaggatgctaatgggcaagaatcaagagaaaggtaattcagagacgacaacgaagtgggaaagaaattacagggtcaaagcgaaagaaaaccaagctgcttgggta

SEQ ID NO: 340404 - DNA, 122 bp, Homo sapiens
attcagtccccaaaacaggcccgagtttcgtctgagttttcaccttaaaccccacacggtcgtcctggcaggtcatggtaagatagaaagccttgcaaataagtcaggttatctgatctgaa

SEQ ID NO: 340405 - DNA, 122 bp, Homo sapiens
aacgcgccgcggggagctgggagcagggcgggggtggaagcactcacctgcgccaggttccggcggtgacacggacggctcccggagaatagtcgcacagcaacccggcggcagatccacgc

SEQ ID NO: 340406 - DNA, 122 bp, Homo sapiens
ggagtagattggccaaccctagggtgtggctccacagggtgaggtctaagtgatgacagccgtacctgtccttggctcttctggcactggcttaggagttggacttcaaaccctcagccctc

SEQ ID NO: 340407 - DNA, 122 bp, Homo sapiens
tctgcgtcagtgaatacctgggaaaggagctggagctctattttgcttgctttctgcattcgtttcttttagagctaatggggacacaatattttgaagtttttccatttcgggtctacagc

SEQ ID NO: 340408 - DNA, 122 bp, Homo sapiens
ctccgcccagagcctcctgagactggagtgtcccgtctccacccagagcctcccaagactcgggtgtccagtctccacgcggagcctcctgagagtcgcgtatctcatctctgcccggagcc

SEQ ID NO: 340409 - DNA, 122 bp, Homo sapiens
gctgcgtagctgccgcgcgtctcacctttcccctgccccgacttgtccctccccatcccccgtgtttgcaaggaccgtcttggggtgacacctgtgacgcgagccccacctccggtgcctgt

SEQ ID NO: 340410 - DNA, 122 bp, Homo sapiens
ctgtcagcaagaagaagttagagtagttgccagtctttctcatctccatggctcacacctcggaactgagtcaatctgaagcccaagttgggtgcttaaataacctttacagaaattttaac

SEQ ID NO: 340411 - DNA, 122 bp, Homo sapiens
cagcgggacgggagggctgcagtgtggtgtgagcggcgcagcgggatgggcgggttgccccgtggtgtgcgtggcgcagcgggacgggcgggttgccccgtggtgtgcgcggcgcagcggga

SEQ ID NO: 340412 - DNA, 122 bp, Homo sapiens
tttaagctactccccagcaaaaccccttagcaactggctgaaacatcagcgttcttctcacggtccagatctcccagctacgcgaccactgaaaaccccctcctccagcctcgcccatccgg

SEQ ID NO: 340413 - DNA, 122 bp, Homo sapiens
agggggcccaggataccggagtccccggagcgtctttcatctgaagtcttagcagcagcgcggacctaacaaaaaagggagttgctgaattagttcaagaaaaggcaactggaaatgcttca

SEQ ID NO: 340414 - DNA, 122 bp, Homo sapiens
catcagggaacgaacggggaaaccgaggcaggcggggccgggatccagcccctggggggacgaacggggagactgaggcgggaggcggggccggccacgatccctacacccagaaatctagc

SEQ ID NO: 340415 - DNA, 122 bp, Homo sapiens
agacccccatctctatcttttaatttatttttgaaaaataatgagaataaagtcccaggccgactgagaaataaaatgagatataatgattgtaaccatccatgacatcatgtgtgtatatt

SEQ ID NO: 340416 - DNA, 122 bp, Homo sapiens
ccctgcagagttacccagcgtgatggcttcatttttgcagatgaagagaccaaggcccagcgagggatcctatagaaagagtaaaagtaaagccaatgagcatgtgtcagaggaggagtccc

SEQ ID NO: 340417 - DNA, 122 bp, Homo sapiens
ccgccactcggtgggtctggggagaaagccgcgcgcccgcctggaacgctccacgggacgcgagtccgcgctgccctggccccgccgctcctggagtcctgccgcccctccctccagccgcc

SEQ ID NO: 340418 - DNA, 122 bp, Homo sapiens
acctccacgtcttgctttcgccaggagctctccccctgtttcaagtctgttcctgtctttcgaccagtccggatctggacggctctctcctttttgctaatgaataaccaaccagcagaggc

SEQ ID NO: 340419 - DNA, 122 bp, Homo sapiens
tttcatgttactttacagttgttggtgataactcgaaatattattaagctcatcactactcgaaattgtggtaatgactgcacctgttgctatcagatattttgtgtgtgtgtgtgtgtgtg

SEQ ID NO: 340420 - DNA, 122 bp, Homo sapiens
aaggagggaaggagagcagaggcggaggaggaaggcgcgatttagttgtgacttgaacaccgtctacaccagccaaagaaggctggtccacactggctttcagctgaggggaggggcagtgc

SEQ ID NO: 340421 - DNA, 122 bp, Homo sapiens
gtccccttcccctgggccaccacactgccactcagcatccacaattagtttctaaccaaccggcagaggcacaggttggaggagaagtggtgctgtcttttgggcagagtccagaatgggca

SEQ ID NO: 340422 - DNA, 122 bp, Homo sapiens
tcccctttcctaccctatagggagccgctgcatcctccaggaagcgcatggtgtgggtagcgtgctccccagcctcccggcacaccacgcacaactgcatctcatcatcctcacagaagaag

SEQ ID NO: 340423 - DNA, 122 bp, Homo sapiens
aagcaacagagatacatttacagcactgagtctataaacatgaaaacaacaacacagatccgtaacatcccaaacgttgtgagcgctttctttaagatgttctttgccttttcagaaacata

SEQ ID NO: 340424 - DNA, 122 bp, Homo sapiens
gcccagcccgcgtcacccggcagcaaccaagcagggtgagtgtgcgggctgcgcgggcggcgcggagcggagggagccgcgcggcgccacactcactcgcactcgcactcacaccggcgtgc

SEQ ID NO: 340425 - DNA, 122 bp, Homo sapiens
aaataagtagttttggaaaccacgaagtgctgtgccagtgatagttaccagctcctagtacgctgtctgccagccctggctggggctgaatgaatgaatgtgaataaccttccttctaaaat

SEQ ID NO: 340426 - DNA, 122 bp, Homo sapiens
gcagcgctctctagggtggcaccaagttgctggttgccctctctccacgcagcctctgcgcgcaccgagcgggcactgcggtcgggcgacaccccttccacgcccccctcccccgcccccgc

SEQ ID NO: 340427 - DNA, 122 bp, Homo sapiens
tcgcctccaaagcccgaaaaatagagtcgctgggagcgaggctgagagacgcacaggtcccgccccggccccgccctctgccggttctaaagggcaaggtctctccgcctggggccccgcct

SEQ ID NO: 340428 - DNA, 122 bp, Homo sapiens
agagtcaaaggcacatggagcattaacagttggaataaacgacagagacacggaaacctccgaggtttccagagcggacccggaaatgacgccaggggatgcaaacccttctgccccttttt

SEQ ID NO: 340429 - DNA, 122 bp, Homo sapiens
atgcccctgagagcgtgctggagcgcagctggggcacagagaaggtggacgtgcccaaggcgcccggactcggcctggtcctggagagggtgcacttcgagaagtacaaccagcgctttggc

SEQ ID NO: 340430 - DNA, 122 bp, Homo sapiens
gttccctctcctgtgccccttccccaaacccagtgggtctctaaattccagcggcgccgacggggttaatgttggctcatgtcaccgcctctgcacgcccccgctccaaacctgccagctgc

SEQ ID NO: 340431 - DNA, 122 bp, Homo sapiens
gacccgccggccatagggcgctgttgtccagcagcatcccccagggggcgctggtgagcccggtgagccggaggtgccctgggcagctctgtggcgtgggggtccgcggtgttgggggtgga

SEQ ID NO: 340432 - DNA, 122 bp, Homo sapiens
ttgaggagagcaccacagtggtcaccacgcagtctgccaaggctggagctgctgagatgacgctcacagagctgagatgtacagtccagtccttggagatcaacctgaactccatgagaaat

SEQ ID NO: 340433 - DNA, 122 bp, Homo sapiens
gcgcaacagccccaagaactgttagctccccagctgggctgttttctaagccgatctctccgtcgtttctactcatcccttaacttctcccttaccagtgaccccagagacagagccaggac

SEQ ID NO: 340434 - DNA, 122 bp, Homo sapiens
agctccgatcggttggcgcccggcggccccgaacattaacgacacccgggagcctggcctcgaagctcaggcccgtgaacagactccaactacaacagcaccggcgacttccaaagagcagt

SEQ ID NO: 340435 - DNA, 122 bp, Homo sapiens
tccatccatcctgatgttcccgcagcacccaacataggatctcacactgttttaagtcatcgtttcatacctgctaaaatatcaccttcttagaggcttttccttgctgcctccaccctcac

SEQ ID NO: 340436 - DNA, 122 bp, Homo sapiens
caatttgtaagttcatctaatcacttacttttcaatgacccttttgaaaacagcatacatcgtatctattcaacaatgatctcctctttagggagaaccataaactactgctcaaggaaata

SEQ ID NO: 340437 - DNA, 122 bp, Homo sapiens
tgttttgttcaaggaattcacaagagtttgatgtgaatccccaaatgattttgttctggacgcacagcacccgtcctaggaaaccaacaccctaccctggcgggccgggcccgcagcaagaa

SEQ ID NO: 340438 - DNA, 122 bp, Homo sapiens
cctcctcaccctttgaattgtcagtgtatcctcattcttcttggatgtgggacaagagctcggaaaccaccgaacgcaggtacaagccataacacaggtgggccaagtggggagggtgcctc

SEQ ID NO: 340439 - DNA, 122 bp, Homo sapiens
ttcccctttttgcagccatgccagtgacggtaacccgcaccaccatcacaaccaccacgacgtcatcttcgggcctggggtcccccatgatcgtggggtcccctcgggccctgacacagccc

SEQ ID NO: 340440 - DNA, 122 bp, Homo sapiens
ttcatctacatctgtaaaacagccaccaggcccagggacaatgagatttcttctggaattcgtagtttacccaataatttaagccacttactcaaatctatgggaacctgcttctgatctgg

SEQ ID NO: 340441 - DNA, 122 bp, Homo sapiens
ttcctctattgtgacccttcaaaaatcctacctgttttcaaagacatcatcctcattgttcgtaacccccaccaccaacaacaaaaaagccagattgaggcacccgctgacaaagcaactct

SEQ ID NO: 340442 - DNA, 122 bp, Homo sapiens
ccagcaagaggctgtgctcgcgtctttctcgtatctgatcttcgcctccatccacctgctcgctggtccttggctgtgcctctgataccccagtgtgagaacgtggagtttcttaaggcaat

SEQ ID NO: 340443 - DNA, 122 bp, Homo sapiens
ggcggcgctgcgcccctctgcccggccccactccgggcctcaggcccccggacgccgagccgccgccgccgtttcagacgcagaccccaccgcagagtctgcagcagcccgccccgcccggc

SEQ ID NO: 340444 - DNA, 122 bp, Homo sapiens
tgttcccacccccgccgggccaaccccgtgcgcaggcgcactccgccaggcccgggtgtccgcactccccagccccgcccctcgggcccagcctccgcgatggcagctagggctcagaggct

SEQ ID NO: 340445 - DNA, 122 bp, Homo sapiens
acctccgtgttgctaaacccagggaacgcttttctgtttttctcactttacttgacagctcggaagcatggggcagagttgacgcctttgttcttgaaacacgtttcttccttggtcatgat

SEQ ID NO: 340446 - DNA, 122 bp, Homo sapiens
ccgcaaaggtctgcagcttcactcctgaagccagcgagaccacgagcccaccgggaggaacgaacaaatccagacgcgcttccttaagagctgtaacactcaccgcgaaggtctgcagcttc

SEQ ID NO: 340447 - DNA, 122 bp, Homo sapiens
gggaagcgaaaggggagctgagcgtctgtcctcagtccttgggccacacgggggcgctgccgctctgcgctcggattctgatgagccgctctggagaggatggggcggtggtctgagtaaga

SEQ ID NO: 340448 - DNA, 122 bp, Homo sapiens
ttggctgctctcccaaccggattattcacaaagcagagtgcaagataaggaatttatgaacgactgcatccctgtgccgcctttcccagcaggggaaagcagggcctgggttgtcattctgg

SEQ ID NO: 340449 - DNA, 122 bp, Homo sapiens
aaacaaaataacccaaaagctagctttctgattgagtttccataaatgcaatgtgaaggacgtgcatgaagaatgcggaagcaggaaatgacttggagagcaatggagatattacgctgtgt

SEQ ID NO: 340450 - DNA, 122 bp, Homo sapiens
acaagagggagcctgagaggaggacgagggacggctcaaggctgcagcatgagtgtggctcgcctaagctgtcccggtatttaaactatcccgggcgtgagtcactgcagagggcagtgttg

SEQ ID NO: 340451 - DNA, 122 bp, Homo sapiens
ggcacagctgtaggccctacaaagagggaccatttactgcctcctgctgtcattgatattcgacaaacatttattgagcacctacaatgtcctagttactgtgctaggccattttggggtat

SEQ ID NO: 340452 - DNA, 122 bp, Homo sapiens
catgggaggggccggtgtgaggcaaggggtcacgctgacctctctctgcatgggaggcgccggcgtgagccaaggggtcagcgtgggaggggccagtgtgaggcaaggggctcacaccgacc

SEQ ID NO: 340453 - DNA, 122 bp, Homo sapiens
agcctgggctcccatgggaggtgcagtgagggaaagcacactcgcccaggctcccccagtcgtggtgacagaaatccaagcatggggccatttaaaagagtagtcgtgacagcttaggaagg

SEQ ID NO: 340454 - DNA, 122 bp, Homo sapiens
atgcgcgggggcatcctctacacggagccccgtgactccatgcagtacgtgctctacgtgcgcctgggtaagggccacccaccctggggtgctgccccagacaactcccacctctccattca

SEQ ID NO: 340455 - DNA, 122 bp, Homo sapiens
gatgggcttggcacttccttgggtcaaatgctgctctgaccctgcatttgcttcagtttccgggggaagagaatcttccagagtgacagagaagcgccaaaggatgttggagctggaaggaa

SEQ ID NO: 340456 - DNA, 122 bp, Homo sapiens
atccagccccggaggaagggccccagtttctttctccccactcgcgaagttcgcatctttcggaataaaaccactgaaacacaatcagggctacgtgcattacctgtggccactttccgttg

SEQ ID NO: 340457 - DNA, 122 bp, Homo sapiens
gagcgtctgcgtctaaactgcccacagacctcccccgcagtatatccctttggagtgccccggggaaagccagggctgcaggcagttccagcaccaactcagaccgcatctgcccactgcct

SEQ ID NO: 340458 - DNA, 122 bp, Homo sapiens
gccatattcagattaaactcaacatttcagggcacaaagaacagaggaactcaaggaagccgactcaccaggttctccaaggcagatcagtgctcaggtaccaggggtttaagagtcgtgca

SEQ ID NO: 340459 - DNA, 122 bp, Homo sapiens
ctgtgccaaaggtgcagcgcgcttttatggatgctgggtgaggagtgggcagggtaggggcggggtcggttgagtttcacacttctgagtgtgacacgccctagtgggcatgcgcgttagtc

SEQ ID NO: 340460 - DNA, 122 bp, Homo sapiens
gacgctgactgggaaacacaagaagtacaaccaacaggaaccagcgccaagggcaggcagcggcctccttgctcccctcccttactcctccctctgctgcctcctccccccaccaagtttca

SEQ ID NO: 340461 - DNA, 122 bp, Homo sapiens
gtctcttagctacagagccgagcaccgagcgcccagcgcaggtgggtggagaagacgccgcgggctttttcaaccacacactcctctgggaagcgcgcctgattgacagttcccacgaaccc

SEQ ID NO: 340462 - DNA, 122 bp, Homo sapiens
tgcttctctggctgccattgtgggctgtgttctgggctccatttggggtctgtgctggaccggctgaggccccaagggcatctgacggcaccacccctttgcctgtagcacacaccagggcg

SEQ ID NO: 340463 - DNA, 122 bp, Homo sapiens
tatgaagagtggactctttctgtgatttaaaatgtgaaacctccccataacttttcaacacgttaaattttcatgaacaagacaactgttaaatattatttaaagatatgggagtaactaac

SEQ ID NO: 340464 - DNA, 122 bp, Homo sapiens
ttctgctgctgagtggtgtgccattaccattgtccacctgcagcaagatcgggtcccgaccgggtggacaaccaaattaacagacggaggtggggactccgcttccggctcgccccgcccca

SEQ ID NO: 340465 - DNA, 122 bp, Homo sapiens
aaaattacgtacgtttttcgtcgctttcccacgatcacacagatctcaggtccaggaggacgcatcgtctttttagtaacagtgcatgctgtgaggcttgtagagtcgcctctctcttcagg

SEQ ID NO: 340466 - DNA, 122 bp, Homo sapiens
tccgctaacaaacagcggcttgaaagaagcagcttcataatgtgccttcatcttgtgtctcgatattagccactttcttatttcttattaaaaataaaacttgtcacagagcaacaaaaaaa

SEQ ID NO: 340467 - DNA, 122 bp, Homo sapiens
ctgtccacaccggggggctgaggggccctcctgccaggggctacaggccgcgagctattccgaggaggagccgaaggaggcgccgccgcccgcagccgagcgcgccgggtcggcagaggtga

SEQ ID NO: 340468 - DNA, 122 bp, Homo sapiens
ttcgcgccggcggaaatacagacgagagcgcgagctgcggcctagagcggtaggaaccgacgcgagcagtcctgcagcgtcccctggcggagcggaggctcaacgccagactctggaggact

SEQ ID NO: 340469 - DNA, 122 bp, Homo sapiens
ccgggtggtcgggaacccagagcggacactggcagcctcaactccacagggcagatgccccgcacaggggaagggacccgtcagcctccccacgggaatggaatttgcagctgtgactcata

SEQ ID NO: 340470 - DNA, 122 bp, Homo sapiens
accacccccaaacatgcacacaggtactccatcattttcaagccagcacccagcaacacacgagcccccaaactcccctcccccgggcgaactcatgtgcacactcattcccaagaccccga

SEQ ID NO: 340471 - DNA, 122 bp, Homo sapiens
cagaagggagaggagaggtggtcctcgagtgggagtcagttcaggatgcgggctgtgccacgcgcggaggtccggggaccccaccgccgcctcctcgaggcccgccccgccccttacgaccc

SEQ ID NO: 340472 - DNA, 122 bp, Homo sapiens
agagcatttatgcagcttttggcacaaagtaagcctcaaaaatctggttacagctgggcacggtggcactttgggaggctgaggtgggtggatcacaaggtcaagagatagagaccatcctg

SEQ ID NO: 340473 - DNA, 122 bp, Homo sapiens
gggaggtgtgggcgtgtctcgctgaacttctgggccggctggcgggagaggcagagctggcgctgacatcagcctcccggcgggaggggctcacaacccacactgagcacccagagccagac

SEQ ID NO: 340474 - DNA, 122 bp, Homo sapiens
tgcctgtaattccagcactttgggaggccgaggttggcagatcacctgagatcaggagttcgagaccagcctgtccaaaatgaagaaaccccgcctgtactaaaaattcaaaaattagccaa

SEQ ID NO: 340475 - DNA, 122 bp, Homo sapiens
aaggcctgggtgacggataaatttagcgcacgagtcgagtagctagcgcgggccggcaggcgtgggaccgcgagccgcgcgggggcctcgggggcagccctccatcccctcgggtacggtgg

SEQ ID NO: 340476 - DNA, 122 bp, Homo sapiens
cagttgagaatgtgaagaaaaaaacacctctagctaatctctaccttctgttgttgctgccggaagaagtcaaagtgttttgcattcaagcagatgagggttcattgtgcatgaaaaataca

SEQ ID NO: 340477 - DNA, 122 bp, Homo sapiens
acaagaggatgtgtgggaacacgctctgaacactgtaaagcaccgtgcacagagaacaagcgtcatcaggccatcaccacaaagctgtccgcctgcataaagcccagatgtttaccttcttt

SEQ ID NO: 340478 - DNA, 122 bp, Homo sapiens
tggaagagattctccaggtgttttgctatcattggggattgttttgtcaccacctgggggcgatcagcaagttttcctaagaacttgacactgcaatttctgcttaaccacttaaaatgtat

SEQ ID NO: 340479 - DNA, 122 bp, Homo sapiens
aattaaagccaaacattctttccaaggcacagcactggcattttcagattgacagcagaacgagtttgtttccgtgaaacaaaatcatgagtccagagtctgtttttgaaacagctttccac

SEQ ID NO: 340480 - DNA, 122 bp, Homo sapiens
acagagcccccagctgggcccaagtccctgcagtgactgagacttccccagctgtgttcccgggccaggcttgtgctcgccattcctgccaccatgacagtgctgctttgtttcctgggagg

SEQ ID NO: 340481 - DNA, 122 bp, Homo sapiens
tgcttcgcccgggaggggggtctgccgataatctaaccccttctaggggcgcgtccgcagcggcgcggcccgcagcctgggcagggcccttccgcactcctttccgccgctccgggggtttg

SEQ ID NO: 340482 - DNA, 122 bp, Homo sapiens
ccccaaggggccttgctgcagaacccaagtcacccgccagaactccagcagctccgtggtcggctggagagtgggcagagtcaggcatctgccggctctccacttctgctttctccaggaaa

SEQ ID NO: 340483 - DNA, 122 bp, Homo sapiens
ctgtgcaacgggtccacacatcatcagccaggtgcccggcctgcctttgctcttcaacctcgctgccacagccactgagcttatacgagattttggattttgtgctttttgtcatttttatg

SEQ ID NO: 340484 - DNA, 122 bp, Homo sapiens
gctgagtatagagaaaggatggcaattagcaacttgattctcttgaacaggggacacttccgcatgtgtttttgtggtgggagagaggatcaggggtatgtgtcttaggactggcacagaga

SEQ ID NO: 340485 - DNA, 122 bp, Homo sapiens
tgtggggacttgcttcccaagaaattaacttcctgggtgccggggtcgggacaacaggttcgtatacaaatactgggtcccttccagccaatcctgagctctcagctctgggaaggggctgg

SEQ ID NO: 340486 - DNA, 122 bp, Homo sapiens
aaactgcgtgccagtcatccagcggactttcgctcactcgagtggggagcagagcggcagcgacacggacacagacagtggctatggaggagaatcggagaagggcgacttgcgcagtgagc

SEQ ID NO: 340487 - DNA, 122 bp, Homo sapiens
ccaaattctcacacagcctcaaagggatcctcagggcgtaaagcagccccagccccgccacgaaccacaacgaggccccagtccccgccagcccggcccgcagtcgctccctccagcctagc

SEQ ID NO: 340488 - DNA, 122 bp, Homo sapiens
ggggtggaccaagcacaggtcagccccctccccttggcgtcgggtcctactcgagcgccccgccccacatccaccaagagaggctgagctcagcagagtcgtcccctcccccgccgccgccc

SEQ ID NO: 340489 - DNA, 122 bp, Homo sapiens
ttttttttttttggaggcaaagtcttactctgttgctcagattggagtgcagctggagtgcggcagaacactcatagctcattgcagccacgacctcctgggcccaagcgatcctcctgcct

SEQ ID NO: 340490 - DNA, 122 bp, Homo sapiens
gctgcacccaagacgggcttccctttttcactggttatttccaagcctccaggctcccaccgaagggcggctttcctcggtcaaaaccttgcctaagaaagcatcactacgtggtgttttct

SEQ ID NO: 340491 - DNA, 122 bp, Homo sapiens
atcttcaaacagctcacaccctgctgtgctcagatcaatactccgttgtctaagttgcctcgagactaaaggcaacagggctgaaacatctcctggactcaccttgaagttctcaggatcca

SEQ ID NO: 340492 - DNA, 122 bp, Homo sapiens
taggtagagataagaagagtgatactcagttctcacatcacggcggactgaatacaggcccggggagtgagagaccatccacccctgtgatctggggcaagtcaccagccctttcagagaag

SEQ ID NO: 340493 - DNA, 122 bp, Homo sapiens
cctactgggtgtccccagtgtcctcagatctccataactggggagccaggggcagcgacacggtagctagccgtcgattggagaactttaaaatgaggactgaattagctcataaatggaac

SEQ ID NO: 340494 - DNA, 122 bp, Homo sapiens
agtcccctggggtcccagggccgcattcctccgaggtctgcaaaggccactgcttaaaggcgcagaggagcagctgggaacgagaacaaagcggccaggcccccctcggaggaaggaaggag

SEQ ID NO: 340495 - DNA, 122 bp, Homo sapiens
cttcaggcctggtgtgatccgggcgcactggggcgttgacagtcattccggcaccggccacgcagctctccatctgcccaaggccacgctcctgaggacagaggtgcagttttaaaacaagg

SEQ ID NO: 340496 - DNA, 122 bp, Homo sapiens
gcctgtcattctgcagttctagtgtggggtctgggcgcagttcttttccctctccagcctcggagtcttcctctgtggactgcgcagataggactggtggcacggaccagctctgcagccct

SEQ ID NO: 340497 - DNA, 122 bp, Homo sapiens
gccgcggcaggaaggcggagccgctgaacgagaggactcgggaactacaactgcgaaggccgccccgcctccccgaggcctcgggctccgcggcggccaatgaggcgggaccacgcgggcct

SEQ ID NO: 340498 - DNA, 122 bp, Homo sapiens
gcgcagagcgctgcctggccgcagcccattgctctgttgttctgaggggcaaggccacagcgacctacagcagggaagagacaaacacagatctggtgcagagattattcgggtcatcgatg

SEQ ID NO: 340499 - DNA, 122 bp, Homo sapiens
gccaagagttcgggcagaagagaaccctccaggattggccagttaagactggggcccagccggtgaggcaaaaaccggactcggtccccagagaagcccttcaaggtatccaggtccatctc

SEQ ID NO: 340500 - DNA, 122 bp, Homo sapiens
tatatggagtgctgcagtcactccaatagacacatccagatccggctccctcttcctggccggtttctgcttcctgttttaatgtacacagccactaggtggtgtacaacttctagccttaa

SEQ ID NO: 340501 - DNA, 122 bp, Homo sapiens
tgggcctgcgatgccgtcggagtgggcggagccagcagcgagctgggatctgtgcccagtcgcagccaggagcggccgcagacggagcgcacctcgcagctgccgggcgggccctgggggga

SEQ ID NO: 340502 - DNA, 122 bp, Homo sapiens
tgggaagcttattaaaagcagaatactccaggggcagtctctccctgcggagcaagaaaacggatttgaaccaagaggccatgagatggtaccttgttttgtttttagcagagacgaaacac

SEQ ID NO: 340503 - DNA, 122 bp, Homo sapiens
cactgtctgtgttattctgcatatgtaattctgactcctccaagcagaagttagaattggcgcaaacctgctatcataacgctgtcaacaacactgcagatcgcaaagattaaacttaccct

SEQ ID NO: 340504 - DNA, 122 bp, Homo sapiens
atggagtcttagtcaggccccacacttcattaggcactgtctgttgcatcttggtgcctccgtgaaaacttctttttaaaatcccaacgcgttacatgtgtcagaggacagttccgcctcct

SEQ ID NO: 340505 - DNA, 122 bp, Homo sapiens
tcaggatccgactcggttggttcggccgccgccgccgaggctgctccgcacctccctggccgccgctctcaagcccgcctccaatgagtagctggttgagacccgcctctagcccagcgcct

SEQ ID NO: 340506 - DNA, 122 bp, Homo sapiens
tctggcggagcccaggacggtctgggggcctgacagtgcctcttgctgcaggtggtgcagcggctgacgcggatggtggggaagaacgtgaagctgtacgacatggtgctgcagtttctgcg

SEQ ID NO: 340507 - DNA, 122 bp, Homo sapiens
taccgtcgcgaaacctgcaggttaagttattttctcctccctgcttctgtaggttcacagcgttcccttctgatagagctttttgtctgtgttgtaaagctctttggctgagatggatgaca

SEQ ID NO: 340508 - DNA, 122 bp, Homo sapiens
ggctattactaaaagcttgaataaaaataacaacaagccctatgctccaatcagtaaactcgtttcttggaataaaatcttcatttgtggaaatggaatgatgtctcttagtagacagtgtt

SEQ ID NO: 340509 - DNA, 122 bp, Homo sapiens
tgaggatggaatgggataacattctgcaccccgcctggccccacaggcatatgaggtattcgataagtgaatgattgtgccagacaagaaagctgcctgccctcctcctcctcggccctgtg

SEQ ID NO: 340510 - DNA, 122 bp, Homo sapiens
cccgcctgggctggtctcgcaaacagcctggcccctggcccctgggtgggtctgaggctgcgttctcttggaggtttttgagcccaggtatggctttgcacctgtgatttatgtctttaagt

SEQ ID NO: 340511 - DNA, 122 bp, Homo sapiens
cagtggccatatgtgacagtgggccctaaggcactgagtctgttgcactttggggtaaagcgcacttttggggaggacactttgagaggtcaagacaggcagatcacttgaggtcaagggtt

SEQ ID NO: 340512 - DNA, 122 bp, Homo sapiens
ctagcctcaggctcagggtataggcaaaaaattaacacctagtacttgacaatgagcgtccgtacctgggctgtgattatgagcagctgcttctgattacaatcagtgaatcactaatctgc

SEQ ID NO: 340513 - DNA, 122 bp, Homo sapiens
ctcaagtcttcctgttgtatttctacaagatagctcttgctcttaattgcacagtcccagcgtgtgtgtttgtctgtgtctgtttgcattcttacatgcctgcacttttacaaagagtgagt

SEQ ID NO: 340514 - DNA, 122 bp, Homo sapiens
agtatggggtgtggagacgcggcacgggatgtggagacgcagcatggggtgtgggagacgcggcatggggtgtggggacgcggcatggggtgtggggacgcagcatggggtgtgggagacgc

SEQ ID NO: 340515 - DNA, 122 bp, Homo sapiens
tgtcctgtgcctccctgtgaattctctccagggcgcctgcctgcgccttccagccgcagccgacagttccatttttaaaaggtcttgaataaagtgaaatgtgattagttgtgggaaatgaa

SEQ ID NO: 340516 - DNA, 122 bp, Homo sapiens
atgcccccgatgccatcccgaatcattctcacctcttcactggccccagttcccccaagccgagtcaggaagggatgtccagctgccacccactctcgctgtactagtgattggaagccaaa

SEQ ID NO: 340517 - DNA, 122 bp, Homo sapiens
cacccagccacgaggcccggagtcagagggctttgcttgcccattcacagagccctcacccgcggatcaaagtcgtattccgcgaccgcagcccggagactcccgggagcggcgcggtgcgc

SEQ ID NO: 340518 - DNA, 122 bp, Homo sapiens
gtcagcgaaggctggggcccaggtctagacaatctctgcattcagcagcagcacagagcccgtgttctattatctgtataaatggagcagaaaattcaaaagccatttgcagtggtttctgg

SEQ ID NO: 340519 - DNA, 122 bp, Homo sapiens
atttattttttctagtgcatgtctctgcataggtattgtgttgattgagttcccctggcccgagattgctgcctcttttatggcactagatggctccctaagcctaggtttgccgtggctct

SEQ ID NO: 340520 - DNA, 122 bp, Homo sapiens
gcccagcgccgcaacgcccagggtgtggggcggagtaagatgtgaaacctcttcagctcacggcaccgggctgcaaccgaggtctgaatgttgcgaaagcgccccagacgccgccgctgctt

SEQ ID NO: 340521 - DNA, 122 bp, Homo sapiens
ccgtttgccagtcagcccgtgcgtccgagcccctcgcgccccgccgcagccccggccaaccgagcgccatgaaccagatagagcccggcgtgcagtacaactacgtgtacgacgaggatgag

SEQ ID NO: 340522 - DNA, 122 bp, Homo sapiens
gcactcggagaaattgttagtaaacctcatccccgaggcagtcccggggaggggaggaggcgggggcttgactcacagactgggaagctctgaaagcgatgccacatgggctcaagatctgt

SEQ ID NO: 340523 - DNA, 122 bp, Homo sapiens
cgcctttacaccgtgtccccaccgaggggcgtcacaaccgtcctccacaccgggcgtcaccggcttcccaagtcccaccgctataaaggacacgtcagtcagcatctcggagtgagacgctt

SEQ ID NO: 340524 - DNA, 122 bp, Homo sapiens
ttgggtggttgatgggactgggcgccctagagcgggggcggcgctcattggggaggctcccgccgcacaggagaccatgaggggggcgggagggaggctcacgcatggcgggctgcaggtcc

SEQ ID NO: 340525 - DNA, 122 bp, Homo sapiens
gaccagcagttggggtctgcagcgtggagatgggcaggaagctggagcccggctcatcgtcgcatagcctgcctgcacccgccccccgccaccacctcctggtgggttccgccctcatgccc

SEQ ID NO: 340526 - DNA, 122 bp, Homo sapiens
ggtgtgagggtctaccaggcagaagcaggttggctgtgatgacagcacagagctcaggaacgctgcctgaggaccctggggcctacgaggaggagaagagggcaggagctggtggggtgctt

SEQ ID NO: 340527 - DNA, 122 bp, Homo sapiens
atccggtccaaggtctctctgcgatttctgaagaattcggtcttcccggagcctctcccccggctcttctagaaccgaaggttttagttcccatgggcacagccggaggccgcctgcgccac

SEQ ID NO: 340528 - DNA, 122 bp, Homo sapiens
gcgcggcgcgggccggcgggggagggcggcgcggcgcggaaggggttaaggcgctgagcgcggagccatctggccgggttggctggttataaccgcgcagattctgttcacgggactcagag

SEQ ID NO: 340529 - DNA, 122 bp, Homo sapiens
tttgaagaggtagaaatcatagagcttgatgggacatctcaatggattctctggattttccgtctgttctgcatacatgtcatctgtaactataaaacacacatccccaccaccacagacct

SEQ ID NO: 340530 - DNA, 122 bp, Homo sapiens
cccattatgctgaccctggccacattgtaatgaagcagaggttaattctgtcctgtatagcgtctctttttttgcatttttattttcttctctcttttgtgactaaccctttatttcagccc

SEQ ID NO: 340531 - DNA, 122 bp, Homo sapiens
tcttgagcccacgggcctgcatggccatggtgggtacctcctggctcacaggcatcatcacggccaccacccatgcctccctcatcttctctctaccttttcgcagccacccgatcatcccg

SEQ ID NO: 340532 - DNA, 122 bp, Homo sapiens
ttttttcttccagggaggcaagaattgaggttgctgcaggccagtacagagtcgctgctgcgaagatactttggtgccgtgtgactcagatccatcccctagcggtcacaccgtgaactttt

SEQ ID NO: 340533 - DNA, 122 bp, Homo sapiens
ccagccttgctgtaccacaggcccctgcgccacgcccacctcctgcctgccccgcctccacgcagggccccaaagctctggggctgtcacagtttccattccgggctgacgctgcctgcagc

SEQ ID NO: 340534 - DNA, 122 bp, Homo sapiens
cacgtggactgcaattatgcattttcattggtcctcaggatcacgcgacaggaagtattgcgtaaccggttgactgccacatgcgcattggcttccagggccggaagtcccacctttttgtg

SEQ ID NO: 340535 - DNA, 122 bp, Homo sapiens
ccgcaacacccccagcccggcagtttgtttaaaggtctgggttaccttgggccccaggcgcgtgatatagaacgtcagcaactgctgctgtccaggcgctcctcagccagccttctctcctg

SEQ ID NO: 340536 - DNA, 122 bp, Homo sapiens
tccccctctccccttccctctctccccctttctcccactctctcccggattgtaagtaaccgtgtcagggtattgggggcccgtgtcaaggtccgcagaatataaaaagtttgaaaaccact

SEQ ID NO: 340537 - DNA, 122 bp, Homo sapiens
gtgtttcaaagacactgcacaaaatggacagtgaccacaaggggacagctcagtggaggacgcattgtttcagggatgcacttgcagtgggttttgtggcttgaggtttgggcacaattttc

SEQ ID NO: 340538 - DNA, 122 bp, Homo sapiens
ctccctgaccccttgcgcttcccaggtgaggcaatgccttgccctgcttcggctcgcgcacggtgcacacacacactggcctgcgcccactgtctggcactccgtagtgagatgaacccggt

SEQ ID NO: 340539 - DNA, 122 bp, Homo sapiens
agccatacaaacaaatcaatctctttactggacaggcatacctctcatatgtatattattcgaatatactaacacatgaaagatcacatcaccttgtttacggatacatttaatatccctta

SEQ ID NO: 340540 - DNA, 122 bp, Homo sapiens
gcacacgccctagcaccactctcctctgacgtccgcctccggatgtctgacgatcgcccccgcctgccgcccttataaaggggacttttcccaatactcgatcgattcccacctcgccctgc

SEQ ID NO: 340541 - DNA, 122 bp, Homo sapiens
cccaccttaaccgaatgtcttcctttgcagctggggctctgtcttcttgtctgaagcttccgaggccttgatttcccaccctcttttatcccatctcccccttttcggtgggaatgcatcat

SEQ ID NO: 340542 - DNA, 122 bp, Homo sapiens
tggtgccacctcgaccccgccgggcgacacacgctgagcagaggcagcactcgggctggccggcccagcaggcagatgttccggaacccttgtaaaaccccgcagtacagggactaggagga

SEQ ID NO: 340543 - DNA, 122 bp, Homo sapiens
tgccgtggggaaaacctgcctgctgatgagctacgccaacgacgccttcccagaggaatacgtgcccactgtgtttgaccactatgcaggtaagaaaaagtgggaaactctctgcatccaga

SEQ ID NO: 340544 - DNA, 122 bp, Homo sapiens
caggaagaggagctagggaggtgggctgccggctgagaggccttgagggatctttgggagcggggcccgatttcagcctgatcctcatttccagaggcctggatgggtgtgggggtgccggc

SEQ ID NO: 340545 - DNA, 122 bp, Homo sapiens
ctctctccagagcccaccagtccccgcgtgccggccagcctagattgtggccatgtccttcgtcctcgaaaacaggagagggtcaggtatcgccatcggacaccttcccggacttgacaccc

SEQ ID NO: 340546 - DNA, 122 bp, Homo sapiens
tcacccgcactgcgggtgcggggtggcaactaccccagctggatagtgagggtgccgggacgcaagcccggggcaggctctcaactgcccccgcccttgcttctcagtcgccctgcacacag

SEQ ID NO: 340547 - DNA, 122 bp, Homo sapiens
tgaataaagaacaaggtatcccagcaatgcagggaagatgtccaggacagtgagtgtgaacgaggggtcctggagaatgtgcacgccagccctgcaggagaatgtccacgccagccctgcag

SEQ ID NO: 340548 - DNA, 122 bp, Homo sapiens
ccacccaggcgaggagccagaaagagcagccgcagcaggtggagcgcatgggcagaggggcggtggtgggacacgcgactgtttgggattgagcgaggccacctaagcagattgcggtgagt

SEQ ID NO: 340549 - DNA, 122 bp, Homo sapiens
ggtggtgatggacaggggcagcaccaccaggtcctggccgggctctcgcacctggcgtcccgccttcaacagcctgcccttgttcatgatctggggggacaggctggcatcaggctggggag

SEQ ID NO: 340550 - DNA, 122 bp, Homo sapiens
ctttggtgctccgctgcgcatacccctaggggagcatgcagacgggcaagtcctgagcatcgccgaccccacagcaccttcgagggttgagtgtttacaagcccccgaaaccccggtgggcg

SEQ ID NO: 340551 - DNA, 122 bp, Homo sapiens
tcacccccagaggccggcagctcctctgacttccctgcccctgtgggtctgggtccttcccgtctggcagagcctttgggactcatttccgggaatgcagaaccacggggattgaatgtgcc

SEQ ID NO: 340552 - DNA, 122 bp, Homo sapiens
atgctggccttgggatgggggcgcaaagcccctggacgcgccccgcctagtgggcgggaacgactacagcccccagcatgacccgcggccgcccatgccacgccccgccacgcgtgcgctta

SEQ ID NO: 340553 - DNA, 122 bp, Homo sapiens
cccgcccgtgtcccctttcccgtccgggcagcccccgggccggagccccctccgttaccccgatggctgcccggcccgccccggcactgcctcctcccggctgcacccaacagctcccgccc

SEQ ID NO: 340554 - DNA, 122 bp, Homo sapiens
gcagccagcagttgctctacaaacatttagatgagtgaaaataatgagggagggaccatccgacacctggatttgaaggatagtttggattttccaaaaaccacacttgcaacaggttgtgt

SEQ ID NO: 340555 - DNA, 122 bp, Homo sapiens
tcgacacccaatacattgttatccaacagaatatgacaatcgccacactcaaaggccctacgaacacattcatgctggtgatggctgctaggagtcaacagaaatagcatcacaacctctgc

SEQ ID NO: 340556 - DNA, 122 bp, Homo sapiens
aaacaacagtcacattcttattctgctaaagtatgagcacatggagaactgccttctgtacgcatatgactgacagaaacaccagttatgaatggcttacatgacgaatcacatgccaccga

SEQ ID NO: 340557 - DNA, 122 bp, Homo sapiens
ctactaaggggggccgcaccttgggcgtgcagatgggacttgaggctgagctcagcctcccgcctgcgctgtaacccgggctctcctgccctgctgggcctcagtttcctccttggcgaatt

SEQ ID NO: 340558 - DNA, 122 bp, Homo sapiens
gtggagtctggaggtagggcggggccagaacagcggcgggggcggagttccggctgggggcggggcggggcggagcgggagctgcgggattccggcttcaggggcggggcaccggcctctgg

SEQ ID NO: 340559 - DNA, 122 bp, Homo sapiens
tgtgccatggtgcagggcaagtctagcagagaaagccagtgttcttcagttactgcagctcggcgaagaatcccactgcagggcactagggaggccggtcctgcagaggtcagcagtaggag

SEQ ID NO: 340560 - DNA, 122 bp, Homo sapiens
atttcttccttccccaacccccttcccttctcctccagatagatgcaaagctgaatctcccgccctgctcgctcagctgatctgtggcttaggtagtttcatgttgttgggattgagttttg

SEQ ID NO: 340561 - DNA, 122 bp, Homo sapiens
gacaccagctcatcgtctgggttccaccatccacccacgcactcatttggcagctatcaacggagtattcacagtacgctgctcacagttctaaccgcggaggatagagttgaggcccacac

SEQ ID NO: 340562 - DNA, 122 bp, Homo sapiens
aacctgagcctttttaagtccatcgatattctgggaaaaacaaaaccaggcttttttcttcgtgggctttctcttcatccatctctgccccccttacttcttggcgtcatcaggcatctcgg

SEQ ID NO: 340563 - DNA, 122 bp, Homo sapiens
gtactgttccgtgtggctttggggcttcctgctgcaacgggctccgggcagagaggcctccgctgcctgccaaggttttagttgctgccgcttctcccttatgttcctccaaatctcccgct

SEQ ID NO: 340564 - DNA, 122 bp, Homo sapiens
agcctcctgcagaaaacgcgcctcacctgacttgtgtttaaatcagcaagggcagtgacgcggctcttccttttcctggggcagtcactctcctccctctgctgagcccgctctctttagtt

SEQ ID NO: 340565 - DNA, 122 bp, Homo sapiens
tcacatcccagacagggcggcagggcagaggtgcttcccacatctcagacgatgggcggccgggcagagacgctcctcacttcctagatgtgatggcggcggggaagaggcgctcctcgctt

SEQ ID NO: 340566 - DNA, 122 bp, Homo sapiens
atcagcaaatcctataggttcttccttaaagtatatccacaagctgacccctgtcaccaccgatgccacttagtgcaagccaagaacctcttggttggtctccctgctcctgctttttgccc

SEQ ID NO: 340567 - DNA, 122 bp, Homo sapiens
tcattacaattaaaaaccccacaccccacttcctgtattttacaacctataggcagcaaccgagcacaggcttactcagggaaggggtgatagagcaggcaaaagaagataattcttggctt

SEQ ID NO: 340568 - DNA, 122 bp, Homo sapiens
tctgcctgggaagatgggaaggttctgggcaccgcgacggagggaatgtgcttcacgccacggagctgtgcacttgaaatggccccggggtcgattttatgttacgtgtattgcagcacatt

SEQ ID NO: 340569 - DNA, 122 bp, Homo sapiens
aacatcatttccttaactactgtgagatcagcaacattttcccagttggaagctcacttgcgcgagaaagctaaccatgcttcggtcgacaggcagccaaccgcagaactccagcgcgcagc

SEQ ID NO: 340570 - DNA, 122 bp, Homo sapiens
ttaccccaaattgagactcagctcactgcctactgactcagctcaccagagtcttgctgccggcccctccacttcctcttctttgctattgcagggtggcaggttgagttgagaacagttgc

SEQ ID NO: 340571 - DNA, 122 bp, Homo sapiens
tggactgggtggagagcgacataggtggtgggaactgtagctggggagtccagccaggaccggatctcaagggccatgtgttcaaagcttagcaccttagactttaccttgaagacaacagg

SEQ ID NO: 340572 - DNA, 122 bp, Homo sapiens
agattcttcctggccaagctgctatatgcaaacacagaccagaccacagctttattacaacgctgagctactcaaatcaggggactcagttaagctgtgcctaggcttctgacccatagaaa

SEQ ID NO: 340573 - DNA, 122 bp, Homo sapiens
cttgggcttgggcatttgggaaaagaatgatgtctggaagggcttaagggacacagtggacgaggggagagtcctcatctgctggcattttgtggggtgttagtgccaaacttgaatagggg

SEQ ID NO: 340574 - DNA, 122 bp, Homo sapiens
aaggtgaaccgctctagccccgcaatgacctcttgcatcttccgtctcctgctggggctgcggaagctgctggaacccaggcaggtgggcccaatatagctcatcagaggcccttaaggggc

SEQ ID NO: 340575 - DNA, 122 bp, Homo sapiens
cacagcggaccttgatttaatgtctatacaattaaggcacgcggtgaatgccaagagaggcgcctccgccgctcctttctcatggaaatggcccgcgagcccgtccggcccagcgcccctcc

SEQ ID NO: 340576 - DNA, 122 bp, Homo sapiens
atgggacgtgttctcctttaagagttaagaaacttgaaaccttgtttgcgcaacaatcagcgccgcggagccgccaaagtgtctagactggcatatgatgggaggcagccaatgactccgcg

SEQ ID NO: 340577 - DNA, 122 bp, Homo sapiens
gcccagaaaaggctggagatagcaggttgccaggatcccataaggaaagtggggaccaaacggcagccacaaacatgttgacatctgggcaggacactgggaatgtaggcccaataaagagc

SEQ ID NO: 340578 - DNA, 122 bp, Homo sapiens
gaatcgcgttctcctgctgcggagcaaacagccgcctttcgcacccggcccagccggcgacgggagcaccaaggcccgaacaccagcgtgctccctgagccagggcggccccttctccttca

SEQ ID NO: 340579 - DNA, 122 bp, Homo sapiens
aagagagggaaagcgggcagtgctggctgggccacagcaggaagccatcatgggccaatccggagttatgcgtgttctttttcctggcagcccagcatcagcccagtcaagacagctcacct

SEQ ID NO: 340580 - DNA, 122 bp, Homo sapiens
tgacgccgctgccacgggcagcctggccgagctgtgctggctggtccgcgaggggggctgcggtctgcaggtgagcggggatggggcagcctggctccacgaagctggctggggtggaacca

SEQ ID NO: 340581 - DNA, 122 bp, Homo sapiens
tgggcgacagagcaagactctgtcccaaaaaaaaaaaaaaaaaaagcctgggactcttagcgcctcagagccttactcagaatcataaaatcattagaagcaatgtctgtcctcactgctgc

SEQ ID NO: 340582 - DNA, 122 bp, Homo sapiens
ggcggcggcggcggcagcgcaggcggcagaggcgcaggcggcggaggcggctggggggtccggaagtcaacaccatgtcaagtctgcacaagagccggtaaggggccatggggcctgacccg

SEQ ID NO: 340583 - DNA, 122 bp, Homo sapiens
gccctgtcttggccggtggtccccgggcccgcggtcttgttctcctttttccacttcatgcgccggttctgaaaccaaatcttgatctgtctttccgtgaggcagagcgtgtgcgcgatctc

SEQ ID NO: 340584 - DNA, 122 bp, Homo sapiens
caggagccgtactctgacagctgtgcacgatgccatcctcgaggacttggtcttcccaagcgaaattgtggtcaagagaatccgcgtcaaactagatggcagccggctcataaaggctcatt

SEQ ID NO: 340585 - DNA, 122 bp, Homo sapiens
gcaggtcctgggcgctccctaggcaaagggagccgatctccgggaggcggtcacagggagcgctcctgcgacttctagggcccgaaagctggggaggatgagagaccaggggcctttcgtcg

SEQ ID NO: 340586 - DNA, 122 bp, Homo sapiens
agatccagttctcgaaactcagggtcgagaaacctaggacttgggcttcttctacgctgtcgatagttgcgagttcctgatgtaaaacttgggtgatcccctcccatgctgtttatcttcac

SEQ ID NO: 340587 - DNA, 122 bp, Homo sapiens
gcagaggggaagagggggacgcctttccaggtgacttcgctgcagagaggaagagggggacgcctttccaggtgacttcgctgcagagaggaagaggcagacgcatttccaggcgaggtcac

SEQ ID NO: 340588 - DNA, 122 bp, Homo sapiens
tgagtctccatggccctgagctgggtcacacagctggaatcacactttgctcaacacaaacgtctttcactttttcattcacccacaagcaacacaaggactgcaacagaacactgatgaga

SEQ ID NO: 340589 - DNA, 122 bp, Homo sapiens
cagcacatttcctaaaattaaaacaaagtttttgatgactgttttcagaaatgaatcatacggcatctggggaagtgcctctaggggttttaaacaaatcctctattagtcatgagcaatag

SEQ ID NO: 340590 - DNA, 122 bp, Homo sapiens
ggagggttttgagtaaggggtcctggctggggagagccagagatgaggcccagcctcccgcgctcacgcaaggcctgtaaacagaaagcagactggaaaggcgcttggagcatttccatctt

SEQ ID NO: 340591 - DNA, 122 bp, Homo sapiens
gaaattgaggccaggcgtggtggctcacgcctgtaattccagcactttgggaggccgaggcggaaggatcattagaggtcaggagttggaaaccagcctgacgaacatagtgaaaccccgtc

SEQ ID NO: 340592 - DNA, 122 bp, Homo sapiens
ggccccaggcggccccagccaatggtctgtgtggtgatggtgtgtggggttaggcccaggcgagctttgtttgggccacaatgtgcgtggccaataaatagatgcttgaaaagggctcctgt

SEQ ID NO: 340593 - DNA, 122 bp, Homo sapiens
aaactatgacacattttgcaaatgtatcaccatgcaaatatgcattgttttcctgacaatcgttgtgcagttgatgtccacattaaaatactggattttcccacgttagaagaatgtttaaa

SEQ ID NO: 340594 - DNA, 122 bp, Homo sapiens
gtggcccttcagaaatcatcccaccagccctctggtctttcagatgaagaaactgaggcccggaaaggtaaaccgctgtccccaaggtcacagaattagagtcaaaagggaaacccggtggt

SEQ ID NO: 340595 - DNA, 122 bp, Homo sapiens
cgtaccatcgtctgtcctggttgtgtctctgtgttctccatgtgagagggcggggagggccgaccagggctgttgaggctcaggttcctcgcgaactctgcagggactcctgggcacgccac

SEQ ID NO: 340596 - DNA, 122 bp, Homo sapiens
ccagcactagaccactgcttcctccttttgttctctaagaaacaactgagcctttgctggcggaacaaacaaacagcagcattcttcagtccaggggtattttgaatcctccagaaaaaagc

SEQ ID NO: 340597 - DNA, 122 bp, Homo sapiens
tgtttattcttatttccttttcaaaactatttaaatggcagttgtaattcttgagaaatacgattgcagaccattacatgttcaaagaaaaacgggatttatttttaaacaagcagttttac

SEQ ID NO: 340598 - DNA, 122 bp, Homo sapiens
agctgtctctctagctgggatgggaagtggtggtggcggcaaaggaaggcaggaggcagccgctgctgctgaacagctcctcaattattcagattgggcccccaccccccgaacccctcccc

SEQ ID NO: 340599 - DNA, 122 bp, Homo sapiens
gggacccgggacatcatcgttctgtgtcagcacatcaggtgcccggggcccggacatcatcgttccactcagcacagcatcaggtgcctgggaccctggacatcattgttctgctcagcaca

SEQ ID NO: 340600 - DNA, 122 bp, Homo sapiens
agctgctcggcgacagcaagcgtccgcgcgcgggacaatggctgctcttgtggccgaacccggaagtgcacttgggctcggagagccagaactacaattcccagaagcctccgcggcgcgga

SEQ ID NO: 340601 - DNA, 122 bp, Homo sapiens
atctctctgatctatttttcctcatctgtaaaataggtgtaataataacaactactttgtcggttgctctgagggttaaatgaaaataaaaagaaaatgtgaaacagcaccacaggtacttg

SEQ ID NO: 340602 - DNA, 122 bp, Homo sapiens
caggcttccgccccagcccttactctcctttcacggaaaggtcgcagccggtggccctaccggcagacaggtgcagaggtgagcccagcatcccagccatcccctgtcctcgcaccgcacgt

SEQ ID NO: 340603 - DNA, 122 bp, Homo sapiens
ttccacccgtctcagcctcccaaagtgctgggattacaggcgtgagccactgcgcccggccgtaaatgtttaaaaaacacaattgggccgggctcggtggctcactcctgtaatcccagcac

SEQ ID NO: 340604 - DNA, 122 bp, Homo sapiens
aaataagtagaaaccttcattaaggacttggccattcaaggtagtgttagtcttacaaagcgagctacacaccaacttcagaggctttcgctccaaacctgcatcaatcccttattaaatca

SEQ ID NO: 340605 - DNA, 122 bp, Homo sapiens
tgggtctgtcctgaaagacactagcccttgcctaaaaggtgagtggctgaggatacacaccggggtgggggagtagagctggtagacagaatagaggacagccctttgctttacatttgctt

SEQ ID NO: 340606 - DNA, 122 bp, Homo sapiens
ggtttatctataccaccaattagttgccacatgcacgtgtaccaagatagtcagctcttacgcttctagaaatgtgttgaccccttctcctaagtatgtttacagagctttttgctaaagtt

SEQ ID NO: 340607 - DNA, 122 bp, Homo sapiens
gactggaaaaattggaattcagggcgcccggggtaggggaacgatgcgcactgctggagacgggcgaccttcgctggccggtcggtgggttcctggttttctgctgccgagtaaacaaacgt

SEQ ID NO: 340608 - DNA, 122 bp, Homo sapiens
agcggtagcggaagctcttgccacattcactgcagtgaaacgggaccctgggggcggcagcggcgggcggtgctggtgcaggggttggggcggggacgtcatccatggtggcggggaataca

SEQ ID NO: 340609 - DNA, 122 bp, Homo sapiens
aaaactgtatgttaatggagtcactttaggtattagtaaaaaaggtcacttgaattttgacgcttggtccagtgtttccaattttatggtccagatttggcagaccaaatcggccaccattt

SEQ ID NO: 340610 - DNA, 122 bp, Homo sapiens
ttgctcgccgccttcgggagggagcccacccggctgctggaataccgaggacagttttcccgggcagggggcgggggcagagggcttttaaggtcgtagccagtccgaaccccggagtttgc

SEQ ID NO: 340611 - DNA, 122 bp, Homo sapiens
tttttccatagttccagcaactgtgcgattggcatttttaaactttccttttctgctggtcgagtattgatagtaggaaaggaaataaacagaggctcggaccggcacagggggacggccag

SEQ ID NO: 340612 - DNA, 122 bp, Homo sapiens
agcgcccatccctgccacacgccctgccagctgcgccagcttccccaggccgtccagagtcgctgctggaactggaataaagtcctctctgagacagctcctgggtggtttcctgcagtttt

SEQ ID NO: 340613 - DNA, 122 bp, Homo sapiens
aaataggcagttcacatagccggccaacatttgaggtatcatcagtgtgagacaaggtcccggtctgttcctactggcctagctgacgctaacaaaatgggaggcttatggctctgcacagc

SEQ ID NO: 340614 - DNA, 122 bp, Homo sapiens
ctcctgaaacatcctgtacttctggcttctgttctcttcctgtttttctcctcctttcctcgctgctctcccgtcatctccttcacaggctctttccttgttggtgtttgcagagtttcatc

SEQ ID NO: 340615 - DNA, 122 bp, Homo sapiens
atacctggctgggcgcagtggctcacacctgttttttaatgtataagagcaatacttggccgggcgcagtggcctacatctgtaatcccagcactttgggaggctgaggcaggtggatcctc

SEQ ID NO: 340616 - DNA, 122 bp, Homo sapiens
gcaatgttgactgttgaaaaagcagcagtatgcttacaggtttgcttagtttggggacaccgttaccaccagaatggctgctctgacaatatgcctagggactttctcatggcttttattta

SEQ ID NO: 340617 - DNA, 122 bp, Homo sapiens
gctaaatctcacagagcttttatccctataattccagcatctaaaatgttacctggcacacgtgggagttaatacatatttgctgaatgactgagtaactgaagaaaccctataagaatttt

SEQ ID NO: 340618 - DNA, 122 bp, Homo sapiens
ccagcggctgcggagggtgtactgggtcccgcagcagtgccagcccaccggtgctgtgctcgatttctcgctggaccttagctgccttcccgcagggcagggctcgggacctgcagcccgcc

SEQ ID NO: 340619 - DNA, 122 bp, Homo sapiens
gggagggagggacgggactagaagcctgccgggctcggggtgggggcgtcttgcgaggaacgggcggggggggacgcacgcctaggaggcctggactgcagagtggggggccttcctccccc

SEQ ID NO: 340620 - DNA, 122 bp, Homo sapiens
gtgttggctgccatcttccgttgcctgcacccactactggtggtcgtttcctgcctcacccgggaccccttcagcagcagcctacagaaccgggcagaggtggacaaggtcagtcctggctc

SEQ ID NO: 340621 - DNA, 122 bp, Homo sapiens
ggaaccacccagagcgaactcgtgccggggcggggtggggaccggaggaaggtcctgctccgaattctctccagagcagaaaagaattctagaggctacatgtgggctgctttccccccttc

SEQ ID NO: 340622 - DNA, 122 bp, Homo sapiens
ggtgtgtgtgctgtgtgagtgcgtcacagctggggctgagtgattccaaggactcctgcccgggtagggggctttaggatgagctctaggtacccccaccccttgaccctccagacaatcag

SEQ ID NO: 340623 - DNA, 122 bp, Homo sapiens
ggtggatggcattgtgggcgttcaagctgtccaggtttgtaaacaggttcccgcacttggcgcagacctcgtagaggctcaggccggcgacgatcacctcctcctggaccacgttgttgatg

SEQ ID NO: 340624 - DNA, 122 bp, Homo sapiens
cggggcgtggacctaagtcgtcgccaaagaaacggcgttctggacggggacgtagggtcccgcccattccttctcgtgaaagcgggtgactggtcatgattatgattgatagcctcctctcc

SEQ ID NO: 340625 - DNA, 122 bp, Homo sapiens
agaaattaataaagacataaactccatgttttataatgcccagagtggtgcgtgcttccccgctggggtaactgaagttgccggagctgggttcactggggatcgtaagggagcttcccggg

SEQ ID NO: 340626 - DNA, 122 bp, Homo sapiens
gggagcggggggctttgaggtcttagccacacccgttgtatagataaagaaactgaggcccgggacactggaccaagggcacttagtacttagcgttgcctcaatccacagtctcagttcct

SEQ ID NO: 340627 - DNA, 122 bp, Homo sapiens
gttggtggcggtgccagggctcgcccacccgggcggtggaacacgggccaggacggggagcgactccccacagtgctttcctggcccttcggcctttgtgcgacgcaggcgcgacagggttc

SEQ ID NO: 340628 - DNA, 122 bp, Homo sapiens
acagcagccctggtacccgaggagggaaaggtttgatgaacaaacggaagaaatgaggatcgtggctggaagaggcgctgctcccaggggtttcacagatttttgtgatttgatccaacgtt

SEQ ID NO: 340629 - DNA, 122 bp, Homo sapiens
cctgtcccagggaggggaccccagtggctgccagatgtgggggagatgcagccactcactcgaggtagttggtgagctccaggttcttgtagagcaggtagcagaagtgggagacagaaaag

SEQ ID NO: 340630 - DNA, 122 bp, Homo sapiens
ccagggctactgagcaggccctgccacctctctgcttccctcccactctgctcaggcactcgggccccttgctggctcctggcttccagcactcccacctcagggccttgcacctgctgttc

SEQ ID NO: 340631 - DNA, 122 bp, Homo sapiens
ggtccttctcactcccgacctgcccgccgcctgccgcccgcagccgctgccccgctggtgcgaacgctttcgacttgccaccgcgagcctcccgggctgccgagcatgcccagtccgctgcc

SEQ ID NO: 340632 - DNA, 122 bp, Homo sapiens
ttcgctccctaggggggtgtcactggaccaccgaggcccggagccccgagctcgcccaggcgggcccaagtgacctgggggcactgggcttggagtctgcccaccttgctggactcctgatg

SEQ ID NO: 340633 - DNA, 122 bp, Homo sapiens
gcgcaaactcttgacataaactctagcttgcctttaatggcagttgtgagcaaggcttggcgtagttactgggttgtttttttttagacaaagtctcgctcacatagttactctttaagagc

SEQ ID NO: 340634 - DNA, 122 bp, Homo sapiens
gcgcctcccttacccagccccttgccacctttacctcgcccagacattctgaaatcacagcgcctactcagcagaaaatcgggctgcccactgtgattgccagtcgcagaccagggcttata

SEQ ID NO: 340635 - DNA, 122 bp, Homo sapiens
gagctcttcccaggcagtctcctggacaggcatgagcatgctgccaagactggatggccccggctctgaaagaacaatagcaatgcgtttcgcactagcatgaaactttccgagggtacaaa

SEQ ID NO: 340636 - DNA, 122 bp, Homo sapiens
gctgggattacaggcatgagtcactgcacccggcatttattattattattttcttagagacggggtcccacaattcttctgcctcgtcctctggagtagctggggctatgggtctgcttcat

SEQ ID NO: 340637 - DNA, 122 bp, Homo sapiens
tcggggcgtgagtaacaggttactcatattctttgcagcagcagcttgtctggttttggacggttgcaggtgctttgtgtgtgtgctacacgtacacacacatacacacatgctcacttata

SEQ ID NO: 340638 - DNA, 122 bp, Homo sapiens
gtgagtgtgcacccgcctcccggcaggcctgggctcctcccacaggtcagaggctgcaaacgacaggatctgcctgagatggggctgccgtgagaaagatgtcttctctcttggatttaggg

SEQ ID NO: 340639 - DNA, 122 bp, Homo sapiens
caagacgatggtatggcctgctccgccaccatcacgtgggctcctcctctgtgacgtcggcgccttcgctgtagcaaagctcggcctctggaattctgagaactaatttgctattcggtgac

SEQ ID NO: 340640 - DNA, 122 bp, Homo sapiens
ctgcgacctgctccggcgccagatagcctgggcctcgctcaactccggcttcacgcggctcggcaccaacctgatgaccagtgtcccagtgaaggtgtctcagaactggatagtggggtgct

SEQ ID NO: 340641 - DNA, 122 bp, Homo sapiens
cgtggtgctgtcagagcgggacctgcagcgggagatcaaggcccagctggcccagctgcccgattccgcgccgggacccccgccccggccacaggtccgcctcgccggggcccaagccatct

SEQ ID NO: 340642 - DNA, 122 bp, Homo sapiens
caatccattgtcttaaggaaagtactccagagactggttttggaaatgctcgggaggacgcgctctccttgctttctttcgcttccccgacttgttactccaccgtgctcagctgcaatccc

SEQ ID NO: 340643 - DNA, 122 bp, Homo sapiens
tggttctgagcagctgaacttcccgggaggtggggtcagaggccgcggtgtcagctctcccggggaggcccaggtgacaggtcctagctctctggtgtccccatcctggtgggctgcagtct

SEQ ID NO: 340644 - DNA, 122 bp, Homo sapiens
tcccagtcccgccggggccccggctgcggaaaggatgcctgcggggagcgggagtaggcgcgccccagccaggctctggcggtgcggccaggggcgggggagaagcacgagtcgcccctgcc

SEQ ID NO: 340645 - DNA, 122 bp, Homo sapiens
tatgccgatctacatatggggttgtggcggaggaaatgggagatgacaggcagtggttctcgatgggaggtaattttgtcctccaggggacatttgaaaatgtctggagacatttttgattg

SEQ ID NO: 340646 - DNA, 122 bp, Homo sapiens
cgtggctgtgcgcaccgaggcggtgatgcggcgccactgcaggacgctgcgccaggtgtgcgtccctgagtgcacccagagccagacctcccttaacccccacagggccgccgcgcgtcccg

SEQ ID NO: 340647 - DNA, 122 bp, Homo sapiens
ctgttgaacagtcatagagagaatcttatcttgttttcttggctggggattttgtgtgggcgtgtgaggtacagctgcaccatgagttttttggcagtgaggacagggcaattctcaatgca

SEQ ID NO: 340648 - DNA, 122 bp, Homo sapiens
tacttgggaggctgaagcaggagaattgcttgaacccaggaggcagaggttgcagtgagccgaggttgcaccaccactctccagccctggcaacggagtgacactgtctcagaaaggaaagt

SEQ ID NO: 340649 - DNA, 122 bp, Homo sapiens
gatttgctatccaaaaagctagccgcctcccacccccagccaggtacagtactagttgtgcgggccagagacaacagcagtaactcattctccagcagtcacccaccctatacgtgtctttt

SEQ ID NO: 340650 - DNA, 122 bp, Homo sapiens
gatgagttccttgatttcactgcccttctcttcggctggttccgaaagtttgtggcagagcgtggagctgtagggactagccttgagggccgctgccggcagctggaggcccagatcagaag

SEQ ID NO: 340651 - DNA, 122 bp, Homo sapiens
accttgtgatccacctgcctctgcctcccaaagtgttggaattacaggcgtgagccactgcgcccggccgaaaacagggttcttgatcagggtgtgctctggaaactgtagtctgacgaacc

SEQ ID NO: 340652 - DNA, 122 bp, Homo sapiens
gctgatgaacgtgtgttttccttatacaacactcccaggggggaccgtagctattgtcttcgagtaatctgtactgtgttgtaatgaactttgttttctaaaaccctggccaacatgccggt

SEQ ID NO: 340653 - DNA, 122 bp, Homo sapiens
gtatattctaggaagacacagcagagcaggagctgcaatcaagaattacaatgcctcagtcgggcgcggtggctcacacttgtaatcccagcactttgggaggctgaggtgttctcaggagt

SEQ ID NO: 340654 - DNA, 122 bp, Homo sapiens
aaactcccgacctcaggtgatccacccgcttcggcctcccaaagtgctgggattacaggccggagccaccgcacctgtccagatcaaccactttggggccattgatatcagagatggcctcc

SEQ ID NO: 340655 - DNA, 122 bp, Homo sapiens
tccacaccagacactgcggagaccaaagctcagggaggtgaagggatttaccctggatctcgtggctggtgagtgacggagtctggacttgactctcacacatacaacgtgcccccaaacac

SEQ ID NO: 340656 - DNA, 122 bp, Homo sapiens
cctcggcggctctgcagtgtgatctcatctctttgtttctccccggctgccgtcagtcaccggctctctgcgcccccacccgcgcgggctcgcggccgtgctgcgggcgtggcctcagccgc

SEQ ID NO: 340657 - DNA, 122 bp, Homo sapiens
ctctgtcctggcggaggatgtctccgtccaggaacagacggaggtcggactcctgcaccccgagcctttccaggtcctctcggtggaacacggacatctgcgcccacaggccctgcgcggcc

SEQ ID NO: 340658 - DNA, 122 bp, Homo sapiens
gggtggagctccctgtgttcaaggcctgggcagccctccgtggtggggtgggagcactgtcgggagggggcactttgggggaggcagaggtggtcagactccagcaagaaggacctgctgga

SEQ ID NO: 340659 - DNA, 122 bp, Homo sapiens
ttctccagacccggttcccactcagcaccaatgccatcatcctccagatctagggctctccggattccagcccccagccaggtggcttctgggccaggaatagcataaggtgagcagaggga

SEQ ID NO: 340660 - DNA, 122 bp, Homo sapiens
tttgagtctagacctggccagctattatctatgtgaaattggccacaatggttgcttcctcgggatcagattcctcacctttacatggggcatccatcatggaggatcaccccaaagggctt

SEQ ID NO: 340661 - DNA, 122 bp, Homo sapiens
ctgtgtcgatatttctgggaactgttttcaatagtgagtgcttgatgatttaggtgcagccgtgccatctgtaagtcttacaaagggacactgtcacttgggttgccttgcgctgtgatgca

SEQ ID NO: 340662 - DNA, 122 bp, Homo sapiens
tcagtcccgccgccgcccgctgcgtccgcccagcgccagctccgcgtcccgaccggcccgcggcagcctgcgccgcgccatggccacctccccgcagaagtcgccttctgtccccaagtctc

SEQ ID NO: 340663 - DNA, 122 bp, Homo sapiens
ggattcccggtcccggcgcccgctcctctatccgcgcagagccctggcccattgagcatgcgcggcctcgcgaggcctgctgggaaatgtagttctcccacccagcctcgccacgcgggggc

SEQ ID NO: 340664 - DNA, 122 bp, Homo sapiens
gcagcaggctgaccatctccaagttcccgattttggctgcgtggtggaggcaggtggaaccgtcctcctcctgagggagacacgggcaaatgagcctttgggctggcaccccaaacctggtc

SEQ ID NO: 340665 - DNA, 122 bp, Homo sapiens
cgacggagatgctttgagaagtgacaggaatctgagtggctcctcatgagaaccttccgacggaagtgacgtcgttacgacgcgcgacccctgtagactcgtccctccggaaggctcagtgc

SEQ ID NO: 340666 - DNA, 122 bp, Homo sapiens
atctgaaggatgcacaggagttcaggaggccagagtcacagaaagaacatttcagagcaacgtcctgggacagtaactaacataggcctttaaaaatctgaaaaatagccagtctagctgaa

SEQ ID NO: 340667 - DNA, 122 bp, Homo sapiens
gagagaaggaaactttgcactctgttatcttcaacctcttactctaccttcctccctagccgaagtcccagtcctaaagcctaagagaccctcattggaacttgacttctgcataatccgcc

SEQ ID NO: 340668 - DNA, 122 bp, Homo sapiens
aggctgggacctgcagggatgaggtcccgggaggggatgcggcagcccttgagtgctggtcggggaaggagagctgcccgcagtgaggaggcgccgggctgagtggcccagactccttagga

SEQ ID NO: 340669 - DNA, 122 bp, Homo sapiens
ggcaaagccaccaatggtgacagcctgtctacatgtgtgcttagatgagattgtactgtgcgtcattaatctggcagctttgagccccattcatacacataaatagtaatgctgtcagcagc

SEQ ID NO: 340670 - DNA, 122 bp, Homo sapiens
atgatcaacttggcatgggctctgcaaagttagtttggagcgtccctccccaaggggtcccgccaggggtgggggtgggggcgcccacctgcagctggctggagcagccgtactggatgagc

SEQ ID NO: 340671 - DNA, 122 bp, Homo sapiens
agtctgtgttagtttgaatgtgtctcccaaatttcatgtgttgatagtatttgaaggtggcgacttttgggagaaatttaggattagataaggttatcaggattggactcccttgatgggac

SEQ ID NO: 340672 - DNA, 122 bp, Homo sapiens
gctgagttccaccttccactctactgccgaacaaagtgaggcaggaagagggtagggactcgctgaaagctaaacaccaagtcagtgacagatccagggctgtaaagtccgaccgagattga

SEQ ID NO: 340673 - DNA, 122 bp, Homo sapiens
acctgtgtatcgccacaaaacttcaccagtctatttataggcacaaacccactctcgcttcggagccaccaaagctgctgagtagctcagtacttggcgaaaggctcctccctaatctgaaa

SEQ ID NO: 340674 - DNA, 122 bp, Homo sapiens
cgacctggccgctgcaggagttatgttactttgccacttcttcacggaccagtttcagttcgccgatgggaaacccggagaccaaatccttggtaagtaagatgcactttagcttgctgatt

SEQ ID NO: 340675 - DNA, 122 bp, Homo sapiens
gtcacttttgagcagagacttgagctggtgcagacacctgagtgtgcattccaggaaacgcgaacagcaggcgcaagggtccctatgagagaatgtgcttggcgggctcgacgcacatttat

SEQ ID NO: 340676 - DNA, 122 bp, Homo sapiens
tctccaggggaaagggagttggaagcaaacttggtccagctggcgttgaggtctcaacttcggctggactcttaaatcctggggtcatgcccttcacgctaggcaggtggaagtctttactt

SEQ ID NO: 340677 - DNA, 122 bp, Homo sapiens
ctatgagaggaagcagattcagaaatatcaaataagccaactaacttatcaatgacagtccgatttctaacctagtgtgtgttttacatcttccctgtactttgtcctccatgatttggaat

SEQ ID NO: 340678 - DNA, 122 bp, Homo sapiens
tgctaatcgcaagccctaagttgttttacctgtgatacttttgactgactggctataaatcggggttcctacaaccccctccttggtttgactaatttgctagagtgactcacagaactcag

SEQ ID NO: 340679 - DNA, 122 bp, Homo sapiens
ctgcaaggagcctggggaggtaacacatttaagtgggcacaattccagcctgcataaaaccgttctgcctataagaaggaagggtagaatgcataaaggataaacagctagaagtgtctgcc

SEQ ID NO: 340680 - DNA, 122 bp, Homo sapiens
aggctcggcttgcgtctcgttctgcctgggccgagctacagagggattgggccgccgggacgtcacgtggactggggccggataatggcgggcgctgcagaagatgcgcgagctcttttccg

SEQ ID NO: 340681 - DNA, 122 bp, Homo sapiens
ggatgaccgggagacagatcgcttgggtttgaacgcaggctacaccaaagcactacgatgcggcgttgggcgggttacttaactcctgggcctcggttttcccttctgcgtggtatcattgt

SEQ ID NO: 340682 - DNA, 122 bp, Homo sapiens
acatattggttttgacctcaatgactgccctggcttaacctttggagaggccctttagttcggggagggggcttgctgctccaaaccgtagccacgtcacccacaaggactggggaggaaat

SEQ ID NO: 340683 - DNA, 122 bp, Homo sapiens
acgattgctttgccacctgcccagccagcactgcctctacagaagaaacttagagtgcttcgtctaggaaggatccctgggactttgtactgagcatcttggactggaaccctggcaatgag

SEQ ID NO: 340684 - DNA, 122 bp, Homo sapiens
ctcctgccatcatagtgaggactctgactccgtttcttcacacactgaactctcggttcccgcctaccgtcccgggttcgcagctagcattcggcacaggtggtgaagcagtgtgggcccag

SEQ ID NO: 340685 - DNA, 122 bp, Homo sapiens
aaatgccttggccctgcccttgtgacccatggggtccccccgcagccccggacatgagctcgagttgtaattaagaaaaaacaatttccagtcatgagcgagggagatcttctcccccatca

SEQ ID NO: 340686 - DNA, 122 bp, Homo sapiens
ctgccgcgcggggcggggagcggggtcggctcagtggccctgagaccctagctctgctctcggtccgctcgctgtccgctagcccgctgcgatgttgcgcgctgccgcccgcttcgggcccc

SEQ ID NO: 340687 - DNA, 122 bp, Homo sapiens
ttaattacatgaagcttcaataatagttacaaattgctccctgcctatctgggtgacacccggtgacagtgaatttcacagtgctatgagggacagatggtgaagctccatttggcctgtca

SEQ ID NO: 340688 - DNA, 122 bp, Homo sapiens
ctcgcctgccgcttctgccggatcaaggagctggctatcgccgcagccatagctgctcagcgagggcctcaggccccagcctctactgcgccctccggcttgcgctccgccggggcgagggc

SEQ ID NO: 340689 - DNA, 122 bp, Homo sapiens
catccgcagcagccagcgctggaagaaaggaacgcgccggcggccccaggtccccggtcccggcttcccccagtccggggtcccctcgtcccggcccccggccacactgacccgaaagaggc

SEQ ID NO: 340690 - DNA, 122 bp, Homo sapiens
gcgcggggaccccggctggggccggaccctgcggccggcgaccccccaggacccgggacgcgagagtccccaggtgattcctggaagcccggaggaagggaaggagcccagtacgcacctcc

SEQ ID NO: 340691 - DNA, 122 bp, Homo sapiens
ggacagagagaagcagaccactgcagtgccaagtccttgcgtaattatgcatttgaggtacgttttctctcttgcagggaacagcgtgtgggtgtgtatatttgtgttttggaaagtacaca

SEQ ID NO: 340692 - DNA, 122 bp, Homo sapiens
tgaaggcagtgcggcgagtttgtcttagccttctctccaagtccagcaagtttattgctacgcttgttccggccttctgcttcaaaggaaacagaaccaaaacaagcacctcttcgctccgc

SEQ ID NO: 340693 - DNA, 122 bp, Homo sapiens
agcagcgcggcgttcaggtgcggcgtcggcgggcagggcgattctagcggagaggatggccggccggaagaaaggcgggaagacatgcatcgtctctccgggggccatccaccgcggctgag

SEQ ID NO: 340694 - DNA, 122 bp, Homo sapiens
cttgtcacctgccctaggagacgcagccgccggaccctgcccagggcacccacgcctcggcgaccaccatgtcccagaccaaaatgctgaaggtccgcgtgaccctcttctgcatcctggca

SEQ ID NO: 340695 - DNA, 122 bp, Homo sapiens
ggtcaccttctcctgccacctctgcagtgccctgcactccccgcctctccactgtttcatcgggtggctgtgctttcctctgcagtgctgagtctacacggagccatccctgctgttatcac

SEQ ID NO: 340696 - DNA, 122 bp, Homo sapiens
acttctgtgtcctgctttattgaccagccgagcatcagtgacataaatggggggcctttccgttccaaagcagatattctgggctatctgacctaactcagaggaggcagcctcaccatccc

SEQ ID NO: 340697 - DNA, 122 bp, Homo sapiens
gaatcccactcagagcccgggcctgtaggggcggggcgtcccgggcacccgggattggggcgtctcccgtcgtgcaccggggcaccggcgactcacccggaaggagaagccgtgatctggct

SEQ ID NO: 340698 - DNA, 122 bp, Homo sapiens
cataacatcctgtgtgtcctcaagttgggtcaagcaatattatgacaagtgccttatctacgtctttgcattttgtcctctccaaagctcattgaggaaatacactttttgtccaccatgag

SEQ ID NO: 340699 - DNA, 122 bp, Homo sapiens
gctgtggcttcctcctacgcgttcggtcactcctgcacatgtccgcagtagtggtgctctcggggaccccctcgccaccccacaataccgctcaccacatggccaaacaggttcgtcttttt

SEQ ID NO: 340700 - DNA, 122 bp, Homo sapiens
gcagggcttcaaaaaacagctgctccttcttgatagatgcagggaggaaacaggaaagaccgggggccatgtggtgttatttgtagcacttgaatagcttggctcttagagtcccaaggcct

SEQ ID NO: 340701 - DNA, 122 bp, Homo sapiens
gtttggaggcggggaccgtccagcgtcagcgcggggcctgggggcggtggcttgagggctcgaagccgggcggctgggcgcccagagccccgtctgggcccttcgctctttctcctcccccc

SEQ ID NO: 340702 - DNA, 122 bp, Homo sapiens
ctgacggactctgctgacaggtgtggtccttttccccaaagacagggttccatccgtgggcgttccgccgcctccgaaacttcccccggacgttcaggctcccccctcttttttgggcccca

SEQ ID NO: 340703 - DNA, 122 bp, Homo sapiens
gaagacacacttgcaagctggcggacaggggaagggctgggcgcgcagaagcccgagcaccgcgcacagtagagtccccctcagcatgtctgaaaaagcaaccgtgggagtgtggtcaacac

SEQ ID NO: 340704 - DNA, 122 bp, Homo sapiens
ttcaaagaaggcaacctggactgacctctaaatgcccatcttctgtgttactgagcaccacggccttcctggaagaatgcaaatggccagcacctctgccacagcccatggaacttgagaca

SEQ ID NO: 340705 - DNA, 122 bp, Homo sapiens
acatgacaaatcaccagacctgggaagaagctaaagagccagagggaaaaagccagaagtcgactacctgggaggagggatagacaagaaaccaaactaaaggaaactaaggtaggtgctga

SEQ ID NO: 340706 - DNA, 122 bp, Homo sapiens
gcggcgggaggagggagctgtgaagccgcaggcagggggttaggctgcgggctgctgagacgccgagctgtttctcagaagtgcagctgcccctcccctcacacccccctcactcccaccgc

SEQ ID NO: 340707 - DNA, 122 bp, Homo sapiens
aaggaccatgcacgcttcaaccctatggaaacacgaacggcccagggaaccgccccttcgcgctgcttgacgggatctggagtcctcccgctccgccccgccaggcgctcagggaccgcccg

SEQ ID NO: 340708 - DNA, 122 bp, Homo sapiens
gaccaagggtgagagccaccgcctccgcaatcccccgcccctcggcaccgtcgctcagcgcgctcgccggctccctattggccgaggcactcgccaatcctggtgaagcggccccgtgagtt

SEQ ID NO: 340709 - DNA, 122 bp, Homo sapiens
agtcctccttaccatataagtggtcttctcaagttctgtaatcttccacgaatcctttctcggtgctctcctcccactcccactggtgatgccctgttcttctgagcttttgtatgtatcac

SEQ ID NO: 340710 - DNA, 122 bp, Homo sapiens
aaaatctgtattttcctcaagtctcttggccacttactaacaatacttttacagaaaacacggtgcagctggtggtctactttatcaagtttcattttagaaaacatcatagaaattaaggt

SEQ ID NO: 340711 - DNA, 122 bp, Homo sapiens
tcggcgcctccgccctcgcggggagagattggctgcggccgcgggacggggtagtgagcgcgtcacttcctgccgctgccaggcgcgtcctcccgcgcgctatgacggccagcgcacagccg

SEQ ID NO: 340712 - DNA, 122 bp, Homo sapiens
attaggagagcccggagccggatccactctcagcctcaggaagcagcagcctccgctccgcggcgggtgtgctcggcagtcacagacccactcaggacacctcccgttgccgacgggctaga

SEQ ID NO: 340713 - DNA, 122 bp, Homo sapiens
gcgtttcatttattttcacaaacctgtggttgcaaagccagcgtgagacgcaggtgaggccgtcacacccctcgtcctggcggaatccacgcctccttgggcccctgctgccaggaccccac

SEQ ID NO: 340714 - DNA, 122 bp, Homo sapiens
agttgcaagctagtctgatggtagtggatccccagaacttattaaccttagtgtcaccaacgttggtatacaaccccccacaactaaatttgactggcttttaaaaaattatagctgtggcc

SEQ ID NO: 340715 - DNA, 122 bp, Homo sapiens
ggtcccagattcctgctctgggaggggccctggaatacaggcttctcccagtgcccgaaacgcccccttttcatcccttttggaactggcttccgtggggattctccgggtcccggtgccaa

SEQ ID NO: 340716 - DNA, 122 bp, Homo sapiens
tttgacctgtgaattaggcccgtaaaagacttcgtttcttgagaaaataagattggagtccgtcgtaggaaactggaaccgaattcagagaaagcgattcaccgaaaaggaaatgaccaatt

SEQ ID NO: 340717 - DNA, 122 bp, Homo sapiens
gactgctacattgatggatgttattggctaatccactgcatggtttgatggccaccatctcggttggccctttgggtgtgatggtgatagcatttcagtgacatcttctttggcccccccca

SEQ ID NO: 340718 - DNA, 122 bp, Homo sapiens
gactggagggaccgcggctgagacaggctgctgcaccaggcggccctggaccgccgcttccgcccctaagccgccctcccagcccaggtgacaggtcgccctacccagggagcatcgccctc

SEQ ID NO: 340719 - DNA, 122 bp, Homo sapiens
ctgagctctagtccagttgctgtatcagctgttgtacaaaaataaccaagaactaaatctcggcaaaaagccacatttcagaggtgaaagagcaagaggagtcagtgagacaaatggaaaac

SEQ ID NO: 340720 - DNA, 122 bp, Homo sapiens
aagactaagctatgctacagtggcttaggagacacatgacaacttaacaatagaccagcacgctggcaggagaagtcatttattttaccttgtattctctttacgtgatagtacacagaaag

SEQ ID NO: 340721 - DNA, 122 bp, Homo sapiens
agcaccagcacttccagcgcttcacttaacggcataaagcaaaacaggaccttggcacaccgtcagctcgaactcaacactggcagccaccgtctcacccctgcggaggagcgctcccgtct

SEQ ID NO: 340722 - DNA, 122 bp, Homo sapiens
cgatctgcctcctcttggcgcagccagcactcgagggtcaaaatggcattccccgtggcccgagccttgtctaacccggccgtgccgccacccgcactctcgcagagagcagggtcgcctgg

SEQ ID NO: 340723 - DNA, 122 bp, Homo sapiens
ggaggctgcggggtggggacccccatgctggctggcaaggggctctgtgaggcccagagtcgctggggacacggggcgcacgtgtgttttaggtttcgttgggttttttctttttccttttt

SEQ ID NO: 340724 - DNA, 122 bp, Homo sapiens
gaacctggatccttgcggctccagcccccgataggaagagagcccaccaaacttcggctccgcagcagagatacagccaaggactccagggcagtcgcgggtaaagccaccaccactctctg

SEQ ID NO: 340725 - DNA, 122 bp, Homo sapiens
gttcacagttcgcccgcgagtcgctgtcaaccctccaggcgcggcccgggggcgctcgcgcgcgctgccaacggagccatccctgacgcgttctcagtctacggcagaaaacgccagtcggc

SEQ ID NO: 340726 - DNA, 122 bp, Homo sapiens
tcagaagccagacaatagacctgtgattttgttgcagctgtaaactctttcgtggctatacgatgagtcagtagttttgtattcataatcattgtcctttaagatgctacaggttaattcaa

SEQ ID NO: 340727 - DNA, 122 bp, Homo sapiens
gggtctggtatctagcggcggtctgttagccttttaggggggattcacggacacctctagcgccctgtagggttgccatggtgacggagcgcttaagggactggcaacggggattcccagag

SEQ ID NO: 340728 - DNA, 122 bp, Homo sapiens
gataagaataatcgataaagcaaaataaaaacaccttctccaagattttgtaactgcaagcgaacgcatggtggcgctgttgactaagaaggcgaattaaaccacaggcattgtgcatgctc

SEQ ID NO: 340729 - DNA, 122 bp, Homo sapiens
cagagcagcgtggggagtccgccattaaggactcaacgctgagcctgcagagctggaggccgccctatagcggaccaaacaggagagggcgccgtagcttcaccggaacctggagctgatga

SEQ ID NO: 340730 - DNA, 122 bp, Homo sapiens
cagctgagagcgaccagcctcggcggcacctttcctctttctggcttttttcaggtcatccgcgcacccctgcgtggcaagggcggcctggaccccaccaaatccctccgcagctgccgggg

SEQ ID NO: 340731 - DNA, 122 bp, Homo sapiens
ctgctgacgtgcagtcagaatgaactaattcacaccccagtctaggcatctgggtcacttcgtgcacatgctgtgaaaaggccgctccttccctttcttcagccactactcggcactactca

SEQ ID NO: 340732 - DNA, 122 bp, Homo sapiens
tctctaaaaatgtttttttaattagctgggcatggtagcatgtgtctgaagcctcagctacgccggaggctaaggcaggaggattgcttgaatctaggagttcgaggttatagtcagctatg

SEQ ID NO: 340733 - DNA, 122 bp, Homo sapiens
ggctgcagtcattggcctctgacctcccagctcccggacagtggccattatacctgtgcacgctgagggaatgggcaaatgctgccccgtgctccatgcatcttccaggtccatggcaagtc

SEQ ID NO: 340734 - DNA, 122 bp, Homo sapiens
gagccacgtgctcataagatatccaatcacaatcacatcctgtggcggcggattggggggcgtggactagaggttgatcgggttgggcacacagcatcacgtgacacgaaaaggtaaataag

SEQ ID NO: 340735 - DNA, 122 bp, Homo sapiens
aacatcccagccccatccccttcctgccctcctcagtagccatggagatggcaaggaaaccgagagaagaatgtgtgactctagggttctctgcctctcgtgtccctcaccagaatgcaaat

SEQ ID NO: 340736 - DNA, 122 bp, Homo sapiens
ctaggggccgctctgcctcccgccccctagtggttgtggccgctctgtcaccacggctcccggggcctctgtcggctccactttggttgagacgtctccacagcccaacaacggcggcgatc

SEQ ID NO: 340737 - DNA, 122 bp, Homo sapiens
tgtgcttcttcgaaatctgattcctagatttcgactgcccttacggatcggctgagataacggacctgcgtttttggcggccttggtacagaagacggcaaaggtattggggatcacacgga

SEQ ID NO: 340738 - DNA, 122 bp, Homo sapiens
gcaatcctctgtccttcagcagcaccagaaacagtggaggatccgtgtgggtgttcacagcgttgtgaatagatctagtgggaggcaagagtccaaggctcaggcttcctgcacgtaccacc

SEQ ID NO: 340739 - DNA, 122 bp, Homo sapiens
cgtgaggtgaggtgtgagttgccctggagggtggcgggttttccaggcgcatgcatttgccgcggacgggacgagaggatgaagccgttctgggcgccggaactcgcttgtgggaaccgccc

SEQ ID NO: 340740 - DNA, 122 bp, Homo sapiens
ctcctggcttcaggcgatccgcccgcccgcctcggcctcccaaagtgttgagattgcaggcgtgagccaccgtgagggcctcactgattatctaaggctgtttagattatagatttttagat

SEQ ID NO: 340741 - DNA, 122 bp, Homo sapiens
ccaggccactggctggtctcctcctcgcccgggggggctggagacagctggacgtgtgggcgcgtgggccgaggggggatgggtacccgaggaggcacctggggcttgtcgtcaccccccgg

SEQ ID NO: 340742 - DNA, 122 bp, Homo sapiens
tatgatacgtcctccagccccgctcccgacgtgaggggcggggcttgcctggaggcggggcgcagggatccggaaacacctgatcatctataggtttagtgcctaatgggtgttgttcctgg

SEQ ID NO: 340743 - DNA, 122 bp, Homo sapiens
gctgttcggccacccgggcctggacatggagctgggccccagccagggccaggagaccaacgaggtgtgcgagcaggccggcggcggggcctgcgaggggccccccaggggcaagggcttcc

SEQ ID NO: 340744 - DNA, 122 bp, Homo sapiens
ggctggcttgagccatagggtttctatatctgtctaaggtggaacatcacactcaccttacgtggttgtgatgactgagtgataagtgttaagcatgtacatactgatcactttataatagt

SEQ ID NO: 340745 - DNA, 122 bp, Homo sapiens
agtaaaaattttatgagaccaacctgaaaggaccagcttggccacctgctgtttatagtgcggtttccttatggctgtctttctctacaggtggactatcatctccgaacactcctaagaaa

SEQ ID NO: 340746 - DNA, 122 bp, Homo sapiens
aaagcaggaagtacctgctggcaggaattctcacccctgccctccagacccagtggtgcacgcatcactaactgtcaacccatgattccttaaaacagaatactaagggaataacaagcagt

SEQ ID NO: 340747 - DNA, 122 bp, Homo sapiens
cgcgcgcctgcacagctctgcggctctgctccggccccacaggcccatcttaaagtgtttcgtgctctaacttaccaaacacgtggcagccggcagaacgaaaaggaaaataaatgaactgc

SEQ ID NO: 340748 - DNA, 122 bp, Homo sapiens
caactgcccgacgaactaaatccttaaccaaatccttccccccagcaagcatgaggggagcgctcggaaaaaaagctccttccagctttaagctgtgtggccgcaggcgactcgcggaacct

SEQ ID NO: 340749 - DNA, 122 bp, Homo sapiens
acctgtattaatagttagggcttgcatacatacagtaaagtttcaagagtgaaacttcatcgactgaactctttatgaagtgactgcctgactctacacgcgatgttttaggagttgaattt

SEQ ID NO: 340750 - DNA, 122 bp, Homo sapiens
actcagcatcacactcctcagctattgcaatatactttaacaggctgcttcatgcaacaccgcagctctttcgcctaccattagatttacagttcccataaagtaaatttctaagaccttag

SEQ ID NO: 340751 - DNA, 122 bp, Homo sapiens
ccgttagtattttacatgatatctacatttatgattatccctgttttacaggcatagaaacggaggctaggggaatttaactgacttgttcaaagacagatagttataagttattatttatg

SEQ ID NO: 340752 - DNA, 122 bp, Homo sapiens
tgaatatcttcgccgattacatcagtgcttatgtttgtgacttcagagacactgagaaggcgcggctctttccctcaaccccattcgccttcctttcggcggcgttgtcttgaaccaacctg

SEQ ID NO: 340753 - DNA, 122 bp, Homo sapiens
ctgctacctcccctctgccttcagccagcacaaggtcttcgtcaccccccaggcacccctcgaggccatccaagcctacctggcaggtcactaccgggtcccgaagcagaccctgtcggcgg

SEQ ID NO: 340754 - DNA, 122 bp, Homo sapiens
gactttattttcataacagcatgaagtgccgtggaactggaataggcgtgtcctctccctcgaccctccccctccttgtccctctgctcacccctcgctcgttccctccctccggcgagggc

SEQ ID NO: 340755 - DNA, 122 bp, Homo sapiens
cccccctgtgatattgtacctaatatccagacggagggagaatgatattactcccaatatcgcaggggctgtacacaccctgtgatattgttcgtaatatccacagcgttggtggggagggg

SEQ ID NO: 340756 - DNA, 122 bp, Homo sapiens
tttgctgcaaactcaaggtacaaacactcattataggacaaacagaggaagttattccatcgtaaaactgtcagtcgtcaaaacagcccattcagcccattacaaaggccttatctgctgcc

SEQ ID NO: 340757 - DNA, 122 bp, Homo sapiens
ttccaggcgcattgtgtactggtccgaacttgagctcacaatttgggattagagcaaatccgagtatttttctgcttgcctgcccgctcccgggcgcccagagcctgctgggtaactgccta

SEQ ID NO: 340758 - DNA, 122 bp, Homo sapiens
agttgccagacaaagagaactctttgtgtagacccatttatttacaatgcaaaagctctccgaataaatattaaaaaagcttatcagctgagcaaatatgtattcacttaatacattatgtt

SEQ ID NO: 340759 - DNA, 122 bp, Homo sapiens
cgcctcccagcggcgctccactctcggattggctgattgatccgagtcagtttttttcctcgccagaaagcggttcgacaattggtccttcttttggcccctcctgcgatgcccgcggattg

SEQ ID NO: 340760 - DNA, 122 bp, Homo sapiens
gaaggaaggaaagataaaatggtaaagggctcacacatgtcttaacaaaaatgtccagttcggctcatttggctatacttcatggctgctgctctgccctggcatcctcggataagctcgct

SEQ ID NO: 340761 - DNA, 122 bp, Homo sapiens
ctcactgattccggctggcgcccttcgtctgtagccgcgtcccctcagactggttcagtccggggtcttctgacttggaagctcgtgctgatttcctaagtcagcccctcctgtcctcttgg

SEQ ID NO: 340762 - DNA, 122 bp, Homo sapiens
aagaaggacccgacgcaggttgggagaagtgaaactcaggggagtggagaatccccaacgcggcgcctccccaatgcagacacggcccttggagcctgagaccctgagagccccgcccggga

SEQ ID NO: 340763 - DNA, 122 bp, Homo sapiens
ccgcccggtaagctgcgcccgccacgctccgcacacaccgggccgcagcccgcggggtcgcgttcgctgcaccccggcctgcagtccccgctgctcccgccgccgcctctgacggggacccg

SEQ ID NO: 340764 - DNA, 122 bp, Homo sapiens
taacgggcacttgccccttctcttgttttcaagacactcgttgccagtttcctggacaagcgaacaaaccctgaataagcaatcggactgattaattagtgtttgttttgttactttgtttt

SEQ ID NO: 340765 - DNA, 122 bp, Homo sapiens
cttgcgcacgggggcgggccaaaccggggatgcattttgggagttgtagtttttaggtaccgggaggaatcggcttgaaaggcgggaagggaggagtcacagaaactacgacttccgtcatg

SEQ ID NO: 340766 - DNA, 122 bp, Homo sapiens
atgagaaattactgtaaaatacatcaagctcctaaataatgtaaatgtgttcttagtgatcggtttatggttgcatccacacttgggttttttggccacaaaatcacaattttattctcctg

SEQ ID NO: 340767 - DNA, 122 bp, Homo sapiens
tgaggcagtcccctgtgcgtccccctcgggccccaaggcgggggtgggtacccgcacggccgcaggaggctcacctgtgctttcatttcaggcctggagaattctgcctgcaaagatagcag

SEQ ID NO: 340768 - DNA, 122 bp, Homo sapiens
tttttattcttcatttgtttacttcttcatgcgctcttcggtctttacaaaatgtgctcgcgatatccttccgcaagtgtcagtctcaggcactcaccacccgccttgaagccatttctata

SEQ ID NO: 340769 - DNA, 122 bp, Homo sapiens
tcagcctcagaggagggagtggagcggagctcgtggttaagcagtgtctgcttctgcccccgcgcctggtcacctgcctccttcctcactcgcggagcaggagtgatcacggtgcctgcgtg

SEQ ID NO: 340770 - DNA, 122 bp, Homo sapiens
aagttctgagaagcagcaaatgcctcctgcttttcatgcagcctgtttgcctgtgtgttccgtggctccttgtgtctaaggacagcacgagtgactcattagcagcacggcatgtgcttggg

SEQ ID NO: 340771 - DNA, 122 bp, Homo sapiens
aggacccggttccccgtctatgtcccaaagtccaccccgcctagctccgcgcccaaataccggctccccatactctctgtctggtgcaggcatgggcccggcacccccaaactccggccccc

SEQ ID NO: 340772 - DNA, 122 bp, Homo sapiens
gccgccgccgccctgctcagcttcctcctccgctgccgctgccaccgctgccggcctctccgcgcatccacaaccgcactttcgccacggccgtcgcagcgcactcctcccccggccgccct

SEQ ID NO: 340773 - DNA, 122 bp, Homo sapiens
tccttcccggaatttgtagtgacagtggagtgacctccattgcgttccctgcctctaacacgctctttaggatgccgagtcatttgactgcagtgttaaacattgcaaagcgcaagtcatgt

SEQ ID NO: 340774 - DNA, 122 bp, Homo sapiens
ggaggagagggtaaggaaatgaacaagcaaatactctggaagccagccaagtcccagatgcgaactcctggtgagtctgtcaatccacagattgtgccgtttcatttgcatttctatttctt

SEQ ID NO: 340775 - DNA, 122 bp, Homo sapiens
aagtcctaaccgactccagtgaccaatccaggaggggccgggcgccagggggccacaccccgcaaaggcagctctctgggatcccggaccccagacctcgatctcaggagacagccctcagc

SEQ ID NO: 340776 - DNA, 122 bp, Homo sapiens
aagtcccagatcatggcccagggcatgcggggcaggtcgcacaggtagcaagattgtctccgggacgaggacacctgcgccgccgacatgatgcctgccctggggaaggtaggcccccgccc

SEQ ID NO: 340777 - DNA, 122 bp, Homo sapiens
gagttagggtgccatccacttttcccctctatggtcttagattcttttttttttatagcccgcatgcttctttggaaagtgaggtaattgtgtcaaataggatagccttgagtggggcccag

SEQ ID NO: 340778 - DNA, 122 bp, Homo sapiens
cctggggcacacgtcccggggcttcttggcatgctctcctgagggtgagcctgccgcccacggagaataaaatcccacttgagtgcctgtgtgggattttgagtccggactgaaacgagatc

SEQ ID NO: 340779 - DNA, 122 bp, Homo sapiens
tcagccagcagaagctggcccacaacgcaaaaggaccccgtgctgaggagtgggttttcccggcttggctttgctgtttggacctgagtgggggtgtcttcctctggccccacaggctgtga

SEQ ID NO: 340780 - DNA, 122 bp, Homo sapiens
tctcccacagttcccaaggcccagtgcacaaggggagggaaggctgcaggcctggctccccggggaactcctgtcctgaactcacactggtgcggcctccagggcccagaggtatggggccc

SEQ ID NO: 340781 - DNA, 122 bp, Homo sapiens
ttttttttagagatggcgtctcactctgtcactcaagctggagtgcagtggtgccatcatcgctcaagggatcctttgatctcagctggcactacaggcacaaacaaccacacccagctatt

SEQ ID NO: 340782 - DNA, 122 bp, Homo sapiens
ctctcttgagaagctgtagggaaagatacctcttggcttcaacacagacttgctcccttccgacttgcccgggatcactctggattactccaactgctgacggaggaccacccaccaaaaca

SEQ ID NO: 340783 - DNA, 122 bp, Homo sapiens
ggacccggcctggggcctgccttcggtggtgggcacagtggccaggatcgggcctggctccggctggcccggcacacgagcacggcgacagtggcaagactgggagggccggcgctgcctcc

SEQ ID NO: 340784 - DNA, 122 bp, Homo sapiens
tgcatgcagccagcagttagagtgcgggactggacagcgccggccggatgcttctgccttcgctcattgacggttcttgctggcttccgaaggcatttagatctgacactgtggatgaaaag

SEQ ID NO: 340785 - DNA, 122 bp, Homo sapiens
gcggggtgaggttggaggcagccgaggagccgcacagggcagcgcctgccgccgccgccgcgcccatcccccactccgacggccacgagttcgggccgcgacgtccccatggcaacacgcgg

SEQ ID NO: 340786 - DNA, 122 bp, Homo sapiens
cctaaactatctaggaatggagtccagtgccagaaagaaatacacaaggtcgttgggtgccgctgtcactgcagggcgccatcggctccctgggccttacatatctctcttgtgagaatcag

SEQ ID NO: 340787 - DNA, 122 bp, Homo sapiens
ttcaggccccgaaggcgatgtattgattggggaggcccagggttggggattccccatctccgcagtttctcttctccctctcccaacttatgtagggtccttcttcctggacactcaggatg

SEQ ID NO: 340788 - DNA, 122 bp, Homo sapiens
atgacaaccttcaatgttcaaaagccccagggactggcctgaagtcaggacatatgtcaccgaaaatgccaatgggaatcacttcagaccagagcttcctgtttaatgcaccagcagaggtt

SEQ ID NO: 340789 - DNA, 122 bp, Homo sapiens
actcacggcggcgcactgctttgaaacgtgagtgggggtgcgaacggaggggtgcggggacgggcaggaacagggctggagggagtgccaccgaactttacctctggtctgatgccagactt

SEQ ID NO: 340790 - DNA, 122 bp, Homo sapiens
gagactcagatgtgcgagggctaccccagggcatccaggtgtgatgtgggggtcccgagacgcgtcgccaagtcaagataccccggagctcagttcgttcctcagcctgagcggtgcccacg

SEQ ID NO: 340791 - DNA, 122 bp, Homo sapiens
gcgcagctgcgcgctcactcgtgtggactggaaacgctccgagccggttattttaaaaaccgggaaataaggcgggttccctcttcgcccgccacttcccaccaagtaggctgtgcggccct

SEQ ID NO: 340792 - DNA, 122 bp, Homo sapiens
cggcatccctggggagagatggagcagggttagaggcccctaactcaggaatctgagagtcgaaggagaccttggagctcatcagtttgtacctggggatgagggatgagagggagggatac

SEQ ID NO: 340793 - DNA, 122 bp, Homo sapiens
tccgcccacgcagtcccgccccctcccccagccacgcccctcgccccgccgcgcaggccccgccccgtcccgccaggctctcggttctgccgacgcaggtcccgcccctctcgtagcctcgc

SEQ ID NO: 340794 - DNA, 122 bp, Homo sapiens
cgtccccgtacattacagcctggccccaccttctacccgcccaccctggtccactctcctcgcacctcggctagacactgtggctcctcagcctggcgctggaactctgtgatgactgtctt

SEQ ID NO: 340795 - DNA, 122 bp, Homo sapiens
ggctgccaggcagtccaggtgcctaagtgcagcagtgggtttgcaggagcaggctccatccgcagaggctcggtgggaccccatgtgctgtgcaacagcgacccctggtggataagaacacc

SEQ ID NO: 340796 - DNA, 122 bp, Homo sapiens
tcttatactttatttttagagatgggatcttgctctgttgaccaggttggagtgcagtggcgcagtcatatttcacgacaccttcaaactcctgggcacaagcaatcgtcccacctcagctt

SEQ ID NO: 340797 - DNA, 122 bp, Homo sapiens
gtccctaaggccttattccatgttgaatctgacgctctcaatgtccaggctcggctgcggcgtggggaccgaaaaggggcggggtgggtcggacggcagtttaattacgtccccgggaactg

SEQ ID NO: 340798 - DNA, 122 bp, Homo sapiens
acaattcctggagttagatctgagttcaagtcctgtctctactggttagagttgtacctccgtgggcaaatcatgccacctctctgagccctgttgtctcacagaaaggaacaaggcactgg

SEQ ID NO: 340799 - DNA, 122 bp, Homo sapiens
cgacccgagatccggaacaatttctgcttcaacacaattgtccacggagggcaccagttccgtcccaccggcggaagcgagatctgcctagctactagacctgctgcctagctgtcattcgg

SEQ ID NO: 340800 - DNA, 122 bp, Homo sapiens
aatgtgggaatggcaacccccaagaatgaggaccactatctccatcaatatcacatcatacggagatcatacaagatgctcccaaccaaattcctgcctgtacttaatttattattccattg

SEQ ID NO: 340801 - DNA, 122 bp, Homo sapiens
tacgtactcagtcaccagcggaaccctctccaccaggctccgcgtcgaggccctacggggcgtcaatacgcacgcgtactttgtgtcccaggtagctcgtctcttagccatgtacgcctctg

SEQ ID NO: 340802 - DNA, 122 bp, Homo sapiens
atctctgaccagaggccaaagaaaagggacacacaaggggcttggttcttacccagccgccgttctcctggatccaaggctctaggtggtcattcaggtaagtggccatccaagctgcgatc

SEQ ID NO: 340803 - DNA, 122 bp, Homo sapiens
ggccaaccccagcagagcttggaaactgaggcccagagcaggagtccaggctcatagagccggcctggcagaggaggggtgggggagttgcgtccccaccattcccactggggcatacagcg

SEQ ID NO: 340804 - DNA, 122 bp, Homo sapiens
ggttttctcacctggcttcctgagtcaggccaagtgcatacttcacacattggtcagggccgcctcacacttcactatggtggttctatccagtttggtcagataggcattaggggaagatg

SEQ ID NO: 340805 - DNA, 122 bp, Homo sapiens
agcctcgttacgatgaaacagtaacttcctactacctagaaatcgcagccagggccagaccggtgtttgtcctaagtcggaacttgattgggctgagaaatcacattgtgactattccacga

SEQ ID NO: 340806 - DNA, 122 bp, Homo sapiens
ctgcaggccctgcacgcctctgcagctgccgggccgtgtccgggacgtctgaactgaggccgaccaatggtcacagcatgaaaaataaatgcaatggaaggtctttctgtcttttcttttcc

SEQ ID NO: 340807 - DNA, 122 bp, Homo sapiens
gtgccaggaactgggaatccccaacgcgggacaacctgccgggcgactcaaccagtgccacggagcccttggaaacccgcggcagctgcgctactccatttccaggcgcccagcgcggcggc

SEQ ID NO: 340808 - DNA, 122 bp, Homo sapiens
ggacatcccctggaattagacatcaatgtgcctcagggaccctgggccagcaaatcactccgcccctacctttgagtctccctagaataagctgagaggtaggaaacagctgaggtagcttg

SEQ ID NO: 340809 - DNA, 122 bp, Homo sapiens
tcctgtgaagtctcagctctgcagtgaggctcaggcagcccaatgacgaaaggcctttggcgagccttgctgataaaatgagcagggatattcacagaggtgccccctcactgtctgccaaa

SEQ ID NO: 340810 - DNA, 122 bp, Homo sapiens
ttagtttctttctctgtaaaatgaggtgattaaactaaataggtctttgaggtcccatcacgctgtctggtatttgactatctctgggattgctaaaaaggcaggaacagtgtgctcttatt

SEQ ID NO: 340811 - DNA, 122 bp, Homo sapiens
tactggtggaggagaggaacaagtgaagatgggagattcctgctctgctcaaatcccgtccgtggctccccagtgccatggagtaatgttcatattgagcacctgggtattcagcaccgtgt

SEQ ID NO: 340812 - DNA, 122 bp, Homo sapiens
tgaggcccaaagagctctgaaaactcatccgcgggttcctgcttcaggaagctcgccttccggcaggcttcaagttgcaagctgccctcatggctgtccgtcgatgcagggccaggccgggc

SEQ ID NO: 340813 - DNA, 122 bp, Homo sapiens
gaggggcaggaggaaggggtgcggtcgcgatccggacccggagccagcgcggagcacctgcgcccgcggctgacaccttcgctcgcagtttgttcgcagtttactcgcacaccagtttcccc

SEQ ID NO: 340814 - DNA, 122 bp, Homo sapiens
tggagagggcgccgtcgcttatttcattcattcagaagccgctgcagaggctgggggtggcgaggctgtggaccccacagaacagcctttagaagggccactttgttgttcagagaacgtac

SEQ ID NO: 340815 - DNA, 122 bp, Homo sapiens
tgcctcagagggacctaggagatttgcctcaaagttgcagttgcacaaaatacttgcgggcggatcttaatggactggggtgggagttagtaaagcctttgtctggagggaacgtaatgaac

SEQ ID NO: 340816 - DNA, 122 bp, Homo sapiens
acaaagaagttcgttgtgacacggtgatttggctgaacatttaaatgacttgttaaagaacgaacttacttcttagagtcacacaaagcacatgaaaaatttgtctaagggcccatgtcatt

SEQ ID NO: 340817 - DNA, 122 bp, Homo sapiens
acgcaatcatatgcaagcctatgtaaccatatgtgtaaaccagcttccaagcagcctccccgcagctctccagctacagccccagggacaaggccacccacttctccagactcccttattcc

SEQ ID NO: 340818 - DNA, 122 bp, Homo sapiens
tgctcagtacctgggtgaccggatcatttgtaccccaaacctgagctcccacaatatacccggcacaagtaccaaatctaaaataaaataaaagttgaaaaaaaaaaaaaagacttaaacta

SEQ ID NO: 340819 - DNA, 122 bp, Homo sapiens
ttcttaattcttaagagacaccatgcctggctacaagttcttaattcttaagagacatggcgataattcatgctgaagaggaaatctggaaacctgaaagatgcgacattgcttttaccaac

SEQ ID NO: 340820 - DNA, 122 bp, Homo sapiens
agaagacacggtgattctatctcccttgacggacagaatgatcgaagacacagggaatggcgtgtgccaccctttggcaggtctgcttgaagtcagggataagggatgcttcctgtgacaac

SEQ ID NO: 340821 - DNA, 122 bp, Homo sapiens
tgaagatggtgttgctaacaatgatcgcccgagtggcggacgggctcccgctggccgcctcgatgcaggaggacgaacaggtgagctgcttactcacgacccgcgaccccaagtctctgtca

SEQ ID NO: 340822 - DNA, 122 bp, Homo sapiens
tgggcttacttcgggatctagacttcggcctccgtccttgcaagggcccagatttgattccggttcgtcgaggcggtctgtagcagataaagggcccattaaaaagctggaccctgtgggcc

SEQ ID NO: 340823 - DNA, 122 bp, Homo sapiens
gtgtgattctaaggctcactggcggcctctgggcttccccttgtcctgtctatggaatgacgggaggtcggtttcgattcctccacgattctgtgaagggctgagctttcctggggaggtga

SEQ ID NO: 340824 - DNA, 122 bp, Homo sapiens
ctccagcgctgccccaagtgcccggccgccccctcggacctccttttccaggggcttttccgtgttccccgtattcacacgacttctctgcctgtggatgtctcatgaccctctagagcagc

SEQ ID NO: 340825 - DNA, 122 bp, Homo sapiens
gactctgtccgtgtgtgccctcaggcttcagtccctgcggtatcgcccatgcttagaggccgcccagtgctcagtaagtgctggcagaatcgggtaccgttttctagaaaatgttgtaattc

SEQ ID NO: 340826 - DNA, 122 bp, Homo sapiens
acactcctcagcccttgggtcgtcgatgggactgggcgccgtggaacagggggtggcgctcgtcggggaggctcgggcggcacaggagcccatggagggggtgggaggctcaggcatggcgg

SEQ ID NO: 340827 - DNA, 122 bp, Homo sapiens
cagcgcggggcccgacgcttcaccgccagctccctggtcggcgtcgggactcatttctgacgacatagtacttttagactgatgaggaatgatgtctgcttccgtccgtcaaatgcagccac

SEQ ID NO: 340828 - DNA, 122 bp, Homo sapiens
cttgagtgtgcatcagaattccctagagggcttgttaaaacccagaatgcaggccaggcacggtggctcatgcctgtaataccagcactttgggaggctgaggcgggcggatcatctgaggt

SEQ ID NO: 340829 - DNA, 122 bp, Homo sapiens
agacgcgacctcgcggggctgaggctctgtcccttattggctgggtcagggggcgtggcgcggcttgaccaatcgcgggcggcgcgcttaggcacgtgtgtggacaggcctgagaatcagag

SEQ ID NO: 340830 - DNA, 122 bp, Homo sapiens
cctggggcttgtctaactcgagtccgacttttaacagcaaaacagtaggagtccgatacacgcacacagtgggtacacagtagcgatctgttttctttatatcttcgccctttaggaagaga

SEQ ID NO: 340831 - DNA, 122 bp, Homo sapiens
caattgacattccagctggggggaccattgaagatcaagtctggcaagtctactagctggcgcctgggtgagctgagcccagcaggtgagggaaaacgcgggaagagggtcttgcagattcc

SEQ ID NO: 340832 - DNA, 122 bp, Homo sapiens
tttaatccaatcacatttcatactttgctccagtgtagccaatcacattccaggtcccgccgcacccagctccaggcagctctcactccaaaccccacccccaacccagtttcagcctatca

SEQ ID NO: 340833 - DNA, 122 bp, Homo sapiens
gtgtggtggttccctccctgggcctggctgctcttcacagtgtgaccctgggtaaaggtccgtttggtggctccgatgggaaaaaattcccaggcgggcatcacctccatggaggtgacagt

SEQ ID NO: 340834 - DNA, 122 bp, Homo sapiens
tcagcagagacccatttcacagtttaaagagacccaggccaccttttgctaggggccctccgttctttgcaccaaaacgcccattcttccctcccaggtactgatggaaaccaagggaaagg

SEQ ID NO: 340835 - DNA, 122 bp, Homo sapiens
tcatgggaggctcttaaggtgtaccttgtcctgctcctttgggagccaagaggcttatctcgggagccacacctgggcagtggaagagccaggatagcgacaagtttgccgaccccaggcca

SEQ ID NO: 340836 - DNA, 122 bp, Homo sapiens
agggtgagcgtcatggcggcttcttgccctctcccggtgaccccggacctgcccacgctgcgtgccaagttgcagggactgctgcagttcctgagggatgccctgtccatttccaatgcaca

SEQ ID NO: 340837 - DNA, 122 bp, Homo sapiens
ggtgccaaaggcctgggtgggcgcaggagctcggagggccccgcgcgggcgctcctggctcgagtgctgtgatccccctgggaattcctggtattttgaagaggcctttatgtatttagggc

SEQ ID NO: 340838 - DNA, 122 bp, Homo sapiens
ctggatatgagcaaaggttctcaagtcccctattatttccactgaagagttaaaataattcgccttaaataagttgaggccgggcgcggtggctcaggcctgttaaccccaggactttggga

SEQ ID NO: 340839 - DNA, 122 bp, Homo sapiens
gggggcggcccagagacgcctccggttgctgctccactttctaatcctgagaggcagctgcgtttctgcaacctatgggcaacatgtttgaaagagctgaagctgattaaatgctttccagt

SEQ ID NO: 340840 - DNA, 122 bp, Homo sapiens
accagtcaccccaatccaccaaccacagcaacccacacagccacaactcaggacacaagccgtcccccctcagggtgtctgctcccagcaggtgcactccgtgcccacctgcaccatggggt

SEQ ID NO: 340841 - DNA, 122 bp, Homo sapiens
acaggggcttggagaggtcaaggaacttgcccaaagtcacagcatagaagtgacagaatccgagttttgacccagatttgatgggttccaaagcgtgaacttatttctccactccacaaaaa

SEQ ID NO: 340842 - DNA, 122 bp, Homo sapiens
cccccaaccatccttctcacctaactattaccaggtcaggaggacgtcctgctgcacgctcgggcggtcactcctcctttccacaaggcccatgtccgcaccgttcgccccggggctcccat

SEQ ID NO: 340843 - DNA, 122 bp, Homo sapiens
atacgcccgggggcagtagcccctcgggcaggcacgcgggaccggttgctccccagccctcggtgtccacctagaaccgggctccccgggccgcacccattccgatcctgggagggtgatcc

SEQ ID NO: 340844 - DNA, 122 bp, Homo sapiens
tggttgctttgtgaccctgaacctccctcctgttctgagccttggtttttcctcctgagccggagctgatcatttgcacttcactggaattcgaagactgggtgaaaagcccccggcgcgta

SEQ ID NO: 340845 - DNA, 122 bp, Homo sapiens
ttgggaagcccttgtggagttaagggtgatgcccacttctttgtctccctcattctgtttcggtggctctctcgttcccagttccaagctgcccacttgttagaggagccactgcttaccag

SEQ ID NO: 340846 - DNA, 122 bp, Homo sapiens
atggatggagagggctggcagatctccctgtaaccccaggtgcatcccgaggcctgccaccgaagcccactcaaggctgaatgcacggcgagctcaggctgctctccccttggtatttgcta

SEQ ID NO: 340847 - DNA, 122 bp, Homo sapiens
ggtatttgtaattgttcgtcagttcaaatctcttggttttaaaaaaatactttccctctgcgcgactggcgcgtcacgtcgcgcgcgaccagtccgcagggctcctcccgcgctgctgatag

SEQ ID NO: 340848 - DNA, 122 bp, Homo sapiens
ggggagaattgctgctgtgtaccacagcaggtgggctctcctctttcaaacacaattacacggtattgatgacatttaatcatcatctctcctactctctgggagctccctgggtacagata

SEQ ID NO: 340849 - DNA, 122 bp, Homo sapiens
cacaccgagttgtgcaaagcctgggaacagtgagggcattaggaccaggagtgacgcgcacgcttggctctgggttgtgtctggcagagggctctcggctgagtggagctatgtgtgaaagg

SEQ ID NO: 340850 - DNA, 122 bp, Homo sapiens
ggaacttatcaggtaagagggtgggtgctgtgaacgagatgccgtctccagtcgcgggggcgggcagagtccctggagcgcgtggattccatgcgagccatgcagcactttttgttttttgt

SEQ ID NO: 340851 - DNA, 122 bp, Homo sapiens
agggctgcttgcgccaatctcattcccacaggatgcaagtacagaagcagagcggacgcccggaaggggtcacagagagacaggcggggcggttgaccagctgactggactcactttggaga

SEQ ID NO: 340852 - DNA, 122 bp, Homo sapiens
aattgcccttcttttgcctgccggccgctgtttctgagtaaacacagcgaggataaccagcgcctataaagaaaaacagactaaacacactccccaggggcgagcgcggcaggaactgctcg

SEQ ID NO: 340853 - DNA, 122 bp, Homo sapiens
gctggcccgcctgaggctggcgttcaggttctgtgcagtgttttggagagaaatgagattcgttgctgcttccttcacctgaggagggcacggcctctgagagtttcaccagcagacctgac

SEQ ID NO: 340854 - DNA, 122 bp, Homo sapiens
agctgaataattccagcgctgcttccacttaaaccagcaggcaggaggagcccccgtcagcgggacctgcctgcaggacgtccactgagcagagccccagcagaaagtgtggggtcaagatg

SEQ ID NO: 340855 - DNA, 122 bp, Homo sapiens
ttgggccagccatgggatctctagcaggctcttcctttgatgaaaatgcacattagcaaacgtgctaggatctgacaagcgccaacaggcccatcgcagagttaaaaagctctacatctgtc

SEQ ID NO: 340856 - DNA, 122 bp, Homo sapiens
cccatctgcagcagggccactgcctgtcccggacactggctgtggggagcctccttgccacggagcatcttctaagctcccttagactaatttttcagactaaatctggggccggtccttgc

SEQ ID NO: 340857 - DNA, 122 bp, Homo sapiens
ccctcgaatttccagcttcagagctctcccctccaggttctttatgtaacagaccatgaccgggaggcttaaccttcccccactcctgtgactcactcagcccagatctgcctccagggtca

SEQ ID NO: 340858 - DNA, 122 bp, Homo sapiens
gagcatgatcagcagcagtctgagtggaagagtgcctgtgatcttagggaacctgatgggcgttggagcagcggttcgacgcatgggtttctctttaatccttccgacttccccaagcccag

SEQ ID NO: 340859 - DNA, 122 bp, Homo sapiens
tggccaccgccaagcttttctcagctgacactgttgattgtgtttattcaaagtcctccgcgtgtatcgctctgcatccgcgttcccccactgggctgtgtaggtctgtggagctttataag

SEQ ID NO: 340860 - DNA, 122 bp, Homo sapiens
agctgccggccttggggggtttgcggtgggcgggcactgcgctcttggacacgtgggtggcgcgcggccctggacttggtggcgacggaccctgcccgaggtggggatcccaggctaaagag

SEQ ID NO: 340861 - DNA, 122 bp, Homo sapiens
aggagggatggctggggctcttgagctataagtggcacctcagggccctgacgggcgtctcgccatgctgctcctgggcctgctgctgctgctgcccctgctggctggcgcccgcctgctgt

SEQ ID NO: 340862 - DNA, 122 bp, Homo sapiens
ctagaggacttgattgaaatgtaaagaatcgttgaaaagaaggaaaacttaggcttaaatcggataaacactcctatgtgcaaaccagccgaaaacaaaataaaggcccttacagagcgttc

SEQ ID NO: 340863 - DNA, 122 bp, Homo sapiens
ccagcccttccccaagaagctagttctttttctccagtgttccctgatctcagaaggccccgccatcccctcagctacctaagcccagatacaggcattttcccagactcgtccccttttct

SEQ ID NO: 340864 - DNA, 122 bp, Homo sapiens
tgaagagagatacaggcggcggaaaattaggaaatgagaggcaggcagagagagaatgagcgaagtgaggaaaagacagaatggtataggcaaagaaatcataggcagatcaagaaagacac

SEQ ID NO: 340865 - DNA, 122 bp, Homo sapiens
gcggccctggccggggagacgagttgcatgtgttggttcagctggcgatagcggcgggagcggagccggcggggcctgtgcgaccgcctgggtaacgaccccaagtgcttctcccgctcccg

SEQ ID NO: 340866 - DNA, 122 bp, Homo sapiens
gtacctgcgtcagcggtgcacgccccacacagcaccggcgggacagtccagagaggctgccgagtttgtgaaacttaaggaggacaggaggtggcagaatgaacccagctcatgtaggtaga

SEQ ID NO: 340867 - DNA, 122 bp, Homo sapiens
tgttttccaaagcattgtccagctagggaagtggtagcacgtggtgactgagagcttccccgatccttttagatcaaagaacacttctatgcctttgtgcaactggtgtgctgtgggtacag

SEQ ID NO: 340868 - DNA, 122 bp, Homo sapiens
gggcctggctgcgcatgtctaatggagccctgcactccagtgtcatgctcgtaggctacacgcagcccacactcacacccaggctggggcctgcccctagggattgctgtccactcccagct

SEQ ID NO: 340869 - DNA, 122 bp, Homo sapiens
atggggagctgtgatttatgtcataagctcgctgtgaaaccttttgcctcggtaattctgcgctccatgggtgtctctttacatctattcacagtacggctgctgcccacggacggcttgcc

SEQ ID NO: 340870 - DNA, 122 bp, Homo sapiens
cccgccccactccccgcccttcgcggtcccgcccacgacctctccccacgcctcccgctccggcccccaacctcccggtcggacgttcgttcccggctctagccggcctccgcgcctctggc

SEQ ID NO: 340871 - DNA, 122 bp, Homo sapiens
cctcccattgataattttccttccccctttggcatttttgccaagccagctttacatctacgattctaatttttgtgaatactaagatgttgcaactggaatgaaccctctaaataattttt

SEQ ID NO: 340872 - DNA, 122 bp, Homo sapiens
acaccaccagggacccaacggagggtttattctgcccagcttcacatctgggggtcaaatcgcattaaagccaaaccaccaacggggcagggagcaggtggttaactgcacaaaataaagtt

SEQ ID NO: 340873 - DNA, 122 bp, Homo sapiens
gacgtccatgcagtgctctcagcccctccgctgcagtccctgctgttaaacagtgattcacgcaccgccatcgcgtgcaccatgcagggcagggacgccggaggctagaaggacaaacacat

SEQ ID NO: 340874 - DNA, 122 bp, Homo sapiens
ccttcgccctccccgatggacactcggcaggccccgcccagcgcccctgattggacgaagcgccgggccccgccccctcagccgtgagtgacaatagaagcccttggtaacggggctctgaa

SEQ ID NO: 340875 - DNA, 122 bp, Homo sapiens
ggtttggccttgggctaagccttaaatgaatcctgacatgacactgccattataccaattcgctaagtgaggaaactgaggctggaaatggtgatgcgccttcttagccaacatgagcaatt

SEQ ID NO: 340876 - DNA, 122 bp, Homo sapiens
gggctccctgtaacccctcacacgcgtggagacttatgactcgtcgtgggcgcatggcggcgcacctgctgcaggagcggccacgtctcagcttcattataccatggcctgcgcacgtggcg

SEQ ID NO: 340877 - DNA, 122 bp, Homo sapiens
ccgccagccacgcgcagcccaggttccttcctggaggcggagcagcgctgacgccacctgcgcagcccagattctaacaggtgtgtagtggaatctcattccgggtttcatttgcgtttcct

SEQ ID NO: 340878 - DNA, 122 bp, Homo sapiens
acagcaagggagggtctggatcaggggactgtgagcaggccaggtgttgtgagagctgaccgaggacatggcctagaggctgattatggagattgtgaaaattgctatggaaaagaaatttc

SEQ ID NO: 340879 - DNA, 122 bp, Homo sapiens
tgccctgcaggcaggtgagccctcgagagtcactcctgttcttggactgaggcttgcctccgggatccccgagcgagtagtatgtctggttagtcaggctttgtcgcactgttggaaacgtt

SEQ ID NO: 340880 - DNA, 122 bp, Homo sapiens
ctctagagggcgccctagcacaaggagccgcctcgcccgggctgctggtgcaggtttcaacgctcgtgctctctccctgggaccttggatgacaaaaagctgcgtgaatttttcacatgcat

SEQ ID NO: 340881 - DNA, 122 bp, Homo sapiens
ccctccagcctgggcaacagagcaagactctgtctcacaaaactaaaataagtccgggcacggtggctcatgcctgtaatcctggcactttgggaggccgaggtgagcggattgcctgagct

SEQ ID NO: 340882 - DNA, 122 bp, Homo sapiens
tcctaggggcggggaaaatggggcggggcctccggacagggggcggagcgtggctgttcgcgctcatccccctcccccggccctgggtgtccccgtgacgaggcagcgcggagccgccgcgg

SEQ ID NO: 340883 - DNA, 122 bp, Homo sapiens
aacctccagcacgacaaaagcaaaacacactcgctctgagaaaccgaggaacgagccagacgactggaggcaggttccaggcggggggcgtggcctcgggcgactgccggatgtcctcttcc

SEQ ID NO: 340884 - DNA, 122 bp, Homo sapiens
attataagtagaacagacctgagcttcaaaagctacgaagcagccagaagctggggtcagcgcccagggaacattagcagggcaaccctgtcacatcacatcctcgctattagagaactgag

SEQ ID NO: 340885 - DNA, 122 bp, Homo sapiens
ttccagacctttctccgcactttcggacactcccagggaccctcgggaaaggcatagcaccgtcccacggggctcctcccgctcacacgagcggctgcacccctcctgccgtatggcctctt

SEQ ID NO: 340886 - DNA, 122 bp, Homo sapiens
acgttctcgtgctcggacagtagcttaacggtgagctcgtagaggcaaccagcgtcgctgcggcccgagtacctgctcagagggagggagcgaggtggggggcgggaggtggggtgggggca

SEQ ID NO: 340887 - DNA, 122 bp, Homo sapiens
tctcccttggccctgttcctgagcttcagctctgataaccttcaggttgggaagcaagcccgatgcagtagcgatatagcactccatgacatgcccttccccggctcttctttgtccttaat

SEQ ID NO: 340888 - DNA, 122 bp, Homo sapiens
ctcccggaacatgtgtctccaccgcgcccacgtcttcttcaggcgtccctccccctggctcgggtgacagagagtgagagcccccatcccagggtcccaccccagggccctctccaggccag

SEQ ID NO: 340889 - DNA, 122 bp, Homo sapiens
ggccgactgactaggttatggtccagttgtctttcccactcctacatgatgaggtcagggcgattaattttgcattcaggtaaccagcacccaacatctcctgcttcaaagcaggggaaggc

SEQ ID NO: 340890 - DNA, 122 bp, Homo sapiens
gcgtagaagggtttggccgggtgcgaggatgaccgcgtctcccttgggctctggagtctgcggtgggaagggcttggtttcagcaccctctggtcagaggccggccgagcccatgggcggtg

SEQ ID NO: 340891 - DNA, 122 bp, Homo sapiens
ctcaaccagactcagaatcctgtatttcccaaaaagaggttgctacttgtgttgaagaatcgcctttagccttcgaaatcagccagggctgcaaggcgacgacctctcgaggaaccgggggt

SEQ ID NO: 340892 - DNA, 122 bp, Homo sapiens
cctgcaggagtccggtcgttcattaggcacccaagagcaggcgacgctgcgcttctgcaccggagccccaccaaggcagctcgcttcagtttggccttggattgttttgctttcttccattc

SEQ ID NO: 340893 - DNA, 122 bp, Homo sapiens
ggactgaagctcccagcacaggggaggcgcccagcgtggctgcagaggaagggaacgcaccgcaggtgggaggggcccagctgatttctcagcgtcacagtgaaaggcacccgtgatgagac

SEQ ID NO: 340894 - DNA, 122 bp, Homo sapiens
aaaacaactggattgaccaaagaggttaagaaaacatagtctttgacccatccatgtagacggcataggaacacagacttagagagcaaacaagaaggcaccataaacgctattgggaaacc

SEQ ID NO: 340895 - DNA, 122 bp, Homo sapiens
aggagggggcttgggtgagtcctgttgttgggaaatctcagagcgattcaggagccgcagcgtttgcccccaaccctccactatgcagggtcgctttccttccttccttctctcattcctaa

SEQ ID NO: 340896 - DNA, 122 bp, Homo sapiens
ccaaaagatgccttgaatatttattcagtgacttctggcttatgctcagaagccagtctgcgtcaggcacgtctcctgctgcgtgacatgtgcagtgctgtaatcggctcccgcttgctctc

SEQ ID NO: 340897 - DNA, 122 bp, Homo sapiens
aggcggtagcagatgccacgttggcggggtcggtgaaggtcaggactctaggcctccctccgccaagccagagggatgagcaatcacgcctgagagcccactgcgtgccatgcagtccgcac

SEQ ID NO: 340898 - DNA, 122 bp, Homo sapiens
ctcgtcgcactccttttccccgagacttggtactgggagataggacgggagtctcctacacgcagtcaacacttgccacgagcggctagacttaggacaggcaagttgccctgccatccttc

SEQ ID NO: 340899 - DNA, 122 bp, Homo sapiens
actgggttttgagaatacacacacacagaatacaagtcctttataagatatatattttcccgcagtctgtggcttatcttttcattcccttaatagtgcagatattcttcattttaatgaag

SEQ ID NO: 340900 - DNA, 122 bp, Homo sapiens
cgccattggacagcccggtgggcgtcagcacaggtggtctccaggagacccggatggtggcgggggtcaccccagcctggacggtaacatcttgtgggggtgctgggggtcctgggagggga

SEQ ID NO: 340901 - DNA, 122 bp, Homo sapiens
ccttaacggggacactttactgcgggtgccacgttaaatgacgactgtaggactctcccacgttgaggtgagcacaggagagcttacttgtacatttgtgctatggtttacagcacgccagc

SEQ ID NO: 340902 - DNA, 122 bp, Homo sapiens
ggtgtccagggagcccctgcatgacccagtggagggaggaggggcagggagacggagctacgcacactttcagcacctccaagaaggacagagggagaacggcggaaaggatgcccaactca

SEQ ID NO: 340903 - DNA, 122 bp, Homo sapiens
tcctgggctgggtctcctcgtcttctcccacctcctcggcatcctccttctcctcctcggcgccgttcctggcttccgccgtgtccgcccagcccccgctgccggaccagtgccccgcgctg

SEQ ID NO: 340904 - DNA, 122 bp, Homo sapiens
tttaaatagtagaaccaaggggatttactgatggattggctgtggattgtaagtcaagaacggctccaaaggttttggcctaaacaactagaaagatggagatgactctgatttaaaaggag

SEQ ID NO: 340905 - DNA, 122 bp, Homo sapiens
ctggctccagcccagggggaagagccacagcggaggcgccttctgcaaaggcagcggggacggccccggaggctgagccagagcgaccccggatccgcccccgcccccctccatgaggcctc

SEQ ID NO: 340906 - DNA, 122 bp, Homo sapiens
gacttttttatttgaccctgtttgctacaaacgtaattgaataattggggcctggcagatcggaagcaataggaacaatatatttcaatccagtactctgtgagcagcagcatttcacagag

SEQ ID NO: 340907 - DNA, 122 bp, Homo sapiens
accgcagctccgtaccggctggggacatggggagcctgagccagttggagatgtgggcgccgagaagtggagcaggaagcgagagattgatgtcgctggtggttgtgaaagtccgagagagg

SEQ ID NO: 340908 - DNA, 122 bp, Homo sapiens
ttcgctctgggcggtgggcggagatccgggcggtaccagctgtcccggccgcgggggggacggcctggaccagcccatggtcgcgggttaaacagtacgagctcttccaggatattggtctc

SEQ ID NO: 340909 - DNA, 122 bp, Homo sapiens
gaccttttaacataagaatgtttggtattgtcatttttatttaaactagtcaagcttgaacgccggcaggatctctgaacaatagttctcaggtaaataaaaaatgtaattttattgttctt

SEQ ID NO: 340910 - DNA, 122 bp, Homo sapiens
aagtttgttggggaggaaaaataatgctgtttccttctctcggaaaaagtcagcaaggagcgtgagggttcaatgtggtaacgtagctgcatgttcctctctgaagctctcagcttctcccc

SEQ ID NO: 340911 - DNA, 122 bp, Homo sapiens
cctgcttatgggcctgttctccatctacaccggcttcatctacaacgagtgcttcagtcgcgccaccagcatcttcccctcgggctggagtgtggccgccatggccaaccagtctggctgga

SEQ ID NO: 340912 - DNA, 122 bp, Homo sapiens
ggaggaaagtggggctcagggggcgctggggcagcagatcacctcgcaggcagagctgggcgccgaggggtaatgagcctgccctggggattgggttaccgaggggggcaccgggaaggaga

SEQ ID NO: 340913 - DNA, 122 bp, Homo sapiens
cggccatattcttccggagcgggggaggccagagaggccgttgggactacgactcccaggcgccctttcggtttgtttttgttcaaaaaaaaaaaaccccacactccccctcctcactcttc

SEQ ID NO: 340914 - DNA, 122 bp, Homo sapiens
ttatgtgatttattcctactaaatgaaagtgcactactgcctcatgtaaagactcttgcacgcagagcctttaagtgactaaggaacaacatagatagtgagcatagtccccacctccaccc

SEQ ID NO: 340915 - DNA, 122 bp, Homo sapiens
cgccacccagctcaacctgaaaaccagcaccgtcatcaactggttccacaactacaggtacgacggctggctcacagggagcgccggtcggcccaggggaaggggctgatctgtccggaggc

SEQ ID NO: 340916 - DNA, 122 bp, Homo sapiens
gccacgcccgtgatggtgccaaagcgcctcgcaaacatcgctggggctgcttgctccctgcgatgtcctgctgcagggaaagcgacgctcttctgtccattttccaaaacatttccagtgct

SEQ ID NO: 340917 - DNA, 122 bp, Homo sapiens
tcagaaccagatagcacacacacaggagagaacacatcgcttctgaaaaagaaggtggagcgaagaaatggaatggacctgaatgaggacttcaggggacctgatagttgcccctcctgtcc

SEQ ID NO: 340918 - DNA, 122 bp, Homo sapiens
cactgcacgccaagcactctacagacgctgccttgctcacatcttaccacagctcccaggcggggatcctcaccctgttcacagatgaggaaatggctcagcctgagtcagtgacttgggtc

SEQ ID NO: 340919 - DNA, 122 bp, Homo sapiens
ttttttcatctacctgaccgtggcacattggagaggtaggtgggctgtgctgtgtggctgcgtctcacactggacgtctaatgtccttgaccccctccgagctgagtgccagccacactctc

SEQ ID NO: 340920 - DNA, 122 bp, Homo sapiens
tggcctctcaccagtgttccctcctaacacacctgttctctctctcacacaccctaaagccgcttgccaaccacctgtcacacagccactccatgcctgttgctgcttggcacccactgggg

SEQ ID NO: 340921 - DNA, 122 bp, Homo sapiens
acagcagatggagagtggcaagagccttgcccagacatccaagaccaccaccgcggtgtacgtcttcttcctttccagtttgctgcagccccggggagggagccaggagcacggcctctgcg

SEQ ID NO: 340922 - DNA, 122 bp, Homo sapiens
caggaggcgtctgcgtctgcaagctgacttggaagtttctggcctcttgatgttctcagtcgaaaatggtgcattagaaaggggattggtctggcccgcgctttgtagtagtaatgagggcg

SEQ ID NO: 340923 - DNA, 122 bp, Homo sapiens
aggtgtgagccaccgcccccaacctgcatatctcgatgtaaggctattcaacagaagccgcgttcctaccctggatctgctgagtgaggatttccaggaggctctcctggcgtgcctagggg

SEQ ID NO: 340924 - DNA, 122 bp, Homo sapiens
tttctggatctgcctttaggttctgcatgccaggcaggcccgactgcacagggagtgagccgtggcgctcaggacgtccacttcctgggacaggacggccgggtcacggatccgcgggagcc

SEQ ID NO: 340925 - DNA, 122 bp, Homo sapiens
ttctttgattaggaaagggaactccccgaccccttgcgcttcccgagtgaggcaatgcctcgccctgtttccgctcgtgcacggtgcactgcacccactgacctgcacccactgtctggcac

SEQ ID NO: 340926 - DNA, 122 bp, Homo sapiens
ttttagaggcaatctaattatttttatattacattaagaaaggaagaaagggaagaagagcgaggcaccaaaatcaagaaggtaagctctttggaaaacctggttttcatcagctggtcata

SEQ ID NO: 340927 - DNA, 122 bp, Homo sapiens
ccagtgcgggttcagcttgagcagctccgtggcaatgcggttgtgctcgcggaaccacagcgtgtgcatgctggtcaggcccagctgctcgttggcgcggtggtccccggccaggaagcagg

SEQ ID NO: 340928 - DNA, 122 bp, Homo sapiens
cgggcgacggactggcaggggcgcgcggggcgggcggaagcgcaggggtggggtgcagggcggggggagcgcgcatcggggggcggggggcggcgtcggcgctgggagtgggggagcgggtt

SEQ ID NO: 340929 - DNA, 122 bp, Homo sapiens
tattaaacctgaatggactgtgggagcccctctgtagccagtcagcttgggggggatgcccgttcctgagactgacatatcagaagtgagggcagccttgtggaggactttacccttcacct

SEQ ID NO: 340930 - DNA, 122 bp, Homo sapiens
agaaaagggagagggagggtggagagagaccctagccagccttgcccacttacctccatccgggatagtaaggtctgtatatccctgatcatgtgctgagccatcaccagccgtacccgggg

SEQ ID NO: 340931 - DNA, 122 bp, Homo sapiens
gcggctcacgactcagaaagtcggggcttctcgccccggatccccaccgctggcgtctgtcgaatccccacctcggtcctcgggtagaggcgcaagcgcgccccaagaccattctcttcgcg

SEQ ID NO: 340932 - DNA, 122 bp, Homo sapiens
ccgggctccagcacgaggccaccagcccggctgagccctcgtctattttgcagtgccattcgggctgctctaaagaccagacctggattgagagaagaaagaaacacacaagtgcaaactca

SEQ ID NO: 340933 - DNA, 122 bp, Homo sapiens
gagcaaagaccaagagaacaactgtgaaaggccaaaagaaagcaacgttttacacccaaacggggagtgccctgtcaaaagtgaacccactgaaccgggagatgaggatgaagaagatgcgt

SEQ ID NO: 340934 - DNA, 122 bp, Homo sapiens
gaacatcagcacccctcggggcaggcacagcatcacgcgcctggaggagctggaggacggcgagtcctacctatgttcccacggcaggaaggtgcagcctgtagacctggacaaagcccgtc

SEQ ID NO: 340935 - DNA, 122 bp, Homo sapiens
ccccgcctcagccggcgcctccctgttgctgagccctggcgcctgcctgtcgcttggctgcgctaaacgcccactgttggtgagattcccgagtggcacatcccgcgcccctggaaagtcct

SEQ ID NO: 340936 - DNA, 122 bp, Homo sapiens
cgctacgtgcttgggatgcaggagctgttccggggccacagcaagacgcgcgagttctggcgcacagcgccaaggtgcactcggtggcctggagttgcgacgggcgtcgcctagcctcgggg

SEQ ID NO: 340937 - DNA, 122 bp, Homo sapiens
ggggcagcaccaggacacagactggaatcttctaacaccaaggccgctgcccttccaatgcggtttccacaacagaagcagtgaacccatgtggacataggctagaacatttgaattataaa

SEQ ID NO: 340938 - DNA, 122 bp, Homo sapiens
ggagctaccaggaggctgcggctgcaggcaccttcctggcagtagagttcaccactttggcggactatttgcatctgttgcaggctgcggcccaggcactcaatccgctaggtgcgtgccct

SEQ ID NO: 340939 - DNA, 122 bp, Homo sapiens
gagttcatcacaccataaaccacagggactttgtaggcatgttattgtattagcaccatacggagactactcatggaactcacatgcagagtgtgtgatgtcagagaagttgacacgaatcc

SEQ ID NO: 340940 - DNA, 122 bp, Homo sapiens
gagacacacaaagacatgcgaagaggggctgaacgaggctcgcgcacaaagacgccggggcgcacggcagctggggctgcacccaccgcccccgcgccgcgccgtgccggggccgggccagc

SEQ ID NO: 340941 - DNA, 122 bp, Homo sapiens
aggatgcggcgcagctggaaggcagagggtggagagggggcgggtgtccgtccgatttaacgctccaagcacggagtttccagctggttgggctaagtctgggaggagcagtttttgcggtg

SEQ ID NO: 340942 - DNA, 122 bp, Homo sapiens
ctctgtctcaaaaaaacaaaacaaaaaacaaaaaaccctgaaaatatgagcccaggagttcgaggctgcaatgagccaatactgcacctttgtgcttctgcctgggcgacagagtgagacct

SEQ ID NO: 340943 - DNA, 122 bp, Homo sapiens
tgtatatgaactttgaaaaaatacttgactctacttttgttacctaaaataaaatgcattcgtttctctgggggagcctgtttacttttaatgtcaaatggcctttatttcaacagcctgaa

SEQ ID NO: 340944 - DNA, 122 bp, Homo sapiens
agcgtttttcctttactctcacatcacaacaatcaacgcagaagagttatgaccaaatgtcggggtggggggggggcgtttccccacacaccaagcagctgggtgtcctctaatgcagtctg

SEQ ID NO: 340945 - DNA, 122 bp, Homo sapiens
tccacctcatcccataattaaatagcttctgaatgaacaacattatagcaagagtaagaacgaggcttttggagtcaaacaggctttgttttcagcaccagcactatctttctagctgtggg

SEQ ID NO: 340946 - DNA, 122 bp, Homo sapiens
cacagaagctcttcaccatgacatcatgttggtcccagcctacagccatcatctcccagacgatccacccctggagagtcatccctgggctagaaagagaaagctggaagacaagcagcgcc

SEQ ID NO: 340947 - DNA, 122 bp, Homo sapiens
gagcaaaatggtctcattcagagtcctgcaaccaaaaggcacagggctagcatcaagctccgtattccagttttccctcctcgaaaccactccagcatggagactgtgggtgaccgggagcg

SEQ ID NO: 340948 - DNA, 122 bp, Homo sapiens
ctctcattctcttcagtggaaagggccgaggccgtccccgctgggtgggcagagcctcggcgttaacctcccttcttccctgagctgacctggcctggggtccccttgcctgggtggggttg

SEQ ID NO: 340949 - DNA, 122 bp, Homo sapiens
atctgtaaaagggtcagagcctagtaataatgcgtaccttgcatgtttcttgggagaattcgagaagctaatgttcataaagcacttagcatgggctgccacatagcagttgctgagtcgag

SEQ ID NO: 340950 - DNA, 122 bp, Homo sapiens
ggtaaaaacagcaccaagctctggatgaaggggttgggagtgagtgacatctggccaacccgacccccagctccgtcttgcctagggcagcccccagcccaaccagggacccagctccttgg

SEQ ID NO: 340951 - DNA, 122 bp, Homo sapiens
catgtcactcttctgtttaaagccctgcaatggttcagcctgagatgccagtggccttgccgggggtggacagcaggggttgcattctggaggcgtccggaaagcagaaccaataggatttg

SEQ ID NO: 340952 - DNA, 122 bp, Homo sapiens
ttcaaaaaacaaaacacaagaaatatgcgtggaaggagatggctgaggtgtctgggcctgcggggcatcgacagccaaggaggaagggctcaccctatgccaggctgggcctgcagatgagc

SEQ ID NO: 340953 - DNA, 122 bp, Homo sapiens
ttttttatagagacggggtcttgctatgttatcccagctggtcttgaactcttggcctcacgtgatcttcctgccttggcctcctaaattcttgggactacaggtgtgagccaccttgccca

SEQ ID NO: 340954 - DNA, 122 bp, Homo sapiens
tcaattttaaaagagaactccgtctcctgagcacggcacacgggcggtcggagggtgagtcgatacttacgttcttcaccgcatcagcatatttctgctcattgaagaattcataaaatgta

SEQ ID NO: 340955 - DNA, 122 bp, Homo sapiens
tctgctcatgctaccgcgggccgcccagcaaggaagcaggctgcccgccaggctggcacgcgcctcttgcagtggagggtttgctcttcaggaacggacagagaacctccagactccctcgg

SEQ ID NO: 340956 - DNA, 122 bp, Homo sapiens
tagaaagtaggcagaggggcgtggcgtccctgtcgcccccacatgccagccctcctccaacgcctgacaccaccacaagccacggctgggaacactgggggcctcccaacccggcgcggggc

SEQ ID NO: 340957 - DNA, 122 bp, Homo sapiens
ccccgctaggccttgcggcagaaagccccggcagcctttgtccccaaggcctgagcgcctcggttttttgcacttcatgccctggggatgtttccctgctgccaggatggagtgccagcccc

SEQ ID NO: 340958 - DNA, 122 bp, Homo sapiens
gcagcccctgccctcgaggggccacctgcctgtggggacggacgcggctgctgagaaggacggccaggcgtggtcctgcagggaaggggcagctcgggctggtggcccccagtgaggagtcc

SEQ ID NO: 340959 - DNA, 122 bp, Homo sapiens
cgcgcgcgcacgcaccctgcgcacacaccacacacacacacacgatcacacacacacccgcgcgctcgctcccacccggcagtcatccatcaatcgaaaagcacacatccagggccaggctc

SEQ ID NO: 340960 - DNA, 122 bp, Homo sapiens
cccagggtctccatgacggtcgagtgagccagcagccagccagcggcggtcccgggtcggcgtccacaggtttggtgtgggcgaggccctgcctccccgtgataaggcacaggcggtccccg

SEQ ID NO: 340961 - DNA, 122 bp, Homo sapiens
tggacccgttcaccgactacggctcctcgctcaccgtcacgctgccgcccgagctgcaggcgcaccagcccttccaggtcatcctgcggtacacctcgaccgacgcccccgccgtgagtccg

SEQ ID NO: 340962 - DNA, 122 bp, Homo sapiens
atttgcttggaatgattagcgttgcccaagggctgtcgctgtcagaaaaacaaaacaaaacgaaacaaaaaaaacaaacgggtccgaagcagctcctggagaaaataggtgttggagagtcg

SEQ ID NO: 340963 - DNA, 122 bp, Homo sapiens
gaaagcatatcatattagagtgtctaagaaatcagtgaatcactaagttttccatcttaccgaagtacaaaacattatttcaaatctaggccttctgacagaatccaatatctatttttata

SEQ ID NO: 340964 - DNA, 122 bp, Homo sapiens
gcggaccccaggaccgggcgcgggacgcgtgcgtccagcctccggcgctgcggagacccgcggctgggtccggggaggccccaaacccgcccccgccagaaccccgccccaaattcccacct

SEQ ID NO: 340965 - DNA, 122 bp, Homo sapiens
ctcaggtgcccggcccggctcgagctgagctcctccactggagacccggggctggctgtgcgccgacaggcaagcgcatctgctaccctagagccggccacctgggtcccccgggaggagag

SEQ ID NO: 340966 - DNA, 122 bp, Homo sapiens
ttccctgctgctgagccggctgccttggccttctcaagcaatctggaagcactgagtgggcggggcaaaagggaatccaattctccattgggggaaaagccggagaagaagcattcagactg

SEQ ID NO: 340967 - DNA, 122 bp, Homo sapiens
gccctcggaggaggcatccttcataacgctgggggcggggagcgcaggccgggccagcggcgccacacgaacggccccgcgggacgctgccacccccgcctcggtcgccccggcgcgtcggc

SEQ ID NO: 340968 - DNA, 122 bp, Homo sapiens
ccgcggagccagcgtcgccctccagctgttgcgcgtcggaagccggaagcagggactgagcgacagactaggaaacgccggtttctccggggctccccagcgccccacctttaccccggagg

SEQ ID NO: 340969 - DNA, 122 bp, Homo sapiens
ttaatgaatgtgaggctaacagaagggaattaacaatgtaggaaaaataacagtggctcacgcatttcagtgttcttagaacctgtgacatcccttcacaggagtttataaccaggaccttt

SEQ ID NO: 340970 - DNA, 122 bp, Homo sapiens
gattcattgccctcggaggttcaaccagttatgagtgagggattggccagaagatcggggcgcaggcaagcaggagtgctctattaggataagcaagtttgacaggaagaagctactcttct

SEQ ID NO: 340971 - DNA, 122 bp, Homo sapiens
tttttctatgatattttcacagtgtacaccagggtgcctgtactttgcagctatatgacacgcaggattattattttttttcttttcttatcatcagagcctcaaaaacaagctccatggca

SEQ ID NO: 340972 - DNA, 122 bp, Homo sapiens
cagttccctctactggacacttggattgtttccacacttttttagtcacaaacaaggccacgttgactaactttgtacatacatcattttgtatttttcagttacatctaactagggaaata

SEQ ID NO: 340973 - DNA, 122 bp, Homo sapiens
cggcactgtccccgccccgcccgaggatgccgtgggggtcaccgcgccttaaagcggccgcgtccactcctgagccagcggcgccggcagcagaaaagacctgggccctgcacccttccctg

SEQ ID NO: 340974 - DNA, 122 bp, Homo sapiens
atggagcagcagaatcttggcatgggccagatcccttccccacggtgatcttggagtaggcgcccagccctggctcttccatgctctgcccctttcctggatgaggaaccggactcacaatt

SEQ ID NO: 340975 - DNA, 122 bp, Homo sapiens
ataaacgcgggtcgccatgcgttgggcctcttgtcgctcatttctgcgctgggctttaggcgcgtgctcgccggagggatgcgggaggatggagcctggcgagggggaggcgaagaggcatc

SEQ ID NO: 340976 - DNA, 122 bp, Homo sapiens
ggcccgagtgcggaggctgcacctgctcagctccactgtgacctcttggtgccggggacacgcctgcccccgcgcacattgccgcccggcccacctcctgtctgagccctctcagcagacaa

SEQ ID NO: 340977 - DNA, 122 bp, Homo sapiens
tcccgggcgcttcgtgtccgaggacctcctgtccccacggcctgggtgagcctgcggagacggccgtgccgtgcaataaacgcaggggcaccccaagtgcagcaggttgttccgtgtggaac

SEQ ID NO: 340978 - DNA, 122 bp, Homo sapiens
acaggcgagaaaggtaagttttgacccagcttagcagccgtagtcagccgggagtgctgtcgtgggggattgtgggaaaagatggcggctgccgcacaatcccgggttgtccgggtcctgtc

SEQ ID NO: 340979 - DNA, 122 bp, Homo sapiens
tgccccctcctcggactctgcgcctggctgccggacgccgtgggtcccaaaggaagcaaccgcggcaagagtgaactccgcacctggaaaatcgatccgctgtgcgcaaaggccagccaatg

SEQ ID NO: 340980 - DNA, 122 bp, Homo sapiens
gcaggaggagctgctggaatgccgccgccgctgccgcgcgcgctccttttccttgcccgccgaccccatcttgcaggcggccaagttcctgcagcagcagcagcaacaggcggtggcactgg

SEQ ID NO: 340981 - DNA, 122 bp, Homo sapiens
agctgttacccccttcacttttcctcctctgtcattacccacaatcactctccttctttgcgctatggtaggtgtttacccatcataggaatgggcatttgaactttgaaactgaatgtggt

SEQ ID NO: 340982 - DNA, 122 bp, Homo sapiens
gagcgcttctcgcttggatggaggcggggccgcagtctcccaggtcccagctggggctgacgtcgtcctggtgtgtgcccaaaatagccggctccgccctcttctcccggcagcccctgcag

SEQ ID NO: 340983 - DNA, 122 bp, Homo sapiens
acagagtagcagaggtatccgtgttggctggattttgaaaatccaggaattatgttataacgtgcctgtattaaaaaggatgtggtatgaggatccatttcataaagtatgatttgcccaaa

SEQ ID NO: 340984 - DNA, 122 bp, Homo sapiens
gagaaccgtttggaagcactggaatacagctttattcctacacgattagacccgttaccccgtgggtctggccgaccgtcctgactcggagatccctgagctgcgccgccgcttccttcgtc

SEQ ID NO: 340985 - DNA, 122 bp, Homo sapiens
cattgcagacctctagtgtggtcagatagccagccagctttttaacaatgggctcgagggcgcaggtcttggcctgggcatcacacacgaagcccaggttgaagaggagagcattgcggctg

SEQ ID NO: 340986 - DNA, 122 bp, Homo sapiens
tgggtggtccagggtgcaggagcctgattcagagacttatagatgagcctcacaataaggcgggggtccatacttagagcatttttactctaagttttctcccatctcctgagagaggactc

SEQ ID NO: 340987 - DNA, 122 bp, Homo sapiens
agcagccaggctgctgaggagtacccccgccaaaggcttttcggggttctctccagcagacgggggcagcctaaggcctccataaaatctccccgaagcagcctatgaacttgccaaaggca

SEQ ID NO: 340988 - DNA, 122 bp, Homo sapiens
gagaggccctgacccacgtccagctgcctccacggaagccgcggcttcgtggctttctgtcgtttgtgtgggctctgcattcagccagcagaggcacttcttgcagagcagggctgaggaga

SEQ ID NO: 340989 - DNA, 122 bp, Homo sapiens
gtatgtaattgcaaataataagtgctaagaacaatgcagacaggaggctgtgagggtgcgcgttagacattagaggcttagtcagagatggcctccctaggaggtggaatttaactcgaagc

SEQ ID NO: 340990 - DNA, 122 bp, Homo sapiens
gccaactccaaagacagctcatagtttcattttcatctcctcacccccttcccaggggagcgctgagcagggagtagcccactgccacccttccagaagcccagctacccagaagctggaga

SEQ ID NO: 340991 - DNA, 122 bp, Homo sapiens
tgaactcctgacctcaggtgatccgcctgcctgggcctcccaaagtgctgggattacaggcgtgagccactgcaccctgcctagaagggtcccagttcttatgctcaggccctggttttgct

SEQ ID NO: 340992 - DNA, 122 bp, Homo sapiens
gcgccgggcagctgccaagtgcatcgcagccttgatcagctcgcggcctgacctgctgcccgatttccactgcaccctggcacctgtgctcatccgccgcttcaaagaacgcgaggagaacg

SEQ ID NO: 340993 - DNA, 122 bp, Homo sapiens
tggcggcagcgacgaaagcagtcgtcatctgagatttccctggcagtggagcgggcccggcgacggcgagaagaagaggagcggcgcatgcaagaagagcgccgggcagcctgtgctgagaa

SEQ ID NO: 340994 - DNA, 122 bp, Homo sapiens
gactatctacttactcgttgcggctcagggcctccctttcccatcggaccgcgtggagaacggcacaccattgccaactgcttgtttaggactatgaaggggtcacttttccagaccctcgt

SEQ ID NO: 340995 - DNA, 122 bp, Homo sapiens
tctgaagcccaaagcaagccaagctgagttgcatgagacacaggacttgagtgaggagcccgggctgggccagagcctgatgccagttccaggtccagggaaacagcaagtcaaggtgagag

SEQ ID NO: 340996 - DNA, 122 bp, Homo sapiens
caacaccactcaactcaagggcaggtacccggctgctgccaaggggtcagcgggagcctgcgcactgccacggccccgccctcttccaacctttcatccgggtctcgggcaggggcgtgtct

SEQ ID NO: 340997 - DNA, 122 bp, Homo sapiens
cggcgctgccctgtgattggtggagcgtccaatccaccgccctctggccgccgccgctcgcggttggactcccaaattgtgtttgttagtcctcaaaatttgattaaatgcttaaaacaatg

SEQ ID NO: 340998 - DNA, 122 bp, Homo sapiens
gggctcgctttggttcctgcgttatttttaaaacgacttttaagagaggggcaataaatgcgtctataatgggaccgctgcagcgtcgagaaaacgaggaaatacgtgtttaggagaaaact

SEQ ID NO: 340999 - DNA, 122 bp, Homo sapiens
gcggcccagcctccgggagtggcgagtcaccttccttggtacgattttcccccggtgcctcgcccgggaaggattgtttttgtaggtgctcctgctgctgggcactttggtaccccttccct

SEQ ID NO: 341000 - DNA, 122 bp, Homo sapiens
cttctcagagaacttgcagccatcagattcatttggagaagtttgataaaggtgactttacgcttagacagaagaaaaaaccctaaggtcttgaactaagccttatcctctgatacagttta

SEQ ID NO: 341001 - DNA, 122 bp, Homo sapiens
atgacaatgggtctttattgtcattatctttatgcaaagtttacacctccatcttttactcggttaagccatgtccaccttccccatcaaactgtaagttttgagggcatggagcgtagctc

SEQ ID NO: 341002 - DNA, 122 bp, Homo sapiens
tgaaccaaagctagaccatgaaagtaaatgagagtaaatgaccctcaggttagtagattacgacaactgtgagggctagtggatttcactggtgatacagtatttaaagctgtgggctttta

SEQ ID NO: 341003 - DNA, 122 bp, Homo sapiens
tctagctaatagccttgtagatttgaggccttcaaccaagggccacatgcaggccttgggcggcctagtgcctgtaggactgcataaccaccagaagatctcacacctgacctcctggctca

SEQ ID NO: 341004 - DNA, 122 bp, Homo sapiens
cacccttttaatatctcacaagagattcttctgcactggttcatttaatttagtggacaccgcagtgtggctcattgattgtggacaaaacttctgaagagcctggtgtgcacccctgttaa

SEQ ID NO: 341005 - DNA, 122 bp, Homo sapiens
gctacgtccctcaccaacaggccgctgtgcaggcgtgaaacccagtggcggttcagaagacgtggcagcgcgggaggggtttatggcagggcatgaattgagaatggcaagacagaccatgt

SEQ ID NO: 341006 - DNA, 122 bp, Homo sapiens
tagaacaaaaagaatactctgtttagtatctcggtaatcacttctgaacatgaattcttacggctcaagactttggatgtagggcatctatagtttcatgtgggataatcatctttaaaaca

SEQ ID NO: 341007 - DNA, 122 bp, Homo sapiens
caaccatttagtcctaaaaccataaaacaactagaagaaaagggagcaaaagctccacaacgtcagtctgggcaatgatttttttaatatgaccccaaaagcaaaggcaataaaagtggaaa

SEQ ID NO: 341008 - DNA, 122 bp, Homo sapiens
cgaccttcgtcaggagatctgtggaagagtgctgctgccagctgccagctgcctgcagcacggctcttggcttttcctcatttgtagagttgggatagtggcttcggccctgcctaacccta

SEQ ID NO: 341009 - DNA, 122 bp, Homo sapiens
accagcagtcccggttggggcacttgcccagcatgtgccggcggcagaagtgcagctggtcgcaggcctggcactcgccgcgctggtagcgggcgcagaggcgcacagaggacacggccacc

SEQ ID NO: 341010 - DNA, 122 bp, Homo sapiens
tacacatgaggggcttccttgagctgtctggagagtttagaggagctgtcagttccccagcgggtagggaacagcttggaagggaaaggcgccagcattaattaattgaccatctcatgtgt

SEQ ID NO: 341011 - DNA, 122 bp, Homo sapiens
agcactcgcccctggcattgctggccgccacctgtagccgcatcggccagccgggcgcggcggcgcccccggacttcctgcaggtgccctacgaccccgcgctgggctcaccctccaggctc

SEQ ID NO: 341012 - DNA, 122 bp, Homo sapiens
accgaccttccttctctttcatcttagggcctttccattggctgctcccttcaccttaagcgatctccatggctaataatcttgcctccttcaagtgttttcttataggtcatcttcccaag

SEQ ID NO: 341013 - DNA, 122 bp, Homo sapiens
acctgaaacaggatctgcgggcagctgcatttgccacccggctttattgctgctttccagcggcgaaggcgcagcagcagtaacagggaagccagagcgagcctccccggcagcggcggcgg

SEQ ID NO: 341014 - DNA, 122 bp, Homo sapiens
tctagaaaagtcagcggctgaagctgacagcccactctgaataaataaatcatttctgatcgtttattccgtgccttgggcacacaccatgtctcattcaccatagtagattctgggaccaa

SEQ ID NO: 341015 - DNA, 122 bp, Homo sapiens
aatgagccccagagccaattcacccaacccaaccccaggtgctccttggtttcctgcggccggggtctatccatttgtaaaagtctggatggactgggagacgttgatggagcttttgcagt

SEQ ID NO: 341016 - DNA, 122 bp, Homo sapiens
gcaatgaatcttgctactgctcactctttgggtcaacactgcctttttgagctataacagcgactgcaaagatctgcagcttcactcctgaagctagcgagaccgcaaacctaccgggagga

SEQ ID NO: 341017 - DNA, 122 bp, Homo sapiens
cgccagccccctgggtgctattgatgcggaccttggaggtgcctgcggcgtggcctaacacgtggacgcggcccataacccgccccggctgctgctttcgcctgaaggcggacaatggcttt

SEQ ID NO: 341018 - DNA, 122 bp, Homo sapiens
ccaccccgtgcctcctgcctccgcgcagcctgcagcgggagaccctgtccccgccccagccgtcctcctggggtggaccctagtttaataaagattcaccaagtttcacgcatctgctggcc

SEQ ID NO: 341019 - DNA, 122 bp, Homo sapiens
tggtaatcgttcttcttctgtagacgagaaaataaacctcagtggcttggtaatgtcacacggatggtaaatgccgcgcctagattcaaggccagagcttttgccgctgcagttcacagggg

SEQ ID NO: 341020 - DNA, 122 bp, Homo sapiens
cacacagcctgggcactcggtgctcagggcccacccctccccttcgctcccctgccgccccgcccccggcagcctggccccgcccctgagtggatgcactcccccagctcgggaccgccccc

SEQ ID NO: 341021 - DNA, 122 bp, Homo sapiens
tcctgcctcagcctccggagtagctgataccacaggtgcgtgccaccacgtctggctgcccgcattatttctctaggatttttactggaggtcattttactggaggtcaactgcaggatcgt

SEQ ID NO: 341022 - DNA, 122 bp, Homo sapiens
ccatcatttcgccctggctctgggggaaggcgagcagcgccgacaccccttgcaccaccacggtatggcacacactttgcaggaaggagaaagggtcactgctccatggcgaactaggggag

SEQ ID NO: 341023 - DNA, 122 bp, Homo sapiens
ggtgtggagggcggggggtgtaacaggggtgctcaccatagatcatggccagcccggtctcgtgcagaaagcgcacccggcggtgcttgaagagccagatggtgaggatggtgagcgtgagc

SEQ ID NO: 341024 - DNA, 122 bp, Homo sapiens
cactgaagggtctgggtgatgactgataaggtccccaaaactaacatggatgtttggggccgggaggctataaaggagtgtagtccacctggtgtaggggtgattagggtccaggaggggtc

SEQ ID NO: 341025 - DNA, 122 bp, Homo sapiens
acatggaggtaaaggaccccggagggagacgcggggctgagcggtgagcggtgtatcgggcgccccttccccgggcggctgcccctgccctgagcatggagcacgcggctcatcgctgctgc

SEQ ID NO: 341026 - DNA, 122 bp, Homo sapiens
caggttctctggggagagctgtgccttcctttacgcaccagcgagtatatgaactgcctccgcggattccctgtaccccacaccgtcagggccgagccgctgcctgcagatttggggaagga

SEQ ID NO: 341027 - DNA, 122 bp, Homo sapiens
cgtacaggaaaaaatcgccgccgctccgttccctgcatcgctgagtcagaatgagacagccgactaacgccactaagagtcaccaggcgacgacaccacagccctcctcacgccttaaggag

SEQ ID NO: 341028 - DNA, 122 bp, Homo sapiens
tggttgccatggggacgtcaggtaatgaaccagcccagggtgaaatcacaggctgttcttcgcccagctgggactggtggtcacgtcaccactggcaactggaaaaacacagagtgtcatgt

SEQ ID NO: 341029 - DNA, 122 bp, Homo sapiens
tcctcctcctccttctccccccaggttttcccgaatgtatctactccggttacaactagacgcggcccctcccccacctgcctccccccttccttccctcgatcgtggagggagcgttctct

SEQ ID NO: 341030 - DNA, 122 bp, Homo sapiens
gagcggctggcaggaggagtggagctgggcgcaaaggtggactcagggcggctagagcgacgcggcggcaggggtggggagagtgcggagcccgagcgcggaggcttcggttccggtggcgg

SEQ ID NO: 341031 - DNA, 122 bp, Homo sapiens
ggttggctaatgacggtgattccatactcctcggggctcctgtccttaggcaggctggcccgtaagatggcgttgtgggccacattgagaaagctgaccagggcatgccagcctttgttatt

SEQ ID NO: 341032 - DNA, 122 bp, Homo sapiens
ggttccaggtcagggcagggaaggccggagttgcctattggagcagaggatctatcaggacgtccccgttgccacagcgagaaaaatcgatatgtttttgcgggctagggaggcgagcgcct

SEQ ID NO: 341033 - DNA, 122 bp, Homo sapiens
ccccctcagcctcgcccgggtcctgcttctggccagggaccccccaaccttcgtggcgggcggaccagcctccaggcccctgcctcaggccgccatgaggccgaggcctgcaggctccgcga

SEQ ID NO: 341034 - DNA, 122 bp, Homo sapiens
agggggcttcacagttgactggatggaaacggcttcttcctgctgctgagagaggagcaacgtgacctcgatcccaggctcctccggtagcgcgcccccacgcccctcttccagtgcagccg

SEQ ID NO: 341035 - DNA, 122 bp, Homo sapiens
cggctgcctggcccctacgcagagtagcaagaagcactgcgatgtgcgctactaagcccacgcggccgcagcaaaaactttggcgtggccggggcgtggctagggtccggccaggccccctt

SEQ ID NO: 341036 - DNA, 122 bp, Homo sapiens
catcctggacgcttggtttctcccggatgtttcagcagggccaaggaatggtgaatagcccggtggggcggtaaatcccaagccgcttctccaacattccttttggaaaagggagctgtgtc

SEQ ID NO: 341037 - DNA, 122 bp, Homo sapiens
atcatgtttactgaggtggataactgcatggaggttctgtgagagaatgttcttatgaaacgcacatgggagcctgtgacagacaggcccgagcaatacaaatgtcctcaggtgggacagaa

SEQ ID NO: 341038 - DNA, 122 bp, Homo sapiens
ctgggaaggaggtgaggtgaaaatctgggcaaggtaacttggccaagggcagttcctggacggatgctcagctatgagccctcagctgctgggggaatgaatttgtgcattgccttgcctga

SEQ ID NO: 341039 - DNA, 122 bp, Homo sapiens
ggggtcttccggggacagtggccagccctgggccggtgacctagcctttgggcgcttccccggggctctagggtcccagggcgccagggccaacaccaggaaagccagaaggttccttcctt

SEQ ID NO: 341040 - DNA, 122 bp, Homo sapiens
taatggaatctttccatgttatcaagcaatgacaggatgggaacagatactagccaagtccgaaccttaactttcctcttggttttgactgtgaaggctgtggtggagtgagactgtgggtt

SEQ ID NO: 341041 - DNA, 122 bp, Homo sapiens
ggaaaattccctcaaacgttcgtcaggcctaagagagtcgtcccttcactcaaaattgcccgtcaccccccgccccccaccattaactttcgattaagacctcctccttagggcaactaaac

SEQ ID NO: 341042 - DNA, 122 bp, Homo sapiens
tggggctgtgaccagtccatgccaatccccctccacccaggctggtctctttcccttccccggcacttgcagctggccccctggcctgctccatgacacctaataggcaccagagacttgaa

SEQ ID NO: 341043 - DNA, 122 bp, Homo sapiens
ttaatgggagaaggccgggtgccagcccccctggcaggacgagggagcagtgagcagcgtcggggcctgtcactgcctggagagcctggggccccagacccttcacttatggagttggaagg

SEQ ID NO: 341044 - DNA, 122 bp, Homo sapiens
gtctgaaaatccttttcaaggcagatttctcagaagacaaattgccaaacagtacaaatacgaactgaactcatgtaaaagcaagcctttgtttacaaattctcaaggagacctctgtcccc

SEQ ID NO: 341045 - DNA, 122 bp, Homo sapiens
aggaactaagactgattattcagagccggtcttcagtctttgggaaagctaatttatttccggttcacccttattcctagctagtccttgatggtcccatccaaaagtctggggtatttact

SEQ ID NO: 341046 - DNA, 122 bp, Homo sapiens
gaaccggcagataggctgacacagcacctgggccgagcaggcctgcagcttccctctgcgcgctcacaacactctaggaagctatgggaggtgaggcccgtagtggagaagaattgaaggag

SEQ ID NO: 341047 - DNA, 122 bp, Homo sapiens
cggaaagagcgggatctagcgtgggataaaagtgggactactacagtgtaactgggcatgcgcccctcctagaaatgatgggaatgcaaaagcccttgactgctccaggactcgagggatcc

SEQ ID NO: 341048 - DNA, 122 bp, Homo sapiens
tcctcccagggaggctgaagacaggccctggggcagtagtgggtggagactggacctcaacgcctagagggaagtgaaagggttaaccaccccgccacccaccaccacctgccactgggccc

SEQ ID NO: 341049 - DNA, 122 bp, Homo sapiens
ttctgtggagttttgagcggcggtaagaggtgtctacgggcttggaaggacgggctacaccgcttgcatcaagacggcggctgctgtgagatagtccaactgcatcttagtttccatttcga

SEQ ID NO: 341050 - DNA, 122 bp, Homo sapiens
gcaaatcccagggtaggtgctactttcctgtccctgctgttctaccttatagctggcacacgatgaagttggagataggacttgatgagcctaattgttctcctcagcctccttttgttttg

SEQ ID NO: 341051 - DNA, 122 bp, Homo sapiens
ccagggcagcccagctaacagcagactgctctcggtgcttggcttggtacggtgatgtgccgcactccggcgtcgcgaggcgagccagagcagacatgtcccatgggacacaagagccgatg

SEQ ID NO: 341052 - DNA, 122 bp, Homo sapiens
acagtaccgcagcatgtgactgaaagatgataacaacaatacaaacattaatccaccatccgaatagaagaaatatcaaaactataattggcctcagagataaagagtagtggcagaaatga

SEQ ID NO: 341053 - DNA, 122 bp, Homo sapiens
gcagggaaacccggtgcacttgggaggcacagccaaggcttcaggggtcagcatggctggcggacgctgcacagccaaggagaggtggactcaaacaagggcggcctcgggggcggtgtgca

SEQ ID NO: 341054 - DNA, 122 bp, Homo sapiens
tttcttgcccacatcaccgccccctgccgcgtttagcggctgcgtaggcctgctcaccggcgtgcctcagccctctcagcgtacagcatgagctggctgaagcagccccaaaaggggcagcg

SEQ ID NO: 341055 - DNA, 122 bp, Homo sapiens
ctgcaaaacctccagacgctcaggatgttcgcaggctccattgacaaaagtgacttcccacgctttgcccacagagggcatccctgcgcattgatacgcagaccaggcaaatgcagctcctg

SEQ ID NO: 341056 - DNA, 122 bp, Homo sapiens
ggctgggaagtccaatatcaaggcactggcatagtccatgtctggtaagggcctgcttcccggttcaaagatagctatcttctcactgcaccctctcatggtgaagggcaaagctagctctc

SEQ ID NO: 341057 - DNA, 122 bp, Homo sapiens
attcagtggtaaacaggacatcgactctgtccagaagtggatcggagcttctgggagctgcgtgaccgcttgtcagggcagtgacagatgtgtatgggtatttgggagcacagtgaaagcgc

SEQ ID NO: 341058 - DNA, 122 bp, Homo sapiens
tgctccagcacagacgcatacatatacgggaggagggtttggggtgggtgagaaaaaggacgcttttgtgatttgatcaagaaggatggattgagtcacttcacaggttttgccagccttgt

SEQ ID NO: 341059 - DNA, 122 bp, Homo sapiens
gaaaatctaaaattaaaagttcatttaaaaaaaatgcagactttttaaaatgctagtttccgttctacgagctcagggtaatttaccatcaataaaaggtagggatagggagctgaaatcct

SEQ ID NO: 341060 - DNA, 122 bp, Homo sapiens
tctgagggtctccctaaatgagtttctccccatctgtaactttcgggcagttacaaagcacgccagtgttcctcttttgcttcgcccctctccggggcgggaagggaacggcatgacattgt

SEQ ID NO: 341061 - DNA, 122 bp, Homo sapiens
caggagccgggtgccgggctcggcaactactgcaccggctggctgcacggtgacaaagcccgcaagacggtggcaagagctcccttgcatatcgcatggttggctgaaagccccgaaatctg

SEQ ID NO: 341062 - DNA, 122 bp, Homo sapiens
agcctgggccacacacctagaccttgcctcaaaaaaaaaaaaaaaaaaaaaaaaattaagcgctaactctgatatcgctacaaggagggtcctaagattagcctcattacagatggggatga

SEQ ID NO: 341063 - DNA, 122 bp, Homo sapiens
tctttctgcatttcctgaaagataagctatataaaaaagagaaataaatggtgacattcccgggaagatttcctgctggctttgactttgcatggaggcactgaacagagatggggcacata

SEQ ID NO: 341064 - DNA, 122 bp, Homo sapiens
cagggccttgaacttggccgggtcgccgggctgcggagccgaggggaggagcggcgccgccgcaactggcagggaccctgcggctctccccagttggctacacgcccccgcccctgcaggtt

SEQ ID NO: 341065 - DNA, 122 bp, Homo sapiens
caaaaacaggcttttccaacaattaccgctggagttgctccacactggagatgctccaggcgggcaggctcgccgcagctctggacactctgtggaggagatttccgatgctggcgggggcc

SEQ ID NO: 341066 - DNA, 122 bp, Homo sapiens
cccagaaggcaaagttacctgggacaggagaggaaaagccaaagtcgtttccgacagccacgctgctggatttagatttctgggattcgtatttcaatcgatctggaaaaggaccacattca

SEQ ID NO: 341067 - DNA, 122 bp, Homo sapiens
cgttggaagggggaactggtcaaggcaggttcggtttcaggatctcacctcacctgggagcggggaggtgacggtcccccagcggggcagtcacgccgccctggccttgaggccggactcca

SEQ ID NO: 341068 - DNA, 122 bp, Homo sapiens
aagcaccaggagctttagataccgggcttcctagcaaaagtggctgcaactctgccaaagcgaaaggttagactcctatacatacacctaagaaaggggctgaatccagggggctgagcagc

SEQ ID NO: 341069 - DNA, 122 bp, Homo sapiens
gggacagctccagcaccaaacggcttctgaccaatgagcagagacggcaaacagcaaatgcgttaccgtggctttcacgtgtcatgaaggtgatgctgtaacctgagcctcagagctcattt

SEQ ID NO: 341070 - DNA, 122 bp, Homo sapiens
tggtcattgtaaacttaatcaaaaatacttgcagatttgtgtgtgcatgtgtgaaactaacgaactgatcctaaaatttatgccaaaatgcaaaggatcaagaatagccaagaggccagcct

SEQ ID NO: 341071 - DNA, 122 bp, Homo sapiens
tcgaaaagggaccagtaggagtggcggcccaggtctgagctgcgctgccattgggcgcggcgacgagagggggcggggagcccgtgaggctggttacgccgagggaagccccgactccgtag

SEQ ID NO: 341072 - DNA, 122 bp, Homo sapiens
gttgcgacaatgtctccagagcgggttatcctttgggcccggctccctggccctcgaccgcgcagttttctgcccattcgtcaccacgttgagaccgggaacgccggaagaggcggggcagg

SEQ ID NO: 341073 - DNA, 122 bp, Homo sapiens
agggcctcgagagcgccacgactacgtgtcccagaaagccgtgcgcccgggttgtccttccggctagcttctcttgacttcctggcagcccaaggctgcccagaccgggacggaaactccga

SEQ ID NO: 341074 - DNA, 122 bp, Homo sapiens
attaaggcagtgccaggtttgtgccattcacagtgactctggtgtgtggccattcaacatcgcaggagtttagagaagacttcatagaaggtgagttaggggctgagccatcacgattgggt

SEQ ID NO: 341075 - DNA, 122 bp, Homo sapiens
ggcccaaaaagcagtgtacggagagcataaagccagccctgagcgggcacccaccatcagcgtccggctcggccgtgttgaccacgctgtagagcaggctcccgtccccgttcctcttcaga

SEQ ID NO: 341076 - DNA, 122 bp, Homo sapiens
gctaacgtttttattagttcaccgtcagatttcgtacaggtccgtatgactagaaagagccgtgttctgtctgcggctcacctttgattggtgaagcaacctcctttcttcccatgttggtt

SEQ ID NO: 341077 - DNA, 122 bp, Homo sapiens
cctagctatagctatgggaatgtttactagtaatacatacagagtcatccactgtgcattcgggagatggggtggggaagggtggtggggagggagcctgcgtgggatagcatctggttgtt

SEQ ID NO: 341078 - DNA, 122 bp, Homo sapiens
gtgaaggctgggggaggtaccgggatgccgagtacgccagagcaggcgggggatgggttccggcttcctgccgcctcggcatctcgctttgcaccgggcaaagaaggggccacgaccggcga

SEQ ID NO: 341079 - DNA, 122 bp, Homo sapiens
aaaagtaaaaaggctgaaatattttcaaattgcctttatggacagtaccctaacagtggtcgcttctcccccctactcccgcgaatgacgtcatcgcctcgcggccccgtttcgccattgta

SEQ ID NO: 341080 - DNA, 122 bp, Homo sapiens
gatgtcatgttagctgggagtcttcccacatgtggcacttcaaaaggcagcaccactgggcgcctgcacttatttgaaaatggaactttgggagaagtatccctgctagtggctctgtaact

SEQ ID NO: 341081 - DNA, 122 bp, Homo sapiens
cgtggggcgggggctgcgcccgagcccgatctgccggctccgaggtaagctcagcgcgggcggccaccgctcagagccgcgcaaccctgccccgaagtggctgcgataccgagaaagtcgcc

SEQ ID NO: 341082 - DNA, 122 bp, Homo sapiens
tactctcactggcgctgagtccccttgtggccagccgtgctcacctgtccgagggtccagcgtaccaaattcagcttcaccatccgcgcgagaagacgccgctcctacaccagaacccggaa

SEQ ID NO: 341083 - DNA, 122 bp, Homo sapiens
tgaaaggcagctaagggaacaggaaagatcactggcatctagtcctagttcaattatggacgaaccatgtgatcttgggcctcctggacctcagtttcctcatatgcaaatgctagggttgg

SEQ ID NO: 341084 - DNA, 122 bp, Homo sapiens
cccctccccaactttccacgtttcactcctctcccttttcctcctcagctccggctccgccgccacgattggccagccgaccacccggcctcggccaataagcgccgccctctcgcccccgt

SEQ ID NO: 341085 - DNA, 122 bp, Homo sapiens
aggcagggttggctctaacgaatttgaatgaggagcctcagcacttttcggcgccattttcgagtgatacctgatctcatcaatctagcggaagagacaggataacctatccaagagtatag

SEQ ID NO: 341086 - DNA, 122 bp, Homo sapiens
accgcgggtcaccttctgaatttttaccttcataaacagcaaggactgcgctctttcgcacggcgccccgttttttcgtagagttccgtcggccaaaaccacttgaaactcgctcagcggcg

SEQ ID NO: 341087 - DNA, 122 bp, Homo sapiens
attggccactgtgggagagagtcgggcagctgaattcccgcaggtgggaatgccagggcccgaggatgttgcccctgtcctgaaggctgtcgcccgatcgctctatccaaggctgccctggg

SEQ ID NO: 341088 - DNA, 122 bp, Homo sapiens
aaaacgcgcacgggcttcggaggtggctatttcatctttgtgtttcttcgcagtggttctcgcctcccagaatccgcagagatctaataaacacataagttaaagagagcctcaggggaacc

SEQ ID NO: 341089 - DNA, 122 bp, Homo sapiens
gccgcgcggaggtcccggcgtctcggtggtcccaccgcgccggttgtcgccgcgcgaagccgcccgggccccgggacacaaggacccgaatcaggagagtctctccagtcggcatggtggct

SEQ ID NO: 341090 - DNA, 122 bp, Homo sapiens
cgggggcctgtttgcagagagccgggcatttgcatgaagcgactcgaccccacagagcagcggcagcagcagcggaccccggcggcggcggcggcgcgcggtcccagccaggcggccccggt

SEQ ID NO: 341091 - DNA, 122 bp, Homo sapiens
ggcctggctgctttcactcccgcagtcctgttgtgatttgttggtgctggcatgtctgttcgtgacgtcaggagttcgtgcctctttggtgcaacgcagtcttccatcgtgtgaatgaggca

SEQ ID NO: 341092 - DNA, 122 bp, Homo sapiens
gtacaatacaatcatagcaattttaaagtaacattaaagagaagacctctagttctgtggcggttttgcttttatttataatctacaagggatgggagggtttgttttccacatttttaccc

SEQ ID NO: 341093 - DNA, 122 bp, Homo sapiens
taccttgtgctctgtagatcaggttatgtccaaatggagacagagtctcctgctgaagaacgagttggatgctcctctcagttaaaaagtgagctgaagatggctcgaggatggaagagaga

SEQ ID NO: 341094 - DNA, 122 bp, Homo sapiens
cgcgagggagggcggcgcgcgtgggccggcggggtgcgggtggacgagccgggggccctgcggcaggtggctacgctgcttcggtcctcagtttacccgtctgtccaacaggaaagatcatt

SEQ ID NO: 341095 - DNA, 122 bp, Homo sapiens
gtagtgacacttctaggagcaccgggaaactgcgggcgtggtatctccggggagagaggccgcctgggttggtagtgggcatctgagagacaaatccggtcctgcctgactccctgactgtc

SEQ ID NO: 341096 - DNA, 122 bp, Homo sapiens
aggggaccctggagacagaggaggcctggcctgtttgtgtgctgggggcccaggtggaggcgagggcttacttctcagaggctaagatcattttggacagcatggggtccaccggcagctct

SEQ ID NO: 341097 - DNA, 122 bp, Homo sapiens
ctgtaagcatttttcagacattcacaatgggaaatttgaatgttaaagttggagagactgcggttaatagcttgaattttagagtcaggaaaacctgtctgtactcaggcaagataattgat

SEQ ID NO: 341098 - DNA, 122 bp, Homo sapiens
agtttgtctcaggagatgctggtcctgtctcactgtgagaatccctatcatagaccttcccgggcaaagccctttcccgggttcctgtctgaggagggaggtgaagcctcttgggtcctcaa

SEQ ID NO: 341099 - DNA, 122 bp, Homo sapiens
ccttggtttgctcccttgacgtgtaattcgtaatgaaagtcatgttttcatttgggaacacggatcggaggtttaaaactggacagtttaagtgtcaacttcagaccaaagaaaataatggt

SEQ ID NO: 341100 - DNA, 122 bp, Homo sapiens
tactttttctaaacattttacataaaaatcacaccatgcaatataaggtctttgcgaatacgttgtttccttagcataatggtttgaggttcatctgtgttgaagcctgtgtctgtggttgg

SEQ ID NO: 341101 - DNA, 122 bp, Homo sapiens
tgaggagtgtctctgcctggccgcccatcatctgggatgtggggagcacctctgccccgccgccccatctgagatgtgaagagtgcctctgcccggccatgatcccgtctgggaactgagga

SEQ ID NO: 341102 - DNA, 122 bp, Homo sapiens
ccacgctcagccgtcgaggtggccacttcttgctcctgtctgggtctttggcctcgaggacggcacacagcaaggccgagtggtgtggagccgggtcttggagtgaatgcagggatgcattc

SEQ ID NO: 341103 - DNA, 122 bp, Homo sapiens
aaggcatgtcaagagttgagacaggccaaaaactagacctcttgtgccagttagtcaagccgtgaatgcaaaagaaaagttcttggagaaaattaaaggtgctacaccagtgcacacacaaa

SEQ ID NO: 341104 - DNA, 122 bp, Homo sapiens
gtgccccgttgccgccgcccacgccggctcccgcgccgcagccacccgacttggccatggcgagtgcctccagctcacaggccctgaggccgcagccgccgctcccgcctccctgcgggccg

SEQ ID NO: 341105 - DNA, 122 bp, Homo sapiens
gaaatcaatccatggggctctggggctgcccattgtgcagcattaaccctttaattcccccggaatttgctgggtttgcaaaggcacacccagcgggctcaggatagcatctgctcacccag

SEQ ID NO: 341106 - DNA, 122 bp, Homo sapiens
aggcttgtcctcagacttgatcaggacgctccttggaagctgcttccatgtgcgccttgtcgggtggtcattgggttatgctaacgtgtagtgactagttccaatggggagatgaagcagca

SEQ ID NO: 341107 - DNA, 122 bp, Homo sapiens
ttataaccttccattactctttcttcaaagcgactgagattgttctatcatttattaacccggtggatctcttgactccaatagggttcatatctcacaaaggatatatctaactgcaacaa

SEQ ID NO: 341108 - DNA, 122 bp, Homo sapiens
taagtcccagcgccccagggcaggggccgtaacggccgctggtcgaggcaccgtcacctgcgctgctgcagcacatgaagctggccctgacctcagagagattctaaacctcggccccgggg

SEQ ID NO: 341109 - DNA, 122 bp, Homo sapiens
atactcccaaatggggttcttgatggcactaagagttaacacatttcagagttgtcaaaacgtagtgaaaatcctccagactgtacaacaaatggagaacaatttcactgctaacttttgac

SEQ ID NO: 341110 - DNA, 122 bp, Homo sapiens
tagcacatatcacattcttttgtgatcattactgtgtttctctcccactggaatggaaggcgtgtatattccctgcatcagagtcataagtatagagttggtgtgcaatagtagttgtattt

SEQ ID NO: 341111 - DNA, 122 bp, Homo sapiens
ctgcagccgcgacttgaccacgtccacaggataggtagagagccaggacacgatgcctgacgtaccgcccgccaacagcagcttgggcaccagcaggcggtcgcccggctcgcagcccagcg

SEQ ID NO: 341112 - DNA, 122 bp, Homo sapiens
ctagggcattggccgcgctgctgggtgatccctccgggctcaagttgcaagggggcgggccgggccggaggtggagtctcccgccaattgaagcctccgctataaattgaactccctgcact

SEQ ID NO: 341113 - DNA, 122 bp, Homo sapiens
ccgaatttccagcagaacctttggaatcctcgcagccgccttgtctgccctgggctgtgccgccccagctctgatcagctcaggacacttgcaggctccgtggtactgtacattaactctgc

SEQ ID NO: 341114 - DNA, 122 bp, Homo sapiens
gggctgtgctcccacacagagccctccaaagggacccggcccacaggatggatggacagacgttggagagatggtgcccctttgtgcccagggtggagggggtggggctttggcggaccagg

SEQ ID NO: 341115 - DNA, 122 bp, Homo sapiens
tgggctggcctctccgggaagccttgaaactcaactcccgggtgggccaggaaggctgcccgacttgggcagcgccggccggagccttcttcaaagccgagctgttcgccgccctcgaggcc

SEQ ID NO: 341116 - DNA, 122 bp, Homo sapiens
tcccacgcgatcagccagtcgcagcgcagagcaatgagcttgacacctccttcctccaatcgcagggcagctcctcccagccaatgacaggcctccgaggggaagcccagtccctcgcggat

SEQ ID NO: 341117 - DNA, 122 bp, Homo sapiens
tgaggtgacatcgtgggctggcggggtggtggagcccagggctggcctggtgactgggaccgaggtgacatcctgtccccaggtggcagctgaacctgaagctggttccgtggccggggcca

SEQ ID NO: 341118 - DNA, 122 bp, Homo sapiens
tgctttgccagttttaaaacacgaaactgtctttctcaaaagacctggaagccagctcttcgaaatgtaaacatcaatgaagacagagcccctgtcttccagcttctgtgggatagcaggag

SEQ ID NO: 341119 - DNA, 122 bp, Homo sapiens
tacaataggatgggcactgcacccacattgtttcatttgcctattaacagctaccatagtcgggaagcccaagtggaaatctttgtacatgcctctgccccatccctaatcaaactagcaag

SEQ ID NO: 341120 - DNA, 122 bp, Homo sapiens
gctctcagagataccgagataaccgcctgcgaggaggcgcttcgtgaacccagtgcagtgcgtcgtgggtcagatcccttagacccacgtagggaccgcgctacatccttaccggggggagt

SEQ ID NO: 341121 - DNA, 122 bp, Homo sapiens
cgggccattaacgggccgcgcgtccatctgtgtccacagctgaccttaatcctgtcccagcgcctggggcctgaagctcgtggaatcacccgcctcacgtgtctttgcggcccactaatttg

SEQ ID NO: 341122 - DNA, 122 bp, Homo sapiens
aaccccggagtccggccgtccctcgggggcctcgagcgtctccacatccttgtcgcacagcgctgcgatcagcgcggacttccccaagcccggaggccccaggaacaaggcggtcacgtcac

SEQ ID NO: 341123 - DNA, 122 bp, Homo sapiens
ccatgtgctctcaggaagcccgcaggagtgataccagccgcggagaagcagtgttgtcaacggtgctgacgtgcggtacttaatgagaagttgcccgtgtttttttcgctttatttgtgacg

SEQ ID NO: 341124 - DNA, 122 bp, Homo sapiens
ggttggtctaagccatattctccaatctagttttcatttaaaagttagtatgctgccgggcgcggtggctcacgcctgtaaaaatcccagcactttgggaggctgaggcaagtggatcacct

SEQ ID NO: 341125 - DNA, 122 bp, Homo sapiens
ccttctcacgtttcttttgcttcattcggcggttctggaaccagatcttcacttgggtctcgttgagctgcagggatgcagcgatctccaccctgcgggcgcgcgtcaggtacttgttgaag

SEQ ID NO: 341126 - DNA, 122 bp, Homo sapiens
tatatgaggcaacgagaaacgtccatgggcggagcgtcctcggcattatgtgagcggggtcgggatcaggactgaaaaggtgagacttgggactgggactttgaaaagctgcttaaggaact

SEQ ID NO: 341127 - DNA, 122 bp, Homo sapiens
tccctcggaggcctatctaagtaagggtcctcggtaaaagggggctaccatttaaggttccgattacatgatcgtttggagttcagtggcctaaggtaagaagaaacaaactggcttattag

SEQ ID NO: 341128 - DNA, 122 bp, Homo sapiens
cggtcgcccggcgcagcccggcgcgaggagcaaatgtgcgcccgcacggcgagggcagcccgggcttcgctggttctcgccgaggtctttcctcgtagcgcccacactacggggaggaaaag

SEQ ID NO: 341129 - DNA, 122 bp, Homo sapiens
gacttgcgtccgggcgggaggcggggcccaggatctctgctcaatcctggagtccgagtccgcaaagtgggagggagggtgtagatgtgaatttggggaaaaacgaccctgttgaatttcta

SEQ ID NO: 341130 - DNA, 122 bp, Homo sapiens
ctagtggctaaagataatacagaagtaaatgggagatttcttcatagcatttatcataatcgaaaactcaaattaggaataatgatcctgagagggcctgtagaggccagaagtgggaaaac

SEQ ID NO: 341131 - DNA, 122 bp, Homo sapiens
atttcttcccatcgtacccttccccacacataccaccttggcttcttctatatcccaccccgatgctctcccaggtgggtgtgagagagacctcattctctgcaggctccagcgtggccaca

SEQ ID NO: 341132 - DNA, 122 bp, Homo sapiens
cggatcctaagagccaggcgggcaagaggggctggctcttactccccgcatcgcgggaggcgcctcacccccctgccatgtggatcgtcatatccaggaggcgagagcggggtgatatggct

SEQ ID NO: 341133 - DNA, 122 bp, Homo sapiens
ataaacatttcccaccaaactctgacatatatatcttaactagagtccaatatttgtttacggtttttgttgttgttgttttcttttttgagacagggtctctgtcacctaggctacagtgc

SEQ ID NO: 341134 - DNA, 122 bp, Homo sapiens
agctgaccctggacccttcccttcctctgccagccaacgcctgggcttctctaccccagccgggcccagagagtctggccctggcttgcaggtagtctcctgagcttcccctggtgccaggc

SEQ ID NO: 341135 - DNA, 122 bp, Homo sapiens
aaaagaagcagagcaaaaaaggccagttcattccattaatacacagaccaaatcctattacgacagacagattcctatctctaccctcaccatctctttcccttcccccaaataaacaagtc

SEQ ID NO: 341136 - DNA, 122 bp, Homo sapiens
acctgtccctgatacaaaacgctgacagccttggggctggccacagggagcacaccttaccgaggggacggagaggaagccgacctggggcggggagctggccaaagaccggcacaagggag

SEQ ID NO: 341137 - DNA, 122 bp, Homo sapiens
acctcagacccaggatctcagcccttgtgcgtcttcaggatcctcatccctgatctctcccgaaggccgccctatccctccttcaggcggggacctagtaccttccgtccagcgctccccgc

SEQ ID NO: 341138 - DNA, 122 bp, Homo sapiens
gagagtggtaggaaatgaggtaggcaggggtcagattttatttgaatttcagtagaaagccgtgggagagctttaaatggaggagtgaaatacgaggtatttggagaatacctcacgtaaaa

SEQ ID NO: 341139 - DNA, 122 bp, Homo sapiens
agcctaagtaaacaaatgacctgaagcccgaaacacaaaccatagcatggccagctattacgctactgacaagaagaaggaggagaaaaagacagtttcccaagtcaggatatagggaatca

SEQ ID NO: 341140 - DNA, 122 bp, Homo sapiens
tctctcctccacctgccagaataaaccatcctcgaagcagctgaaaaacatgccttgatccgggtttttcataatgaaagaaagcaaaccaggcttctctcatttccaagggtactcgagcc

SEQ ID NO: 341141 - DNA, 122 bp, Homo sapiens
aaccagacatgtgtattttgaaaaagctcctcaggtggttcaactgtaaaacgaggattgcgagtcatcagcctaggtcagtcacttagctcttttgaaaactagaagccaggctcctagtc

SEQ ID NO: 341142 - DNA, 122 bp, Homo sapiens
actcagataatgtcggaacaccatcttggaagtgatttcatattatatgataaataattacgcatcttgtctgagccagcaagttctgattctttaaaattcagttgactttttgaaatagc

SEQ ID NO: 341143 - DNA, 122 bp, Homo sapiens
gttagcacctctgtaacagttacattccagcaacatcgagtcccagctgccgatggctggcggcgcaaacactccctgccctagctatgtaagttccccaactacagtataacctctcagag

SEQ ID NO: 341144 - DNA, 122 bp, Homo sapiens
gcccgggcagcaagtgcctccccacagaggggactccacggtgcaggagtgacctgctggcgagttctggccagccagggtcccagcaccctccccccggcgctccagctctggggccccac

SEQ ID NO: 341145 - DNA, 122 bp, Homo sapiens
agacgatctgctccttcggaagaaaacacagggtgcggcggtgactcgcagagctcccagcgccccagcgcccccgcgaggcccgggcagcgtccgcgctccctacagggggaagcccgccg

SEQ ID NO: 341146 - DNA, 122 bp, Homo sapiens
cgcctccggagtgctgagctggagattccgccccgcgacggcccccagatctctgacccgcgttaccggcactcacctgccgctgcccccgaccaactcaagcgccactgcctctacctcgg

SEQ ID NO: 341147 - DNA, 122 bp, Homo sapiens
ccacctggtggggaccgcagcggctgaactcgggtggccgctgggactcagaggtcatggcgagcacggtggtgaagtacctgaggtaggcacgggtctcgggtggcctgctctgccccggg

SEQ ID NO: 341148 - DNA, 122 bp, Homo sapiens
acagaattattgctggaactgttgataccaagccaatccttttcttggagttgctaatctcgggagaggtggagggagcagaaaagaagatagcattgcaagaagcctcggaatcagttgag

SEQ ID NO: 341149 - DNA, 122 bp, Homo sapiens
ttcttccgcctgttccgggtcatgcgtctggtgaagctgctgagccgtggggagggcatccggacgctgctgtggaccttcatcaagtccttccaggtagccgcccctcatgtcctgcggcc

SEQ ID NO: 341150 - DNA, 122 bp, Homo sapiens
cgctcctcacatcccagacagggcagtggggcaaaggctctccccacatctcagaagatgcgcggccgggcagagacgctcctcacttcctagatgtgatggcagccgggaagaggcgctcc

SEQ ID NO: 341151 - DNA, 122 bp, Homo sapiens
ctgattagcgctctacatcacccaccgctcagcctcccctggggtcgggtggcttctccacgtcttaaataagattcagttgtcatgtgtagtatattgggagtgcgtttgaaacggtgttt

SEQ ID NO: 341152 - DNA, 122 bp, Homo sapiens
tcctcattgctcacattcgtgtgcagaaacatgcacccacctctagccatgctcaggcaacgtcaagtataatatacatgtagtttaaaaaaaaaccccagcaacttccccttaataaatac

SEQ ID NO: 341153 - DNA, 122 bp, Homo sapiens
agagagagagagagagagagagagagaggatgtcgaccttacatggctcctagctctccgcgctctagccgaatgcctggttcctagtgggtgcttgatacgtgggaaatgtagggggaggg

SEQ ID NO: 341154 - DNA, 122 bp, Homo sapiens
accccagcttcctaatttagtgctaatggggaaacctagagaggggaggaagaggcttagcgcccctgcaggtctacagatgctcaggatgcctggctccctgcagcaggccctgaggactg

SEQ ID NO: 341155 - DNA, 122 bp, Homo sapiens
gtttatttcacttaacttcatcctcaaggttcaacttaaaggtgtatccatgttgtagcacgtgtcagcattttctttcgttctcaggctaaatagtatttcattgtgtgtgtacaccatgt

SEQ ID NO: 341156 - DNA, 122 bp, Homo sapiens
taggatttcagagagaaggatactgtgtggggacttgagcttctggagagggtggcgcctcgcgtcatagtcagaagcctagtcttgttttttttacagaggcttaattttcagcatttggg

SEQ ID NO: 341157 - DNA, 122 bp, Homo sapiens
taagcaaacagggatttggtgcagcagccacagcctgtcctgcatttgccccggtcgccacgagagcagctctcctgtggttcgcttcccggactctggccccagcatatgtgaggaagggc

SEQ ID NO: 341158 - DNA, 122 bp, Homo sapiens
aatcctctgggcggttgtccctgtcaggctgtcaggacctgattttccctggtaagccttcgtcaggcaggtggcctcgcccaggcctcggaaaatgtcagggcgcaagctgggcacacggc

SEQ ID NO: 341159 - DNA, 122 bp, Homo sapiens
tctgtttaaaaaacaaaagtagcgcatcggtggtcttcacgacgtacacccagaagcacccgtccatcgaggacgggcctccgtttgtggagccgctgcttaacttcatctggttcctgctg

SEQ ID NO: 341160 - DNA, 122 bp, Homo sapiens
cgagtggaggaatcctagggtgtgcctggaggtggcggagtgtaccgacgcgggtgtgagcgcgtgtgccagcgagggtgggcacgggggtgagcgtggcaaggtgagctgggtttgggggt

SEQ ID NO: 341161 - DNA, 122 bp, Homo sapiens
cgtcagaaggggtctggttttcgcaccttccctgacgtcaaacctccatcagggttgcaacgccacgttgccttggatgcctgcgtgagtggagtcgcgactcggggcccgcgtcctgagag

SEQ ID NO: 341162 - DNA, 122 bp, Homo sapiens
agaggcgggggtctgggggccaatgcccgaggcagcggctgcggctgcgggaggcgggggcgcgggcgcggctggcggaggctgcggcggcggcggctggaggtgacatgctcgcgggcggc

SEQ ID NO: 341163 - DNA, 122 bp, Homo sapiens
ttacagctcttaaagcagcacgtctggagttgcctgtttctcccggtgggctcttggtctcgctggcttcaggagtgaatctgcagaccttcccggtgagtgttagggctcataaaagcagt

SEQ ID NO: 341164 - DNA, 122 bp, Homo sapiens
gagttccgggtgggtgtgggctcagcggaccctggactcggagctgcggggaggccccaccggcccgggcagtgaggggcttagcacctgggccagtagctgctgtgctcaatttctcgccg

SEQ ID NO: 341165 - DNA, 122 bp, Homo sapiens
ctgaagctgggttatctgttccacgcccccggcattttcctttttgagtactttatcctgcgctctgtctcctgccataaggggcgtcaagccagaattcgagattccttcctccaggagga

SEQ ID NO: 341166 - DNA, 122 bp, Homo sapiens
gcctgagtctcttctgcaaatccactccccctgctgagtcctgggatctcagtcaaggggcgaattcctgatgccccctgccaccctcttccctctccaaaccctgaaatctgtccaaatgg

SEQ ID NO: 341167 - DNA, 122 bp, Homo sapiens
acattgtcttgtttcctttgcaggttcccattagaaaacctagtctcattccactcagtccgcacctcacttggtcattttgtcctgatttccttcagtgaagccttgacttagtcttgaga

SEQ ID NO: 341168 - DNA, 122 bp, Homo sapiens
agtgctgggattacaggcttgagccaccgggtgaccggcttacagggatatttttaatcccgttatggactctgtctccaggagaggggtctatccacccctgctcattggtggatgttaaa

SEQ ID NO: 341169 - DNA, 122 bp, Homo sapiens
gcccggcctccagcagcagcacgcgctcggcggggtcctccgtgagcctcccagccagcacgcagcccgccgagcccgcgcccaccaccacatagctgtactcgtcccggctctcagagcct

SEQ ID NO: 341170 - DNA, 122 bp, Homo sapiens
gtatagttacgttagtcactcgacccaaaccttaataggctgccaaaacgttttcataaacgaaatgaaatggaaataaaacagtaagagaagaggttattccatatgttgaactttggtcc

SEQ ID NO: 341171 - DNA, 122 bp, Homo sapiens
gcgcaacccgggggcggggcaagcggaggcgaggctcccagtgcgtggcttttctgtctccgccccctgaattttgcattctgcgtttccagggcccctcatgcacttaatccacacccact

SEQ ID NO: 341172 - DNA, 122 bp, Homo sapiens
tcatacagggagtgaaaactcaaggaattaggactgtgtagcagaaatgtagaaagaggacggaacttggagtcagacaggcctggattagaatccttgtttggtcacattctaactgtctg

SEQ ID NO: 341173 - DNA, 122 bp, Homo sapiens
agcctgcacgctccgtgccgaaactcctgctctgcccccatgagaaggaatgtccaccaccggatgaccttgcagttcagttcatcaacacattgagggacatgggaatgtcccaaaggtgg

SEQ ID NO: 341174 - DNA, 122 bp, Homo sapiens
gaaccgattttttgcaaagcgagatccttttcaatgagtttctagctggatcgcctccttcgcccccacacaaccccataatcacattttaagattgtgcccttatccattccatatggccg

SEQ ID NO: 341175 - DNA, 122 bp, Homo sapiens
ttttttatcctagacctcacccttataatcattgtaggattaccactgtgagggtaaaaccgtgcattgagttgacattatttaatgttaaaattgatttttttaaatgatgtggagctttt

SEQ ID NO: 341176 - DNA, 122 bp, Homo sapiens
aacacccaggacacattacatctcaaggagcagagaaaattagtctggctaaagaaaatccggcaaaaatgcaaaagagaacttgcagatttcaggagccagattcccctatagtgccttga

SEQ ID NO: 341177 - DNA, 122 bp, Homo sapiens
ctgtcagctcaagcttatgctgaatttcaacagctgtgacatgtctaaactgcattatctcgaaaacattggctctagtgaaaactagaaaggagccaaattaataaaacaaaacatttcaa

SEQ ID NO: 341178 - DNA, 122 bp, Homo sapiens
gtcatcatacacactattttagatgcaaagatcctcttttcaacaccaggatgggagccccgaccctgaaaggcagatgtgggcaacgccacagagctaggctctcaatgtgttgattctgc

SEQ ID NO: 341179 - DNA, 122 bp, Homo sapiens
aggaaggcatacactgtccagtgcattttcattagtggatcacgtagctactttccctgtcgagtccaattcactatttcctcagaagcttggggcagaggtcctagcagaaggagatgaat

SEQ ID NO: 341180 - DNA, 122 bp, Homo sapiens
ccaatgctgctgaggatgtcagagcacaggaacgaggccttgggaaattacctggaaatgcgactgaaatcttccttcctgaggggtctgggctcttggaaatcaaaccctctcaggttggg

SEQ ID NO: 341181 - DNA, 122 bp, Homo sapiens
tgcctggctgagaaaagcagcaaaatatcagctttgttggtttcagttaacctcttagcccgggctaatctcttttccttgatgttcaaaccaatttgggatatctaactctaaagagagac

SEQ ID NO: 341182 - DNA, 122 bp, Homo sapiens
tcagcaagtagtgcttggattcttctgatctttcccagcatcttcctgaggtgcgggccacggaagggttaaggaggctgcgggcaggtttttccctgcaggggtggggcagctgggcaggc

SEQ ID NO: 341183 - DNA, 122 bp, Homo sapiens
cccgcgtgtgctgagcaggagagaaaggcgtgcagagaggtctgctcctgggcctcccttcgtaagggcagtcggttccaaaggccacgtgtaaagcacaaagtctcgaacactttcttttc

SEQ ID NO: 341184 - DNA, 122 bp, Homo sapiens
gggaattgttgattccagagagaattgctgatgggtgtagcaccccctgggtgcgtgcatcgaagctgtgaacaaatcccccctttcctcactagagtctctacagagaaatcacctcagcc

SEQ ID NO: 341185 - DNA, 122 bp, Homo sapiens
gctctgggctgctggctggttgtgcatttgctgtgggttccctccggcaggcgacctctccgcgctgagaaggttatccggataaccaagtaagaaagtacatgaggaggcacagaaagaaa

SEQ ID NO: 341186 - DNA, 122 bp, Homo sapiens
atccacctgggtagcgcctgatatgtatttaccagagttttattccccgtcatcttcccacgttcctggggcagccgggaaagtgccggtcaggcccattgctgttgataatttaaggcatt

SEQ ID NO: 341187 - DNA, 122 bp, Homo sapiens
cgccgcgcacctgccgccccttcctccatgcggtcgctgcagccttcccgccggacgcctcgcccccccgggcaggggcgcacctggaccacctgcctccccgcctctgccccgagcctgcg

SEQ ID NO: 341188 - DNA, 122 bp, Homo sapiens
gctactgcaggcagccatgctgcagctgctctcagcagccctctctcccattccagtccccgcttaggagaaactgtgcatggcacaaatctgattgggacaaggtggcgtttggggagaag

SEQ ID NO: 341189 - DNA, 122 bp, Homo sapiens
tccaaggctaatttacccgaggtcacacaggtagtgagtggcaaaattcttccgccttggcgtatacctcccgcactcacggcctggcctccggaggctagacggttcgccgcgctggggag

SEQ ID NO: 341190 - DNA, 122 bp, Homo sapiens
taaggtagcagaaaaatagaaaagcagtgaagcagatggcatacataacaaaggccccagcggacacatagcagatgtaggcacagggatttacataggagcaaggaaaggtcctggagggg

SEQ ID NO: 341191 - DNA, 122 bp, Homo sapiens
ctggcagccagtggttcgccggcactgacgactacatctacctcagcctcgtgggctcggcgggctgcagcgagaagcacctgctggacaagcccttctacaacgacttcgagcgtggcgcg

SEQ ID NO: 341192 - DNA, 122 bp, Homo sapiens
actcccagggctacctagccctccccgtcagcagtcccggcggcgaaccgacctgggtgccgaaggcccctttaaacgcccacccgcactcccgccgccccagcccgccgggcccacttccg

SEQ ID NO: 341193 - DNA, 122 bp, Homo sapiens
acctcgtgatccgcccgcctcggccttccaaagtgctgggattacaagcgtgagccaccacgcccggccggattggtcatttcaaagtaactttccctgtagggcaggaacaaggaaacaga

SEQ ID NO: 341194 - DNA, 122 bp, Homo sapiens
ggctcaccaggccggcctcagcggtgcctgggccagccgaggggtggggtgattggagtccgatctggaccaatgggcagccggcgggacgggggcggcgacgacaaccgcggccgcaagaa

SEQ ID NO: 341195 - DNA, 122 bp, Homo sapiens
gcaccaaggcagtggaatcctttcaaaataggcctccagcgccatagaccagaaagcaggcgcccaattctgggacactgggagatggtgcaggcagccaccagtacgcaaagcatagagcc

SEQ ID NO: 341196 - DNA, 122 bp, Homo sapiens
agacgggctgccgtaaagcttcgctttgccgactgctgcaaagcgccttacgactgaacccggaatcgacctatggccagcagtcgtccccgccctgcttcaaacatttgggtttcaggagc

SEQ ID NO: 341197 - DNA, 122 bp, Homo sapiens
aatctccattatctccaaagtcaacaaaatagaggtccaagttcccattctccaaggtgccgaggacccgggctcgataccaggaaccatttgtaggtaaaggtgctgctacaatgtctcct

SEQ ID NO: 341198 - DNA, 122 bp, Homo sapiens
aaggttgtaaacccccatgatttgactccacgggcagttaaagtgtgttcccaccccccacggatccgctgccactaggctgtgcgaaggcatttacctccctggcactttgatccaagttc

SEQ ID NO: 341199 - DNA, 122 bp, Homo sapiens
tttagttagcagtacattccaaatttgccatcagaacacagtttcgttctaagcattatacggtgactcatttgcaagtaacatttggaaaacagtgacagtgtgcaggtcagctgcatttc

SEQ ID NO: 341200 - DNA, 122 bp, Homo sapiens
ccctgcgtgcacacaggcccgaagccacgcagccagcaccgcgtagccaggcagagcacgcggcacaggcttctccaccatgtgagtcataaacacttgaaactgtgggcgacacacatgct

SEQ ID NO: 341201 - DNA, 122 bp, Homo sapiens
cagagtctgcaggtcgggcggtagcgacaggtcagagctgcggcctgagcagccagcgtccggcatgaaggtctggggtctggctgctgcctgcttcttgctccagcaccatggaatgcctg

SEQ ID NO: 341202 - DNA, 122 bp, Homo sapiens
ctccggcctcgccataatttgggctccggttccatttgctcatctctccgttccccaaaccgcaggttatggaactgggctgcggatttgcggaatagtctccgggaggagtatttgtcaga

SEQ ID NO: 341203 - DNA, 122 bp, Homo sapiens
gtcaagggaatgaaggagaacagggtgctcagcctgggggcccagcctcccgctgtcacgcgctgcctgcggccgagacccctgcccgcgccctctgccgggctgccctccaagccgccctt

SEQ ID NO: 341204 - DNA, 122 bp, Homo sapiens
agcgcagccccgggcccagcggagccgagggcgggtggtgcgggggttcctgggtaggttcgtcccgacgggccgcgggcggattgaagggagggttgggcccgccggcagccccggcgggt

SEQ ID NO: 341205 - DNA, 122 bp, Homo sapiens
aatgtaaaaagtttattttgccaaggttaaggacacgccagtgtcacaaccctaggagatcgtgacgatggtgcccagggaagttgggatgcagcttggttttgtacattttggggagacgt

SEQ ID NO: 341206 - DNA, 122 bp, Homo sapiens
cataaagtcggggtgcttgagggcgtagggccgagaccgtcgcgggtactgaggcgcctccgtcgtctctcccactcgccgcccgctttccaagacatatgtcccgcttgcagcccatttcg

SEQ ID NO: 341207 - DNA, 122 bp, Homo sapiens
gggctgtacatctggcctcccccgaggttatccccatagccccctggccccatcgagtgtcggagtgattccacctgcaggcagcagaggaaggtatgacagtgaagagaagcctcagagga

SEQ ID NO: 341208 - DNA, 122 bp, Homo sapiens
tggggttcctcattgcaaaacagggtcccagactcccaggtctgttgcgagggcttctctcggcacagagcctggcacatgccgggtgcttgtagggggcctcaaatggagtcaagagatgg

SEQ ID NO: 341209 - DNA, 122 bp, Homo sapiens
ttgggcggttgatgagagcaggcgccacggagcagggggcggtgcccgttggggaggcttcggcagcgcgggagcccacggtggggcggggggtgtcaggcatggcagaccacagttctaga

SEQ ID NO: 341210 - DNA, 122 bp, Homo sapiens
tcttattatgactggactgccactaccctgttcaggcctttattggactcatttctcacccggattttcatgagccacccttcaaacccatcctctacacagcagccaatatcaaatatggt

SEQ ID NO: 341211 - DNA, 122 bp, Homo sapiens
cgggagggcgtctcagccagggctcctgccgcctgcatgggcacggcaggaattcacattcgcccaggccgaattcacctgtccgagttccagggtgaacctacgggggacggggcgcctgg

SEQ ID NO: 341212 - DNA, 122 bp, Homo sapiens
ttcagaagtaccaagtagcaaaccagaaaggacttgatttaggaactaaatctaggctgtcgtggttagaaaaagcaggcagagccttagctatggaactgcagcttggggcaacagccatt

SEQ ID NO: 341213 - DNA, 122 bp, Homo sapiens
cggagggtgcctgtccgcaggaatgcaggccgggagccacgcagagcccccaccccagcccggaatcgctgtctccgaggtcagtttccatggcaacacggaggctgccccgcgcagggtga

SEQ ID NO: 341214 - DNA, 122 bp, Homo sapiens
ctgggccaggtagaggtcgagcacgggcacaccacggaagcgcacgtccctctctgtgagcgagtttaccatgagcatcacccagacgggcctcttgcgctcccagttgcccgcgatggcat

SEQ ID NO: 341215 - DNA, 122 bp, Homo sapiens
gagtgcacttcctctgaggggcacacgagagtgagacccgcacatcctgtgttgcttgaccgtcgggactgaccagggacagaggacacttaactggccaaattccctccttgccatcagcc

SEQ ID NO: 341216 - DNA, 122 bp, Homo sapiens
ggcgacctgaaggaaatacactgccagtttggtcaacttgtgaatgccagttctctaggtcgtcaagggcactgccagttaagactgatcccctaactgcacccgaggctactactcttcgc

SEQ ID NO: 341217 - DNA, 122 bp, Homo sapiens
cgaaagcctggtctgagccggctgggggcggggagtgtggcggagaaatggggaacaatgcgagtgagcaacttcaggaagtcattgtgaaagaaagctgggaagagctccgcggccaagtt

SEQ ID NO: 341218 - DNA, 122 bp, Homo sapiens
agttgggaggagcggtgaggaggggccgggtgcggacccagcgcttcccattgacgtagacgactttgcagccatccttgacctgggagcggagaaggggcctggaccgcaaggcccggtgt

SEQ ID NO: 341219 - DNA, 122 bp, Homo sapiens
gacatgttatgctggggccgtgtcgatgtatcagtgccagccagaacctcagcacacccacgtgggtcagatgcagtacaatccagtactgccaggccaacaggcatttttaaacaaggtaa

SEQ ID NO: 341220 - DNA, 122 bp, Homo sapiens
caagtcctaccaaaataattcaacagccatcactcaagaaaacatcctttaggctgggcacggtggctcacacctcactttgggagaccaaggtggggggatcgcttgagccctggagttcg

SEQ ID NO: 341221 - DNA, 122 bp, Homo sapiens
gacacggggtcccagggcgcggggaccagtcaggcgaggagaattagctgcgtcatttgtcgccatcctagcaactcgagcttacttctcccgatagctccctcctggccgctgctcccagg

SEQ ID NO: 341222 - DNA, 122 bp, Homo sapiens
tgaagtcactcttgtcagacccagaggaaacagggtcaggaggcctgggggaggggaggacgctgctgcgtgtctgagatcagagctgtttccaaggactttctgaagccccacaagaaggc

SEQ ID NO: 341223 - DNA, 122 bp, Homo sapiens
ggatagtggcctttgcctggaaaggggcatgtggtccaaggaagacacctcaggacagctcggagcaggggctggcccaaccctgtccttccctcaccatctctgagacgagtgaggcttgt

SEQ ID NO: 341224 - DNA, 122 bp, Homo sapiens
tcgtctcgcactgggtgggcatcggtgcctgaaggctgcccacctcccccgtgctggctccgcttgggcctccatgtggggccggcctcgaccccatgtctccccagcctcttggagcctgt

SEQ ID NO: 341225 - DNA, 122 bp, Homo sapiens
agctctgtggactcagcccaaggacctcagtgtcacaaagtttgctccccagaaagtggccgcacacggagcagattgtggggatgaggagcccgagcaatgggaaagagcagaaaacgtgt

SEQ ID NO: 341226 - DNA, 122 bp, Homo sapiens
ctcctgaaggaaggtttgtgagggtgaatttctcaaagtcacttcaggtccttactgtagcgacagtgttggcaccttctgtgtcctctctcaccttgcctgtgagccttccagtgggtggg

SEQ ID NO: 341227 - DNA, 122 bp, Homo sapiens
cctccatccagacctctggacctcccccttcctaccctgccatccatcacctgcctgagccgtttgcacagctgcccctttgcttccggctgctgtttgccaagatgtcccagagacattct

SEQ ID NO: 341228 - DNA, 122 bp, Homo sapiens
cccaggccgattccgcggttggggttgaccttacacaggatttgggccccaggccggttccgcggttggggttgagcatacacagggttcgggccccagcgggagtcactgtcgctcagtgt

SEQ ID NO: 341229 - DNA, 122 bp, Homo sapiens
actaggggagtcagtccctctctttctctctctggcctttggaaactgcacgcatctacccggctcccccagccccggaaggaaggaaggatacatcctgcacgatgcgctgagtggctgtg

SEQ ID NO: 341230 - DNA, 122 bp, Homo sapiens
cctcaaaagtctatgtgaagttcctggccctgagaagatgattagtaaatgattaactaccgtaaaaatcatgccatggtaccgaccacttggtctgtaggttaggtgacggcttgtttctt

SEQ ID NO: 341231 - DNA, 122 bp, Homo sapiens
tggtcaccgttgagcgccagcacctcctcagagagccgtgtctgcacccagggcagctggcgctcggggtagcgctctctctgcatgcccatgacctcctgcagtgcgctgccgaacatgga

SEQ ID NO: 341232 - DNA, 122 bp, Homo sapiens
ggctttggcaggtgtggatcacccggaaaggaatcaaacactgagtcctgccaaggtgctcggtcccggcagcaaagccagtcctcagcagcctgcgctcccgaagctcctccagctaagta

SEQ ID NO: 341233 - DNA, 122 bp, Homo sapiens
tttcagtgaaacagggccaagatgattaagctcttaataagattgaggtgatcggccacgcgcggtggctcacacgtataatcccaacactttgggaggccgaggcgggtggatcacttgag

SEQ ID NO: 341234 - DNA, 122 bp, Homo sapiens
tgagtgccctgacggcggaatgggggggccgtgctccggctggtgggctactgtgagggtcgggtcctgccagtgacaaaatgctccaagggctcctcagcaaggctgagacgggtggcact

SEQ ID NO: 341235 - DNA, 122 bp, Homo sapiens
gccaatttcttgctaaagccaacatctctaggaaaagctgaattctagcataggaaactacgaaactgacatctagaatgccagagagggtcgtgtcagggtggctgagccaaggtgtggaa

SEQ ID NO: 341236 - DNA, 122 bp, Homo sapiens
aatcaagccccaagtcccatgtgtcactggaccggtgaggaaccgaactcacctgagaaacgaacacccacacctcacgctcacgccgaccggaagtctttgcacttccgtcttccgggcgg

SEQ ID NO: 341237 - DNA, 122 bp, Homo sapiens
acaggcgctcctgctttcccgcccaaatgttgtattttccaagcctacccttgccggccacgcccccaacctgggcctataaaaaccgccccccgcaggccctagcgggcagacacactgaa

SEQ ID NO: 341238 - DNA, 122 bp, Homo sapiens
ctgagtcaatagtatcacctatgtccaagcacagaggtccaggaaaggaggatggggattcgaatcaggggtgaggcagaaagcacacctgccacagacatggtcctcattaatacaaaaca

SEQ ID NO: 341239 - DNA, 122 bp, Homo sapiens
ccgggagctcagtgctgaggccggcagtggccacagtcacccagcactgtctgcggggggcgtgtgaagtctctccagttcgggggtaggagggcgacactgaaaggcctattgttgctgcc

SEQ ID NO: 341240 - DNA, 122 bp, Homo sapiens
agtttcgtttccgcggtgcccgagggacgccggggtaacggaaaccttggccaccttctacgaagactagagagggtcaaacctatcagaacgcgattatgttgcaaacgatctttgtcttt

SEQ ID NO: 341241 - DNA, 122 bp, Homo sapiens
tttctcaaaaacccaagtccctgcagctgcctgtggggctgccctaaactgcgtgagggccgcaaggcaccctttctctcactcaaggcctgggcttgagcagaagagataaagaccttctt

SEQ ID NO: 341242 - DNA, 122 bp, Homo sapiens
tgcccagtccaacagcccgagcagggagcgatttcggggatcgcgggaaggaacgcacttcgccaagggagggccgggtgccctcgccaccggctcattcctgctccggttttgcccgatgc

SEQ ID NO: 341243 - DNA, 122 bp, Homo sapiens
gaaggagttccagggcgatggggccgcggcccgggctgacgctttgacagctggaaagagcgcggagccagcgcctggtggggagggaggggagcgcggcgaggagagcgccagcgagcgag

SEQ ID NO: 341244 - DNA, 122 bp, Homo sapiens
cctgaccagggtgatggcaggtggccctggggcatcgaggcaatctggaatgagttttcccggggggctgttggaggggaaggaaaagggtcccttggaagggagagaaacgcggcgtccct

SEQ ID NO: 341245 - DNA, 122 bp, Homo sapiens
atttgacctcatccttctagttgcttcacctcctcttgcagatttccatcatggtttcttcggatgccagtttggagaatccttctcaacattttccctcctaagtattcctctgccccttt

SEQ ID NO: 341246 - DNA, 122 bp, Homo sapiens
gctgggccttcttaggcgccgtcccttttggcctttctgcaggtgagctcaggagaggctcgggcaggtggggagctgaggcgctgcctgtttcgtctgttctggcccatgatgtcgggtga

SEQ ID NO: 341247 - DNA, 122 bp, Homo sapiens
gaaccaatgatccgaagccttctttcctgatgggattctttagcgaggacactaccgaggcgcgacttcctgacgcgcatccgatccgggaaggcgcacttccgctccccagttgccgcggg

SEQ ID NO: 341248 - DNA, 122 bp, Homo sapiens
ctcgcagcgcagccgtggccgtgcttcctctcactcatcccagacacagggtgggggcagcgtcaccaaaaagcgcaaactggagtccactgagagccgcagcagcttctcacagcacgcac

SEQ ID NO: 341249 - DNA, 122 bp, Homo sapiens
cccttttcttagagccaagggctgtactaagtttgtgctgccacctggtggctggtatgccgacgtgcctgagcagagggtcggggccaggatgttttccacgtcagccacctggcccctcc

SEQ ID NO: 341250 - DNA, 122 bp, Homo sapiens
gaacagttccttttgacattaatttttgcctacatatatatttttaagttgagaccaaatcggtgaagtgttgagcaagtaacatttatgatgtgtgtatattggaacaaatgtaaaagggt

SEQ ID NO: 341251 - DNA, 122 bp, Homo sapiens
gcggggcggtctggagtgctctagcttacgaaaagtggctagccagggaccagtggggaccggacggccggaggaggatggccggggctctgctgactgccgagctcggcaggcggaggcca

SEQ ID NO: 341252 - DNA, 122 bp, Homo sapiens
tttcttctccctgaataatattgcaacccatttctgttagaaaacatcaataggtttaaccgtctatacacagtctgtccatagagaatggattagtttggggtccctgctacctccttcca

SEQ ID NO: 341253 - DNA, 122 bp, Homo sapiens
cacgcagtgatgtgaggcgggggctgggggtgcagacccagcctggaagcccagtcctgccgttcgttcgtcaggtgtctgctcctctgagtgctcagggtggggctagaatgatactggag

SEQ ID NO: 341254 - DNA, 122 bp, Homo sapiens
ccctcagcacatagcagctgactgtccctatttgcgctggggcaacatgaagagcagaggcgacccaccctgcacttacgatgatcttaaggaagtagttggacttccaggtcgccctgtct

SEQ ID NO: 341255 - DNA, 122 bp, Homo sapiens
gtatgtgaatgacgtagaagtattgcgccgttggtgattacggaagaaccaggagtttggcgtgaccatggtgagagaagacggtccaagaagggacgttatcaggccactttttgggtgga

SEQ ID NO: 341256 - DNA, 122 bp, Homo sapiens
gtggttttgtattgtttgctgctttctttttcctgcagtgtttcgattacaaatggcttccgtctgcctttcgcatcgtggctttctgcagattctggtagttgtcccctcctatcagccag

SEQ ID NO: 341257 - DNA, 122 bp, Homo sapiens
caccttccagacggggtggtggctgggcataggaactcctcacatcccagatggggtggccgggcagaggcgctcctcacttcccagatgatgggtggccagacagagacactcctcacttc

SEQ ID NO: 341258 - DNA, 122 bp, Homo sapiens
ttgttaagaactgaggcaagtctaaccatttcctactgaagaaaccacttctgcagcaaacgcttttaaaatgtcacaattaatagtatttctgctgcgggaggcacttccattaagacaaa

SEQ ID NO: 341259 - DNA, 122 bp, Homo sapiens
tcccatggataggaaaccagtgaattccgtggctggcacaccacgagctgtcacgcggcacgggtcataacacatctgggtgtcatcggacacctcacctcgcccaccctgtaggagcgtaa

SEQ ID NO: 341260 - DNA, 122 bp, Homo sapiens
gggtcggggaggctgcgcaaggcggtgagccccggcagctggagcagcccccgccccagccgcacccaccgctgccccaggagcagcacgaggaagagatggcagcagaggctggggaagcc

SEQ ID NO: 341261 - DNA, 122 bp, Homo sapiens
gtaaagaactggcatcatgctttacctgttgtggctagacctgcatatcttaagttaccacgtgcaactgtcacataggccatgctaattcatgcgaacctcctgaattgaaacaaagcaaa

SEQ ID NO: 341262 - DNA, 122 bp, Homo sapiens
aaggcgacagattccagttgttaaggctacgatgaaatagcagaagactctgggaagcagcgtgcaacgagtggcaaaggagcccctaacgctctttcttctgtgctcgccccgccccctcc

SEQ ID NO: 341263 - DNA, 122 bp, Homo sapiens
tcaggagtgagacgggctggaggcagaggcttttaggatcagagagctgctccggcctggcgcttgactagatgtccatgtcaaacacatcgtactgggtatgtctgggtctggaactgcct

SEQ ID NO: 341264 - DNA, 122 bp, Homo sapiens
cccgtgcggacacaggagaggcctgggcccgcgttctccctcccacgcaggccactcggccgctctgcacgccaggccccgcctccacatcgagcccctctgccagccccaccctgtcttca

SEQ ID NO: 341265 - DNA, 122 bp, Homo sapiens
accgccctggggcggggtatttggcactttcggagggattcggtctggccctcagggcttcggaatcggacttggctggggtagagcttgaactgaccagaaggtggggtgggagggccaga

SEQ ID NO: 341266 - DNA, 122 bp, Homo sapiens
tgggtcgagacatgactgacaggagtaggaacaaactatctaactgtgctggggattacccggtcagattttagagataaagagccccgctggaggagaatacctggaggctaggttcagca

SEQ ID NO: 341267 - DNA, 122 bp, Homo sapiens
ggaggcccaagacctcggggccctgctccaggttcgctgtccctggtgctgaaatcgccccggcggccgcgcctgtccctgtccatggtcctgacacgccccgcaccttctaccctgccctt

SEQ ID NO: 341268 - DNA, 122 bp, Homo sapiens
atcttgggttgtctttcaccagaattgtgttcaacaactcacgttctggagccaacccgccgcagatcagaatccagcttctgcaccacacagccgtgatctcggacaagttactcaatctc

SEQ ID NO: 341269 - DNA, 122 bp, Homo sapiens
tactggtgaaacagcccagttgtagtaggtgccagtcagtcaaggcaggggccctctctccgtcaatatggaaaactcagcagttttcctctcccccagttgtgttcttgtaacgttgttaa

SEQ ID NO: 341270 - DNA, 122 bp, Homo sapiens
gctgagtatgcggccagggcttcccgctgagcggcgcctctgagtgcccgcagccgaatgcggctgcttccttgcaggcggacacccaccgctgggcaccgtctggtaccctgcccctgcgg

SEQ ID NO: 341271 - DNA, 122 bp, Homo sapiens
attctattcttaaacgcctcctcactttcaacagtggggtctgcccgggcccttttcttccgagggggctgaggtgcttcgctggtactgccaccatctccgtttccaggagtcttctgctt

SEQ ID NO: 341272 - DNA, 122 bp, Homo sapiens
gagttggtgccttctctaacaattaggctgatcgttaaatttgctattcctttcttccggcgtctagggagagcgtgcacaccaaaccctccagaacagcaccccggtcccccaccccgccc

SEQ ID NO: 341273 - DNA, 122 bp, Homo sapiens
agggcgaggccgcacagtgctaagacgcaggctctgggatcacactacccggacccaatgcgcgaggctgcccctggggctccgccccatcttccctcctcaaaccgccccgtgctcgttcc

SEQ ID NO: 341274 - DNA, 122 bp, Homo sapiens
ccgaagctcccagcccgcgctcggccccagcccctgttcccgcctcagagccgcagcgagcgggttcctccggcaccgcccaaaggctggcctaggaggttccagcccccagcgccagccca

SEQ ID NO: 341275 - DNA, 122 bp, Homo sapiens
cctgtggaaaccaattgcatttctcttcatatcttccaccaggccggggcctggggttgccgctggaggggctaaagaccgctcctgcttcctcagccgccccttgcccggcgcgggaaccc

SEQ ID NO: 341276 - DNA, 122 bp, Homo sapiens
cccccgctccctctctccctctcactctcagcctttgactctcctctctggcattttcttcgcggcttcccaggcttcggtcttctaagtcctgtcctctggccaaactgaccctctccgcg

SEQ ID NO: 341277 - DNA, 122 bp, Homo sapiens
ttagaacttcaacttctctgaggtttagcttggcgggaggagggggattaattaccgtaccgtaatttctcctgggatactggatttgggaaagggtatatatcctaatttgccattctgaa

SEQ ID NO: 341278 - DNA, 122 bp, Homo sapiens
ctacactccccagagtcctcgggagtcgtccaggtacacgccccagaatattggtcatagcggtccacccgggactgcgcgacccggaatccttggaaggacttctcggaaggactcctctc

SEQ ID NO: 341279 - DNA, 122 bp, Homo sapiens
cttctgtgtgccctggcttctcaggaactgttctctgtgccggacgagcaccaatggctccgctcctccttgctgcctccctgagtcgctctgtccctgggactgctaagggcacggggcct

SEQ ID NO: 341280 - DNA, 122 bp, Homo sapiens
tctctacagagctggggcaaaggttagagaaagcgatctatgtaaacgagctgccaggcccgtacacagtaggtgctccgtgaaggctgtctccctgccccgtcctcaaatatctgcttctt

SEQ ID NO: 341281 - DNA, 122 bp, Homo sapiens
tcttgacgggagtctcatccatcatttcctctctgtgcaacctcaggcagggtacataatcgatctaacttttagttttctcttatgtaatctggagataataacatatattttatataatt

SEQ ID NO: 341282 - DNA, 122 bp, Homo sapiens
caaacagccccactgctactgaggtctctgctatttgggtgggtgaccacaaattggccccgtgcattggcgctatgttgtgagtggtaggattcacactttccagcatactagccaagaca

SEQ ID NO: 341283 - DNA, 122 bp, Homo sapiens
gcgcggaagaggctgggtgtgataaactataaagaggccctaaactcggatgcaacgtgacgggagttgtagttctttcacctggcgggcgtctgctccggttcagctgcaggaggtttctt

SEQ ID NO: 341284 - DNA, 122 bp, Homo sapiens
ccccccacccctcccctctccttataacttcaccatattgtttctatcaccagcagagcccgcagcgctctgagattgggcctccctggcccctggtgccctagagagaaggaaaagaatga

SEQ ID NO: 341285 - DNA, 122 bp, Homo sapiens
ccacgtggccaggacctacagcatcgggcgcagcttcgacggcagggagctgctggtcatcgagttctccagccgccccggccagcacgagctgagtgagtgcccttgggagagcctggcct

SEQ ID NO: 341286 - DNA, 122 bp, Homo sapiens
tgggtgtagactcctgcaaaataattcacttccggtttccagatctcgcgagagagggaccgggaaggtcaaacctaattctgggatcccagggaacttattttctttttttccttttttct

SEQ ID NO: 341287 - DNA, 122 bp, Homo sapiens
ggccatgtgtgcagggtgctcacagcacacatgtgctcatggtgcccttggcttcgtggccggctgtgccaatcacgtttgcttcatctccatggcttctctgaccatcatcccacactgtg

SEQ ID NO: 341288 - DNA, 122 bp, Homo sapiens
cttttcacgttctggaattgacagagggaccatgagaacacccatcccatgtcaagaacacgtgcagcgtgagcaggaaggacgctggcatgtggccggactcggttctgcggccccgggct

SEQ ID NO: 341289 - DNA, 122 bp, Homo sapiens
gtgactttctccatgtgtagtcaggactgagagagggctgagaagggcatgcttttccctcgtgggtttcagtgttatttaaggccacatctgtgtcctgctttaaatcaccttgaattcca

SEQ ID NO: 341290 - DNA, 122 bp, Homo sapiens
agttagatcagtcaagggacacaggagctccctgaactccagactcataaatcaaaatcacggcaggtctcaaacaagataaacaaaaccaaactcccctaaacctgatcatcccacattct

SEQ ID NO: 341291 - DNA, 122 bp, Homo sapiens
tgcacggaaacgtggacttcggcagaacatgtgtgcgccacggagcggctgcgtgcagcccgcaggtgagaccgtctgcataactctgccaaccgtggagtatccaagtaatttttaactac

SEQ ID NO: 341292 - DNA, 122 bp, Homo sapiens
gccgggacctctacgccctgtatccgctgctcatccgctacgtggacaacaacaggtcagcggggccccgctgtccccatgccctccgccccgacctcccacgtcctccagccccatctgat

SEQ ID NO: 341293 - DNA, 122 bp, Homo sapiens
caggccgtgtgacccgcctaaaggcctggtgatggctgagtggtgacagaggaaaggggacgagaaggagactgggacatcgaagcattcctgctccagagccagaatccagattgtccgtt

SEQ ID NO: 341294 - DNA, 122 bp, Homo sapiens
cgcgggagggaggcccgggagcccggcgcgcctccggccgtgcggacccaccggccgaagcgtggccctcgggcccagggaaggggaccttgagacaggcaccaccccgagttccgtccgta

SEQ ID NO: 341295 - DNA, 122 bp, Homo sapiens
tgtagttgctcgaggtaaccgctagagggtgcgcacctggatgctggatggggacggctgcgggcatctgcagggtggagggggccaccatccagtgtagggcacaaccctggggactgccc

SEQ ID NO: 341296 - DNA, 122 bp, Homo sapiens
ggaaagaataattacaggcgccaggcccagggcctcattgccctggtcagcctcaggacacggctcccaagatcctggcagctccagatccagcagtggctcaaagagctacaagtacagct

SEQ ID NO: 341297 - DNA, 122 bp, Homo sapiens
cgagactccgtgggcgtaggagcctccgagccaggtgcgggatataatcttgtggtgcgccgttttttaagcccatcagaaaagcacagtattcgggtgggagtgacccaattttccaggtg

SEQ ID NO: 341298 - DNA, 122 bp, Homo sapiens
attcagatgaaccagatatttaaaagcatccctcatgcaaagtccctccactggttgggccggcctggggagggtcaaggctgggtctctagtctggttttccgggggcgtctgtgtgcact

SEQ ID NO: 341299 - DNA, 122 bp, Homo sapiens
caaccacacgcggtgatctaaacctctacaacacgcggtgatctaaacctctacaacacgcggtgatccgaacctcaaccacacgcggtgatccgaacctctacgacacacggtgatccgaa

SEQ ID NO: 341300 - DNA, 122 bp, Homo sapiens
cagaaccaagaagtctattatgatctcagccatcaattactaggctgctgaagaaatacccggagactggaccagatgcccaagtcactgtgcagcagccttagggaatacttgtaagactt

SEQ ID NO: 341301 - DNA, 122 bp, Homo sapiens
ccagtggaccctggaagattaggacccctttgaacgcgctcaactttattggttccccgccgggcgaaccaggtgggaggaagttcctaccccggcgcggtgtgcggagacgctgtcaacgg

SEQ ID NO: 341302 - DNA, 122 bp, Homo sapiens
ctcgatctcctgacctcgtgatccgcccacctcggcctcccaaagtgccgggattacaggcgtgagccacagcgcccggccgatattcgatattttaagccctcctggatctgactcttgcc

SEQ ID NO: 341303 - DNA, 122 bp, Homo sapiens
taatgaaagcaaagcatttagcacagactctgacccattaagcactttaataaaggcagccgtcatacaataaggccaatagagcttagaagttaaaataagtatgacatgttctcactgac

SEQ ID NO: 341304 - DNA, 122 bp, Homo sapiens
atttgagtaagaaatttagcagtttgccttaaaaaaagataaaggacataccctaagagccgggattttcacttgtagaaatctaatatcaatgtgtggctggcatagttggcactcagtga

SEQ ID NO: 341305 - DNA, 122 bp, Homo sapiens
gcaccatgcactaccatgtccagcagagggcactgctcttccctgtgcctctgccacccccggggctgacccaggagatgcagggctgagccccaactacccttctaccctctcttgggttc

SEQ ID NO: 341306 - DNA, 122 bp, Homo sapiens
caaatcctccatgcgtgatggctcaggtgcgtcttccacgcagatcactctggcagggagcgcggatggagacccgaggctggggcctgctggctttgcccctctacgcgaacagaatggcc

SEQ ID NO: 341307 - DNA, 122 bp, Homo sapiens
gagcccagagatgtgaatgaatctgctggtcctttagcctccctcagttacccagtgcctcggacaggtgagcatcctgttgaactgaatgtgattccagtatacacaaacatgcattttct

SEQ ID NO: 341308 - DNA, 122 bp, Homo sapiens
ttcctcctccagagcctgctctatgcggatctggaccatctagccctcagcaggccccgccggctgtccacagcggaccctgctgatgcctccaccatctatgcagttgtagtttgaaggga

SEQ ID NO: 341309 - DNA, 122 bp, Homo sapiens
ttataatgtcccatgtgctcctttggcaatctagtgaaacagaggacccccttctgagaacgttttttaaatgcacaaaataaaatacattgaattataaatcaaatggaaacagtcatcaa

SEQ ID NO: 341310 - DNA, 122 bp, Homo sapiens
catagaactgagacccatgagacccgggacccgcagcctccctgccccgtgccctggtgccggccctcagcccagcttcctcgtctgcatgcagcagctcctctgtccaccagcagaggctc

SEQ ID NO: 341311 - DNA, 122 bp, Homo sapiens
cctgtcccctgaggggcagcttgcctgggcctggtggccggcgggacaggcaagatgacccgataggcttttcccagctcaggtttcgatgaaacaggaaccccggagctgcagcctgggcc

SEQ ID NO: 341312 - DNA, 122 bp, Homo sapiens
aggaggccagggtccggcgtcgggctgggggccggttttcgtcccccgttacgtgcaaggcgggaaatgacccctccgccgtcccgttactctccggggccaacgtggactcgcaggggcca

SEQ ID NO: 341313 - DNA, 122 bp, Homo sapiens
gtacaaggagaaagggcagagccagaatgcctgcccaccagcgttgcacttctaccagcacgccctgcacccagaggcaaagtgcctctgcctgggcttagttggacataaactcttacacc

SEQ ID NO: 341314 - DNA, 122 bp, Homo sapiens
tctcccatcagttttgttagtccttttctcattcaggactatttccctgaggtcagctttcgtcaggccatgtatctcatcggccctgcctgaccgctagaacttaaatgcctcttagcaag

SEQ ID NO: 341315 - DNA, 122 bp, Homo sapiens
actgtcggcgcttcccccaccccccaggaccccccctgcctcccagccgtgcaaatctcgcgaggaaacacgcggtttcactagtgtgtttacaccgatcagtactaatccggaccgaaccg

SEQ ID NO: 341316 - DNA, 122 bp, Homo sapiens
ggcgcaagctctgactcacgtcttcctcatcgagcccgattggctaagccccaattgacccgacccgattggctgggcttgtaccgagctctgattggcttcctattctgattttttttttc

SEQ ID NO: 341317 - DNA, 122 bp, Homo sapiens
tctttttcctccttttgtaaatgtgactgtgttgtaattgcctctaagtagacttcttagcgaagtcagcgctgcttttgcttacacagcattggtgttgcaggaggaaccagagcccagtc

SEQ ID NO: 341318 - DNA, 122 bp, Homo sapiens
caaggccagggagaaaaggccccgctgtgatttggggaagggccgggggcccataagtcacgtgctcggggcggttgtgcaggagcggactgtcctctgggaacatagaagcgcccccgact

SEQ ID NO: 341319 - DNA, 122 bp, Homo sapiens
tcaaaggctgaacaaggcaggaaagagcagcaggccagtgtggctggaacacagcgagcacgggccaatgtgatcagagaggaaccaggtaacctagagctgcagggcttggtaagccacag

SEQ ID NO: 341320 - DNA, 122 bp, Homo sapiens
ttggaagtctgtgcataaaagagatttctaggaaaaaaaaaaatcagcagttcaatctatcggacacctgaatggaaatatcaagcatgtagttggattgtgacttgaagaaaagcatgaag

SEQ ID NO: 341321 - DNA, 122 bp, Homo sapiens
cttccgcggccgctctaggaagggagcgaaaggggctttcaactcggtagtgtttccgcgcgtctacgtgagaggaaggttgatggctttcaggcccgctggtaaatggaacgggtttatct

SEQ ID NO: 341322 - DNA, 122 bp, Homo sapiens
ttagggttcatttagggactgggggctgagcattagtacagggttccatttaaggtccagcgttggtgctagcgtcactatcaaggttagggcaagtagaagtaataaagagatttagagtc

SEQ ID NO: 341323 - DNA, 122 bp, Homo sapiens
ggccgctcctctgtgtttgtgtttgtagcaagatggctgcccgcctcgcaccacgtgacgcggacgcggggccgcggggccgccccttccaccgccgccgccgccgccgccgccgccgccgc

SEQ ID NO: 341324 - DNA, 122 bp, Homo sapiens
aaaaactgcggcgggaactgctgccatgcagctgggctcccaatgcagtggggatggtggcgctctgggctggcgggagctatcctgccggacgtgattcccagcacagccgtgagcggcag

SEQ ID NO: 341325 - DNA, 122 bp, Homo sapiens
cgctctcccgccgcgaagctctcgcggttcatgacagcggtggcgacagtggcgaataagcgggagcactagctccacacgccagacacacgacggaaccagaatgcaactcgccgcctgga

SEQ ID NO: 341326 - DNA, 122 bp, Homo sapiens
tagagtttataaatcaaaatttaagagactgcgttagtattactagaacaggatacttcacgaattgctaagactgtgccaggcactcagtatctcttctgtggagtgcaagcatcaccttt

SEQ ID NO: 341327 - DNA, 122 bp, Homo sapiens
gggtaaaacctctccactggagcaatgtcctactactaaatgactttcatcatttctcctcggagatgggaaacttttcaaagtttaaaatgctagtaatactaacaaagcaacgaaaaagg

SEQ ID NO: 341328 - DNA, 122 bp, Homo sapiens
gttacttcacgaggtttctcagttcgtgttggataagcctccacctaccgagagtaggtgcgcccaagaactagtaaatacttgttacctctacactttggcatctcagtgaagtccacctg

SEQ ID NO: 341329 - DNA, 122 bp, Homo sapiens
tacaagaagaggccaccaggacacagacacacgtgcagggacaggtgggcgttcctgggacgccggctcggcactcacccaatgaggtcacggtgtcaagggagggcccgagttccagcagg

SEQ ID NO: 341330 - DNA, 122 bp, Homo sapiens
tatgtatttatgaaaatgaaacatttgaaaaatctttttatatctctaggcacttcctgacgtgtagtaggtatttaataactatttattgactaagtggttaaaagagcctatttaaaaat

SEQ ID NO: 341331 - DNA, 122 bp, Homo sapiens
cagcctgtaagagagtcaaagcttttcagtgaagtcacgtcagaaaacatcaaacaaatacgatctgccgacgggtctgagggtggatcgacagaggcagggtctggggcggcgggcgcccg

SEQ ID NO: 341332 - DNA, 122 bp, Homo sapiens
ctcagccgaacccctcccctgcacgccggcagccccttggggcttcactccgcctccgcccgctactcgcgaagcccagcccggccccgcccccaacaagtgacgcaaaactgggaggggcc

SEQ ID NO: 341333 - DNA, 122 bp, Homo sapiens
gtggaggtgagggggagggtcggggggcgtgtctacactcagggtgcaggagccaggagccgggagctggagcaggcgaccaatccaatcacgtttactcccagtcgtccccggcgggggca

SEQ ID NO: 341334 - DNA, 122 bp, Homo sapiens
cacagcgcaggcaggggcccgatttgagccgttttttgctgacttctcttccagtgtctccgaaatggctctgcatccctgggatcgcctcttccctcagatacctgtcctgcagcccccat

SEQ ID NO: 341335 - DNA, 122 bp, Homo sapiens
tctcagaagggaagggtctcttggcccagaagataggggctaaaatccacctcaacataccgtaccataaatggccaaatttgaaggccttcaaacagatcctgcccagccaacatttctaa

SEQ ID NO: 341336 - DNA, 122 bp, Homo sapiens
cgggtctatttatacggctccaaagatgtcgaagaaccacgatggttttctcccgcgacgcgcagtttggaaaacgaggagttggtggattctaagccaaggctctgctgagaagccccttg

SEQ ID NO: 341337 - DNA, 122 bp, Homo sapiens
ccgccgcctcacgctggccgccatctaccgcttcatcaccgaacgctttgccttctaccgcgacagcccgcgcaagtggcagaacagcatccgccacaatctcacgctcaacgactgcttcg

SEQ ID NO: 341338 - DNA, 122 bp, Homo sapiens
taccatagaaggaactttcattaacagtgttgtcagtttcatacagctttcatgcaactacgtctgcatactacatcaacaacaaatgggacacaatgagtgcttatgctaacattaggaat

SEQ ID NO: 341339 - DNA, 122 bp, Homo sapiens
ctcccggccgagggccagtgtccggctggtcccggccaagacttttgggtcaaaggtcaccgtatccccgtccacgagctgggtcggcaccccgcgtaggctcagatctgggtagaggtggg

SEQ ID NO: 341340 - DNA, 122 bp, Homo sapiens
gtgattggtgaagagcgacgggccaattggaggagttgttgttaggccgtcccggagacccggtcgggagggaggaaggtggcaagatggtgttggaaagcactatggtgtggtgaggagct

SEQ ID NO: 341341 - DNA, 122 bp, Homo sapiens
accttaaaaataacttttaaaaagtctcttaagtgttaggggttagaaggcgcacccatgcgcccattgccccactgaagaggccccttctcacttgtcgagcctgcaaaggacgcgtccac

SEQ ID NO: 341342 - DNA, 122 bp, Homo sapiens
cctggaggagtgggattggttctttcaaccatcaattgccttaggagcgcttctcattggcgtcagtcaagcgcggggcaggggcggagcaccggcaggcaggctccgtccaactgccattc

SEQ ID NO: 341343 - DNA, 122 bp, Homo sapiens
atacgggataaacagctaccatgttgagagtggcggcgctacccagacaaccaaggcgaccgccatcttatgagggctggactcgcgaggtgagcgcggcggaggcggggaaccgcgagccg

SEQ ID NO: 341344 - DNA, 122 bp, Homo sapiens
cctgtgtcctcagaagtccttgctcaagattgagaggattctaaatgctcacagatggcgcgctccctctctgtctctctcttcctctctctctcacacacacacacacacacacacacaca

SEQ ID NO: 341345 - DNA, 122 bp, Homo sapiens
taacactgctctgtggtgatcccccatcctatatctgtaggaagccatgctgggtctgcccgagccagagttttcaaaatctataatccctccagaacctccttgctttcctcaacatagat

SEQ ID NO: 341346 - DNA, 122 bp, Homo sapiens
gccgcatgtatgggtcctactgatgcataagaattgctctgggccactcacccaccatcccgtagatgcagcatttgagggaagattttccaaatttgccatatagacttagagcagtcctc

SEQ ID NO: 341347 - DNA, 122 bp, Homo sapiens
cggcgccgcggggtggaaggagctcggcggcgaccaggaaagcgactccgagttggggggcgggggcgggggctgcgggattcccgggctcaccttggactaggggagcaggaacgagaccg

SEQ ID NO: 341348 - DNA, 122 bp, Homo sapiens
tgcggtgctgattggagtaccacacctttaaattcaggaagcggccttagagtgaggttccgatcacagagttcagttcacctctcatttttttcttcttcaaaaacatgatgacagctgac

SEQ ID NO: 341349 - DNA, 122 bp, Homo sapiens
atggagtcctcagacagagtcttatcctctcaagacctgaggctgcccacccggccaggccgacactgggctgtcatcctattgcttgcctgtcttctgctgccgcagggcctgcaggaaga

SEQ ID NO: 341350 - DNA, 122 bp, Homo sapiens
ccatgcatttctgccatctgaagtttcttgtttctatgaaaactcacctagagccaccaccgactttacattagtaaactaagtccagtacattttcctcacagaatgaaatcccaaatatt

SEQ ID NO: 341351 - DNA, 122 bp, Homo sapiens
ctcaagggaagagctgggctccaggagtaatgttcctttggttcttcatggctcccaccccgctccttcaggtcttgatttcagaaggactggggcagtttgctcaagatcccaagttcatc

SEQ ID NO: 341352 - DNA, 122 bp, Homo sapiens
tggctttgccttgaggtcctatttctggagaaatcttcaggtatgaatcttggcctgcctcgaggacttagctgtgttccttgactcaggtttgagtggcaccttctcgtgttccatttgtt

SEQ ID NO: 341353 - DNA, 122 bp, Homo sapiens
acgaaaagcggggagcccagtgcgggggcgtggagggggcgcgggcggggtccaacttcccgcacccgggggggggcggggcgccgggcggcgacagggaggggtcgctcgggcgcgcgcgt

SEQ ID NO: 341354 - DNA, 122 bp, Homo sapiens
gccaggatacttgggagtcaaacaggagctgaagagctagaacagggctagagtgagacacgtgaggcatttggagcctgaaacttagagacactcatgcttagtgttcatccccctctctc

SEQ ID NO: 341355 - DNA, 122 bp, Homo sapiens
aacctgtactgcgattctgctgcaaatttaaatcacagggctgaggcaagaaggctgtggcgtacagcctgggtccagagaacagaatgagtggcactaacaagtcttggcaggaaagggaa

SEQ ID NO: 341356 - DNA, 122 bp, Homo sapiens
taggaggcaaaactagccaggcttggcccctggtggatttgggaggcagggagcaggaggcgtgaaccaagacgctgggttccaggccagacactgtgacatgagaggccatagctgaggtg

SEQ ID NO: 341357 - DNA, 122 bp, Homo sapiens
ttaatagttttcacccggcattgggatgaacggatgcttcatccctggttgccaagcgcacggccccccgtgagccctgtgccggaggcgagctcgtcctggctttcgccgtgaccttgaca

SEQ ID NO: 341358 - DNA, 122 bp, Homo sapiens
gtgggatgggtaaaagggaacaaaaggatcgggaaccaaccaagaaactgaccaaatcaacgccagctcaatgaagaggtattggagaatagtattggctgcccaaaaagccgtccaaaatc

SEQ ID NO: 341359 - DNA, 122 bp, Homo sapiens
cacccgaatattgcgcttttcagaccgccttaaaaaactgcgcaccacgagattatatcccgcacctggctcggagggtcctacgcccacggagtctcgctgattgctagcacagcagtctg

SEQ ID NO: 341360 - DNA, 122 bp, Homo sapiens
gccctgcaccctcagctccaaatacacattctcgttcactcaacgtttgttgacacctagcgtgggccctgtgggatggggtaaaagttcggtgttgggaggagccccggtgacagattttt

SEQ ID NO: 341361 - DNA, 122 bp, Homo sapiens
tttatgttttgagacgataactctgccaccaaggtctttggagaaagtcagaaatggaaacgaggagataaatttaaaaatgaatacattgcctgcaacaggaagaaaaggtagtttggaca

SEQ ID NO: 341362 - DNA, 122 bp, Homo sapiens
ttttgcctcaggggattttcagggcctaaagcagaaagtacttgaaaataacctctttttcgggtttttgttaaagtacaaactgggggtcgcaaattcaaactgacaaagccaggcaggta

SEQ ID NO: 341363 - DNA, 122 bp, Homo sapiens
gggctgaggacagagagaagccggtgtaagctcgcgggttgctccggagcgggcgggggccggacaggctcacagcgggcggagcacgtaggcccgcccactgcgactctggcgcgtgggcg

SEQ ID NO: 341364 - DNA, 122 bp, Homo sapiens
accaaaatgggatttggtcagtcacacttccagttatgcattccctctagtgaccaatagcgaggaaaacccatctgctcagtgtggcattcctagtctgtgggtcattattaagcaataag

SEQ ID NO: 341365 - DNA, 122 bp, Homo sapiens
tcagggtgaattaagagtgtggactttggagccgacttggctgcactggagacccagctccggcattcacaagtttttgtttattgttaagatttgactaataacccctccccgtgtagctc

SEQ ID NO: 341366 - DNA, 122 bp, Homo sapiens
tattaagtacacacagatctggtgatttaatgtgattgggggaactcaggcatttcctgtcgtgcacagtgaaactttcaaaccttgtttttggctgctgctgattattgttgccattaaca

SEQ ID NO: 341367 - DNA, 122 bp, Homo sapiens
agcgctgcctcttattcctgtactcagttttacctgacaagcagtctttacagcgttcctcggaattgctaaacatgagaacaggttgccgttcctgatgtcacataaagttcgtcattgca

SEQ ID NO: 341368 - DNA, 122 bp, Homo sapiens
ttaagggcagcttataaacaccatgttcctgtctttatctgagattactcaactgtaaaacgtgttctgtgggccaactgtgacactgggagtgtggcaatcgtcactcatttgtttattcc

SEQ ID NO: 341369 - DNA, 122 bp, Homo sapiens
accaagaacctgttcccttgatccatcaatcacctctttttatttccagccagctgctttcgctcagatcagaaactggtcaattcagatcaaaaagaaaacaaaccaatcttctcttaatg

SEQ ID NO: 341370 - DNA, 122 bp, Homo sapiens
gaggggtcctgcccagatactttcagacctctaggccttggttcctatgaggccctctgccgagaatgcctcctcctcccttctcacctgatggaaattccacgcatccctggagctcccct

SEQ ID NO: 341371 - DNA, 122 bp, Homo sapiens
gtagttcaccatgtgtgtgatgggccacacccatccacaaccatcgttataacttttgatcgatttcagataatctcctcaccattttgcaataatttatcaaccgcaacccttcagatacc

SEQ ID NO: 341372 - DNA, 122 bp, Homo sapiens
tcccttctgccatcccatttctatttctagcaacatcttaggagaagatgaggctccaagcgacactggggtgtgagacggaaaggaatgtccccacactccccactctcccaccaggatcc

SEQ ID NO: 341373 - DNA, 122 bp, Homo sapiens
tcagttgggtgggggtggagaggccctggggatcaggttaatggagcaggagcttgaaaccggagcatggtgaagagcccgtgaaatagctttgtcagctgcctcccactcgccactttcca

SEQ ID NO: 341374 - DNA, 122 bp, Homo sapiens
ttgagtagcttgcagtctagtggggagacaagcaggcaaacagtcacaacacagcaaaagcgaccttggagcatagtgggacttttggagtaggagtgctgcatttgactgagggaatcatg

SEQ ID NO: 341375 - DNA, 122 bp, Homo sapiens
gcaggacagtgaggagtcgtggaggggcccgattcaggcagtgtggcgggagaagtcagacgaccaggcagggacagctgggatgagctcctcttcctggaatttctaggcagggaggggag

SEQ ID NO: 341376 - DNA, 122 bp, Homo sapiens
agctccacagctggaatgcagctgcttggggtggagcaaacataactccctataggtcagcgggtgagggagggcagggaatcttggaaggttgggaaagtccttctaaagccagagctcag

SEQ ID NO: 341377 - DNA, 122 bp, Homo sapiens
aactgaccactcattggccacattattgaagcccttttatgtgcagaccccatgctatgacgcattggagaagttctcatgtgctcagttctgccataagctattctaaggcctaaagaagg

SEQ ID NO: 341378 - DNA, 122 bp, Homo sapiens
ccaatccttcacgtttcaaatcaacccctggcctggtgctgcctgggactgccagggtttcgcaccccttggttacaaatgcaatttccaaaaataaaagatatgtagatacacatagattg

SEQ ID NO: 341379 - DNA, 122 bp, Homo sapiens
gttgccggagcctggagcctgcgtcttttgtctgccttgctcctgcgaaggagcgggagacggctgcgcgccccaagcgggccaatcaggagacagccggcgccggccggtaaggcggcgat

SEQ ID NO: 341380 - DNA, 122 bp, Homo sapiens
cagggccagcaaggccacgggggcacaagcaaacgcactttcctcatttcttctgacaagcgcattggagcccctgatttatggccacacttcatgggacactagtaaacgtcccatagtat

SEQ ID NO: 341381 - DNA, 122 bp, Homo sapiens
ccttaactgtgtccttgccttctttttctttctcaagtctggtctctgactcgaaaaagacgtcaaagacctgtcagaactagataaaattatgatggaggtgttttgaaacactaatcctg

SEQ ID NO: 341382 - DNA, 122 bp, Homo sapiens
ctcttgaggctagtttcaaggccagcattgataattaaagggatatcaggtagaattgctcgtcagtgccaagcagcaggcaacaaatcagattggcaaggcaagcctacaccctcccttta

SEQ ID NO: 341383 - DNA, 122 bp, Homo sapiens
acgaagtggcgtggaccttacccgtggaccaagtgtgcgaacacagcacagcaagcgccccgtgcaaacacaggagcatcctgaggggcctccggtgtggggaactcagagagccgcaaggt

SEQ ID NO: 341384 - DNA, 122 bp, Homo sapiens
ctggcctggggctccctcccacacggccttggccctctccccctcgccccgggaccgctccgcccctcccggatcccggtcggcggagcgcatttatttgcatatttctacctttgttccct

SEQ ID NO: 341385 - DNA, 122 bp, Homo sapiens
gacccgccctatttccataccagaaggaagtgcggcaccttagtgatcccgagtttaagccgagagttgctcacgtgaccgagatctcacatgacgtaggcgctcacgtgattactcgctta

SEQ ID NO: 341386 - DNA, 122 bp, Homo sapiens
tcggcaggtggacaaccacgtcattggagacccggtacggggcatgcgtcgggcagatgccgagggccccagctgcaacagtcttgcaaataagcacctgtccagggaaccatgtccagctc

SEQ ID NO: 341387 - DNA, 122 bp, Homo sapiens
tgctagaccccctggctgctcaggaccaacggtagcctgcagctctacctcaaggcagggcgagaacctccaactaccatcctactctattaccaaccctgagtaaacctttatgttcacag

SEQ ID NO: 341388 - DNA, 122 bp, Homo sapiens
ggctaacctccgtttctgctcccacaaaatagcacgaaagaatcacatctctaggagccacgccaaccgccacccaaagcttcgtggagtgaggtctttccactggccttgttttaaggctt

SEQ ID NO: 341389 - DNA, 122 bp, Homo sapiens
cggagcaggcaaggtctctctaaggaggcccctcggcggcctggggcaaaccggtactttcgccaccccttccaccgctggctcccacccgtcatccgacctcgccaaagctgtattaagcc

SEQ ID NO: 341390 - DNA, 122 bp, Homo sapiens
gatcagtgcttcaaatttgctctagttagaaactgacaatagtaagttgagttggaggagcgacaagaatgtgacagcctctcagtggctgcatctcccagcaccagggcctggctgctctt

SEQ ID NO: 341391 - DNA, 122 bp, Homo sapiens
aggcgtctctgtctcaaactctccggattttttgcagctaccagggactgcgagggtctgcgtcctgggtggaaggaagcggcgtcagtcaacttcctcgcagcggcggcagcggcgcgggc

SEQ ID NO: 341392 - DNA, 122 bp, Homo sapiens
cctgcccgggccacttcctctggctgaccattgtgcttaagaaggaggacccatgacagacgcggagaagtgggagggagggattgcctctacagccagagaactccttagcccaagacccc

SEQ ID NO: 341393 - DNA, 122 bp, Homo sapiens
ctgttaacatttcaatgtgcagatgtcaaaaaccatttgctctgactttacaaacaggaacgtgcatgcacacacacacacacccttgccctaaaagttttagttttaataaatggtgtata

SEQ ID NO: 341394 - DNA, 122 bp, Homo sapiens
tatggctggaattataggcagaagccacgtgggtacggctgggatgatgggcagaagccacgtgggtacggctgggacaagtggcagaagccatgcgagtatggccggaatgataggcagaa

SEQ ID NO: 341395 - DNA, 122 bp, Homo sapiens
catagggaggaggagaaacggctgtgggaagctccaatccacagccagaactgattgacccgattcaactcagggaggctcagggccctagttagagcaaggcagaggccctgggaccacca

SEQ ID NO: 341396 - DNA, 122 bp, Homo sapiens
gagcagacacgggggctgctggagcctgagaggaccaagactctgctgcctcgggagagccgggcctgggagaagcctcctcatcccgcctgcaccaaagactgggaggctgtggaggttgg

SEQ ID NO: 341397 - DNA, 122 bp, Homo sapiens
caggacgctaaccgataccccccacacagtggcgcaggacgctggccgatacccaccaggcgatggtgctggactctggccgataccccccacacagtggcacaggacactggccgataccc

SEQ ID NO: 341398 - DNA, 122 bp, Homo sapiens
agctgcagcctagcaggcctaccaataaggacagcgccatgggatatgctgcagcacaggcggaagcaaagcgctgtggagaccccaaggccagatataggagctctgcctggctgagttag

SEQ ID NO: 341399 - DNA, 122 bp, Homo sapiens
gcaggaggattaaagacgtaggctgagctctcctgctttccaagcctgcactccacccttcgtcttattagaacaaagccacgtcccacattaaagatacaatgtatgcttcattacaagaa

SEQ ID NO: 341400 - DNA, 122 bp, Homo sapiens
caacggacaccttctcaactgctacgggaggaatgagagcattgcctccaccccaccgggcgaagaccgcaagagcccccgagtgctcatcaaaacgctggggaagctggatgggtgtttaa

SEQ ID NO: 341401 - DNA, 122 bp, Homo sapiens
aagtatgactgaagaggtggaatgatggagagagcagagttcatcctaaacaggaacacacgaatgctgggcctcttacggggctttccttgggctttactgagaggcccttaactcccaga

SEQ ID NO: 341402 - DNA, 122 bp, Homo sapiens
gccccacaacagcctaccctgcctccggctgggtttctgggcagaggccgaggcttagctcgttatcctcgcctcgcgttgctgcaaaagccgcagcaagtgcagctgcaggctggcggctg

SEQ ID NO: 341403 - DNA, 122 bp, Homo sapiens
ttcgaaggaaagcccgtggattatgcatccaggaattaaagcagtccatgcaatggcagccgccaagcagagacggtgacgggatccctgcgttgacggtggcatgaccgtgtgtgatggga

SEQ ID NO: 341404 - DNA, 122 bp, Homo sapiens
tataacacaggacgttgctatttgttgactgacacatagtgcttggtgaggtcacgctggcgctgaatactttttgtataaaccgacgaacagctgatgaccgcatgaatgctcacacaagg

SEQ ID NO: 341405 - DNA, 122 bp, Homo sapiens
gcccaatgcaatcagctgttggctcagcctgaagatcgctgggataatattcctggggtccgagtataatacgcccggcatacactttcccatgcattagggtttggaagttggataacaaa

SEQ ID NO: 341406 - DNA, 122 bp, Homo sapiens
aacagtttaaaagatagactcatgactacctaaaaattgtttccagttctacatgacttccggtatatgttcagaaaaaaagatcaagtcatacgtggagtggctggcagatctgaagggcc

SEQ ID NO: 341407 - DNA, 122 bp, Homo sapiens
caggccccgcgcctggggcggaggtgcggggagggcgtccagcagcagcaacaccccgcgcgccccgagcacccactgggggtccactcgccgcatcccctgctccaccctctctacttttc

SEQ ID NO: 341408 - DNA, 122 bp, Homo sapiens
accaggcctcacccgctccgtgtacactatgccactggccaaccaccgcgacgacgagcacggtgaggaaagggtggccagagtcccctccgacccctgtcaagcatttcactttgcccctg

SEQ ID NO: 341409 - DNA, 122 bp, Homo sapiens
ttgtgtgaagcagcagttaagcagttatagcctgttgtgttgtgccaacacgagagccagcgtccacaggtggcactgctcctcccaggcaccattttggggtgatcttctttcttcctgac

SEQ ID NO: 341410 - DNA, 122 bp, Homo sapiens
agcacaggaacagataggcccgggagagcctgtggctggtgggctttgttctgggcaagccgtgcgctggcccctaggctccctgccagccctctccgtagacccgtccggggccgtgtggg

SEQ ID NO: 341411 - DNA, 122 bp, Homo sapiens
gcgaaaaaataagggcacagaaaatggggcggctggaggatgttcacaaaaggggtgatccgttatgtggacagacatcagagttgaatgggtctcaagtgaaaatttcctcactctctgat

SEQ ID NO: 341412 - DNA, 122 bp, Homo sapiens
agttgccctttagcttattttacccacccagctgttcacacagcaagggataaaaatccacgatcgccaggggacttgaacttctcagtggttgctatgcaaggagagtctgaacagaatct

SEQ ID NO: 341413 - DNA, 122 bp, Homo sapiens
aacgtccaggtgatctgccacacagaggcggtggccgagaagctcggccagcaggtgaaccgcacatgcccgggcttcctcgcagacgggggtccctgggtgcaggacgtggcctatgacct

SEQ ID NO: 341414 - DNA, 122 bp, Homo sapiens
agacctgggcgggtggcgtccggctgccgaatcccgcggggtcctgggaaccctgagaagcgcagagccatccttgcctcagaactttccgcagacccttcgcgatctgcaatctgggggtg

SEQ ID NO: 341415 - DNA, 122 bp, Homo sapiens
cagcgtttcagaagtccttacaagtccttcctggaaatggaaaagagtgaaaaagagaaacgcgcagcccgtttcctaggacaaagcggcgccggcccctctcacagcccgctgcaagccgg

SEQ ID NO: 341416 - DNA, 122 bp, Homo sapiens
caccgccgcctcagcgagcaccgcgaacccggccccagcctagccctgacctgttgcgcgcgggggccgccgggaattgtagtttgtttacgagactccttcacatccccagtcacgcagca

SEQ ID NO: 341417 - DNA, 122 bp, Homo sapiens
cagcctcccgccttcttggctgcaagagcgcaggcgcaagggaccggaaacagggccttccgcggttatacagatccgtgcgctccaggcttgcctttggaaaatgcctgtctgaaatttgt

SEQ ID NO: 341418 - DNA, 122 bp, Homo sapiens
cctccagcccaacagacagatgaggctccggaagacattccttcttcttgatgggagtcccgctgctacttaaccctccctgcagtaggtccaagtctgtctgtctttctcttgccatggtt

SEQ ID NO: 341419 - DNA, 122 bp, Homo sapiens
cccggacacctggggcgtgggcgtgcgggggcagcccgggctaggcgagcgcgggagaggcgcctgcggtcccagcccggccaggcccgagcacctgcgcgagcccgagggagcgcccggcc

SEQ ID NO: 341420 - DNA, 122 bp, Homo sapiens
cagcacaaagtgaggggcgcgctggggtaccgacgcccccccacaaccctcctccacccccgagtctcgtgcgggctcctgcctaggctaccctggatgcccacctccgccgcctgccccgc

SEQ ID NO: 341421 - DNA, 122 bp, Homo sapiens
tccggggtgagaagggactgactctgggcgtctctgaagatggctcgggcttctctttggcgcgccggggggaccctgacactgaccgctctgtgacgcgagtagtctcccctgcaccgtgc

SEQ ID NO: 341422 - DNA, 122 bp, Homo sapiens
accactgcccggatttccactcccgcccccaggtattgatttcctgcatcattcatttgccgggccttggcggctgtgattagctccctccattctccctacagattccaccccccttcccc

SEQ ID NO: 341423 - DNA, 122 bp, Homo sapiens
ctaattttaaaactagctcaatctacttagtccgaagaatccatttaatttctcaccattcgctgagtatgaatttggtttaaaagaagaagaagaagaaaaaaaaagctaggcctttggga

SEQ ID NO: 341424 - DNA, 122 bp, Homo sapiens
cacagtttattgttccagccaccagcactctctctttgggctgtgactggtcgacagcgacgtgaccaaaccattcttgaatcatgctagcaggcctttatgtgagcagtgtgagcagggcc

SEQ ID NO: 341425 - DNA, 122 bp, Homo sapiens
ttaatatattttgatagcattgatatttcttttcccgatagtgtaaaagtttgataatgacgttatttccagtgatttgatgttattttaaatggttttaggtattggagggccatgggcca

SEQ ID NO: 341426 - DNA, 122 bp, Homo sapiens
aaagaaaaactaagctcgacagctgccactgagtccaactctttaaccagacagaactaccgcattcttagactgttgtttttaggaaaagagaggaagcttgcagaatttgtattgccatg

SEQ ID NO: 341427 - DNA, 122 bp, Homo sapiens
gagcgtttccctatgggggtgtctgtacgtaggagagtggaggccccactcccagttgggcgtcccggagctcagggactgagccccaagacgcctctgtaacctcgctgcagcttcagtag

SEQ ID NO: 341428 - DNA, 122 bp, Homo sapiens
tgcttccggtctcgcgatagcggaaagggctgtaccatccggaaatgggaccggggccggcggctgttggagccctgcgagctgggacggccggcgtgtgtccttccgtcttcgctgccgac

SEQ ID NO: 341429 - DNA, 122 bp, Homo sapiens
cagccccagatgcagcacagcccgcacatctggccggtccagccccatcccaaaggccaccgtggccaccaccacccggcaactggccctgcatgaaggctcgctgtacccgccgccgttcc

SEQ ID NO: 341430 - DNA, 122 bp, Homo sapiens
gtagggggaagtgtggggggctggtccgcagccttcgaggggtggggcgacaggagcgagcggccgggggaggagaaaaaggcgggcggcgggagagggggcctctattatctcggcttctc

SEQ ID NO: 341431 - DNA, 122 bp, Homo sapiens
agtttgttctgcccttccttagcttgaccctttatttatccctagaaggtggtgcttctgcgtgcagactcttcctcttgttgtatgaagatgcatcagaactctttattatagccaaggaa

SEQ ID NO: 341432 - DNA, 122 bp, Homo sapiens
actcttcctctgtcacccaagctggagttcagtggcttgagctcagctcactgcagcctccgcctcccaggttcaagcaattctcgtgcctcaggtttagtactagaaactcatcaggaaaa

SEQ ID NO: 341433 - DNA, 122 bp, Homo sapiens
aaaagcaaaaatatacctatggaatagaattcagaactccatgaaagacagctggtgtcccgagagctgatgtcacacagcctgtggcatgaatgtcagaataggcccattctaccagctct

SEQ ID NO: 341434 - DNA, 122 bp, Homo sapiens
aaaggaaaggaagaggaacccaggcctgggttcccggcagagctgtccgcagagcctgtgcggggctgcaaaggcccctctgttgtcacaacacccctgtccccgtttcagatgaaaccggg

SEQ ID NO: 341435 - DNA, 122 bp, Homo sapiens
tccaacgccccctcccaccccctaaagttccaaccaaagtgagagggtcacagggtgacccggccaggtgttctgcactccctcacaggctgctgtcagaggcagcttgtgggtttaattct

SEQ ID NO: 341436 - DNA, 122 bp, Homo sapiens
gttgtcttgggaattcttcacagtacgggaggtctgagcatttcatgatgtctagcatcccgcccaggttgacgaaatgccagtagcaccccatccccttgaatccttttgacaatgaaaaa

SEQ ID NO: 341437 - DNA, 122 bp, Homo sapiens
aaaggttggctccacggtcccgccggccgcgcaggtctggctgaactgcttggggtcgcccggctcctctcgattttatgaaaatggcctaattgaggtgtgctcttttctttccttcctct

SEQ ID NO: 341438 - DNA, 122 bp, Homo sapiens
cctcgcttttttgctggtagacgcacaccatcacatcctacataatatttagctctgaggcgtttccagatgggaagtgcgtttctgtattttcatagccgtgttctctacgtgaatggact

SEQ ID NO: 341439 - DNA, 122 bp, Homo sapiens
gccctcccaggccccttcctcccgccctcccccgccccccgttttcctcccctcccctcccgacccgccccaggccagacccccgcgcgggtcctcgccctcccaggacccttcctccctcc

SEQ ID NO: 341440 - DNA, 122 bp, Homo sapiens
ggcctcatggccctggggctgaggggctccctggccgtccccaggagtggctctgctctccgcctggtgtcccccactctggtcagtcaagacccatgggcccagctcactccccaattcca

SEQ ID NO: 341441 - DNA, 122 bp, Homo sapiens
ctcaagggcatgctctccacccacctgacgtccatgttcgagtacttggcaccaccgcgccggaagggcagccagatcacccagcagtccaccaaccagagtcgcaatcccgccaccaccaa

SEQ ID NO: 341442 - DNA, 122 bp, Homo sapiens
gtgaggctcctgggagggagacggactgcagggaacccctccatcccatgctacgtgggacgctggctctagggttttcatcaaggccctggaggagcttgaggaagctccctcgttctagt

SEQ ID NO: 341443 - DNA, 122 bp, Homo sapiens
aatctaatagcgctctcatgggcgcattcctgatgacgtttaggggtagggttagatgcccgtttccgctttcttcccacccacttccgggtctcctctgtttacgaatgtttgggcgcgaa

SEQ ID NO: 341444 - DNA, 122 bp, Homo sapiens
tggcccctttggcacagcagagccttttgtgaagtctctgaagcagactctgaaagcctccgacgcccttgctggtggctcagcggctgaagggctgtctgagagcgacgtgttcatgcagc

SEQ ID NO: 341445 - DNA, 122 bp, Homo sapiens
acgttgaaaaggaaagcttcctgaatccctgtgtgactctaacccaacctccccacctaccggagaaatgggttttatcctagaaatggggacgaggaaaaagagatggctcaagggagtcc

SEQ ID NO: 341446 - DNA, 122 bp, Homo sapiens
cgttgctgcacccgaggtggggaaaccggagcccgaagagcggaaggggcttattccaggcgacaggcagtgtcagtaactgaatcaggggccgaggaagtttccccagaagcgcggcttcg

SEQ ID NO: 341447 - DNA, 122 bp, Homo sapiens
gatggccgcatagacttcaccgtagtaactgggaggggactcttcccttgacgtcaaaggcggttttgcttccgttccgctggcgggaaaccgccaaccgaaagcggatttaaggcggcgtg

SEQ ID NO: 341448 - DNA, 122 bp, Homo sapiens
ctccccggcctgcctctgagtcttgccacagcaagctctgaataaactgcctcccactaccgtggccctggtggatttccacctgggcgtctggagcacaccgggagcttgcctactgtgat

SEQ ID NO: 341449 - DNA, 122 bp, Homo sapiens
caaagtgttggacgccaataactgcgactatgagcagagggagcgcttcttgctcttctgcgtccacggagatgggcacgcggagaacctcgtgcagtgggaaatggaagtgtgcaagctgc

SEQ ID NO: 341450 - DNA, 122 bp, Homo sapiens
caggtaaaggcaggtgaagaactctctggtctccagccagagaagcaacttggccaaggtcgagcaatgtcaaggccaagctgaggtcagaagtctaagtcccggcaagcattctggcctct

SEQ ID NO: 341451 - DNA, 122 bp, Homo sapiens
tgttagggtgttttcaggattccaagaccacagccaaaatagggtctgaggttccccacacgggaacgttttctgtgaaactgagaattagcactttttggttaaaagaatcttccttctct

SEQ ID NO: 341452 - DNA, 122 bp, Homo sapiens
atttaacctgcttggcctcccaattaaaaggcagcctccttcgccccggacacaggcccacgtcccccacaagcagcctcttacagggctgccaccccagcaccggcgcaggccccttcccc

SEQ ID NO: 341453 - DNA, 122 bp, Homo sapiens
atacggcagataggtgctggagggtggctggcttggcacagggcagggttcagcccagaccgcggtttaggtgagcagtgtcctggccacgtcgcagcaaggaaggagccgagccagccagg

SEQ ID NO: 341454 - DNA, 122 bp, Homo sapiens
gggaagggtaattatccttcagttgctgcagaaatacaattagggccatgctctctgagccgccaggatattgtggcttttgctaattaaggagcggatgtgtcctgccagcgcaattagag

SEQ ID NO: 341455 - DNA, 122 bp, Homo sapiens
gcgtaggaccctcccagccaggtgccggatataatctcgtggtgcgccggtttttaagcccgtcggaaaagcgcagtattcaggtgggagtgacccgattttccaggtgccgtctgtcaccc

SEQ ID NO: 341456 - DNA, 122 bp, Homo sapiens
gatcagcattctccacctcctgactgcggccacaatattgacaggttgctaagagttcctcgagggctggagcccatcccagggaaagaggaaagctgcatggcttggccttgccagaccca

SEQ ID NO: 341457 - DNA, 122 bp, Homo sapiens
gattcttatctttgtccagaaaagtacatttaagtacatagtttgttatccatttgtttgcgttgtgagaaaaagattatatggctaataaaaaaaatcaagtactaaaatagaaaacatat

SEQ ID NO: 341458 - DNA, 122 bp, Homo sapiens
atgtgcttagggcactgagtggcccagagtggggagctcctgcagggttgagaggaccggcggggcgaggtcggggcggggctcgcaggacctgggcggggctcgcaggggctgggcggcct

SEQ ID NO: 341459 - DNA, 122 bp, Homo sapiens
agcgcgggaattcgggaacccagcgcgggctgcagaggccccagcaggagccccgcctcccggctcgtcgacggattcgttcttggccctgccaatctgattctcagctcccagaacttcac

SEQ ID NO: 341460 - DNA, 122 bp, Homo sapiens
gcgccactggccatctggagtcctgggaacattaaagcgctgttacccgccaggcgtttccgcctaggacacactcacacccaccctcggagactcctaaaggtttctccgtgtcaattcat

SEQ ID NO: 341461 - DNA, 122 bp, Homo sapiens
ggttccagttaccagaccacagccaaggtccaggatggctgcatcagagtcatccagagccggttaaaaatgacagcctcggctgggcacagtggctaatgcctgtaattccagtactttgg

SEQ ID NO: 341462 - DNA, 122 bp, Homo sapiens
actccccattacaaaaagaatgcttaagtagtcagaaagtactgctgagaggctttccatcgggagatgaaaagagagtcttcaacctgaattcagtataaaaaactgccggtggctcaggc

SEQ ID NO: 341463 - DNA, 122 bp, Homo sapiens
gccttctggcagcggtacccgaatccctataggtacgtggtatttggaagagcaaaaccgcgccatctcgctatctggagatcgaattatgggtaacccccaagtactgggaccaggaagga

SEQ ID NO: 341464 - DNA, 122 bp, Homo sapiens
gcactgatggtgcagcctctcccccagtgcctcagcttcggtgggggggggcgggggctgcgtggcacctgggaatgtgtatttctaacaagctcccaggtgatgcccatgctgctggactg

SEQ ID NO: 341465 - DNA, 122 bp, Homo sapiens
tcatttacagcttaaatgtctgaatgttacggtttccttcagaaaacaaggcggtacactcggtaaggagaagtgaggcagcaggggtggggagggctggtgcggtaggaggcttggtttta

SEQ ID NO: 341466 - DNA, 122 bp, Homo sapiens
aaaaatgaggatcatggaagtctttgggcctaagacattggatttttaaagaacttcttacgactaaagaactacagctttagttcttagctgtggtttccttccagttgatgtcagctaat

SEQ ID NO: 341467 - DNA, 122 bp, Homo sapiens
ttgctgcgacaggagataatgctgggtaggtggagaacacagggaccggaggagctgaggcggaaggatggagaggcttaagcatgtgttaactgccactgggaagaagtcggcaatcacgg

SEQ ID NO: 341468 - DNA, 122 bp, Homo sapiens
ctggttccccctcgcctgatcctgaccggggtggagcaacctaaaagaagaaggagagaccgagacaggggaggggaaaaaagccagcagccagttgcaaaaccccaaagcaaggggagccg

SEQ ID NO: 341469 - DNA, 122 bp, Homo sapiens
cacagtcaaagccatgatgaaaaactcagtcgtaagtgatcttcctgaattaaatgcactcgctctgaatcaggggacacgagatttacagaggttggccagccttaggatggactctgagc

SEQ ID NO: 341470 - DNA, 122 bp, Homo sapiens
gtacacatgaatagaaagcaccacaggtaataaaaacacctaaaaaggtcagcagaaactcggggagctgctggaaattcacctcctctgcctttctatgggactcagtgggcagtgatcag

SEQ ID NO: 341471 - DNA, 122 bp, Homo sapiens
atttcgcgctctcgcgccgcgccccgccccaccggcctaaatttgcatatcccaggatcgcggccaatcgctgctcgtctctctcgaagcggatggcttttgcctgagaggaaagggagtgg

SEQ ID NO: 341472 - DNA, 122 bp, Homo sapiens
caaggtctgatttttcacacaaaaaatttgcaacctctggcataaacgggttaaggccttcgactgactggataaggccacccatattatggagagtaatctgctttactcaaagtccactg

SEQ ID NO: 341473 - DNA, 122 bp, Homo sapiens
aaaaggggacagagtacggaaaactagatttttacttcctctgccttcttagaaataaagcgagtcaggctttactttctgaagttccgcccccatcaattcatttaaaatttagcaaacat

SEQ ID NO: 341474 - DNA, 122 bp, Homo sapiens
gtcacgaacaccgcacggtcctgcaagcttcttagagtccttgtcgtcacgaacaccgcacggtcccgcaagctccttagagtccttgtcgccagcccagggcccttggctcacttctgagg

SEQ ID NO: 341475 - DNA, 122 bp, Homo sapiens
caacaaagcatctcagcctgctctatgagctggatatttcgtaggaaggagccgatttggcgaaagttacgtaaacaatggaattgtctcagtttgcgcctttgtttcgtttgacagccctc

SEQ ID NO: 341476 - DNA, 122 bp, Homo sapiens
cttagagcaaatgattagttttagaaggatggactataacattgaatcaattacaaaacgcggtttttgagcccattactgttggagctacagggagagaaacagaggaggagactgcaaga

SEQ ID NO: 341477 - DNA, 122 bp, Homo sapiens
acatagttgaggttcctgtcactcgaagtcccgcctctgttacactccgtgccctgtgcccgccccaggacttggatcgctacatctgaccctggccccagggctggctccacttccacgct

SEQ ID NO: 341478 - DNA, 122 bp, Homo sapiens
gaaggcctctgaccgttcttgtcctacccaaagttacacatctggcagaagtgatgacatcgctgaaaccactcctaggttcaggagcccgaagtgatttcacgcttagggctagacctcag

SEQ ID NO: 341479 - DNA, 122 bp, Homo sapiens
tcggcgcccggttctgtgacatcacagggggtttagtggcgcagcctgcgggacagaggccggggatttgaggtggcctcgtcttgtttgatctcggggaacctcggcagacggaaagcttt

SEQ ID NO: 341480 - DNA, 122 bp, Homo sapiens
gccagccaggtgcacgcgtgtgtgtacgcagggccacaagtgtgtctgctgttgtgtccccgggtgggtagagtctgctcccacattctgggctgtgtgtatgtgtgtgtgcccgtgcatgt

SEQ ID NO: 341481 - DNA, 122 bp, Homo sapiens
tggattgggctgtgcagagaaagcccagggagaagaaacagcctcctgttcccaccaccacgacagcagagagctgggcccccatgactgcaagctgggaattcccttagcccccaccccaa

SEQ ID NO: 341482 - DNA, 122 bp, Homo sapiens
aacaccaggagctggcacacattgcaaagagctaagtataagctttgcagtgtgaatcaccgggttgtaaattccttcacacaaacaaaaagcattctggagcattgtaactgtgagcaggc

SEQ ID NO: 341483 - DNA, 122 bp, Homo sapiens
tcttgctcctcataatggcatccgcaggagtctccaggattgggtgaggccccgccttcccggcccccgacggaacgcacacctccaaggggccccattaccgcccccaacaaataaatgta

SEQ ID NO: 341484 - DNA, 122 bp, Homo sapiens
agttccgagcttgaagtcagtaagtagcggctgcgctaagggcgcggccatgttggtggccgcgctccccattgttggaggaaggaggcgagcggaggcgagatccgggtaacccgggcggg

SEQ ID NO: 341485 - DNA, 122 bp, Homo sapiens
aggctgagatgggaggaccatttgagcctgggagatcgaggctgcagtgagccaagatcacggcactgcgctgcagcctgggcaacacagtgagaccctgtcaaaaaaaaaaaaaaaaaaaa

SEQ ID NO: 341486 - DNA, 122 bp, Homo sapiens
ggtttttcctaatcctgaagctaatctaggggctcctaaccaaaaaaggcatctcattatcgtataaatgacactctttttcactctggagattccacaggttttaggagttgtgtgccaaa

SEQ ID NO: 341487 - DNA, 122 bp, Homo sapiens
ggccttcctccaggtaaatcgccgggcctgcgggggcttcccacacgcgcgggcgggagacgcgttgcctcctacctcagtttacccgccttaggagccggtaccttcggcaaacgctttcc

SEQ ID NO: 341488 - DNA, 122 bp, Homo sapiens
tgttacttattcatgaaggagggcattggcgcgtttaggtttcccctcacctgtccagcacgccctgaaagattgtagtacagagtcctggggagaaagtggtttcctgcctctccctgggc

SEQ ID NO: 341489 - DNA, 122 bp, Homo sapiens
gacaagttacttcgctgtctgagcctcagctttcccttttggatgagagtaccttcctctcgcttgggatgagagtacattccttaggggattgtcaggcttccgttgggtgatgaagtgct

SEQ ID NO: 341490 - DNA, 122 bp, Homo sapiens
ctctttaccccaccccacggacgcttcctcggggtacagatatcggcatggagaggtgcccgccgcccatctgccaagttccaccgacacacaggtgcattgagccaagttcatcgtcccca

SEQ ID NO: 341491 - DNA, 122 bp, Homo sapiens
cggctccgggcggcagctatgaggcgggacgtgcgcatcctgttactgggcgagggtaggcgccggcccgggggtctcggagctgcggcggccgtgaggcggggtgagggtctcgggggtcg

SEQ ID NO: 341492 - DNA, 122 bp, Homo sapiens
cgtagcaaatgaaaaaagaactcaacgaaaaccaactacacaacaaaactttcaacgagtcggcgcgccttccactccgagtgctcaggggaggggtgtggagcggctggaatcccactgat

SEQ ID NO: 341493 - DNA, 122 bp, Homo sapiens
ggctatgtgaggtagtgcacatcagccacccccaggtggatctctgttgatctaatcgggcgacatccctgaccttacaggtgaactctataccccctgacacgcaggaaatgccggttgaa

SEQ ID NO: 341494 - DNA, 122 bp, Homo sapiens
ctaaaatgggggctgttacatttctgccatgacagagaagtttttggggggaaatcccaacgatgaccacagcctaaaaatgcacagcttagaggggagtttccaatggacttggtcttcag

SEQ ID NO: 341495 - DNA, 122 bp, Homo sapiens
ccctgctaagaaaacaccaccatctctttctctctctctcttttttttttctttttgagacggagtctcactctgtctcctaggctggagtgcagtggcaagatatcggctcactgcaacct

SEQ ID NO: 341496 - DNA, 122 bp, Homo sapiens
cccacacagggagagaagagcatgtgcaaagtcccaaagcagagggcatctgggccatgacgaccactagccagtcagacagggtggcctccccacagctgacaccctccggccttccctcc

SEQ ID NO: 341497 - DNA, 122 bp, Homo sapiens
gtcagcttttgaattacactgaaattgtagggatgaccacaacctactctgtactcaagccgctatccctatattccttaaagccactataaagaggtgagattcccactgcattatgttac

SEQ ID NO: 341498 - DNA, 122 bp, Homo sapiens
tcgatctgctggcgcccggtccctcccccaggacactttcaagcggagtcccccttcctccgatagaagaaacccctgggcctttgaccgaggttagccaggcaggcagggcgtcggacaag

SEQ ID NO: 341499 - DNA, 122 bp, Homo sapiens
gcaaactgctcctgcccctcaaggagtaaagaagacacaccgaggggatctgctggagctcgaaatgtgaagtggaagtctaagggagggagggcttcatctggtcccaggagagctcgaat

SEQ ID NO: 341500 - DNA, 122 bp, Homo sapiens
ctctccttccccgccagagtacatgaaccacctgaccgtgcacaacagggaggtgctgtacgagctcatcgagaagcgaggcccggccacgcccctcatcaccgtgtccaatcaccagtcct

SEQ ID NO: 341501 - DNA, 122 bp, Homo sapiens
aggcaggttatatcatccccatattgaagacaaggaatcgaagtccaagagaggcagtgtcgttaaagctgcatatttacatggtagggtaggtggtgtgtccacgctcccagtgtaaggtc

SEQ ID NO: 341502 - DNA, 122 bp, Homo sapiens
cattcctcgccccagccggtagtctcctagccctgttgaacgcaagagcatccaagggcgcgcaagtccccaagagctctcagaggttcctgaccctgagcgttaaagcccttcctcgcgga

SEQ ID NO: 341503 - DNA, 122 bp, Homo sapiens
taggggacggccgagggcctcggagggcgagtattgaggaacggggtcctctaagaaggccggactggaggtcagggatctgcgcggggcccggctgggcctcggggggcggtgggcagggc

SEQ ID NO: 341504 - DNA, 122 bp, Homo sapiens
atttgctgaagaaaatactgtcttctatttttaatgatacattaggtacgatgtgtagttcggtagagtcctaaaatttttgtactactttcaatttggtgaaaatgtattaagttgtctac

SEQ ID NO: 341505 - DNA, 122 bp, Homo sapiens
ccggaggcccctgggactttgttgcaattgggttcagcccgggcatgggctgaacgtggacgcgcgggaaccgcgcctcggtttccccatctgtgaaacctggaggctgtattaggattctg

SEQ ID NO: 341506 - DNA, 122 bp, Homo sapiens
tggagaatgtatagttgaggtggaaaaaactcaagtacaatcttactatttccaagtatccgaatggttctaatgtggaagagaaattagacttccatgttgttcaaaaaggatgaactaga

SEQ ID NO: 341507 - DNA, 122 bp, Homo sapiens
tccagtccgcgttctcaggggccacttggcgtccccaccacctggtcttcgccccagccccgtctcatctgccgctagagttgcgtaacgtgagtcctggacagttgattccacctgaagtc

SEQ ID NO: 341508 - DNA, 122 bp, Homo sapiens
tggaagggagcatgaggtgagtttttgcaatattaaattggcttgcagattgctgccttccggctgtgtccttaaatggcagagagagacaaagagagagggagagagagagcacgccagag

SEQ ID NO: 341509 - DNA, 122 bp, Homo sapiens
cccttagcacctgcattaccatccatcaataaatctcttccattggaaagtctctctccccgtacctcatgttttgagtcatttcatctcctgggtatgtctctctctaccttatcctaccc

SEQ ID NO: 341510 - DNA, 122 bp, Homo sapiens
cggaggagaggaaggaaagagaataggacattaagcaggaaacatggccgctggattccgcggcgaccaggtctctacccgcccggcgtagcttaccctgtacgaccaccgactgggtcatg

SEQ ID NO: 341511 - DNA, 122 bp, Homo sapiens
cagattgatggatccctgccatcaagactgggcattcctgtccaacaggtgccagagttgcgaaaggcctgtgacagggaactccactcttcccttggctgctgttctgggactcacccctg

SEQ ID NO: 341512 - DNA, 122 bp, Homo sapiens
cattaagcgctcctggccttaccttccttggtttagtagctgctctgccgtggtcagcatcgttctctctgcagcaattagtggcaataagtgggagctcgcacaattgatggtgtaaaatg

SEQ ID NO: 341513 - DNA, 122 bp, Homo sapiens
ttcttcccagagcttttaggggcctggcctttgcagttccagatctactacagcaaacatcgttcaagatgtcccaccaagaaggcagcacagacggcttaccagacttagggactgaaagc

SEQ ID NO: 341514 - DNA, 122 bp, Homo sapiens
ctgcccgtgcagaggggcttgcccaggtccccgactgctcgggattgggggagcccacagcggaggctgggggcctgggtcgcacccaccctgggtccagatccccatctgtgggcaagggc

SEQ ID NO: 341515 - DNA, 122 bp, Homo sapiens
gcgtcccacatcccgcatccggcatcccagcggccgggcatgtagcagcggcagcaacggcggaatatgggcgggaaccactcccacaagccccccgtgtttgacgagaatgaggaaggtaa

SEQ ID NO: 341516 - DNA, 122 bp, Homo sapiens
atgattcttcttggaaagatgtcctcaaagatctggatctgggtaagaagctccagggtccgtccttgggccatgctaaggaccacagctgtctagcagtgaagtggaccccaggaaggaag

SEQ ID NO: 341517 - DNA, 122 bp, Homo sapiens
caaaacctttcccacatgaacacaaggaaacatgcataagaaagttcacagcagcagccacgcttgtaatcccatcactttgggaggccaaggcaggtggatcatttgaggtcaggagttcg

SEQ ID NO: 341518 - DNA, 122 bp, Homo sapiens
agagtagacagcagggagggccaaagcctaagaaatcgctacaagactagatgccgagttcgaactactgcctggacggcagcgcccgagcgcccgcaaaaataagcccccgtgccatttcc

SEQ ID NO: 341519 - DNA, 122 bp, Homo sapiens
cagaagagggccagagcagcgttacctctttctgtgggtatcccaagggttctggaagaccggggcagtctgtccgtcccaccacagaggggacatgctgggcccagcccttgggatttctg

SEQ ID NO: 341520 - DNA, 122 bp, Homo sapiens
ccggaatccagggctcccagaagatcagaaaggagaaaagtagtgggttggaggtcccagcgattgagattccaagaagcctgagaggaaatctagtaggtcggggtcacagggatcaggag

SEQ ID NO: 341521 - DNA, 122 bp, Homo sapiens
ctttcaagttgccctgggaggatttggagtgttgcgtggtcattgaataaatagctcattcgcttgtccggatatgaccccactcagagctggctcccccactaagcagtgacactaagaag

SEQ ID NO: 341522 - DNA, 122 bp, Homo sapiens
agagatctagtaacaatgaaaagagatgtgaccctgttaagatttatgtaaaaatgtatgcgcatgtgtgtgttggctctaggataaagtgcaaatgttccatggtgtaaaaggaccttcac

SEQ ID NO: 341523 - DNA, 122 bp, Homo sapiens
aaaaaaaaattttttttttaatttcaataccttttggtgtacaggtggtttggggttacacggatgaactgtacagtgatgaacgctgagattttagtgcacctgtcgcctgagtagtatac

SEQ ID NO: 341524 - DNA, 122 bp, Homo sapiens
aagtgctgggattacaggcgtgagccatcacacccggccagatatttgtttttttaaatacgagttctcactctgtcacccaagctgaagtgcagtggcataatcatagctcacggcatcct

SEQ ID NO: 341525 - DNA, 122 bp, Homo sapiens
tcttgtttgctcattctgttggtcacaccagtggttgggtttggagtggagatggattgacgcagagcctcactggtggaaggcaactcaagcctcatgtcctgttgctgatgggtcaggaa

SEQ ID NO: 341526 - DNA, 122 bp, Homo sapiens
ggagtgtagttctggttcaactaagataaagtactgatgaaaggtcactggcagacaatacggagaaacagcctgccttgcaggattttttgtatgcctagtcagcctacccaaggacaatg

SEQ ID NO: 341527 - DNA, 122 bp, Homo sapiens
gctcagggagcgggtgggggagcccgggttccgggagcctcctttctgtcctctctactccgtgcgggcctgggccggcagaggtaggagggggcgcacaccgggccaggaggctgccgccg

SEQ ID NO: 341528 - DNA, 122 bp, Homo sapiens
ccaccttctttctttcagctgcaggctttgagtttctcagactgccttctgattcctcatcgactgtggaccttgtattctccgtattctatactgtgatacctccaacactcaatccagtc

SEQ ID NO: 341529 - DNA, 122 bp, Homo sapiens
aagcagcgccaggacctggccaacctgcagaagcagcaggcccagtacctcgaggagaagcgcaggcgcgagcgtgagtgggaagctcgtgagagggagctgcgggagcgggaggccctcct

SEQ ID NO: 341530 - DNA, 122 bp, Homo sapiens
atccttcattcagacttaatgcctgcaggtccggtttaatgatttcccagagtttatgaacgaaaaagaaaaacaaagcaataaaaacaaaaatcaaagttaaatttcctcaaaagttttca

SEQ ID NO: 341531 - DNA, 122 bp, Homo sapiens
gcggcgggggcggccccagcggatgaatgaagcggcgcgtggctgccggggaggccagagcgtggagcgctgcgcggcgcggcggccgggccctcgagacggggacggtgagtgcgcgggga

SEQ ID NO: 341532 - DNA, 122 bp, Homo sapiens
ggctaaatgctgcaaaacacagcaccggcctcccgctcccgttcccgcaccctgaggacgcgctggctgattgtggcacgcgtgccttccgagcccagatgtcccttcctgacacgccggca

SEQ ID NO: 341533 - DNA, 122 bp, Homo sapiens
ccagccggtggcacggaggcggacggcggcggggctgtttttggcctggtggctcgcgtgcgcgcggcgggcgcggggctccggcgggcgggcggcccggcgccggctcgcgccctgcccgg

SEQ ID NO: 341534 - DNA, 122 bp, Homo sapiens
gactactgagtcggccatggcaagtatgggcagccctggaagtaattctcctttaatttccgaaagatgtacccacgagtttaaaggcgagtgacaccatagcaaccaagccccaataggaa

SEQ ID NO: 341535 - DNA, 122 bp, Homo sapiens
tcctcctcctgcagctcctccagctgccgctgctgccgccgctgccgccaccgccgccgccgggagaagtttcactcccgacccttgctcggagccccggcccagagctgagcgggagcccg

SEQ ID NO: 341536 - DNA, 122 bp, Homo sapiens
cttgacccaagtgtacaaacttattggtcgctgcaatggaaactcccagtgcactctccacggcctggcagccgccgctgatgggtggagtcgcgctcccggccccacctatgggacggagc

SEQ ID NO: 341537 - DNA, 122 bp, Homo sapiens
gcacgagggtcgtttctgggcccagagtagggcagctctcagattgcagctcctgagagccgtgcgcgaccgtctccagcactcgcggacccccagagggctgtttttttttctccatagca

SEQ ID NO: 341538 - DNA, 122 bp, Homo sapiens
ctagcccaccactcaccagctgtgttgacaggcaagtaagttaacatcgcgaagtccttccgttgccctgttagagatgagcttgtatggggagtaagtcaaatgagatgatcctacaacat

SEQ ID NO: 341539 - DNA, 122 bp, Homo sapiens
atcccactgcctctattcaggctgccgaggcactgctttaattttttgaaagattcaccgcgtcttcttggatttcaagaaaaatcccgttaagaattgaggggctctcttcttcccctcct

SEQ ID NO: 341540 - DNA, 122 bp, Homo sapiens
acagaaaatccatctccaagggggttgtccttctgtccatttttgttggtgtgtttgtttcgttttcctttcgtattaacagtactgtggccgttcggtggaaacccgcatgcgtcctcagg

SEQ ID NO: 341541 - DNA, 122 bp, Homo sapiens
cgttcccgccccttccgctcggactgcagatgcccagagagtaggagcgcctggagaaggcggcggctggtcccgggccccgcgaacgccgccaggccggcggcgtgcgtgctcagcgccct

SEQ ID NO: 341542 - DNA, 122 bp, Homo sapiens
ctcaaactttctcctgcccccttcacgggaggttcctgtagcctctgggccttagggtcccgtaagcctcgggatcgacttgtgcccggggtgggtgtggcggaagcttgaatcggattacc

SEQ ID NO: 341543 - DNA, 122 bp, Homo sapiens
aactttgaaaagggatcttccaaccaccttgggaaatcactaagagaggcattggcagtgcggcaaggacattcaagggactatgagtcctttgacagtggcagcaggaatgctgtccacta

SEQ ID NO: 341544 - DNA, 122 bp, Homo sapiens
gaaaatccacagggcaaggccattgcccagaagcccaaagataaactccagccccaacaccggcggcaacaccttggcaatgaagtcatctcggaacacacagcagttcttcttgtctattt

SEQ ID NO: 341545 - DNA, 122 bp, Homo sapiens
cagcccacgccgagggtccaagcatcgggatatgccgccagcacctggctgctgcagcaccgcgctggacatgagcgctccgcccaacccgacggcgtcagctggcgcgcgcgcccgcgacc

SEQ ID NO: 341546 - DNA, 122 bp, Homo sapiens
agattagaccattttagccatctctaaaaagctgaacttgcaaaacaaagggataaagaacgctaattttcaatgaataaataaggaattctggacgtgcaggcaagtgatcaagagccatt

SEQ ID NO: 341547 - DNA, 122 bp, Homo sapiens
tcagctcggtaaggcctgaagctccggctggggtcgggcttagagtccaagtcaccagtgcggaaagcctctcggatcctgggctcccattccggcaggtccctgaagtcaggtggctgcac

SEQ ID NO: 341548 - DNA, 122 bp, Homo sapiens
catagttgtgtttgcttttgagtgttagataaatggaatcctgtgtatgtgcttttgtgtcgtttttgtcactcagcattgtataatccatccttgttgggtcctggagttcatttttaatg

SEQ ID NO: 341549 - DNA, 122 bp, Homo sapiens
cgcgcgcgcgcgcatgtagtcgtgtctcgcgcagggtccggcctgtcaggcggaaaatctcgcgagatcggagacgggggatgacggtctggaggaggggagtggtgtcgggtaaagggggg

SEQ ID NO: 341550 - DNA, 122 bp, Homo sapiens
tgaggagcgtctctgcccgcccgcccatcatctgggatgtggggagcgcctctgccccaccgccccgtctgagatatgaagagcacctctgcccggccgcgaccccgtctgggaactgagga

SEQ ID NO: 341551 - DNA, 122 bp, Homo sapiens
gacagacagacagacagtcagtcctggattctggtggtctccaaggttgattcagctagtcgtggatgctgtcaaaaacccaggtgcattgcctgtctttactcagtgatccttggtttgtc

SEQ ID NO: 341552 - DNA, 122 bp, Homo sapiens
cgcgccagtcgcgcgcccctccccgcggcggcagcgtcggcggcgcatccaggggcggcgcggagccttgctcagcccagcagccagtgcctgcgagctccgctgctgcttggggaattcac

SEQ ID NO: 341553 - DNA, 122 bp, Homo sapiens
tcgtacttgtgcataagcggcgggtcggcgagcagcaagcggatgtcgtgcgggttgagtcgctcgctgcactcggggcagctgatgggcaccctgctctcgcttatctccaggcgcaggta

SEQ ID NO: 341554 - DNA, 122 bp, Homo sapiens
ggcttgaagtcattcaacccctgcgctctgtgctttcacgcccttgcacttgcggtccctcggcctggaatgctggtctgtttaagccctggaggcagctcctgtgctgtctcatttggacc

SEQ ID NO: 341555 - DNA, 122 bp, Homo sapiens
acaacagcagtccacatcccagagacctgctcccccctgctcttttgtcttttttggcctcggctcatcagatgcttttgtctctggaaaaccaacagaaccctctgccagaaaggtctgcc

SEQ ID NO: 341556 - DNA, 122 bp, Homo sapiens
ggccatttcattgtcataaaaatcctttatttagccttctccacaaataagctcacagcacgacaaaggacactagttagagtaatttgggcgataagtaaacagaaggaatggctaggagc

SEQ ID NO: 341557 - DNA, 122 bp, Homo sapiens
gggtgaaaacagaaggaaaataaaccggttgcagcaaaacccactattccgcctccaacgcggagggaggagcggtcaaatgcacgtcttcaggctcaggcccttccgattggctgctggga

SEQ ID NO: 341558 - DNA, 122 bp, Homo sapiens
ggaagtttcctccaccactctgctttcccagacatctgtcaagagcgaggccttgcgcagcgtgtccatctcacccggaacgtggtgcttttttaaacggagtccacctttactacattatt

SEQ ID NO: 341559 - DNA, 122 bp, Homo sapiens
agtggaatgattgggctccaaacccccactgagccaggagttagaaattctaagggaggccggccccatggaatgtcttccccatgagaaggaagggcaggtaggttgtgtttaccctgcag

SEQ ID NO: 341560 - DNA, 122 bp, Homo sapiens
aattttctcaggatgacttcaaatcaaaacagaaacgtgtggtcttgcctttggtttttccgcccaaactgccttttggctttgccgtgtggggaccgggcacctcgactgtcctctgtgtc

SEQ ID NO: 341561 - DNA, 122 bp, Homo sapiens
taggagtctcgaaatcactagtcggctcagccataccactggcgggtccggagtctagcacgcgactgtggagcaagcattaggcgtcacttcctttaccgtgaactacaaggctcagccaa

SEQ ID NO: 341562 - DNA, 122 bp, Homo sapiens
caaggggctgctgcaaggacctctgatcgctttgagggcccttgtgctcagggttgcctccgtcacacacacctgaccctgcactgggtgctggatgttggagataggaagtaattgggaga

SEQ ID NO: 341563 - DNA, 122 bp, Homo sapiens
ttcgcttctttctcgtgccgttttcgcggacgttttcttctaagttttgctggccttccacgggagatggagcgtttgctgccggcgtggcaagtgttggggcgagacgggtgtgtgtgttt

SEQ ID NO: 341564 - DNA, 122 bp, Homo sapiens
ctggacgcagggaaagccgaggaggtggagctcccgcgccctgcgcccccgcactgggcccggctccgtcgagggaaggccaggaatcttggaagaaaccgaaagaaaactccggcggcggg

SEQ ID NO: 341565 - DNA, 122 bp, Homo sapiens
gcatctcttcttcccacctggaactctcggaagacagcccaggggaaaggtggaaacgggcgtgagctgccgccaccaggagccaccagcccaggaggcagcagcaccgtcccctcctcaaa

SEQ ID NO: 341566 - DNA, 122 bp, Homo sapiens
cctgggcgaccccagcatggcaagttctctgcgtgaataaggcagtggttgtttaacaggcgtgccaggaggctcagggagcaggagctacagggacctgcattgtattctaagcgacatga

SEQ ID NO: 341567 - DNA, 122 bp, Homo sapiens
gtaatcctcagaatctcagtaactttccagtgaccccgcatccccacccactaatcccagcgtctctggttacgcctcccagcaatggcgccaccatcggtcccggagtcccagtgatgctc

SEQ ID NO: 341568 - DNA, 122 bp, Homo sapiens
ccctcgctggccaaccctaactgcggccgctgggctcccgggttccgcgccgtcctcgagcgggttcccacttcacagacagggagactgagggccggagaggctgcccctttgctgcgagc

SEQ ID NO: 341569 - DNA, 122 bp, Homo sapiens
agatcagatcagaatagattgatggaagggaaaggcggtgagggtgaagcaagagaaactcggctccagtgaaaaggacccatcattgcattccagaacgtaatttgcatttcatatgtaaa

SEQ ID NO: 341570 - DNA, 122 bp, Homo sapiens
gtctcctatgcgccaagtggagtccccggccaagaagccagcctcaccagcagaggatgacgaggatgatgacatcgacctgtttggcagcgacaatgaggaggaggacaaggaggcggcac

SEQ ID NO: 341571 - DNA, 122 bp, Homo sapiens
ccgcctctcgtttttccttccagcctcgcttcaaagttctgtattgcagaatgaaatcggcgcctttccccagcggtttttccaaatacgagcaaaggaggcacaaaacgcaggttccagaa

SEQ ID NO: 341572 - DNA, 122 bp, Homo sapiens
aggcaagcccttttgcaaaaagcacagctgaaagcctgagtttgggagcctgcaccaccccgatgaagctccacgggagcaaatacagagcctccaggcagtgctatggtccaggctggctt

SEQ ID NO: 341573 - DNA, 122 bp, Homo sapiens
gcagcgcccccagaccgtcggagagcgcagagaggcagcggcgtgctgaggtttcgctgccgcccggtcttccgctgaggcccacgggcaagaagagaagccgctggcggccgggcaggcgc

SEQ ID NO: 341574 - DNA, 122 bp, Homo sapiens
atagtaaaccttattcaaattaaaaactattttaagggataggcctggcgcggtggctcacgcctgtaatcccagcactttgggaggccgaggctggtggatcatttgaggtcaggagttca

SEQ ID NO: 341575 - DNA, 122 bp, Homo sapiens
caataagtggaaaaaggaagggcgtgtggacagggcagagcttggaaggaaaattcgtggcggcgctgggcagggcagatttagggtgtgatcgccagatcctatcccaagtccgccttcct

SEQ ID NO: 341576 - DNA, 122 bp, Homo sapiens
atcttccgtgtcttttggcacctaccgccactgcctggcgcacatctgccggctccggtacggcaaccctgacgccaagcccaccaaggccgacatcacgctctcgggatgcgcctccggcc

SEQ ID NO: 341577 - DNA, 122 bp, Homo sapiens
gtcagaaggccccatgaataaccttccagtcactgagggaggtccctactcagcacgccccggtctccttcactctcctgcactcgtgcctcacagatggcctcatgcgcggactggcggtc

SEQ ID NO: 341578 - DNA, 122 bp, Homo sapiens
tgcttggcccggagcgccgcggcgggtggtggcgctcacactaactatagctatccagggcgcgggtcgagtggcgagaccagctcccctgggtatgagaacgcatctttgtgcggtcggct

SEQ ID NO: 341579 - DNA, 122 bp, Homo sapiens
catttcgcagggggctttgcggcgcctacttcctcctggctgattagatgggactggtgccgttggccggacgtttttgggagcttcacaggctgatggggaagggcgaaacctgctcgatt

SEQ ID NO: 341580 - DNA, 122 bp, Homo sapiens
cacaagttttcagagaaagggcatttgcctttttcttctagccaccagcctctgagacagcgctggaccccaagactctgcaggattcgcctcagtgcagaggctctggattctctggctct

SEQ ID NO: 341581 - DNA, 122 bp, Homo sapiens
cactctgcggacctgccggcgtagttgcagcgggggcttggggaggggctgggggttggacgggattgaggaaggtccgcacagcctgtctctgctcagttgcaataaacgtgacatcttgg

SEQ ID NO: 341582 - DNA, 122 bp, Homo sapiens
gtctcgggaccccatgcgctggatctcgtggtaacaggtaaccccctcgtgaccagcttccgtgtgttccttttgatttgcccagggtctcgagtgccacctctctaccctgtgagatacgc

SEQ ID NO: 341583 - DNA, 122 bp, Homo sapiens
gtcatctgttgaagaattcacagcagctcaggacagctctgcgatggtgggtgaagatgtcggctccctggctctggagagtaagtccctgcaaagccgccttgctgagcagcagcagcagc

SEQ ID NO: 341584 - DNA, 122 bp, Homo sapiens
tccatggtgaaggggcaagagggtccctgagctgtttggttcttgacttcgtgcacagagcgtagctcttctttgtcagggacccacaggatgggcattctgggcatctttttttttcataa

SEQ ID NO: 341585 - DNA, 122 bp, Homo sapiens
cgcagagcggtcctcatttggccggaagctactcaggcagcctctgtttcctcacttcagcggggtgggcttgggtgtgggtgaaagagataagatatttagcagtgagtcatttttttctg

SEQ ID NO: 341586 - DNA, 122 bp, Homo sapiens
cggtttcctttctcctctcagaagcacttaggtttcagtttcccttcagcacgaattaggcgaggcactttcgtggaaagtttagcatccttcccttcaatcagaatcttaagaaggggagc

SEQ ID NO: 341587 - DNA, 122 bp, Homo sapiens
agggcctttgtcttttttaatttactgcaaaataatcagtgccaagaacactgcttggcacgcagtagtcaaaaaatatttattaaatgaataaataaatacatagtagatattaaagtcat

SEQ ID NO: 341588 - DNA, 122 bp, Homo sapiens
aagtccttgttacttcttcgtgggcgttttcaccaagtagacttggaggttaacaaaggacgcaaaggagaggttctaatgggagatagggaattctggccaaagctattccagggctccta

SEQ ID NO: 341589 - DNA, 122 bp, Homo sapiens
ctcatggtcagaggcggaggggagttgtgaacgttctgatgaaagcagtcaacgtgaaagcgctctggtgatgggcgctggtgctcacccaccacttcctgtgtatctatctccctggcccg

SEQ ID NO: 341590 - DNA, 122 bp, Homo sapiens
gacgggactcaccccagcgtcccaaacaatgtcgcccgcagcgtgcgtccagtaccacggcgcatgcgcaaggaggcctatggcctacaatccccagaaagccccgcgcgcagcagtggcca

SEQ ID NO: 341591 - DNA, 122 bp, Homo sapiens
agatccgctctcctcccgggcaggagttagggcactgaagacgtcagggctggcggatgacgtggtatttgaggaagcaggtcattgagccgaggcgggactcaggtggcgggggcgggtca

SEQ ID NO: 341592 - DNA, 122 bp, Homo sapiens
aaacccacattcgggagcaacattacgctaccagctgcagctgagggctctgggtgaaatcgagccagggctggggaacaactcaaaagtcatctgagaggtgtgacacctccctggcgtcc

SEQ ID NO: 341593 - DNA, 122 bp, Homo sapiens
gagccgaggcccgcagagcctggcggctgcaggggtgcgggagcctcctctggcctggtgcgccccgcttctcacggtggggctcctgatgctcacgcctgtccctgcttctccccagaagg

SEQ ID NO: 341594 - DNA, 122 bp, Homo sapiens
ttggggtacggcgcgtagagatgacgtcgggttctacgcgcagtggtgacgtcacgggagcgccggcggctgagaatccgcgttgttccgtgttgggggcggcatggagcgggagccgggcg

SEQ ID NO: 341595 - DNA, 122 bp, Homo sapiens
cgggccgctgccctgcagagcccaccttactcttactctccacaggcctgttggccgcggcgggccttggctcccctgagcctggtgggcctgcaaagagctgcgtccaggagccgccccca

SEQ ID NO: 341596 - DNA, 122 bp, Homo sapiens
cctctgcccggggctcaggatacggtcacctgtattcgctgtggcttcaacatcaacgttcggggtgagaggcttgtacgcaggggtcctggcggagggcgcagggtcggaagcttggggaa

SEQ ID NO: 341597 - DNA, 122 bp, Homo sapiens
agcagttttttttaaaatggagaacctagcactaccttttctaggtgtgttacattgtctcgatattgtaaaccggctgaaactcaaaattcttgttgctattttcagggtcgaaaagtaat

SEQ ID NO: 341598 - DNA, 122 bp, Homo sapiens
ttgtcttcttcctgctccatctattaccttccagatctctttttccctcctgaataccttcggtttgccaggaactttgccggacactgaagagtaattagtgagtaaatcagatgtggtcc

SEQ ID NO: 341599 - DNA, 122 bp, Homo sapiens
gcagaggcctgtggcacaggcttcacctgatcttttatcctgaggctgggatgctagtcacgctgtcaggcttcctgctcggaacacccagcagctgtcatgtgcaccgtggagccaggggg

SEQ ID NO: 341600 - DNA, 122 bp, Homo sapiens
tctgtgtgtctgagggcccaggtgcctgtctggatgtctgggggcccaggttcctgtgtccgggtgtctggatgggatccgtgtgtctgagggcccaggtgcctgtctggatgtctgggggc

SEQ ID NO: 341601 - DNA, 122 bp, Homo sapiens
caggcaccagaatatagcaccgggatgtgcaccggaaaaggcccgggggtaattagtacccgagggggagaggggccgtcattgtaatcgcacaacgtttcagattagcaagcagaaagtaa

SEQ ID NO: 341602 - DNA, 122 bp, Homo sapiens
tgaaaagtctccgaaataaaaacctaatccgaaatttggtatcttccttagatatgaacacgtctccaaaagtacagccaccttctcaatctaaactcagagcaactagaaaaagataataa

SEQ ID NO: 341603 - DNA, 122 bp, Homo sapiens
atcaactcttaaaatccgagacataaccacgaaaggagcagcccccagatcagagagcaacgcatgactatctgcgtgtgcttctgtgactacgcggatgttgtgggcggctacatgcgtgc

SEQ ID NO: 341604 - DNA, 122 bp, Homo sapiens
ttgtcagcggatgtgatttttgtgacatctgttccgcagcccccatcaattcacacccagcgtctgcgtgactcatgtccttgaattagccattgttgggcccgagggaggcgaacgggaaa

SEQ ID NO: 341605 - DNA, 122 bp, Homo sapiens
cgcacgtgtgggagtgcgcgtgtacgcgcacctgtgagcgctcggcgcaggcccgcgacacgcccgagcccctcccgccgcgccccgctctcgcccacctcctggtgctccacctccccgcc

SEQ ID NO: 341606 - DNA, 122 bp, Homo sapiens
gggccccgccccccagcatagctccgcccctaacagcctcgcccccggcagagaggccgtcggcgtagcggccccgcccactagacccgccctgcattctcagctccgcccaccgcccggtt

SEQ ID NO: 341607 - DNA, 122 bp, Homo sapiens
ttctctctccttgtctgcccctgagcaccgtgttccccaaacggaggtgggatcaggatccggcaagtgccaggccggagtctgagcccagagatgggacaaagatgggcaagagtcggggg

SEQ ID NO: 341608 - DNA, 122 bp, Homo sapiens
ccttgggacaggggctggatctgtcatgttcctgtcgtgcccctggcacatgctgggttccggatatatagctgcaaaatgactgaattaaccaaataatgagtgagactacagatggttcg

SEQ ID NO: 341609 - DNA, 122 bp, Homo sapiens
tgagctgcagctggggccagagcagctccaaccggcctgctgcaattagagacgtaccggcgggcaggaggcactgggattttctttcttgtgacatacgtggttgtagttttcattttgat

SEQ ID NO: 341610 - DNA, 122 bp, Homo sapiens
tccaccaccccctccccgccccccgccgggctcctgcgcggcctgagcctccccgacgaccgccgccccctgctccccggtgcctggtcccattgaccgcccaagggctgaggagtgtgggt

SEQ ID NO: 341611 - DNA, 122 bp, Homo sapiens
cacccccccacatatgtgcaaccacacaccatacacttgtacgtgtgaccacacatacatcgtctattcccatctgtctcctacacacagtctttcctaagcattttatttaaaaaaaaaaa

SEQ ID NO: 341612 - DNA, 122 bp, Homo sapiens
tctcctcaatgacagtttcctattgtctgttgttctttctctaagccaagacatttaatccgtcccaaggtatttttacaaactgctctccccagtgcatcccttaaaagctgctgtgttcc

SEQ ID NO: 341613 - DNA, 122 bp, Homo sapiens
gggaaagtccggtgtctaacaggtcacaggtcacaccgttcacagcagcgtttttcacgacggccagagggtggacgaatgtgttacatgacccctgccccgaatgtgatatgtacgcacaa

SEQ ID NO: 341614 - DNA, 122 bp, Homo sapiens
tctggagtgtgtggtgaaacagaaaaaaacatgtttaataaacggagattgttcttttatcgctgtgccgactttcttaggcagggctctccagacctgtacggtggtaagatctgctttct

SEQ ID NO: 341615 - DNA, 122 bp, Homo sapiens
accttgatagattaaagctgctccaggtctggaaagcctccagaggagcagactaaatcacgtagaaaagctgaagggaaagccagtgtgggtgattagccatggcaaagtaccagatccag

SEQ ID NO: 341616 - DNA, 122 bp, Homo sapiens
agatatgttgtcccaggactcagagtggttgggaaaaacatgtacttaaataataagaagcgttaaatagaggttgtagtcttgtataaaatggtaggaaagagtgaaggtgtaagtgacat

SEQ ID NO: 341617 - DNA, 122 bp, Homo sapiens
tctcacaagaagcccaggccacgtggcttcgccgtctggtttgggagtgggcgagggtggcgccccagtggctgtgcggctaggtcagtgtgaggctcgcactgagatttcgagggggtggc

SEQ ID NO: 341618 - DNA, 122 bp, Homo sapiens
agtgacgcgcaaggaacggagcaggggacaccgtgcgggctcaggagctccccagatgcccgagccgaaccgcggggtcctcaccgccaggttccagcccaggaagcgctcgcctgccccac

SEQ ID NO: 341619 - DNA, 122 bp, Homo sapiens
gcggcggcgggctgtgggtggcggctgaggcggtggggtaacctctgcatcagttacaggcggcggcggcgtcacgcgccgcctgtgcaaacactatcgcgaggctcctgcgcctccggtag

SEQ ID NO: 341620 - DNA, 122 bp, Homo sapiens
gccgcctctcagttttggggcggtggcgaccccagtccgggagtggccccggtaggtccccgcaggcgggcaggagctccgaggccattggctggcgcgcgggctgccaaggggcggggagc

SEQ ID NO: 341621 - DNA, 122 bp, Homo sapiens
gaagagagaatggggtccgaggcctctgtcacgctctctctcgaggcgcggcggtgagaccgcagggatttcctgagcagcaagtcgtgtgccccttggcacgctttatctgcttcgcccgg

SEQ ID NO: 341622 - DNA, 122 bp, Homo sapiens
ccgtcaggccacctacacagagtgctgctgcctgtatggagaggcctggggcatggactgcgccctctgccctgcgcaggactcaggtgctggcactggcctaggctgaactcagaggcctt

SEQ ID NO: 341623 - DNA, 122 bp, Homo sapiens
aatgtgcggcatccagacgcttactatgcagtgtaagctcagttggtttactaatcaccccgccccacccgcaaacaatcaggatcatttgaatgggaacctcattcagacttctaggctga

SEQ ID NO: 341624 - DNA, 122 bp, Homo sapiens
tctaattgagctctctgctttcacccttgcctcccagtcagttcccagtacagcagttagcgggacccttttaaagtgtcagcaagactcctgcttaagagccaccaatggttccccatctt

SEQ ID NO: 341625 - DNA, 122 bp, Homo sapiens
aagccgggccatccccgccactcgccgggtggtgctcggcgacggcgtgcagctcccgcccggggactacagcacgacccccggcggcacgctcttcagcaccaccccgggaggtaggcgcg

SEQ ID NO: 341626 - DNA, 122 bp, Homo sapiens
ggagtagaactcaagcctggaggctccaagcagcctgtggcctgctctggtgaggtttttcgcacctctcccagggcctccttcctccccgacgcagaacaactcggatctgctggtcccac

SEQ ID NO: 341627 - DNA, 122 bp, Homo sapiens
tttcacacacaattgattcaagcattatacaggaacacccctgtgcagctacgtttacgtcgtcatttattccacagagtcaagaccaatattctgccaaaaaatcaccaatggaaattttc

SEQ ID NO: 341628 - DNA, 122 bp, Homo sapiens
ctcgatctcctgacctcgggatccgcccgcctcggcctcccaaagtgctgggagtataggcgtgagccaccgcgcctggcctatacttgatttttaatgaaaacattcttaaattcatatgg

SEQ ID NO: 341629 - DNA, 122 bp, Homo sapiens
gtgcgtgcgtgtgttatgggtttgattccagagcaggttgcacattggtcctgggtggctcgcaggctcaggtcgtgcttgggcgtcctcctcctaatcgtttccgaagtagcagcagcagc

SEQ ID NO: 341630 - DNA, 122 bp, Homo sapiens
ggcgagcgtctggcgtcctctggggcgcagtcccgagagagccccttccgggacctcggacgcaaggcccctgagtggccctggaagttggatcccccggggaccctgctccgaaccctggc

SEQ ID NO: 341631 - DNA, 122 bp, Homo sapiens
agtgcaacgtcgggtggcttcctgagagtactcctccttcctgttatcccgccgccccatcgtttgctgcttcttttgccatgggagatgcttacttgcggggtgacctttactttaggtga

SEQ ID NO: 341632 - DNA, 122 bp, Homo sapiens
ttggtcgccacgggtaagggcaccgcccaatgggaggtgtggatagtgaggggtcccacacgcctggagccgagggtctgtgtcaagagcggcaggggctgcaggagataagagaaacgggt

SEQ ID NO: 341633 - DNA, 122 bp, Homo sapiens
aagatcgtgccaaaggctgagtcacttgcactaagtagcctagaacagtctctggggaaacgcgcccgccgacaaggatcgccagaaccggcgcgggcaccgcgcggcgaccaggagctctg

SEQ ID NO: 341634 - DNA, 122 bp, Homo sapiens
tggacagagacgcgctcaagcagagtctcgtggtggccgtccaggaccacggccagcccccgctctccgccactgtcacgctcaccgtggccgtggccgacaggatctccgacatcctggcc

SEQ ID NO: 341635 - DNA, 122 bp, Homo sapiens
ggaagctcccgggatgggcctgactccgccgcctggttgcaatagtcctggaaggggcggcggagcaagcagaagcctcctgccctggcccgtgggtttgcaccagctagaacgtggggctc

SEQ ID NO: 341636 - DNA, 122 bp, Homo sapiens
acaaacaaaaattcttcatttcctgatttctctttcagaccttctatggaggaattgtctcgaccaacatgggctagaaagaaactaatcaaatgaaaggactatatttctttgaaaaaggc

SEQ ID NO: 341637 - DNA, 122 bp, Homo sapiens
tcatttaattcttacaaaaccacggcaaggattcaaccccacaactgctgtctagaaaaccgaggaaagtgacgcaacccgcgggaggtctgacggcccgagagccgcagcgccaggcccgg

SEQ ID NO: 341638 - DNA, 122 bp, Homo sapiens
gaggcatcctccccaaccaccgaacctccggcggttctcctcggcccagaccgatggagccggggatgctgggtccacacaacctcccacaccacgagccaatcagcttcggcatcgatcag

SEQ ID NO: 341639 - DNA, 122 bp, Homo sapiens
ccactttggcacggaagccttacagtgtggggaaccaaaacttcgtgtctcccctttccccgatgccatcagcatagacttgacttccttaaaccgagagttttgatgtggccttggcaacc

SEQ ID NO: 341640 - DNA, 122 bp, Homo sapiens
ccaagcctgggtcacgttggagaatctgccacccaaggcaggcagggccgggctgggatgcgtcggcctgctttggtggagacaccagggcctgcagtgggctgaaccgtattgtttccctt

SEQ ID NO: 341641 - DNA, 122 bp, Homo sapiens
gtccgtctgtccgtccctcccatctctgggtctccatgcctccctgtctcttggttcccacgtcgtctccacttctgtgtccccacgtctctgtgtccccatgtctctgggtctccacatgg

SEQ ID NO: 341642 - DNA, 122 bp, Homo sapiens
aggtgaagacagcaacaccaaacaacttgactgtgagggcagcaagtgagtagatgcaagcggtgaaggctgtttgtgcttttcaggacatgaactcttgtgctcgcacaaacagttccaca

SEQ ID NO: 341643 - DNA, 122 bp, Homo sapiens
gaagcggggcctctgggctgggcctctgccctgccaggaagcggtctgggggctgcccctcgggattttcagaaccctggaaggagagagctggggtctcaccgcggagactcccgagttct

SEQ ID NO: 341644 - DNA, 122 bp, Homo sapiens
ctatgttttgttttgagtgtagcctgactgttttataatttgggagttctgcatttgatccgcatcccctgtggtttctaagtgtatggtctcagaactgttgcatggatcctgtgtttgca

SEQ ID NO: 341645 - DNA, 122 bp, Homo sapiens
cacgtttgatacagtggttggtgctgtttgctgttgtccatcctgggcagcactgtcccccgcagacgttcctcctgtggggtcaccaaaacagagtcaacacaaggatgctcagagctggg

SEQ ID NO: 341646 - DNA, 122 bp, Homo sapiens
agtctgttgttttgaaagcaaatctaaggggaaaaactttcataaaagagaaaaagaaaccgatcgtgtactaagaaactcccaaaagctgaaacagcatgttttctgtgtaactgagcaaa

SEQ ID NO: 341647 - DNA, 122 bp, Homo sapiens
cccaggtgttgatttccaaggccattatccaataaaaagaaccagggattcttggagacacgaatgattctagggctggagcaaaaaaatatacaagatgaacctagggcaccctgtagagc

SEQ ID NO: 341648 - DNA, 122 bp, Homo sapiens
ggcggccagcgattgggagatgcaaataccggcttctctgcccagcaacgggtgacgcggcgcccgagcgcgaggcggggcccggccgcagcccaagcgggcacctcggtgtttacacgggg

SEQ ID NO: 341649 - DNA, 122 bp, Homo sapiens
tcgggcctgcaggctgacctaaactcctggaagccaccgaggaagagtcagagacccaaacgtgttctggaattctaacttcctttatttcagaggattgctagtgtcatggagaaaccaga

SEQ ID NO: 341650 - DNA, 122 bp, Homo sapiens
cccccgtggcagctccaaccccagctttttcactagtaaggcagtcgggcccctgggccacgcccactcccccaagcggggaaggagcttcgcgctgccgcttggctggggactgggcaccg

SEQ ID NO: 341651 - DNA, 122 bp, Homo sapiens
gccgccctggccttggcctctgggagcggcgcggccagggttttctgtgtcagccaagcccggaatgcgggggcgcctctggaccctcctcttgggtctgggggctgcctcgggcatcctct

SEQ ID NO: 341652 - DNA, 122 bp, Homo sapiens
aaatctgatagtactttcccaagagactggctggtgcagtggaaattgcttggtagattccgatcaagcaatgatgtcaaatgtaactccttgaacattcatgtggtaggaaggttgcaagc

SEQ ID NO: 341653 - DNA, 122 bp, Homo sapiens
cagcgaggaatgcataaaattagtggactcctctgagtgacgttccccggctccaatcagcgggcgcgcaggcgcccccggccccgccccactgctgactctctttggctgattcctgcagg

SEQ ID NO: 341654 - DNA, 122 bp, Homo sapiens
agcagggatgacaccaatgtggctttaaaccagtgttcaattcccatggctgattcggaacgtcctgaggcaaaacgtgaagtttactgcatccgaggaaggaagtgcagcacccacagcag

SEQ ID NO: 341655 - DNA, 122 bp, Homo sapiens
tcttcctaatgcgaactgtcgcctgctggctttattcaaggagaggctcttggggatttccgtaagtaaagtctccgcttctagaccaagagtccctgaccacttgagtgaacattaccagt

SEQ ID NO: 341656 - DNA, 122 bp, Homo sapiens
aactgtacattttcagaagagctcattactcacagctgtacagcacgctgaaggccctctcgtctctgtcctctccgaaggcgggtatgttaaaggaaagtggccccttacctcccccaagc

SEQ ID NO: 341657 - DNA, 122 bp, Homo sapiens
ggatctgcagcttggtgtctgagagagatggaaggccagtttctgcaatcactcagctcccggggtgtggaccttatacagattacaaaggggtttggcttccaagaggaaaagggtgggag

SEQ ID NO: 341658 - DNA, 122 bp, Homo sapiens
gtcccctcgccacccgcagttccaatccaatacttttgttttttgccttttcagcctcctcgaggtggagtgccgcttaaccgggagcatccccactcctggctttctgagtgtgtcacaag

SEQ ID NO: 341659 - DNA, 122 bp, Homo sapiens
gaccgtgcgactactcggcgaagcctgtgcctgggagggtggtacccgccagggtgcatccggagagaggactgcgggccctcagtgcccgtgcgttccagcctccggggagactccaggtg

SEQ ID NO: 341660 - DNA, 122 bp, Homo sapiens
cttgacattgccacttggaaatcagtgtacttggcatctcaggtttaacctgcttaacaccgaactcgagatattcttcctacacttcacctattcctacctcagtaaatggcaccatctta

SEQ ID NO: 341661 - DNA, 122 bp, Homo sapiens
ggactctgtctgagtgcctggagaggaccccttgctctggcattgagtttcttccagccccgccccatgcaggtgagatccctactcacagcctagggcgcacccgagccgccagagcacag

SEQ ID NO: 341662 - DNA, 122 bp, Homo sapiens
agaggaaaacagagtttaagccttttcccatttgtcctgagagtactcaccaggggcttgcgactgcagtgtttaccccgagataactccgccacgaaatagctcgattttattattatttt

SEQ ID NO: 341663 - DNA, 122 bp, Homo sapiens
ttccctttgcttggattggcaggagtgcagctggggtgcctgtaggggtgctgtgggagacgtggctggtcatgatgggtgctacgggtcaaagtcagttcttgtaagcagggaactattaa

SEQ ID NO: 341664 - DNA, 122 bp, Homo sapiens
tcagttcccgggactagagggtacgctcggccagatggctgggggtgccgctggccttggcgcccccgccgtccccgcgcggtcgcccaccccggcccgacaagcagcttgggcgtccagcc

SEQ ID NO: 341665 - DNA, 122 bp, Homo sapiens
tgaggtggtcaaggaaggcctctgtaaggatattcttgagtaacaagaaagagccaaccccgtgaagatctgaaagaacttcctatcagaggacgcactagggttgtctctaaaagtagcaa

SEQ ID NO: 341666 - DNA, 122 bp, Homo sapiens
gctctcccgtaactcatgtggttgggatccatcccatctgggtcacttcagtctacttcacgtacttgaaaaggctttcctttacacttccaggaccaaacagcaacttcctgccacacact

SEQ ID NO: 341667 - DNA, 122 bp, Homo sapiens
tgttcccctgcgtgccagccctgaccggcaaaagaggacgggcaggaagagggcaggggccggcttcagggtcagggctgggcacaagcttccaggtcagctgcctctggcagcctgttgca

SEQ ID NO: 341668 - DNA, 122 bp, Homo sapiens
ctacttcagttattagggcctctcctggtctcagtaagtgctgattctaaaacctgccaccgggtgttcacaggtagcgacggcatcgtctgtgcgtctgtgctcagtgaatctctggaagg

SEQ ID NO: 341669 - DNA, 122 bp, Homo sapiens
gtgagccgtggctggggactgggcggcggctcaaaggtcaaggggctgctccaagggcaccgccgtgggaactgcgcagccggggcccctggacgccctcctcttctctgagccactcaatc

SEQ ID NO: 341670 - DNA, 122 bp, Homo sapiens
ggcgacttcgcgctagaagagggacagtaattgcttttgctaattttagagcgcagagcccgctgggcacagacagccttcctgttcagtacatctttgtccttatcgagtgaccatttttg

SEQ ID NO: 341671 - DNA, 122 bp, Homo sapiens
caccgtcgcctccgtgacgccctcgtgacactgagtgagcaagttattgtgagacctggtcgtttgaaactgagttggggcccagctcagcgggcacgaccctgctctgggccacgcttacg

SEQ ID NO: 341672 - DNA, 122 bp, Homo sapiens
caatgaaggagagctgggagctgccaggctcccaggtgagggggtctgcggccgcaggaccggcccccggtccccacgttcggagaactgggcctggcctgtgaggaagcggcgaccccaac

SEQ ID NO: 341673 - DNA, 122 bp, Homo sapiens
gggtgcgcgctgtcgcttattggccagcagggtcccagaccttgaccaatcgcctggggccgggtcgtcatggcgacgcgccacgctaacgcatggtgtcggagggaggcccacttgctgaa

SEQ ID NO: 341674 - DNA, 122 bp, Homo sapiens
ccggggtagctcctgtcatcaccatcatcatcctcatctcacgcttaagactaaacaatgcgccccgcctcgcctcccggttgcaaaggctttataatttgttgttttattggggcgggaga

SEQ ID NO: 341675 - DNA, 122 bp, Homo sapiens
ctagtccaccatcttctcagattactggctctccagataaacctgctttcttcccgccatcgctcctctcctgtgtttggcttttgacaggtgagcagctgaacctgggtttgatgacaaca

SEQ ID NO: 341676 - DNA, 122 bp, Homo sapiens
gggttccttgaacctgcgtctacagacgcattcctgacgccagagaaacgtagggtgctgcgttcagagcaggtgggcgtttaggggcacacgggccgtgcaggggcttctgataggaagcc

SEQ ID NO: 341677 - DNA, 122 bp, Homo sapiens
atggtgttaggtaccagggacacaattttgaatgagcagaacacagtccctgtgagctcccgggtagctcctggtccagtgagcaaatggacagatcatctgaaggcagggtgaaaagtgct

SEQ ID NO: 341678 - DNA, 122 bp, Homo sapiens
gacatgccacaaacttaccacgtttgcacatttgctggagagttcttccagctgctggcgcggacgagccccgcacatgctaacgctccagcccctcggtcaggcctgactcccagacacag

SEQ ID NO: 341679 - DNA, 122 bp, Homo sapiens
gtaacattttcagaactggcattgtagacatctcttttggttcacttaggccctaacatacgtcaggaaatagacaaagtagttttcagatgttgccttgaaaatgttgctaagtgatttct

SEQ ID NO: 341680 - DNA, 122 bp, Homo sapiens
ccgcctagcatcatttcctgtgcgctggatgctgattggtccgacagtcggaagtgagggcgggcggtgggggccgttgccgcagtgacagtgctaggggagtccgaagatggcggcgtcgc

SEQ ID NO: 341681 - DNA, 122 bp, Homo sapiens
gagaaagccctggggcgtccagaggcttggtttcacctggcagccgtctgggaccaattgcggagttgaagtagctcctacgctttctcattggtcctcacccagggggaaggcgtggcttc

SEQ ID NO: 341682 - DNA, 122 bp, Homo sapiens
cctggcctgagtcttttctgtctcccagccgttaaaggttttaggaccaggcaggcaccccgtgcaggatttggctctctacttccgctcgccccagcccttcatcccttctaagtcaatgt

SEQ ID NO: 341683 - DNA, 122 bp, Homo sapiens
ggagatggaagggcccctggatgcccggccacagcacaagtcctgcctctctgtgtcctgcgacccttctacttggggccccctaggcgttccgggcctgccaggggcacagctcactcatc

SEQ ID NO: 341684 - DNA, 122 bp, Homo sapiens
gggaggcttagagagtttaagtcctttggcagttagatctctgagaaacatgaatggcaccgatatgatgaggagatacccacaggtatttaaggcgagcccttaggagcacaggcgcaact

SEQ ID NO: 341685 - DNA, 122 bp, Homo sapiens
aattgagcagaactctctaatggggtagggtaaaagggctaccaaaaatttctggcacttcgttgaccataactaggaagaaagtgggattagaactgctgtgattcaattgacaagctgaa

SEQ ID NO: 341686 - DNA, 122 bp, Homo sapiens
caatccccgcaccggaccccttatctaaatagggcagtaaatcaaggacctgtcagggcccgggtaattacaggaactccataaaaaggacccggccggccgcctgtttatattagcgcggt

SEQ ID NO: 341687 - DNA, 122 bp, Homo sapiens
tctttgccaccctcagaggcgagctgtggaagccttgactcttagggccgttttagaacccgggcctcggaccggcggggtttctgcacgtggaaccggaacatctgagatgatcgcaggcc

SEQ ID NO: 341688 - DNA, 122 bp, Homo sapiens
cgctctgccgcgcgcgtgcgtgctgggtgcgggtgcgggtgcggggttgggcctgcgcatcgggtgagacgctggctgcttgcggctagtggatggtaattgcctgcctcgcgctagcagga

SEQ ID NO: 341689 - DNA, 122 bp, Homo sapiens
gggttagcggggagtggagacgacgtccgcagctgagggtggtgacaccctccacgcctccgtaagcctcgtcctcccagatcttcccatgcagcacctgttcggtgcagccggaccctgcc

SEQ ID NO: 341690 - DNA, 122 bp, Homo sapiens
aggagagtgaaggccagcctttaactgtctcctgaggttgtgtctgtcattagaggggcccgaaatgataatagcttccatttatgtactgctttctaggtcgctacgttttgtttacattc

SEQ ID NO: 341691 - DNA, 122 bp, Homo sapiens
cgacccttccgtcccctgcagcgcctgcttcctggaccagagaccgaaagcctctcgctccgctgggcctcagcaagcccagcatgaggccgatctccaggagtcggttttgctccagtgtg

SEQ ID NO: 341692 - DNA, 122 bp, Homo sapiens
gttcaggttgggcaccagtgatgccactggttctctgcaaggcgattccatgacagaaaccgtagcagaaaacatcgttaccagtatcctgaagcagttcactcagtctccagagacagaag

SEQ ID NO: 341693 - DNA, 122 bp, Homo sapiens
tgctcgaggggaggcgaggcggcggggaggcgagcgcgagcgaccaggaagcaggaaacccgggcaagctacctatgccctttacggcacctgtttattttcaagtggcttcctccctcacc

SEQ ID NO: 341694 - DNA, 122 bp, Homo sapiens
ctccagagagcctcttcctttccctttccctttcaccaatcaggcgctgggaggggcgggcgcgactttttttcccggcggccccgcggctctgcccctcgtgcggtcgcgttcccggcggc

SEQ ID NO: 341695 - DNA, 122 bp, Homo sapiens
tgtcttcatggcccccagcagcgtggtctcaggagagaccccaagagagacctcagctcacggtctgcagataaggacgtctctgggtggtgtgtctgagctaggaatgcagatatgtgcag

SEQ ID NO: 341696 - DNA, 122 bp, Homo sapiens
ctgtggctgtatgaccccaccttactctaccccagcacagctgcacctgcattccatgggcgaagactcaggacagggccctacattcctgccagggtagtgtgtggggagaggagtggagg

SEQ ID NO: 341697 - DNA, 122 bp, Homo sapiens
cttaccgtaccgcaccctctgctagggctgcagcctcccgccccagacccctcactgcagcgcccaccctggccctgggggtcccagccacgccttagcccgctgctctcaccgcatcgctg

SEQ ID NO: 341698 - DNA, 122 bp, Homo sapiens
ggtacgagcggggcagggacccagggtcagggagtgcaggcggctgtgaggcggaggccccggactcctgcccaaccctgaccctgaccccaatcccaacctgaccctgaccctgcctccag

SEQ ID NO: 341699 - DNA, 122 bp, Homo sapiens
gttcatgagcgtggcttcccaaagtgccttccaagttgcaacagaaattctacaaaatcccgattcaagatacacataaaggcccagtgcagtggctcacgcctgcaatcctagcactttgg

SEQ ID NO: 341700 - DNA, 122 bp, Homo sapiens
atccatgctaggtactgacacctggcacttgtgcccggtcaggtgagaagccgggtgattcgggctgtttccatctggaagctacagagcactgcatcctccccccctccactccccggggt

SEQ ID NO: 341701 - DNA, 122 bp, Homo sapiens
ctacttaatctctttgcttcagtgtcctcatctgtaaaatgggtataataatggcatctgcgtcagagggctgctgtgaggattaaacaggtgaataaatgtgcataaatgtctttgcttgg

SEQ ID NO: 341702 - DNA, 122 bp, Homo sapiens
ggtgggaggaaacttgattctctggcccccaacagggacacatctttttttcccaagggccgctgacccaacctggccgcctctctgcgccgcactttgaccaaactagcaggacaaacaaa

SEQ ID NO: 341703 - DNA, 122 bp, Homo sapiens
aacaacaaacatgctcgccctcgcctccccgtgcagacgcctcagggccaactcgggcttcgccaggcaccgagagcagacagaagacgccaaatggctatcaccaggagagagggcgaggc

SEQ ID NO: 341704 - DNA, 122 bp, Homo sapiens
aaatggcagaggactggccctgctgtgcgcgctcctggggacgctgtgcgaaacaggatccggtcagatccgctactcggtgtctgaggagctagataaaggttccttcgtgggcaacatcg

SEQ ID NO: 341705 - DNA, 122 bp, Homo sapiens
ccacactcgggttgaggagcaaggagagaaaagagcgtctttctctcttgctcaaagctgcgtgtgtgcaacgcgccagtcccaggataattttaactcgcggccggagagaacgcgccgcc

SEQ ID NO: 341706 - DNA, 122 bp, Homo sapiens
gaaggatttcagatcttggataattcaaaaataataatgtgtctgagaggatgcagtaaacggttaggcctcttagtgtcgctgttgaccactcaagaaggagaacgcagctggagaactag

SEQ ID NO: 341707 - DNA, 122 bp, Homo sapiens
gctgctactgggcctggatcccaagcctgccgccgctctgtgctcagcccgcagttggcccggacatgccgcaccagcttccaccttgagtgccggggtctgaacaaggaggacgcagcggc

SEQ ID NO: 341708 - DNA, 122 bp, Homo sapiens
ggcgtacccccggcgcatgcgctctggtgggctcgtctaccggcggctgggtttcaggggcgcccaggtgaaccctggcctagttcccagctaccccagaagggtcttagcgctcacgtctc

SEQ ID NO: 341709 - DNA, 122 bp, Homo sapiens
tgtgggacgggggccaaggatcggcccaagctgctgggaacgttcttgtccctccaggatcgcgcccaaggaccgctcccctcttgcctctccttccatagcctccgtttatccttcccgag

SEQ ID NO: 341710 - DNA, 122 bp, Homo sapiens
ttgcagtggttaaatgtttattaaaggaataaaaatccattcctccttggcggaccgcggcgtccctagggaacacacccacctagcaaccgagaccagagctggagcgctgcgcctttaat

SEQ ID NO: 341711 - DNA, 122 bp, Homo sapiens
ggtgggtcccttcaagcctagtctcgtttgctggaatgtgggaaagggaatagaaatgagcgctgacgtgcctagatttgcccaggccacgacagtacctgtgagcatctgcccaggtctag

SEQ ID NO: 341712 - DNA, 122 bp, Homo sapiens
tcctttgagtcctcccaaggcctctacgacccccagatttaagctctcccgttaatcccccgacactctgcctggagtttcccctacaacactttcccgtggaagttcacctatgggctctc

SEQ ID NO: 341713 - DNA, 122 bp, Homo sapiens
tgacacattgggcgggtttggcagcttaactgtgactgactttcatttttttctgttacacgttgagaaaaaaactaaatgtgatttttccataaaaatgctgatacaaatgtccaaaactt

SEQ ID NO: 341714 - DNA, 122 bp, Homo sapiens
ggctgagtggagccccagcccttcccagccagaatggaaatgagtgtttacacgtcaaatcgacgaaagccatctcttgacgtcagatctacctggactaagatccgaatggtattcccggc

SEQ ID NO: 341715 - DNA, 122 bp, Homo sapiens
agggaccacgtctgccctgctccatgggagctggctggctcatgggctgctctagccccacggctacagctgcgccgggtgtgtggcacgctccatgagtcaccgtggaatgaacgcagcgt

SEQ ID NO: 341716 - DNA, 122 bp, Homo sapiens
accaaacaggttacaatggggtctttgtaagtgaaacctcaaacctcagctgggcttatgcgcccccgccgggtcctccctcgcgcaggaggcgggaggcgctggagcctttgggaaactgc

SEQ ID NO: 341717 - DNA, 122 bp, Homo sapiens
attaatgcaggtgacaatctgtagtgaacagagatcacagtccttagacaggtcatcgatcgtaaaggagagcaggaaatctgtgctactgtttccttgtgtttttactcaacaaacgtttc

SEQ ID NO: 341718 - DNA, 122 bp, Homo sapiens
ccttgggtgcagggcagggcccgctcaggggacagtgtgtggcctgagtgcctgtttcctcgaagcctccgcccttgagttggccctgggcaaccgtcgcctctctgggcctcagtttcctt

SEQ ID NO: 341719 - DNA, 122 bp, Homo sapiens
tttatttgagttaaattggaaaaaacagtcgtgggctcttcagttggctctactatctgccgccagggctgctccgaaccactccacaagtcaaaacgcgctttcactctgtctcggcatac

SEQ ID NO: 341720 - DNA, 122 bp, Homo sapiens
cgcaagtgtagatgggcactggggtacagtgagcggtcctggcaaagaaggagaggagagcggctggatgagcattcagagagcccttcggaaacgacctttttccaaatccaaaggaaaaa

SEQ ID NO: 341721 - DNA, 122 bp, Homo sapiens
tggcctggttagcaaatgtttcttcctccctcacaggctataagagcaatgagctggcaacgcccctgagcacactgtctgctggttaaccaatggcatgtgagaggagggacagaggcagt

SEQ ID NO: 341722 - DNA, 122 bp, Homo sapiens
gactggaacatagaaaattattggctcagatgaagataccacattagatttttgaggacccgaaaataagtaagagcaataagcctaatccctctccctgggagctgccatacttcaaggga

SEQ ID NO: 341723 - DNA, 122 bp, Homo sapiens
ttgaggcgaaggtggcgctcgccaggtgctcaacatcaaatacgaagtccccgcccctaacgtggcctaaatttgcttccaggacaaagcaggattttagcaagcaaatactctcagagacc

SEQ ID NO: 341724 - DNA, 122 bp, Homo sapiens
tactggatgcgaaatagactctatgccaagttgaactttcggcatcaataaatatggcaccgtctgaggctgtgagttctcatcagtacctgggtcatacggccgacacgccggctaaccag

SEQ ID NO: 341725 - DNA, 122 bp, Homo sapiens
gtctgtacttgatgtctggctcactaggattatgcctgagttgatagtttcacctaaggacgacagatggttcaaaataaaggaaccattcattttgtcccagaaacacaaggagttcttta

SEQ ID NO: 341726 - DNA, 122 bp, Homo sapiens
tctagacaaagtgacttcagattttcaaagcgtaccctgtttacatcattttgccaatttcgcgtactgcaaccggcgggccacgcccccgtgaaaagaaggttgttttctccacatttcgg

SEQ ID NO: 341727 - DNA, 122 bp, Homo sapiens
tccggtccggcgtgcaaaccggatgtgaattctgtccgctgccaatgggaagcttgcttccgcagcctttcagccattcagagaaggagacaggatattagggcggagctagaaagttgaga

SEQ ID NO: 341728 - DNA, 122 bp, Homo sapiens
tcttaggatgagaagagatgaggggcagcagcagaggctgatggagcagacagaggggagcgattctgaaacatattgagaagcccagatgatgtgggaggaagactcctgtaaagatttcc

SEQ ID NO: 341729 - DNA, 122 bp, Homo sapiens
cttttgctggtgttgagcctgtttttattgcattttttggggtgtgtgtgcgcgtgcacgcgcatgtgtgttttttcaggagggggcacattattgctgctacttgcttattaacctctcaa

SEQ ID NO: 341730 - DNA, 122 bp, Homo sapiens
ttttatgatgcatctgaaatggagttttactgcatcctcccacgaccttacgaaaaaccacgggggaggaaagaaaaacagaacccaccaagaggagcaagcagacctgtccgagggtgggg

SEQ ID NO: 341731 - DNA, 122 bp, Homo sapiens
ccccctcatgtaccacatttccctggtggacctgctggccgcctgtgccgagggcaaaaacgtctacactgagatcaagtgcacctccctgctgccgctggaggacgtggtgtctgtggtga

SEQ ID NO: 341732 - DNA, 122 bp, Homo sapiens
gcgcatctgccaccggcctacccagactctggcttggcctggcgcgatgtgttgacaggccggggatggtctacccactgcagaccaaatctcagaggatgggaaatgttttgtggttttaa

SEQ ID NO: 341733 - DNA, 122 bp, Homo sapiens
agtaggtgcggctccctggcaaaatgccacctgcttattagccagcccagcggtttctgacggacgccttagcactcccctctcacgcctctgccttcggcctcagtgattggcgtctcctc

SEQ ID NO: 341734 - DNA, 122 bp, Homo sapiens
gagcagagaatgactcacattctctgtgacatgagtcactcccatgcaaaactggagttgcgagctactactttgcctgtagctgtttgtttgttcagaggcagatggaaggcagaggctgc

SEQ ID NO: 341735 - DNA, 122 bp, Homo sapiens
gtttagatttgggggctagagttctggtcccagttcaactaagtgtacaagcttgataatcgtgggccttcctatcacactggcctcttccagcaaaaccctacccattctcatctctagag

SEQ ID NO: 341736 - DNA, 122 bp, Homo sapiens
aggctttttctgaggtcagcagtaaggcttgggatcccagctctgtaacttaaatgtgttcggtaactcatggacccatgttcaaaagatacagaaaggtatacccaagaaaagtctccttt

SEQ ID NO: 341737 - DNA, 122 bp, Homo sapiens
cgggaggaggcgggggtgggtggaggcgggagggtgggacttattaatgaggcttgtttccgagtccgggtagcagatacacgtgacatcagaaacatctcataatcacgaaagaaatcgaa

SEQ ID NO: 341738 - DNA, 122 bp, Homo sapiens
cagggctgggctccgagcgcagtagcgagaccgcctgttggttaaacttaccgtaaggtgcggggtcttcttaggtctctgctctcaatgcggagagctctaccttagcccgcttacagaca

SEQ ID NO: 341739 - DNA, 122 bp, Homo sapiens
cacttctccgggcactctgctcatagatctcccgccccagcccaacctggcttgggcaggcgggggaaggccccactgccagccactcgccatgctggtcatgtctgcgctcccagctctgg

SEQ ID NO: 341740 - DNA, 122 bp, Homo sapiens
tcacacgacctacggctagcaggggacacagagccgcggggacaggaagtggagctctgtcgggacaaaggccccgctagatcccggaagccgtcctctcctctccagacatgtgcctgatt

SEQ ID NO: 341741 - DNA, 122 bp, Homo sapiens
gctgcatggtgtccagtggccagcctgggaggagctcaggactggcctcacctcgtgccacgccctcgtaccaaggtggctcagatggcacctgggttcccgaagggcccaggaacacagcg

SEQ ID NO: 341742 - DNA, 122 bp, Homo sapiens
gcgctccccggaaaaatgcgaccgcgcaacaatcagacgtcagcgccctccagccaataacggttcacttacttacggagaccgccgagggacagaagcctctctcaggtgtttgcgcctca

SEQ ID NO: 341743 - DNA, 122 bp, Homo sapiens
tgggggaggcgctacctctccgtgtgcatgtggatgtgcctgcatcaccctgaatgcatacgtgtgcaggagtcagggcagaaagcctgtcgggccgaacggggccctcgggggaggtgcta

SEQ ID NO: 341744 - DNA, 122 bp, Homo sapiens
tttttttgaatatctgttccatatcacgtgtttgtggatttaaaatttctattaatttcccgacgattttgacattatcctgtatttaaaattggtgggtgggtgcaattatacctgacaga

SEQ ID NO: 341745 - DNA, 122 bp, Homo sapiens
ccaccatgcctgcgcctcccctccgcctccgtgggctcctgtgcggccgagcctccccgacgagcggcgtcccctgctcgacagcgcccagtcccatcgaccacccaagggctgaggagtgc

SEQ ID NO: 341746 - DNA, 122 bp, Homo sapiens
aaccccactccagtcccgtcacgctgaggctcagggcctgaacccatgaatgcgaggacacgatcagtccacagcaaggctgtgtccctgaggagcaggggcggaccctggccacactctgg

SEQ ID NO: 341747 - DNA, 122 bp, Homo sapiens
tatgtcaaatgtggccaatacacttcataagaatttggattgaaatgtgccctaggtcgacgccctggatttgcaggtcaggtgggtacttacctgttgatgacagacaaacctcaatggct

SEQ ID NO: 341748 - DNA, 122 bp, Homo sapiens
gccttgggagggagggtcagggtctggacaggagccgcggccgccagatgggaaagaacacgtgggagcagtaatgtcaagtgacacttaaacccttagacgccgattcgttataacgcgag

SEQ ID NO: 341749 - DNA, 122 bp, Homo sapiens
aactgcccaacaaaaagaccaatgcattgaccataagtgattctcaattgcagagcataccgcatccctaaggagcatttgtaagggtgtgggggcatttctagtcacagtgaatggagggt

SEQ ID NO: 341750 - DNA, 122 bp, Homo sapiens
ggcggagagcggagggaaagagaagaccgcgggactggagccctgtcggcagggattgagcgattcaaggacatctcgagagagaaagcctggaaactgagctctcgcctgctctggtactc

SEQ ID NO: 341751 - DNA, 122 bp, Homo sapiens
ttgtttttttcaagaagtgagactgaggaaaaataaaatgtggtctttttaagaacctaccgtgatgatttgttttaactaactttgagttggtgaggagagactttctcaaatgcccatct

SEQ ID NO: 341752 - DNA, 122 bp, Homo sapiens
tctaatcctaggtcctgagtgaacactgactgccagtttacatctcaggtgtgtagggagcgtggaggaggcaaatcctgtttggagaaagccagtgtccaacacagcacttggtaaacatc

SEQ ID NO: 341753 - DNA, 122 bp, Homo sapiens
ccctgctgctgagcagcctgtcttgaaggatcttctgagaacggactccttttctgggagcgtttataagagatttctcatggctcagttcccctatagaaaaccaggaattgtaagtctta

SEQ ID NO: 341754 - DNA, 122 bp, Homo sapiens
ccttctaaagagagaggagggagggagggagggatggaaagggggaaggacagagaccaccgtgaacacatctccgcttttcgctatgggcagatgcttccatagacatgggactttgcagc

SEQ ID NO: 341755 - DNA, 122 bp, Homo sapiens
agtccatcttgcaaaaccccaatcctggatgagactgaccatctgcttactcagtgcccacgccagagcagtcaagatttgagaaagcaaagctgataagaaagttacacgacaggggctgg

SEQ ID NO: 341756 - DNA, 122 bp, Homo sapiens
acagagaggttactcttgcccactctgcccgccaagtgtcctcacgttggggtggaagcccgttgcaagctgccaggcccctcgtagctgcccagtcactctccgcccagtctacacatcct

SEQ ID NO: 341757 - DNA, 122 bp, Homo sapiens
ccccggtcccgcacaggtgtgctccgactccggcttctgctgtggcgcttggtgtccctgcgatccctttccctgcctcgttctcggtccctttccctatcccgatctcggtcccccctgtc

SEQ ID NO: 341758 - DNA, 122 bp, Homo sapiens
gactgtcctcatggctctgcacccgcagaggtggctttgcaagagcgacagtcagtgaggcgtttgctcggcaccgttttttctggtccgatggctacttgtttttgttgtagtttttaaca

SEQ ID NO: 341759 - DNA, 122 bp, Homo sapiens
ctgcagaacaggaattataccattgtacagcctggcagtcctgtggaattggctgaatagcggaaggaaggaatctgaaaaggaagggaaggatctcaccacccagtgtgagccaattccag

SEQ ID NO: 341760 - DNA, 122 bp, Homo sapiens
agtatgagggcgcgccaagctctccagttccacatctgctgtcgagtccagcgcctgccacgctcccgtgcggggacccgcccaaaactccctggaagccaggcgattcagaccccgccacc

SEQ ID NO: 341761 - DNA, 122 bp, Homo sapiens
gggtccccaccccccggaaatccgggagagggcgggcagccccggaggcgggcgggggtccgggcaccgcctcctggtccctgacacattccagatgcctgggccgactcgaagcccttata

SEQ ID NO: 341762 - DNA, 122 bp, Homo sapiens
ggccagcatcactctgccctctgcttctgcatcacatctccttctctgactctgaccctccgggttcccgattgtaaggatccttgtgattacattgtggccacctggataatccaggataa

SEQ ID NO: 341763 - DNA, 122 bp, Homo sapiens
tcttgggatctctgtcctgggctggggactgccccctcccctggcctggctcctgacgcccgtgctgccggtgaaacgctgttgacatgtcctgaattattaagcgtggggagggctccgga

SEQ ID NO: 341764 - DNA, 122 bp, Homo sapiens
tccatggcagcgactaaaggacagcgatgtgaaccactgacaacagttcgcggcgtttgacggcggcgggggcgtggcggggttttatctgtgtattgacgagagccgggcgcggagggaaa

SEQ ID NO: 341765 - DNA, 122 bp, Homo sapiens
catcctggaccggatcctgcgggctatggggaaggcctaccaccctggctgcttcacctgcgtggtgtgtcaccgcggcctcgacggcatccccttcacagtggatgctacgagccagatcc

SEQ ID NO: 341766 - DNA, 122 bp, Homo sapiens
cggcggtgcggcggttttcacgcgcgcactcactcagcgcgcccgggggtctgaggtcgccgctacggcgcctcgccccgggcagcagcaaccagcacgcaggcacccctggaacaggcggg

SEQ ID NO: 341767 - DNA, 122 bp, Homo sapiens
agaatacaacaggagaagctactcactgatgacaatagtatctcttaatggaaaacctaacgtggaccaaggccacagaaggagttatggaattcatgataattttacttgtgttaacattt

SEQ ID NO: 341768 - DNA, 122 bp, Homo sapiens
gaggacaagccaaaccccgggagggaccacgcggcctgggaaacagttcggcaaggaggccgggcccctgtcccgcctctgagggcggaggactcggcctgcaccggacccaagcgaggggc

SEQ ID NO: 341769 - DNA, 122 bp, Homo sapiens
gtctcagggacgctggccggggccctttcagagtccctctcccggtagattttgtagagccgggggcctaggacgcagctcagcagcttcgccatggccccggctcgggccgctgctcttcc

SEQ ID NO: 341770 - DNA, 122 bp, Homo sapiens
gacaccatgcgacacccatttctcctttgcatcctgtgtcttggggttcaatggggtgcacgtgatggggcttggggttaggcccaggggagggggtgggtgtggcagccttgcgaagtggc

SEQ ID NO: 341771 - DNA, 122 bp, Homo sapiens
ttcagaagaactgcagaggagccaagtttgtcagaaaactataggcaaccccatgtgaaacggctcctggggtttacacggaacatgcaatttctaaagacagtttgagcctgcacttaaag

SEQ ID NO: 341772 - DNA, 122 bp, Homo sapiens
gcgaaagaacaaagttcccacatcatggaaggggacccaaccctgttgagctgtgggctccggtggcctgcttttattcccttgtctggccccacccacatcctgctgattggtccatttta

SEQ ID NO: 341773 - DNA, 122 bp, Homo sapiens
cgggtcctctcgggtgggctggtgctggagagcatctccatctccagctcctgggctcgccgggcagcctcctgcaccagaggcagagggctctgggtaaagccggacaagttcccaggcat

SEQ ID NO: 341774 - DNA, 122 bp, Homo sapiens
gaaaagtggggttggctctcaaataacatggagggtttgttttagaggaaacatgtaacacgacaggactccagaagcacgtgctttaaggtataaggacatgtacccctggtgacagagga

SEQ ID NO: 341775 - DNA, 122 bp, Homo sapiens
atgccagagcaaggtagggtcctgtatttggggaccgctgacgtttgggtccccctcccgcggctgttagcgctgcgtggcccgagacctgcggtcgggcggggattaaggctgctttccgg

SEQ ID NO: 341776 - DNA, 122 bp, Homo sapiens
acaccaggtggtcaatgccagcctcttttaagatgtatggggcatcgtcctccagggtctcgtggtgtccaatcacactgtacattatctcacagggagcacagagctctacatacgtcacc

SEQ ID NO: 341777 - DNA, 122 bp, Homo sapiens
gaaaattgtttcaaatgacttctaaaaaaattgaacatattactggctagttggtaaagtcgggaagcttaaagaacactgacgttaagtgataattctgcagtttgcctcaagacgaactt

SEQ ID NO: 341778 - DNA, 122 bp, Homo sapiens
tcggccacgccccctccagagcctatttggtctcaggagctagagcaccggaagtgctggcgacatgtcagtgcgccctaccctaaaccttccccccccaggccacctttcccattcagctg

SEQ ID NO: 341779 - DNA, 122 bp, Homo sapiens
attaattccttttcattgcagagttgcaattttctttatttcatttctctctcctttttacgtatactgtggttgcttccagtcagggaagtttgccaggagaaatcatttcattgatgaat

SEQ ID NO: 341780 - DNA, 122 bp, Homo sapiens
tctgagggcccagggcgggccgtggagcttacagggcctccttcgccttgccttctatctcgccatcttttccattccttactttctttcttctcccctgtgcttaattttatgtctcaatt

SEQ ID NO: 341781 - DNA, 122 bp, Homo sapiens
agagctactgtgacaagaacgaattgatcattaaatttattagcgagataaattccgcggcgactgagcggcctgctggaggcgcaggggccggcgcaggtccggggcctggctctgctgga

SEQ ID NO: 341782 - DNA, 122 bp, Homo sapiens
tggtggttgtaaagatgtttagataaactgcacactaaaaagtgtactcttggctgggcgcggtggctcatgcctgtaatcccagcactttgggaggccgaggcaggcagatcacgaggtaa

SEQ ID NO: 341783 - DNA, 122 bp, Homo sapiens
cttgcccaggccagcaagaccccaccctgacccaaggaaggtcttcaaggatctagctttcgtgccttccactccatttcatgggagcctaactcctcttaaaggatcagtgaagttgtggt

SEQ ID NO: 341784 - DNA, 122 bp, Homo sapiens
aggctctcgccgaccctgcccttggcacaccaaggccctgcactgacatttctgcggacccgccgccctgtgttgtgtgccgtgtgttacatcagggaatcagacctgggtctctctgggca

SEQ ID NO: 341785 - DNA, 122 bp, Homo sapiens
acttgattgaaatctaggatatgctctttgaatgttattcctaacgtaatgcctttcattcgtccatccatccatccatccatcaattcatccaacaagtgtagtgggcattgtgccagcaa

SEQ ID NO: 341786 - DNA, 122 bp, Homo sapiens
tagggctccttcccttccttgaatcttgggcgctggaagccagccacgggcgtcttgccacgcgagtgcccctagacagcaacacacccactggaaacgcacgtgaacaaagctctcgcccc

SEQ ID NO: 341787 - DNA, 122 bp, Homo sapiens
gtggctttactcaatgccacggtacaatggtttcagagcaggttttggggccagaccctccgggttcaaaccctgacttcaccacttattactacatgacactgggcaagctaatctatgcc

SEQ ID NO: 341788 - DNA, 122 bp, Homo sapiens
acactgaaccttaaatcagagcatcatcattcccactgtgatgctgggaaatgaaatgatcgtgtcattctgctcagctggcgggctgcagggttctctgtacttaatcacacaatgcagat

SEQ ID NO: 341789 - DNA, 122 bp, Homo sapiens
gcggagcgcatttatttgcatatttctacctttgttccctgccagcggccaatcagcgcgcggggcgagacgaaggggctgggcggggctcgggctcctgctccggctcagctgcggcggcc

SEQ ID NO: 341790 - DNA, 122 bp, Homo sapiens
gcggaaactgcccggtccgcgcccgctgctagctcctggaggttgatccgacggcgaacccggctctgaaattaagagcaaacttccttcgagaggcgagagacaggaggcaagaggcgtcg

SEQ ID NO: 341791 - DNA, 122 bp, Homo sapiens
caaacttaggctccctgacttttatcggtaatcagtactgaggacaatgcgttccacacccgctggctggctgatgtttgattctgtaactataccacgcccagaattctctcaaaagggaa

SEQ ID NO: 341792 - DNA, 122 bp, Homo sapiens
gcgggcctgggctccgggaacccgcacattgcgggcgggagaggcgcagggtgcctgggacgccgccccgctcgcctctctcctggacgccgtcgccctgcctccccgcggggacacagcct

SEQ ID NO: 341793 - DNA, 122 bp, Homo sapiens
aaggaatgatatcagagggctgatgatgaggtctagggaaatgatgtgcttgaaccacttcgaatgggcagagtgtgcatattgggctcccttttgaatgttcaccaaaggcaaccacttct

SEQ ID NO: 341794 - DNA, 122 bp, Homo sapiens
acaatgggaagcctgcacagtgaggaagagcggctggagccggtcttgtgccggggaggtcgctgctcccagaatgcacctggcatcaacacggcggcggcggcggcggcttccaacaggct

SEQ ID NO: 341795 - DNA, 122 bp, Homo sapiens
tccagccgccggcgtgagtgcagggagctgagtgcctcccggaacgtggcccgcagggcgcgctccatcagcgccttgtggtacactcctgccacgttcccgcacaggaacagcactgcgtt

SEQ ID NO: 341796 - DNA, 122 bp, Homo sapiens
ccagccccctgcccacaactgcgcaggcccagcaagcccccacaattaaaagcccagcgccgacccttcctgtcaattaggcgctgaagcgcaggcggtcagcatcgccatggagaccaaca

SEQ ID NO: 341797 - DNA, 122 bp, Homo sapiens
cacaaatctttgtcaaagagatgcactaagctgcaaagacacatgtacaaagatggtggccgggggcggggtattaccaaggttttatgttcccctctgacctcaaactttgtttcaatcct

SEQ ID NO: 341798 - DNA, 122 bp, Homo sapiens
tgatgtcatcgtgcggggagggggtgggggaggagaacgccctgcccaccggagggctggcgccccagatcctaggtgagttgtagccttgacttcagcagcactctgcgggtccccggcgc

SEQ ID NO: 341799 - DNA, 122 bp, Homo sapiens
gttttgagtcctgcccccagactgcctggaacttagctagctgctgctagtggaaccctgcggatgtgaggcctgccttgccaagtgtgtgggagctgagtgtggcttacctctacctgcta

SEQ ID NO: 341800 - DNA, 122 bp, Homo sapiens
cccgcccccccggcaccgccttcctaacggctgtttgtttttgcacacggcacgcggaggcggggcctccagccccaatagtgacgcgctctctgcctttcaccaggcgcccaagcctgacg

SEQ ID NO: 341801 - DNA, 122 bp, Homo sapiens
aaccttcttcaacgacgaggcgggacggaggctcggacgcctccccagcctctgggctggcgcaagtcgactgcggttcgtcctcagtccacgatgaagtcatagggctgtgggtccgtgtg

SEQ ID NO: 341802 - DNA, 122 bp, Homo sapiens
aaagactgcaagccttctcttcacaatggggtggggatggatggctgcgaaatacatatacgagtccaaatgatggagggacactatctcctaggtcaggaaagcccacatacaccctctgg

SEQ ID NO: 341803 - DNA, 122 bp, Homo sapiens
tgctgcccgaggctgccagcagcttggtcaggctatgcctcatgagggccagcggcgggccgcggtaggccccggccgctaagagtgggcctcacgggccccaaggatcccaggccccaggg

SEQ ID NO: 341804 - DNA, 122 bp, Homo sapiens
acagatgcaggggaggtgggggcggccaggcgggcattacctccttgaactgggggtggacggcatcgcccacaagctgcagaatgagcccttcgctggtggagaggaaggcaccactctgt

SEQ ID NO: 341805 - DNA, 122 bp, Homo sapiens
tggataatcccccaaatcatttttcattgagctttgagtgtcttatgattgctgggaagccgactggccttcctaagtgggtgttatttctgttcatagcagttgggagctgggcttgggaa

SEQ ID NO: 341806 - DNA, 122 bp, Homo sapiens
ggatcatctcagacctccaaggtaagcactatcagtgccctgttttacaggtggggaaaccgaagctctggacagtgctgtaaattacgtactcaccaagaatggttcctggtagcctaaga

SEQ ID NO: 341807 - DNA, 122 bp, Homo sapiens
gccacagcccagctagaggggagggcatttgcacgggatccagtggtgtttccccaaattcgcatccactgaaacctcggaacgtggcctctgcaggtgtgatgtgaagtgaggatgaggtc

SEQ ID NO: 341808 - DNA, 122 bp, Homo sapiens
ggaggaaagggggctggctgctcctacagagtggagccctttggtctcaggaagaggccccgagggagggggctgccctgcctccggggccaccggaccccacggaagcctccgaggtcctc

SEQ ID NO: 341809 - DNA, 122 bp, Homo sapiens
ctaattaagaaataatttttcaagggcgttaaaactctgggattcaactaacacatatagcgtactgctaggtgccaagaaccgtggtggaaattttcacatgcttgtgccatttactcaca

SEQ ID NO: 341810 - DNA, 122 bp, Homo sapiens
gccgcgcccacacgtcctccaccggccgcgccctcacgtcctccaccggccgcgcccacacgtcctccaccggccgcgccctcacgtcctccaccggactgtgcccactgtgcccaccggat

SEQ ID NO: 341811 - DNA, 122 bp, Homo sapiens
tatgtgtcttctgtgattctcccctggctctgagccctttgcatctgcacctcacagcgccgctcaaatccctgggggtaaagtgcagtggcagatgttggccagttgtagtctgataagat

SEQ ID NO: 341812 - DNA, 122 bp, Homo sapiens
ctatgctaagcacttcactttttaaaatctcatttaatcctcacaaagacccagtaatggcgcgcttgtagtcccagctagtcgggaggccaaggcaggagaatcgtttgaacctgggaggc

SEQ ID NO: 341813 - DNA, 122 bp, Homo sapiens
ctgtgtgcattaggtggcttaaacaacaaaacctgatttttcacagttctggaggctggacgtgcaagatgaaggtgccggccagtttggttttctggccctcttctcggcgtccagacggc

SEQ ID NO: 341814 - DNA, 122 bp, Homo sapiens
ttcatccttgctgaatcaggaaccctcagctggaggaccaacacgtttgggttacatttacgtcatctttcagccccaaggacttaatggtaaatttattcttgaactcacatgaggggttc

SEQ ID NO: 341815 - DNA, 122 bp, Homo sapiens
acagggagcgccacccggagaggctgataggaggcggagcttcaatgcgacacaacgtggcgggaggagcctaagggacgaggaaaggcgagtgttctgcttgcgcagacgcaaggctgggc

SEQ ID NO: 341816 - DNA, 122 bp, Homo sapiens
gcaacagatttctccaaattcccttttaaaaagagcctcccagagctgtcgaaatctccgcggggtgaaagctaaacttttggagtcgctgtgtagccgggtagaggacacggcggcgcgag

SEQ ID NO: 341817 - DNA, 122 bp, Homo sapiens
ggtccccattcttgtaggaggtattgaagcagatcaaggagatgacattggttaccgccacgaagacaggaaaggagatgtctatggactgtccgttgtgggtggccagcatatcacacaat

SEQ ID NO: 341818 - DNA, 122 bp, Homo sapiens
ggaggagaggaaaacagccctgcattaagaggaacatattgtacaggttaatcataagcacgcagaaatcagagtgctgccagccggcaggacggaaggcctgggcgccaggagttgcggga

SEQ ID NO: 341819 - DNA, 122 bp, Homo sapiens
gtccacctcctccgggggacggcaggcatcctcagcgggtcagaggattgatcccagttccggccaggacacagaatgagccatggtaccgacctccacaaaactcgcctcccctccctcct

SEQ ID NO: 341820 - DNA, 122 bp, Homo sapiens
atgcagacaccttaggtgtggggtgtgtgcgttacctacaaactaacaccgttcagcacgcgacgggggcctggcagacaagttcatgtcccagctggtcccccagaggccaggagcacaga

SEQ ID NO: 341821 - DNA, 122 bp, Homo sapiens
gggatgcttacggggaatgggtcattaccaagatttctccatggcggatattttggagcgcgtggaattagaacgagtagggggagcgcaagcgctgtcagctccgcgggaaattccagttt

SEQ ID NO: 341822 - DNA, 122 bp, Homo sapiens
tcttctgcagtgggggcttggctggtgagtggagactctgcgtgactctgggggcgtggccgagaatgggtgtagctctgtactagggcgtggtcatgcgtaggggtttgggtgaggcgtta

SEQ ID NO: 341823 - DNA, 122 bp, Homo sapiens
gggtgtgtctgctgaggttctaaggaacttaattaacatggactttcctcacttattcaccgcctacccctataaggtgtgctagctaagtagtttttccacacacctgaattttacccttt

SEQ ID NO: 341824 - DNA, 122 bp, Homo sapiens
tatagttggttaagcacaaaatagttcctgccattggggaacaactgtaacttgggtagacgtgatgtttcaaacaaggtatctgagaagctcatgaaaatgaggatgactccaaaaaccat

SEQ ID NO: 341825 - DNA, 122 bp, Homo sapiens
acaggaacagcatagccacaggaccgggcgtcagtcacattctccccgctggccgaatgacgcaaataatgctcaaattccatgctgcggtttgctttgactggcggaggtggaggggcgcg

SEQ ID NO: 341826 - DNA, 122 bp, Homo sapiens
tgagtaaataagagaatcaacaagttcactggtatatcacacctttggcccaattcaagacgtttcctcccttagggccactgtaaaaacttgagtgtcagagcttaaagcagcacacagac

SEQ ID NO: 341827 - DNA, 122 bp, Homo sapiens
cgccgagagtatcctggagccatctagtcttgcctcggaggcggggtgggcttatttgtgcggagaagaaacggatctcttaatggggtgagatttttcctccgtacattgttcccatttcc

SEQ ID NO: 341828 - DNA, 122 bp, Homo sapiens
ttccaaaggatattgtatatagatccctgatagagaaatcagaaaaaagcaaagtggttgcggttaaaatagaagtagaagttcagttgtttttaagcacagtttgaaaaacacatagtttg

SEQ ID NO: 341829 - DNA, 122 bp, Homo sapiens
gtagctaggcgctccttcctttaggcaccaacgcagctctggaagagacagtgacacacacggtgctgaaaccctactccacagcgtggctctcagcaaggctgcgcgccgggaggactctc

SEQ ID NO: 341830 - DNA, 122 bp, Homo sapiens
gccaggtgtgacccttttgtgctgtcaacctgtgtgtccttccgaagtccgcatgccggacgcctcacagggatggcgttgtgaggcagagcctttcggtggtgacccggttatgatggcag

SEQ ID NO: 341831 - DNA, 122 bp, Homo sapiens
gcagacctccggggaggcctcttgctccccgaacacccgggagttcgctttcatttttaacgaatctccacaatctcttgtttgggagataattgcttctttcaggggcttggagaacaaaa

SEQ ID NO: 341832 - DNA, 122 bp, Homo sapiens
agtgtccccagcttcccccatggagcagcctgggccagcctctccttttcacggctgaaccgtattccaccgcacggatcagcctcacgatgctgacccagtcctccgcccagggacacatg

SEQ ID NO: 341833 - DNA, 122 bp, Homo sapiens
gaccccggacgtcttccggataataaagttcccgctctaattcattttccctaatctggacgcccctaatctacagcttttattgcgcccagttaaaagtcgagggaattcgctgtccctcc

SEQ ID NO: 341834 - DNA, 122 bp, Homo sapiens
ccaaaataaaggaagaaagaccttcctttctacttaaagttgcatgtcgtttccaaattccggttacagcgtatcacatttcattggacatatttcttttttttttcctcagacggagtctc

SEQ ID NO: 341835 - DNA, 122 bp, Homo sapiens
tctggaagtttaacttcagctcttgctgaaattttaaaccctcaatttccagaggaccatcgccaggtgtttttaaaacctcgataggaataagaaatgcttcccagaatggagacttccat

SEQ ID NO: 341836 - DNA, 122 bp, Homo sapiens
atggggctcgaggctgtgggacgggggtcgggttcggctcggaggctgtgggacgggggtcgggttcggctcggaggctgtgggacgggggttggggggagctcggaggccgtgggatgggg

SEQ ID NO: 341837 - DNA, 122 bp, Homo sapiens
aagtttacattttgaaatagtgccatgatggcatccctatgcttggtattatttaccccacggaggagatgtgtgtattgcagaacactcatgtttagatcagccaagagaactgcttggaa

SEQ ID NO: 341838 - DNA, 122 bp, Homo sapiens
gcagcctgaagggcccgtgtctgttgagctgatagtggcgtcttggtcacacatcacagacgggaaggcgagcaccatgctggtgggctgggggcggccttggcctccagacccaggaagct

SEQ ID NO: 341839 - DNA, 122 bp, Homo sapiens
ggttccgcggggctgtgaaggggtcctgccccaggggcgcggaggccgggcgggaaggggcgcactcacctgcaggcggcgcaggtaggctggcggcacgtagcccgtctcaccactgcgcg

SEQ ID NO: 341840 - DNA, 122 bp, Homo sapiens
gtatccttccagggtctcacccattgtggaagcccaagggaagtcatgaaaattggggaacggagtaggggcaccgctcacctgggtcccaggggtgccctgttgtccaggaggtcctggct

SEQ ID NO: 341841 - DNA, 122 bp, Homo sapiens
ggggaaataagccactccacatatcggttgctgaggaaagagtggaggaggctgttgacccgtgtgtgtccccatgactcaaagagggaaaagtctagctgtttccaatatcccgaaatcag

SEQ ID NO: 341842 - DNA, 122 bp, Homo sapiens
cagaggaggctggggggaaataagttccaggtcatactccagcatgttttataaatcagccgatatccctcttcatgaagctctggaataggttcttgaaaagggcctgcatggtagtcaaa

SEQ ID NO: 341843 - DNA, 122 bp, Homo sapiens
gcgaaatatagccccccttccgaaactcctgacctcttcttccaccccggccagggcccgcgtccaagttcccggtgcaggccccacccccgaatcttgacatttgctgccctcgactctgt

SEQ ID NO: 341844 - DNA, 122 bp, Homo sapiens
aaaaatggggagacccagacaagggtcccgggactacgcttcccagccgcctccgcccggcgcccagtccaacttcccttacagggatggcccctggcatcttggccccgcccatccccagc

SEQ ID NO: 341845 - DNA, 122 bp, Homo sapiens
catctatgtctttcccccttcctccaattcttctctccccagttttgtttataagagtcccgtgaagcacatctcctttgctgcccccaactctccttttagatgttttaagggatacccta

SEQ ID NO: 341846 - DNA, 122 bp, Homo sapiens
cgtaagtgtactctttcctgctcacgcctggctacctgcctactctaacacaacaacttccgtttttaaagtgtcaacttgtttacttggaggagccgccgcctgccggacacagcacgttt

SEQ ID NO: 341847 - DNA, 122 bp, Homo sapiens
catgatcccgccgacacgcacttccgcttccggttaaagagacccgaggggtcctgggggcgccgaggcggctgacagggcggcggccgcgaccttcccgtagccggtcgagaaatttgacc

SEQ ID NO: 341848 - DNA, 122 bp, Homo sapiens
tcctctcagcggggaagagttgttgtgtgagtttggggcgggcggcccgaggcttttatacgctccgggcggccgcggctcgccaatgagctgaatggagtcctacacaaacagggacattc

SEQ ID NO: 341849 - DNA, 122 bp, Homo sapiens
gtgatttctgtggccacacctgtgctggctgctcccgacgtccctggaggccagctgttccggcagggctggggcacacacacaatctccacagtgcagccgcggcctcctgctgggaacgt

SEQ ID NO: 341850 - DNA, 122 bp, Homo sapiens
cggcttcaggtcactgccggctgaacggagctgccgtcgccatgtttggctgcttggtggcggggaggctggtgaggatgggaccgggtgatatcaggaaggggtcaggataccgagggcga

SEQ ID NO: 341851 - DNA, 122 bp, Homo sapiens
aattgccccgagcccagcactttgcctctgtttcccctttgcacctgggaagagtctgggcggggggcgagggtcttgggaggggaactgagcagtgaccacgactggtgaggctaaagccc

SEQ ID NO: 341852 - DNA, 122 bp, Homo sapiens
ttataaaaatagttccgccgccatctttcttcctggcaggggccgacgcagggaccggcgcgggggtgagagcgcgcggccggattcaccacaacatggcaactctttttataaggaaaatg

SEQ ID NO: 341853 - DNA, 122 bp, Homo sapiens
agacgggcgggcagggcaccaggcggatggcaaggcggcccagggcgctggggtagtgcacgcgcatgacggtgtcgaacacgttggcgatggtgttagcatcgcccttcttggagctgggg

SEQ ID NO: 341854 - DNA, 122 bp, Homo sapiens
atgaaaagggtacacttgggatttggccgccttggctggaggaggaatccggcctttcggcgttcccacctgctgctacgggcgccgggagcctagttgctgcgtctcacggatgcaggtga

SEQ ID NO: 341855 - DNA, 122 bp, Homo sapiens
atcttttttgactctaccgagaatattgaaaagagttttgattagtattggtgtttattacgagaggaacattctgggaaccagactattagtataattattattgtttttattatcaaact

SEQ ID NO: 341856 - DNA, 122 bp, Homo sapiens
gaggaataaatccaatgtaaggagaatagaggaggaagagacactgctgtatttagcagccggttgtttatttagaattgattacctggcctaatcccaactgttgtagaattactcagtta

SEQ ID NO: 341857 - DNA, 122 bp, Homo sapiens
tccaggatgccggcaactacacctgctatgcggccaacacagagggctccctgaatgcatcggccacgctcactgtgtggagtaaggagcagccctcgcacgtcggccttctgttagccacg

SEQ ID NO: 341858 - DNA, 122 bp, Homo sapiens
tgatagaatagggtctgggggggactaggggccacagcgcaccgggaagatgcggccccgcgctcaggatctgttggctgccatccaaggtttctgaaaatgcgggagagtacaaagtgtta

SEQ ID NO: 341859 - DNA, 122 bp, Homo sapiens
gagcggggattctcttcctgcctggagggagcagtttggctacaaagctgccttttagagcgagaccccgtctcccctccctgcgttcccaggactttgtgaagaagagaaagtgagtggcc

SEQ ID NO: 341860 - DNA, 122 bp, Homo sapiens
agccctccttccctgactctccaaacacgtgcataaatctatttaacaataattagttatcgtctcgctctgcattgggtcataaagggagaaaatatgtcctgaaaggaaaaaagaacagt

SEQ ID NO: 341861 - DNA, 122 bp, Homo sapiens
aacagtcgccgccacaccggcaggcagcgcactacattattcaggagacgcgcctggccacgccccatgagggccccacaaggcccacagtcaacgccccaagttgttgcatattcataagg

SEQ ID NO: 341862 - DNA, 122 bp, Homo sapiens
aatgcgcacaatgaccatggtggggtggacactcgacaggctggaactccccggggcaggcgggtgtggagctcccagcattcagggtgccgggctgaggcaggactgggctgggccgacaa

SEQ ID NO: 341863 - DNA, 122 bp, Homo sapiens
cattcaaccagcgtggattttgggagaggggcggggcgcagagccaaccggaaactcctccggctgatttatctctgtgaagaaccctgctgagagacgtaggaagagtcccggggccctat

SEQ ID NO: 341864 - DNA, 122 bp, Homo sapiens
ggagtcgggtcaaggctggcctctgtgggagggggttgccggggtccccaggaacctctccgaaggcagcaccaccccccgcccagcgccctggctggtctcaccggcccttccgtccgcag

SEQ ID NO: 341865 - DNA, 122 bp, Homo sapiens
atgtgacaggacaagactctgtctcaaaaaaaaaaaaaaaaagaaaagaaaagaaaactacgtatcaattatctagctagctatctatctagagaaatggtttcattctattgctcaggatg

SEQ ID NO: 341866 - DNA, 122 bp, Homo sapiens
gggagaggcagccatgctcagtctccctggataaagccagggttcccttggcaacgggaccgtgtggacattcgcaaaggggtttccctccaccccccaggtcctctttcaactcaagagct

SEQ ID NO: 341867 - DNA, 122 bp, Homo sapiens
caagccaggagcaacgagactgcggtctctctgagcccggctagagtggcctgtgaacaccggtcgggcgagctggcagttgggagtttccctagcgactcagttcgggtgggcgttgggcg

SEQ ID NO: 341868 - DNA, 122 bp, Homo sapiens
aggagccaggctacgcctgccctcaggcccccgagagtgtggaggcccctggccatgcaccggaggagcctctgatggatgcttcataagagtggtgcccacactgcagccacctccgctgc

SEQ ID NO: 341869 - DNA, 122 bp, Homo sapiens
gcttccatccgcagattgacgtcttccgtggccgagcacaagtgggcagttaggcccaagcgccaggttcaggcctccaaaaaccccctgaaaatgctggcggcaagagaagatctccttca

SEQ ID NO: 341870 - DNA, 122 bp, Homo sapiens
tcagtcattcatctgagtagcaaataattgcttgggttctcatgctgcgtgtaaaatatccgagacggagaggtgcttcagacaaaaatatacctttcccatgtcacaaataataattataa

SEQ ID NO: 341871 - DNA, 122 bp, Homo sapiens
cttgctgagaatcctcagaaatttaccagcgcgccgacagggggcgcgagagttgttgcgcggggggcttaaacattttcgagtactttagttcatttgaatctctcggaatttttttaatg

SEQ ID NO: 341872 - DNA, 122 bp, Homo sapiens
gcaggcgttcctttccctggggactacgaagaagacaagggcttccgaaggtgtcccacacgcagcctccctccttccccaattccccctcctgcttccacacttatctctcccccagtgag

SEQ ID NO: 341873 - DNA, 122 bp, Homo sapiens
ccagaccaccggccccaggaaaaggaccgcaagatgggcgccgccatcttggtagcggcacgaagggaatgctgggattgcagaggctcccaccacacccacctacttacagctcctaggga

SEQ ID NO: 341874 - DNA, 122 bp, Homo sapiens
gctaccaatcccacccaagaaccgaaatccaggctgccgctgcgcaaaggcagctagaaacggagcatgcgctctgtgaccgagtgagaatttacccaaccccgcaaaattgaccaagggtg

SEQ ID NO: 341875 - DNA, 122 bp, Homo sapiens
ggccgcacctgaggggcttgcgctggatgcacacgcgctgggccaggccgctcaggaaggcgggcgggctctcctgcaccacatgctgcacacgcagccgccacttcacgtactccagcagc

SEQ ID NO: 341876 - DNA, 122 bp, Homo sapiens
caggcgggggttggggctctggaataagcagaaagtgagggtaattcagacaaaagacaccggccacagtctgggtgcgaacccagccttgctacttatagtctgtgtggcactggacaagg

SEQ ID NO: 341877 - DNA, 122 bp, Homo sapiens
tgtggggtctcctagagaagaggtaggaatggaatgaggatgttctttagtgacagtgagcgagcagccatgactgagggtccttttgggggtcagggttttccattcagggcagccttatg

SEQ ID NO: 341878 - DNA, 122 bp, Homo sapiens
tgcttcaaacttcttctgtctggctttctacagcaattcttagggatagttttattttcccgtttcagatttctgtagcctttatggtcagtacaatgcatttagccccgatcatctgtaac

SEQ ID NO: 341879 - DNA, 122 bp, Homo sapiens
gcctgtcccacttgggttccggaagaggtgcccttgccttgtattttagacatggggcgccggctgctggggctgccaggtgccaggagacgcctccctcgggcctgccccggcgcccgccc

SEQ ID NO: 341880 - DNA, 122 bp, Homo sapiens
gaaagttttttgagtatgggggagccctgcaccaccccattatgatttgaggtctctcctcggatgctcccaaatctggcaacggcggcaaactattgggctgaaagactcaatccagtgta

SEQ ID NO: 341881 - DNA, 122 bp, Homo sapiens
tgggattagagagcggtgggaaaagggtagtgggcctggtgaggggagcaggagccaggccggcaaggggcaggccatcttaccgaagctgtgatgaatgattctccacccaccaggtcttc

SEQ ID NO: 341882 - DNA, 122 bp, Homo sapiens
ttcgtgctgtcggtatctccacaagtccagaagctggcttcaccggggtgggcaagagttcgacagcaggttttaccgattgcgctctgacttagacaatgtaattgttccccacttgggaa

SEQ ID NO: 341883 - DNA, 122 bp, Homo sapiens
tcaggcatggtgtcccggcctctcaggctgctggtttgggctagggtcccactgtggaagcgtggtggtgtcccggcccacctctgcagctcttgataataaaagcatctgttaaatagctc

SEQ ID NO: 341884 - DNA, 122 bp, Homo sapiens
tttaaaacggaaagtcctgcatcccaagaaaacctctagtccaggcaaacctaggtgggtcgctctaggatggaattaggatttccagtggtcttggacagaagggcgacctctcccttgag

SEQ ID NO: 341885 - DNA, 122 bp, Homo sapiens
cgtaaccctccctatgcctttagtcattgagttgaggatatttattcatcaaacttgtaccggagccagagtcctcaacagatgaggagccaccggcgttttgctgtcccgtgtgttcttgg

SEQ ID NO: 341886 - DNA, 122 bp, Homo sapiens
gcgagcgatctgcgcgggtcacagcacagtcgagggggaggccagaacccggacccagggcgctctcctgcctagggccgggccaggggcaggaaggtgtactcacaggagccgggcctccc

SEQ ID NO: 341887 - DNA, 122 bp, Homo sapiens
acctacggctgctcaagccgtcccttttctcgaccacctttccgtggacgtatgaagccccgaacctgtgcagtgcagaaggcctccacagcagcccggactgacagagcctgcggtctctg

SEQ ID NO: 341888 - DNA, 122 bp, Homo sapiens
cttgagtgctgcttttccagcttccctattagaccttagtgcatgtttcatagctgctttcgaatgtatccgttttctttagaggatttgggagggaccctaaactgagcgttgcttgggtc

SEQ ID NO: 341889 - DNA, 122 bp, Homo sapiens
gagttcatattggaaaaaaaaaacacctttcacatgttcttaatgactttaaaactgatgcgctctaagggcacattcagttgtatgctctgaagcagtagacaccatacagcttatgcttt

SEQ ID NO: 341890 - DNA, 122 bp, Homo sapiens
atctctctctccgggagcctgaagaggaaagcagagtcattcgaattgccagggtaaaaccgcagtcaagcaaaagcagcttgacttttattttctggagcctgtggggcacgtaccaaaga

SEQ ID NO: 341891 - DNA, 122 bp, Homo sapiens
cgccgaggccccgctgggattcccacacctgggctcctgggcccttacccaggtcaatgtcggtgaagccctccgcggtgatggcgtctgcagtgtttttgtcgatgttctccaggcacagg

SEQ ID NO: 341892 - DNA, 122 bp, Homo sapiens
tcctcgtccaggctggcattgtctgtgttcgccagcccctccgcgaagttagctcatttgcggatcaggccaaatccctggagacttcacgcagacgcgggtgcagcctgctctgggacttg

SEQ ID NO: 341893 - DNA, 122 bp, Homo sapiens
ggccccccgagtgggcggggtcaccccacctgtggcggacagggcagcgaggccacggtgcgccccctcgcggctctcccagagctccggcgacgtagggcccgagaccctggagtggggac

SEQ ID NO: 341894 - DNA, 122 bp, Homo sapiens
ttggataaacatcaaaactctcatcatgggattccagcagaatatggtctttgctatacacgcctagaatgttatttcttcaaaacactcattgccatgataattcttgcttgtgtgtttat

SEQ ID NO: 341895 - DNA, 122 bp, Homo sapiens
tcacagtgcaggagtgtgtttgctgcaggaaggacagaagcagggaagctgctggtggaacgcctgctgctggggtgcaatctagatgcaaggaaggctttgctgaggaactgtcatttgag

SEQ ID NO: 341896 - DNA, 122 bp, Homo sapiens
tgtctttgctccatactgctgggggatgggagagccacagtgtgtttcttttgtgcacttcgcaactgacttcttgtcctggggttaaaagttgaagatattttctgatgatattaaaagtt

SEQ ID NO: 341897 - DNA, 122 bp, Homo sapiens
gtatgggcaaaagaaagcaatcagaataggaagatttcctttaatagacctctatatcagcgaatggacatcctgcctgaataattttattgacaaaaataaagatgattaaacttgatgtg

SEQ ID NO: 341898 - DNA, 122 bp, Homo sapiens
tagcgctgctgcggaggttcaaagtgtccgacgaggtgagtgcgccgcgccttctgctcgcggcccccacgcctgcaacagcacctggtcgggaggaggcctctggggtctgtctccgggcc

SEQ ID NO: 341899 - DNA, 122 bp, Homo sapiens
ctgggggaagccattgcctgtttaatagttgctgttgctgcacttccgcttctctcccagcgagagagagacacgagtggccaggcccagccgcagccgcagcagcagccgccgcggcggca

SEQ ID NO: 341900 - DNA, 122 bp, Homo sapiens
gggtcggggctaggtggaggggtgtccttgggttcagcctctagggctggtggtccaggccgcagcatcctttcttcggattctcttcggtttctcctctacttagtggggcacgggacggc

SEQ ID NO: 341901 - DNA, 122 bp, Homo sapiens
ccggctagccggcggttcaggtggccggacctgctggaagggcgggcgtgggggatgggacgcaccccaggggatgctcctgcagagcttttcccaggtgggcacagtggctaaggcctgta

SEQ ID NO: 341902 - DNA, 122 bp, Homo sapiens
acggggccgcccaccaggtggctgaggtcaggggcgttggcgaggcacaccgactgcggccgctccaaaaagctctccaggtaggcctggctgcagtcactgaacatcctggggaaactgga

SEQ ID NO: 341903 - DNA, 122 bp, Homo sapiens
cctcaactgtggggtattgacgtcgttggaaagagaacctcaactgtggggtattgatgtcgttggaaagagaacctccactgtggggtattgacgtaattggaaagagaacctcaactgtg

SEQ ID NO: 341904 - DNA, 122 bp, Homo sapiens
ggggtgcttgggtttgggtatactgactgaagatctccattccccaaataccttgtgagtcgggtggtatttctaattttattttgcatatgggtgtgaggtgggaaggtgtgtgtctgaat

SEQ ID NO: 341905 - DNA, 122 bp, Homo sapiens
gccatcataagaggagagcaggctgcctaataagctgtctccacctgccacaaacgtaggcgttcctggacaaaatatttccttgcagagattaaacagatttctatttaatgaggtcagaa

SEQ ID NO: 341906 - DNA, 122 bp, Homo sapiens
cctaggaaaacgccagcagcgtgtggcgatcacggtgatgaagcgcaatggtggccgccccgtgggctacccaggagcaggaggagggccgagggatccagcccggggaccggggtatcagt

SEQ ID NO: 341907 - DNA, 122 bp, Homo sapiens
ttagactcaaagtaagctgattttatcaagccaccgggtaattctgaccatttcatctggcgattttagtacggtattgttgcagctgacctgtatacgtaaggaattactgggtcatcagc

SEQ ID NO: 341908 - DNA, 122 bp, Homo sapiens
aatacacattctcagacacacaaatgaacgtgcatacactcatacacaagtatacaccaacgcatttgggcaacaagacacacagcctcaggcacagatgcatttacacaaatcattcttac

SEQ ID NO: 341909 - DNA, 122 bp, Homo sapiens
aaaggggaaaaaaaaaaaaagtttgggccaagcattcccggaatgtgcttcctgctggcgcggggcggggggcgggcggggaggcccgggcggggcggggagggcgcggggcggcgcggccg

SEQ ID NO: 341910 - DNA, 122 bp, Homo sapiens
tcatacatgcgcgccatagcgcgcatgcgcactggtggactccagcccccaccgatcctacgccctgtctctgcgtctgggaccagacgcaccaataagagagcggattcgggggcgggcca

SEQ ID NO: 341911 - DNA, 122 bp, Homo sapiens
aaaatcaaatgtaagatgcagagagccagtccaggctgtccagaggacagggctgagcctcgctccccactccattcccagggcctagcacagggcctggcacagaggccatatcacaagtc

SEQ ID NO: 341912 - DNA, 122 bp, Homo sapiens
gggctggaggtatctgagcaaactgcatggctgttcccagctgctcagggccacagcctgcggtcagcctgacaaagcctcccaggacacacagcaaggaccccccaggacacaccgtcctc

SEQ ID NO: 341913 - DNA, 122 bp, Homo sapiens
ctgggggacaggacctattgcaaggcccccgggcctacccatggtaggtgcaggcctgtgcgcacaagggtacttaactccgacacatacccggaggagggaagagggccttggctgggggt

SEQ ID NO: 341914 - DNA, 122 bp, Homo sapiens
ccaaggcccccaggctttggtggaactccagcacttcctgggctttgtccagggcctcctcggccagcacgatggcatcgggcaccactccaccacccagccaggcctcgccgtgattgtcg

SEQ ID NO: 341915 - DNA, 122 bp, Homo sapiens
cactggaatgttacaactaaaatacgcttgctggaaaactcttgtacataaacacctgagcgatcaaggccaactccatttatcttgaccattgcttgattaattcctctagaacaaaagca

SEQ ID NO: 341916 - DNA, 122 bp, Homo sapiens
acctcccagacgggtccagctaagaccggaagcgtccggagccggatgcggaaatcggtgcgcgccgacgaagcccgggaaggcaggcgcgcgggttagaacgcgccagaggtcggcgcgcg

SEQ ID NO: 341917 - DNA, 122 bp, Homo sapiens
attgaaatatgaggaaatcacttattgaagaaatattgactgctgtaaggtagaggaactcgtaacacaagaacatttgggaaaaagaacttaaaggtcctaggcacagaaataggtaaggc

SEQ ID NO: 341918 - DNA, 122 bp, Homo sapiens
ggccgtgcgtcggcgtcggctgtgatggggagcccggagcagccaggcggcgagcagtagcggcggcggctgcagctcggagcagacaggagagccggcgctcctccccgcaggctgcgctg

SEQ ID NO: 341919 - DNA, 122 bp, Homo sapiens
cacacccccaggtgagcatctgacagcctggaacagcacgcacagccccaggagagcatccggcagcctggagcggaacccacgcccacaggcaagcatatgacagcctgggtcggcaccca

SEQ ID NO: 341920 - DNA, 122 bp, Homo sapiens
atagaggcaagaaacaagtgcatgtcagattgtcctgaccttcatggagcaagatggctacgtcttcagaggaagatggtggaactcctgttgtaggaatacaaatacaaatgaaaaatagg

SEQ ID NO: 341921 - DNA, 122 bp, Homo sapiens
cacacttacttgcaccagtgcccagagagggggtgcaggctgaggagctgcccagagcaccgctcacactcccagagtacctgaagtcggcatttcaatgacaggtgagtagtggcccctag

SEQ ID NO: 341922 - DNA, 122 bp, Homo sapiens
ctgggatttgagcaaagacttgaggctgcagagccgctccctgcctggcatgtgcggcaccggcacggtgaggtggccctggtccgggtggcactgcagcagcgtggtgaggtggccctggt

SEQ ID NO: 341923 - DNA, 122 bp, Homo sapiens
cgctgggaggcgggacggtggctcccacagccaatcgcggccggtagagttgcccggcagcgcccgccccccagtccggcttctaccaatcaaaaggaaactagaggcgatgactcgctagg

SEQ ID NO: 341924 - DNA, 122 bp, Homo sapiens
cgggaaggccgcgggcgggggcggtccctccggggacggggcgggtgggggcaccgcgggcgagatcgcttcctgcagaggaggcaacaggccccgctagcaggtcagggtcccgggcaggc

SEQ ID NO: 341925 - DNA, 122 bp, Homo sapiens
aaattctgataatttttgttttcatttccttgctttttccaaataggcaaacttgtagcacgtggagaattctgggacatagttgcaataacagcggctgatgaaaaacaggaacttgctta

SEQ ID NO: 341926 - DNA, 122 bp, Homo sapiens
ttaacacactgcaaactgcagcacatttacacatacaccatgtgatccataaaattaagccgtcagattccataaaactcagcagcttattatgcaattcagagaactaaaaactcagaaat

SEQ ID NO: 341927 - DNA, 122 bp, Homo sapiens
cccgcctttttcttcccccagtactgaaattaagcagcatccaacacaggcctactcttacgacatgtgactttactgttttccgtttttgttgaaagagtcattaacagttaggagttgat

SEQ ID NO: 341928 - DNA, 122 bp, Homo sapiens
caaaaaggaaagcttcaagattctcggcttcatttttcagttatgttattagaataaacacgttctctaatggcagaaggtacctcagataaggatctataggtgatgtaggatatcactca

SEQ ID NO: 341929 - DNA, 122 bp, Homo sapiens
cccgccgtatgtcaggcctggtgctgggtctccgccccggagctggggtgcaggggctgccgcgccctgtcgggtcgatccgggtgggaacccagatgtctccaagatccgagacagatccc

SEQ ID NO: 341930 - DNA, 122 bp, Homo sapiens
tcccatacccacccatttcggcctttgttctactgcacaataacagctggcactggggtgcgggaggacggtgaaagctcgagtcccaggctccaaatcctccaggagtaactggggtgacc

SEQ ID NO: 341931 - DNA, 122 bp, Homo sapiens
atcagtccagcctgtgtcggacccgatgactaagcacacaggaacccataactgagcctgcggaagagccagaagccgccttgcctttaacgaggggtatcctggcgagcatgcgcagaccg

SEQ ID NO: 341932 - DNA, 122 bp, Homo sapiens
agctctgggggctgctgcaactctggggctggtggctgctgcctgagccaccacaggccccgtctcttccaccggcgccggcaccagagccccgactgctgtgagagtgaaccttctggggg

SEQ ID NO: 341933 - DNA, 122 bp, Homo sapiens
ctgactgctttgttacctgtttccaatggtgtgacctgactgcgctttgttacctgtttccgatggtgtgacctgactgctttgttacctgtttccaatggcgtgacctgactgcgctttgt

SEQ ID NO: 341934 - DNA, 122 bp, Homo sapiens
ccgtctatcccggtcccacccaccggccccaggttgacgaagccgaatttgcgtgccaggcgctcgacctcccggttaccctgggacacctggacggcccagctgctgacatagatgggggc

SEQ ID NO: 341935 - DNA, 122 bp, Homo sapiens
ggagactatttcacacaatttaatacaggaagtcgataatgaggaacacacccttgttcccgtcattcacgtataaagagtggctaccttaaagagtcacgtttcttttttaaagatacact

SEQ ID NO: 341936 - DNA, 122 bp, Homo sapiens
gagctggtatacgtggtgtaccggtattgtcgtaccggtattgtaccaaagggactttaccgactgcttgattggcttctgtatatggggctaggtcagagttaacctttttactgcgcgcc

SEQ ID NO: 341937 - DNA, 122 bp, Homo sapiens
ctcttggcttacaagagacctggaagctcctggttcctccccactcccaccagtccctctcggactcctgtgtatccagctatttcctgggtctgtccgccatccccttccccacagatgct

SEQ ID NO: 341938 - DNA, 122 bp, Homo sapiens
ttttaattttatataagtttaactaatttgaactttaatagccacatgtggctaccataccggatagtgcagacaagaagataatttggcgacacatataaaatgcttttaaaaaatgaggg

SEQ ID NO: 341939 - DNA, 122 bp, Homo sapiens
tcagggcaagcgagcgtggagtcttctgagcaggccggggaggggcctctgcggggcgaacggcctcggcccggcgaggagcgccgcggtggagacggggtccgctggcccgagagcccccg

SEQ ID NO: 341940 - DNA, 122 bp, Homo sapiens
cttggggctgcggagcgagcgagcggggagcctgggaaccctgctgcattgctgcaggaacggtgaccttgtgctgctgcggcggcagtgatctacagacatccagagacgctctctagtga

SEQ ID NO: 341941 - DNA, 122 bp, Homo sapiens
cttgtgtaggactttgtggacgtggcccacacatgggatctgggctgtggctcctccactcggctctcgggagccaccgtggtgctcggtgtgtgtcgtgggtggatctgttccttcgaagc

SEQ ID NO: 341942 - DNA, 122 bp, Homo sapiens
aggcgggcgggtcggcgggcgggggcagcctgcgaggggcgggagtgtccctgcgtggggcggccgagccggagttgtgtcagtgaaggaatccagtccgggggccgagctggctgcgccct

SEQ ID NO: 341943 - DNA, 122 bp, Homo sapiens
ccatttccttccactccattttcaatctgattgctattctgtttggaggagtgctatggtcggaatgtttatgtctccctcaaattcatatgttgaaatcctaacccccaaggaggggcctt

SEQ ID NO: 341944 - DNA, 122 bp, Homo sapiens
tcgccgggtgaggacgggcccggcccgtggcgcctagctgtaaagggccctaatgctgcgcgtttgtcgcaaagggaggcctgttctgacaccaaggagtgtcagatacttgaggataagct

SEQ ID NO: 341945 - DNA, 122 bp, Homo sapiens
aaccggggggcatggtgccaggttcaaggagcatggagcacccaggcagtgccctagagccggcgcttccctgccttcctccagctacccctcactgctcatcatctcaccctcaggacatc

SEQ ID NO: 341946 - DNA, 122 bp, Homo sapiens
cctgcggccggccggaggggccgagcgaagcgaggagaggccgggctggtggccgcaggtcggcctcggacccacgggaccagaggatcccatatccgtcccccgggctcgagaggcgctgg

SEQ ID NO: 341947 - DNA, 122 bp, Homo sapiens
cgcggaacaaggcgctgactgtctcccagcctcccctcctccgcgccccctcggcagcagcgaaaacccggaaatctgatcctggccccaggagagccgggttccatgaggtgcactgagca

SEQ ID NO: 341948 - DNA, 122 bp, Homo sapiens
ttaggatttccagtggtcttggacagaagggcgacctctcccttgagttacgaaggaaggcggagagatgaagggcaggattaaataaacaagtatgcgggctttggagccagggcaaagct

SEQ ID NO: 341949 - DNA, 122 bp, Homo sapiens
ctctgtccctccatggctcatggacaatgattgacctgaagccgctccaggaagtctactcgggagtcctcactgcctgctcccctatggccctaagggactcaagcctctcctcgagaagg

SEQ ID NO: 341950 - DNA, 122 bp, Homo sapiens
ataaacttaagtaaaaaatttatttactcaatgactatctattgagcaccaggcactgtgcgtatagcagtgaataaaactgacaaaattccctgctcatatttttgatgggagaaacataa

SEQ ID NO: 341951 - DNA, 122 bp, Homo sapiens
agtcgagcgccaccccctccacaaagtggtaggattatttgcgtgagccacggagccctgcggagactctggttttactttctgctcacctaagaagctcctgctgtgtccctaagtgttcc

SEQ ID NO: 341952 - DNA, 122 bp, Homo sapiens
ttcaactacctcaaaatgatatgtttagcgtcaagtaatcattgaaaaagccacggtgtccgtcctccccagcctgctcggacaagcacaccaatgtgtctttgagcactcttgtgtgggag

SEQ ID NO: 341953 - DNA, 122 bp, Homo sapiens
gcgcagccagtccccgcggcttcttcctgaggacctccggccgcgctccttccgcgcccgcgtccagactcacccttccgggggaacacaagctcgaacccggacccctccccgctcccgcg

SEQ ID NO: 341954 - DNA, 122 bp, Homo sapiens
tgcattcattcaccaacaaggcacattcactcacgactgccctgtgctgctgtgtggggccggcagaccctgcccttgaggaggggggcccagcccgacagtgaaacgcagggcgattaggg

SEQ ID NO: 341955 - DNA, 122 bp, Homo sapiens
ctgcccaactgcaccggagttggctgcaaaacatccactgggccttgcctatgggctcctcggaccttttttcgactctgttctctccctgaaatgggtcctcccactttcccttttctact

SEQ ID NO: 341956 - DNA, 122 bp, Homo sapiens
actgggggctgcagagccccgccaggctgcccgcggccgggagcgtaaggccggggtccacgcctcgattttcagtgtccgcagcccctaccccgcctatctgcgacgcaaggcgaaacctt

SEQ ID NO: 341957 - DNA, 122 bp, Homo sapiens
gcctggcacgtttctctcgggcagagcgtgatcccgttagggagaggctctcggttagggcgctctatcctgttgctgggaagcgtgttttctgccggtggggctctttgtgggaatctccg

SEQ ID NO: 341958 - DNA, 122 bp, Homo sapiens
catctcaggacccaacaccagccccaaccgttacgtggtgcttgaatggcactcagaacgcgcactcagtgcccagcgactccagaccccaagctgaccgttctctttactgcctcagtatc

SEQ ID NO: 341959 - DNA, 122 bp, Homo sapiens
agggagccgcagaaggggttccccgcttgagctaacgtagtggtggcatccagaggtgaacgcgggagcggccgcctgcggagggcacccggctgcgtggcgtccgctcgggccgctgctgc

SEQ ID NO: 341960 - DNA, 122 bp, Homo sapiens
gagcctttctccctccagggctggttcctcagagctcacccatccccttctgcatccccccgggcccaggacctgcaggccaggctcaccctctgccccgagtcagcccgcgctgccccccg

SEQ ID NO: 341961 - DNA, 122 bp, Homo sapiens
tggcaccacggcagagtccccggctggtgcttgaggaaagccctgggaattgggggccaccggtcctcaggatgcgccgcggtattcccttctcgggttccgcaggttaacagcatctcagt

SEQ ID NO: 341962 - DNA, 122 bp, Homo sapiens
gggcgcagcggggcagcccagggtccccgagccgagggacccgcgcggtcagggatgccgcgctcgccttaggcttcgggagatccaccaggatctccggggcgaaactttaaactcaaaac

SEQ ID NO: 341963 - DNA, 122 bp, Homo sapiens
catggacccaagagcggacagcccaaggggatcttcacccctcccaacttctgggagagccgctggaacagagcgagccaaacattcacacagccatgtccagatgccctgtcctgggtcct

SEQ ID NO: 341964 - DNA, 122 bp, Homo sapiens
aatgtgtcttcccgtcggtcaattgcatccaagaatgctggctgcgaacggtctgggtggcgatatagttgcagctggcccacagaatccctaggcaggtggggaaacaggatttgagggga

SEQ ID NO: 341965 - DNA, 122 bp, Homo sapiens
ctgagcccaggagaggcgggactaggggtaccgaggggggcgcgtcgctgggggtccccgcgaagttggcgcccacgcgcgctggggcgggtctcgaacgccggcacttgcgcggggcgcgg

SEQ ID NO: 341966 - DNA, 122 bp, Homo sapiens
aagtccatccgttcctacactctcactgcctccaagtcattctgcgctcttgagccagaacgacctggccgtttttaaaaatggagttttttgccttagtaattgacttgtgtaagagttct

SEQ ID NO: 341967 - DNA, 122 bp, Homo sapiens
atcggctggtgctgtcgccgcccgagttttgtgtttccacagctttccagttgggtacaacggagccgaactccgtgttcccgggctggagagccttggtgtccccgccaacccccagtagg

SEQ ID NO: 341968 - DNA, 122 bp, Homo sapiens
tccgcgtcctcagggaatccagcggctcccattcgccccatcttctccccctccgcagcccgggcctcaccgaagaaaacaggttgctggcaacgcggacaggtccagctcatagctccgct

SEQ ID NO: 341969 - DNA, 122 bp, Homo sapiens
ccaccacaccaggcccctctccacactctcctttcctcagctttgcgcctacaactctctcggtcaaacaaccgaaaacatcccgtgccggaagcgcgtcatcgaggccttgcggcaccttt

SEQ ID NO: 341970 - DNA, 122 bp, Homo sapiens
gcggcgcccgagtgaggagtcgtttctgcttttctcagcaattcggcccaggcccactgtcgtgtgaggacagcaacaccgtccccctagcggcggcttccagaatcacaggctcagtgcaa

SEQ ID NO: 341971 - DNA, 122 bp, Homo sapiens
atttcccccagctaattctgggatacctggtcccaggactacagtttgagaaatatatgacgagactcattaagatctgactggagtgcatacttgttaggtggccgtgtgactgtatgggt

SEQ ID NO: 341972 - DNA, 122 bp, Homo sapiens
gcagcgtgcctgtgtacagcagctcgcagagtgccaggcagagcaggtagacggccagcacgttgccctgcagtacctgcagcagcgccagccacgcagtcaggcagttggccggcaccccc

SEQ ID NO: 341973 - DNA, 122 bp, Homo sapiens
ctggcatggcgatgacccttctctctgtatcagcgtcaagaggatgctgtcatcccacggcgcccagcaaagcctccaccccacgtagcagggcaccaggttgtctccaaatcccttccttt

SEQ ID NO: 341974 - DNA, 122 bp, Homo sapiens
caaactctgtgcaggaggaagtggccagagagggaaatcagttgccaatggataaacagccggggcccagggaccaaagttcttatttacacagcctcccagtgtttacccaggaagtgagg

SEQ ID NO: 341975 - DNA, 122 bp, Homo sapiens
cgtccgagctgggccacagcctgaacgagaacgtcctcaagcctgcgcaggagaaggtaacgggcagctccgggtggttgtgcctggagcccttcactccaggggacgtgggtgtgtcaggg

SEQ ID NO: 341976 - DNA, 122 bp, Homo sapiens
atgtggtgtgatttctaagacgccattgagccctgctaaaggagttgctaatatccacctcgttctgcggttaagaaaccaacaggaaaaagaacgcacaactcccagcacagtgctggcgc

SEQ ID NO: 341977 - DNA, 122 bp, Homo sapiens
cctggtccagggagtttttgatcccatcctgagctcacccttgcagataacaatggtgagcgtggagctggtggtagagagaatgggatgacagtggtaacggtcatgatggaaatgatgag

SEQ ID NO: 341978 - DNA, 122 bp, Homo sapiens
tgggattgaatgtgggcacctcataaaccgtagtgcagaggtccgttctgacccccagcccgtaggaagactcaaagtgtcctttccctcaaggaacccgacagctgcctgggagtgtcagg

SEQ ID NO: 341979 - DNA, 122 bp, Homo sapiens
cggtgagggaatgatcccggcttgtccacctgttaattatggtagaggaatgctgcaagccggcccaaatacaaattatggcacagggaaaatccaggcagccattcaccaggcacgagaaa

SEQ ID NO: 341980 - DNA, 122 bp, Homo sapiens
tgcatatgactgtgtgtgattgtgcatatttgtgtgtgtttgcacactgggaatcttcctcgtacatgttgttatacttgctccaaattctggtgatctttggctctagactaatatttaag

SEQ ID NO: 341981 - DNA, 122 bp, Homo sapiens
attgacgcattcatctctgagaacggctgggttgaggactactgaggcacccagccctgtcgggcgtcctggtccaggagggccctgggcagaagcccccagcccctgtacacagtttgtgt

SEQ ID NO: 341982 - DNA, 122 bp, Homo sapiens
aaacttgcggccacaagacagctgccgggtgaccttcctggctggggatatggtgacgtccgcattcctcacggtccgaggtgactgcgctgtgctggtgcagggtggggtcagatccttcc

SEQ ID NO: 341983 - DNA, 122 bp, Homo sapiens
ctgtcctggtagattaataaagtgacagggtgttaggccacttagagcagggtggcctagcgaacaaacacaaggctgggaaccagaacccataggcctggatctggtcctagcctggacac

SEQ ID NO: 341984 - DNA, 122 bp, Homo sapiens
taactgtaaattcctcaccaggactttacttgccccctcaaccgaggcataaaaataggacgatttccacaaacaacacttatttagaaataatgtgccagaggaatgatttgggttggttt

SEQ ID NO: 341985 - DNA, 122 bp, Homo sapiens
caaactgcactccatgtggcgcgaggctgcgcttgcggagatccgggttctggtgcctggcgccggcagccagtaggggcgcgcgtcctgcgcagttgccgcgcgcggcctcctcgggcttc

SEQ ID NO: 341986 - DNA, 122 bp, Homo sapiens
tttcagaacgcatctgcggtcatggtgcatgtgtttttcagaatgcatctatggtcatagcgcatgtatttttcagaacgtctgccatcacggcgcacgtgtttttcagaacgcgtctgcgg

SEQ ID NO: 341987 - DNA, 122 bp, Homo sapiens
ttcgccaagttactgatcctctctggacctctggttcctcatttgagaaagatagctcaccgtagttctacatttaaacgatagtttaatgaggtaaagtgcataaagtgcctggatacata

SEQ ID NO: 341988 - DNA, 122 bp, Homo sapiens
ccccaccaagccagccgtgcccccacccatcttcaatgtctttggctacctctagccacgcggagagggcctcagcccccacctctggcctgcaggagtgtcgaggtccccgaggcgctctc

SEQ ID NO: 341989 - DNA, 122 bp, Homo sapiens
ggccttacccaaaggccttgtccttgaaaatcccttcataaaatacaacatacctaagctcggaggtagacagccctgaatatagataaaatatatataatatagtcagtaatacataggct

SEQ ID NO: 341990 - DNA, 122 bp, Homo sapiens
ttgcaagtaggtaagggccagctccagcgtgtcactgggtaaatgtccctgcctcccccccgagcccagtatggccagtaaaggcctttagacatgtctaaggaatggaagagggctgagaa

SEQ ID NO: 341991 - DNA, 122 bp, Homo sapiens
actaattgagattaaaccaaaagcattataaactgctacaagtgtttgtgcttttgtttacgatgaatgggtttcatttttggaaattgcttttacaagctgcaagatccttcacttgaggc

SEQ ID NO: 341992 - DNA, 122 bp, Homo sapiens
aaagtttacaagtggaagcagtctagagacctataccgagccccggtgagctcactgtaccgaacaccagggccctccttgcacgcggacgccgtgcggggaggcctgatgtcgccgcacct

SEQ ID NO: 341993 - DNA, 122 bp, Homo sapiens
gggggcgcggggctaggggacccttgcgcctcactctgtcctgaagttgaggtggtctttcgtcgcatcgatgcgcgcaggaaaagcggcaagggcgcccaagttagaatgtagattttact

SEQ ID NO: 341994 - DNA, 122 bp, Homo sapiens
ccgccggcctacctggaggtaatagggtttccttagccaggcccccggacagagactcctcgccatggtaatcacacatcgccccgccgcgctgcagtcagaggcggacccgagcgctggcg

SEQ ID NO: 341995 - DNA, 122 bp, Homo sapiens
tctccaatctcctgtcctagaatgtgcagacttagggggctctcctgtactcctgggtcccgcacatctgtccagccccgcctcgttcaccagaggcagcagagacaggctgagcacacaga

SEQ ID NO: 341996 - DNA, 122 bp, Homo sapiens
ggggcgggcacggccgcggggagggcaggggacgccgccagcggctgcggcgcgagtctccgagcacctcccctgccggctgcgccccccacgtcccagcaggaggaggggaccccctcccg

SEQ ID NO: 341997 - DNA, 122 bp, Homo sapiens
tgctgccaggtggatggtgccaccatgattgagatggaaagataaggggcagcaggggttcgggggatcaaggactggactccttgagtgtgaagtgcccgttaaacattccagtggcaaca

SEQ ID NO: 341998 - DNA, 122 bp, Homo sapiens
catttaataaccttcctttgagtatgcctgggacctgttaatatgatggaatatcacccccgtgactgcattacataacattatgtaatactttgccatagcaaactggagagagtctgtct

SEQ ID NO: 341999 - DNA, 122 bp, Homo sapiens
atatatatcgcggggcgcagactcgcgctccggcagtggtgctgggagtgtcgtggacgccgtgccgttactcgtagtcaggcggcggcgcaggcggcggcggcggcatagcgcacagcgcg

SEQ ID NO: 342000 - DNA, 122 bp, Homo sapiens
tggaatttctttgtctctttccagccctgctttctctacctccagtcgttttctgaggaccggcttggtgggtgctgatgcctgcctggaagacctcacacccacagtgtcttagaagattc

SEQ ID NO: 342001 - DNA, 122 bp, Homo sapiens
ggatggggaccacctgttcgggatgttactgaaatctgtttcttacgtttttagaggcttcgtgacggagttatcagagacattgagaggcaaattcggaaaaaagaaaacattcgtctttt

SEQ ID NO: 342002 - DNA, 122 bp, Homo sapiens
tggaaggaaaggctgctcggtcaggccccaccacagcctcctgtcctgccacctgctttccgttggccacttgtggccattcctactcccatgccggctgccctgccctctccagccagcct

SEQ ID NO: 342003 - DNA, 122 bp, Homo sapiens
ggcagccccggacatcggcgtcaggttgcttgagtcaggggcgtgggaatcagacagacccggtctcagatgccaccctgtactgttggttctgtcatttatgctcaccaagttccaagtcc

SEQ ID NO: 342004 - DNA, 122 bp, Homo sapiens
gagggtgggggagccctgtgtgtgtggtgggggtggcatccgatggatcccgggggcctgcggaggaggtgggcatctcggcgccacccggtgcgcgccccgagcgagggcatctcccctcg

SEQ ID NO: 342005 - DNA, 122 bp, Homo sapiens
cgtcagacctcggagaagggcctcacttcctcttcgttttgtcgccctttgtgttacatacggggcaagcaaggtctgccaatcactaccatttctctttcttgttctataaagacagggtc

SEQ ID NO: 342006 - DNA, 122 bp, Homo sapiens
gggcgaatacgaccgtcttgatgcatttgctggtctggttgttgatctctgttgtgaagacgaccttctctcctggcgtgaaggtgttcctttccatctggatttgcaaacagacagtgccc

SEQ ID NO: 342007 - DNA, 122 bp, Homo sapiens
gtgagcgcggcctctcagtgcccctcgaggagctgccggagctggaggtgggtgaagccacggagccgcccccaccgccacccccgagggtcgcctccccggcctcagcgcctacggccgcc

SEQ ID NO: 342008 - DNA, 122 bp, Homo sapiens
tgcaaattaacaagataaaagcacacacatttagttaatataagttttagatgacatagacgcctttagaaatgaagaccccaagaaacagggaagtttatgtatttttaggacagttgtgt

SEQ ID NO: 342009 - DNA, 122 bp, Homo sapiens
cgggccgaggcggaaaggggttgaattgggggcgcccgggcggggagggtcgcaccgccccggggcggagccgggccacgtgggggaggtgggagggggccccgcggccacactacctgttg

SEQ ID NO: 342010 - DNA, 122 bp, Homo sapiens
ggcgctgtgcggcaaactgtccaatcaggtgcgccgggaggaggggcaacttccaaagcccgaagcggtctcatttcccgccggccccccattcgggtccgggttttagttcctcggggagc

SEQ ID NO: 342011 - DNA, 122 bp, Homo sapiens
aagaggaaaacgcggcgcgactcggttgggggacagcgctgagatgcggacagatgcggacgttctgccgccgcctgcaggcagagggactcggagatcaggccgcagaagcagaagaaggc

SEQ ID NO: 342012 - DNA, 122 bp, Homo sapiens
tctcttttctggaggctctgacggcacagttcgaacgtggtcttgaccgtcagcacatcccgctgcagagggcattccctttaaggcttgaaaatgcctcctgtagtcccaaaccagcaaag

SEQ ID NO: 342013 - DNA, 122 bp, Homo sapiens
tgcaggatgctggggagggagccgcgtgcaggccatggaaacaatgcatcttttatgaagcgatccccgctcctcgcctggaaaccttgcattaatgcggcattgatttccctcgtaataga

SEQ ID NO: 342014 - DNA, 122 bp, Homo sapiens
cgtgcctaactgctaagacttgtgctaacaggagctctgggacctcagggagaatgggctcgcgttcatcttgcacctgcctttgttttagcactgatctaactctcacattttttacccac

SEQ ID NO: 342015 - DNA, 122 bp, Homo sapiens
tcattatattagaatctcttttcttctttacagacccttcatgtggcctttataaatatgcgtttgagacagagttatatgcagaagttgaaaatgcctggaagatttctggtttctttcac

SEQ ID NO: 342016 - DNA, 122 bp, Homo sapiens
aaacagtcttattcatgtagtcagcagcccttgctcatgtgtacaaacaacagctttggccgtgaccccaggaatgcttctgcaagacagcccttcctcctactcttccaagaaaccagcca

SEQ ID NO: 342017 - DNA, 122 bp, Homo sapiens
attagcagtttgggcaagaacatagaagcaagggtgcctggtgagcacaggttcctgaggcgctgctcaggcagcagttctccaaaggaagcagcctctatggcacagtgtccatgggctgt

SEQ ID NO: 342018 - DNA, 122 bp, Homo sapiens
tgcatggttgtatctgattttattttcacctgaggccctaaggatgcttggaaggacctacgagactcttgaatcagcaacatgacttaaaagcaatataaggtggttcccaagacaactca

SEQ ID NO: 342019 - DNA, 122 bp, Homo sapiens
tgtcgaagctgcagaagtcacacttgaagggacggtccttacagtggactctgctgtgcacgcgcagggcggccgcgctggagcaggagtagctgcactctggacacttctccgggtggtcg

SEQ ID NO: 342020 - DNA, 122 bp, Homo sapiens
gatttacagaccagaaacatgcgcctattaaggatgtaataagctatggcaaataagacccggctgcttaaattacaaatgctgatggcttcagaaatccattcacttaattatttttatac

SEQ ID NO: 342021 - DNA, 122 bp, Homo sapiens
gcgggtcccgacgcggcccgcgggagctcggggtgccctcgcccgccgctgccatcttgccgccgagggttctcttagcgaccagcaacgcccgcttccattggtctttgtcgcaagggggg

SEQ ID NO: 342022 - DNA, 122 bp, Homo sapiens
gggtaacagacttcagctgccgggttctggagtcacatgacccgggctggtcacgtgggccgtgggtttcccaatgcctttacaagcgaaggtcggaataaccacggctgagaaagacactc

SEQ ID NO: 342023 - DNA, 122 bp, Homo sapiens
ggctggaatgctcacgggcagatggaccacaagacgataaaccagcgaggtgactccagacgcgagggggctgagaatgacgaggagagggcacgtggcataggacggccgagggggagcca

SEQ ID NO: 342024 - DNA, 122 bp, Homo sapiens
ggcaggctgcagagccaggacaggacagcctagccgatggggaaggaaagaacagagaagcgcccttagggcttaacagcacagaggtccctagtggcgttgacaagaatgtttctgtggga

SEQ ID NO: 342025 - DNA, 122 bp, Homo sapiens
ttaataactttgctggaaaatctgtaaaaaagaaaaacaagtttgctagtgactaagccccgcatatgtgagtgaaagtacttcaggcacgctgcctcctggtaacagctatgcagggaggg

SEQ ID NO: 342026 - DNA, 122 bp, Homo sapiens
ggacatgccatgtgccaagcattgtacaggtgctttaccattacagacaaaacttaagaacgagattttcacatggtagttgaattcctggcctttcaatacggcggctgacctagactcgg

SEQ ID NO: 342027 - DNA, 122 bp, Homo sapiens
gtctcctaacaggaaaagcagccaacagagaagcagatgcattcacattcactcatcattcgttcgctcattcattcattcaacaattatacatagacctctcatagtcatgagttttaaca

SEQ ID NO: 342028 - DNA, 122 bp, Homo sapiens
atacttcctaaaaacaggcagtgcatgagcactggtgatggacattgtgactgcatcgagcgcttgcaactttgaggtgaatgaagtctgtactgactcctggttgcaacacataggaacac

SEQ ID NO: 342029 - DNA, 122 bp, Homo sapiens
ttttctgggtaatgtagttccctaggcaacaaggagggtaaagggcgcaattcccagaggcgcttctgcaggaaaagcccagcttcacctcgggagtatccttaagatgtgcgtcctgactg

SEQ ID NO: 342030 - DNA, 122 bp, Homo sapiens
cgtgcgccgggccgccgctgcctgccctcgggctgcggtgctcagcgcgaggcgcgcagccgatccccaggccggtgccaagtcgccggccccgctagctgcctccatgggccaggggctcg

SEQ ID NO: 342031 - DNA, 122 bp, Homo sapiens
ccgcacctcggctgacatgttggacaggcagcaccatggcccctccccgggccgggggctcggggtcctcctgtcacagggcctggcagcccctgtccaggccctggagccctggctgcatg

SEQ ID NO: 342032 - DNA, 122 bp, Homo sapiens
aggattggatgtcaagcctggcatgtattgccaacttctccctgggtatggagaatagatcgatcaacttggctgccaaagatgttgtgaataggaggcttgagagggctggaacctcaggc

SEQ ID NO: 342033 - DNA, 122 bp, Homo sapiens
ttgtttgctgataaccctcttctctgtggtaaccccagcagatagaggcaataccaaggacgtaggtctcatttccctgaagagtagcttctcgagagactcaggagagatgcccactggag

SEQ ID NO: 342034 - DNA, 122 bp, Homo sapiens
gagcagggccagtagagttcggggcagctgtcaaaaacgagacggggaggcttttcttcccgggggtggaggagggaaggagggaggtgtccttttttccatctgttgcagtttccgaacca

SEQ ID NO: 342035 - DNA, 122 bp, Homo sapiens
gaccaatggggaagtggcatgtgggagggcgccggggggccccccgccaatggggagctacggcgcgcggccgggacttggaggcggtgcggcgcggcgggtgcggttcagtcggtcggcgg

SEQ ID NO: 342036 - DNA, 122 bp, Homo sapiens
cggcggccgcgtagacgcgcaggttcatcacggtcccggggagggacggtcccgagtgtccggagagagcctgaccctgaagtcctggggctgcagggagaccccagaccctagagaccccc

SEQ ID NO: 342037 - DNA, 122 bp, Homo sapiens
gaggctgtaagaccagcctgggcaatatagcaagacattgtctcttcaaagataaagaaacgaacaacaacaacagtaaaaaactgggcatggtagcaggcacctgtagtcctagttactca

SEQ ID NO: 342038 - DNA, 122 bp, Homo sapiens
aaaaagggacccgagtctcgcttgtcccgcgccggggtggcaagttagtgaagaaacccacgagagtgagatcccaatctacgactgcccctcccaggtcctcaatcccgggagcctgctcc

SEQ ID NO: 342039 - DNA, 122 bp, Homo sapiens
agagagaaaagtggtaacctggggctgggggccggcgcggcggagctcggagtagtagagcggagtgaagacacgggggaggatagagactggcattcctttgggccgggggattggcggga

SEQ ID NO: 342040 - DNA, 122 bp, Homo sapiens
tagagtcttgggcctggttcgagtcccagctccaccactttctagtcttgtggctttggacgcgttacttaacctctttgagcctcagtttccccatccgtcaagtagctcatagcgagagt

SEQ ID NO: 342041 - DNA, 122 bp, Homo sapiens
aggcgagctaagacctcccaaagtcctggagctagagccatgggcagggtcctctacccacggacatggtagtcagaaaggcccacactaattaggaagaaagatgcatgccccccctctcc

SEQ ID NO: 342042 - DNA, 122 bp, Homo sapiens
tgactgcagcagaacttggcccttcctgcctgacaccgcgccacagtgaacagcaggggacggcacagctgatgaaggtgatatgaatacagtagtcaccttgtattcacaatttatccaaa

SEQ ID NO: 342043 - DNA, 122 bp, Homo sapiens
gtgagtggtgctgcgagtgcgcatgtctgcacgcatctccaggtgtgcatggtgccaggacgctctgcaggtgcgtgtccacctccgcgtgcagggtctctgcctctgtgagggctcaggtc

SEQ ID NO: 342044 - DNA, 122 bp, Homo sapiens
aagacagacaacttccagagattccctacatactattttaactctcatttttaaaaattgcgatatgcactttagtttctgaaattgtttatgcattatgctgaagtaatttactgaaattc

SEQ ID NO: 342045 - DNA, 122 bp, Homo sapiens
ctcactccctgtatgtgcctcccacagtgctctcctcccagccaaggaactcattgttaccggccaggctgtgtacatttcccatccagtgacatttacaagaagaatagctcctagcagaa

SEQ ID NO: 342046 - DNA, 122 bp, Homo sapiens
atgccagccctgaaatctctaagcaaataaggttcccaggaggacggcagcatttgcatgcgggtgtgtgaaagcccagccaagtgggctgcctctgtctgcagctctgagccccacacccc

SEQ ID NO: 342047 - DNA, 122 bp, Homo sapiens
ctgcccctagcctctcctgccctgccctgcccctagcctctccttggaggtgtttcccagcgaccacttcctgatgtccttatgcttgggcaggccacttccccagtggattgcccatcctc

SEQ ID NO: 342048 - DNA, 122 bp, Homo sapiens
tccgtctatccacatgcatgcaccgttgttacattttcattgtgattggaagctacagttcgggcaaagggtacaaatctctttaagaagataagaaagaaaatgcagagatcctaagtcaa

SEQ ID NO: 342049 - DNA, 122 bp, Homo sapiens
ccagtgtgggagagctggagccgtggctgagctcagctggagggagcctggccccttgcccggtctcgcagccaccccgagcgttccaccacactgtccgcccttggcctcggcacacgctc

SEQ ID NO: 342050 - DNA, 122 bp, Homo sapiens
aaaataattaaccacagaagtaacttgcccaaagtcaaacagcgacttagtgatggaactcggactagaacccggtgtcagtatgaaagaggatcagcaatgtctgtaaggacatgattgtg

SEQ ID NO: 342051 - DNA, 122 bp, Homo sapiens
aaagaaagaaagaagagaaaagggatgggtttattgtccttttcaacagactagagtatacggggtgaaactgcttcacttgattcaataaaatcgtttccggtaacaggccccaggaatcc

SEQ ID NO: 342052 - DNA, 122 bp, Homo sapiens
tgtttgttgtggtggttgcaacagcagcaacacagatgacacatatctccctattcttctcgcccttctcaccctccctacccagctcctgccttagaaacaggcttgtcctacactgtatc

SEQ ID NO: 342053 - DNA, 122 bp, Homo sapiens
tccctccacgcattcatgcatccctggctctcagcggggcctaaaatccctgtcaatgaccggaaattgcagatggggacactgtccctccccaactcctacactcccttccttggagttgt

SEQ ID NO: 342054 - DNA, 122 bp, Homo sapiens
cacagctgggaccacgaccacttgcagacactggcacagaagtcatgctttggatcaccacgtctgaatttgaggcacttaacttgcttctaagatggggaagggggaggagtttcttaaat

SEQ ID NO: 342055 - DNA, 122 bp, Homo sapiens
gctcaatgccgccatgtttcccgcaggaagtcgcgtgggaagtgacgcctgaagctggcgcggccccgtaccccgacttccggcctgtactgagttcctggtatttctctctctgcgccaac

SEQ ID NO: 342056 - DNA, 122 bp, Homo sapiens
aaacagctagacagaaaccatccaaatcagataggcctttcctgaaaccagatgaaatatcgaactagaaaatatctgtgtgagaacagcccatggaacaaagctcttgaattattattcaa

SEQ ID NO: 342057 - DNA, 122 bp, Homo sapiens
tatttagtgcgaattcgatctggggctgggctgggccctacttaatggggcccgggtgtccgagagcgtgccgagcggagcgaagccaggagcccgatcgagatgatgatggttatgcagcc

SEQ ID NO: 342058 - DNA, 122 bp, Homo sapiens
tagtttcagccaaaaagttttcagaaagttatgagtcactgaatataggattataatgagcgtctgtgagtaaacttaactaaagcacagattctattttgtatgtgggaagtcacacacac

SEQ ID NO: 342059 - DNA, 122 bp, Homo sapiens
cagggcaggtctgcagagagaccctcggccctgggccatgctgttggggtggcagcgtatcgggaactggactcagcatgcagtgggaggggttgggtgttgtgacattctctctgtcctcc

SEQ ID NO: 342060 - DNA, 122 bp, Homo sapiens
aacttagatgagacaagtgtcgtcaggatctatgattggctcttgctccacaatgaatctcgctgtcagaggttaaaaccctgtctgtcccaagtcaccaagcagtattttgttacagtcaa

SEQ ID NO: 342061 - DNA, 122 bp, Homo sapiens
tctcgtcaacagatctccagaggtggtgcagaaacgaccccgcgccggcgccccatcctgcggccagtgcctccgcgccccggctccggtccccaccgtccccgccccagatttccggagga

SEQ ID NO: 342062 - DNA, 122 bp, Homo sapiens
cttgcatcctggcacccacaggttcccaaggcgcggtggagggacactcgtaaaaggtctcgctgtgatcactgtctccagcctgctgaagctcagagggctctgattcagaaagatcatcg

SEQ ID NO: 342063 - DNA, 122 bp, Homo sapiens
gagacatatttagacaggaccaggtggggactgaggggtgccaatttcagggggcagctccggttccctccccgccccctgctcctattcctccacctgaccctttttcccttggctctgtc

SEQ ID NO: 342064 - DNA, 122 bp, Homo sapiens
ccgcagactcttgtgcctgcccggcccgttagtttgagggcgggtggcagccgcgggagtcgcaggcaggtgctccgcaggttgaggttttaggatctggagcctctcacagtagcccgatg

SEQ ID NO: 342065 - DNA, 122 bp, Homo sapiens
ccctcaggccgtcttgtcagactctgagagcggcgtccagctgagcggctctgagcgcaccgcggatgcttccaacggcagcctgcgggggctctcgggccagcggaccccgtccccaccgc

SEQ ID NO: 342066 - DNA, 122 bp, Homo sapiens
tcgctttcgcttttgctttggcccccgagggctcggagaggtgcaaagcggtgacagatccgtgactcagcgtccccacccctgctggggaaggagccccgccggccgccgcggcaccgcac

SEQ ID NO: 342067 - DNA, 122 bp, Homo sapiens
tgcgttgggggtgcggcggggggtgttggagacgggactggggcttgagctccttgcacccgactctccccgccgccttgtagccccagttcagctttaggtagagtaccgcaggcaccaag

SEQ ID NO: 342068 - DNA, 122 bp, Homo sapiens
ccaccagtgctgcctgtgctgtggccctgctttgtgtcctgtggcctaacactggagcgccggctgctacctgtctgtctcctgtgctggacaggaagcaccatgcaggcggcgttgtcgtc

SEQ ID NO: 342069 - DNA, 122 bp, Homo sapiens
tgccgctgctgctgctactgctgtacggtatgagggatagctgggctctccttccccgaccgacccacgccagcagccggttgggtggtgaggggggctctctggctctctgggtttgtggg

SEQ ID NO: 342070 - DNA, 122 bp, Homo sapiens
tcacagcagagtgcctattacatttccaacaacatttagtacttattgatatgcaattaacgtagaattaagggtttgttaagtcatgtcttctatcttcctctcatctaaaaaaaactgct

SEQ ID NO: 342071 - DNA, 122 bp, Homo sapiens
ctcccaccactgacactcctgctgcagcagcagaagagcctgcaattacagcctcaggcacgcgcgtcaccaccagttcagcgcagccaggcgggctgttgccatgggaaccatcccttgaa

SEQ ID NO: 342072 - DNA, 122 bp, Homo sapiens
cacgaacccaccagaaggaagaaactctaaacacatccgaacatcagaaggaacaaactccggacatgcagtctttaagaactaacactcaccgtgagggtccgcggcttcagccttgaagt

SEQ ID NO: 342073 - DNA, 122 bp, Homo sapiens
tgaactaatgtaaagagacagtttgttccagtgccagaaatgaaccagcaaaaaaaaggacggaggctctattttcataggaggaagttaacaaaataatacccactctgtttctctgcagc

SEQ ID NO: 342074 - DNA, 122 bp, Homo sapiens
ccacccccgcagctcctcctcctccggacaacctgcagccccgcccctgcaggtgaacggcggcccagtccctgcaggtgacccgcggaccctccccgcccgtcctactaccgtcataggac

SEQ ID NO: 342075 - DNA, 122 bp, Homo sapiens
aaacgtacaagcagatagaagaagcttaaaatagagacagaaagcggttcaaatgcacatcgtgcaggtatgaaatccactacatgtcccctgcaagaaggatttgggcagggaagtgtgtg

SEQ ID NO: 342076 - DNA, 122 bp, Homo sapiens
gctatggttgtgataggcagtgtcaggtacagcaactaccaccaccatatagcaagtgaccgttctgtgtctagtatgatgttagacattttacaaacaccattgaggcctcacaacaacac

SEQ ID NO: 342077 - DNA, 122 bp, Homo sapiens
gggccgatggctggggtggcgctcgtgtggggtagtggctttgtggtccctgctgttactcggtccgtgagtgtgcatgttctgcttggggtatgtgacccggtccactaaccctcagcatc

SEQ ID NO: 342078 - DNA, 122 bp, Homo sapiens
tccgcggagctgaggtctgtttgcagggtaggagcgggagccggctccaaggagcgccaccgccgactccggccccgcctctgggacgttggggtcgcgggaactgaggcggcaaacacaag

SEQ ID NO: 342079 - DNA, 122 bp, Homo sapiens
catccgcccagaggttcgcgcccgttttcggagcttattatctcaggtagcccagaggtccgactgagctggaattagccaggcctgggacccctttgctgccctttagagtggtggcaggg

SEQ ID NO: 342080 - DNA, 122 bp, Homo sapiens
ccagtagacttttagttacatatactacaaaactgactttgtactctcaagtagacctttcgtagaaagaaaatgtttctaataaaaatgtattagaactaatgactgcagagagactcaaa

SEQ ID NO: 342081 - DNA, 122 bp, Homo sapiens
gagctttggggagctgaacaaacattccttgcaccccaggatttaacctgcggacagctgcggaagcctcttatcctgagctctgagttccttagaggggcctcacggggcaagagcctgac

SEQ ID NO: 342082 - DNA, 122 bp, Homo sapiens
caaaggtacttgtgcctccacctccctctgcgcaccgtcgtgtgcttggttttggtgagacgtagcgggcttgccaggggaggttttagggcactttctcatagttgctttggccacttggt

SEQ ID NO: 342083 - DNA, 122 bp, Homo sapiens
aggaaaaagtcaggagagtcctaacccaggccaaccttgtgtgtccacagcatctactgccgaggatgttccaagccgctgtgctgctcgtgcgcgctccttgacagcagccacagtgagct

SEQ ID NO: 342084 - DNA, 122 bp, Homo sapiens
ctccagtgagtgcgaagtgagtgcctcgttcacacccacagtcgcgccgtcccctcttcccgctctggggccagcaactcttgttagaatgcagatgccttttgtccatggactgtgaggca

SEQ ID NO: 342085 - DNA, 122 bp, Homo sapiens
gaagatcccgttcatccgggaggcggagcggctgcggctcaagcacatggccgactaccccgactacaagtaccggccccggaaaaagcccaaaatggacccctcggccaagcccagcgcca

SEQ ID NO: 342086 - DNA, 122 bp, Homo sapiens
gtgggaaaaaaaggtgcagccagccagattctggaaacaacagaagaaattacaggaggccgagcacggtggctcacgcctgtaatcccagcactttgggaggccaaggcgggtggatcacc

SEQ ID NO: 342087 - DNA, 122 bp, Homo sapiens
gtccctgccctctccccagtgctgggctgttggagagagcgagcagcaagccggtgagcgcgagcgcggcgcgccggccggctaacccgagagcgcgaggcgccccaggctggcaggcgccg

SEQ ID NO: 342088 - DNA, 122 bp, Homo sapiens
gtaaatgttaggaaaaaagggtggaagttaatcagaacacaaaccccttacaggcaagtgcgcagcagcacaggggaacaagaaagaaagatgttttccacgaagatcctgcacaaaggaag

SEQ ID NO: 342089 - DNA, 122 bp, Homo sapiens
ccgtaggccacgctccgggggcggggctccagtgaggatactgcatcccatggtgccttgcgcgccagcgcagccattggtccggctactctgtctctttttcaaattgaggcgccgagtcg

SEQ ID NO: 342090 - DNA, 122 bp, Homo sapiens
cgccccggtacccaccgagtttatttccaacctccctgggcctcgggctccgcccaggctcggagggtgcccacccagggcagggaagcccctccacgctccagccccacccgctttcagac

SEQ ID NO: 342091 - DNA, 122 bp, Homo sapiens
aactcgttagaggattaactgagtccccagagacctccaggaggctaaacagatggaggtcgagaatataaacctagcaccacaccaactagatgggtttctctagacgcctttcaccaggt

SEQ ID NO: 342092 - DNA, 122 bp, Homo sapiens
tcttagcaggcaaaataatacagccaatttaccagcaacttcatttggggctggtacgtgcgtttcctaataaattgccgaatatctagactttatgtgaagcttatcagatgaatatcctt

SEQ ID NO: 342093 - DNA, 122 bp, Homo sapiens
tacagctgagggggcgggggctccctggaggaaccaatcagcgcagcgcgggcggggtgacgcagcacaccttgaggtcctgggtaacctgtctgcagtgggctgggctggcggagctcacc

SEQ ID NO: 342094 - DNA, 122 bp, Homo sapiens
atgggagctggaagctagagatgggattgctgctgccatctcggaagcagagttgctctccggcagagagcttaagcgggcagcagcaaggtgcaccgttccttttgcagactcaccagtct

SEQ ID NO: 342095 - DNA, 122 bp, Homo sapiens
cagagaatgaggtctctgtttcctttctgccagtacctaatatcagctatgcccaggagccggctgatgaagacttcctgtttgttttgagtcactgttagagtgataaatatactttagct

SEQ ID NO: 342096 - DNA, 122 bp, Homo sapiens
ctaggggaaggaatcttgttccacttcaagtctggaacttcaagtctgtgtgtgtgcgtgcgcgcgcgcgcgttgggggtgggggttgcagagcagatgcgtacctgacagcggtaacctag

SEQ ID NO: 342097 - DNA, 122 bp, Homo sapiens
gagaagggcgagagggggcgccaccggggaaggggcggctgccggggggcaggtcgggggcgcaggggtctagttcccagctttgtacctggaggcaggttcacccctcgcctctctcccct

SEQ ID NO: 342098 - DNA, 122 bp, Homo sapiens
ctcggcctcgcgctcctccctcaggatgctgtactggatggatggcgaggcgggcgagggcggcgggccgcccacgtggccaaagctcacatagcctgagggcagcgcgtcctccgcggcca

SEQ ID NO: 342099 - DNA, 122 bp, Homo sapiens
gctcgaccaaaagtgacccacgcagaacgtggcctcccattggacgcgataagatacaatcggcattgagcttcttaggaccagggcaggagggctacttctataggtctaaactagaaaag

SEQ ID NO: 342100 - DNA, 122 bp, Homo sapiens
aagcagcagcaagcgggggaggagtctcatggcgctgccggtccagtgtccagtttccgtcggctaaggctctcggcggctccggcggtaatggcgttactcttcatccgggctccgggcag

SEQ ID NO: 342101 - DNA, 122 bp, Homo sapiens
tcccacttccaaagcctcttctacctcctcagctgatggctcccttcatccagggggctgcgctggtaggcaggtcttgggccacacacgcagtgattatcccagggggaccaaagctgctg

SEQ ID NO: 342102 - DNA, 122 bp, Homo sapiens
caggacttattgtagggggtggtcaaaatagtcccggcggggcggggccatgacccctgacgtcgccggtccggcgcgcagttcagtttggcggttccggtaccgctctcacattggggcgg

SEQ ID NO: 342103 - DNA, 122 bp, Homo sapiens
gggtgctcgtagctctggtccttcttggaatgtttccgaggctgactgtgtgtcaggccccgccgccggtggacgaaggtgcccgccctctgggggcacccagctggggtggtggaggcggc

SEQ ID NO: 342104 - DNA, 122 bp, Homo sapiens
agttttggaacctcatagaaactgccaattttgaatgatttcatactataacattcatctcgctactttcaaaatgtctagcttcaaaatgtttgaaccttcgatgtaaaaagcttcacaat

SEQ ID NO: 342105 - DNA, 122 bp, Homo sapiens
aaacggcaacgagttatcaactcaagataccgggaagattatattgagcctgcactataccgggccatcatggagtaggtgcttccagggtccaagggattctcagccatccaggcaagagc

SEQ ID NO: 342106 - DNA, 122 bp, Homo sapiens
tcccaatgggccgccagttatttatggaaggaataaaccagttacaatacatcatagctccggctgtttgaactttctggctctagccatccttgcccatgttctctgcccataaagccttt

SEQ ID NO: 342107 - DNA, 122 bp, Homo sapiens
gttgccgtgtgcgtttccgttgcggggtgtgggttgccacggggcaactgcatttttctgcgtcttcatggccaggggtacagggggcgtcgggcttttcctgggggtttttctgtgtgcgt

SEQ ID NO: 342108 - DNA, 122 bp, Homo sapiens
agaatcaaggatgagaacatctcattactgtttggtggttttggtactcatctaacaggccgtgatttttctccctccccattttgttgttccaaaacagtgatttatatggaagtttagac

SEQ ID NO: 342109 - DNA, 122 bp, Homo sapiens
ccagcacgggccagggctgcccaggaggactcagcttgggttatcaccttctgacacagacgtcactacccccagccccgcgtcctacagcctcactgggcccactgccctgcctcccattt

SEQ ID NO: 342110 - DNA, 122 bp, Homo sapiens
cttatttttttatgtaacatttttaagtttaaacctcaaaatgaatgattagatatattccggctttggtcctggcattcgttatacatttattttggtcttttgagtcgaccttgtggttg

SEQ ID NO: 342111 - DNA, 122 bp, Homo sapiens
ggaggcaagtggatgctctattaccagctcccacggagccaagacaggaaagcagggatccggcactgactcccctcattaaatagcccacgcccaccagacgccggtcagccagggcagcc

SEQ ID NO: 342112 - DNA, 122 bp, Homo sapiens
cccctcctccctccttagatctggttcaagaaccagcgtgccaaatggaagaggcagcagcggcagcaaatgcagacacggccatcactagggccagcaaaccagacaacttcagtgaagaa

SEQ ID NO: 342113 - DNA, 122 bp, Homo sapiens
gcttaaatagatctgttaccttttaatggctgttatgttatgtaaactagcttaggcttacgccaagtactgttactgggtctgcttggtccagatgcttcaagaggcttctcttgactcag

SEQ ID NO: 342114 - DNA, 122 bp, Homo sapiens
ggcgggtcctggagccctgtccaatcagggacattgacgtgggaactgtccaatcaggagcgcagcttgagaggcggagggggtttccgggatctggcggggcctttgtcttgtgctccagc

SEQ ID NO: 342115 - DNA, 122 bp, Homo sapiens
accttgggtaacaggggctgcctgaggtcctggagaaggaagaaccaggtggcccaccttcggtgcacagggaacagcagggacctgacggcagcccccgcacccctccctgggctgaagtt

SEQ ID NO: 342116 - DNA, 122 bp, Homo sapiens
ccctggcctggccattgttcccgccaggccccgcgcccctggtcgccctgggccccccaccgcccagggctgtggggcaaacagctcccattcagctgccctgcagctgtctggggggagcg

SEQ ID NO: 342117 - DNA, 122 bp, Homo sapiens
acgtctctctcagggtgcgctccggaagagcgagccctttaaggctatgccgagtgggcgcgtcccggcctctcccgggagaggagaggcggggcggacctgtgtcccgcccccggcccggc

SEQ ID NO: 342118 - DNA, 122 bp, Homo sapiens
cacacacatacacatacacatgcacacacacactcatatacacatgcagaagctgtgacacgtgcggaagctgtggtaagtgcatcctccttcagtctcagttctgaaaatagatcatcatg

SEQ ID NO: 342119 - DNA, 122 bp, Homo sapiens
gttggtaaaaatgatataggtactcagatcacactaagacagacccacttgtattggagtcgagaggcttaattttttaatcaagttgttctaataataaacaaaaaatgcaattatcaggt

SEQ ID NO: 342120 - DNA, 122 bp, Homo sapiens
agcgtgagatcaccacgctggtgagccgggtgggccatgagcccaagaagtggcccatctcgggtgtcctgccgcactccggccagctggtgtggtacatggactacgacgccttcctggga

SEQ ID NO: 342121 - DNA, 122 bp, Homo sapiens
tcaaaaatgaattaggatacaatagaaaacatcagagtatttttggggtaaatattgcttcggaaagtttcactccaagcatgtttgtgcatgcgtgtgtgcatgtgtgttaaagcatgtgt

SEQ ID NO: 342122 - DNA, 122 bp, Homo sapiens
ggagcacaaaccctgctcagggcgcgtacaaccggagggacagaaaacacgatgcgacgtcggaaagcaggaagggaattgaaattcccgcagtcacgtcacagaaatcttagcagaacctc

SEQ ID NO: 342123 - DNA, 122 bp, Homo sapiens
tggatgtggggctgagacagcagctctctgttgggtctcgcaggaagcccaccctgtagccggcttgctctccttcccggcctgtgccagccacagggcagtgcgccagagccatcttgctg

SEQ ID NO: 342124 - DNA, 122 bp, Homo sapiens
tgcagcctcgcagggaacgtgggctccggcttccagagggcagcgccattcgctcacagacggccaggagaccctccctgtgcaggcaatgccgggtgaggcatcgctcctgaagaattaat

SEQ ID NO: 342125 - DNA, 122 bp, Homo sapiens
aatacagcatcacacagggcggtgagagaagacccttccacgcaggtgatgtggagtagacgcttgtgtcacaatgaggaggcagccacaggaagaaccaggaaagggtgttcaggtggagg

SEQ ID NO: 342126 - DNA, 122 bp, Homo sapiens
gcgaggggcgggatggggcggcggcgcggggcggtacggccaatggcggggcggggcgcgcgcaggctttgtccggatggtaccaggcgcggtgtgactccccgcccccagcccgggcgtcc

SEQ ID NO: 342127 - DNA, 122 bp, Homo sapiens
ctgtcccggtcactgttcctagctctcctgtgttcctgttctgatggttccctgtgctgccgatcctcccgtcctctccggggatgatcctcacgctcctaaaattcaaacagattctgtaa

SEQ ID NO: 342128 - DNA, 122 bp, Homo sapiens
ggaatgtagtgaatctcattggctgcctcagcactggcactcttctggggctgcgggacccggcggcgtttgcaccagcgccggcgagtatacaggatcatcaccaggcacaagatggacag

SEQ ID NO: 342129 - DNA, 122 bp, Homo sapiens
tgtgccctcgccccaccgctgtgcctgagcgcccccccatcccgcccggggacccgcgcccgctcctggaaccgcacccatggccagcaccctgtccccaaccccgctttagtttccaccca

SEQ ID NO: 342130 - DNA, 122 bp, Homo sapiens
gtgtctctacactctagtgtgacttctggttacctgtaaggttgatgatctaacctcgcacgggtgctgggaagggcagtctatgtaaaaatctatgcaaggactggtgtgtgccaggggtc

SEQ ID NO: 342131 - DNA, 122 bp, Homo sapiens
agggtttaccctgagataactttgccacaaaatatctcgcctttattattattttcacatcgttctaatatatcgactttgaaaacacaaatcatcattctatttatagcatcttgttgtta

SEQ ID NO: 342132 - DNA, 122 bp, Homo sapiens
ctccggcaggggcggaactaaaatgccggccacacccctctctgtgactcagtctctgagcgttttaatacgatggtgtccccgcgggatcaaacttcagcgtcacagctgaggactggctt

SEQ ID NO: 342133 - DNA, 122 bp, Homo sapiens
caggaagatcctttttgggagaatgcaggatgtgctgatttagtagtagaaattaaaggacgccaggattcccaaaccaaagtcaattcctccagtggcttctggacaaatgatgtgggttt

SEQ ID NO: 342134 - DNA, 122 bp, Homo sapiens
gacagtgaaattgattattttggtggttccagaaggcacccacaattttccctttgtttgcgtaagagttgtgtcagaggcgaaaggcctaacacagctaaatctaacacagagttgaacag

SEQ ID NO: 342135 - DNA, 122 bp, Homo sapiens
agaatttttgactctaaggtgagtgcttattcgatttggtcctttagtcccagatcctttcgttccagtctggatagttttgggaagcagggagctgggtgatcacattcttcagggagcgt

SEQ ID NO: 342136 - DNA, 122 bp, Homo sapiens
cagacttacaaatggcacacttaataacaaataggtacaggcagacccacgctatggacacgattaaataaaaggggttccacccttaaccacatcaaactatcttccaaggtcagcttgga

SEQ ID NO: 342137 - DNA, 122 bp, Homo sapiens
agcggtgggaggactgcggggctcttgaggccagctgcagagcttgtggaggccatggggcgcgtcgtcgcggagctcgtctcctcgctgctggggttgtggctgttgctgtgcagctgcgg

SEQ ID NO: 342138 - DNA, 122 bp, Homo sapiens
cgagggattcagacagtcaagcgccaaggcagcccgaggctccccaaagcctcgctcggccgcacgcgggcaggaatctgcgcttgcactcgggctcagctcctcatcttcctttggccaga

SEQ ID NO: 342139 - DNA, 122 bp, Homo sapiens
ggacacaaggtgccgagctagcaaacgacagagtctgtcagggaggtggctagagaggcccggaagtggcttctgtgccccgccctgcgggtggtttgctagtttcaagcactttgtgagta

SEQ ID NO: 342140 - DNA, 122 bp, Homo sapiens
tgcagatatgtgacttaaataagccacccaattctgaactgagctttatattgcaacttacgggttaaagtattttcacaatcaccgtcccagttgaccccctcaaaattctatgagttaga

SEQ ID NO: 342141 - DNA, 122 bp, Homo sapiens
ggaatggggccagtaccgtcacttatttttgtctctgaatccagatgtcagctccagacccgctggacctgaataaagcaaatacctgtggagactctgttgagagaagagtctagaatttc

SEQ ID NO: 342142 - DNA, 122 bp, Homo sapiens
ggaaatagatacccttggctgcctcccatagtgactagatttttgctgctgtctgcctagcgtgctgttagtttgtgttccctgtcatactaaatcagaaaatgtttgccactcaccatgaa

SEQ ID NO: 342143 - DNA, 122 bp, Homo sapiens
gaacagaaagaaacacatgtgacgatctcaacagccggcgttagtaagaggctgtgtcctcgacgcgagggattctgttcactgtcacaggactcagggcaggtttagatgtgaagcgtgtt

SEQ ID NO: 342144 - DNA, 122 bp, Homo sapiens
tctggagtccctaggaggattgcttttctcattgctgcagaaaggcagtctgtgttctcacgggcacatgtacacacaaacacacacttgcacacacacacacgcacctacgtgcatggaca

SEQ ID NO: 342145 - DNA, 122 bp, Homo sapiens
accaggggaaacagcagggaaggttctggaaggctggggagggcacacagtcccccttcccgcctaagctgaaccccactaggctggaaggacacgtatgtctgcatttctggaaggaaatg

SEQ ID NO: 342146 - DNA, 122 bp, Homo sapiens
gccaccaccgtggttacccctactgagccctcatgagtcccagcttccataatgacaacacgatgtctgttgagcatgaactatgtgctagcactgtgccaggctccccttcaccttcacag

SEQ ID NO: 342147 - DNA, 122 bp, Homo sapiens
agcaaatccagccacgtggcagagggacagggaagagcctggcgtcaggttaccaggcagcgcccctctgctcggcccactggcaagcgctcccagcggcaggtataaaagctcaggctggc

SEQ ID NO: 342148 - DNA, 122 bp, Homo sapiens
ggctaccagccagaccagccatgtctataccaccaggtcccaccagaattgtggacaggccgggtgcagtggctcacacctgtaatcccagccctttgtgggggttgaggtgggtggatcac

SEQ ID NO: 342149 - DNA, 122 bp, Homo sapiens
tcggatcccccagaacaagagcaagcaaaacgaaatgctggtggcagcggcggcagtgggcgtggccacagtctttgcagctcccttcagcggtgagaccccttcatgccccgccccctggg

SEQ ID NO: 342150 - DNA, 122 bp, Homo sapiens
agtccttggaaaagccctctgtttctaggagctggggatggcaggagctgaatgtccccccgccaccccaacttctcttctgagactgggatttgtttagactcttcaccaaggaggccagc

SEQ ID NO: 342151 - DNA, 122 bp, Homo sapiens
caaatggcaaccctgggattcgaacccaggtagttggtcagcggcactcaccatcgtagccgcccctccccccatactatcgcagcctccctggcttcgacctttacttttgcatctcttaa

SEQ ID NO: 342152 - DNA, 122 bp, Homo sapiens
ttactaattgaacaggccctagggtatgggaaaggaaaagcccctctggtccagctactgcggctccagcatttgggctgggaggattactgtgatcttgtttgcagagctcagcaaactcc

SEQ ID NO: 342153 - DNA, 122 bp, Homo sapiens
gcggaccctcggcgaccccgggctcccgctgctttgcgtcctcaaccgggaagcacctgccggttccgcacggtccctgcacccagcgtaggccacgtttttgcctgggaaaatccacaccg

SEQ ID NO: 342154 - DNA, 122 bp, Homo sapiens
gacagtttccaaaacagctaaaaaggaaaagtaaaatgggggcaaggtcaaaagctgcaacgtatagtatgagtttttctatttgaagaaaggctgaagaacccatacggggactggaccct

SEQ ID NO: 342155 - DNA, 122 bp, Homo sapiens
caggagaagagaattgggtggacagcaggaccatctacgtgggacacagggagccacctccgggcgcagaggcctacatcccacagagatacccagacaacaggatcgtctcgtccaaggta

SEQ ID NO: 342156 - DNA, 122 bp, Homo sapiens
ccccaggacctttcccctgctcagagaccaaagggttttcagagcggaggtgggggctcccggcaggggaagttagagccgagggagcggcaggagcacgtgggctgagtgggggtgggagg

SEQ ID NO: 342157 - DNA, 122 bp, Homo sapiens
cagtaggccacaacaagaacccagcctttctcttaatgggcttatattggtcgaataccacgtaaggagttcatgtaattaatcactgagctgaggccactgctctcttctttaatctggaa

SEQ ID NO: 342158 - DNA, 122 bp, Homo sapiens
cacgccgcgcgcctcctcgctccccatccagcgcggcgaccaccggggtggcggcgacagcggcgcttctcaaacctttagtctcccaagagccgttacgcgccgcccctctcaatccccac

SEQ ID NO: 342159 - DNA, 122 bp, Homo sapiens
cggtaacacaccaaactggcgacgctgtggggaagcaagcactctcccaagtggctggcgcgcagtgagggcgcaggaaaggtaagcaggagacccgccgctaggagccagagccaggccgg

SEQ ID NO: 342160 - DNA, 122 bp, Homo sapiens
cttttttctttttttttttgagaaagactctcatcagttgcccaggctggtgtgtagtggcgcagtcttggctcactgcaacctctgcctcttgggtttaagtgattgtcctgcctcagccc

SEQ ID NO: 342161 - DNA, 122 bp, Homo sapiens
atttaagaaaagcagagaattagacgcagcaccggacccaggatgggcgtggccctggtccgggcgaggaaaagaggaccggtcgcccccggccaatcagagcacgccttgcgctccggccc

SEQ ID NO: 342162 - DNA, 122 bp, Homo sapiens
ggcctgccccgggagccccgcggcgagtgtcgccacgctcacctcctcgctgtgcgtggacgggcacttcttccgcaggcggccccagttcagcaggttccccgtctgcaggtgcagggtgc

SEQ ID NO: 342163 - DNA, 122 bp, Homo sapiens
cccggcgccagcaagggcgtagtgcgcactgcctcctgggagatgtagctcctcgaggcgcgctctcgcccctcatcccggaaaggaagactctgaatgactacaactcccagtactgaaga

SEQ ID NO: 342164 - DNA, 122 bp, Homo sapiens
acaattgctggactcagggctgccacaaaccctccatttgttttcagaatgccctatctgcgaagcgtaataaaacgaggtatgccatagtacagtggcgccgcgaccgacaaaggaaagcc

SEQ ID NO: 342165 - DNA, 122 bp, Homo sapiens
tatttgggtcccggagacacaggaacacactggaaatctaggagtggaatagctgggccccggagccacgggaacgcactggaaatctaggagtggaatatttgggccccggagccacggga

SEQ ID NO: 342166 - DNA, 122 bp, Homo sapiens
cgcccctttaagcggaacaggaggccaacgcgcggctctgcgcaggcgcctgtgtcatggcgctcccgcatcaaccgcccggcggggaaatgcgctgctctcggaaaactggtgcagctgcg

SEQ ID NO: 342167 - DNA, 122 bp, Homo sapiens
actcgctctgagttcccaccaaggggagcccaccaacggcgtcacaggccctggccgtggcgctattgactgcagggatgaggcacagcgatgctgcagaagatggtggatagctcttaagt

SEQ ID NO: 342168 - DNA, 122 bp, Homo sapiens
gggctgtcacgctctgggctgggtcccctggccgcgccatcacactctagccgggtcccccggctgcgccgtcacactctagccaggttccccggctgcaccgtcacactctagctgggtcc

SEQ ID NO: 342169 - DNA, 122 bp, Homo sapiens
aatgaagagtcgactcaccaatttttaatcatgttacatgtagaactttgaaggctaccacgtcacttagattgaatacttgttttgctagcagtcaagtcactaaagtggatgtatttatc

SEQ ID NO: 342170 - DNA, 122 bp, Homo sapiens
tgacttggcttctgagacccaaggcctttgatcttctcaccagtgtccctccatatgggccgactgccactggaaaggagagtagaaacggaaacagacccgtctggacagaatccaaagtg

SEQ ID NO: 342171 - DNA, 122 bp, Homo sapiens
acctccattcaaggtcaaaactttgcccagctcagccttgctcgaccctgggcagggaagcgcggacatcggcagagggagcccgaggctctccgtgcccttcgcgccggtgagttcccgac

SEQ ID NO: 342172 - DNA, 122 bp, Homo sapiens
ggtgtcagcctcatcccgctgccagctggccctcggttcctcaaagacagtgagttaggacggacctcaggctgtctcttcgggtcacacccggtgtgaaaaggcggcagatacagcaccag

SEQ ID NO: 342173 - DNA, 122 bp, Homo sapiens
cgtccgtggccaccaatctactccatgagacccactctcagctcccgcaggagggaggcacggggcgttcatctttctgcgcctggcttcgttccagttccatccacgctgccgcgaacggc

SEQ ID NO: 342174 - DNA, 122 bp, Homo sapiens
ttgggctcagattactgttcaagaagttccagagagccaggtctatagttaactgagtcccgggagcagccttgaggcagtaggaagtgagatctgagtcggaggtagtgagaatggaaaca

SEQ ID NO: 342175 - DNA, 122 bp, Homo sapiens
gggcgcgcggcgccaccgttcccatccaggcttgtcggcggccaccggcggaccgggcttcgagatggcctccccgccgcggtgctccccgacagcccatgacagggaatgcaagttgccgc

SEQ ID NO: 342176 - DNA, 122 bp, Homo sapiens
gggaagaagggtcatgacagacactgccggtcggtgctgggagggggagaagcccctgaccgggatggggtcatggaaagacaaaaacaggcagcactgttctgctagcatttcccctgccg

SEQ ID NO: 342177 - DNA, 122 bp, Homo sapiens
cggcctcggcctcacagcggactctccacgcccagctagctctcgcctcactgcggcctccggagtccaaaactcctgcctctcggccgcttcagcaggtccagctcctgcctcccagtggc

SEQ ID NO: 342178 - DNA, 122 bp, Homo sapiens
tagtaggtgtccctatttgtcgagtacgtgagatatcttgatacagacaggaatgcaatgcgtaataatcatatcagggttaatggcgtgtccatcacttcaagcatttatcctttgtgtta

SEQ ID NO: 342179 - DNA, 122 bp, Homo sapiens
cactgcatgtcagcctgtgccatatcaggagatcctgtctaaaaagaaggtgggggagggcggtggggaaaaataaataaacacgctgtcttaaagtcagacaacatgacactctgttgggt

SEQ ID NO: 342180 - DNA, 122 bp, Homo sapiens
attgttactcacaaatggagtattacggatccctggttctttttcacctttcatttcttgcgactgatgtaactttttgtatcagtagcaatagaaacagaaactcaaaatatctcaaggca

SEQ ID NO: 342181 - DNA, 122 bp, Homo sapiens
tcaaggggtggggggcgcctgaaatccatctgccccggggagaagggcctcgtgggccagcgcagcttgctcctctgcagacccagaagcatttgtgcgtcccgggcgtggcaggcccggcg

SEQ ID NO: 342182 - DNA, 122 bp, Homo sapiens
tcaaccgacgggcaaacacacacagacacaccccggctgtcctccagctgcgatgcggctcgctgcgccccgccggcccagattctcccgtacgctcgcgttcttcctgcactccacaaagt

SEQ ID NO: 342183 - DNA, 122 bp, Homo sapiens
ttcaacatatgtttattgagaagctataaacataggcacaaggttatgtgctaggtagtgcgattacaaccaagaagataacccagggcctacttttggtctagtgaaagagatggaattag

SEQ ID NO: 342184 - DNA, 122 bp, Homo sapiens
cctaactaaactccttgaaaagcaatgaccagcattactaatctctctctccatctcacccgcctcatacacccagcatttgcccagaacatatattcaatatctgtcaactgactgataca

SEQ ID NO: 342185 - DNA, 122 bp, Homo sapiens
gctgcacgacctcctggagggggtgatgctcgttcacctctcttcagctttgtgaaataccgcaaggtctttggagatgagccaggaaaatccattcacgtgcggaaatttgccgggctacg

SEQ ID NO: 342186 - DNA, 122 bp, Homo sapiens
gcagccagggagaaggagggcccctcagtggagacccagggatttcagtagcccctgttccgggacaggcgcaggtcctgggaggtgacagaagatagactaaaggcccaagagtccctgga

SEQ ID NO: 342187 - DNA, 122 bp, Homo sapiens
cgagtagttcaccggccccggaggaaaggggaccctcccactgttcccaggcaaatgtgtcgccggcatcctgcactctgccggggaagacgcgcatccactcgctctgcagggaggggaac

SEQ ID NO: 342188 - DNA, 122 bp, Homo sapiens
gagctgtgttgattcccgaggaggaggctgtcgtaggtgtctagccccctcagcgagagacgtttctccccaggacctggaaaggggaaagactgtgccagctgccggtctagcttcggaaa

SEQ ID NO: 342189 - DNA, 122 bp, Homo sapiens
aatcgcctggaagcttgttgcaaatgcagattcttaggccccactctgaactcagccaatcggaatcaacattttaacaagacctttaagtgagttgtatgcacattaaatgaagaaactct

SEQ ID NO: 342190 - DNA, 122 bp, Homo sapiens
atttgattaaaataaaaacaaaagcttcagtgaatatgcaagtttatgtctaatgacaaccgcattcaacaatgatatttaagggttaactaaaatgtgaaaatacttaaacatgaaatagg

SEQ ID NO: 342191 - DNA, 122 bp, Homo sapiens
acgtcacctgctcccgcctggggaggctggtggacaccgctcttgtggcgctccttgccccggggccgcaaaaccacacggtgagactcttcttcagaagagtcccccgagtccccactgcc

SEQ ID NO: 342192 - DNA, 122 bp, Homo sapiens
ggatagtctccactaaactgaaggaaggcattcaaggaagggcagctcatcgccacagggcggaggtagaaatccaggctgcctacttgacttcctgggagaccacctcagcatggatggaa

SEQ ID NO: 342193 - DNA, 122 bp, Homo sapiens
aactatgggaggctgagttctgagcagctggccagctgtgcaagcagccacaggagggggcgggaggagggtgacaggacggactctgtgtccccggggaccaacgacctcctttgccccag

SEQ ID NO: 342194 - DNA, 122 bp, Homo sapiens
gatccccgttcctgtagcccagcatgagccaagaaaagcatactcaggatccaggctcagcgagtgtcagggctgagagtcctgcctccagagaaggagcactcggttagaggtccagggac

SEQ ID NO: 342195 - DNA, 122 bp, Homo sapiens
accacaaattgattagtatacacacaaatgccttctgaaaacagggcgagtgaatgaacgcgctgtgtaagccaagacaggaaaggaaggctggagacagctgactccttccaagaatacac

SEQ ID NO: 342196 - DNA, 122 bp, Homo sapiens
tcagctcccggctctcacagccctgtcccctgggcctgcctgtgatcactgctctgttggcgaggacttgtgtgctgctgatagagatgggaaagtcggtggcttaaaaatttagaaggttt

SEQ ID NO: 342197 - DNA, 122 bp, Homo sapiens
agggggcggtgtggggcgtcgaggcggggagggcgcaggctggagttggagccaggtgcccgccgccagcaggcagagcgagaaaaacgacaatagcctggatgtaaaaagctcccccctgc

SEQ ID NO: 342198 - DNA, 122 bp, Homo sapiens
tgatccctgagctgctcacttgggttatcactacaacagaaacagaaacacacgcacgtgcggcagctgaaacgaggactcgttactcacaatcacccctcagatttctgggctgctccact

SEQ ID NO: 342199 - DNA, 122 bp, Homo sapiens
acttcttgtggcatatggtacccaagatcttgggaaaaggattgatcaagtaaagggaaacgatagagagagtgtgctctacaactgagatcatgctccttgtgaaagacagggtagggaaa

SEQ ID NO: 342200 - DNA, 122 bp, Homo sapiens
caggaaattaggattgggagccaggagacacccggcagtaacttccggcaggttcacacccgccccgccccagtcgggcccagtgcagggagacttgcacggcctcttcggagactccccat

SEQ ID NO: 342201 - DNA, 122 bp, Homo sapiens
tcctgtatgattcaacgtgcttccgaaaataggactgacatgggtgtgcagaatgggagccgcctgggcgcaaagtgccagtatggctgggatttcagcagttgtcgagagcaagggtcctg

SEQ ID NO: 342202 - DNA, 122 bp, Homo sapiens
ggagctgggccgtgggtccgggtacctgcgcttcccctctgatgcctgaaattctctgtgcggctccattccccttcgtgccagtcttcaggatcatgccagagcagccacggccacatact

SEQ ID NO: 342203 - DNA, 122 bp, Homo sapiens
cctcaagataatttctgaagtaggtaagagaaggaatcttgactttataggtgggaaaaccggggttccttcgtatcaggtgacttacatcaggtccaagcaagcaagcatcttggggtcag

SEQ ID NO: 342204 - DNA, 122 bp, Homo sapiens
gtgtttcagtggcagtgccagtacttgctgggaatcctgctgcttttcctgtggtctgcccgttgcttatgctctgaaaaggcactgtttgaaacctcaatgccctaaggagcatcttgggt

SEQ ID NO: 342205 - DNA, 122 bp, Homo sapiens
actccggagagccctcagctcagattccatcctcagcccggccccagatgcccgtgcggccgacccagctccagaagtgaggaaggtgaaccgcatcccacctgatgcctaccagccgtacc

SEQ ID NO: 342206 - DNA, 122 bp, Homo sapiens
acaactgcatggagtaaaccacaccgccttgttaaatgccgtcgccgccgccgccgtcttcgtcaccgtcacagtcgccgccgccatctttgttgtgtctccgactcccttcccgcccccct

SEQ ID NO: 342207 - DNA, 122 bp, Homo sapiens
cgataagggttaaatacttacctgcggcggaacgctgcagtttttattcgtttacataaacgaatacaatgtatatattagctcctgcatacgcggggaaaagtgagggaagaggagcggga

SEQ ID NO: 342208 - DNA, 122 bp, Homo sapiens
tggaaaactaaggcccagagagggtgtgttatttgacaagggtcacagaggaatgaaggacgggactgtttccagtacttgggtctgatgtctaggccagggttcttcccaaaagtccaata

SEQ ID NO: 342209 - DNA, 122 bp, Homo sapiens
gacagtgcatgaaaaagtattccgctgggaattgagccatgccaccaaagccaagaggagcgcatggaaacccggtagtctagaactaatcagattactgattttagggcacagcaccagat

SEQ ID NO: 342210 - DNA, 122 bp, Homo sapiens
cggcggcggcccggccagagactcggcgcccggagccagcgccccgcacccgcgccccagcgggcagaccccaacccagcatgagcgccgccacccactcgcccatgatgcaggtggcgtcc

SEQ ID NO: 342211 - DNA, 122 bp, Homo sapiens
gggtgcaccagacaacgggcggaagccgccggagcctcacggtctagcgggcccagccctcgctgctgaaatgatttcattctttatgctgggatgtgttgtcccctgagtagtgggttttg

SEQ ID NO: 342212 - DNA, 122 bp, Homo sapiens
gtggcggtcattttggcctctgtcctgtttgtccagcccgccagtttctgcagtggaggtcgcgactgagggacgggacagagaagtcgcgaaagtgggccagaggttctgcgacaccacct

SEQ ID NO: 342213 - DNA, 122 bp, Homo sapiens
ggtggctgcccccgcctccccccggccggggcgctggtgctggggtggggccggcggcggcggctttctccggctactgctgcccatcctgggcgagctcaggcgcgtcttgggcgccacct

SEQ ID NO: 342214 - DNA, 122 bp, Homo sapiens
ctgcctctggggagaccatgctgtgtggatgacagtcccctaagacccggaagcgagccacgtctgggaggatgagatggggtcggcaaatctgggccgggagggaaggctgcattcttgct

SEQ ID NO: 342215 - DNA, 122 bp, Homo sapiens
acactctatggagcgggtgggagctgaagacaggtgggagtcctgccccttccgagttggcgctggagctccgttggtgccgctgcaatcgcccaagccatggctgtagtccctggcatccc

SEQ ID NO: 342216 - DNA, 122 bp, Homo sapiens
tacagaaatgagatccgcttcctgcccaacggtaggtgcctcacaaccactggcagccggcgcttccatccttgcctggcaggggtggtccactgggccctggtttgggatgtacccggcga

SEQ ID NO: 342217 - DNA, 122 bp, Homo sapiens
gggctcacagcgcgggggtccgggggcccggggcgccccgccgcccgcgccccccacccccgctgcaggcgccctccccgccgccgtcccccgctgcgcccagctccctcgctgtcacccgc

SEQ ID NO: 342218 - DNA, 122 bp, Homo sapiens
ggagattaaagtcctccaagaaatgcagctgcttccgtgacaagagggaattatcatcttcggactcaggaggtatggggttggtttcaagtccgtggagccgcacagtctgattgagaggt

SEQ ID NO: 342219 - DNA, 122 bp, Homo sapiens
tgcacaccaaagacataccctagtgattaaatgctgattttgtgtacgattgtccacggacgccaaaacaatcacagagctgcttgatttgttttaattaccagcacaaaatgccatcagtc

SEQ ID NO: 342220 - DNA, 122 bp, Homo sapiens
ggtgcggggatgctgaggggtgccccgaagttttcgaccgtctgagattccaagatggggcgctctctttccggggctgagtggcctaggaaagtttggcagaaactgagtagagtctcccg

SEQ ID NO: 342221 - DNA, 122 bp, Homo sapiens
cttccttttcagcggagagaccccagtgcggcctccctgccagggctgctgtctagctagcgctgttgggactacttcattcacggcacaaggggacccgctcatttagtgtggcatgttaa

SEQ ID NO: 342222 - DNA, 122 bp, Homo sapiens
aactacctttcagaccttcgcggcctctcctgcgcccgcagcgcccggcagctggggacccgggcttagccacatcgaccgcaacgttcgcgcgccaccttgtgtccattcccttagcctcc

SEQ ID NO: 342223 - DNA, 122 bp, Homo sapiens
tgagatcacctccatttcaccctgtgcccccatgccacgccccagcccagcccacacccacgccctccatcccggcactaacaccagcaaggccagaggtctgccccgccctcctctccctc

SEQ ID NO: 342224 - DNA, 122 bp, Homo sapiens
ggcagggctcgggacctgcagccacccatgcctgcgcctccccccacctgggctcctgcgcggcgggagcctccccaacgagcgccgccccctgctccaccgcgcccagtcccatcgaccgc

SEQ ID NO: 342225 - DNA, 122 bp, Homo sapiens
gtacatgggtcggattccacgctgggagccggcctggatctgcgctttaggaagccactgcgggcgaccctatcttgtcgccaggacttcgcatctgatgagcctcagggcacacaagttag

SEQ ID NO: 342226 - DNA, 122 bp, Homo sapiens
ccccaaccccggtggggctctcagccggctctcggggactcgggaagagtttcctccaggcgccagaaatgcgtgtgggtaggaggcgacccaggtcagggaaccgtgtcccgctcgcactc

SEQ ID NO: 342227 - DNA, 122 bp, Homo sapiens
taaaaaaaaattttaagctgcaagcagagaagcattctatattagcaaaaaatcatattacgtgctattgtgaacaacaggacatagaggcaaaaaatttggaataggtatttactggttga

SEQ ID NO: 342228 - DNA, 122 bp, Homo sapiens
ataaagcaggattacctatatattccttccacaaggatgagaattttcttccagggccttcgtgtccgaggctgaccataaacaatggcatctttcaatagcttctctaggctttgcatatc

SEQ ID NO: 342229 - DNA, 122 bp, Homo sapiens
gaactggccaaacaggtcatcgagtatgcccggcagctggagatgatcgtctgagccccccgggcactgggtggggcagggcacgagttatttaaaacagttacactgcagggtttcgccca

SEQ ID NO: 342230 - DNA, 122 bp, Homo sapiens
accgagctcgtggatgtggacttccggctgaaccccgtggtgaaggttgagcctgactaccgcctttttgttgtgcacctgctccccaagctccagcagctgggtaggcatcaggcagggcc

SEQ ID NO: 342231 - DNA, 122 bp, Homo sapiens
ttctctggcccccaacagggacacatctttttttcccaagggccgctgacccaacctggccgcctctctgcgccgcactttgaccaaactagcaggacaaacaaacagccttcagcctagag

SEQ ID NO: 342232 - DNA, 122 bp, Homo sapiens
ggcctggagatttggcgcggccaccagagcacctgttgcgttttgggccagggcaggtcccgggtggccaggagaggacaggtaaagctagagcagtggccgcaggaacagagcaatctgga

SEQ ID NO: 342233 - DNA, 122 bp, Homo sapiens
ttgttacatagcactgaggctacaagatcgtaagtactgagggaagaaagaacaagcgagcgattgaacgttaaaaagatgccttagcatgcactccacctctgaaccttcctgtgtgttct

SEQ ID NO: 342234 - DNA, 122 bp, Homo sapiens
gagctatgatcagcttgggcgactgagcgagaccctgtctctaaaacaaacacacaagtccgggcgcggtggctcatgcctgtaatcttagcactttgggaggccgaggtgggcggatcacg

SEQ ID NO: 342235 - DNA, 122 bp, Homo sapiens
gcgtttcttaaaacatgtcagtggctggtgtttgtgttttgggttgaacagtttcacacacgtcgctggagcccgtgctcgaccagctgctgtgctggggatttgctttctgcggctttggg

SEQ ID NO: 342236 - DNA, 122 bp, Homo sapiens
gtcctgaaaaacaactgatcatgaaggccaaccaggcctacccataattctgaggtgtgtcggcaatgttatatataggtagggtttgcgtgggcagtcccagtttatgtctgttacaactt

SEQ ID NO: 342237 - DNA, 122 bp, Homo sapiens
aactgctgtatagaagaggtcaaacaagctgagtgcaggttttgtcacgaaactggggggcgagtagggttctattatcaaagaatggttgtgttggggccataagaaagaattacaggcag

SEQ ID NO: 342238 - DNA, 122 bp, Homo sapiens
gtcctggaagactgagcctggggtggcgttggacaccaactcccaggtcctcgccccacacggccacatcctcgcccagccccgcctccgcttagctccgccccgtcgcggctccgccccgc

SEQ ID NO: 342239 - DNA, 122 bp, Homo sapiens
cagctcagaggcagagttctccgcggtgtctcctagggtttcttgtcagagggccccaggcgcctagggagtcgttaccgccctggcattcaaataactcccgcgagaggcggaaatcccgc

SEQ ID NO: 342240 - DNA, 122 bp, Homo sapiens
cagtatcctgccactgggaccaccaggagtaagatggtttccacaatggagggaactcagcgacggagagcagctgtgggtctgaggccagaaagaggctctgcaagcgcaggaagaatggg

SEQ ID NO: 342241 - DNA, 122 bp, Homo sapiens
gaaaagcgggatagcctctgattaattcctactctgttcattcagatagtttgtgcaaagcgcttcctacaacactgctttctccttggcatctgggattcagctcttgcggtcgttgcttc

SEQ ID NO: 342242 - DNA, 122 bp, Homo sapiens
tccctttcctaacttagcagtcacagagctatttccaagagttgttcttaatttcctgtgcgatattcccattggctatttaacactgaacattctgtttttgaatcaaagttagttaaaat

SEQ ID NO: 342243 - DNA, 122 bp, Homo sapiens
aatttaaaaaaaaattaaaaatacctggagttctggccttgaaaatcccatccttgtgggcgctccttccagtcttgaggagtgaacctggccatcagtgattctgaagaagcaatggccac

SEQ ID NO: 342244 - DNA, 122 bp, Homo sapiens
tcctgccccacccgccagccccgggctgtagggtcggggcccactgacagctcccgcccccgccgcggccaatcagcggttggtgcacacgcccccccggccacagccaatccgcagcagcc

SEQ ID NO: 342245 - DNA, 122 bp, Homo sapiens
cgcctgaaaccatggtttccttgttttcgcctttatcccttctgccttgccagtcctccccgccagcggggccgagagcccggcgactcttgcgtgaccgagcgggctccgctgcctacggc

SEQ ID NO: 342246 - DNA, 122 bp, Homo sapiens
acacctcccagacggggtggtggccaggcagaggtgctcctcacatcccagacggggcggcggggcagaggcgcccctcacctcccagacggggcggctggccaggcggggggctgaccccc

SEQ ID NO: 342247 - DNA, 122 bp, Homo sapiens
ctcttctgccaggctggcctcagacactggggcccttgcaggcagccacaaagcagatgccgtcgttgatggagcatgtctcagagcagctgatggggcacacctctgcacctggcagccag

SEQ ID NO: 342248 - DNA, 122 bp, Homo sapiens
ccgagagcacagcctctgaaatgcaagaagaaatgaaagggagcgtggaagagccaaagccggaagaaccaaagcgcaaggtggatacctcagtatcttgggaagctttaatttgtgtggga

SEQ ID NO: 342249 - DNA, 122 bp, Homo sapiens
cacaagacaaagagataaagagaaagcagctgggcccgggggaccactaccatcaagacacggagaccggtagtggccccgaacgactgggctcactgatatttattgcttacaagacaagg

SEQ ID NO: 342250 - DNA, 122 bp, Homo sapiens
gcacgtgggaggcaggtggggagggtgcactggtgagtcatcctcttggggacttggccacggcaggcaggaagctggtcccgattcctgcttctctccctctggctgcctgtggctcaggg

SEQ ID NO: 342251 - DNA, 122 bp, Homo sapiens
cagcatctcggaaggagccctggtgggtttaattatggagccggcgctgaccggcgtccccgccctccccacgcagcctccttggtgcggtccaacacatcaccgggcaagctgaggcctgc

SEQ ID NO: 342252 - DNA, 122 bp, Homo sapiens
ttttttttggtagaaatgggtctcactttattgaccagtctggtcttgaagtcctacactcgagcagtcctctcaacttggcctcccaaagtgctgggattacaggcatgagatactgtacc

SEQ ID NO: 342253 - DNA, 122 bp, Homo sapiens
ctgagcctccctgcactgtccccgcgaactttattcccattttcacagatggtgagcaggcggctggggagatggagctgagttagaaccaggtctcccggctccaagactgcgctcccagc

SEQ ID NO: 342254 - DNA, 122 bp, Homo sapiens
atgtgctccaaatcatttcccggccgaggaaattggctaagaccgttagctggtgggaatcggaagagaatgggtcactcgggctgtgcgcggggcactatgggtgttgtagtttttgcagg

SEQ ID NO: 342255 - DNA, 122 bp, Homo sapiens
tcgtgcactgaaatggggcaagcacagcggctcaggccagcgacggccaacgggggagtccgcagctccgcgcgtgcgggacacaaggcgggactctcaggggagaccaagaatgagtcagt

SEQ ID NO: 342256 - DNA, 122 bp, Homo sapiens
gaagttccagagcaggtaccaagcaggcaaacccttttccaaccccggccccataacagacgctaggcctctctctagatgccctctggtggcctggcaagggtgtcctatcaaaaaaatgc

SEQ ID NO: 342257 - DNA, 122 bp, Homo sapiens
ggatagacaaacatactattgacatcgcccccactctagaggtctgtaccgaacactctgcgttcaccttccttcagtttgcgcaattgctttgctttggcgcttcctaggcgcacctacct

SEQ ID NO: 342258 - DNA, 122 bp, Homo sapiens
ttaaataatgccaagggcagagaaggaagtaaacatcctggccacctcctccgccttaaacgcccgcctaggttttacagtcaaataccaataatttcctgaaggctgagtgtcaaacacgg

SEQ ID NO: 342259 - DNA, 122 bp, Homo sapiens
aaagagcgaaagaacaaagcttccacattgtataaggggacccgagcgggttgccaatgccggctcgggcagcctgcttttattctcttatctggccccacccacatcctgctgactggtag

SEQ ID NO: 342260 - DNA, 122 bp, Homo sapiens
agactttttttttgtctcagcttctggggcagctgatttttactttcactattggcttggcggtgctacaagcctctgtgactttccctttaactctgtagctgccagcacagctagtttct

SEQ ID NO: 342261 - DNA, 122 bp, Homo sapiens
tggcggtagttctgcttgcaagccttaggtcatagcctgatacctcacattgccgagaatcggagttctgtggctccgtggttctaataaaagatgcatcaagattcaataggaaaaaaaga

SEQ ID NO: 342262 - DNA, 122 bp, Homo sapiens
ggctccttggttttgtcacattcctcattctggggctttgcggttttgtcttgggaatctcgaggctctcccaaggttcctttctatgtttatatcatttagcagggaaggattgttaatga

SEQ ID NO: 342263 - DNA, 122 bp, Homo sapiens
cagtcaccgcagaagggcctgcagcggacgctgtcggacgagagcctgtgcagcgggcgccgggagcccagcttcgccagccccgctggcctagagccagggctgcccagcgacgtgctctt

SEQ ID NO: 342264 - DNA, 122 bp, Homo sapiens
cgccaaggtcaacacgaagacagacagaggtcacaacgcctatttattccccacacgtcacgccctgcaccccgggtgggcttggcacacacctcaccgccatgagcggctgcagggccgcg

SEQ ID NO: 342265 - DNA, 122 bp, Homo sapiens
gagggagccttctccgaggattgtgggagatgtagtttttccggcgccttcgcgtcctggcgcatcgacgcaggacgcacttccgcatgcgccgcactcccggccttagtcgggtgcgcgcg

SEQ ID NO: 342266 - DNA, 122 bp, Homo sapiens
aaagcacacattgagaagtcccatgagtgaaagagatgttggaaagcccttgaacttggtcgttaggaaacatccacactgaagaggaacctgactgtatggaaggtcaaaaaggctgtatt

SEQ ID NO: 342267 - DNA, 122 bp, Homo sapiens
cggcgctgacggactgggggcgccgcccgcgcccgggaccgacccctctgctcgcggccgcgcctttgaggtaaagccccctgcgcgtaggtgctccgctgccagccccggcccggcggctg

SEQ ID NO: 342268 - DNA, 122 bp, Homo sapiens
gagagggccgaaaaggctgcaggtgggagctggggcgtgaacccacaaaagcgtcactgtcgagaggggggcacatcctgagttcatcttaaagtgaacacttcagtggcatttagtacatt

SEQ ID NO: 342269 - DNA, 122 bp, Homo sapiens
ccacatttttttgagacggagtctcactcaccctgtcgcccaggctgtagtgcagtggcacggtgttggcttactgcaacctccacctcccgggctcaagcgattctcccgcctcacctccg

SEQ ID NO: 342270 - DNA, 122 bp, Homo sapiens
cacgacagcatcgccgcgcctcctccgccacagcttcctgccgatgagactgtagaggaccgtgagacagaagacaggaaggaagaagaagatgctggacacccacaccatgaccgtgagca

SEQ ID NO: 342271 - DNA, 122 bp, Homo sapiens
gtcagtggtctgtcagtgtgtaacaggagctcagctttgtgcaactggagcgcaggacagcgtccaaatgtgcatgggaggggctgagctggcacgagagggcggaggcagcccgctccaga

SEQ ID NO: 342272 - DNA, 122 bp, Homo sapiens
ctggggtttcccacgatcgatttgaattggggtcgtcggctgctgagatcccaaggacgccgacctgatgggcggtccctctttggggtttgccaacctgccggtcctttccgttttttgat

SEQ ID NO: 342273 - DNA, 122 bp, Homo sapiens
cacccagcccaggagtttcacgaggaagggcacttcctcaggaggatgctcactattcagcggcaatggtcccagaacgcccgccccatgtgacacatggcgtgacggctggccaagtgtcc

SEQ ID NO: 342274 - DNA, 122 bp, Homo sapiens
ggaggtgagctgcagagaagaggaggttggtgtggagcacaggcagcaccgagcctgccccgtgagctgagggcctgcagtctgcggctggaatcaggatagacaccaaggcaggaccccca

SEQ ID NO: 342275 - DNA, 122 bp, Homo sapiens
agggatctcacaggaaaacaggtagcctcggggtgggaattcccagagcactgaaggcgccggttgttggccagagggaggccgggactccggtgggcagagtaccccgcgagtgcggagat

SEQ ID NO: 342276 - DNA, 122 bp, Homo sapiens
gcctgtgtactaggtacacagaatccagcttggccgaatgggcccacagactcagccccacgggggcactggggggttcacagggggagggagcatctccatatatatattttgtaaaaaat

SEQ ID NO: 342277 - DNA, 122 bp, Homo sapiens
aaaaggcagtgtgggtgttcccactgggtcctcctgtgtctgctcatttttcctgcccaacgagagtggccaggacatactcaagcctcctccagctttccccaatcatcaagtgcattcca

SEQ ID NO: 342278 - DNA, 122 bp, Homo sapiens
ccggggacaggcgcagcgggtgctgactgggcggtggggaggatgtggtccacagcccagcgaagggaggagtcttgttggcctggggtgggacttttaggggaggttaagggagtgtggag

SEQ ID NO: 342279 - DNA, 122 bp, Homo sapiens
atactatctgtgttacatttttacccaaagatttgtgacatttagaaattcaatgaaaaccgacaacgggaatattttcacatttctttcctcctctttttatctgtgcagtcacttttttc

SEQ ID NO: 342280 - DNA, 122 bp, Homo sapiens
gagaggatatccgagcaacttccaacaaggcagtcaggttaggcttcagtgagtgaccatcgagtaaaaactttaaagtaaaaactttgcccaggccgggcacggtggctcacgcctataat

SEQ ID NO: 342281 - DNA, 122 bp, Homo sapiens
ggtgcccgggaggaggctgcgccaccgagcaggaagtggccaccacaggttgcaagtggccggctgtgggatgggccttcgggctgctggagaccccgttctgcgtggcttcccgcacccga

SEQ ID NO: 342282 - DNA, 122 bp, Homo sapiens
ggcaaggctagaataagctgtctttcaagaggggagctttatttatacgccgatgccagtcgcgctcctgctattagaaatctcatcggctcctttgatttagggcttaccacaagctgcca

SEQ ID NO: 342283 - DNA, 122 bp, Homo sapiens
accacctgagaacttgggttttattcattgctcattcatccctccctaacccgcagcttccggtctgccccgggggctcttctccggctcaggctgatcgacagtggtgacgctgtgccagg

SEQ ID NO: 342284 - DNA, 122 bp, Homo sapiens
tccatggaaactggttctggggggaaaggaggaggtgattaggacacttggaattctgagcggtaccaaatatctataattaaatgtcttgtcacccagcaggagggggtgagatgagggag

SEQ ID NO: 342285 - DNA, 122 bp, Homo sapiens
cctgattggacggtttccagcccagcgtccctgattggataacttctaaggtcctgcccccgcaaaccctgaatgaaagatgtgatcagacgctgggctgaaagaagaaagaatgacagcct

SEQ ID NO: 342286 - DNA, 122 bp, Homo sapiens
gggcatctacaagtcccatttgatccacaaacgctacaccgtgcccagcaccactccacgcgtgtggggctcctgggtccgaggctccgccctcgagaaccacaagctcctccccctatgtt

SEQ ID NO: 342287 - DNA, 122 bp, Homo sapiens
tttgctacaacttacctacagcaatgacggcttttgtaaattacacaccattcttgctctcgcagccagtattgagaagtaagccttcaagagctgatacctcttctgaaaaacaattgaat

SEQ ID NO: 342288 - DNA, 122 bp, Homo sapiens
ctagccggtgcagacgttaagtcatggaggacaccagcaagaaccctgtttatggatgggcgtccgctctgatgatcaggagttctgcgtggtgcctgaagtccttggctgaagctgcgtgt

SEQ ID NO: 342289 - DNA, 122 bp, Homo sapiens
aatatgatattacaatggcttctcttcccttcacaggtgaatgacctatgctggcatgtccggtgtctctcctgcagtgtttgcagaacctccctaggaaggcacaccagctgttatattaa

SEQ ID NO: 342290 - DNA, 122 bp, Homo sapiens
gtgctgggattacaggtgtgagccaccacacccagcgatgtctgttgcatttgtggaacccgcatgatggttttgatgtaaaagcgcattgatctgaacatctgtctggtcaacagtccttc

SEQ ID NO: 342291 - DNA, 122 bp, Homo sapiens
tcatcaatgcttatgcaaatactctcagggaaagcactctaaatctaatactgggtcccccgagatgtcggggaagtttgaagataatcacttgcgacactcaggcttttcttgagacccag

SEQ ID NO: 342292 - DNA, 122 bp, Homo sapiens
acagccatgtgggtgagggttgggcatgtactgcaggaatgtgtgcacgaagactaagaacgaggaatcaaacactggaggtttcctttataactgtcgaaattttccactaggaagtcaag

SEQ ID NO: 342293 - DNA, 122 bp, Homo sapiens
aagaaatgtcgtgggtcccacaccattctcaagactctgtttcaaagcattgtttcaatacgctgatccaaaccctgataacctgccatctttttaataaaataatttataaatttaatgag

SEQ ID NO: 342294 - DNA, 122 bp, Homo sapiens
gtcttgttctgtccccccggctggagtgagagtgtttgactctgtccgaggaccgtgttgcgggtccctcactgcacattctcatctgatcgctgtttcaggactgtccctccgccctgtct

SEQ ID NO: 342295 - DNA, 122 bp, Homo sapiens
tccctcctgtggtccccactggccccagatggaggccgagtcccccagcccagagcgccccgggggtcgggagtgcccactgctttgagccacagaaacccaggccccaacctcctcaggac

SEQ ID NO: 342296 - DNA, 122 bp, Homo sapiens
gcagcctaaagcccaagggactggagaggatgggtcaggatgggtcctgtacccatctgccgcaaaggagcaagcattcttcaaggtgaccaaacctggatttgtttaaaaatatcagcaag

SEQ ID NO: 342297 - DNA, 122 bp, Homo sapiens
accttgcagtttgctacggtttccccccttctcccacattactccagcctccttccctcacgtaggttgcctgacccgctgatacctgtgtttgctatccctgcagatgggtgggtaggagg

SEQ ID NO: 342298 - DNA, 122 bp, Homo sapiens
tactcaggaggctgaggcagaagaatcacttgaacccgggaggtggaggttgcaatgagccgagatcgcaccactgcactccagactccagcctggcaacagagtgagactccatctcaaaa

SEQ ID NO: 342299 - DNA, 122 bp, Homo sapiens
cggacccctcagctgcttatgtaactgggaaagctgggggaggagaacaaaccccaggcacgaggcacgtcacacacacagacacatgtccccactgtaatggagcggggatcagacagaaa

SEQ ID NO: 342300 - DNA, 122 bp, Homo sapiens
cccgctgcccccaggccctgtgagccagggatagtccccggggaagttccaggaggaccccgcccctccagatccccaagcccctccagccttccccaactccctccccacaaggagccagg

SEQ ID NO: 342301 - DNA, 122 bp, Homo sapiens
ttgtcaatccaggagaaaaggcatctcaagaatggaaagacttgctggcccaggctccctcggggagctctaggtgtagaaaatgcgcgctctccgttacttctcggttactttgcccagca

SEQ ID NO: 342302 - DNA, 122 bp, Homo sapiens
gtctagctccttctcctcccagagcctttatcctcatattgggtctggggacacacatgccgtctcttgattcctaaggatccattacccatttctctgcacagatcttcgggtatccaacc

SEQ ID NO: 342303 - DNA, 122 bp, Homo sapiens
gctacaaaacgtccacactctttcaaaaagaaacgatgctgagctaggtgcggtggctcacgcctgtaatcccagcactttgggaagttgaggtgggcagataactggaggccaggagttcg

SEQ ID NO: 342304 - DNA, 122 bp, Homo sapiens
aatcttgccgcgtggttggtttcttgggatccgccagttctgttcgagggcagtcagccgcgtctgccgcaaggctattccagagtggccccaccgctccacccactctgggtaactcatgg

SEQ ID NO: 342305 - DNA, 122 bp, Homo sapiens
cacacagctacgtggcgaaggacttgcgagatttgattatatatcccatgagtcaggtttcgatgggttacagattgcaataaaatcaaccacaggctttggaaaaactttccatgaaaggc

SEQ ID NO: 342306 - DNA, 122 bp, Homo sapiens
cccggggaacggtgcactctgggaaatgtagtccggagcctgggccgtctttaactgccccggacaccgcggtcaccattaacggaccctgcatttgagccccatcccctcgctgggcaaag

SEQ ID NO: 342307 - DNA, 122 bp, Homo sapiens
gtgaactctgagataagcccaaggaagatgcaaactatcagcaccatcaggcgcttcgatcgcaccttgtgatggctgcaatgaaggagaaacaagcaccgaggaagtcctctgctcacctc

SEQ ID NO: 342308 - DNA, 122 bp, Homo sapiens
ccgtcccttgaaggtcactcacagcacagggcctgaggccacacaccacagagccttccacgctcagtgcattaaaatccgctggtccatctcacacttggaatgtaacgatttgctttttt

SEQ ID NO: 342309 - DNA, 122 bp, Homo sapiens
cgtcttacgcgcctccatcttcaaggcgtagcacagtgactgaaaaaaactgacgttgaacgtgcactaaactgaactgctcaaacacctacaggcacagggcgaggggtagaaccacatcg

SEQ ID NO: 342310 - DNA, 122 bp, Homo sapiens
gtaaggcatttggcgcggtggccgttggatgagcagccagcaatggcggctctgcaatgtcgacaccgcaaagccaagccaaggcccatcacctagcggccggttcacgcactacaagaaaa

SEQ ID NO: 342311 - DNA, 122 bp, Homo sapiens
gtgggttccatgaacgtcccaccctgacccctcgctgtggacaggcgtgggtgccatgaacgcctgacccctcactctgtgaaagctccctcatattaggggtcagggtgcacctgacccct

SEQ ID NO: 342312 - DNA, 122 bp, Homo sapiens
gggccaggagaaagcctctcagggtcccgccccttcagtgaggatcctaaatttacatcccgagtgtggccccatcaaagactggagcgacgttcactgaaatgatacaagaccagcagggg

SEQ ID NO: 342313 - DNA, 122 bp, Homo sapiens
cttcaggggtatgtgtcttccggccagggtaggtgtcttccggccagggtagttgtcttccggccagggtaggtgtcttccggccagggtagttgtcttccggccagggtaggtgtcttccg

SEQ ID NO: 342314 - DNA, 122 bp, Homo sapiens
gcgtgcggtctccatggtgccgggtcatccgagtcgggtcacgtggctggcgaaagccgtcgcggaggcgtggggaggagaaatgggcgggaggctgtggggatagcgagacacccagcgac

SEQ ID NO: 342315 - DNA, 122 bp, Homo sapiens
taattctgaagaatgtggcattaatctctcaggcgttcactcattttccatggcaagttccgaaaggcctcgtgctcgtgggaagttttcatgtgaacgcctaggtgttgaggttcgtgagg

SEQ ID NO: 342316 - DNA, 122 bp, Homo sapiens
cactgccaaattgctttccacaagggcctggccaacgccgtctcctacgtgggatgtgagcgggtctgtgtcccacaccctcctcacccagggacaggaacgtgcttttacattgcagcctc

SEQ ID NO: 342317 - DNA, 122 bp, Homo sapiens
ataatctatgtggtcctaagagggcacaacctataccaagtgaggacacagccagtaaaccggaagcaaatgcgacccggtttcaccatatcaacactgccgcctccgcgcacccgcctccg

SEQ ID NO: 342318 - DNA, 122 bp, Homo sapiens
tcaccagtgctcatgtaaagtcaaaacaaaaaaatgcttcttcctcatcattgtaaaatacgtcaccccattcaaatcagctgatgcctatgaaaggaattggttgaggtggaatataaatt

SEQ ID NO: 342319 - DNA, 122 bp, Homo sapiens
ctgctgccggcccatgtggccccactcggtgatggctgtgtgctctcccccagggttcagcgtggactggtgggcgctgggagtcctcatgtttgagatgatggccgggcgctccccgttcg

SEQ ID NO: 342320 - DNA, 122 bp, Homo sapiens
aggccacagaaaaggagggcttgtggtccttcccttggtcggggacgtgccgtgactccccgagtggcctttctggcccgtactcctgtctggctcctacctcctgggtcccggccctccct

SEQ ID NO: 342321 - DNA, 122 bp, Homo sapiens
cggcccccaggagagcaacaactcaacgggaacgatgtggaaggtgtcagctctgctcttcgttttgggaagcgcgtcgctctgggtcctggcagaaggaggtaagacccagcgcaagtggc

SEQ ID NO: 342322 - DNA, 122 bp, Homo sapiens
tggccaccaagcagccgcgtcttatccttgctctattttttttgagactgggtctggctccgtcgcccaggctggagtgcggtggcgcgatcccggctcacagcagccttgacctgccgggc

SEQ ID NO: 342323 - DNA, 122 bp, Homo sapiens
ggaacttcaaaaacgaagcagttcaacccctcggtttttctaatgagggaaccgaggctccgcgaaatgcctccgtgtggccgaggtggcagcggggcgctggattctcacgtctggcttct

SEQ ID NO: 342324 - DNA, 122 bp, Homo sapiens
ccacccagggaaaacccacacccacccgaggaaagcccacgccccccctgggcgaccccacgcccaccccagaaagggccaacccccgcccccaagaaaacacccagcccacccaagggaat

SEQ ID NO: 342325 - DNA, 122 bp, Homo sapiens
tgctccctatcacaagtatcatcatgctagagccagccattgtcacctggggacctgcaacgccaccatttatttcatccatttataccagaaacatttattaaccacttgtatatgttgac

SEQ ID NO: 342326 - DNA, 122 bp, Homo sapiens
ggcccactgcggcccgtgaggctgttggttgccagacccaaccagggagatcacttaccgcgagcttagcgagctacgccggccgaccggcgagaagagcactggggagctgactgcagacc

SEQ ID NO: 342327 - DNA, 122 bp, Homo sapiens
cccgcggcccggcgggtttgcaaagggtgccccggccaggaggcgggggctcggggcctgcgtccagtcggtggcggctccagcccgactgcacgtggagtcgcggtgggggtgggggtggc

SEQ ID NO: 342328 - DNA, 122 bp, Homo sapiens
cctgatctttcattctttccccttttcttcccgaaggtaaagatctggtttcagaacaaacgctccaagtataagaagctcctgaagcagaattctggggggcaggaaggggacttccctgg

SEQ ID NO: 342329 - DNA, 122 bp, Homo sapiens
actggaacatctatccatcacggactgactcttgggcttggtaaggatcctaacaaccaccgggtccacctgccaccttgtgctccgggcccctccccagaagctccccctgcagtgggagg

SEQ ID NO: 342330 - DNA, 122 bp, Homo sapiens
aagaaagaggacagcacacgagtatctgaagaaaaggttgaaatgttactgtaataaaagcggaaataaatttctacacaggtaagttcctaaatgaaacacgtgggtttagtggaaaaaat

SEQ ID NO: 342331 - DNA, 122 bp, Homo sapiens
tgaatgactccttctgtgcgtcagaaatccaaagcagcagcagcagcaattagggaagatcgtcactttcactcaaggttcagaaatgggggaggagagcaggggggacaaaggaaaagggg

SEQ ID NO: 342332 - DNA, 122 bp, Homo sapiens
agctaaagcagcggtttaaagtatatagtcccaaacaaagaattcttactaaaaacacaccggatctgtaaggcagaggagggaggggcgggaggaagaagtcgaagagcagggtgtggtat

SEQ ID NO: 342333 - DNA, 122 bp, Homo sapiens
gcagtgcctggggcccggcgggaggcagcaccgcccctccggcccggggcggggtcaggccgccccgccccgcccgtcccgacctaccctgcgggtcccggtccccagagcccttgcggggt

SEQ ID NO: 342334 - DNA, 122 bp, Homo sapiens
tgacgtccgaggtggcctctgagtgtgctgacttgtgaccctgagctgttgggggctcaccggtgactccatggtcttgttgagcaccctgcacgtggggctcagggtcggtaaaatagcag

SEQ ID NO: 342335 - DNA, 122 bp, Homo sapiens
ttcatgtgagccgcccgcctcagccacccaaagtggtgggattacaggcataagccactgcgcccggccaacaatgtatatttttcaacatgggagattcagttttgaatgctcccatcggg

SEQ ID NO: 342336 - DNA, 122 bp, Homo sapiens
acgcggccgttggaggcgacacctccacaagcagcgtggaggcgacacctccacaagcagcgttatctgacggaaccctcacaacaacccgttttacagatgagaaaactgagcctcagaga

SEQ ID NO: 342337 - DNA, 122 bp, Homo sapiens
tcctcgcgtccgccgcgaatgctcccgcagaagtacagggccgggcggccaggctccccgcgctcccagctctcgctgcgccccggcaccatggcagcagccattccccagccgcccgcgct

SEQ ID NO: 342338 - DNA, 122 bp, Homo sapiens
cctcccaacccgcgttgtcctcgcgccttcgccctgggtaggtgaggccgagaaggcaaccgcgaaaaggaggcggaaacgcctcctacccgacccccgaaaagttgaccgcgaccccgcct

SEQ ID NO: 342339 - DNA, 122 bp, Homo sapiens
gtccggccgtgcgaggtgagcccgggacaggaccagacacaggccagaggcactgacccgcgggggtggggccgggaagccaggcgtccgggctccccgcggccgaagagggagggcgctgg

SEQ ID NO: 342340 - DNA, 122 bp, Homo sapiens
atgcggtggggcggggtggggaacctgcccagggggcccagctctggggcggggcgggggcgcctccttccggcccgcggtccgggcggccctcgcagctgtccaggccccggcaagcccgg

SEQ ID NO: 342341 - DNA, 122 bp, Homo sapiens
ttgaacatttccatagtgcacccgacacgtcgggcccggtcatagcccggcgcagcccctcgctcactcaggaacatctgctacagcatttaccacgttaatagattagctttgagaatcgg

SEQ ID NO: 342342 - DNA, 122 bp, Homo sapiens
agcagagaaagagtttagtgatcgcagggcagccaactgaggagatgggagtgttaccagcgctgaatttacatggtctgcagcaagctcagttcttgcctcctcagaagaaagaattcaac

SEQ ID NO: 342343 - DNA, 122 bp, Homo sapiens
aggggctgcggagcggtcagatggaaagcggctttgctctggggtttcttctctctgagccgcttcctcttccccacagcctgcggcgagagggctacaccgtgcaggtgaacgtgaacgac

SEQ ID NO: 342344 - DNA, 122 bp, Homo sapiens
ggggctccagggcgggtgcggggggacgatgggtggacgcggccagcagcccctcacctgcgcaggtacaccttccagggctctgccaacttctcctgaaccagcgccttcacggccttgcc

SEQ ID NO: 342345 - DNA, 122 bp, Homo sapiens
ctattccccattcccagcattctgcaggattctctcagagaacatcataaatatattaggcgaaagtgcctaatgcccggtattgctgaataacattgcattgtatgaatgtggcacgtttt

SEQ ID NO: 342346 - DNA, 122 bp, Homo sapiens
tggaagcaaaaaataaaataaaaattcagcccaggtttttcaggtcccctgaaataaccccgtatttcaagttgacctaccaatgcccgaattctggaaacgaaataacctcccccaacatt

SEQ ID NO: 342347 - DNA, 122 bp, Homo sapiens
cggctgcgaggagcggggctcgggcgggtgcagcgacaccgggttgggtccctgcgcccgcgacagactacttcttggaatgcggcttgtttcccaggagcccgtctatttccatcactgtc

SEQ ID NO: 342348 - DNA, 122 bp, Homo sapiens
accctccacaccctagcggctctgtcacgtgacactcaagtggccgccattattatggcccgacacacctgccgccacccaaagtcgctgagtcctcgcggctcggcaggggctttgtctag

SEQ ID NO: 342349 - DNA, 122 bp, Homo sapiens
atgtgcaggtacaacacagtcacccaggaggcaccagggtcaaagacaccatgagcctcccggaaactcaggttttctgtctgttcatcgtcaatgtgggacactggtctggtaagagaccc

SEQ ID NO: 342350 - DNA, 122 bp, Homo sapiens
gtgcagaaattatttaggcctctgagcgtcgctgttgaccacctaaggagtaaaaggcagcgagacatccaatccagcaatacggctcccacagcacaagggggtggaggtttggccctaaa

SEQ ID NO: 342351 - DNA, 122 bp, Homo sapiens
aggagagacgagagcagacggagggagaaggtgcaggagggctcgtcacaaaggaaccaacgtgcttcctgctagaagggcccacacatgccggcaccatggctcagcatcccgaaccagag

SEQ ID NO: 342352 - DNA, 122 bp, Homo sapiens
gcgcggcgccgccgccaacctcacctggctccgcgcgccgctgcgggacgggcgggaatgcggccaagggccgccccggctcccgcgcccaccccggactctctggcctccgcctctctctc

SEQ ID NO: 342353 - DNA, 122 bp, Homo sapiens
tccttggccagcccctgaatctcaccatttcctccaccaagctgcagcccctttcatctgcgacaccagtgctctgggatccctgcctaagaactcggtctgccttacccagctaaacactc

SEQ ID NO: 342354 - DNA, 122 bp, Homo sapiens
cagccgcgtcagcttcgagtcacggtaggggacgtgcttacagcgcccgtccaccagcgccgagatgacattgcccagtgccgagagcgacaggttgatcttggtggcctccttgagccgct

SEQ ID NO: 342355 - DNA, 122 bp, Homo sapiens
cagaagcctgtgtggccttcccggcggctgattcgagggcttgtttggtcagaaggggggcgtcagagaagctgccccttagccaaccatgccgtctgagggtcgctgctgggagaccttga

SEQ ID NO: 342356 - DNA, 122 bp, Homo sapiens
cagggtgcgggaaacgggtgcgccatgagatagaagctttctgcttccacccactccaggcgcccagtctttctccagcacctcttaagctagccccaggactctgcaaggtacccgaggac

SEQ ID NO: 342357 - DNA, 122 bp, Homo sapiens
gtgcggggggcgcacttctgagacggaagagcatctaggagctgaatcctccacgcgggtcgcccaggttgatctgaatttctggggaatggcttggctgcccgcccgggaccaggccgacc

SEQ ID NO: 342358 - DNA, 122 bp, Homo sapiens
ccggcagcgtgtccaggcagacagtgtcccggggcaggcgggcacccaggcgccgcagctcggcacacagcagggggaaatcataatcaaagccattgtgggccacaaggcagatgggccct

SEQ ID NO: 342359 - DNA, 122 bp, Homo sapiens
gtgagggttctggtgcctagcatcaatgctacataaatgtagggttcagcgtcactactgcgctttcccccacacttcaccctgtctgcaaatgagtgaccactgctgtcagtgtagtcttg

SEQ ID NO: 342360 - DNA, 122 bp, Homo sapiens
caatcagagtcgccggggtggggcccggccaactgtttatccgcgggtcacattgccgttcgcctcagtctttggcccctcccgccgggtgaggttggcaccccgtttttcctgctctgaga

SEQ ID NO: 342361 - DNA, 122 bp, Homo sapiens
aaatgattgggtataaagttagagaggtaggagattaggaaggaaaagaaagggggaaagcgagatagacatagcaagatggacacacagcatcacagatttgctcacaccaagaaaagtaa

SEQ ID NO: 342362 - DNA, 122 bp, Homo sapiens
agcaggagtccaggcctgtctggagagaagaactgggaacagtctgctttctcctggcaccgtgactgtggactctattggtgtaatggaagctagtgctgggctcctcagggatccaaagc

SEQ ID NO: 342363 - DNA, 122 bp, Homo sapiens
attagggccccggttctggcctgggccaccaagggaaggggggtgccacccagaggtcatcgtgtgtctcacagaggctgagatgtaggatgacaatcagtgtgggcctcggccagcccctc

SEQ ID NO: 342364 - DNA, 122 bp, Homo sapiens
gtcccatgtctagctcagctgcaccccagggtggcttgcagaatgcatggtgtccactgccgggtatgttttataatctcccctctgtttgtccaacaagcagagataacctttcttctctg

SEQ ID NO: 342365 - DNA, 122 bp, Homo sapiens
cattcatatgaatgactaatataagactctgaaggtagattctggaggagaatgaaagagcgatcactagaacaaaagacaaagccacccagtatcgccaatgagctcggagcccagtaaat

SEQ ID NO: 342366 - DNA, 122 bp, Homo sapiens
actcgctgcccctggctccgcatcgtgcggtggattcggggcgcttctccgtgcgcagcgcgaagcagcagcgcctgcacacgccagttagtacggatggaaggtgtgcccccaagggaggc

SEQ ID NO: 342367 - DNA, 122 bp, Homo sapiens
aggagcagctaccgaagcgactgcagcctcttcctcctcttcctcctcctcctcctcctccgccactgctaccgccaccaccgtggtagccgcctccgcgccctgcctccgccccgtcccct

SEQ ID NO: 342368 - DNA, 122 bp, Homo sapiens
agcaactgaactaggccagagcaaccgaactaggcagaatcgaacagaatttggcgcggtcgggctggccaggctgctcaagagtcaaagtgggccaacatggtgagaccctgtctctacta

SEQ ID NO: 342369 - DNA, 122 bp, Homo sapiens
cccatctcctgcccaacacactgggaaaccacaggaaggaaattcattcccaggcagggccgtgggagctgggacagccagactaagtcctggggcgggtgtgaccccgtggccacaagcgg

SEQ ID NO: 342370 - DNA, 122 bp, Homo sapiens
tgtccctgtctgactcagcttgagagactgtttcctatgtgcatcccaagtccttctccacggttcagcacagttctggtgcacagagtcatccctggctgctgtgagtcactgggaatatc

SEQ ID NO: 342371 - DNA, 122 bp, Homo sapiens
tgaaattccctcataagcacattttccttttacctcaaaacaccgctctcagaccagaaacgtccacacccgccctccgatggcctgtcgccctggctaggttttagggtcagtgggatcct

SEQ ID NO: 342372 - DNA, 122 bp, Homo sapiens
cttagcaagccagcttatcccaacttcctctggctgctttgttctagcagcactggcaaccgattggatggtgcccatccacattgagggtgggtcttcctcttccagtccactgattcaaa

SEQ ID NO: 342373 - DNA, 122 bp, Homo sapiens
gcgcagccgcaaagagagttactctatctacgtgtacaaggtgctgaagcaagtccaccccgacaccggcatctcatcgaaggccatgggcatcatgaactccttcgtcaatgacatctttg

SEQ ID NO: 342374 - DNA, 122 bp, Homo sapiens
tggggctcacctggagccatgtgctgctcccggcaggttctgcgagatggtgcagttccccggcgacgtgaggaggcaggccctcctgcagctgtgtctgctcctctgccaccgtttcccgc

SEQ ID NO: 342375 - DNA, 122 bp, Homo sapiens
caagagagcactctcgaggagcccgcaggcggggctcggccggggaccagcagggcttgtcggcgcccaggctctgccccctacccgaccctgcctgccgcttgccgcctgcctttggctag

SEQ ID NO: 342376 - DNA, 122 bp, Homo sapiens
ttactagacggtattctcagacgggccgcctccattgccaatgaaatcttccagcggggtcgcggtaggcgggccgtggaccctctggtataaggcggtcccgggggagtgaggagaaaggg

SEQ ID NO: 342377 - DNA, 122 bp, Homo sapiens
gtagcagctgctgcacttctgttagttgcaggcagccaactgttgaaaccctgttcaaatcggcaaacgccaggctgcaaccaatagagctgtctctgtacctcacttctgttttctgtacc

SEQ ID NO: 342378 - DNA, 122 bp, Homo sapiens
ggtttcgctccaactctgtcctgcccctgatgtcacaggcacaacttcctgaatctggctcgccgttccgcccgctccaggggctcggcccaggctttccaccctgggccagcccacctcgg

SEQ ID NO: 342379 - DNA, 122 bp, Homo sapiens
gctcctcacttcctagacgggatggcggccgggaagaggtgctcctcttcccagactgggcggctgggcagaggggctcctcacatcccagacgatgggcagccaggcagagacgctcctca

SEQ ID NO: 342380 - DNA, 122 bp, Homo sapiens
atggaaggctgtttctccccggtttgctggaataaagtctctgtcttccaaattccttttcggagaacttttgttcacaagattaaaaaggtcacgcagctggtgacggagcctgggttttt

SEQ ID NO: 342381 - DNA, 122 bp, Homo sapiens
gttctatcagacgcccagtgaccccgggaaagctgcgtgtggcatctccagctacaggcccgaggcccgcggttcccacctggaccccgtcctgcccaccttgcctgccctcagtcactgcc

SEQ ID NO: 342382 - DNA, 122 bp, Homo sapiens
cggtgcctgttcttggccctgcagagagctgtgggcggttgttaaggcgaccgttcgtgacgtagcgccgtcaggccgagcagcccccaggcgattggctagacaatcgaacgatcctctct

SEQ ID NO: 342383 - DNA, 122 bp, Homo sapiens
gctatgcaggtgtgtgttagtaatgttctaacaaagtcctggctgagtgcatggagataccgtctctgccctcaatgattcagagcaaacacactgctcctggcagcgtccacttttcgagc

SEQ ID NO: 342384 - DNA, 122 bp, Homo sapiens
ttcttgttactgaagttggaaaggtccctcctccctctgcatctccaaaccaggcttctgcgttgccttgttctccggggctttgctgtgactcttacgtactcttcctcttgcagcttcaa

SEQ ID NO: 342385 - DNA, 122 bp, Homo sapiens
cgagggtcagctgcgactgcgcgccgggaacggtggcctgagcatccgcgtcgtcgctttcgactcacggtccccgctcactggatgtagataccgtggaggccagaagagacgaataattc

SEQ ID NO: 342386 - DNA, 122 bp, Homo sapiens
aatcacctctgataaagatcacagaagctgcccgggaggtgtttggtaagcttggagttacgtttgtggggtggatgggcagaagtcagatttcatagcactgaggatgcagcacaaggaga

SEQ ID NO: 342387 - DNA, 122 bp, Homo sapiens
ttcttggcttcctggaatactaatctttggtaaaggaagtttctcactggtctcctaagccggcagtggtctgaggcatgccaccatttctttgagctgtgatgtgttatatcatcttcttc

SEQ ID NO: 342388 - DNA, 122 bp, Homo sapiens
acccactgcacgggccgtgagagcagcacccaggcctccgaggtgtccctagggtggctccggggcctggctctgaaaaggatggcccgcttctgcccagacgctgccctggtcacgctcac

SEQ ID NO: 342389 - DNA, 122 bp, Homo sapiens
cagggtgcctggattcaaatctgatgcctgcctgttacagctgtgtggcttttggcaggccgtttagtctctttaagcctcagcttcctcagtctgtaaattagagatgatggaatgcttgc

SEQ ID NO: 342390 - DNA, 122 bp, Homo sapiens
tgtggaaggagagggtcccggaggttaggctggggcccccggggaaggctgaaaaagctgcgattcctcagctgcagcagccaagttgaatggcctggtgcccttgtttccctgctgagtgt

SEQ ID NO: 342391 - DNA, 122 bp, Homo sapiens
cacctaaagtctccgcgcgtcagcgcgcgtcagcggcccgccgcccaatcgccgcgctgccgcgctccctggactcctggcccgcgctcgctttggtatatttccgacctgacgtcacgagc

SEQ ID NO: 342392 - DNA, 122 bp, Homo sapiens
ccgccgactctcccttgggtcccctgagagcagagccgttggacttcctttgggactaagcgcagggagacgctgctccctgacggggggtgaagaaagtgcaagggcttggggaggatcct

SEQ ID NO: 342393 - DNA, 122 bp, Homo sapiens
ggactcccgccttagtgggcggagttgtgccgcgtctgatgcgcagttccctttatagcgcggcaagccgaatcctagaggctaacccggcaggtgggagggagaaagttgctttctgcacc

SEQ ID NO: 342394 - DNA, 122 bp, Homo sapiens
atatttttcaccacctggaaaacaatctacctgaaagcagattcctagtgctcattactgcgaggctgggctcatcgcagccattgtcatgcaagcacagttgtaagtaataatgtggcctt

SEQ ID NO: 342395 - DNA, 122 bp, Homo sapiens
tcagtgcgtgttagcgagcagcgccgggagatagctgtcaccgccgcccgctcacagatgcgtagactgaggctcaggtgtcaccacctgaccaaggctagttccgctacaaagctgccgac

SEQ ID NO: 342396 - DNA, 122 bp, Homo sapiens
catgctgtgacacaaatcaaaaggttgataactttgtaattttactctggagattctaaccgaagttggtgtaagttttcaagagttactaaaatcaagttggaaatgatttacgtacactt

SEQ ID NO: 342397 - DNA, 122 bp, Homo sapiens
ggtgggaaaaaagagagggggcggggagagcggtgagacacagccaagagccatgagcggcgcctcctcgcctgccaatcctggcacctgtgcgccgagccactgcaccgaggaggacccta

SEQ ID NO: 342398 - DNA, 122 bp, Homo sapiens
tcgtgtcatgcagcagaggctgtctgatttatgtatcaggaaccagcaggttcctgaacccgcttcctgtatcactgggactttttctgcttgtgtcttgaggattgctcatctcccatgag

SEQ ID NO: 342399 - DNA, 122 bp, Homo sapiens
tctcagcagccctgcttcgattatccggcttttggattctccgttgtcctgggaactatccgggaccccctcttgcttctccagcccctgccggcatccacaggctggtagcgggacgggga

SEQ ID NO: 342400 - DNA, 122 bp, Homo sapiens
aattgtacccctcgtgctcccagagggcagctccatggaaaccaaaacatcacaaatccccgaaggtatcgcgagaagcgcagatgcgcctgaggccgtggagaggcggagcgagggcggga

SEQ ID NO: 342401 - DNA, 122 bp, Homo sapiens
ggaaaaaaaatttcagccggattcaacactgttgcggagaagatcgtcttactccttcggcgctggcgatggcactgcagcgcctgctttcaatctagctcgcaacctcggctcctacagca

SEQ ID NO: 342402 - DNA, 122 bp, Homo sapiens
cctggcgcgagttcgaagctggagagggctgtaaaatagattggggggcgggggagaccacgtgattttctggaacgctggctcgcctctttattttgattctcgagtaaacttacaatccc

SEQ ID NO: 342403 - DNA, 122 bp, Homo sapiens
ccaggcctccttctctggagacccggttcccaggggacgctgtgcggggacaggcggagccggcccttggagcccggcgcgggcagaggcgccgcggagacaacgcctccgacggcaggggg

SEQ ID NO: 342404 - DNA, 122 bp, Homo sapiens
ccctctatgagcggtctgagctgtctgagctacagtgctacaaaccaagacaggtgtcaccgtaggtccctaggtagtctcaaccaccccctttctaatgctgtgaagccaggttttctctg

SEQ ID NO: 342405 - DNA, 122 bp, Homo sapiens
tgggcacggtggctcgtgatggtaatcctagcactttgggagcccgaggcgggtggatcacgaagtcaggagtttaagaccagcctggccaagatggtgaaaccccatctctactaaaacta

SEQ ID NO: 342406 - DNA, 122 bp, Homo sapiens
cagagtataaaagaactgcccacgccagctattgtactacgcagcttcgaaactcctgcacgctctcctgtgtggctcccgtccgtgatgggactgtagttgaggagctcggtctcaaatgg

SEQ ID NO: 342407 - DNA, 122 bp, Homo sapiens
gcccgagcaagtataatgaaagaaacccaaggaatttccacctccagcatcctgggaccacggacaccaacaatttccagagataaaaataagagataacacattccgagaagtcaagtgac

SEQ ID NO: 342408 - DNA, 122 bp, Homo sapiens
cccccttcttgatggaacttctcccaacttccagtgatttgtctggttttgaaaatgagacgggacagcagtggggctgggaagagctggaaagagaccatgtgtcaggcttgattcctata

SEQ ID NO: 342409 - DNA, 122 bp, Homo sapiens
cactcttttgagggtagactacatttcccagaaggttcagcggtttgagtcagcttttcgcgcgaacttttcctccgccagagcttgtgggactgtctccctggccggggcaggggtgtaag

SEQ ID NO: 342410 - DNA, 122 bp, Homo sapiens
tcacgtggctcgcgcatgtttaacttcgtaagaaagcaccaaacggtcccaccaggtggccgtgccatgggcatccgcatctcaaactgcgagggccttgggcactccacatcttcacggac

SEQ ID NO: 342411 - DNA, 122 bp, Homo sapiens
caaacctcaacgcttagcctcccggcacctcctagggccggaagcttctcagcccaaagccgctgctggctgcaacctccgtcccgcagtccaattagcagccgcgacccggcgcccgccca

SEQ ID NO: 342412 - DNA, 122 bp, Homo sapiens
aacgaagaaagcccaacagccccggcgcacccagcgcaccttcctccggggcacgctctgcgccacctaccggatgatgctgaggaactgggtcatggtcagctcctgcgggaccaggaact

SEQ ID NO: 342413 - DNA, 122 bp, Homo sapiens
gcgagacgcggggcctggctgctaggaggtggccacttagccggggtgcccggcgaagcccgagcccaggggctgccagaaacagctgtctgaagcatgtgcgtggttcccggggccatgtt

SEQ ID NO: 342414 - DNA, 122 bp, Homo sapiens
ctcggacgctgacagaagactgcgccgctgctttgggattggtagctgagttttgtgtcgcgccttttctgacgatgcgaacaacatggcggcggaaagtggtagcgattttcagcagagac

SEQ ID NO: 342415 - DNA, 122 bp, Homo sapiens
aaaaaaagacaatgactttggagcacagcctagtaagaacctggcgtttgcctgtcttttcgacattgctgatgctcttgagggcatcagccaagtcgttcatgtgcaccattgtggtggcg

SEQ ID NO: 342416 - DNA, 122 bp, Homo sapiens
gggcggtcacaaggaaatatgattagaggacaaagggtgtggtctaatggtactgaactgcgggtggggggggcttagcaaaacctgtgtgttcacattcttcttggtatctctgtgtcttt

SEQ ID NO: 342417 - DNA, 122 bp, Homo sapiens
atatggagaggtctggagaagttagcacacctcattgagccaagcaagaaacaggggcctcgggaaaaaaaaaaaaatcccaagtaacttaagtaaaaaatcccaagaaaagttaaacacat

SEQ ID NO: 342418 - DNA, 122 bp, Homo sapiens
cctgcgccgccgggcacagatgacaagtcctccaggaagccagagcgaccgtttccgctacgcgacggggaagggcggggcaagaacgacgcctggaggaaatagttgagggagaggaaggg

SEQ ID NO: 342419 - DNA, 122 bp, Homo sapiens
aggggtgagccagacgctccagtggtgcagcgcccagatatcgggcgtgcagtcgaggtgcgcgcacagccgcaggaaatggcgcgggtcccgggcgcaagcgggcgcagcaggcggccagg

SEQ ID NO: 342420 - DNA, 122 bp, Homo sapiens
ttctgggcaaaggaagccctgcttgatgagcatgaggctccacgggggcagtggctgtgacggtgagtgccacacagagctgcccacactggtggagggaaggcagggagataccaggacca

SEQ ID NO: 342421 - DNA, 122 bp, Homo sapiens
agcagcagactgcgcccgccccagagaacttccccacgtattctccactgaggccccgtccgaccttatcgcgggttaacagcccaggatgttgacttgagctggcttggtcggctacaggt

SEQ ID NO: 342422 - DNA, 122 bp, Homo sapiens
actccgtgatagttttattttctcttttgtaaacacgcttaaaattcagtgcagggggagcgcagtttgctctgagatgtgaagatcaaatgataccattaatagtctaatcatgtaggaga

SEQ ID NO: 342423 - DNA, 122 bp, Homo sapiens
ccagggagcagctgcaggggcggctcgtagccccaccatttaaagagacagcagcgagaccgggagccttactgcggcggaggcttccgacggaggcgggaggcgggcgcggagttgccgag

SEQ ID NO: 342424 - DNA, 122 bp, Homo sapiens
tcagaggtcacacaagccacagctgtaaacgctcatcaaagagcacgataggccactcgacgagttctgccgctagtgacagggagagaggccagttccgccccgatcaaccacgctggcct

SEQ ID NO: 342425 - DNA, 122 bp, Homo sapiens
caccctgggctctgtggccagaaaatccaggtcttgatttcgcttgggccattgcagacacgcagccaggtcgactggtcctcattcactccggtcatgcaaagacagagggaaaacctggt

SEQ ID NO: 342426 - DNA, 122 bp, Homo sapiens
ttattttctggttcttctcagaatgttacttgtaaatggtatttgccttgatacagatttcggtggagaagtaattagtttacaaagaagaattctcagcatgtggatgtaggcttaattga

SEQ ID NO: 342427 - DNA, 122 bp, Homo sapiens
acaaaatcccccatgaaatcctcccttggctcagtgattctttgcatcttaatgttactccgtttcttctctaaatacctcaattttctggactggaagagagctgggtatttgtttaatta

SEQ ID NO: 342428 - DNA, 122 bp, Homo sapiens
ccgctgactgacattctaatttcacagcgggcttatctccccctcagaagggtcttcagccgcagcagggccttccgtttttgcttaaatcgctctgacctttttatcaagcagttcataaa

SEQ ID NO: 342429 - DNA, 122 bp, Homo sapiens
tgctagaagatctgacttgaaattttgtttctttatatgttgcttgtctcttgtttacagcggatagcatctttactcagagtagggaaatgttcatcatgagggtaattgtttttgtcttc

SEQ ID NO: 342430 - DNA, 122 bp, Homo sapiens
gggcagctagtctattcagacagagagttacagggtccgtccgaggggtggaggcacaggcggctgtggtggaggggtgctggggctgaggtccagtgagctgcctgcctctgtgtcaagaa

SEQ ID NO: 342431 - DNA, 122 bp, Homo sapiens
agctggacaaaataatggacctccacatgctcacatgcttacagtgcaactccacccttccgtatgaagagacttcatgaagtcattggatccttttgaaactcttaagttgtaacagcttt

SEQ ID NO: 342432 - DNA, 122 bp, Homo sapiens
ctgctgcttgtgtgttctcctctgtggagataagcctaggatccagaagcttcctgagtacggctgtcagctgtgctgtccttcctccttctgtgctgagcctcctcccggggcaggagcat

SEQ ID NO: 342433 - DNA, 122 bp, Homo sapiens
cctgatgttttgacagtctcctagtgctcctggtagtgccactaagggaaaaccaaggtgcgcattccttctccctggactttaccttacttgttagtctacgccccactgtttccacccat

SEQ ID NO: 342434 - DNA, 122 bp, Homo sapiens
gcagcctgctctgcccagagcttcttgcttgctcagacgaaaaacaagctggacaggccccggagtgcctcatcctgacctccacggggaagccggcccggtgggctttgtcctttctgtgc

SEQ ID NO: 342435 - DNA, 122 bp, Homo sapiens
cagcagagctgcatgttcccccattatttcctcccagtgcatcaggcactttaattaaaacgagttcaccagactctttgaaggtgcagccaacaaaggaaacaaaaacagcaattgccttc

SEQ ID NO: 342436 - DNA, 122 bp, Homo sapiens
cagttggggtagcctggctacaacctctacgcgagttacttccctgaggcttccaaatctcggcctcttacttggaaggaggaaagggcctcaccgtccagggctctagctgcctcatgccc

SEQ ID NO: 342437 - DNA, 122 bp, Homo sapiens
gggcggccgggagggagacgctgagcgagcgacaacagcggcagctcgggaatgggggctcggagcgcggcggccaagttttatgttatgtatattttacaagtaaaaaaattttttcacct

SEQ ID NO: 342438 - DNA, 122 bp, Homo sapiens
tctggggctatctacttagcgcttttgccatttacttcctgagacagactcatgggggatcggggctcaggtgcacctggatgtgaaagccgggaaggcctccctcactcccacacagagcc

SEQ ID NO: 342439 - DNA, 122 bp, Homo sapiens
gtggtgggcgcctgtaagcccagctactcaggagactgaggcaggagaatctcttgaacccgagaggtgaagattgcagtgagcccagctcgcaccactgcactccagcccagacgacagtg

SEQ ID NO: 342440 - DNA, 122 bp, Homo sapiens
cattggtggtggtgccaggagaggcggggcgctggcagaaggccgcgggctctcattgggcggtagcgcaagtcgggtggcctgactggcaggaggcagctgcagaggggaagggagctcgg

SEQ ID NO: 342441 - DNA, 122 bp, Homo sapiens
gggcgccgccttttaacaccgaccttcttgtcgttaaggacacacggctgggagcggctgcgggaaaggccgctggagcgtctcgccagctctggtgttgaggcaggtgtgctgttggctga

SEQ ID NO: 342442 - DNA, 122 bp, Homo sapiens
gagcgagccgccaggctatgaccccaggggctctgctgatgctgctgggggcgctgggggcgccgctcgccccaggtaagtgtaggccccgaaggggcagtgacggggccagcggtcgtggc

SEQ ID NO: 342443 - DNA, 122 bp, Homo sapiens
gacccctcacaatcagtgatcgggaaccacctgccacaatcactagggaagtgacacagccgggaaactccgcccctcacacccccgcgcgctcgcgccggccgcagccccacagctcgccc

SEQ ID NO: 342444 - DNA, 122 bp, Homo sapiens
gtacatttattattgtaatatatactattatgcagcttattttacctgaaactgttaagccgaccaagatccctccctgcaagacagatgggaatgtgtataataactaggtatttgagaag

SEQ ID NO: 342445 - DNA, 122 bp, Homo sapiens
acccaaggactaaccctgtgtcccagccacctggcaccttctattctcacctaaagcacccggcccttgtacaaattacctaacagtttctatagggcatggtaagagtcagctctataaac

SEQ ID NO: 342446 - DNA, 122 bp, Homo sapiens
catcagcatcaccccagcatcacctggtattgccgggccccgcccccagaggatctgattcgaaaggccagggtggagcctgagaatttgcatttccaataagcacccagggactacacttt

SEQ ID NO: 342447 - DNA, 122 bp, Homo sapiens
agtttgacaagttccggatgttcattggagacctggacaaagtggtgaacctcctgctgtcgctgtcaggccgcctggcccgggtggagaatgccctcaataatttggacgacggcgcttct

SEQ ID NO: 342448 - DNA, 122 bp, Homo sapiens
gtaaaggcaccaggcggaagggtctggcggagggttggccgctgtctcctcactcctcagcggggtcctgtcttccgacttttgtctcgcgccgccgcagcctgtggactcctgggccctcc

SEQ ID NO: 342449 - DNA, 122 bp, Homo sapiens
tgttactgctgaggacagacctgacggcagtcccggtaggtcagatcccgggggcacccgcgagacctggggcaggaggtgggcaggtgccaacctcgggcacaactccagtgcgcagcgtc

SEQ ID NO: 342450 - DNA, 122 bp, Homo sapiens
ggtgtcaccatgttgcccaagctggtctcaaactcctggactcaagcaacctgcacatctcggcctcgcaaagtgctgggattacgggcatgaaccaccgtgccccacaggaatgtatatta

SEQ ID NO: 342451 - DNA, 122 bp, Homo sapiens
acctgggtttctctggctgagtccagggcttggcgctaggttagaattcaggctgagccccggggtggcctccttttgtgtcccgatcctagtctggcccggtttccccttcccggattcct

SEQ ID NO: 342452 - DNA, 122 bp, Homo sapiens
ctgatggcctgtgtgttcggtgccactccaggtgctgggcctgtcccagggcagcgtcagcgacatgctgtcccgaccgaagccatggagcaagctgacgcagaaaggccgagaacccttca

SEQ ID NO: 342453 - DNA, 122 bp, Homo sapiens
tacaccccccaacgctcaacgtgggccaaaatatttctatgacctgttactattatcggtcgtgccaagaagcatattttgtcgaacttaattttgaattcgctatactggatattgtttcc

SEQ ID NO: 342454 - DNA, 122 bp, Homo sapiens
acccaggtctatctcacagccacagcatagtattttcttttttttcttgctgtgactgcacgttacgccatacatggcattcaggacgcagaggaattagtatttactgtttttaacattcc

SEQ ID NO: 342455 - DNA, 122 bp, Homo sapiens
ggagctgctatacatggttccggcttgacgcggatacctagtgacacttggcggccaggccgggcagacttccgggtgggtgatccctggcgctgtgcggagccattcgctgcgctgaagca

SEQ ID NO: 342456 - DNA, 122 bp, Homo sapiens
ctaccgctccagtcgcgctgctatctctccatcactgccaacaaccgcagcaaggcgagccgcgttcacgtggctccagcctccagcatacggccactgactcctgattcctagtcctctac

SEQ ID NO: 342457 - DNA, 122 bp, Homo sapiens
ggggaagcctccgttagggcccctcgggggtgggggcgtcctcgtggcgcttgggcccttcgtcccgggttaggacggcccgtgtccttgtgcgcttgaaggggccgccccctttcctcgag

SEQ ID NO: 342458 - DNA, 122 bp, Homo sapiens
atattcaaggctgaggagccaagtgaagtttgggaaaatcagaatatgaaagaaagtccccgaggaaggtctgaggactgaagtagaccatatttgcacagtgaagtaaaaagaacattgat

SEQ ID NO: 342459 - DNA, 122 bp, Homo sapiens
ggactctagaggctttggagggggcctgagggctgcggggcgggaccgagcagggcggggcgcttaggtggcctcgggggaggcggggcttggaggctccgcccctcaggccccgcctcctc

SEQ ID NO: 342460 - DNA, 122 bp, Homo sapiens
accgtgctaggcagcttcgcagcccggctggctggtggggctgcctgcacgagagcagcccgctccccagcaccgccgatggcaagcccgactccagtcagaggcctagcaccttggaccag

SEQ ID NO: 342461 - DNA, 122 bp, Homo sapiens
cggccccgggggatgtgtctgctggaggccgttggggagtggagcctggcccatgcctcccgacagccctgtgatggccactgccctatgcagacctgccccaggtggagatcaccaaggcc

SEQ ID NO: 342462 - DNA, 122 bp, Homo sapiens
tcacacagctgagcctagaaaccagatggtctaattctcagagcctctgccttcctgttccgcaggtgttcagctgctccttgctgaggaccttggtggctgggggaggagcatggattggg

SEQ ID NO: 342463 - DNA, 122 bp, Homo sapiens
acagcctgatcaaggctgaggtgcagctggccttcctctcccctctggaggaagtggacacgatgactgggggccaggccctttctgtgcccaatcctgcatgatcttccctgcaccctccc

SEQ ID NO: 342464 - DNA, 122 bp, Homo sapiens
cagggacaccttcaagccagcagccagctagcagggcaggtcccttggttttctaattgtcgctgccaatgtctgttggaacaaggctctctgctgagcatgtgtgccatctcctctgcacc

SEQ ID NO: 342465 - DNA, 122 bp, Homo sapiens
ggacaatatggtgaaacctcgtctctacaaaaaccacaaacagccaggcatggtgatgcacgcctgtagtcccagctacgcgggaggttcaggtgggtggatcacttgagcctggggaggta

SEQ ID NO: 342466 - DNA, 122 bp, Homo sapiens
attcacatcccccaattcctgatcatgtttgtctacgtctggcgatacctgaccagaagacgtccttatcttctatcctctccctttcctttgagggagaagtcattttggtaaaatttgat

SEQ ID NO: 342467 - DNA, 122 bp, Homo sapiens
gggcagcggggctcggggattggccgcaaccgagagggctgggcagaactataagaggcgcggagggggcgtgcagcagagtgcgttcctcgtctgccagccggcttggctagcgcgcggcg

SEQ ID NO: 342468 - DNA, 122 bp, Homo sapiens
tggttccctaaggggggcccaggaccagctcagacccttgccaaaatggattccagactccgtggaggcctgctgagtcagaccactggaagggaggccccacgtccgctgccactcctggg

SEQ ID NO: 342469 - DNA, 122 bp, Homo sapiens
gccttggagattccgccgggctagcggctaccgggagaaggcggtggaaactgtagagcccgcggctctgattggctacctcagagcaaggggcggggcggcggaggacccgaagggcgcga

SEQ ID NO: 342470 - DNA, 122 bp, Homo sapiens
tccctgtaaacctgcagtcagaaaggtatttgaattttccccctctagcacttgcaaatccgatttttatgtataactaagtgctcttagtttttactctatctactactggggcctggttt

SEQ ID NO: 342471 - DNA, 122 bp, Homo sapiens
cgcccccacgacggctgtgggcgcagagcccagaggatggagcctccccttcctgaaacccgctcgaagctcggaaagccccggcccctccgcgcgggctgcggcccccaggctccttcccc

SEQ ID NO: 342472 - DNA, 122 bp, Homo sapiens
tctacctcgggacttctgtaagtatcataagagatgttttatatgacaacacttcacaaacgtttagtaaaacgctgcaaaatgtttgtagctggctataaacaagatcatgcagattgggt

SEQ ID NO: 342473 - DNA, 122 bp, Homo sapiens
gctagccatgttgttgtggcataagaggttgtagagaggagacaggcatggaagaagatccggccgagagataggatgctcaaaggcctccaggcaggaaagagctaggtggtgtgtggatt

SEQ ID NO: 342474 - DNA, 122 bp, Homo sapiens
cccaccagaaggaagaaactctcaacacatctgaacatcagaaggaacaaactccagacgcgccaccttaagagctgtaacactcaccgcgacggtccgcagcttcattctcgaagtcagtg

SEQ ID NO: 342475 - DNA, 122 bp, Homo sapiens
tcccctgagactaactggacactctaggggagggacctgggcatcagtttgcattttaaacgccctgtgggtgattctaacatgcagctctgtggtcactgttccaatcatccaactcccag

SEQ ID NO: 342476 - DNA, 122 bp, Homo sapiens
gaagggcggaggagtgtgtcgggagatgtagttccgcgagtcccgacagcaaagctgtcccggctccgctaatagattgggaccactactcccaggagtctgcgcgcccgaccggagcgtcc

SEQ ID NO: 342477 - DNA, 122 bp, Homo sapiens
tctcggcctcccggggagaatttcacaaaattctctgattatcttgttataatactgttacgtaggctgttgttttgattctgatactggtctcttgtgttctttaatcttttttccttaat

SEQ ID NO: 342478 - DNA, 122 bp, Homo sapiens
ctctgcctggtccccacttaggaacacctcaatgcctcagttttcccctttggaaagagacggaattcacttccggacactaacagggattgttttaagacccagctgcttcctagaatgac

SEQ ID NO: 342479 - DNA, 122 bp, Homo sapiens
ctggctggaatggaaactcattgcgagcagagacaataggttttgctctcccgcggatcacgtcccagcctccagctcagcaccagacacttgagggcgcaggataaaatatctgcagtcag

SEQ ID NO: 342480 - DNA, 122 bp, Homo sapiens
acgctactctaggagcccctgggcatgatggaagttgtagttcagacgatggaaggccaccgttgcctgggaaacggcttcccaaatccccgagaaagggctgggaacttgccttacagatt

SEQ ID NO: 342481 - DNA, 122 bp, Homo sapiens
gagccaggaaagggggtgtgtagtcacctcggccaaaacccggctttgggcagaaacatgcgccccagcttctttccttagctgtctccaggaaccggatgttgcagattctctgagcagtt

SEQ ID NO: 342482 - DNA, 122 bp, Homo sapiens
tcaagctgagaccagagggacaagccacaggaagagaccaagtcaggaacaattttacaacgttccagaagccaacaggacagtggggctggagctgactgggagggataggggctgcgaga

SEQ ID NO: 342483 - DNA, 122 bp, Homo sapiens
ctccccgagcacagcctttgtggggcctacggggcagtaggagacaggacgcttgtcctgcggaatggcaaggaatcagctctccatttcagggcaaagtggggcctggattgtgggccttg

SEQ ID NO: 342484 - DNA, 122 bp, Homo sapiens
gcacggacaggccatctctagtctttgctaagcgagagtcactcacaactctgcagccaccgagaggaagacttgcagccccctgctgcacagaaacgccagcctcgctgcctggaagcaag

SEQ ID NO: 342485 - DNA, 122 bp, Homo sapiens
gtctaagccctttatcctggatgccttctaaccttaaccacttgcttctacagggcccagcgtgtgaggcggccgataccagggtcagatcagaccacaacgatgagtgggggggaaggaga

SEQ ID NO: 342486 - DNA, 122 bp, Homo sapiens
caacacgcctgtgctctggatcttggttccactgcaggcctctcatcagtcacctcctctcgatttacagctggggaagcaggaaaagctggtgtgaggctgacggtaggaaataaagggat

SEQ ID NO: 342487 - DNA, 122 bp, Homo sapiens
gtggtctatgattgtttattgttttaaaagaaattcagttatttatttttttaaaaaagacggaattacctgatttgtgcctggatttactgatagtaataagagtgatgatggttttgttg

SEQ ID NO: 342488 - DNA, 122 bp, Homo sapiens
gaaggcagcttaggcaaatgggggcgatgcggtttgcctgactctctgcctgtagaaacacgcatcatcattctaatgagaaccttggggaacaagaaaacatcatagcagcacaggaggta

SEQ ID NO: 342489 - DNA, 122 bp, Homo sapiens
ggagccagggttgcaggcacgttgtcattgggtgaaatgagatggcagaggaaaatggcacggtgtggaggctttttttgtcagaagctctggggtttggctcttctctgtgccatgtagtt

SEQ ID NO: 342490 - DNA, 122 bp, Homo sapiens
gattccgtgcccgcctcgcaccctggccagcctgctgagtccggtggttttgccaggtgccgcccatggaggttccgtagaaggaacgtgctcaccaacttgcgcaaccgcctcgaccaaac

SEQ ID NO: 342491 - DNA, 122 bp, Homo sapiens
ccggggaggagcagaggccggccgaggcggagcgggggcggggccctcagcaggtgaagacgggaggaggggacccgggcactcagggctccgcgagggggcgtcctggcccctcccgcttc

SEQ ID NO: 342492 - DNA, 122 bp, Homo sapiens
ggatcggggctcctgctccagcggccctacagggatttcgggaagtaccatgtgcaccagcgccttgggaccaagactcaatggtgtgttgtagtcattaacagtcgccttaaacagtcgac

SEQ ID NO: 342493 - DNA, 122 bp, Homo sapiens
catctctcacccaaggtttattagaggaaagtcaaatgctgggcatcagctacctagaagcgatttttgaattagcctaagaacggggaaacacggacaggaaagtgccatccctcaagtta

SEQ ID NO: 342494 - DNA, 122 bp, Homo sapiens
agctaggagcgaggggatagagccaggggccgcgttaggagcgaaggatggagcccggggcgcagagaggggtaagaggtggaagctggcgagggataggggctgggggacgtgctagggac

SEQ ID NO: 342495 - DNA, 122 bp, Homo sapiens
ctgtgtctgccgggctgggcgggggcggcgggccgatattcacttggcgaggcggggctacgcccccttccgcccggctgtggcggggcaggggcgaaggccgaggggaagggagggtcggg

SEQ ID NO: 342496 - DNA, 122 bp, Homo sapiens
ggtggcggctgggtagagatgctcctcacctcccagacagggcggccgggcagaggcgctcgtcacatcccagacgatgggcggccgggcagagacgctcctcacttcctagacgggatgac

SEQ ID NO: 342497 - DNA, 122 bp, Homo sapiens
ctgtgttgggggcccagtcggtcaagcggttgaggagggttgtaggcctatgccaggtggcgggggaccttgagtccaggcccccatcctcatgggtccagccacagctcctcctgggcatc

SEQ ID NO: 342498 - DNA, 122 bp, Homo sapiens
tcgtgcggtggcctctcctctcaccatggtggcctggaggcacccagatttctctggccacgcggcgctccaagtcaggagtcagcgcacaagccacgcgcggacaccagaacagcctggag

SEQ ID NO: 342499 - DNA, 122 bp, Homo sapiens
ggcgccggcgggaaacgaaacccggagggagccaggcgccagcgggaaacgaaagcgaagcgttgcggggaaacgaaagccggaggcccaggcggggcaggagccctggggctggggcgccc

SEQ ID NO: 342500 - DNA, 122 bp, Homo sapiens
agaggagaaacccagctggccaatcggtttcccgcactcgtcttccgcccctaccccgtccgcttcttaaaggggctagcctatctctgtctgggccccccgatttccacaggcaaggctac

SEQ ID NO: 342501 - DNA, 122 bp, Homo sapiens
aaagcagtgattcacagagcactgcaactgaggacactcccttcactttgagagctactgcgggattggggtcaatgagggctggcatcaagatgaagggcagccaggctcctccctggaga

SEQ ID NO: 342502 - DNA, 122 bp, Homo sapiens
tcagggcctgagggagcagggcagcaaacgttatccaatcaggactgctgggctgggaaccgtccaatcaggcacgcagctggagcggacaggacggcttccgggatttggcggggcctttg

SEQ ID NO: 342503 - DNA, 122 bp, Homo sapiens
gcaactctttagactctctcacccttccaccctcctcaaatactgccaccgttttgaggccggagacaatggaatttgcttacctaaaaagctccgccccttgatggcgtcacacgaaacca

SEQ ID NO: 342504 - DNA, 122 bp, Homo sapiens
gcggatggagcgcgcagccaggacccccagccgcaccccggggggctggaaaggcgaagtcgctgctttgtgggctcctgcaagtgccaggcgctgaccactcctcctgggagcctaactga

SEQ ID NO: 342505 - DNA, 122 bp, Homo sapiens
ctgtgaggattttagtgcaagtcaaaatgtcttagaggactcgctgaagaacatgctcagcgataaggatcctatgctaggatctgcaagtaaccagttctgtttgcctgttttggatagca

SEQ ID NO: 342506 - DNA, 122 bp, Homo sapiens
cttccagagctggaaatattcgagtttggaaagtcccggagcagagccgcatttgcaacacggccatcctgctttagggatgaattgaaactggaaagagagtagtaccaatgagagtgaga

SEQ ID NO: 342507 - DNA, 122 bp, Homo sapiens
gccgaggcaggcagatcacttgaggtcaggagttcgacagcagccttgccaaaatggcatcgctactaaaaatgcaaaaattagccgggcgtggtagcgggcgcctgtaatcccagctactc

SEQ ID NO: 342508 - DNA, 122 bp, Homo sapiens
atagcatatccgggttacccatagcacgtccgggttacccatagatatccacgcaccgcacgttcaggcgacccatagatatccacgcaccgatgttcaggtgagccatagacatccacaca

SEQ ID NO: 342509 - DNA, 122 bp, Homo sapiens
tgcccaatcacgcacaggaaaagaagcacttgacttgcatctctagagccagaaatcacccgattctctatgcagagggtggccatacaccgcagtttgccaggagagtctcagttgactct

SEQ ID NO: 342510 - DNA, 122 bp, Homo sapiens
ctgtgcgttctggtgtcgggttagactagcaggcggggcgggggggttggggcggcggggcgggggagactagggcttatatcagcccagatccaggcaaaaatggtagggagggtgcggcg

SEQ ID NO: 342511 - DNA, 122 bp, Homo sapiens
tttccgacagaggcctgcccgtgattggctgctcgtactatttacgtcctttcgatgttgcgtcatgcagtgcgccggaggaactgtgctctttgaggccgacgctaggggcccggaaggga

SEQ ID NO: 342512 - DNA, 122 bp, Homo sapiens
acctgagccgccgaagccgccacagtccgagccatttttcccctcagctggctcagccgccgccgaaagcttcggccgactccacagccagccaagcgcagcacgtcacttccggacaggga

SEQ ID NO: 342513 - DNA, 122 bp, Homo sapiens
ccgggggagaagattaggggaacactggttaaagaaaggcttctctggggacaagtcactcggccaacacacgaaggacccacagaaaacgtctgttacagctagaacggctgcacgtgagt

SEQ ID NO: 342514 - DNA, 122 bp, Homo sapiens
tagctgtataatagattaccaccaaataatggctgcatactgcaaacatttattatctaacgcagtttctgtgagtcaaggacacaagagtggcttggctggatggttgggctgagggtctc

SEQ ID NO: 342515 - DNA, 122 bp, Homo sapiens
ctcacagcctgaatcccaggctgtatgaataggagaggttcaagtccagatgactgttcacgatgctggtcccccttgcatccctaatcatgctagagacatgaccagggtctgagaggagg

SEQ ID NO: 342516 - DNA, 122 bp, Homo sapiens
gttgttctctggaatcccaacaccctgccgcgaacacactcaggtggaaccccaggtcggcggcccagggctctacccaccggcttcccacgagagctccgtcttaagacttaccgtcgcca

SEQ ID NO: 342517 - DNA, 122 bp, Homo sapiens
tggtatgtctttctttgctttggccaccaggaaactcagagctaaattaggttcaattaacgtaggtcttaatctcagtctttgggtatccttatcttccctgtctaatatacacttagctg

SEQ ID NO: 342518 - DNA, 122 bp, Homo sapiens
ggggtcctctccctgggaggtgggtcttccactggttttccccgccagggctccagggggcgccatgcgattcagcgctgggctccgctgggggccgggccttggaggaggcgaaccgtgca

SEQ ID NO: 342519 - DNA, 122 bp, Homo sapiens
cccaggctgggctgcatcctttggctaagtgacatgtggaggggtccctggctatcatgacgcgtacagccgcgaggcgtcctctgcagcacgacaccgagctccatgtcacactcacgctg

SEQ ID NO: 342520 - DNA, 122 bp, Homo sapiens
cttccgcctggaccctggccaggggctccctctctaatctcagggccaattttggttccccgccctacctcttggtcctaacaatgacaataacaataaacaatattaactattctaattga

SEQ ID NO: 342521 - DNA, 122 bp, Homo sapiens
gaggaggacgaggaggaagaagagagtgaaagctcagactcagaggaagaaagggctcatcgcttagcagaactacaggaacaggtattttgtcactcttgaaagtttttattgggtaagag

SEQ ID NO: 342522 - DNA, 122 bp, Homo sapiens
aagctccagactctggattttcccgtcttcggggttcagcgtgtatccacctcacccggccgacttggccctgggccctttcacccagtggaatcctgccactgggagaagagaaagagctg

SEQ ID NO: 342523 - DNA, 122 bp, Homo sapiens
aagggctgaaaaaaaaaaaaatctatccaggtgaagaggatacaagaaaaactttccagacggtgtagcattcgcaatggccctgaggcaaagaaaatgctgagaacactgtttttctctct

SEQ ID NO: 342524 - DNA, 122 bp, Homo sapiens
ccaaccacctacaccgcagcccgcccacccgcacgcgggggcggggcgggcaggcagaggcgcaggcgcggtgcttcgcagcccgcttccggcctcacacctgccaagcatcacacctgcca

SEQ ID NO: 342525 - DNA, 122 bp, Homo sapiens
aggtgttggcattgaggaagccctggggaatgcagactgtggaagggagcctcgcttgcccgtcggtgggctgggcgggagcgctgaccctggcgcctcggaggagggagggggcgggctgg

SEQ ID NO: 342526 - DNA, 122 bp, Homo sapiens
gcgtcccgcccactccggcgcctgcgtcattttgggcaccatggcaacgaagtaaacaagcgggtaaataatagacccctgacagccagagacccggagaaacaaagacggtgagaaacgga

SEQ ID NO: 342527 - DNA, 122 bp, Homo sapiens
gtggaaggtgcctactagccggtgcaggtttcttctagcgcgtgtgctggggtacctggtcgtcatggaggcggtattgaccgaagagcttgatgaggaagagcagctgctgagaaggcatc

SEQ ID NO: 342528 - DNA, 122 bp, Homo sapiens
agaagtcggggctaggctccaagtacaccaggtcctcatctgtgtgcggcttgaactgtgcgttgcgtggcaccagtgccctggaggagcccacgcggcgtggctccacctcagtggcacca

SEQ ID NO: 342529 - DNA, 122 bp, Homo sapiens
ccaggatcaagcacggctgacacggaagacagcggggtggggggcctgccttggccgtggcgttggggggaaggtgagggagagcttctgtacaaggtcatcttccgtgagggtcccggctg

SEQ ID NO: 342530 - DNA, 122 bp, Homo sapiens
tatgccattcattacagatgctctcctgcagttactgcccttctccacaaggctttcagccgcccagaagtcaattcagggcaaaaaagcgcagtccccacgtagccttgatttgaactact

SEQ ID NO: 342531 - DNA, 122 bp, Homo sapiens
gagccaccgcgccgggcccaatagtgatgtttttactgctctgggcctgatcgcatgcaccgttgtctgtgctgtgacttccgtcgttgtctgtgctgtgacttccgttgttgtctgtgctg

SEQ ID NO: 342532 - DNA, 122 bp, Homo sapiens
attgtgttggccctcctcaaaagagttgcagaatctacctatatgccctgggttttcatgcgcagtataaggtgccatggttagtaatatgcattttcatgtggaaagatcatggactatct

SEQ ID NO: 342533 - DNA, 122 bp, Homo sapiens
gcccctcactgcccctggccgggggctccgagtgcagggcccacggagcccacgcccacccggaactcagttggcctgcaagtgccgcctgcagcctgggttcccgcccacgtctctccctc

SEQ ID NO: 342534 - DNA, 122 bp, Homo sapiens
ctgcggggcagaccgacagagagagagagagtgagggcgagggtgaggtaagcaacgccccgggaaccccggggtccctggctcacatctcctcgccagctcaggcgccttctgggaaaatg

SEQ ID NO: 342535 - DNA, 122 bp, Homo sapiens
tctgtgttggagagggcatctcacaattggcaggactatgcctttaacttttcaagtcctcggacaaaaatctcaacgccatggactattcagaaggctccgaatgttcatcagtccttcca

SEQ ID NO: 342536 - DNA, 122 bp, Homo sapiens
gagggtgatggcatgggaccacctgagcatcctcgcttggttactcagtggtgtcctatccgtaaagtccttggatccaacccccaagatataagacccagaatgcctgtgttgggctcctt

SEQ ID NO: 342537 - DNA, 122 bp, Homo sapiens
tgtacttcccgtcttgcctgtgccgcctcaacatcgtggagcctgcgtgttttgctaactcgagagcccaggtgtgcagtgcattatttttcctgataggcagcattctggttttgtgaatg

SEQ ID NO: 342538 - DNA, 122 bp, Homo sapiens
acatccccatgttccctccaaaagcatcccaccccaggccatgccccccaccccgggccacggccccccaccccgggccacggcctcccccaccccgggccacggcctcccccaccccgggc

SEQ ID NO: 342539 - DNA, 122 bp, Homo sapiens
cttaggaaactgctccagctagtaatgccaccaccaacagccactggaatgaactccaaacggtccttgcatctttgcatctctcacttctggtgcaagtccccaaagtaaagggcatctga

SEQ ID NO: 342540 - DNA, 122 bp, Homo sapiens
atttgctaaagaaaaaaagcagcaattgaactgagcacttactcaaagttttattgcagacgtgtatatgtgtacacaggagtcagctgagaaactgattctcgagatgcttgaagggtttt

SEQ ID NO: 342541 - DNA, 122 bp, Homo sapiens
aagcggagacgcaagcagctggatctccggtaactgagacatagggtataactgttgtcgcggcggaggaagtgaggacggcgccaagggccttccgggccagtgttggatccctgtagttt

SEQ ID NO: 342542 - DNA, 122 bp, Homo sapiens
gcggggaggggggtccgcgccgggagcgggcgggacgggagggggcgcctgccgagcccgcggggacataaacaaaccctcaaatcccccgcgccgccccggccagcccggcccgccgtccc

SEQ ID NO: 342543 - DNA, 122 bp, Homo sapiens
cttaaaagttggattaaaaataaataacccctctttaaaaaatcagattgttggggcacacgttgttgggatctcctgtgagctgtgtcatgggcaaaaagtgataaaattgtttaaaaacg

SEQ ID NO: 342544 - DNA, 122 bp, Homo sapiens
tttcaccccccccccccaaatccttgcagatcggaaacccattcactttctatcctagagcggggcaggcagcagagcaggcagaaggaaaggagttcaaggcttctgtcagcataacacca

SEQ ID NO: 342545 - DNA, 122 bp, Homo sapiens
tgtattaccctcacatcccccagctttctactgctctcccaggaccaaccatttcttccgcgggagtcacattacatcagcattcctaatgcagtatctgttatctaccagattctgtttta

SEQ ID NO: 342546 - DNA, 122 bp, Homo sapiens
tatttaaaaactgccataacggctgcatgaacaaagaaagagcgagggcaggagagctcccggctgcagacagcagagaagctgatgctcgctctcagcggctcccattcagccttcactta

SEQ ID NO: 342547 - DNA, 122 bp, Homo sapiens
ccaaaaataaacagtggagctgccaccatttttcctacactgagtctacccaatgtgccccgggttgtttgtttttcctggctggccccagagcaagaagagatgactgctggtaaagagcc

SEQ ID NO: 342548 - DNA, 122 bp, Homo sapiens
ataatggtgagggtgcagtgagatggtgcgtggtaagcctccccctgtacagtctgtcctcgtcgtggtaagcctccccctgtacagtctgtcctcgtaaagtttcacttccttttcctagt

SEQ ID NO: 342549 - DNA, 122 bp, Homo sapiens
cctgcttgctgatgctgaagtgtggtggagggttgccatcagccaaacacctgatttccacgcggtccccttccttcagcattcccacgggctccacttccagccacactttttctgtcggg

SEQ ID NO: 342550 - DNA, 122 bp, Homo sapiens
gaggtgctacctacccaaacagttactgtgtgattggcagatggtctcaagagaggcagccggatcccacactgaggcattcttctcatctcctcaatgggagttccaagccacttcttatc

SEQ ID NO: 342551 - DNA, 122 bp, Homo sapiens
tctaaccctccatggtctccccctcaacttctgatgcttgtcttctgatacatcacccttcggcccacctgaggcccccgaggcacaggaggaagtatccaaagccagttacctgacactcc

SEQ ID NO: 342552 - DNA, 122 bp, Homo sapiens
gcccacggcgagctggcatgccatgccgtcctgaccgcctccctcctctccctcaggtcccgtttaatggattctgacatggattatgaaaggccaaacgtagagaccatcaagtgcgttgt

SEQ ID NO: 342553 - DNA, 122 bp, Homo sapiens
ttgagactccaccctcaagattctcattttctgcctttcccttctaaggcttaatcccatcgggactaagggaggagccttcccttccagcctcacacaggcagactatctcaaaagaaaga

SEQ ID NO: 342554 - DNA, 122 bp, Homo sapiens
ggacctgccgggtggccggggaagatgctggcagtggcgggggcggcgcccctgcattgccgcccctgggctccctgccccggacccggtggagctgggagcctggccaggcggccagggcg

SEQ ID NO: 342555 - DNA, 122 bp, Homo sapiens
ctctgtccttgattggctgtaagagctgtcctttaacgaaattctagctccgcctcagaccgatccctcgctgttgcgcctacgtatgtttgactcctcccatccacccgttactgactttt

SEQ ID NO: 342556 - DNA, 122 bp, Homo sapiens
tgtagaaggcccactgttcaagtttctgaaatgaatgaagaagcggcccagccttcagcccgcctgaaaaccttcagctgcagcggctacttctgagcagagctcttaaccagactaacacg

SEQ ID NO: 342557 - DNA, 122 bp, Homo sapiens
acctcgaaagcctcagtttccacgtatgcaaaacggtccatggtgccctcgtaccctggtcgctgctgcaccatcgaggtcagcgcgcggcaagtcccaggtaggccacgtcggctgcagac

SEQ ID NO: 342558 - DNA, 122 bp, Homo sapiens
cgattaggacgaatccgggcacttagccatgcaggaacaatggcgagcctctagccgatccggagcggcaaagtctagctgggtcagaagctcagtggacactctgctggatccagagggat

SEQ ID NO: 342559 - DNA, 122 bp, Homo sapiens
cctttaaaggaaaggtgatgggcggagccacgtttttctactgttgggattcagttccgccgacagaaaatgcggagaacgcggaggaagtccctgaggggaaattgctgctcacctggctc

SEQ ID NO: 342560 - DNA, 122 bp, Homo sapiens
gagctgacagtgagtcctgataggagctggttaaggatggtcagcttatgtaccatcccccgcatgccactgtttctaccaccagttttgcaggagaaaaggaatcctaggactaatacaag

SEQ ID NO: 342561 - DNA, 122 bp, Homo sapiens
aaactctgagaccctagcagccagaggcactggcgctggatgtggagagaagcacatcagcggaggaacacactcaactggctggacgtggagagcaatgcaccatcgtggtgagaggtgac

SEQ ID NO: 342562 - DNA, 122 bp, Homo sapiens
ctccgggtggcctcggttcggcggggctcgggcgcacgtcttgcctcgactaaggagtggcgagctctgccagggcagcggcgccaccgagcaatccaaacacttagcgggattccccagcc

SEQ ID NO: 342563 - DNA, 122 bp, Homo sapiens
tggccttatgaattggctcagataacgggcctgcatttttggctgccttggtacagaagacggcaaaggtattggggatcacacagaaactgcatgccgcctcccggcctcagagttccaga

SEQ ID NO: 342564 - DNA, 122 bp, Homo sapiens
gaagtttcccttctctgtggcgttaatgcatcttgtcagctgaagagaaggcctgcttggcgggttaccatgaacatttctctttggtgttcctgctgattctgcaggagggaatcaggcaa

SEQ ID NO: 342565 - DNA, 122 bp, Homo sapiens
gaggatagagtgcacgtgaaatgcttaacagtgaagtcggtgttcctgatggccgcgggtcggctgaaccggactcccagcgcccgagaggaggccaggggaactacaatgcccacaaggct

SEQ ID NO: 342566 - DNA, 122 bp, Homo sapiens
caggatttccgcgaacacagctcgggcttgggtgatttttagtgctcccaggtgatttgacgggcagaggttggagccgggtgctgtcactggagaacccctcctcctccctgctgtcccca

SEQ ID NO: 342567 - DNA, 122 bp, Homo sapiens
ggtggcgacggctggctggtccatggtggcctcctctctctctaggctgaacctgagctccggttgctaggaggcgggtgtggcccgtgggctcccgagcgcgcgcgcctgggaccgctccg

SEQ ID NO: 342568 - DNA, 122 bp, Homo sapiens
agaaaatctgaagtagcagttaattgcctgtggatctgggttagggatcccatacgtgggcgtacagaatactttgctttgaggtccccaaaataagtgcactgcttcacacagaacacttc

SEQ ID NO: 342569 - DNA, 122 bp, Homo sapiens
gcaatgcagacatcatacaaccgggttttctctcctccatcccttccagtggcatttctgcggcaagaagacttgagttccttctatataacccaggtcatctcccggccccttttctgaga

SEQ ID NO: 342570 - DNA, 122 bp, Homo sapiens
tagatgaaagtttgtgcaatgatcctggagggactgttggagacttccaagagcactcagcgttaatgatgatgattgtactattcgttcttattttattttcagactcacagctttgtttc

SEQ ID NO: 342571 - DNA, 122 bp, Homo sapiens
gggtcgtggtgggggtggggagggaagtaggcgggccagctgcctgaactgcttggtcgacgactgtaggactctgcggacgccgaagacgactagacctggtccccttgctcggggcttcc

SEQ ID NO: 342572 - DNA, 122 bp, Homo sapiens
gaagagagtagcacgtgcatccccaggccgattcctagagggtgaaactgaggacgactgcgatcagtgcagacagatttcgctagtcccagctcagggagtcctaggttagggactactag

SEQ ID NO: 342573 - DNA, 122 bp, Homo sapiens
cggggaagagcaccaggttcctgatcgggatcgcgggccgagcaagcgcgggtctcgggccgggacagcctcggcgtcaccagctcccggcagccaaccaaagttttccagcaacttttctc

SEQ ID NO: 342574 - DNA, 122 bp, Homo sapiens
atgccgggcctagcaggccagctgctgttgttcatttgaacgcagattcaccagctcagccgaggacagcctgggctgatctgggctcacacttactatctgatgtgagactgcagaggagc

SEQ ID NO: 342575 - DNA, 122 bp, Homo sapiens
ccgcgcccccgcccaagccgtgggggggggggagagatggggagcgaagccgcccgaccccggggcagagacgccacagcagcccgcagaagcggaaccactaccagccccgccgcggacac

SEQ ID NO: 342576 - DNA, 122 bp, Homo sapiens
gtccgtggtctccgctggggaggggctccccggcaacttggctcgcgggaaagaaagcctcggggtcagcctcctgccagctctcataagtagatctaattatgaccgcttacttcaaaaag

SEQ ID NO: 342577 - DNA, 122 bp, Homo sapiens
gctgcagtctcctgcgtcttcctggccttcgtcatcgtgctgctggtgctcagactgaggcgctggcacaagtcacgcctgcttcaggctgaaggcagcaggttggcgggtgtgcccgcctc

SEQ ID NO: 342578 - DNA, 122 bp, Homo sapiens
agaggacagactggccttggcagaagtaccctctatggctgcctctgcagtgggtgctttcggctgtcccgtgtgagagtggaaaggactccgtgtctgaggacgtccgtccggctctgaaa

SEQ ID NO: 342579 - DNA, 122 bp, Homo sapiens
ctcgaactcctgacctcacgattcacccacctcagcctcccaaagtgctgggattacaggcgtgagccactgcacccggccccttataattttatatgaattttagaatcaactatcaactc

SEQ ID NO: 342580 - DNA, 122 bp, Homo sapiens
ctatttagcagcccacaagaaaggtggagtggctggaattgaggcttgccacgttgacatcgtacctggcccctaagctgacagcatattgggaagaccactgaaaaagagacacacacacg

SEQ ID NO: 342581 - DNA, 122 bp, Homo sapiens
ccacgatcagcttcgtgtccggggacatggcgtggatgcggcggggggcctctcgcgtcacgaagtagctgggggtcttctccatggtgatctgcccatccagggttcggggcatcagactc

SEQ ID NO: 342582 - DNA, 122 bp, Homo sapiens
agttttcatgtgaacgcctaggtgttgaggttcgtgaggttctgtagtgccaacccgttgcgccaccattctgcaggatttttggcaggaggcctggcctctaagtgaggtttaagaatgtc

SEQ ID NO: 342583 - DNA, 122 bp, Homo sapiens
ggaagggaggagaaaggagaaggaagtgggggaagagaaggaagaggaagagttagaaaacgactaggctgtggcccctgagcccccttggcttgtggctggtattggccgagcatctgctt

SEQ ID NO: 342584 - DNA, 122 bp, Homo sapiens
aataacatctatccagtgagtcctgcaagacttcaggctcttctgcttccatcagcacctcgttgagcctggaaaaggagacaaaactaaagcagccagggaaaatcagacaccacagagcc

SEQ ID NO: 342585 - DNA, 122 bp, Homo sapiens
actcagcccgcagcctggtccccgaaagcgctcagtcagaatccgagagcactgtggcggcgcccccgtgtggccacaggactgaagacagaggaccccgctcccctttctccccagccagg

SEQ ID NO: 342586 - DNA, 122 bp, Homo sapiens
attagccagacatggcggttcgcacctgtagtttcagttactggggaggctgaggcaggacgatcgctgtagcccaggagttcaaggctgcagggtgctacgatcatgccactggactctag

SEQ ID NO: 342587 - DNA, 122 bp, Homo sapiens
gttaaaagacaattctcatctattgctttcacatctttaggtaggtaattttcctttttacgtttttttttttttaatgatcagacatctgtttcaaatgaggcaattaactactctttaaa

SEQ ID NO: 342588 - DNA, 122 bp, Homo sapiens
gtcggcccgcaggtctgcgcggactcatgctggcggtcatgctggccgcgctcatgtcctcgctggcctccatcttcaacagcagcagcacgctcttcaccatggacatctacacgcgcctg

SEQ ID NO: 342589 - DNA, 122 bp, Homo sapiens
cctcgctgcgccctttcttctgtgcctccggaagttactctttcagtaggcgtttgggggcggcactggtcaattttgttctcggttgcttggttgggctagatttcggttctgccgggtgg

SEQ ID NO: 342590 - DNA, 122 bp, Homo sapiens
tgctgcaagcaggagcgctagtgctgggagggcggacacgtggctccgggcagaagtgtccgccagcaggagcgctcgtgcttggaaggtagacacgtggcccgggcggaagtgtccttgca

SEQ ID NO: 342591 - DNA, 122 bp, Homo sapiens
ctgacacgtaattacacacttgctgatggtatcgcggtgccgataattaaaactgccacccgaggattgcgattgcgagtctacagctgggatgttgtcaggaggcagcaactccagcagct

SEQ ID NO: 342592 - DNA, 122 bp, Homo sapiens
ttttgccacaggaagcgacagaactagggacaggtatgtatctttaccacctagaaattgcgggatgtccttaaccaagggaacagcaaagttcagatccctttgcaaagaactttgctaag

SEQ ID NO: 342593 - DNA, 122 bp, Homo sapiens
aagcgggtacagcctttaggctggggagggtcgaggggagaactcggagcctgagtcgggcgaggttttgctccactctggcttctaagtgtgggggcctcaggatgtgacccgtggtcgta

SEQ ID NO: 342594 - DNA, 122 bp, Homo sapiens
acccgaagagccgatcaggagcggaagaggcggccgcgcgggcgagctcggggcgcgttccggcggagccagcctggatccgggttttcactcgtgccctgttcacaagctcttgggacccg

SEQ ID NO: 342595 - DNA, 122 bp, Homo sapiens
aggaaggaataaaagggaccccaggtagaggagagagccctgtaacaaagcagccaaacacgtacgctccttcaaattgtggcatctctgtcgagctccttggtctgttttcctcatctttg

SEQ ID NO: 342596 - DNA, 122 bp, Homo sapiens
ttgaacttgtgccttcagagcacattagcgttggtttctctacccctgcccgggttcgggcgtgcgttctgtgagtggctctccgggacattcaaagctcgacgccagggtcctagcagaag

SEQ ID NO: 342597 - DNA, 122 bp, Homo sapiens
ggctcagtccggccttgcggtaagccttcggccgcggctgcccggtagtcccggcggcggcggacagacgagctgacaggcaccagggtctaaggcggctcctcagtccggctgctgtctcc

SEQ ID NO: 342598 - DNA, 122 bp, Homo sapiens
ggcgctgctggcctcgtttgggtgtggcccggagcactgagcagcggattccccaccagccgctccccgcccagccccgcggtgctccggacgccccgcgaagccgggtgcagggttttccc

SEQ ID NO: 342599 - DNA, 122 bp, Homo sapiens
cctgcatgcgggaagaaagccggacgtctcggtcctcctactcccgcaggcaggaccgggcggccaccctgaatgatgctacccttcccgcgggacacctgccctgaaagttgcctcctccc

SEQ ID NO: 342600 - DNA, 122 bp, Homo sapiens
tctatttattcagttcactatatcgactgaatttctcaatagcccgcaaccttaccttgccggataaatgtatattttatgatgccaaataaaaatctccattttaaaccacctctgcagat

SEQ ID NO: 342601 - DNA, 122 bp, Homo sapiens
cagggtgctgtggagggtcagggatgcaaaggcctgagttggctgaggtggggtcgggctcgtggaagaactgccatttggttgggcttcagagagatgtaagcagacacggggtctgggtg

SEQ ID NO: 342602 - DNA, 122 bp, Homo sapiens
gggatcaggagcacaacatctccaattgctgatttagggaaagtggaggccagagtgctgcggcccctccaagagacctgggctacgaaggcctggggctgagaggccctggagcaagaggc

SEQ ID NO: 342603 - DNA, 122 bp, Homo sapiens
gaaagttaattgcgtgttaaaagtctcagcctaatgacttaaatggctggtatgacttcacgctgttggtaaaagggattcgggtcaagtgttttttgacaagagtttctatatcagcttca

SEQ ID NO: 342604 - DNA, 122 bp, Homo sapiens
ctcccgggaggtcactttctaggcagcccagcctgtgcttgggcggggtggttgcttctccgaggaatcgcgtttcccagccttgtatttcaggacctaactcttcccacccctacgttcct

SEQ ID NO: 342605 - DNA, 122 bp, Homo sapiens
tcattatctattctttcagggttctgaaaaggctttagaatctgctgattgtcatcaactcgctactgtagcctcaaagctctgcagcactgctggaccatggcaaatgtaaaaaagatagt

SEQ ID NO: 342606 - DNA, 122 bp, Homo sapiens
gatcattaagagagtgcgtgtatatggggaaatgctccgaggactaagtctggggcactccggtgattaatggtcaaggagatgagaaacatccatccaaagagcctgagaaaagcaaacag

SEQ ID NO: 342607 - DNA, 122 bp, Homo sapiens
tggggggcagggtgggggagagaactacaaagaaaccttcttaggagggtgtttctgtggcggggtgggaagccattccaaagccgtcctagacaccccgtgaactgggcacatgaggcaat

SEQ ID NO: 342608 - DNA, 122 bp, Homo sapiens
ctgagaagacgcccattctctgatgtcaggactgcatcgccgagtcctgattgcaaatagcgaaatatataattaaggagagttcgggggcgtatcctgcaatgggatgccgagttcgataa

SEQ ID NO: 342609 - DNA, 122 bp, Homo sapiens
aggcggaggaaggggagatgggcagagggtgggcccagggacccccagacaaggcctggacgcggggttggaggaggaggcggaggctggcgggaggcgaggggcagcccgcagaggagacg

SEQ ID NO: 342610 - DNA, 122 bp, Homo sapiens
gctcagtgccgacgcccctaccctgggggtctcggccacatggtcctcgtgaaaccgttacgagtgctgtacatgaccacccactgtgcaaagagctacgattgctttcgttcgttaattct

SEQ ID NO: 342611 - DNA, 122 bp, Homo sapiens
aggcgagacctggagatggacctgtgatctgggtaagacagttaatacagagagtattgacgcattatgacttgtaaccccttagtgttctgtatgttttggtaaagcagaagtgacctaag

SEQ ID NO: 342612 - DNA, 122 bp, Homo sapiens
cgaggatccccagggtggctaacccacccatgtgcagctgagagaggctcgtgtttcgggcgggaataggatactgagagaagctcttcctagatgtgcatcctgtagactagtgatcacgt

SEQ ID NO: 342613 - DNA, 122 bp, Homo sapiens
ggcctcaggaaacttacaatcatagcagaaggggaagtaggcaccaacctattcacaaggcggcaggagagaaagcatgaaggaggaactgtcaaaaacttataaaaccatcagatcttatg

SEQ ID NO: 342614 - DNA, 122 bp, Homo sapiens
cagccaggctgctgctgggtctggaggagcaggacacgggccacacacacagatcaggagcggagaagatgggagatgcactgtctggatcgcttcattagacccacgtgctgtttccacaa

SEQ ID NO: 342615 - DNA, 122 bp, Homo sapiens
aagcagggtgggcagagtgtgtacacgtaacgacattatggtcgcctctgagtctcttcccggtgtcttttccaccggctcagcctcccaccagtgaacctggcaaacaattaataattcag

SEQ ID NO: 342616 - DNA, 122 bp, Homo sapiens
gggaaacatctctgggaggcaggagaaggccactcatgtcgtgtttgcgaggaccacacccggggaagtgcctcagatggcgctgaggactctgattccccaggccctcctttctctgatcc

SEQ ID NO: 342617 - DNA, 122 bp, Homo sapiens
tatataaacagggggcccgtaaactttaaattcaatcacaaaagcaagatgggaaagccacgtgaactgcatttattctataaattggatggtaatctaaacctgacaaatgatcaaaatgt

SEQ ID NO: 342618 - DNA, 122 bp, Homo sapiens
atctactgacactggcatctactgacaccaacatttaccaacaccagcatctaccaacaccgacatttaccaacaccagcatttaccaacaccgatgtttaccaacgccgacgtttaccgac

SEQ ID NO: 342619 - DNA, 122 bp, Homo sapiens
accagttggaatacacatagattcacacatccagcaaatgcaaactccatcatccaaagacgtgtttgtcccggccataattgctccaagtgcttacaggtcaatttcatacatggaacacc

SEQ ID NO: 342620 - DNA, 122 bp, Homo sapiens
cacggcttggcaagacttccctcacatcatcgtgagaaggggcggcagtgcccggtacagcgtggtacagtgagcgccacactcaaccatatgaacagcctacttgtatcgacagagagcag

SEQ ID NO: 342621 - DNA, 122 bp, Homo sapiens
ctttaccagggtcctcccgagtgtttaggtcccgatgcgcgtagaaagtgtcttgcgagacgcggaactggtgagactttgccaccatttggtccaggccaatgtcggccgccagcccaaaa

SEQ ID NO: 342622 - DNA, 122 bp, Homo sapiens
aagcaaggaacgctcttcctaccgtgatggcctcttgcagggctgaacgggaaagggacgcggcacagtctggcagtgcgtgggagcaaacgaaacctgcacaaagggaggcggaagaaaac

SEQ ID NO: 342623 - DNA, 122 bp, Homo sapiens
ctaattctgctcctttagtcacagtgagggtcagtgattgtaggaaaagcccaaactccccggggtccaacctgggaagaagaccctatttctgatgggcaaattataaagaggaaagggcg

SEQ ID NO: 342624 - DNA, 122 bp, Homo sapiens
tcccttctctctttagaagcggttatttgtcattaaacattcttcctgtctagctgtcaccgtttttccttaggagtcctcctgtccccacctcctcaccaccactccctctcttttcatgt

SEQ ID NO: 342625 - DNA, 122 bp, Homo sapiens
gcgttcacgtggctccagcctccagcatacggccactgactcctgattcctagtcctctacgttgggcagcgaccaactcgacatgaagatacaggaacctgaaaaaacgttatctctcttc

SEQ ID NO: 342626 - DNA, 122 bp, Homo sapiens
tgcaatcaagtcccagcttggctattcaccactgattcaactgtgtgcaaggtatttaaccgctcagtgcctcagattcctcatcataaaatggagattataatagcacctaccaaattgga

SEQ ID NO: 342627 - DNA, 122 bp, Homo sapiens
gaaccccagccagccactccctcgcttgggcctgcttgtaactggagcagagctaggggacgcctccgtggaagctgagtcaactgtgggttgtcccagcccccatgaggttccattcacag

SEQ ID NO: 342628 - DNA, 122 bp, Homo sapiens
ccacaccgcggaagccgagcatgcggcacaccacgtctccgtccttcttgtcccagccgtcgtcacacacggtgccccaacgccggtcgtggtacacttccacgcggccctcgtgcggacct

SEQ ID NO: 342629 - DNA, 122 bp, Homo sapiens
gccgagtccctgcgaatcacagcagcagcgggaggtatttgaataagccccgcaaccccgcgcagaccccaactcctccgagagcagcatgccctgcaccaagagccaccactctggccggt

SEQ ID NO: 342630 - DNA, 122 bp, Homo sapiens
tctcggcgctcctgctccggctgcggctcgcgctgtccccggcttggccgcgcgggatgccgcccgggcggagcgctgacgtcaccgccatgctctgcaccagttcttccccctccccttta

SEQ ID NO: 342631 - DNA, 122 bp, Homo sapiens
tgggtgggtatgttgccctcccaattttcccaggcacagcaatatctctgcagacaggtacgggcatgcatcagaaatctggaggctcgcccaaaaagttatgtctgctgtttgtgaagggg

SEQ ID NO: 342632 - DNA, 122 bp, Homo sapiens
aactccaggtcttcccataggaaggcccctgggctgtcattctgaggtgcctatttcccccgcgccgtgtccacgtccacgagtccacgaaccctccgagttctctctcctcacctgccgag

SEQ ID NO: 342633 - DNA, 122 bp, Homo sapiens
agaggcccaccccgcccggagaccccctccccccgaatccagagccagacgctctcctttcgcagctcagctggattatctcatcgcttctcgcccttaggggcgggctggggtctgccccc

SEQ ID NO: 342634 - DNA, 122 bp, Homo sapiens
ttcctcaacacttttcacagtgcttggcataaagctggctggccctttgtacctgtaaaacgcggaaacacccgcagctcctctttttctctacctactttgtcgcacattacgcaataatg

SEQ ID NO: 342635 - DNA, 122 bp, Homo sapiens
ggcggcgcgcacggcaggcggtgagcccagagcccagcgccaggcaggaagccaggctgacgaggaaggaggccggcccgagcgtgtaaaccacggccaggtcccgcagggcgagcggctgc

SEQ ID NO: 342636 - DNA, 122 bp, Homo sapiens
gctcccttgtgttcccgctggacgctggcccggcggccgtggcctatagagcaggcccctcggtgcatgaagccagcacagccctggaaatcccgtgcaacaaaaagcctctgttccaccca

SEQ ID NO: 342637 - DNA, 122 bp, Homo sapiens
ccgcggcgggtgagagcctcttcagggccgcagcgggtggcgggcgaagtggtaaacgggcgcggggacgggttttggtgccgctacggggctcggcggcagcggggttgcagtagagcccg

SEQ ID NO: 342638 - DNA, 122 bp, Homo sapiens
gcagctgcccatgcagagacaggccaagactggggtgcataatgtcagcatgccagctcccgccctcccaaacagccccaccaagccagggccaggcagatggcacctgttgcccagcaacc

SEQ ID NO: 342639 - DNA, 122 bp, Homo sapiens
gaagtgagatgtgtggtgtgctaaaaatagaagggcccctcaggggaagccagcaaattgcgaagatccagtattaggagtgaggtgagtgactacagaggctactttccgagcgtgggaac

SEQ ID NO: 342640 - DNA, 122 bp, Homo sapiens
ttcctcagccacagcagccacatttcgagggctctgcagccacacgtggtttgtggttgacgtggtgggcatgaaggttaataaactcctggccaggcacggtggctcatgcctgtaatccc

SEQ ID NO: 342641 - DNA, 122 bp, Homo sapiens
gaaaataaaaagtaatggggcaagaaaaacagatttccttggccacttttaaagccacagcggctccgggtctgtctgatatttcacaaccaattggggttggctaaccttggcttacctca

SEQ ID NO: 342642 - DNA, 122 bp, Homo sapiens
tcaggtggcctctgaagccatgtccataggccagccacctggtagaccccacagcaggcccgaggccctcaatgaacagaccaggcccagagaagagctgggttctgccccaggtcacacag

SEQ ID NO: 342643 - DNA, 122 bp, Homo sapiens
ccccccacctcacccaggcacccagctctggcccaagggtgagtccagcccgggccacagcgaggagcgtctgaccatcctcgtgctcagcacggaggctaacccaccggtttcttctcctg

SEQ ID NO: 342644 - DNA, 122 bp, Homo sapiens
actaagagaatttcacttgatgacccttgcctctttgtgtctgggatgagccgcgcggagcgcacccttatccacccagagtgctgtgcctttaaggtccactgggggcgtgatgtcagccg

SEQ ID NO: 342645 - DNA, 122 bp, Homo sapiens
ctcctgcccaggatcactgctccaggctggccacattcacccgatgggggctctgcccctcgccccaggcctgagtcctacttcatttatgcggctgcttcaacaatgcaaggaagagattt

SEQ ID NO: 342646 - DNA, 122 bp, Homo sapiens
ctttgagccaagcccaagctgtctgcctgtcccaatagtggtgttttctcttcaaagaaccgttgccacagcctcgcagttctgagcaggaattgaaaagcctttgaaatcggtgcagcctc

SEQ ID NO: 342647 - DNA, 122 bp, Homo sapiens
agcgattttcattcactccaagtgacactcccttaaaattaataactgcatctgggagggcgagcgtgtcctccccactccccttgccccctcggcggcaggggcgctggccccgaaaagcg

SEQ ID NO: 342648 - DNA, 122 bp, Homo sapiens
cgctcctggggtgtcctgccgaagggtgagaagagaagccatgccgggcagcggccccagcgagaggatgacgtggcctggcccggccctttctgcgggccccccaacccgccctctctcct

SEQ ID NO: 342649 - DNA, 122 bp, Homo sapiens
tgccacgtgacccgctccgcatacacgtgaccagcttcgcacccggtgggcgtcacgtgacggactcagtagaccgccactggctgtgcacgttatggggtttccacctagggctcggcctg

SEQ ID NO: 342650 - DNA, 122 bp, Homo sapiens
gcccgggaacggggtgggggtaaccgggtctccccacaggcgggatcctgggactggtgtcgctctcagccgcccacctgccagggttgctggaaggaaggccgtggggaggcgggaggggg

SEQ ID NO: 342651 - DNA, 122 bp, Homo sapiens
ctcagtttttctaatgatggtgcacattagtaccgttctcaatgcatgaaaaaggtcattcgttctatgtagaggatatcttagggcattaaggcttcatgctcagcctgttgagaaatgtt

SEQ ID NO: 342652 - DNA, 122 bp, Homo sapiens
ggttgcctggcttggtaacaaacactcttcggagccacagcctgttctcagggtcctcgccgcctcccaggccctgcgatctctttgcatctcaggaggtccaggttggttgcagtcctctt

SEQ ID NO: 342653 - DNA, 122 bp, Homo sapiens
agggacggcagggcgccaccgtgctggccgtgcctgatggagcagcaaggcggcagggagcgcattctgatctccccgtgtttcggagtttgtaggtcaagtgtgcactatctgcagtcagc

SEQ ID NO: 342654 - DNA, 122 bp, Homo sapiens
atcatacatctctggttttttaaatgtattgaggctttcttggtggactagtatagtatacggtcagttatgtcaatgtttcatggtcaataaaaaggaagttgcaaattgtgatttaagca

SEQ ID NO: 342655 - DNA, 122 bp, Homo sapiens
aggtggctgaggcaccccagtcagaggcggaggtggctgcattgggtgctatttctaaaacggaagggagactctggcaaacaatcttaggtacagagtcaggagaggacccccatgctctt

SEQ ID NO: 342656 - DNA, 122 bp, Homo sapiens
ctggggatagcagcaccagccgcttgtgtgcggatcacaggaacccacggcttacggaggcgagtgggctgatcggacttgccctaagcttacccccagggctagcattgccattccatagt

SEQ ID NO: 342657 - DNA, 122 bp, Homo sapiens
ccttttatttttggcggcctcctttcgaaaactccgccttctgacacgggaccactggagcgcggggagcatgcatcaagggtccgtggcagtgagaagtccccacacacgctcgctctgtg

SEQ ID NO: 342658 - DNA, 122 bp, Homo sapiens
acttctgtgaatatccctttcaggctgaggaccgggatgacatgctgggctggatcagagcgatccgggagaacagcagggccgagggcgaggtgagggcccggccagcccggcggccacag

SEQ ID NO: 342659 - DNA, 122 bp, Homo sapiens
cctccccggctgtggtcccgagactcagcgcaaggacccggtgctgggactagggctgcccgaagatcgcctaacttaaaacctgcacacttaagccgcattggggaaccaaaagccagggt

SEQ ID NO: 342660 - DNA, 122 bp, Homo sapiens
gtgttctctgcggcgggccgcgtccccgctgagcctcgcggtgacagccgcctttggcagcgagcgctcggggcacttctatccccgcctctcaaagggtggggacagccgtttccagattt

SEQ ID NO: 342661 - DNA, 122 bp, Homo sapiens
tagagctatattaaggtttcaatgtgagcttaatttttttccccacttcgggcaaaattacgattagattgcatcctcaaagaacacattaactactggaaaggaaaggaggagcttggttc

SEQ ID NO: 342662 - DNA, 122 bp, Homo sapiens
cctaagaggttacgtgtttagcagtgatcaagaaccctggagttacatactatgggtgaacgtagaactgcttgctgcgtgtatggccatgagcaaatttcttaacctcacaatcagtttcc

SEQ ID NO: 342663 - DNA, 122 bp, Homo sapiens
cctcccactcgccgacctgggcgctgtccttggtgctgccggcgccatagcgagcacaagcgccttaccttctgcccctgcggaagctgcggacgtcccccaaacgttaaaaacgccatatc

SEQ ID NO: 342664 - DNA, 122 bp, Homo sapiens
agcctcccattggctattggtgctgtccttcaggcagctctcaagccaatgacgctgcaacgatggaatttacagcccggtagagccgggcagctgccaagcggcggatcatcccttgtggt

SEQ ID NO: 342665 - DNA, 122 bp, Homo sapiens
ttactcaaacaaacctggtatgtagagcaggcactgccagagcctcatggcctttttgtacgggagtggtgtacagttcagcagataggcacagcaaactcctcttctgccattcagatcag

SEQ ID NO: 342666 - DNA, 122 bp, Homo sapiens
acctcgccatctgcccgtcttggcctcccaaagtgctgggactacaggtgtgagccaccgcgcctggccttgttaagagttttattataaaaggatgttgggatttttcaaatgttttttct

SEQ ID NO: 342667 - DNA, 122 bp, Homo sapiens
agcctgggtgaaagggtgaaactccatctcaaaaaaaaaaaaaaaatgggtgagggatttcgatcgaagctgtggaatctgctccagatctcaggttgctactatagcatcttgggtagatc

SEQ ID NO: 342668 - DNA, 122 bp, Homo sapiens
attccgtttcttcatctttctgaccactccaatattttttcaacccacaagaaaagtttgcgaaaaaaattcaaatatatagtttctcttgaaaaatctctaagcctataattccccatggt

SEQ ID NO: 342669 - DNA, 122 bp, Homo sapiens
cacagatattagagatgaaaacactttgtgaggtcagttcatcttcagttggcgtcaggtcgggcctcagtcattattttctagtgtttcataaccaaagtgagtaatggatgggaggttga

SEQ ID NO: 342670 - DNA, 122 bp, Homo sapiens
ctggtgtgacctccacgtggcaggtcagagttgtcccggcacccggcacagcggctggcacgagagctgtctgttgagtgaatgatcgggtgttcagcagacatcagccagagcgtcagggc

SEQ ID NO: 342671 - DNA, 122 bp, Homo sapiens
cccccgcgcgggctgcgagcagggtgttccccttgccgcgggcaaacaagtttgtgcagacgcggttgggagcgcggcggggctgcacctgctccggctgcagggcgggcttgccgggggca

SEQ ID NO: 342672 - DNA, 122 bp, Homo sapiens
tgtgagaagggcataaattggggggagtcaaaagagattatattggattgaattctgtcccgcaaaaatgtatggattaaagtcaacgccagtaagtcaaaatgtgactttctttgaagaca

SEQ ID NO: 342673 - DNA, 122 bp, Homo sapiens
aactggggtgaagtgtttctaagcagaagcgatgttgacgatgaaatatcaatatgctcgcgtattcttaggcagggagactctagagggctcagggagcagagacagactggaggcaggga

SEQ ID NO: 342674 - DNA, 122 bp, Homo sapiens
tctctaacatcttcctctgcctgcgccatgactctttattaataatttcaacttttaggccgggtgtggcggctcatgcctgtaaacccagcactttgggaggctgaggcaggcagatcacc

SEQ ID NO: 342675 - DNA, 122 bp, Homo sapiens
gcggagagagacgccggggcggcgatgcgcttcccacagcagagacgcgtcagagtccaacggggaaaggtggaaaaagacgaaccgtgtaaacaataatcaaaagggacatcgggtggctg

SEQ ID NO: 342676 - DNA, 122 bp, Homo sapiens
ggactctcggggtgcaagcgtggggattgggtgctggggtttttcccttaaagtgtcccccggagcggggcgaccggccggcggcgcgggctccgctccgctctccttggcggccgggggcc

SEQ ID NO: 342677 - DNA, 122 bp, Homo sapiens
gggctgtcttaatgcatcccagagcctcagcgccgttcagttcctcttcggaaatgaagtcgcccattctggttcttgctgcgcatgattaaggagcagaagtatccaatacagggagtcac

SEQ ID NO: 342678 - DNA, 122 bp, Homo sapiens
ttacatgcgctgcaaaatctgagctgcagaagagtagcactacaaaaaacgctacaaaaacgatgcgattagccagcccgacaacagcgcttcattgcgctgcgaggcacatgaactgcaga

SEQ ID NO: 342679 - DNA, 122 bp, Homo sapiens
ttgctttacaggcagtaggcattttatgggccatccctgcaagaaataaatgttagaaggcgccgcctccccattcttgccaaccaaggaacagagttatgggcggaaaagcagccccacct

SEQ ID NO: 342680 - DNA, 122 bp, Homo sapiens
gacatgggagtggagtgacaggacgcactcagctcgtggccccactgatgagcttccctccgccctatgggaaaaagtggtctcatacagaacttataagattcccaaatccaaagacattt

SEQ ID NO: 342681 - DNA, 122 bp, Homo sapiens
agccatggcactctgcgttgaaggtcccatcccaggacgagttgtgctcaggtggctctgcgtggccttttctggttttcctggtccccctcttatcccctaaacctgtcaggcatccacgt

SEQ ID NO: 342682 - DNA, 122 bp, Homo sapiens
aggtgaaagaaagaacgcagggagggaagagaagtttggcagaggaaattgtgggatgaccgactattcaggagaggccagatttcatacattctgatcctaaatatactcatatttgtcaa

SEQ ID NO: 342683 - DNA, 122 bp, Homo sapiens
tgaagtttcacttcctgagctatatcagtaaaggaaagataaatatgccccaaatccaggcgtaagttctaacgttacactgttgtgtaaaaggctagatttctgttatggcttaagtcaag

SEQ ID NO: 342684 - DNA, 122 bp, Homo sapiens
acacagcgccaggacgaggatcgcggtgagccagcaggtgactgcgatcctggagctggtcgcagcaggccatcctgcacgcggtggaggcgccccctgcaggccgcagcgcatccccagct

SEQ ID NO: 342685 - DNA, 122 bp, Homo sapiens
tttccacagtgtgtttgccagtgacctcaaccctgacctgcagggtcaccttctctgggacgagaagtaatcctgtgttgggtcaccctctggtactgagggactcctatttgtggtgccat

SEQ ID NO: 342686 - DNA, 122 bp, Homo sapiens
atttcacagatgagaaatgtggatcttggagatgtaacttgcccaaattccaagccagaacgtgacagagctgggatttgaatacagatctgactcacaccagagtatgtgcttaaccacca

SEQ ID NO: 342687 - DNA, 122 bp, Homo sapiens
tcttaagtgattctgaatgaaaacaaattggcccgctttcttctccaaacagacgcgcggcgcggtgggggcggcgggcgcgggcccggggcggcccgggcggtggggttggctccgggacc

SEQ ID NO: 342688 - DNA, 122 bp, Homo sapiens
ggactacatcctgaagcacattccaaacatgcacaaagatcagtttgcactaacagcttccgaagctcatcttaaatatatcaaagaggctgtccgactggatgacgtcgctgttcattact

SEQ ID NO: 342689 - DNA, 122 bp, Homo sapiens
cctcggaaacctcccagccgcagcccggccctccccagcggcctgagtggcctcctcccgcggcgccccccagctccgcacctccccagccccgcccgaggcgcgcccagcgagcgtgaccc

SEQ ID NO: 342690 - DNA, 122 bp, Homo sapiens
ggcagctgcagcctgtatctgtcagtggcagagctgggattagaagcctcgccatcaccccgctccacagtgccacagccacagccatgactgtcgcagaaaagtcatccctggctctccac

SEQ ID NO: 342691 - DNA, 122 bp, Homo sapiens
gaggggaaggactagcctcaacataaagccgctggcaggttaggcgaacctaagaaaatgcgctgtcatacttaaaaagcaaaaaactgccagatagttgtaccccgttagccaccgatgag

SEQ ID NO: 342692 - DNA, 122 bp, Homo sapiens
ggaggaggaggcgcagatgtgcgcttgtctcacacgagcagccgcatttagccaccgagtcgggactgaaatattcctgagggagaagaaccctgaggcttcagggcggcaacggctcgtca

SEQ ID NO: 342693 - DNA, 122 bp, Homo sapiens
cgaacatcagaaggaagaaactcccgacacaccgccgcctttaagaactgtaacactcaccgcgagggtccgcggcttcattcttcaagtcagtgagaccgagaacccaccaattccggaca

SEQ ID NO: 342694 - DNA, 122 bp, Homo sapiens
tcttatcttgtttcaacccttaggtcatttttgtttggagccattttcaggtgatggtgacgacaaggtcagcccatgaaaagagagtacgctgtcactttgtacgtaattttattgagcca

SEQ ID NO: 342695 - DNA, 122 bp, Homo sapiens
ccggacccccacccttccactatcactctagctgacaaagctggggtccagggccctctccgtgtccctctcccctccccgctgggcctcggagtcctctcccgcccgagaggagtccggaa

SEQ ID NO: 342696 - DNA, 122 bp, Homo sapiens
tacgccaatagtgtcttaggagttagaaatatacaatagtggacaaagtttctattatcacggagcttatatactaatgggaggaatgtaatcagtaaacaaatgaacaaatagatggtggc

SEQ ID NO: 342697 - DNA, 122 bp, Homo sapiens
ttgcagcttccacccttcggcttataaaattcagcttataaaaaagctgatgagtcacctcgtatcatacaggtaatggcatggtcagcccccagcacccgcagacagctggctccagagca

SEQ ID NO: 342698 - DNA, 122 bp, Homo sapiens
tcttttgaatgctcaggttatgtcatgagtggtagcaggcatcgcagaatggaggctgtacgactgcgtaaggagaaccagatctacagtgctgatgagaagagagctcttgcatcctttaa

SEQ ID NO: 342699 - DNA, 122 bp, Homo sapiens
gatcatttaaataagccctcattgatcagggaggggtgaggcattctgggctttgtagtccgggcctacttgtgacaaaggcgtgttcatcaggggagcgcagctaattagcatccgggctc

SEQ ID NO: 342700 - DNA, 122 bp, Homo sapiens
tgccgagcccggctatcccccggagcctggggatcccaagagcgacgacagtgacgtggacgtctgcttcacagacgaccagagcgaccccgaggttgggggcggcggggagcgcgacttgt

SEQ ID NO: 342701 - DNA, 122 bp, Homo sapiens
ttccccagcagatggttacctttgggctgttgctttcttgtcaccatctgagttctcagacgctggaaagccatgttctcggctctgtgaatgacaatgctgactggagtgctgcccctctg

SEQ ID NO: 342702 - DNA, 122 bp, Homo sapiens
gtcatcctcctgatcttttcagctgcattgggtaaatccttgcctgccagagtgggtcagcggtgagccagaaagggggctcattctaacagtgctgtgtcctcctggagagtgccaactca

SEQ ID NO: 342703 - DNA, 122 bp, Homo sapiens
ttttctctctcgctacttaaaagctgtaagataacgaattgatcagcaggtggcagtgtccgcggaggctcgcatcccgtcggccctggctctcaaggcggaaacacgcaccatggtgactt

SEQ ID NO: 342704 - DNA, 122 bp, Homo sapiens
cctgtgtcaccaccccagcgcatctgctgagattgttgcgacgggcggagcttttgcccacgtgactgctttccctgtggtcaaaagtcaacacagagatttagaccccagactaaagaaaa

SEQ ID NO: 342705 - DNA, 122 bp, Homo sapiens
tggcagagcaagcttgatgcgtctgcgtcccagcccccgaccccagattcgccctcaccccggcccaggcctgagccctcctgcgtctgaccctggccctgtctcccccaagccatattctg

SEQ ID NO: 342706 - DNA, 122 bp, Homo sapiens
gagaaaacagctgtgcccggggaaccactaccaccaagatgcggagaccggtagtggccccgaatggctgggcacgctgatattgattgcatacaagacaagggggcagggtaagaacggtg

SEQ ID NO: 342707 - DNA, 122 bp, Homo sapiens
ggagccctagagagataagccaggacgcctggaaatggtgagtgtttggggccagctacccgaaacccggcaggggctgggtggaaacggccagaaccggctgtgacgggaccccaggcccc

SEQ ID NO: 342708 - DNA, 122 bp, Homo sapiens
ctcccttctctccctccgtctgtcttgcccgcacctgaggttgtcgcagaggcgctgagacgggccagcaggagctgtggctgcccctcaggaaggcagagcagtttctcacttccttcccc

SEQ ID NO: 342709 - DNA, 122 bp, Homo sapiens
ccggcctgggcatggagcgcggggtggcagagcctctggacgtttggggcgcgcccagtccgagcccccggcgcgcctgaagttgcgagcggcgagcggcgagcggcgagcggcccgcggag

SEQ ID NO: 342710 - DNA, 122 bp, Homo sapiens
cggttgagaggcagaactgacacagctgggacgaaggggagtttctggaatggccagatgcgtgtcccaggtgtgtaggggagatggaatctccgtactactcatcaacttctgagtggaag

SEQ ID NO: 342711 - DNA, 122 bp, Homo sapiens
caccttcctccgcttcctgctgctactcaacctgctgagcctgctgctcaccgcaagcttcgtgctgctgcccctggtctggctccgcccccctgacccaggccccaccctgaacttgagtg

SEQ ID NO: 342712 - DNA, 122 bp, Homo sapiens
aggtctctgtcaccctttccttcctccctgagtgtccaggtgccctggctccacctctcccgaagttaatgtttagatagctcccccgcccagcaggttggtgtgtagggtggggccggggg

SEQ ID NO: 342713 - DNA, 122 bp, Homo sapiens
tgaaggagtggatctcagaggcgagccaaccatgacataacccttctccagttctgataccgtggacaagtgatcactctaaacaattccccacctaaattggtttcatgtcattaaaagcc

SEQ ID NO: 342714 - DNA, 122 bp, Homo sapiens
ctcccatctgagtaatcataatgataaagatagcagcattgggccaggtatggtggctcacgcctgtaatcccagcactttgggaggctgaggcgggcagatcacttgaggtcaggaatttg

SEQ ID NO: 342715 - DNA, 122 bp, Homo sapiens
cggccttctccatgaggacggccgtgtggggcctgtgctcccgggactcccggcacatcacgcacagcagcttcccgtcgtcctcacagtagtagtgcagcttctctcggtgtcgctcgcac

SEQ ID NO: 342716 - DNA, 122 bp, Homo sapiens
gtggcgagggctgtgctgcctaggatccactgagtggctcttgctggcgtgtcagctgcgcgcgaaccagggctgggaggctcggctggaggtgtgaccagggcagggactgacctggcccg

SEQ ID NO: 342717 - DNA, 122 bp, Homo sapiens
cctgggagggagacggcgctcagcaaatttagatgaatgcaacgcttcaacgtgggctctcgacctctggtcccccatcccctgccggctctattaggacaatgaagtccccaaactccact

SEQ ID NO: 342718 - DNA, 122 bp, Homo sapiens
gatgggagggtgacgtgtcgcacggcgcacacacacagcagaatgtgggtcgaacgtgcccggcgggctgcaggcccaggaaacccccacattcccggcctgaattcagtccagaggaggct

SEQ ID NO: 342719 - DNA, 122 bp, Homo sapiens
tcactgaaactaaggttaactcctcactctctatggacggctactctctatttccaagggcgtgaagaatttccctcttctcctgtgctttcatctaaaagttctccctggataattatcat

SEQ ID NO: 342720 - DNA, 122 bp, Homo sapiens
cgaggacaggacctcctggatgcactggaaagtcgaagagacatggtatcagggcaaacgcgttgcagagctgtatttgtgaaagccagaatggagtgccttcttgtctaaaaggtttggtt

SEQ ID NO: 342721 - DNA, 122 bp, Homo sapiens
tcgcgccctcctcctcctcctcctccttgcgctagcaggttcctgatggtagggtggtttcgtgccctcctcctcctcgcgcgagcgggttcctgatgggtgggtggattcgcgccctcctc

SEQ ID NO: 342722 - DNA, 122 bp, Homo sapiens
acgggaaaggtaagaattgttaggcttttaatctaaagtcgatacctcaaaaaataattccggaggtaagcatttaatatcaacattcaataaagcaggaagtatcagcccgacgaagaccg

SEQ ID NO: 342723 - DNA, 122 bp, Homo sapiens
tctctgcacccctaggcggcgctgcgctcctcaacacccggccggctccgctttcccagacggctgcccagcctccagcctagcaagcccggctcccagctggccagccccggcaatgccgg

SEQ ID NO: 342724 - DNA, 122 bp, Homo sapiens
gttcattttccttcctcccatcttgtgaagaaggtgctttgctttctcctcaccttgtgtcgtgattgtaagtttcctgaagcccttcctgccatgctgaactgtgagtcaatttaacctct

SEQ ID NO: 342725 - DNA, 122 bp, Homo sapiens
cgtttctccagaccaaatggtaagttgagttttaataatgcacacatactttagaaaatccgataattcttaaaggataatgaagaaaataagccccgcataatcttgccaagagaggacga

SEQ ID NO: 342726 - DNA, 122 bp, Homo sapiens
caggctgcgtccggtgggcaccgaggacgcccagaattgttgggaatctgggcggaggcccgtcgtgggcttggaggccaccgggtccagcagaggcagaggcctctgtgccacgcacgcac

SEQ ID NO: 342727 - DNA, 122 bp, Homo sapiens
acagtctctcgcctcaaagatctccgccattagtggtagccatttaagaaaacagaattacgatgaataatgatttgaagccaaaaagtcaaaatatcttatttcgcaactgtaattgctgg

SEQ ID NO: 342728 - DNA, 122 bp, Homo sapiens
gggcagcatctaaggcagtactcaccaggaccaagtcaattctacctctcccagcccattcgtggcccccaaagccacccccatttttttatcctttcagccacaagttctcttggttctgg

SEQ ID NO: 342729 - DNA, 122 bp, Homo sapiens
gcttgaaggcccctgttaggagtctaggggtgagattctcttctctctgatcccagaggacgttaacttctactgcaggtgagaaacaaaataggaggatggtggggactgtcctgggagga

SEQ ID NO: 342730 - DNA, 122 bp, Homo sapiens
tttcgaattgcgggaaacccgcagacttagtaaggtaaaagcgcagtaacacgaggtttccgtagtgtagtggttgtcacgtttgtctaacacgcgaaaggcttatattatttttcgttgct

SEQ ID NO: 342731 - DNA, 122 bp, Homo sapiens
acaaaccaatggaacaagtatttcctcatattgtagatgaggatgctgaaatgtaggtgacgttaccaacctcagctcatgttgcacatcttgaaagtagcagaactttctgagaaaaagca

SEQ ID NO: 342732 - DNA, 122 bp, Homo sapiens
cggagctgagccgagccaggctgggccagggcgcagcctctctcctctaagtctgcattccggaaaaggcaggggggaaaactgcaatttaataagcacctagtcgggcccgggtcacccat

SEQ ID NO: 342733 - DNA, 122 bp, Homo sapiens
tctttcctaatcataggcaattttctcaactgctttgcccatgaggtcccggctaagagccgtaagagaatgccaggaagggcagaccatccccgtgggaggcggaacggcagagcgggttt

SEQ ID NO: 342734 - DNA, 122 bp, Homo sapiens
ccaggctgctaacaagtcacgactgtgaaattttagaatcagaggtcacaggcagggctccgaaacccacactcctgtggctgcagcagtttgacaccgagtactcattcctcaaagaagtc

SEQ ID NO: 342735 - DNA, 122 bp, Homo sapiens
ccaaatgtatccccgccctaaggggcgctggtgggaggagctaaatgtgggggcggggctcggagtccagcttattatcatggcatctcagccagggctggggtaggggtttgggaagggca

SEQ ID NO: 342736 - DNA, 122 bp, Homo sapiens
aaaaaaaatccttagggaccgcccagaggctggtgacacctgcactggtacctccatggccgcgcctctgaggtcaccgctccagaaggtcccaggccggcgtggaaacctattactaagtg

SEQ ID NO: 342737 - DNA, 122 bp, Homo sapiens
taaattactactacttgaattgccttttccccactttcactcctactaacaggaaagactcggtctctcccagaggattcagggcctccgtagcgggctgctgtcggcctccctcccggcct

SEQ ID NO: 342738 - DNA, 122 bp, Homo sapiens
gagtcagggtgatgcataccctctctcctcagccacatggcagctcttggagcacataggcgtccctatgcttagctcagtgccttacacaaactaggtacactgataaaggcatgttgaag

SEQ ID NO: 342739 - DNA, 122 bp, Homo sapiens
gtggcgcagtcttggctcactgcgacctctgcctcctgggttcaagcaattcttgtgcctcggcctcccaggtaggtgggactataggcaggcaccaccaagcctggctaattttttgtatt

SEQ ID NO: 342740 - DNA, 122 bp, Homo sapiens
ggtggcctctgcccgggagtcaggagtcatcccctttgttcttccttgccctgggagggccgctaggagggggtaggccctcggccgggcggggccggtgggcacctgggcgggcgaatctg

SEQ ID NO: 342741 - DNA, 122 bp, Homo sapiens
ctcggcgcgcttctctcccagtgcgcagtggcctggtgggtcagccggcggcggctggagcgcggggccggccctgcgcacgaatgaatgggcgcccgggggacgcgcgcgctcggggctga

SEQ ID NO: 342742 - DNA, 122 bp, Homo sapiens
cggctgggggagggaacgagggcggggctctcggaaagtcccaggaacaggctgatcctgcgctggcgagaagctcagccatttaggggaaagcgaaatcgaaagcggccgcctgctcacta

SEQ ID NO: 342743 - DNA, 122 bp, Homo sapiens
cgcctcccctcctgcgcgcccggcccggcgcgctccgcccccaggccccgcccgggacagcgtccaggccgggccagggtccccatcccgctagcgagccgcgttcttacccttccgggccc

SEQ ID NO: 342744 - DNA, 122 bp, Homo sapiens
gtccaactacatctcctcgtgatggaggctggacctcctccattctgtcccccttgatgtcgccctctcctttccttcctgcaaacccccacccaggcccagagatctccaaagactgagga

SEQ ID NO: 342745 - DNA, 122 bp, Homo sapiens
aagcccagcggatctggaaggagaccccgccgcgaccggggaaaattgagcgaacttgggcgcaaaacccgcccggcaactcgtgacgtcatctcgtcccgcgctcggataggctgtaccca

SEQ ID NO: 342746 - DNA, 122 bp, Homo sapiens
cgcaggtaggcgcgcagctccacccttacggtcccgcccagaggcaagccccgcccactacgagtcttgctccctgggaggagccctgcattaaaataagccccgcctgcgtgggagccacg

SEQ ID NO: 342747 - DNA, 122 bp, Homo sapiens
gcgtggttccgcggcgatcccggggttggaactggctctgggaccaatggctcgggcgagcgcttttctggcgccgggacctctttctggcgccgtctggcacttgcgcgccctatatagcg

SEQ ID NO: 342748 - DNA, 122 bp, Homo sapiens
ttaattttcctttctgaagatatcgcaggaagctgttcgtatcttaaaaactccaaaccccgcgctctccctcctccctgcctcccccccacccccgccctccagcctcgcccaccagctcc

SEQ ID NO: 342749 - DNA, 122 bp, Homo sapiens
ctaataaggaatctaagaatctgcgactagaaatcaagtgtcctggttggaccctttccacgttgtgcaaagggttttggtgagggctgaatgcttcgtgggctctttctgcttaaccatac

SEQ ID NO: 342750 - DNA, 122 bp, Homo sapiens
cttccacatgagtgtgcactgcagacacatctggattcccaaggtccagaacaagaagctcggaaacgtgcttagatttccaagtgttcagttctcaataccatgccattctctttggagtt

SEQ ID NO: 342751 - DNA, 122 bp, Homo sapiens
actgtgttattttatctaatccattgcttaatgagtgtgtttttccatgaatgaatataccgtggttcatatgttagcatggcagcattttcagatagctttttgtttgttgggaagttggg

SEQ ID NO: 342752 - DNA, 122 bp, Homo sapiens
tgaacgagactccatctgcaatcccggcaccttgggaggcggaggctggcagatcactcgcggttaccagctcggccaacacagcgaaaccccgtctccaccaaaaaaatacgaaaaccact

SEQ ID NO: 342753 - DNA, 122 bp, Homo sapiens
gcaatgggaggagtcgtgagaacctggatgacagcgggctgagccaccggcttggcgcggcggccaaactggtgggacagtgtctccaggtagtgaggcccaacctctttaaaacaaacaaa

SEQ ID NO: 342754 - DNA, 122 bp, Homo sapiens
gtagcatttatgccaaaggagctaagaggcatagatagatacagcacacaaacttgttttcggagaataaaaccatgctgtggtgcttacttagacagatattgtgccttatacaagagcca

SEQ ID NO: 342755 - DNA, 122 bp, Homo sapiens
tccagatgcttcccaccaggcatctcggagagctccacggggaggcctggagcaggagcacgcgggcagaatccctctccccgcggggattgtgtgtgccacatcagccagggcaggagtgg

SEQ ID NO: 342756 - DNA, 122 bp, Homo sapiens
ccccagggctggggccttggagcctgggaaagcaaccgggggtctctggggagtcctgagcgcaggcgcccgcccacggccaagaccgtggcccagccctcctcagacctcccaagggggcc

SEQ ID NO: 342757 - DNA, 122 bp, Homo sapiens
gacccgcggtttcggtcagacccgcccgcgggctggtttcgattagggccagtaggagggcggagcggccgggacgccaggagggaactagcctaagtggggacggtccccgtgcaggagac

SEQ ID NO: 342758 - DNA, 122 bp, Homo sapiens
gtctcttcacgacaagttcaaggtccagtacccacagagtcaggcttgtaagatgagtcacgttcgtgacttgccccctgtgtcagggtctatcatctgggctaaacagatcgacaggcagc

SEQ ID NO: 342759 - DNA, 122 bp, Homo sapiens
agaagcttattttatggagccaaatttaatcagaatgtgggtgacaaaaatggatcatgacgttaatgatctactgcattagagtccaagttgttcattgagcgagtgagagtaatgttgta

SEQ ID NO: 342760 - DNA, 122 bp, Homo sapiens
atgcaataaggactcaagggaggaagagatgagccagccctgctatgctgaaactactcccggcccagtgctagccctttgggaccccgtttgaacgtctgactgccctttgacacctggac

SEQ ID NO: 342761 - DNA, 122 bp, Homo sapiens
cccaaccgtcgttggcggtcggtttttcatcctttgatcccggggccccttcctgtaccgcgtcctcagcatctggaatcttgagccccacggcatctgaggtgccttatgcctctggcatg

SEQ ID NO: 342762 - DNA, 122 bp, Homo sapiens
cttcaatttcctcagcagtcaaatatccctggtcacttacctctcccgagggcagcgccccgcgcttgacctcctcgtaagcgcctacctgctcccaggtggccaggaaggcgtgggtgggg

SEQ ID NO: 342763 - DNA, 122 bp, Homo sapiens
ggggtctctctgcagttgtaatcaggtggcagctggggctggagtcgtctgaaggccaaacggggtggaccgtccaggatggcctcttcgcccccgccctcagttgggtggctggaacagct

SEQ ID NO: 342764 - DNA, 122 bp, Homo sapiens
actgaatgtttgtggtttggagtccctgaataataaagagggaatatatttgcagaaagtcgcatagggttttttaatgcagaattttgtcagaagacaatggcgctgcatgtttttctttg

SEQ ID NO: 342765 - DNA, 122 bp, Homo sapiens
ccagccccagccaggcgcggtcggcgcgtttctctttctcttctcctactctcagcggagcgggtggaagcttgatttcatgccgtttattttactttgactgttttcaaacctatcaagtt

SEQ ID NO: 342766 - DNA, 122 bp, Homo sapiens
gcggagagatgatgtttaggtccgggactgtcagtcagtgcgcggccaggtacgggccgacgggcccgcggggccggcgccgccatggcggccgtgtttgatttggatttggagacggagga

SEQ ID NO: 342767 - DNA, 122 bp, Homo sapiens
ttgtaggatgctcattatgagtcttgagtctgactcagtccagaaagcaatggaatattccgcataaccacctaaaggacttctctttcccccttccccagggtctgtttctcctgtaaggg

SEQ ID NO: 342768 - DNA, 122 bp, Homo sapiens
attctgaaactgaagtctttgcaaagagtacctggtctatcaatccctcaatactggtaccgtttacattaaacaactcattcagccatttcttcaatattttataatcgttgccatcttca

SEQ ID NO: 342769 - DNA, 122 bp, Homo sapiens
tcggactgaggctatgtctttcgctccttttgtcttttccaggcattagaactgtcatggcgccttcaagaagaggtaggaggccctctctgcgtccagcagaaccatctggggcacctgga

SEQ ID NO: 342770 - DNA, 122 bp, Homo sapiens
ctggtgaggtatcagagtcatcagaggccagttgctaacaaaactcaaattcccaggcagcggggtttttgacaagcatcccactgacgctaactggcccctggaggtacctgccccccacc

SEQ ID NO: 342771 - DNA, 122 bp, Homo sapiens
gccagaagagggtaagtccacaggagcccagggacatcaggatcaatgtcacgtgggacccggggacagaaaaaggaaatcaggtgcaaacccaagcgtctgcataaggtgtggattccgtt

SEQ ID NO: 342772 - DNA, 122 bp, Homo sapiens
aaggtgggttattacgttttcattttccttttgtgctttatgaataatattttctcttaccgcattttctcaaatatgtatcagaatatttcatttttgtctacattccatttatgcttgaa

SEQ ID NO: 342773 - DNA, 122 bp, Homo sapiens
gcatcccccgcctcgcgccaagactaaaattaaaaagccaccccgagaaaacccaagagccgtcaccgctgaaacaggaggcgaaaacctttctcgctacactgccaagcaggagcgaacag

SEQ ID NO: 342774 - DNA, 122 bp, Homo sapiens
gaaaagatgagctggagtcaatttcatgttttggactcatcagctaagttctgttgcagtcgggggtcagagcagcttagctttaaagaggcagaaataaaagagcttgctattcaagtagc

SEQ ID NO: 342775 - DNA, 122 bp, Homo sapiens
agtgcaggttgaggtggtcgtgcagggtggacttctgtgtgaagcacttgccgcagatgccgcacgagtgtgacttgacaccacgatgcacgttcctgtggtggttgaggttgttgctgtgg

SEQ ID NO: 342776 - DNA, 122 bp, Homo sapiens
atgggcggcgtgcccggcggggtcacggtggtgacgatgttgggggtgcgcggcggggtgcggaccgcgtgccgctgccggggcgatgggggcagggaacggtggcccgactccagtggcgg

SEQ ID NO: 342777 - DNA, 122 bp, Homo sapiens
tgtctctcaaaaaaaaaaaaaagaaagaaagaaatgcagaaactaagatccctactgaatcgcaatctgcattttaacaagaaccttggatgcatgttaagagttcgagaaacaccgttcta

SEQ ID NO: 342778 - DNA, 122 bp, Homo sapiens
cattcacaagcctcagagggacccagttagagtgcatagaaactaggccatgtatgagaacgacctgtggccaaatggagaaagttctgggcgttgatgcagtagaactttcatcctcttca

SEQ ID NO: 342779 - DNA, 122 bp, Homo sapiens
ctgggctcaagcaatcctcctgcctcagcgtcccatgtagctgttactacaggtatgcaccgccatgcccagctgatttctttattttgtagagacaaggtcttgctgtgttgcctaggctg

SEQ ID NO: 342780 - DNA, 122 bp, Homo sapiens
cggctggggcaggagtcagcagctaggaaagccctcatcgcgagttcctaccacccggcacggcctgaggtctacgactcactgcaggtaccagccagccagagtgcttgaaggccggtact

SEQ ID NO: 342781 - DNA, 122 bp, Homo sapiens
tggaaaatgagactaatgatactatcttagagcaggtgtccccgacctccaggccgtggacgggtactagtttgtggcatgttaggaactgggccacacccagcaggaggtgagctgcgggc

SEQ ID NO: 342782 - DNA, 122 bp, Homo sapiens
cattcactaatatatgggacaaagagtgaagggcacatattctggtgaatataatgggttcggatttgaacatgttgggctttttgagtcattcaggtggagattttaagtggtgggaacat

SEQ ID NO: 342783 - DNA, 122 bp, Homo sapiens
aagaggaaggtagtcttacacagacctgggatattttcatagatttcctctgcttgcctccgcaccatacagcttggattgatcaggttcttcagaagctggtaaaactcttgcttttctga

SEQ ID NO: 342784 - DNA, 122 bp, Homo sapiens
ttgctgggggatgagtgcaacccgggttctgcaggagtcaccagacgcgtggggaaagggcgtccggggcctggggcaaagccggggtagaatccgagagcctcctgcctctgggtcctgtc

SEQ ID NO: 342785 - DNA, 122 bp, Homo sapiens
gggggcggggggcgacccaacgcccggaaacagggtgtccttcccactcggggcaggccacgggtccgccttcccacccgaagttgagggaccccaagatgtaccccctccctgtaaggtgg

SEQ ID NO: 342786 - DNA, 122 bp, Homo sapiens
tacttttccttcctgggaaacttgtaattacagctgtaatgcagtcacagtttgtaattacgcttgtgtgcgtgcgtgcgtgtctgtgagccctactggatccaagccccagcaggcaagga

SEQ ID NO: 342787 - DNA, 122 bp, Homo sapiens
cagcggaatcccacggtgcaggcccagagctgcgccgagagccgcgcgtccagctcctcccgggcctgggtttagggtccacagctcttgccaaattccagaggctggaagggacgcgaagt

SEQ ID NO: 342788 - DNA, 122 bp, Homo sapiens
cggtgaaaagccccactcctccgcgtggaccgggatcctcaggggtgcggcgccaccccacgtgctgacgtatggcccagaagccgcctcatcgcaccgccccaccagcctggaggagcggg

SEQ ID NO: 342789 - DNA, 122 bp, Homo sapiens
gtagtgagccatgagtgttccattgcactctagcctgggtgacagagtgacaccctgtctcgaaaaaagggaaaaaagaaagaaagaacagctcagtttctaagagaagggcctttcctggt

SEQ ID NO: 342790 - DNA, 122 bp, Homo sapiens
tgtgcccacaagcagtaggaactcagtaaattacaatgataaacactggctcaagtgaaacgtatccaaggtagtttttgttcattctttccgaagtaaacaatcaaattaattctggattg

SEQ ID NO: 342791 - DNA, 122 bp, Homo sapiens
ctcggaggagcagttctgggaggcctgcgccgagctccagcagcccgctctggccggggccgactggcagctcctagtggagacctcgggcatcagcatctaccggctgctggacaaggtag

SEQ ID NO: 342792 - DNA, 122 bp, Homo sapiens
acacgaccggtggcaagagcccggataaaggcggagctaaaggtgccggataatgcatcacggagcgcgtgtgcgcacgccgtagggggcgggccgttcgggcttggtttcctgggcgacca

SEQ ID NO: 342793 - DNA, 122 bp, Homo sapiens
ctgagagtgaatgcaggctgtgaactgctcaaccgaaaacaaagagaggaaggagaaggacgtagaagggctagaaaagaaaatagaactgggggaactgcagataaagactgggaaatggg

SEQ ID NO: 342794 - DNA, 122 bp, Homo sapiens
tagaattgaaatacttttgggggaaagtcacacttctatttaagtatatgtatcttttttcgggattatgtcatagtgcaatgtaaatcttagttatggtatttagaatgtcagaatgtcac

SEQ ID NO: 342795 - DNA, 122 bp, Homo sapiens
ccacacttgatggtggaatataaacttggtttactgtaatagtgtgctgttcatggaaaccgagggctgcatcttgtttatagtcatctttgtactgtaatttgatgtacacaacattaaaa

SEQ ID NO: 342796 - DNA, 122 bp, Homo sapiens
tggacagcgaccattcagtggctagagtgaagttacaaagttgcaaacgaagattccacccgcagtcagtctgatttgttgaggacagccaatttcccgtctactgtgcagaaaaggtaggt

SEQ ID NO: 342797 - DNA, 122 bp, Homo sapiens
aggtgccacaaatgaggtcccacggaccctgctgactggctctgagtcttccggctagcccggctgtcccaggccccaagtgctctttcccaagggctggctgccttgcaggtctccagaag

SEQ ID NO: 342798 - DNA, 122 bp, Homo sapiens
aagctaggaaataccacgggagaagagtagatgctatggccagaaagatgagtctggggccgtgaagaggaggtgttccatcagagaagttcaccagggccccactgtaatccagatggagg

SEQ ID NO: 342799 - DNA, 122 bp, Homo sapiens
agacactgaaatttagttccaaacattgccttagaggattcttgatattattcattctgccgatgatccactcagaaaatgaaacctgagtacggcgacattggagaagtcgttaaagcatt

SEQ ID NO: 342800 - DNA, 122 bp, Homo sapiens
gccagtgcagcaggcactccgagcctctggggcctgtcatgtactggcctctacctgtggcgaggctcctccaatgggctccctgccttccggaaagtcctaatccagagctcaggtgaatc

SEQ ID NO: 342801 - DNA, 122 bp, Homo sapiens
ccagatgatgctgcccagcaccaggcccaggacgatgagcaggggtgctctcagggaccacggtgatgccttgtgggacaggtagaaccaatcttggccagcctgaccacaaggatgcagat

SEQ ID NO: 342802 - DNA, 122 bp, Homo sapiens
acacaacaaatgttaatgtcctttctcatgatcctgtcagctatccaatcagccggactccggttctctcttgaaaagtgactttccaatttggatgaccattttggaggagactctgtcac

SEQ ID NO: 342803 - DNA, 122 bp, Homo sapiens
ataaaaaagacagggcatggtggcttacacctgtaatcccagcactttgggaggctgaggcggtcagatcacaaggtcaggagttcgagtgcagctgggccaacatggtgaaaccccatctc

SEQ ID NO: 342804 - DNA, 122 bp, Homo sapiens
ctggaatcatacttgtttatttacttgactctctgtctctccctactagactgtaagttccgtgaaggcaggaaacttttttttattctctactccatctctactacctaaacagtacctgg

SEQ ID NO: 342805 - DNA, 122 bp, Homo sapiens
aacctggagtgatagattcactttcatgtttcagcctgattttttcccactgtatgcccacgcgtgtgtgtatgagtgtgtgtgtgtgcgtgcaggcacacacacgcacactcacattttcc

SEQ ID NO: 342806 - DNA, 122 bp, Homo sapiens
ctgtcgccgccccccgcgccgccgggctagggcgatgcgggcgcccccggcgggcggccccggcgggcaccatgagccctctgctccgccgcctgctgctcgccgcactcctgcagctggcc

SEQ ID NO: 342807 - DNA, 122 bp, Homo sapiens
agggcgcaatgtagcagacacttagaatggggacgggggtccctacctcgttcatctcctcgatgttggtgatcatgacaatgatgggcgtgtgctcctgccacaccatgcgccagaagtcg

SEQ ID NO: 342808 - DNA, 122 bp, Homo sapiens
cgttcaggtcatctgtccagggtgcatcgagccgggagggctcaccagccaggagcagcacgccactccactccccctcgcccatccgtgtgcacaccgtggtcgacaggcctcaggtacgg

SEQ ID NO: 342809 - DNA, 122 bp, Homo sapiens
gcgtgcgggagggggcgggtggggaaggatcgcaggcgagattacgaggcgaggctcgcgcgcccgcccccgccctggcccccagtgcccacccggtcggcccggcacagccatgatcaagg

SEQ ID NO: 342810 - DNA, 122 bp, Homo sapiens
cagctggtctgagctgtgtggatctcacctccagctgtgcacctatataataaccagacacgtcctccagcccccaagatatacccaggaattcgaaaggtaaaatgaaagtcacaacttcc

SEQ ID NO: 342811 - DNA, 122 bp, Homo sapiens
ggaaagcaggttctggaagaggtgcaggagagtagcaaagagcctctggctgttgtctcccgactggtcactagagggaggcctgggctcagaagtgacaccacacccacctattgttgagg

SEQ ID NO: 342812 - DNA, 122 bp, Homo sapiens
ccgacggggtgatgcatgaatacagtcattattcaaattagctaaaacacctaactcattcgggtgagtctcgccagtccctctgggctgactgtcccgccccgcgcttacacccgggagcg

SEQ ID NO: 342813 - DNA, 122 bp, Homo sapiens
gaatgtcctgggagcgtgtggagagtggcgggcagagaagcctgtctgccagagagcacccggcacaggggagtcagggacagcatcagcctatggtctcggctttgggttttgtttttcaa

SEQ ID NO: 342814 - DNA, 122 bp, Homo sapiens
aggagaggacctggcgagggacggggttcctggggctgagaaagcagcccccggaggctgcggggcaagcctgaccctgacccagaaccacaggctccccaaggcagaaagtacccctgctc

SEQ ID NO: 342815 - DNA, 122 bp, Homo sapiens
agttagtttagagagctttctctgggacatggtaaaagacaacctggaatgaagtactagcggcagtcaggccagtgagtggggttggcaacagagcaggtaggtagacctgcatttggttg

SEQ ID NO: 342816 - DNA, 122 bp, Homo sapiens
gtgatgactgttcttaagcatgaccctattctgccagaaaacaggccagcagccaactaacgtcctcagtggggcagaagaggctagggaacaaatgagaaaagcttaaaagtcttggccaa

SEQ ID NO: 342817 - DNA, 122 bp, Homo sapiens
tgcggatttccaccagggggcgctaggacgccacgacctttcactatgtgcaccagggggcgctgccgcccgccttggccatcccgggctgggaagtccgacccttcgattaagccccgcct

SEQ ID NO: 342818 - DNA, 122 bp, Homo sapiens
tgcagaagccacgctagccggtaccgcattagccagcgcagtcgccgggatcaccgcaaacgcttcctgcttgcgcttcgagccggccctgcgcactgcgcatgctctagccgcggcgccgc

SEQ ID NO: 342819 - DNA, 122 bp, Homo sapiens
cttcacactgctctggggtaacatctgaggcctcacggattccaccctgctcctctgccacgccggggggtggcacaggacaggcaggcgacagggtggggctgaggcgcaggccctgcgac

SEQ ID NO: 342820 - DNA, 122 bp, Homo sapiens
ccatggtggcagaatcctcatgccagtttctgtctcctgcaagttactctctctgtgtgccgtgcttaagcatcccacatgaaaagagccatgtcgggagccgtggtggctcccctctcccg

SEQ ID NO: 342821 - DNA, 122 bp, Homo sapiens
cgtgcaggtcgtagttgtgcacgccgttctggtggtcctggaaggggaccacagtgagggcgaagggccctacgctgcgcgggctccggttggtcagccgcacctccaggcgcacggggtcg

SEQ ID NO: 342822 - DNA, 122 bp, Homo sapiens
acaaaggaagtagtggcagagagcacactggtggggagaagcctccagtagccacggtcccgcgagcgtgcaggcttgcagcaggtgacgcggcagacccatgtttccagcgaggctgctcc

SEQ ID NO: 342823 - DNA, 122 bp, Homo sapiens
catcccaaaccacacacaaagaaggaaagcacaatttcgacaggtcttgggaaaactcgacgaggccaagtatgaggccacaagacaccgtttttagttccgcgttctccctcttctaatcc

SEQ ID NO: 342824 - DNA, 122 bp, Homo sapiens
gcatacacattatctcctgcagacacagatatgttctcttctgtaacatctcaactgcagcgttattgcataattgtgttgatatcaatatctttcgatgactgggcatgagcaatgtatat

SEQ ID NO: 342825 - DNA, 122 bp, Homo sapiens
ggggctctagaggctgtggggacagagtgcatcaacctggggtgcatccagtccatgaggcgggtgtttgcccgaaaaggagacaggaatagagatggagctatggcagagatgcagggatt

SEQ ID NO: 342826 - DNA, 122 bp, Homo sapiens
cgggggaaccgggaggtagggccgcacacttggaggaacgttgcctgggggttttgttcgcgcacccgccccttcccctctcccggtaaatgtttaacaccaccgctcatccccaagtccag

SEQ ID NO: 342827 - DNA, 122 bp, Homo sapiens
gggaaaaattcagtcctaaaggctaatctagtccagcctaacaaatattaaaaacaaacccgaaagactcaaactgtttcctgcatcccagtacaaagctcaagagtatttataggaatgca

SEQ ID NO: 342828 - DNA, 122 bp, Homo sapiens
ggagggtgggggcgggggcagggcagcgctgagatttccggggagcggcaggtgaggccgcgcggggcgggtgacggcacccgggcgggctcctttccaggctggagcccgagactgccacg

SEQ ID NO: 342829 - DNA, 122 bp, Homo sapiens
ggctgaggacctgagggccggcccgggctctcttggtgccagggggtctgtggggctgcccggccctcatctgctcggtggctctaggtggccccagggagtgcctcaggccccagccgact

SEQ ID NO: 342830 - DNA, 122 bp, Homo sapiens
tttgcagccctgggaggaatttttgaagcttgaagcacttttgtttgtgcatgaagactccgcactgctattggggcatttgggtgcctctccattcgtcccattagagttggggggctgga

SEQ ID NO: 342831 - DNA, 122 bp, Homo sapiens
cgggtgacggggactgctgggcgtcgggtggtagcggtggtgaggagaggggatcaagtccgggctcaaaccacctttgagaccctcccattcaggtgttatggggggcggtagggagagca

SEQ ID NO: 342832 - DNA, 122 bp, Homo sapiens
cttggcactccttcttcctgccgccttgtgaagaaggtgccttgcttcccttttgccttccgccatgatcatgtttactgaggcctccccagctgtgctgaactgtgagtcagttaaacctc

SEQ ID NO: 342833 - DNA, 122 bp, Homo sapiens
acgcgaacaccagataaatggattacggcaagccaggagacaatgagtgcccactgaagccggcgcggcggcaggtgaaaaatgctttaacggaatatgtttcccatacatgaatcaccagc

SEQ ID NO: 342834 - DNA, 122 bp, Homo sapiens
tactcatctggccagccctggcccaagatgcacagaactctaagagcgaaccctgagccgcggagtatactactgacagaaacatggcaggcaggaaaaatgaccctcacttcctctaggcc

SEQ ID NO: 342835 - DNA, 122 bp, Homo sapiens
gacaggatgtgggcaatcgaactagctcttgaaactgaacgttttgcaaaaggcccctttcgaaatttgaaaccctgtggccaccggccagagctgagtctggcttgtggggttcgcggggg

SEQ ID NO: 342836 - DNA, 122 bp, Homo sapiens
gggctggggaactgggtagcagacacaggctgaggatcggcacgggagcatggcagccaacgtctcgggtaaggagaaggcatgttggctgtctctgggggtctgcagattgtcaggaggtg

SEQ ID NO: 342837 - DNA, 122 bp, Homo sapiens
ccgcccgcagggcacgcagctgactagcccagcagttagtgcgggacgactgccggtgagcgtgaggtcctgggctgtatgtgcggatactgtgtgcgcccgtagatgcgtgtatttataca

SEQ ID NO: 342838 - DNA, 122 bp, Homo sapiens
actaatacttcacggcgcggtgggtcacgcctgtaaccctagcactttgggaggccgaggcgagcagatcgctgagcccaggatttcgagaccagcctgggcagcatagcgggacccgtctc

SEQ ID NO: 342839 - DNA, 122 bp, Homo sapiens
cctgggcctgctgaccactctgagtgcagggcctcggagcccacacccacctggaactggcgctggcccgcaaacgtcacgggcaaccctggcgtcacggcccgcacctctccttccacgcc

SEQ ID NO: 342840 - DNA, 122 bp, Homo sapiens
aacacacgggaagcagaggtcaggagcagagccccagggggctcctgcacagagccagggcgaagctagagagacgacgcagaccaccggggcccagggtgacacggcacgcgcatcgcagg

SEQ ID NO: 342841 - DNA, 122 bp, Homo sapiens
gtaccggtccatggcctgttaggaaccagtccgcacagcaggaagagagctgccagcaagcgagcatcaccacctgagccccgcttcctgtcacgtcagcaggggcattagattctcgtagg

SEQ ID NO: 342842 - DNA, 122 bp, Homo sapiens
taagtagatacaacagtgtataaacaaggaaaccaaggaagatttttctccttcagaactcggaccctgaataccaggttgagctggagctgagtgagtaataaaatgaaaggccctttaat

SEQ ID NO: 342843 - DNA, 122 bp, Homo sapiens
ggccgcgggactcacccgcggcgctgaagccgaagccggcggggacaggcgagtgttccgcgagctccaatcggataacaaccagtgacacactcatagggcaggcgctggccggcgcgggc

SEQ ID NO: 342844 - DNA, 122 bp, Homo sapiens
tgaggtgaaagactttgctccgggccttgcgcaccaggtcgctgggcgagatgccttgcgcgcagccggcgcatttcgtgccaaagcgcctgtggacacaatgtgcctgtcactatggggtg

SEQ ID NO: 342845 - DNA, 122 bp, Homo sapiens
tctttggtattcgctagaaaatttctcccgcgaagaacgcactagaaccggcaatcactgcgcccctatctacatatgcccgcctcttatagtaacgtcaccacctgcttctgtacgatctg

SEQ ID NO: 342846 - DNA, 122 bp, Homo sapiens
gacatccagctcgcccgccgcatccgcggagagagggcgtgattactgtggtctctctgacggtccaagcaaaggctcttttcagagccaccaccttttcaagtaaagtagctgtaagaaac

SEQ ID NO: 342847 - DNA, 122 bp, Homo sapiens
aggtttcgggcagctccacggcaccaggtttccagaatccaattcctaaagaaacagcaacgggggtggggatgggactcaccatggctgaaaaactgtgaactaacatctgcgaagagtct

SEQ ID NO: 342848 - DNA, 122 bp, Homo sapiens
ccacttagcagccaggtgctcctggtatgattagtcagtgatgtgagcacctggggtgggcgggcgttcacctctctcgtggtcagggctttggccggcccctgtccattggcccactggcc

SEQ ID NO: 342849 - DNA, 122 bp, Homo sapiens
cagctccctgcagaaacgctttagaagcgtccacgatttagccaaacccagagtgcccaacggacgcgccaaagaagaaaaacggacggacgtgccaaaacttgaaggctagcacaggacag

SEQ ID NO: 342850 - DNA, 122 bp, Homo sapiens
aggcggaggcgggtggaatttaggaggtttgtttcaaaggctcagggcgctgtaccgccacgccagccctgtcccacctgggactccctagaagggtcagagcatcaatgaggacggtgtcc

SEQ ID NO: 342851 - DNA, 122 bp, Homo sapiens
taagcctcgtaaaccgcagccatggggcggggcttgcaggcccggaggctggacctgagacggaagtgggggaagctggctcagatgatgggccctaggggtgggctttgagtgagggactc

SEQ ID NO: 342852 - DNA, 122 bp, Homo sapiens
gggcagccccgcaggctctcagctgggccaacatgaactagcctgctggctgttgttccccgtggctgttgctcctagatctgttcttttgaactccagatcagaaaagaaaatagctggag

SEQ ID NO: 342853 - DNA, 122 bp, Homo sapiens
tccccagtttcccgcgggcctggaggtgacagatgaggtactggagaaggcagctgggaccgatgtcaacaacatgtgagtcactctgcatggctacatagccagttcccctcggcttcccc

SEQ ID NO: 342854 - DNA, 122 bp, Homo sapiens
gggaggggtggagagtgggtacagtggggcagaggtgccgggccaagcgagaggggaaggcgtgggtcaggccccgccccacacttccccaaagccgagatgcccaccccttccttgactcc

SEQ ID NO: 342855 - DNA, 122 bp, Homo sapiens
tcttccttcaggcctgagcagttcctactcttagctgagaacatctgctgtttcctgaaccgagtctgttcactaccaggtccctatcccctagtatgggtcttaatgcttagatttccagt

SEQ ID NO: 342856 - DNA, 122 bp, Homo sapiens
tgcccggtggcaccaggcagctgagcaggccctaatcctgtctagggcagccttactcaccggcagatggctgactggctgtaggctggaccttccgttgcagtcagagcctgacccacctg

SEQ ID NO: 342857 - DNA, 122 bp, Homo sapiens
agaacagagacgttgctgttagaatacaaagctggtccaggaagggcacagagggaatcgcgtctctgcttggccaccctgccatccctttgtccctctcttacacaaacatcgtccatccc

SEQ ID NO: 342858 - DNA, 122 bp, Homo sapiens
gcctgtaggaccctccatggttagatctgtgattttgtgcccattccagcagccccacctcgatggattaataagttcccttagacttaaaggtccttagagatgcctcctccatcctcgcc

SEQ ID NO: 342859 - DNA, 122 bp, Homo sapiens
gggcccagcttgccgggctcctggatccacgtccaggtcgcaggggaggggcccgccgcccgtttctaagggcctggctgcattcctgcggtcacgatcaggggtctttgctttctcccatc

SEQ ID NO: 342860 - DNA, 122 bp, Homo sapiens
gatggatatttaaaacttatctaaaccctgtggtcttcaaaactgttgatgacatcttcccggaaactcactcagctttctagcgacatcactttcacttgatttttcttatctgacttttc

SEQ ID NO: 342861 - DNA, 122 bp, Homo sapiens
aggtcacgcacctggtcagcggcagagacaggactccccccgcccgggcccgcggattgccgggtcggttctcagtcaccgcacaggtgccctggagagtgcgaccaccccctgccctccgc

SEQ ID NO: 342862 - DNA, 122 bp, Homo sapiens
cgacggtaattaatactcgctacgccatatgggcccgtgaaaaggcacaaaaggtttctccgcatgtggggttccccttctcttttctccttccacaaaagcaccccagcccgtgggtcccc

SEQ ID NO: 342863 - DNA, 122 bp, Homo sapiens
gaaatattgtctagaacaaggcccgaggcactcagagaggccaggactattgcaggttgccgcttgcgacttgcatcactcaacccaagcagtgcaaacaatgacgggtgtcccaggggccc

SEQ ID NO: 342864 - DNA, 122 bp, Homo sapiens
aggagagggaccctagccccagcctctctggggcaccggaggtggagcacagggacttctcgggaaggctaggcctttcttctcagtgccagtgccaggcaaagacaagcagaggccaggcc

SEQ ID NO: 342865 - DNA, 122 bp, Homo sapiens
gccttcaaatgctcctggactgtggcaaccaagtctgtaagaaacaggacctccaggttccggcccagggaggttggaattcagcaatatagaaagggtggtggtgccgcaggaaagggtgg

SEQ ID NO: 342866 - DNA, 122 bp, Homo sapiens
ctggagcggccgccaacaggcaagaactgggcctgaggtggccaggctgaggcaagagcccggcccccatgggccactgtgcgggagaagctatggttgttcgggcatccaacacacgtgct

SEQ ID NO: 342867 - DNA, 122 bp, Homo sapiens
agcccctgtggccccctcccttcgccgcggcgcccctgcctcctttacccggtgccgctgcgcacctctccgcatctctggcccggtgcagctgcgcacctgctccgccgcccgcgcccagg

SEQ ID NO: 342868 - DNA, 122 bp, Homo sapiens
ggcgcctcccggcgcacaggccgctactcagtcgtcgcctcctccccggaggccgccccgcgtctggtcgactggctccccggttgcccttcgaccatctctcccagcacacgcggggatga

SEQ ID NO: 342869 - DNA, 122 bp, Homo sapiens
cagaggaaataatggactccactgtggagagttaaaaggtttcacaaccttttccaacctcggttttcatcattctaaagcactgaacagaattcaaactttttcaagaacattatctattt

SEQ ID NO: 342870 - DNA, 122 bp, Homo sapiens
gggtctctgggtaggaaagtttctcccgagggcgagagttaaagcgcctccagaacaaagcggcggcggcggcggcacatggggcaggccgcgggccgggagggggcgcgcccacgaggtac

SEQ ID NO: 342871 - DNA, 122 bp, Homo sapiens
cataaatggctttgtagcatatttatttacaaggctatactaattaaaacagtgtggcaacgacattaagatcagcggaacagagcaggtaactcgggaaaaaaaaggatttcgctgcttaa

SEQ ID NO: 342872 - DNA, 122 bp, Homo sapiens
cggcgtcccgggtgcgcggtgggtggcggcccgggtgcgcggtgggcggtggcctgggtgcgcggtgggcggcaccatccaggcttgctgcgatgttggcaagaggacgaggtctcctcacc

SEQ ID NO: 342873 - DNA, 122 bp, Homo sapiens
tgcatgtgtgtggatgagggagggagaattttaggtctgttatagagatatccagttaagcgatgtgaaaaaaacaacaaccaggtctaaagtttgagactggagatggaaatttcactaaa

SEQ ID NO: 342874 - DNA, 122 bp, Homo sapiens
acggctcgctcctcgcctcctcccccttcggcgggcaccgctagtaccgcgcaaccaaaccgccccctgctccaccgccgcctcctcaggccgctccgcccacagccagcaaggtaagggag

SEQ ID NO: 342875 - DNA, 122 bp, Homo sapiens
tcagaaatgcggagagtagcagacacaagccgcaagggggatacaacaaaatctactgctcgtgcaagatccgacttcccagaccccttcgcattagggcggagcgtgcacccggcagccaa

SEQ ID NO: 342876 - DNA, 122 bp, Homo sapiens
tgctgtcacgcggggaagtcccatctgaactggggccttatgaccttcggtacttttattcgaacgtagcctgcgtccctgcctggaacctggttcccgccctgaaggacccttacttagca

SEQ ID NO: 342877 - DNA, 122 bp, Homo sapiens
ctaagctgccgcccgatcttacccctgacccgagggcggcctggagagcttggtctgtagcggtttccttcggggcaggtggggactgctcctttgggaggaaggaggaggcccaggccgcg

SEQ ID NO: 342878 - DNA, 122 bp, Homo sapiens
tctatggtccatacactgtcttaagtgctggggaattaacagtgaccaagaattttagatcgtgacttcatggagctcataatgctaacaattgacattggacaagtaactacaagtttgat

SEQ ID NO: 342879 - DNA, 122 bp, Homo sapiens
ggtttccttgcgcagtgtttgcacaggatgagctaatttcaacacagatttgctgctggtcggggaacagcaatcaaatctggaatgctattctagaatagcttccaagaactgtaaacgag

SEQ ID NO: 342880 - DNA, 122 bp, Homo sapiens
ggcgattgggagggggttctggagctcatgcctggggtcggcccggcgggggtgaccccgcgccctcgccggtgcaaggagaacagctggttcccgccggggcagggaagcgtggacggtgt

SEQ ID NO: 342881 - DNA, 122 bp, Homo sapiens
agtgaatggtaaatgaacaaggggtttgtagggactccagacagtccctgtcaaggctcacgcgtatctggggcgggcctcagtttccggttcaggtactggaaaaataaccggagggcttt

SEQ ID NO: 342882 - DNA, 122 bp, Homo sapiens
cagagcctgtggtgcaggtgaggggaaggggttgggggcagggccctggggctgagcagacgggatagcctggctagggacaggacacttaacttcctcagaggtcaggggcacacccgagt

SEQ ID NO: 342883 - DNA, 122 bp, Homo sapiens
ggagaggtaggatttagggcccgacgcttccgattattttaagctgagccacctagtgagcgaggctgtccgaaggctgactctaagccttttagggaattaaacggaattaaactttggcg

SEQ ID NO: 342884 - DNA, 122 bp, Homo sapiens
tcagagacgatcttcttccctagaaagaagtcgcttacggttggcgtttccctcaggcagcgccgtgggcagcccacaggcccttgtaaggcgcgcgccgcggccccgcctctttcctttcg

SEQ ID NO: 342885 - DNA, 122 bp, Homo sapiens
agtctgaaaattcctcgagtggtagagatgcctcagctaggatgacagcgtggggacggccggcggcgtcccctgccccaggccgcggtggcggcgccgcgaccccgccctctcgcgcctgt

SEQ ID NO: 342886 - DNA, 122 bp, Homo sapiens
cgttaacttctttaatgaacatcctgctgttcaatagtgaggctgcatccttctagaaagcgctgttgagaggtgtgaggaggctgccacgcaggccgcgccgccccgaatggcaggtggaa

SEQ ID NO: 342887 - DNA, 122 bp, Homo sapiens
gcaggagtgcaccggaagtccgcctcccgggacacccaccgcgggtcccaggacaagtaacggactctatttcccaggagcctacgcgctcccccagttttggggccgtcttaaatgtctct

SEQ ID NO: 342888 - DNA, 122 bp, Homo sapiens
tccccagaaatctacatggcctgctgttgaagtcaggtccctgtccaaatcccacctgctcggcaaggccatcactatccagcccgccctgccttcctcatcccggttaatatttccttaca

SEQ ID NO: 342889 - DNA, 122 bp, Homo sapiens
tgaagcacatcgtgtgcctttagcgtgtttctcctgtttctataggcagtctaagaaaaacgctaggtggtaagagcacgcggtgtcactgtccgtggtcctgaaacatggttgcgtgctaa

SEQ ID NO: 342890 - DNA, 122 bp, Homo sapiens
agagcaggagaggagaggggctgctgcagggagaatgcctgacagtggattccttttcagcgaatacagctgggatggggtcatgtacgcacagatgtgttttctgccttatagggagacaa

SEQ ID NO: 342891 - DNA, 122 bp, Homo sapiens
cccactctcgtcaccagcccgcacttcccgctgcctctgagtattctgtgggggctgccccggctgcagccccaggtgtagcctgctggaaatctcacggtgtccaggccccatccctaacc

SEQ ID NO: 342892 - DNA, 122 bp, Homo sapiens
gaccgttggcaccttcttcctttgctggacggtgatccgtggctgtttctgcggtgtgttcgcagtggttgcctggcttggtaacaaacactcttcggagccacagcctgttctcagggtcc

SEQ ID NO: 342893 - DNA, 122 bp, Homo sapiens
gacgttgctcattctggaaccttcatatccgacctatgaatgtgctagactgggtgactccgttccaggttagctgtaatggatcaaggaatcctaaaggggaattaaagggctcagaagca

SEQ ID NO: 342894 - DNA, 122 bp, Homo sapiens
gaaacagccggggaaggaaggctgagagaagcaagtttgttaatattcactgggcagcagcggcagttgtccctgggttttctgtttccaaggcaagcagacatcaccagcctagctcagca

SEQ ID NO: 342895 - DNA, 122 bp, Homo sapiens
gggggcgcaggactcggcagccgcgccgggaggagggtcgggcgggtctcaacccctcctcgcccccaggctcccactccatgaggtatttcagcgccgccgtgtcccggcccggccgcggg

SEQ ID NO: 342896 - DNA, 122 bp, Homo sapiens
ggaaggacgtgatagttggccaatcagagttcatcacggtagcccagttagccagtaggacgctgtgaaggggaaatggggcggggccagcggggttgagaggacggtaggcggtggatagg

SEQ ID NO: 342897 - DNA, 122 bp, Homo sapiens
caccaattgtcagattattggtgcactaagaatattcttgatgatgtgactactctgtcccgaatttgtatttcaaacacaattaaatctgaaatccaaaagacaatctgacaatcctgagc

SEQ ID NO: 342898 - DNA, 122 bp, Homo sapiens
ggcgcgggggtccccgctgcggaggccagggcgggcgggaggggcagcacctgaggaatccgcctccggctgcggcggccgccgcctcgctccgccccggggaactgagcgcgcggaccgcg

SEQ ID NO: 342899 - DNA, 122 bp, Homo sapiens
ttaaaagaagtcaattatccctcttatgactgattcataatttagccataaggagctggacgttacttcattctgacaatgagccatgatccctttgttaggccaagtttagacaaggaatc

SEQ ID NO: 342900 - DNA, 122 bp, Homo sapiens
ctgtcctaggactgtacccagccttcataattctctcaattccaaacacaggcctgccaacgaacgtttagaacccaagttcactgtgaattgggacatgcctgcatctcatctgtccattc

SEQ ID NO: 342901 - DNA, 122 bp, Homo sapiens
tttttttttttaacttttggaaacactctgcaaaatatatttagaagctgaattaccatgcgattggtaatttggccataatttgacttagcacattgtggaaaagaataggaaatcgtcag

SEQ ID NO: 342902 - DNA, 122 bp, Homo sapiens
aaacacaaaaagctcccaaatgtatataaaacttctcagcctcactcctaatgagagaaacgggtatctgaatcacaataaaatactgtccatgatctatcctatggacagatatgcaaaaa

SEQ ID NO: 342903 - DNA, 122 bp, Homo sapiens
tgcacatgagtgccatgggctgggtcaatgatgagatgttaccttgaagagaaatgatgacgtaaaaattaagttcagttggattacgctgaggcccagcctaggtaacaattgtgagacaa

SEQ ID NO: 342904 - DNA, 122 bp, Homo sapiens
acctgcgggaggtgggctccttcccctgcaccctgaacccccacgaggcagagtccctggcgctggtgggcgccatgattgaccaggtcctggagctacacccaggcgcccagcggctgcac

SEQ ID NO: 342905 - DNA, 122 bp, Homo sapiens
tggggagacatgaagagtctgaatgcctcccaagtaactcagcctccacctagcctccagcgtgggggctgaggacaggctgcactcagcccctctcttcattagtgcagggacgggcctca

SEQ ID NO: 342906 - DNA, 122 bp, Homo sapiens
aaaagcctggtggccagctctgcgatgccattgcgggtccggtacatgaacaggctcatgcggtctgcctgcaggaggaagcacagcttcttcatgacattgaagatgcatttctctgtctg

SEQ ID NO: 342907 - DNA, 122 bp, Homo sapiens
catttttgaggttaactcaatggagagtagcctcccttagtgaacctggaagatgccacacgccatttaacgtccacttatcagggtgcccatttggaagcctcttcctcctgtgcttctcc

SEQ ID NO: 342908 - DNA, 122 bp, Homo sapiens
ctgaaactaaaataaaagttaaaaaaaaaagggaaagaaactttgagctgaaaaagtggccgctataatgatgtgaaatggcatcttcaaaattttggtggtggtggtggtgggtaacataa

SEQ ID NO: 342909 - DNA, 122 bp, Homo sapiens
tggtgtaccctctcaccatcccgcaatgccccctgcatacctctcgtcgtaagctttggtcgccttccactgtcttgcccagcataccatgaatttaaaatggcctgggccgggcacagtgg

SEQ ID NO: 342910 - DNA, 122 bp, Homo sapiens
tatagtctcatttccatgctgctttgtgctttctttcgacttaggctatcactgcttcttcgtttcttccccatttaacccctcaacaccccatctgtgctttctgaaacctctatttcctg

SEQ ID NO: 342911 - DNA, 122 bp, Homo sapiens
agccctggggcttcccgcagcccccgggggggtggggctcactgactagcctcccggaagcggaccccaggagaaccaggcagttggttaatccaggaacagctcctgcgcggggcgtggac

SEQ ID NO: 342912 - DNA, 122 bp, Homo sapiens
acccgggaggcccacccaactgcaggcgtggttctgcatccttttttcgggtggggaaggcggtgccgaggagttgggaaattaatcacctccagaaagcagagggagcgcgccccgcaaga

SEQ ID NO: 342913 - DNA, 122 bp, Homo sapiens
agtggaagaagatggcggaaggcggagcggcggatctggacacccagcggtctgacatcgcgacgctgctcaaaacctcgctccggaaaggggacacctggtaagagaaaggggttgagatg

SEQ ID NO: 342914 - DNA, 122 bp, Homo sapiens
ggcgcacagtacatacggctcatggcatttcagggagcggcaagccagttgctgccaacccgcccgatgactgtgtctaaggcggaatctggaagcctctctgagcctccgtctccctcact

SEQ ID NO: 342915 - DNA, 122 bp, Homo sapiens
aggcagaacgaaatctgcagttccctgctgccttccccaggagagctgagctttcagtctcgtccctcttcctcctccccaacgagaatgcacaagagaggggagaaggatgggcctggttc

SEQ ID NO: 342916 - DNA, 122 bp, Homo sapiens
gtgctactgcaggtatgagggaagtgaagccctgagcgctgctccggaggatttggcatgcgagtgagtgggaaagaaagaaagctccttcaatgactgccgtggaaaaagtgccccggatt

SEQ ID NO: 342917 - DNA, 122 bp, Homo sapiens
acccaacaccctcagcatccaatagcgagctccataaccctgtttgttacccaatacctccgcttccccttctgaccctggcctaccacatttaaaatagacccagttctatgaaggacagt

SEQ ID NO: 342918 - DNA, 122 bp, Homo sapiens
ggtcatgcatttctttgagtttttgttattctggtcaaagagagaccatttgacactctacggatggctgcatgcaaacatttaaaacatttgagagaatacggcacaccagggagactact

SEQ ID NO: 342919 - DNA, 122 bp, Homo sapiens
ggacaaggtcccggtgagaggcacgacactgtcacctgcctcaggccgcgctcggtggggcgggggccaccagctgaggcccctcctgccgcccagacagctcggccccctgcggccccagc

SEQ ID NO: 342920 - DNA, 122 bp, Homo sapiens
tacagaagagttcttggatgagccaaggacaagctggggtgtcctatattgaacagacctcgatgaaaatcttgaattcaccccagtgccctctgttggcaagggaaggtgaagattgaaaa

SEQ ID NO: 342921 - DNA, 122 bp, Homo sapiens
gtcttgactaggagtggagatcggaactctctggatgtctttaagccagtgttcgctccccgcctccttccctccctccgttgccttcggtcagaggaattcatttctacttcgcctttgat

SEQ ID NO: 342922 - DNA, 122 bp, Homo sapiens
aagtctcagccccccaggccctgagattttctgagattggtgaccttcagtccctgttttcgcctggtgagaaggagcccactgtgaccagggcaaacaatcccgcagcatcctcagcccca

SEQ ID NO: 342923 - DNA, 122 bp, Homo sapiens
gcgaaaccttctacgatcgcaggtgttttgtgaagccgcgccgctatagcggggctgaaacgctgctgaaagtagaagcggaagtagtcgccttcctgggattgtgagagacttttaaacag

SEQ ID NO: 342924 - DNA, 122 bp, Homo sapiens
attccagacttcttatgaggaagcattgcgtaactccctgtttggttctgttctgatcaccggtgcatgcggccccagttacgtagcccccacttgcacaatgtatcacggccctttcacat

SEQ ID NO: 342925 - DNA, 122 bp, Homo sapiens
caaccaatgcattctcgttcagcccccagctaactactggaaagagccttccaacatctacgtgtgtttacatttgcatgactcagttcctgccctcaaggagtttgcaggcaattcagaga

SEQ ID NO: 342926 - DNA, 122 bp, Homo sapiens
tgtgcgggatataatctcctggtgtgctgtttttaaagcccgtcggaaaagcgcagtattcgggtcagagtgacccgattttccaggtgccatctgtcacctctttctttgactaggaaagg

SEQ ID NO: 342927 - DNA, 122 bp, Homo sapiens
gcctaaaggatctgaaagcagttacctgctgagcccctgtgggagtatcttcagtcccctcgtgtcacccggagctgctcctgcacagggtcctgggtctccagtgcgtgctgcccagtgcc

SEQ ID NO: 342928 - DNA, 122 bp, Homo sapiens
ctctccggcacgccgggcgggcgccggccgccctcagcagctcacggagccggcgggcggcgcggaccccaagtccgagaagcagtcgaactcgctctggcccaggaagagctcgggcagct

SEQ ID NO: 342929 - DNA, 122 bp, Homo sapiens
tcatctggccatgcagagctttgccagtctgagtggagcccagggctcagggccaatccccgctccatccagggagttttcaatgagagctaggtacctagctccatgctggagctgtgggg

SEQ ID NO: 342930 - DNA, 122 bp, Homo sapiens
ttgcgatggcaacggcgagaggcagagaccacaaacgatgaagcccagacccagaagccacgagctggaaaggccacgccaagggaccaagacatactacctttcggggatgtggtttccgc

SEQ ID NO: 342931 - DNA, 122 bp, Homo sapiens
tgcgcgtgcctgtgagccccgggactccccagggtcctgggcactggggctgtggatcctcggaggaactcagagtggttcccctgaatttcccggccctggcgacgaggtgctggtcccag

SEQ ID NO: 342932 - DNA, 122 bp, Homo sapiens
tccgggataaacaaaactccagaggcagaactcagaggccctgtgggagaagccctgctccggtgcgagcacagcaaggctgccgcgccccccacttagcgagggaggaaagaatcacagag

SEQ ID NO: 342933 - DNA, 122 bp, Homo sapiens
acagcgcccatgtacacacccggccctgcgtggcggtcacgccgctccagcctgggtccgcgcccaagttctagctaccgggcttgcaggctcggaaactcgcaggcggcacctgctctggg

SEQ ID NO: 342934 - DNA, 122 bp, Homo sapiens
aaacaggaacattaaatacctgattgtcaccaaattgggtagtctcagcacttctacactcgtaattgtgctggaaaagtggaatgctagcactaataattagattttggtttggagggttt

SEQ ID NO: 342935 - DNA, 122 bp, Homo sapiens
aattaggcttaatattctgtgccaaggttgacagactgatggctgcttcctggagctctgcgttaagaaaaactctgagggtgtttctgggcctaatagaaagatcactgtgcagcttagcc

SEQ ID NO: 342936 - DNA, 122 bp, Homo sapiens
gcgaggtcagggaggcgagaggccggccccttaaaggggcgatgtgccgcgggactcgcgcgtggggcccacagtggagccaccttcccaatcggaaagattagcgtgtgggaagctgtaac

SEQ ID NO: 342937 - DNA, 122 bp, Homo sapiens
gactgtgttgtattgttctataggttttgacaaatgcataatgacatgtttctacaatgacgtatcatacaaaatagcatcaaggccctgtgcttcacctacacagaggggagcatttgaac

SEQ ID NO: 342938 - DNA, 122 bp, Homo sapiens
atgtaccattatctgttttgtttaggttattgatgaacaggttgggcccagacagtacggcgtgttgaggcatttcatcatcgactctcacccaagttaccatcacaggcctgcagggggaa

SEQ ID NO: 342939 - DNA, 122 bp, Homo sapiens
ccttggggagacagggccagattccctaggtcagtggatcagggctgggccagagggaggcgaggctgaaggagcaagggaggggctcagagggcttcccggaggaggcaaactgcgcgcaa

SEQ ID NO: 342940 - DNA, 122 bp, Homo sapiens
ggactacaggcatgcaccactgcgcctggtcctttctcatctcacctcagagcagataaccgcgtctatttcatgttgttggaagaattaagtgagataatgcaagaagaattgagcgcaat

SEQ ID NO: 342941 - DNA, 122 bp, Homo sapiens
gattatgctgaatttatgcacagattccccttttccttttttctcatttcacaggtcaagcgcctgtcatgtcagcatgttaagatttctgttcccagttttaataattagttagaatttgg

SEQ ID NO: 342942 - DNA, 122 bp, Homo sapiens
tgccttcaggcccctcagcctcagatgcgcaatgtgggagagacaacctcggggcaaagacggctcagagtccccctaggacggcaggcagcaaggggtcccgtgtgtggccagcagtgtgg

SEQ ID NO: 342943 - DNA, 122 bp, Homo sapiens
tttgttatgtactaagaaaaattattctgccttgagtttctgtgaccttacccccaaccccgtgctctctgaaacatgtgctgtgtcaactcagagttaaatggattaagggcggtgcaaga

SEQ ID NO: 342944 - DNA, 122 bp, Homo sapiens
ccctgtctgggaagtgaggagtgcctctcctggccgccgtgcaaccttccaagtgtgaagcgacagccttgtgtgtgatctttctgccttccccaagtttgcattttcgacattaaagttta

SEQ ID NO: 342945 - DNA, 122 bp, Homo sapiens
gttctttactttctccctgccgacaccgtcttactgcttccatcctgcagccattatcaccgtctcaggacagccatgatcacagtctcagggttcccagtgcacgaaagacacagcctcca

SEQ ID NO: 342946 - DNA, 122 bp, Homo sapiens
aatatacttcttaagtaacaagacttggaagtcaaaatcactccttgattcacgggctgccgaatggatgctgtgttagcaggcctggaaacaacattcatctccttgtgtatctccaccag

SEQ ID NO: 342947 - DNA, 122 bp, Homo sapiens
tcacagctcactgcagccctaacaactcctgggctcaagcaatcctcccacctcaacctccgagggagctacaactacaggaatgcaccatcatgcccagataatttttttttttttgtaga

SEQ ID NO: 342948 - DNA, 122 bp, Homo sapiens
aatcgacggtgccacgtggttcttcttgcacttctcttcttctccagtttcaggggacaccgtggggtgtgcgagcccgggggagcgcagggaagggcgggttgggctgcaggtgggaatgt

SEQ ID NO: 342949 - DNA, 122 bp, Homo sapiens
cgcttggaggttcattaatatcattagcatttaaccccctccctcttcccatcccctccccgcacatggctgacgtcagaccccgccaggagttgggggaaaagctaagtgggccagggacg

SEQ ID NO: 342950 - DNA, 122 bp, Homo sapiens
ttcatctcactagggaataccagacactgggcgcaggtcagtgtgtgcacacaccgtgcgcgagccgaagcagggtgaggcattgcctcactcgggaagcgcagggggtcagggagttccct

SEQ ID NO: 342951 - DNA, 122 bp, Homo sapiens
aaggagcctcctccgccactaacccttgaattcttgagctgaggccaagaaccaggcagccggaacagaaccagttgagattagagtttcacacatcttccaaggacagattctgctggctg

SEQ ID NO: 342952 - DNA, 122 bp, Homo sapiens
ctggactcggaattactgccccgcgggtctgcattttcacagcggcaggtgtgagttccccgccgctggagaccagaagcctgaaggcagctccgcccaccccagcccacagcgccgttatt

SEQ ID NO: 342953 - DNA, 122 bp, Homo sapiens
ctagggccagcacctggattcatcagactattgtgcagatgcactttttcctcatttggacgatattgccctaattttgttcccatctttacaggctccctggggaagggaatgcagggttg

SEQ ID NO: 342954 - DNA, 122 bp, Homo sapiens
catgggcagctctgtggctgggatggcccctgcagaatcacttgagtttgggccaggaagcgttgcgactggtagttggatagaggctaccccaggaaggctaaatggccttgagcaagact

SEQ ID NO: 342955 - DNA, 122 bp, Homo sapiens
aaagtgtagaaggcttagcatggtgcctggtactgcgtgagtccacagctattttcactccggaccagcggcgatcggggcccggcctctccccgcccccagactcgcccgacctgcgcagg

SEQ ID NO: 342956 - DNA, 122 bp, Homo sapiens
aggcaggagtctggtctagtcctgctctgtggttgcccttcagtgtgaccagtgatggggcgctgcccctgtctggtttctgtctgcctcactggcagagatgtggcttgggggaggtgagg

SEQ ID NO: 342957 - DNA, 122 bp, Homo sapiens
tccaggcaacctgaccctatttgccagtgtccgcttttaattttggtcgctaagggcaagcgcccgtgacaaacatggcggcggcagcctcaggcgcagtcacctgccggagctgcgcccgg

SEQ ID NO: 342958 - DNA, 122 bp, Homo sapiens
gtttctgatgtccgggatggaccaggctggtagggtgtgagtcacagtgggcgccatgcccggcctgaacactgtgctccctgcaatgacctctttatgctcccggggggaggagcagggct

SEQ ID NO: 342959 - DNA, 122 bp, Homo sapiens
atatcctttgcccttactgaatgcagcccccactaagttattaacattgtagaaaagattcgagagcaaaatttaagtgctcatgcaatttaaaataggctgaattaaatggaaaagaagag

SEQ ID NO: 342960 - DNA, 122 bp, Homo sapiens
ctacctccgccgtcttcatggtcaggctgaaatgtcacagtctggttatccagcaggacacggattgcgtcgtgaggctcaaggagccattggacctggaaggagatgggagggggcctgag

SEQ ID NO: 342961 - DNA, 122 bp, Homo sapiens
agctcttcgtctttctccaagcctgagcaatcgttttggcgcaggcagtccagagtagagcgctttgtgagccagctacagaagtgctgtaagccccttcccactagatggcagcccctaaa

SEQ ID NO: 342962 - DNA, 122 bp, Homo sapiens
cactcattcccgtagtcttctatcaaaagcagcctgagtgcacttatcggaaagcaaatgcgtggagctacattactaatgtctggggcaacaccaggactttcatcagcaggcagctgctg

SEQ ID NO: 342963 - DNA, 122 bp, Homo sapiens
gcgcccgtcgggccccaggtcgcagccagacatcctctggagggtgtgagaccctggccccgcccccgcggtcagcccagtcccccgagccccgccccgccccgaccaacccgcggggattt

SEQ ID NO: 342964 - DNA, 122 bp, Homo sapiens
cccagcagaagcggggcctggctgaggcagtggcatcagagactcggggcaatgggagtgcgaggggggtctcagcgtcccacagctgctgtaacaagtcgccgtaaacacagtcactcaaa

SEQ ID NO: 342965 - DNA, 122 bp, Homo sapiens
gggctgattgtgttaaagcgcgaattttagctgctggcaggtctctgctcatcctcacaacgcgctttcagcgggttccacactgccagggctattacgaagagggaggctcacgttattgg

SEQ ID NO: 342966 - DNA, 122 bp, Homo sapiens
gttgttttaatgttaaatggttgagaggcttagtgataagcccaagccagttaatccgtacgagttttaattaaaatcaaagggttggaggtgatcactgtggtctctcagactctacaatt

SEQ ID NO: 342967 - DNA, 122 bp, Homo sapiens
ggtactagatcagagagaaggtcatttcttcccagtttgtctcatcttaaattgtcctctcgtgcctttaagagccagccctattcttaggacggccctcctaaactgagagggaattgctg

SEQ ID NO: 342968 - DNA, 122 bp, Homo sapiens
tacaaagatcacactggcagctgcattttggaagggatttgcctagaggtaggataactgcggggggtatgtctatagcaataaaagtgagaaaatatgagatctgaaggagctaacattgt

SEQ ID NO: 342969 - DNA, 122 bp, Homo sapiens
taacctctaagcacactgccttgctgtgcgctgacttcagaaaactacagctagagggcacgtgaacgctgagcacagcaggtaaagagcaaatgtaagagcgatctgggtttaaatccagc

SEQ ID NO: 342970 - DNA, 122 bp, Homo sapiens
acatccccgtttcacagatgaggaaactgacgctcatagggtggaagcagctggcctatgcgcccacaactcctaagaagcagagacaggactggaacctgggtctcacgggcctccccaga

SEQ ID NO: 342971 - DNA, 122 bp, Homo sapiens
agaataacaacccccacaaagcatccgtccaactctttgtaacttgaagactatgagtcacgttgggtcatcttcctagggagtatgggctgcaatttactttgttggacaaccacagctgg

SEQ ID NO: 342972 - DNA, 122 bp, Homo sapiens
ggccccctgtctggagtttgttacttctgatgctcggatgtgtttgcagtttcttccttccggtgggtttgtggtctcgctggttccagagtgaagctgcagacttttacagtgagtgttac

SEQ ID NO: 342973 - DNA, 122 bp, Homo sapiens
cacttcccagacggggcggccgggcagaggtgcacctcacttcccagaaggggtggttgccgggcagaggcgctcctcacatcccagatgatgggcggccgggcagaggcgctcctcacctc

SEQ ID NO: 342974 - DNA, 122 bp, Homo sapiens
gcgttaggtgaccaagggggtcggggacccagaggataggacccaaagacgcaagcgtcgcgcgcccaaggctcagcgcgcctgcgcagggtagcggccgttcagccagcggctcgggggcg

SEQ ID NO: 342975 - DNA, 122 bp, Homo sapiens
agaggcacctgcccagtgggacagctctcccttaagctgcaagttttccaactcaagagacgcacttaaaccctaaaaaagaaaactcacacaggcccagatgagacagaaagattctcctg

SEQ ID NO: 342976 - DNA, 122 bp, Homo sapiens
actatcacaatgatacttggcctaattcattttggttgagggcctgatgagccacacatgcgtgggtcagggaagatggttttcaccggatgcctgttgagtctgattgtagagactttcaa

SEQ ID NO: 342977 - DNA, 122 bp, Homo sapiens
aggaccttccgcagtcaccacactctcctgctttcagctctttctcactcctttctggcacgtcccagaggctcctggcataggtataggaggttattctccccagtttacagatatggaag

SEQ ID NO: 342978 - DNA, 122 bp, Homo sapiens
ggctgaaatccaagctgagggtaatgaaaggtgctgctcctaagccgcacgtctctgatccgccctccccgcccgccctctgctgcccgcgggccctctaagagctgcccaggctgctgccg

SEQ ID NO: 342979 - DNA, 122 bp, Homo sapiens
ggaaagtcaggagagaggagttgaacactttctgcttcacctgatccgggggacctgatccgggggacctgtgtgggttaagaggaggatgggcctccaggggccacttctcaggagcagac

SEQ ID NO: 342980 - DNA, 122 bp, Homo sapiens
gctcagctgacctgccggagccgggcgtgggtgagtgcggccggccgcgcctgggcttgccgaggccagaccttgcccgcccaggagcagtgcccgggggatgcccatctcccggagtacgc

SEQ ID NO: 342981 - DNA, 122 bp, Homo sapiens
ctcagggcccgcgagcccacagggctccatgcccactgagcaggctcgtggacgtcggcacgtagctcagatgtgctgatttccagccaaggacatgctttgtgtcaacgatacaggggcct

SEQ ID NO: 342982 - DNA, 122 bp, Homo sapiens
ctgctcctcccttccctttgctggtgtttaccagtcttttgactggggagctgtccatcccgggctggtactgaactaggaatctgggaaagctttttgtctcttccttttctgctgagtgc

SEQ ID NO: 342983 - DNA, 122 bp, Homo sapiens
tcccctatcagcatcagcaataaggtcactccattggcttctagcttgcatagtttctgacgtctccataattcttagcttcctctgtatgcaatgtcttctttttccttgctgcctttaag

SEQ ID NO: 342984 - DNA, 122 bp, Homo sapiens
ctctcccttaagcaaaaagcgcagcaccgcccgcgcgcggtagtctcggaaccccgccgccgggaggccgctggcagctccacgccacctccctgaagcccagtccattttgcctacatccc

SEQ ID NO: 342985 - DNA, 122 bp, Homo sapiens
tgatgctccacatcagtcacaaatgaggccctgaatagacttgggacctctacctgcctgcgcagatgggaggagtctgtggtgttttgtataaacaaccctccctctgagacacacacaca

SEQ ID NO: 342986 - DNA, 122 bp, Homo sapiens
gggcagcccggcggccgcctagctgcccccagccagggccccgggagggaggggctcggacgggccttagaaactcaccaagaactaacacgcgcagcccggcagtcccgctgcccactgcg

SEQ ID NO: 342987 - DNA, 122 bp, Homo sapiens
aatggtggacgctcatgactgtgtatgtgtttttgtatatctgtctgtctgggccggtctcgggggacccctaagggtgaccgtaaggcgaaaaacgtttgaaaaccacggccctgagttaa

SEQ ID NO: 342988 - DNA, 122 bp, Homo sapiens
caggcgggccttctgcccacatcctgcggcgcccgcgacccgggccgggcgatccggcgccgggttttgttatccgcccgcacctagaggccgcaaggcagccgccagccccgggactggac

SEQ ID NO: 342989 - DNA, 122 bp, Homo sapiens
agccaggcaggggcagggaggagagggtctgctgttccgtgggagtgagtgtcagggacgcgagtgcacacgctctgcgatctgctgtgcaacgttgtccccagagcgaacagcaccgtgag

SEQ ID NO: 342990 - DNA, 122 bp, Homo sapiens
ctccgagccaggtgcaggatataatctcatggtgtgctgcagtccgaaaagcgcaatattcgggtgggagtgacctgattttccaggtgcgtccgtcacccctttctttgactcagaaaggg

SEQ ID NO: 342991 - DNA, 122 bp, Homo sapiens
caccaaccaggttgcacaggatgacaagggtcctgcacatacgctgtggggactcactttcgtccgtggaggggacctctgcctcaccatttgtgtttttcttccacaacacaggtgcctcg

SEQ ID NO: 342992 - DNA, 122 bp, Homo sapiens
ccccctggccgggacccaccatttgggttatgcttgctgcgttatcttctcatgaaaggccgatcttatcactcatactattgcgcatgagacaggcatgagacctctcacactacctgcag

SEQ ID NO: 342993 - DNA, 122 bp, Homo sapiens
tgacgacccccgcagccacttacccgccatggctgcgctttcatgggcggcccccagcagcgctagcacctgcagcgtccccaggagcagcgcggcccaagcacctcgcgcgccgagtccca

SEQ ID NO: 342994 - DNA, 122 bp, Homo sapiens
gctgggcctggcggaggcaagacgcagaggggtcctcctggccccaggccaggggacttccgaggagggtcccaaccggctcggagagagtgcaagagagcgcgagaggaggcggcaggggc

SEQ ID NO: 342995 - DNA, 122 bp, Homo sapiens
gggcggcgggcggctgctgggtctcggcctcgctgctcatggttgcggtgatggtgactgcggccggctgcggcagctgcggctcctcccggggtgtgacggtaactaggccggcggcggcg

SEQ ID NO: 342996 - DNA, 122 bp, Homo sapiens
cggcgcgaggccccgccggcagcggccctcccagcccctcagccccgcgcggctcgggcgcgacccggtcgcctcaccgggagctattcctgctgttggggtcgactcccttgaaggtggtg

SEQ ID NO: 342997 - DNA, 122 bp, Homo sapiens
tcagtatttatcaactgtacctagggattttcttaaaaatcatgttcttattcttccccacgggccactctggagaatagtctcttacctgagttttgtcgtcaggatgctgtattttgggc

SEQ ID NO: 342998 - DNA, 122 bp, Homo sapiens
tttgcgaagtctgtggttcttgtagtgggagttaagaggaagcattaaaaatatctgcttcgttcatggagtagatgcacttttcaggacagatccctgttactgatctggtgttttctttg

SEQ ID NO: 342999 - DNA, 122 bp, Homo sapiens
gccgccgtcgccgccactgcagctggcttggtcgtcaggccgccgcccgcgaacctgttgcgtagcctgtcacagccgctcagggctccgccggcgccgcctcagccccacaacaacatggc

SEQ ID NO: 343000 - DNA, 122 bp, Homo sapiens
ggacatacacatgcagattcattaaccaaaacctacccagcacccctcacatcgcgcgtacgttggcattttcagtttataggtgggtcctggaacagctaaaaccaggaagctccggggta

SEQ ID NO: 343001 - DNA, 122 bp, Homo sapiens
atttgaattatggctccatctattaactgtgtactttaggtcagttgcttctctgcgcctcgatttctgcatctgtaaaatggtaacaacctgtgtaatatggttggggttttaaatattaa

SEQ ID NO: 343002 - DNA, 122 bp, Homo sapiens
acccaatccatgaattagcacctttcctcttgatcctggattctgaaaataaagaatcttcgtattttggagattcttagtattgaatatctaaaataaaaattcagaagaattaatagcag

SEQ ID NO: 343003 - DNA, 122 bp, Homo sapiens
ccgaatgtcagattagcccgagcagctacactgaacgctgcggaagatgcaccagaatcccggagtaggagccagatttccaaaggaagaaagctaggccctaggactgtggagattctgta

SEQ ID NO: 343004 - DNA, 122 bp, Homo sapiens
ggtccgcgactcgtcgctaagattccccaaaactgagatttcaagaaaattcaccctttccgctttctttggcgtccttcaaccgtgaaggaaatgaaggttgagaacctggaacccgcttc

SEQ ID NO: 343005 - DNA, 122 bp, Homo sapiens
gtgtccagctgcttctcctctctgttgattgagtctgggggtctttataggcacaggatgcggtggtgtggggcatgggtggtttaggaaaagacaacattctagcaggaaaacagagatat

SEQ ID NO: 343006 - DNA, 122 bp, Homo sapiens
cagtttccagaaatgttcctcagcgtcgcctgtgacgggaacaaaatgaaccgcacatctcggttcatctcggtccaagtgactcagtgcttttcccgccctccctcatcttccccacgcag

SEQ ID NO: 343007 - DNA, 122 bp, Homo sapiens
aggggtgaggtgccgaggccttcctggtgggggcatagtcaggagttaggaatgcagcctcggctgtcagccatgcaacctgagggcagtcttgtgacgaggatgtgtccagaaaggagtgg

SEQ ID NO: 343008 - DNA, 122 bp, Homo sapiens
agagaaggccctgcacactcgctgagctccactgtacaggtccatgtttactgaagactccgggcctgaaatcaacaaacaagagagtcatttagagaaacataccggtagcttctcatgaa

SEQ ID NO: 343009 - DNA, 122 bp, Homo sapiens
cttttctcactgagattttattggccatcaacaacacagccaatgggctgtatgtttagtcgaatcgctatgtctgcttgactgtaattctatcattctttggtcttttccagatacacatt

SEQ ID NO: 343010 - DNA, 122 bp, Homo sapiens
cttgaagcctggacctgccctttagaacatgcttctgatacatggggccccagcatgccccgcccaaatagctccaagcccattccctcaagggtggactacgtcaccagtggggtagccaa

SEQ ID NO: 343011 - DNA, 122 bp, Homo sapiens
ttggtgcgagaccccgggcggggggtcagaggtttctgttgcatcagagaaacacggcagcgtcaaaaagaaaaagcttccagtgggtctgggcctaaagctatttttatttaagtctcaaa

SEQ ID NO: 343012 - DNA, 122 bp, Homo sapiens
aggatatgccctttaaagtaaacgctctgaatatgtcccttggtggcgtgtgtacaaccacgtgtagcaaaattctaacgaaagcccttccccaacacccgggtaaacctagagaaacagtg

SEQ ID NO: 343013 - DNA, 122 bp, Homo sapiens
tgcccagcccatgataccatccccgttgaatgccaaagccaagagcgagctgcaggactccggctcaaaggagactcctagttcaaaggagacagctctttgaaacttgaggcactgtaact

SEQ ID NO: 343014 - DNA, 122 bp, Homo sapiens
gcaaaggaaagccacctccaatggagtcattatgacaattatcattccggactgggccagcgggaacaccctgagcccgacctagctgcacagccccggagctcagacgttagcagggggat

SEQ ID NO: 343015 - DNA, 122 bp, Homo sapiens
gggatgcagcgcttccaggtggtgaccccggctggacgtgcgtgggtgcgaactgccacccgggctggggccagcttgctgcgccgctgcctccgcaagccctcccagcccggagctgagtc

SEQ ID NO: 343016 - DNA, 122 bp, Homo sapiens
agagtctctttacctacatgctccactctcctgctttttccagcagaatttcagcctgcacgtagctctggtatcaatgacacaggcctctactcaatctaaaatttctcaggaaaatacat

SEQ ID NO: 343017 - DNA, 122 bp, Homo sapiens
cgccggcgattgcgcattccgtcgcggagagcattatgggattggtagtccagactgaggcgcagataggggttcctcgaagccacagaactacatttcccagcaagacccgcgcagcaggg

SEQ ID NO: 343018 - DNA, 122 bp, Homo sapiens
cccccgcggcgttctttcttggaacaaaactagcgcggagccacggaactccgcagtttgcgtagacttgaatttcctattcctcggacgatccatgtggaatccgtgagtagtgcgactcc

SEQ ID NO: 343019 - DNA, 122 bp, Homo sapiens
gaagaggggctggactctggtatccttggatggggggcactccaggctctccagcctcctcggctcagcctgggcccctccccatccaacatccactccagtcctcattcaacttcctcttc

SEQ ID NO: 343020 - DNA, 122 bp, Homo sapiens
gcccccttcccacacgctgaaggatatcgaggcccgataagccgagaacaggagcaagaacgaggaagaagaaaccctaggcagacaccaggccaggcttgagagacagaactcctgcatgg

SEQ ID NO: 343021 - DNA, 122 bp, Homo sapiens
cgggaagaggaaatgactggggccacatcactccaagcttgtctctacttgtccttgtgacgagtatctcacgcacacaaagggacacttttttctcttgttttcactagcaagtcctatgt

SEQ ID NO: 343022 - DNA, 122 bp, Homo sapiens
ttttccttcaggaaaagcctaaagattagactgtaagaaaagaaaatagaagccatgtttcgaagacctgtattacaggtagtcacttgtctgtattaatactgagatgtattactatcagc

SEQ ID NO: 343023 - DNA, 122 bp, Homo sapiens
ccaagtgattgccagaaccctctcacttcttgatgctgttggtaatgagcaggtgggcatcgtgcctctcatccaatagaagcatggcccccaggtagcccaccctcttgtctgtgaatctg

SEQ ID NO: 343024 - DNA, 122 bp, Homo sapiens
gagtgacgtttggggcaatgtgcaggatctacatctggctttgctgctgcaagatgcttccggggtgagggaggtggcacgagggagccgtgcgctctgtgatgagactgcagcaaggtgat

SEQ ID NO: 343025 - DNA, 122 bp, Homo sapiens
ggcggtggagtgatgaagtgcagaggttgaaggagtgcagggacagaactgggggtcggacggagagtgggcaggcaggaaaagtcttaaaggcctggggtgacttaaccgtttggggtgag

SEQ ID NO: 343026 - DNA, 122 bp, Homo sapiens
ccatggagcggcgcatgaagtaagaactaagctcccccaaatgccttcagcgtggtcagccgaactcaatacacccttctgacctcattcacagtaactattctgttcatttcacttagaaa

SEQ ID NO: 343027 - DNA, 122 bp, Homo sapiens
ccctcagagcttcacggcagggacatggctccgacctctgagcccactggtccccggctccgacctctgagcccactggtccccggctccaacctctgagcccgccggccctggctctaacg

SEQ ID NO: 343028 - DNA, 122 bp, Homo sapiens
tccctggccgcctcctccagcatagaaccgctcacctgcgaccccggcggcacctccccacggtcgccccaaggggggtaggaaaaaagatgcttcattgatcccccgcccactaactgggc

SEQ ID NO: 343029 - DNA, 122 bp, Homo sapiens
agagcgcggcgctcatggcggcgtcgggccgggctctgcgtccaagcgaggctgtcacctcgctgggcccagccccgccgccttttctagccccggctgacgtgcacgccccgccccgactc

SEQ ID NO: 343030 - DNA, 122 bp, Homo sapiens
ctcgcggtcgccgggaggcccacctagggtactttccttttttccactctcagaaatatacgtctgtcacagttaacggcaaagcctagggcaagagttctacgcccaagatggccagccgg

SEQ ID NO: 343031 - DNA, 122 bp, Homo sapiens
tgctttcctcagtcctcgccccttggggcgagctgggcaagtcggggcagcaggcagcggcgtcgcccagcacaaggcgtgaatccgggaggagggcgtggcaccttctcttcccgttcgct

SEQ ID NO: 343032 - DNA, 122 bp, Homo sapiens
agcttcactcctgaagccagcaagaccaaaagcccaccgggagaaacaaacaactccagacgtgccgccttaagagctataacactgaccgcaaagctctgtagcttcactcctgagccagc

SEQ ID NO: 343033 - DNA, 122 bp, Homo sapiens
gagttgtgacgcttcccggaaccccttttatttcatttgtgaaagggtccgatggatactcgctatacccacatcagaaggcgtaagagtgcctggctcagacatttttcctctcttttatc

SEQ ID NO: 343034 - DNA, 122 bp, Homo sapiens
ctgcatcctcattttcttttggataaaatcaagctctatcgtgagacagaatggcttcttcgacctcacttgcctgtagttctctccctgtgtcacctgcattaactcctggctccagcttg

SEQ ID NO: 343035 - DNA, 122 bp, Homo sapiens
agtcatttggaggacgaccacgagggggcagcagcagtaccctctcctgaagaatccctgcgtttcattgtgagaacagtttctttttagtgtatttacatttatgttacttttattgtgaa

SEQ ID NO: 343036 - DNA, 122 bp, Homo sapiens
tcctcaaacatggccagtgcttacccccggaagagaggccacatgcaaagtcattggccccgatgccaactcctcctgggaacagaaagggtggggtcaggaatctgtttaatcacctaagt

SEQ ID NO: 343037 - DNA, 122 bp, Homo sapiens
agaggcaggaggctgaggacacagctgcgcagagccgcccagcagaggttacccggataacgataagtggtccccgcgacgccccttaagtctctggggttatctggagcgcaggtttgcag

SEQ ID NO: 343038 - DNA, 122 bp, Homo sapiens
agtctggggcagggagagccagcctttccgggggctcagttttcttaagaattccacccccgcgaggccggctggacgacaggccctgctgcgggccacctgcccggcccgctcccagggcg

SEQ ID NO: 343039 - DNA, 122 bp, Homo sapiens
caccttcccggtgaatggggccccccgggacagcctcgctgccgcctcgggagttctgggcgggcctcagactccactggccccagaagaggagacccaggcccggctgctgcctgcgggcg

SEQ ID NO: 343040 - DNA, 122 bp, Homo sapiens
ttgcaggcggggtgaaggccactctcacccgctgtctgacttctctatctgaggtgtgcccgccccaacccatactgtctcctttctaaaccacagacagaatctgtaaggcacctgccttt

SEQ ID NO: 343041 - DNA, 122 bp, Homo sapiens
ataataaggagagggaggaataggaggacgtgagctagagaaggggcaacagctagatcacgtagaaccttgaaggacagggaaaaagaattgtgacttaattctacatataatgggaagca

SEQ ID NO: 343042 - DNA, 122 bp, Homo sapiens
aagccgcgcaggcactggctggcattgcgcatgcgcaagcagagaccgccccaccctccgcggaacaagcctccggtctgcaaagccctaagccccgcccctctacggaggtctcacgtgcg

SEQ ID NO: 343043 - DNA, 122 bp, Homo sapiens
tggaggaaaagacacaaaaccagagaagagcaaatgctttcagggtgaatttctaccacacgttgagtcgaaggcaaactttgaaagaacaccagtgaaaaataaagttcatgctgattttg

SEQ ID NO: 343044 - DNA, 122 bp, Homo sapiens
acatttttatataaccataagttgtcctctccagatgccgtgctgatgaacacctcctcccgttccgtaggagagcgcctcgcactccacactgcccagcctcacatgttctcaacgtcttc

SEQ ID NO: 343045 - DNA, 122 bp, Homo sapiens
ccctccgcgcctcgggccggggcaggctgcctcccgcctccagcctccagccgggctgagcggccacttacctatttgcaccgcgaggatcagtgaaatatatctgccgttcaacttaagtc

SEQ ID NO: 343046 - DNA, 122 bp, Homo sapiens
tccccagtggactacaactcccggaaggcagagaagtggactacagctcccagaaggctgcgcgacatacagccagcccggtgctctcgtgaggcgtgccagtcagattccgcgggagagcg

SEQ ID NO: 343047 - DNA, 122 bp, Homo sapiens
agacgtccagccaggggaggagctgacagtgtggtattctaactccttggctcagtggttcgacatccccaccacagcgactccgactcacgacgagaaaggtacccattccaaaagcgtgg

SEQ ID NO: 343048 - DNA, 122 bp, Homo sapiens
gcggctcctgtctgtcaaggggcgacccagaccgagccccctggtcaaggcccataaaagcgtccaggccaacctagaccagagccagaggggcagctccccgcaaaacactacaaccccca

SEQ ID NO: 343049 - DNA, 122 bp, Homo sapiens
cgtgcaccgcgatgacgtcctcaaggcgcgccacgtccgcccggcggcgcagctgcccagcgcaacctcggccccgcctcgatagccccggacccctgccccgcccgaccccgccccgccac

SEQ ID NO: 343050 - DNA, 122 bp, Homo sapiens
tgtttagaaaaatgtgcactaacggaaagatgttttatatataactggaaaaaaacaggtcgcagaacagaaggtatgtatagtgtaccatttgtcggagagagaacctgaataattagtat

SEQ ID NO: 343051 - DNA, 122 bp, Homo sapiens
tcaaacaaactgtgatctctttgtagcccgttagttctacttcactgagaattcaagtcacgttctgaaacagaaagattaaagagatcggaggggctttttgaaaggaaaattcttttcct

SEQ ID NO: 343052 - DNA, 122 bp, Homo sapiens
tgtagcgaacagcaggacttgggtagtgctgctctaagtctgtgaccgcgactagaggcgcgatattgggcttcactcgtgattcatgccatagagccgtggcgtagtgttccgcgctagga

SEQ ID NO: 343053 - DNA, 122 bp, Homo sapiens
gccctagcagcacacaggacagagaaaggggtgaattcaaaggtcgtttattccccctcccggcaagacacccattttacagggtaggtcagtctcgccaagcccttcttctttgcccttct

SEQ ID NO: 343054 - DNA, 122 bp, Homo sapiens
aacaacaaaaagtcaaatcatcctgcccttttctgcctgttcgctgcctgcttgtggggccgcaggaaggctcagagctatcaaatgaagaaaaatgggcctttggcttacaactatattgg

SEQ ID NO: 343055 - DNA, 122 bp, Homo sapiens
tcgatagctcagctggtagagcggaggactgtagtacttaatgtgtggtcatccttaggtcgctggttcgattccggctcgaaggagacgctgctgttttggggtttacggttgctcttcgt

SEQ ID NO: 343056 - DNA, 122 bp, Homo sapiens
aaagtccttcggggcctcaatgataggtcagggtatctctcaggggtaagaaatgtctatcgacagctagaagatcaggtagtggcacaaccaagcgtccaccaaagcctccagctgggaga

SEQ ID NO: 343057 - DNA, 122 bp, Homo sapiens
aaatgtcatcactttaaaaatagatgtttgcaaaccagtactgggaagcgggactagttccgtacaccaatatcataacaggcttcagttgcagcaaaggaaacagggacttcactgtcact

SEQ ID NO: 343058 - DNA, 122 bp, Homo sapiens
gtcggtcctccctcctcagtggccactcttcagatggattcatgtcggtcctccctcctccgtggccactcttcagatggcttcacgtcggtcctccctcctccgtggccactcttcagata

SEQ ID NO: 343059 - DNA, 122 bp, Homo sapiens
agggttagagggggtgggcacttgcagctgccgatgtggctggatctggaacttctcagacggctcctgtcagcgccaagtttcaccaaatccaggcctgcgggctcctcccccaggacccc

SEQ ID NO: 343060 - DNA, 122 bp, Homo sapiens
accctggccccggccccacctccgccgcgggccgcgggcgctgctgtcgaccgggagggccgggcccgggacccccgccccacgattacctggggagcccccaccagcgccgagcgcgcggg

SEQ ID NO: 343061 - DNA, 122 bp, Homo sapiens
ccctgtgtttgcagaagggttccgttcgagccctgtgtttgcagaagggttccgttcgagcgctgtgtttgcagaagggtcctgttcaagtgctgggagcacagtgctttcttccagggcca

SEQ ID NO: 343062 - DNA, 122 bp, Homo sapiens
gggcctggctcacaattaggcagaagtgagcattgtggcattgtatgtcttcaaggattccgtttagaaactagactatgagatgaaatgaaacaatgcatgtaaagtgaccacaactgtac

SEQ ID NO: 343063 - DNA, 122 bp, Homo sapiens
ccattctcccagctccatcggctgccaacctagggccatcgtctgcctccatcacccctccgcccgcccgcctacccacccaatcccaaacgggtgctggatcaggtgctgaatccggctgc

SEQ ID NO: 343064 - DNA, 122 bp, Homo sapiens
agaaccggtgggtgcgggagccggcgagggtctggcgggcggaaggagcggcagggtccgcgccaacaggctcttcccactcgcaggtacctgccagtggtggggcacacggacggcacgct

SEQ ID NO: 343065 - DNA, 122 bp, Homo sapiens
gttttatgcacagaatgggtcctcccaaggctcgggtgcctgatctgcaattctgcgctccgccgcagggcgacgctcggagaccagccacactgtcccaagtcccggcgaagacccgcccg

SEQ ID NO: 343066 - DNA, 122 bp, Homo sapiens
gcggcggacaacagaaaacctggggcggcggacccaaccctgcgcccagaaatcccaggacgcccaccccatagttctggagcggtgcgtaccttggccactacacggaattcaccggccca

SEQ ID NO: 343067 - DNA, 122 bp, Homo sapiens
ctgtagaggtctccccaggctcaccttgacgctctgattggcggctgcagaccccatccgcgagatggcagtgttaggaacaaaggtgagctgcccactgcaggtcaaacgctgccggctac

SEQ ID NO: 343068 - DNA, 122 bp, Homo sapiens
ttgagcgggctttttggaagtttgtggcggaggtgaggccgaggtgactgcagagcggctcgcgaggtgctcgggctgtgggactgggcccctgggagggagcggttctgtgggggaaagga

SEQ ID NO: 343069 - DNA, 122 bp, Homo sapiens
cctctcttggccctcaagcagccagagcccctagttcacacattttggctgaaggcggcccgcaggctgatctccacaggtggggtcctgccagtttgggcagcagccaccagcctcttccc

SEQ ID NO: 343070 - DNA, 122 bp, Homo sapiens
gctcaccacctggtcctcacggcctcggatggcggcaagccgcctcgctctagcacagtgcgcatccacgtgacagtgttggatacaaatgacaatgccccggtttttcctcacccgattta

SEQ ID NO: 343071 - DNA, 122 bp, Homo sapiens
aacaaggtgcgagcaacgcctgcgcagctctgggagacaccgcctccgcctcccaggcgccgcccgctccgcccccagctcggcctccgcctcccgcagctcccgcggcccggcaggctcgc

SEQ ID NO: 343072 - DNA, 122 bp, Homo sapiens
agtcgcgctgcggagcaaccccagtggatgggtccgcgggggctgagcgggcggaggacgcgggaactccgtgacaccgaccagctgacgctgcccgcgtgaaaccagagccgggcatcagg

SEQ ID NO: 343073 - DNA, 122 bp, Homo sapiens
agaaagggaacttaccaggcatctggccctgacacagcatgagctctggaatgatgattgcgggtacactgccctccctcccttcgtttagccactgtgcagagtgaacacccacaggtctc

SEQ ID NO: 343074 - DNA, 122 bp, Homo sapiens
agggagtgttacagctcttaaggatgcagtacctggagttccttcctccagctgttaagacgggtccagagtttttttttttttcttctggtgggttggtactctgagttcattatctatgt

SEQ ID NO: 343075 - DNA, 122 bp, Homo sapiens
tgagaatacagggtgaaaaagaacgacgttactgaaggtagacattgctagtgcaaggtacggaatccatgtgcaaaaggtggctggaacaaatgttcagataaggtgcgatttgccaacag

SEQ ID NO: 343076 - DNA, 122 bp, Homo sapiens
gccaatcaggtgtctctcagccaagttgctcatccaagtctaccccactttctactgcagcgctcgcgcacttccccctgcttcagccagtcagactttgctggctgcctgcccgggaccag

SEQ ID NO: 343077 - DNA, 122 bp, Homo sapiens
taactttactgttatgcaaaatcaagtgcaaggtaattaagctgtcactgcaaacgagaacgattagctccacctgactgccagactggttcacagcagcacagagcagcccagttacatca

SEQ ID NO: 343078 - DNA, 122 bp, Homo sapiens
agcatgtgcagaagtgcagaggcctgaaagggtgtggtgtgcccaggacatggcattgaccgagggcctgttgtgtggccatcgtggtgatgtgcactgtgaaagaaacaggaccaggagac

SEQ ID NO: 343079 - DNA, 122 bp, Homo sapiens
gggggctgacgctccctgcaggagccaggagcaagcaaacaagcagcttgagtgcaggcgcggggacgggccgggggtgcctgcgggtgaaagggcggctcaaagggacagtcgctggaggc

SEQ ID NO: 343080 - DNA, 122 bp, Homo sapiens
agaaggggggaaggtgaaaaggagaggtgtttattctctcagtgcgcaggcgcggagccgcggcctctcgttcttaaagagataggaaagaactgacctactttctatggagattcttgtaa

SEQ ID NO: 343081 - DNA, 122 bp, Homo sapiens
tggtagaaaggaaaatcatccacagccatcaggctgcagggcaggagggagattatttaccgctcagactctcaaaccccaacaaagacatgggttgaaagaggcatggctatttaaatgat

SEQ ID NO: 343082 - DNA, 122 bp, Homo sapiens
agaagaggcttttctagcggcacgaaagaatttggaagcggcagtgttacggtaaaaaaccgacaaggtgcctgatgaagaggatttttatttccactaggtggtgctgttggcttagcact

SEQ ID NO: 343083 - DNA, 122 bp, Homo sapiens
ggaaacgcttccggggaaggtcgcgggtgtgggcgcctaggtcggcgcagccttgggagccgccgtgggtcgcggactggcgtggccagtgtggaaacttgggactgtttgcgatttctggg

SEQ ID NO: 343084 - DNA, 122 bp, Homo sapiens
ttctgggggggctggggaggtggaaaaccgggagacctgctgagtgaatgggaaaggcgccgcccagacaccagggagagaaagaggaaccgcatccatgcggtcccccgcccccacgccca

SEQ ID NO: 343085 - DNA, 122 bp, Homo sapiens
ttcccctcccaggggctcaggtttctctttcatctgtgaggtcctctcccgcccggacgccggggcccgccatccccaacgtccaccgcgagctccccagatccatggtctggagcaggtcc

SEQ ID NO: 343086 - DNA, 122 bp, Homo sapiens
caagatcttgtgtttttcctcggaaacaaggaaactgtaagaaggagaaatgaagatatccgagctaagagagaaaaaaagagacattagcattaatcatttataggataagggctaataga

SEQ ID NO: 343087 - DNA, 122 bp, Homo sapiens
tgcagcagcaccaggaggaccccaagcgcacagttccttgaggaccggactcgatttcctcgcatcccttcctacaggggtcccagcctggccgcaggacacggcacacttcccatttgccg

SEQ ID NO: 343088 - DNA, 122 bp, Homo sapiens
gggggagccttctgcatctcattctggggcccctttccaacctttggagttgcctcctggcggagcttaacaggctgaggcagcttcctgagcagcctgtggttgctccagccgggtagaga

SEQ ID NO: 343089 - DNA, 122 bp, Homo sapiens
ggatatgcaacgagctctttatggcaccttggagatggttgcttttagtgccgttgacagcgggctcagagcaccaagtgagctagcaccgtatttattagtaaattactccataactctag

SEQ ID NO: 343090 - DNA, 122 bp, Homo sapiens
ggcacacacaggacccgtcttacctgtgcacccagagcagccccttcccgcaactctcggcgttcttgggggaaggagtttccctctggataggggtgattcatcaccgcccgagcgggcgg

SEQ ID NO: 343091 - DNA, 122 bp, Homo sapiens
caattccaaggagtaattacattaacctacactgctgtctaaatttgctcaagtaaacctcgaggaacacagagtgctgttttaatacagtactgcattaaccccaaagacttcaactgaag

SEQ ID NO: 343092 - DNA, 122 bp, Homo sapiens
gctcggaaagaggaaatcagctacctggctgcggaccatctccctcaattgtgacagctccggcgctcaatactttcagttctgcattcggccgagcaggtggcaggaagaactgtgaccct

SEQ ID NO: 343093 - DNA, 122 bp, Homo sapiens
taacgtcccagggctatggacgggctcccttggcggccagttttgttgcgcgtagggaggcgttaggcgtgaaggtcttgagagggggtggagtcgaagtgggtaggactgcatccccgtct

SEQ ID NO: 343094 - DNA, 122 bp, Homo sapiens
ggccgtgtttgattctttcaaatgtcttctctactttgcaattttctttttcctttgggacggggtctcactatgttgcccaggctggtcgcaaacttctagactcaagagatcctcctgcc

SEQ ID NO: 343095 - DNA, 122 bp, Homo sapiens
gttatgactgacaactactcagacgaataaagccctccttggccaggcgacagcgtgtagcgagttattaccaatcccttggcattgcacattgacttagaccgtatcagccaatagccatt

SEQ ID NO: 343096 - DNA, 122 bp, Homo sapiens
ctggctcctcgccggtggacactgcggttcgttctcaccgggaggagataacgcggacagcgcggcagctccaccagtcacagcaagcaagaggctcagcctaacccggaggcgaatcgctg

SEQ ID NO: 343097 - DNA, 122 bp, Homo sapiens
aaagggggccccgcagcagccccttggcttcccttctcccttgcctcccctccggggctccggttcagaggcactctgggcgcctgctacagcttccaaactgcgccgcttccttcttcggc

SEQ ID NO: 343098 - DNA, 122 bp, Homo sapiens
ccaaacgtgcccgagtggtgacaggaataaagtgggtcacaaggcctagcgggtccccagcgaaagctctctcggcacccggtccccgtctttccccgcctcccagctgctggaatcggccg

SEQ ID NO: 343099 - DNA, 122 bp, Homo sapiens
aaatgaggaaacggaagccaaggacctgcaggtggctggggactgtgcacaggctggttccgctcaagtcacatgactcgtcagccagtgagtaggtctgggtagcagttggcatggatgaa

SEQ ID NO: 343100 - DNA, 122 bp, Homo sapiens
gcggcgccaggcagcattacgaggggcaccagtgcaaggcccaaagcgcgagggcacaggcggcgcggccgtgcggcgggtcatccctgggccactgcgagggcggagggcggcgccagggc

SEQ ID NO: 343101 - DNA, 122 bp, Homo sapiens
agggaataaatgtcattttagttttaggccggtcagtttgctcttttagtcctgtaacttcgaagcatacatgacccctagcaatcaaagtgaattagaaaaaaaggtgagaaaataacaaa

SEQ ID NO: 343102 - DNA, 122 bp, Homo sapiens
ctgcactacacctttgcgcgcaccgggcccagccggcccagtccctcaagcatcagtagacggaaaatgctcctgaacgcccccgcgactgcatggagtctgtgtgcatctgtcccggcctg

SEQ ID NO: 343103 - DNA, 122 bp, Homo sapiens
gcctggtgtgtatctgacaatcacactgccagccgccagcagcagatggcttggtgacagcggctccagagtcctttctgctttgagattatccctctgttaagattgttttccttggcaat

SEQ ID NO: 343104 - DNA, 122 bp, Homo sapiens
ctgtcaaactcattcctgggcctcatttctcctattatcctacagatgggtttaaggtcacgttcatggaatgtatgactattcaggatgacagtgcagatctctggaccaagcctagtgtt

SEQ ID NO: 343105 - DNA, 122 bp, Homo sapiens
gaaacaatttaggatacagcagccattgaagaaaaatatcaccacagggaaaaccgtaaacgacttcaggtcctccactcccgtgaagcttcattaaggtgccaccggtttcaatacaagtg

SEQ ID NO: 343106 - DNA, 122 bp, Homo sapiens
ttcacagtgaaacttaccccgcctccgaggttctggaagcagaagtgctctggggctccccgtggcctctcggtgtgctgcggcggctttcggagtcactcacatgtcctttccccgcggac

SEQ ID NO: 343107 - DNA, 122 bp, Homo sapiens
accagcaccaccggtctcacctctgccagctaaaacttgcaccggatgcagatacgagttcgccatcatcgaacctagcagacccaggacgcagactgggtgttcacagaaagttgaaggtc

SEQ ID NO: 343108 - DNA, 122 bp, Homo sapiens
gggataagcagtgaacaacaacaaaaagacaaacttcttccaccctgaggcgtatgttctcggtgagaaatgggcaataaacataatacctaagaaaattatacgggatgttagtgacaaat

SEQ ID NO: 343109 - DNA, 122 bp, Homo sapiens
cagcaccactcggctgacccctcggctcccaaggaaggtgggcgcgcgcacagctagccccggaagaccctccaggcctcccgcagccctgggggtggaatcgccgccctccccggggcggg

SEQ ID NO: 343110 - DNA, 122 bp, Homo sapiens
aatccatctcctcggcccattccacgtccacggccccctcgacctcttccaagaccaccacgacctcgaataggtcggtcaataatcggtctatcaactgaaaattagcctccttcaccctt

SEQ ID NO: 343111 - DNA, 122 bp, Homo sapiens
cctgattctcataggcctcctctcggcggcggatggggacatcgctggcacacacatacacgtagacctggttgtcacaggcaatgccccagcagcactgcgtggtggcgctgacgcgcttg

SEQ ID NO: 343112 - DNA, 122 bp, Homo sapiens
aacagacccctggcctggaggaagacctccagggcaggttaggcgggccagtcacatctccgggggtgatttaaaaggcaccaccttgggacaaaaggatggaagcattgaccagacaaatg

SEQ ID NO: 343113 - DNA, 122 bp, Homo sapiens
ggtgtaacagcttctctctgtctctgttttcagagtcgcagtgcacgctctgcggggagccggaaggtgagtacctgacatgctgcctggggtgggcgggggccgcgcggctcacaggtgtg

SEQ ID NO: 343114 - DNA, 122 bp, Homo sapiens
attctgattcatatactaggtatatttaacctggggtccattgtcctctaggggttccaccgatcccttgatatacacaattttatgtaagtctgcatatgttcatttttttttttttttga

SEQ ID NO: 343115 - DNA, 122 bp, Homo sapiens
agaaagcaaccagccgagagttcgcgccccagggagggaagcgggcacagggccgcccagcgccactcacctgtgagctctccgcgggccctgcaggcggagcctcggtacgacgcctttcc

SEQ ID NO: 343116 - DNA, 122 bp, Homo sapiens
cccagccgcagcactcagaggcttattgctttctgaatcactcagtcctgagggtaggggcgggggacccccttccatagcaatatccacaggcccagagaggccagggcagggcacagcaa

SEQ ID NO: 343117 - DNA, 122 bp, Homo sapiens
cttatatcatgcaaccaggcatatttgattgcaccatttattaagaagtttatgttcggccggatgcagtggctcacacctgaaatctcagcactttgggaggccgaggtgggcagatcact

SEQ ID NO: 343118 - DNA, 122 bp, Homo sapiens
ggacgtcgggagcgctggcctctgctctgctgatttgcaggtgggagtgcagggtgagcccggcgcaggggataggaggtgggggagtcgagagctggagtcaggcgccgctcacgctggga

SEQ ID NO: 343119 - DNA, 122 bp, Homo sapiens
tgtttgcggaccacagagcggcagcacatccctacacggggctgtcaggcaaggtcaacgcgctagagtgcaagagcctttgctttgcggattgccgcagcgccgggtgtgggcgcaggtgg

SEQ ID NO: 343120 - DNA, 122 bp, Homo sapiens
attgacggtatacggtgcgcactagggactctcccgacggggagcagtgagttgtcatcccgggtagacggcgaactcccggagccacgcggccgcaggtgggcgagggcggcgagatccct

SEQ ID NO: 343121 - DNA, 122 bp, Homo sapiens
gggcggggacttcctatgttagcggggcgaggggccgcctcttaaaggagccgcctggagcggggaaactgctgacaacccttaaggcatttaagtttacaggaaattgcgcttttattgcg

SEQ ID NO: 343122 - DNA, 122 bp, Homo sapiens
cctggcagctgctcgggctctggtctggggtggggagggcggcgagtgcagtctggaccccgttgcaggagcacaggagggttttccaggccatgtggctcagcttcctcaagcacaaggta

SEQ ID NO: 343123 - DNA, 122 bp, Homo sapiens
agcgatgaaataatttaaggatgcgcagccgatgcacattgtgtgtgcataaagtggattcgtgctgcagggagaggtattctgagcaatgattcacttcagaagagatttttacaggaatg

SEQ ID NO: 343124 - DNA, 122 bp, Homo sapiens
tgcacgctgggtgtccctgggtgctccaagagagccccacggtgggacgcaggcgtgacacgggaaagtttcttggctgagcttcaagacagagacagacagacaagagaacagcagcttcg

SEQ ID NO: 343125 - DNA, 122 bp, Homo sapiens
aggaactcaaaaacctattctgatatttaaatgtagacaggcacctcttacgtttattcgcgcctgatattcagcactgcccaccaagttccgcgctgtgcaccggtacacgcccccgtcgc

SEQ ID NO: 343126 - DNA, 122 bp, Homo sapiens
ggcctagttattaccctgaggaaagctgatttgggggctcagaggggaggtgagatctcacggtgaccataggacgccttgagtaaaagtttggagaatatctcatggcctgaccctccata

SEQ ID NO: 343127 - DNA, 122 bp, Homo sapiens
agagaagacgccaagaagactactggcgagaactggaggccaagtgcaagcggcaaaaggcggaagcagccgagaagagacgcctagaggagcagaggctgcaggcgctggagaggaggctt

SEQ ID NO: 343128 - DNA, 122 bp, Homo sapiens
gggtgggttcgggtgccgtgagggcccacaggcggccgccgcggccctccacggcccacacggcccccgcagggcacagccttacgcagcccttgcgttgcactgattccccggccgcgccc

SEQ ID NO: 343129 - DNA, 122 bp, Homo sapiens
ctcccggccctccatcaagcggggcgccagcctgcacagcagcagtgggggcggcagcagcgggagcagcagccggcgcaccaagagtagctccctggagccccagcgtggcagccctcacc

SEQ ID NO: 343130 - DNA, 122 bp, Homo sapiens
cacaggtgaggacacaccaggggccacactcgcagaaccggaaaggacgccagcaccgtgcgtgaaaaaaaagccaagaaagtccaggtgacaagttcctatgctggaacccggccctgcat

SEQ ID NO: 343131 - DNA, 122 bp, Homo sapiens
gttgtggaattttctcagcccctacgaggcgcggggattctccagccccggccctcctcccgccagcctgaggtctccttcgctcgcctgccttgctagggaccgcagtccctcagccgcag

SEQ ID NO: 343132 - DNA, 122 bp, Homo sapiens
cctcccgagcccaggactggagttgtctggagaccacgcgtctaaccaaggagctgtgaacgctcaggacccagagggggctgtgatgaaagagaaggccagctttctcccacctgtggaaa

SEQ ID NO: 343133 - DNA, 122 bp, Homo sapiens
gcttgttttcctttttccacttcatgcggcggttctggaaccagatcttgatctggcgctcggtgaggcagagcgcgttggcgatctcgatgcggcggcgccgtgtcaggtagcggttgaag

SEQ ID NO: 343134 - DNA, 122 bp, Homo sapiens
gggcggggtccgcggggggctcctcccgggaccgagcgggaccccgaaccaagggacagtcgcagtttgggccccttgaattttactttcaagtaatgggaaactgaggaggcgggcgcttt

SEQ ID NO: 343135 - DNA, 122 bp, Homo sapiens
agcaaccaatgttctgtcccttgcagtagactgtgaagcatcctgtgtgtgtgaagcacccgccgtcagtcaagtatgcccggtgctttctctcagaactcatcaaaaaggtcagttatggg

SEQ ID NO: 343136 - DNA, 122 bp, Homo sapiens
aaccctagctgccacatgactctctgctggtactgtattgccttcaaaggaacatcagtccggcattcaaaataattaagaagctattttaactgtttgttagagtttctctaacctaccct

SEQ ID NO: 343137 - DNA, 122 bp, Homo sapiens
taataattttttaacaaggggccccacgttttcattttgtactgggtcctgcaaattatgcggccaatcctgttaagtgacaacctttagcaggtaggagacaggtactggggaaacagcca

SEQ ID NO: 343138 - DNA, 122 bp, Homo sapiens
acttcccgatggtagtcaccagcatacaggacctgacacgggcgtgcgggcagggtgtgccgctacggggtccctggcgcacctgctacccctgctacccgcattcaccgcacgcggagggt

SEQ ID NO: 343139 - DNA, 122 bp, Homo sapiens
ggagcaactcccctccaggcacaccctcctgggaactttgaactgagcagcttcccaaaacgtttccaagcagggcagggctggaggcttaagaaaatcaatgacctggcagggcgcattga

SEQ ID NO: 343140 - DNA, 122 bp, Homo sapiens
cttgggcggtatcggggcggggccgggcccagagagggagaagaggggcgggatccgacccggactatgagaagagggccgggcctgactcaaaaaaggaagcagggccctacgctgagggg

SEQ ID NO: 343141 - DNA, 122 bp, Homo sapiens
atttggaggaggagatgagcatctcagagcagggccctcttaacacatttctgtcggatgcgctagaagctaatacgatggcacctggtttttgagaaaagacaagctttttgttgcatgtc

SEQ ID NO: 343142 - DNA, 122 bp, Homo sapiens
aggctgctgagcttcgtgcttatctgaaatctaaaggagctgagatttcagaagagaactcggaaggtggacttcatgttgatttagctcaaattattgaagcctgtgatgtgtgtctgaag

SEQ ID NO: 343143 - DNA, 122 bp, Homo sapiens
gatgtacttcactggggcatagcccgccgccccaccggccccgccaccagaggacgcccgcggcccacaccccagcaccagcaccagtagcagcagcagcagcgaagacaggggtgtcagag

SEQ ID NO: 343144 - DNA, 122 bp, Homo sapiens
ttccacctcccagcacatcacccacactaagggccccacacctcccatcccaccctcccccgtcctacctgttattgtataactccagcctgagggcatcgctgtctctggttaactggttg

SEQ ID NO: 343145 - DNA, 122 bp, Homo sapiens
aaaaaatcaacctacaaaaggcagattaatttgagaaaaggcatacaaatttatttaaagcgtatacatgggagccttcagaatggaggccctacccaatgatggggtgcagaagcttatat

SEQ ID NO: 343146 - DNA, 122 bp, Homo sapiens
tgatgtggcagtccccacatttcccaaggtgttagcactcacctgtggcctattctccaccgcccctgaaatgagctcttagcaatcttctttggagccatcctctgctgagagtcacctgt

SEQ ID NO: 343147 - DNA, 122 bp, Homo sapiens
ggcgagcgctcgggctccggcaggtccccgaagaggtccatggcggaggctgggtggaggcggcagcagcgacagacactcagcccgcgagcagcggccgggctccacaccccgggcgggcg

SEQ ID NO: 343148 - DNA, 122 bp, Homo sapiens
tcagacacaaggccaggcccctcatacctatgtctaagcatagatggagaggaggctaaccgacccctcttggctaaaatgggtcatgctgattcctggccagcttagatttatggggacat

SEQ ID NO: 343149 - DNA, 122 bp, Homo sapiens
tgctgagtgcttactctaagccaagctggtatacaacgtggaaaagaacactgcatggtacggaataacaactcttatctgttgagaaccaggcattgtgctaaaatttataattattattt

SEQ ID NO: 343150 - DNA, 122 bp, Homo sapiens
gccccctcccctgccgcgctgacgccccctcccctgccaggccccaccttataggcttgccgcacccctccgttgtcagcaatgttttccccaagggtgttgaatccgttcacctgcgcaca

SEQ ID NO: 343151 - DNA, 122 bp, Homo sapiens
ccttcacctcccactcctggcgctgcttccggcttctgtatggattactctccaggccatcgaagttgggctcaccggcccctgaagggagggagggagaagcatggagccataaggaagaa

SEQ ID NO: 343152 - DNA, 122 bp, Homo sapiens
agttcccatcaacaaagcatcatcagccattgtccctgagagtcccagctttgtgatctccgccggatttgcatgttttctagtcatttacggtgtgtgggtgtggtggtcacttggcaggg

SEQ ID NO: 343153 - DNA, 122 bp, Homo sapiens
ctctcaaaagttcatattccactcttgctccccctttctcctgcagtacaatctacatgtcgcagccaaggatcaggtcaaggcattctcatgctctctccagtggctcaccttcttaccta

SEQ ID NO: 343154 - DNA, 122 bp, Homo sapiens
ccgcgcagatccctgctcctacttggatttagcaagggcctcagagcttagcattgtattcgcgatttacggctgacaagcgctttcaccaggcaagagtgaaaaggtttcaaaaggactat

SEQ ID NO: 343155 - DNA, 122 bp, Homo sapiens
agcctgactggcgcgtggtcagttcccgccaagcggccctgccgggggccttctgagacccggtcagcggttgagaggctgcggtttcctccagaaactctgccctttcgcgcgtaactcga

SEQ ID NO: 343156 - DNA, 122 bp, Homo sapiens
gccctaaactctccccctttctctaggctgatatttggagctaagctctcattagaagggcgcctcagaactgcagtggctggaatgctttcagggaataaatgcgtggctcaatggctccc

SEQ ID NO: 343157 - DNA, 122 bp, Homo sapiens
ggcgccatgacgcgctgggtgcccaccaagcgcgaggagaagtacggcgtgggtgagcagcgccgccgccgccgcgcctctcgccccaagcccaggctccggcggggcgggtgtgccgggcg

SEQ ID NO: 343158 - DNA, 122 bp, Homo sapiens
caatttccagaattctgttcatctcgcaaaactgaaactgtatactcattaagtaactcccgttttcccctccctttatcgcctggtaacaaccatttttttttctcattttttagagacag

SEQ ID NO: 343159 - DNA, 122 bp, Homo sapiens
tcggctcgctcgcaggccctgctggagcgcgacgggctggcggaggaggtgcagcggctgcgggcgcgctgcgaggaggagagccgcggacgcgaaggcgccgagcgcgccctgaaggcgca

SEQ ID NO: 343160 - DNA, 122 bp, Homo sapiens
cggtaaccggtggtcccgcggtagctagaggcgggccccacgggtgggtgtgtccgtttccgcacgccagccttccagcccgggaagagcgcctgcaagcgggtactttgttcccaaagatg

SEQ ID NO: 343161 - DNA, 122 bp, Homo sapiens
ttataaagaacaaaaacagaagcagaaggcgcttcattcctctctttcttcagctgaagccggttctgttagcacagaatttagaaaataatagtgagacgtggcatgaattggcttgtatc

SEQ ID NO: 343162 - DNA, 122 bp, Homo sapiens
ggcgatgaccccgtctccaaccagaacatccagtacttcctggaccgcttctacctcagccgcatctccatccgcatgctcatcaaccagcacagtgggtgccggccacagcggcggggagc

SEQ ID NO: 343163 - DNA, 122 bp, Homo sapiens
acctcctgcttgggttcagccaccttcaaatactgcatcaatggctcgtgcctctgcctgcggggctgggccagcgcgggagaggcaggcggagggttcagggagctggggatctgcggtat

SEQ ID NO: 343164 - DNA, 122 bp, Homo sapiens
gctttgtagcaggaatatcacagtactgaggtgattgatgctcaggccactcttctcactcggagtcaagcccatcaagccccagccagttggagcaagggctgcaagccttgaactgcagt

SEQ ID NO: 343165 - DNA, 122 bp, Homo sapiens
cttcagatgagtccaggtcttcgtcctcctgtgaagatccttcagctgagtctaggccttcgtcctcctcctcttggacgggattgatggagttctctcgggactggtccttctccagttga

SEQ ID NO: 343166 - DNA, 122 bp, Homo sapiens
cggccctgtcagccctgcagggcgcaccagctgctctcacgggccacagaatcacagatgcggtcctcacctctcgggagcggccttctcctagacagcacacgagccatctacgttttccc

SEQ ID NO: 343167 - DNA, 122 bp, Homo sapiens
tgctctctgcctgcaggcatttctgagtgtcttggcctcctgaggctggggaagggaggacgtgaactctctgttgaatgtgggaggatgccgggatagcttgaaaaggacgacaacgccac

SEQ ID NO: 343168 - DNA, 122 bp, Homo sapiens
actgcacacacctggcaccgtgtgcaccacctcatgccacaagcagccacacaccccacacgcgcccgaacaacacccttcacccacactgcacacgctgcagccctgtacacgccacataa

SEQ ID NO: 343169 - DNA, 122 bp, Homo sapiens
gtgtattcatatgggatttacagagtaatatttgtgtgacatacagtaggtggtcttttgcgtgggtgaaatactccagctgactttggttcatgaatgcttctaggataattatgacgaat

SEQ ID NO: 343170 - DNA, 122 bp, Homo sapiens
ttccactcaccaggtgaagagtttgccttttatcctgcgcagcaggctggagaactcggccgccgctccctccgcgaggggctctggggcgccggggcccgctggcgagtctgcctccatcg

SEQ ID NO: 343171 - DNA, 122 bp, Homo sapiens
actgcttcctctggccccatgaggctcagaggagctaggggcttctgccccaggtgaggccgcattggggagtgggtgggagggccctggctgagcagctgcttcatcttcgtcatcatcat

SEQ ID NO: 343172 - DNA, 122 bp, Homo sapiens
actagctgctaccggaaccggaagcggctgctccaggtaaagggcgcataagttgctggccgagccaaggatcgctgggctttcaccgcagcccctgcgggagagcggcgcaggcagaagca

SEQ ID NO: 343173 - DNA, 122 bp, Homo sapiens
actagacataactattactgctgtgaatgagttccggaagctgcagtctcactggtccttcgggtcatcatccagctttcagttaggggaagctggcaggtaaggtgaaaacagaactggat

SEQ ID NO: 343174 - DNA, 122 bp, Homo sapiens
cccttagttcgagcggccatcctcctgtggggcttgtgggcagcctgtggggtttgtgggcggcctgtggggtttgtgggtggtctaaggaaagagttggggcactcaggggtctgctgttt

SEQ ID NO: 343175 - DNA, 122 bp, Homo sapiens
gccatggtaaggttcagaagttaccctgtatggttcaaaaagctgggaagccctcagctccgagaaattgaaattgcccacctctttcctggaaaactcatgaataatccacccttgtttag

SEQ ID NO: 343176 - DNA, 122 bp, Homo sapiens
tgagacaaggttgctggtcttctgttttgggggaaatcttggaaggatcctccgtcatgacggtgcttcaagtgcacctgcacagccgggaatcccttctccagtctcaatttccaatagtc

SEQ ID NO: 343177 - DNA, 122 bp, Homo sapiens
gctgtccagcattatgattttaccagaatatatcactcctcaactactttagaaacccctcgaaggctaggatggtattttatacctaacagtttggtgtcatcccacgcccacctccaact

SEQ ID NO: 343178 - DNA, 122 bp, Homo sapiens
tgggcttgatgagaccctttccagccccttcccatctactcaccctgattcctgtggttacggtcattatcaaaatcattcccctggaggtctgtggcccctgtattacacatgaaaggtgg

SEQ ID NO: 343179 - DNA, 122 bp, Homo sapiens
tcgtaagcttgtttacgtaatggagaaaatactcgtacacagaatgtgcagtaccagaaacgtttatgtaacccccgtagtgagcttgacagtggtaatcggaaatcgtttttgaaaagcct

SEQ ID NO: 343180 - DNA, 122 bp, Homo sapiens
cgcgtcggcggcaggggatgacgtaaaaaggccgcgctgtactgcggcttgtgccgcttccgcaagaaggtttcctggcctgttgcagccatggtgcattgcagttgcgtgttgttcagaaa

SEQ ID NO: 343181 - DNA, 122 bp, Homo sapiens
cggacaaaagggaggaggcccgccaagttgcgagggggagccacgggtcgagggaggcagcgccggcggagcagcggcgcgcgggtgccggcgcggggagcagctggtgttcgctgtaacaa

SEQ ID NO: 343182 - DNA, 122 bp, Homo sapiens
acgttacgcggcgtgcgcgtgaggcgtgcgcgcgtcattgcacgtggtgcaggaagtggccgatgtgtgcaatccgggtgcgcaagtcttggcgccacaaatgtcagtgacagccttgcgtt

SEQ ID NO: 343183 - DNA, 122 bp, Homo sapiens
cctccatttgcccgttggagcgtgtggagtgtttccagttcttgactgtcacaaagaaagcggctgtgaacattcgggtacaagttgttgtcgggatacacggttttatttccctggataga

SEQ ID NO: 343184 - DNA, 122 bp, Homo sapiens
ttccaagaccaatttgacaacatggtgaaaccccatctctgctaaaaacagaaaaattagcggggtgtggtggtacacgcctctacatagttccagctactcaggaggctgaggtgtgggag

SEQ ID NO: 343185 - DNA, 122 bp, Homo sapiens
ggcagcattggcctttgcagcggcggcagcagcaccaggctctgcagcggcaccccccagcggcttaagccatggcgcttctcagggcattcagcagcagcgttgctgtaaccgacaaagac

SEQ ID NO: 343186 - DNA, 122 bp, Homo sapiens
atgaagaacttccaacatgtttcccgagtgtcattcatgccaagggacttgacttggggtcgcatggaggagatgatgttctccacctcgtcctccataaacagcccagggatctctcctga

SEQ ID NO: 343187 - DNA, 122 bp, Homo sapiens
acatggttccaggagacaggagcgggaacggtgagatcagcgatcagtcggagagaggaccgcagcagtgttggtgcctcggcacaaagctgaagcccgagaccctggagctggaaggatca

SEQ ID NO: 343188 - DNA, 122 bp, Homo sapiens
aacagcttggtcacccaggcacaggcatcctcagcctctcatttatttactgagcccctgcgtcagcctctccccctatactcaagctttctggttccagctgggccagcgtgtgggggtgt

SEQ ID NO: 343189 - DNA, 122 bp, Homo sapiens
accaggtgggtggctcttaaaagagcctttggggtgaacgttgcgcaacctctcaggtggcgagatagccctcctaggcccgctccccgcggatacggcgtgccagctggatgtccttaggc

SEQ ID NO: 343190 - DNA, 122 bp, Homo sapiens
cagaacaataacaagctccaagtgtcaccaaaataaatagtacaacaaatgggagagccgcgcagcccccgcccggacctaagccccggcaatcggcagccttaacgctgtggccgtcgctt

SEQ ID NO: 343191 - DNA, 122 bp, Homo sapiens
aggtgactgcccaggaattctgaccaagtcttgctcatcttcatcggagtctctgagcatcgcagctgccaggcagccaagcattgtgtcgcaactctgcagaagtgccacacacacagtga

SEQ ID NO: 343192 - DNA, 122 bp, Homo sapiens
aaaaagtttgctgacctctgtcctggaaaattcatctcccaagttctcttccggcactggcgttcctgggtgtcctaaatttggcccctgttatttctgaactctgttttggctctgttccc

SEQ ID NO: 343193 - DNA, 122 bp, Homo sapiens
gcgtcatgaccctcccaccttcttccgccgctttttaattacgccattctccccgagcgccgattggacagctcctgcacagccgcgcgatgacgtgtcggaaactccatctcccattgggg

SEQ ID NO: 343194 - DNA, 122 bp, Homo sapiens
cagcagcacctcttcgggcgttccaacgcggcgccccctattggacctcccacccatatccggtttccggtctgacgccccctgctcattcgccaggcagccttgattggcatgacccctgc

SEQ ID NO: 343195 - DNA, 122 bp, Homo sapiens
ccaaatgtgcagacatttatcaaaccgagtgtcgggagcagaaatgcagtcgtgcatccacgttgaaactttcgctttgattcctgcaaacccacaggcccctgggtccaggactcccactg

SEQ ID NO: 343196 - DNA, 122 bp, Homo sapiens
gcttctagttaaacatcagctattgtcattgcaggatgtacgctgattactactgagcaccgactgtatgccgggtgccttcgtggcacttctcggttgcacgctggttagtattgagcacc

SEQ ID NO: 343197 - DNA, 122 bp, Homo sapiens
aggggccgggcggtgtggccgcagggtccgcggaccgggctcgagtctccttcctgccggcgtcctagtgcagccggccacctagcagggctgggaggccatcacctccagcggagaccgag

SEQ ID NO: 343198 - DNA, 122 bp, Homo sapiens
caatcccacagccaacatcataatgaattgacaaaagctggaagcgttcctcttgagaagcggaacaagacaaggatgcccactcttgccactcctactcaatatagtattgaagtcctagc

SEQ ID NO: 343199 - DNA, 122 bp, Homo sapiens
cggatagaccacattttgtctgttcatccatggatggacacgcgtggcttccaccctttccgatcgtggataatgctgctgtgaacacatgtgtacgtgtattcgtttgggtccccttaggg

SEQ ID NO: 343200 - DNA, 122 bp, Homo sapiens
gcggggaggggtctgggccctctccccatcgccccgggctccggccgggattccgttcggcgcactcagcgctcgcctccgcgcagaggaccagaccctcccgctggccgcggccgctagcg

SEQ ID NO: 343201 - DNA, 122 bp, Homo sapiens
agaagcgtcccagagggacctaagctaggtccacctctccctccttcaagcccacagagacgccacctggacgtgcttgaaggaagtggggccagttcctggctggccctgcagaaaacgcc

SEQ ID NO: 343202 - DNA, 122 bp, Homo sapiens
cggggctgccggagggggcggggctgccggagggggcggggctgccggaggggcggggctcgagtgggaatgcaacccttggacacggtggatcctgggaatctaaccttccgtcccggggc

SEQ ID NO: 343203 - DNA, 122 bp, Homo sapiens
ctcccctttccccgcccacccccgggccttggctcccggctgcgggccaggagaagagagcgccgcgtacccgctgcttcccaaaacccactgagcctgatgcgcgcgcctccgctgtgcca

SEQ ID NO: 343204 - DNA, 122 bp, Homo sapiens
ggaaatggccacggccatcactgttaggtgaaaaaagcaagctgcagagcaacatgattccgttcgtgtaaacacctcccctaaaaggcaccaaacgcgtgcgactgtaaacacaggaccaa

SEQ ID NO: 343205 - DNA, 122 bp, Homo sapiens
aagtcaggcctcgtcaggaatcaccaggtggttgcttgcgagagaagctgggggtgaaaccggagaaaacaaagtaggaagcaggtctgggccaattgcagcccactctgatgggggcctgc

SEQ ID NO: 343206 - DNA, 122 bp, Homo sapiens
ctcccaaagaagctgggaccaacaggcaagtttcatttctttgctaacaaattcctaattcgccaccacgtggcgggcccatcaggccatctgcctggacgtccaccttgccgaccggctgt

SEQ ID NO: 343207 - DNA, 122 bp, Homo sapiens
agactgctggtcttcatcttcatccccatctgtcaatgggacgggactcacccccggggacgccgagcccagccctgagcttgggttcactagggcaccgggcgagcgggttcacctgggca

SEQ ID NO: 343208 - DNA, 122 bp, Homo sapiens
atcttctgccgcatcatgaggtaggcgataactagcgttggggagcggctataaccttcccggcagtggacgagcacccggcctgtaagaaacaggggagacgtggtgagctgggggcgtcc

SEQ ID NO: 343209 - DNA, 122 bp, Homo sapiens
gcaacccattgagtatggaattgagagtcacaggttttagcctgggtgataatgaggatacgagaatctcctgatacatattcagttaacaggaagaggaaacttagatactcaattttgga

SEQ ID NO: 343210 - DNA, 122 bp, Homo sapiens
ttgtacgtataagagttgtgagaattctgggactgaccaactagatccacagcccagccccgcagtatgatcctggcatatgattcttggcatcccaggctttgggatatatgcatgccaag

SEQ ID NO: 343211 - DNA, 122 bp, Homo sapiens
gtggctgggccacttaccagccaggtaacaaggggcaaaacatttctcctctcagttaagcggggggcatctgaggggctttctgtaagaattcactaagatgacgcgtgcaaggcccccag

SEQ ID NO: 343212 - DNA, 122 bp, Homo sapiens
gtgttgctaatttagactgagtggccaggaaaagcctcaccagggaggtgacagataagccgagatctaaatggcaagaaggaatgagtcacatgaagacctacagtcagagcaatccaggg

SEQ ID NO: 343213 - DNA, 122 bp, Homo sapiens
cccagagagaacctgccccgcctccctggcccgggccccgcctccttggcaagcgagtggcgctttcaccttagcaaccagcgcggctcccaccatggctgaagaagaggaaactgctgctc

SEQ ID NO: 343214 - DNA, 122 bp, Homo sapiens
cgtgagaaactaagctaggactgcgtctctccctccagacatcacggcgtcctcaccggtcggtggggtccgccctgaaacatctggctctttggagtttgcgtcgatttgtgaaagctccg

SEQ ID NO: 343215 - DNA, 122 bp, Homo sapiens
tcccggctccgccccaccccttcgcccgggatttccgccgaggcggtgcagctaccgcgccgtgttgtcctctgtctgcaccgccgctgacggaaagctaggcccttctggagacccgcttt

SEQ ID NO: 343216 - DNA, 122 bp, Homo sapiens
ctgcagagtctcctgactagggagctaaacaataaataaatgtggcctagctcagcagctcgggcggcgggaggagcggcagcggcaaggcagcccagtttcgcgaaggctctcggcgcgcc

SEQ ID NO: 343217 - DNA, 122 bp, Homo sapiens
ctgtccttttgagttttatggaggcctcattacataggcatgactcattgaatcactggccgctggtgatcaactaaaccttcagcccttctctcccagaagaggggtgtggggctgaaagt

SEQ ID NO: 343218 - DNA, 122 bp, Homo sapiens
ttatctgattaaaggcaggggatgggccagatgacctcagagggccctttctcttcactccggtatggttctgagccaccctatgcccagtgaggtggaggcagcatgatgcggtggtggag

SEQ ID NO: 343219 - DNA, 122 bp, Homo sapiens
ctcaagtcatccacctgcctgggcctcccaaagtgctgggattataggcgtgagcaactgcgtgcggctttaccatcatttcttgatcaagtagcactgactttataatgaaactaaataac

SEQ ID NO: 343220 - DNA, 122 bp, Homo sapiens
cccagcccccttaccatgctgcagcccccggcccaggcgtgctgggtccgcaccgcggtgcgcccaggtggctttcttaaagggaaagttgcatcagcctcccgaggctctgtgccgcgccg

SEQ ID NO: 343221 - DNA, 122 bp, Homo sapiens
atttgggaaagggaagaaggagtttagaaaaacaaaagttatctagaaactaaacatacccgtatgtcctgcaggcctggcctattttagcagctgtgctaaaacagcccccatgcgtggtt

SEQ ID NO: 343222 - DNA, 122 bp, Homo sapiens
gtcggttgccttggaaatgcagggcgcagcagccgctgcagtggagccggtaggcctggccggcgggctgaaaggaagtgcgagctgtccgcccagggccgggtatccgcccctgcaggctg

SEQ ID NO: 343223 - DNA, 122 bp, Homo sapiens
tcagtttgggcatggcattgaaagtgcccgggaggatgagctggatagcgttgtactccacgttcaggtactctaggttttgcagccccgcgaatttctcccgggacagcgtgtccaggtaa

SEQ ID NO: 343224 - DNA, 122 bp, Homo sapiens
tgcagagttgaatgaaagtgtttcccgggaggggccgagtggaaagcagcaggtggccggcgcgggtggaacccagcgcgggcgcagagcgtctctggcgtgggcattcggtgcagcgagtc

SEQ ID NO: 343225 - DNA, 122 bp, Homo sapiens
tgtgttaggaggttttagacttgctgtttcttacactttctccttccgtttcagtcagttcgatttctgatggctggttctccccattccttccctttctaaggtggagagtagatctcagg

SEQ ID NO: 343226 - DNA, 122 bp, Homo sapiens
ccccattaacagggaaaaatccacacagcttctcttggtttctctggcccgaaaatccaacgttggtccaagaaggctctggcgtgtgccaggcactcgctgatcatctggtcttagggggt

SEQ ID NO: 343227 - DNA, 122 bp, Homo sapiens
tttgcaagttatgtcaacagatgttcagtgtttcattttccttaagggtgtatggtttctcgctgactcttggcttcaaatacagattctctgctgttggttttgtctgtaagcatgtaagc

SEQ ID NO: 343228 - DNA, 122 bp, Homo sapiens
ctaggtggagtgggaaagaagaggaaataaaggggaatctgaaaagtatttgtatagctgcgtccgctcggttaagtgcttgtagagtccattttagaagttaaggataaatgacctacgtg

SEQ ID NO: 343229 - DNA, 122 bp, Homo sapiens
cgctcgcccggagtctgcacacagcgcagctggaaaatgttacttcgctggaaaggtttccgctggcactgccaggatcccaagccgccgcgccaggccccctcggttcctttttcctcgcc

SEQ ID NO: 343230 - DNA, 122 bp, Homo sapiens
cagcagaagaacatacccagagacgctggccgaccattgacagcagaacgatgtggatgacgtggaatttggccaagggtggtcagaggagagcccggccgctgagcggccggactccaggg

SEQ ID NO: 343231 - DNA, 122 bp, Homo sapiens
gaggcccggaggccagaggaagcccttggcccagcgctggggttttcggaaacggagagacggacgggttccggggaagggcaacagtctctttttactcaccctggcggaggttttgatgg

SEQ ID NO: 343232 - DNA, 122 bp, Homo sapiens
gaggctcgcgctggcggcctgagcgagctcgcgccgagcccggatactgcgcctgcgccgcggcagaggctcgtctctaccgggtccgctctcctccgacaccccagcaacgccgactcctc

SEQ ID NO: 343233 - DNA, 122 bp, Homo sapiens
catcccaggcatcccttgggactcccaaaggatgcgcacacacacactcatgtacaacatcgcaggcatctcccactccagccagcccttacactctccattcaaaccagtgcccagatctc

SEQ ID NO: 343234 - DNA, 122 bp, Homo sapiens
tcgtttttgatgaactgtgttcatcaaccgccccccagggccgcacagagggtgacggcacgggcgaggagtctggctgccagggttcaaggcctggctctgtcactacactcagctccagc

SEQ ID NO: 343235 - DNA, 122 bp, Homo sapiens
ttctgcaggaaccccccggttcctgcgccgggcggtgctctgtcccgcacaccgcgctctcgggacacttctctaactttggggacacgtgggcactgcctctggcagggccttcaggctcc

SEQ ID NO: 343236 - DNA, 122 bp, Homo sapiens
ccctgattggttcaacaattactgatcaaccactactgtgcaccaggcagtgctgggtaccggaggcatttgccttggcctgttcttcttccacctgcggcacctcgaggaccacccgaggc

SEQ ID NO: 343237 - DNA, 122 bp, Homo sapiens
atcaaaggggccccagtgtttctaggcctatggctgaagctctctcctgcaggaagaatgcgggctggcctgaaaaacagatgcaaggcagaccagatgtccctgggcattcttcacattcc

SEQ ID NO: 343238 - DNA, 122 bp, Homo sapiens
gcaaccatggaggggaccacagatcagagtgggttggggccagctttgcgggccaacttccgggtccttcctcgagagccactgttgctggtggcccgggcaagactgccggcaccctcccc

SEQ ID NO: 343239 - DNA, 122 bp, Homo sapiens
ggggtcgcagcaaggccccgcctgtcccctctccggagctcttatactctgagccctgctcggtttaggcctgtctgcggaatccgcaccaaccagcaccatgcccatgatactggggtact

SEQ ID NO: 343240 - DNA, 122 bp, Homo sapiens
tcagcatcgaggtcatgtcttcccacttctctgtctgggattactggaggggcttctttgcggccacctgcggggccttcatgttccggctcctggcggtcttcaacagcgagcagggtgag

SEQ ID NO: 343241 - DNA, 122 bp, Homo sapiens
cctcgagaggggccctgaggtggtgggcccaggctgaagggcaggctggggcctgagggacgccccgggtctgagagggcagctccggccttaggcggcacccgggcctgaaggggttgttt

SEQ ID NO: 343242 - DNA, 122 bp, Homo sapiens
tgtctcaaaaaaaaaaaaaaaaaaaaaaaaaaagaggagggcattgtgtgggcaaaagtgcggaggaggaaaagtatagggtgtgtttgtggaacagtcctggtgcaattaatggctaagcc

SEQ ID NO: 343243 - DNA, 122 bp, Homo sapiens
cccatcaccgccacagacccccagcccttcagttgccctgcacctccttggtgatgcagccgtccttgttaaggtcatacaggttgaaggcccaattaagcctgtcatctacagttccccga

SEQ ID NO: 343244 - DNA, 122 bp, Homo sapiens
tggggcgaagggctcccctccacatcatggggcatccgagaaggggtgggagaataagcacggcatggaaaaaggagctgggagtcccccacgtccgcagtgagaccccacagatgtttcat

SEQ ID NO: 343245 - DNA, 122 bp, Homo sapiens
ggaaagtggattgatttgctgttgctaaatgaatggaaacagcgttagagcttctgtccacgatccatcagtctatcgagattgctgattgcctatgacttggacggttgatggttttcagg

SEQ ID NO: 343246 - DNA, 122 bp, Homo sapiens
gttaaacatgttcactcatttaatgcttacagaagtcctacgttgtagggactattaggccgtttttacagacgaggaaaataattccccagagagcttaagtgactctcacaaggtcagcc

SEQ ID NO: 343247 - DNA, 122 bp, Homo sapiens
gtagcagaccatctcatccaccgggcggtggcaatcagcggggatttagctgaggccatccgggcaggaaagcaaaaaccaaccccaccaacagaaaacaatgcatcccaaagccaggcctg

SEQ ID NO: 343248 - DNA, 122 bp, Homo sapiens
tacatacgctgtatatttcaaagaacatataaaaccatggatgtcaatatacttcccttccggtgcgctgcctgcgcagaaccgagaggttctgacgatccgcagctcccacgctccccttc

SEQ ID NO: 343249 - DNA, 122 bp, Homo sapiens
ccctgtgtcctctttgcacgttgcatgtgtcgtggtgggagctgtgaggcggtgccgtgacggggcgatgctgctgcaggagacgtgctccggggcacgactctgacgcagcttagaagagc

SEQ ID NO: 343250 - DNA, 122 bp, Homo sapiens
ctctaaggatgcaataagagaagtcctaagctctggtcatggcctcaccctcacttactacgtgtgacttttgggaagccacttaacctctttgggtttgctcctcagcagttaattagggg

SEQ ID NO: 343251 - DNA, 122 bp, Homo sapiens
gcaacgccaggagcctccgaggagaaaggaaaacgcgcgacggccccgactgcggcggcgcgaaatccgcctcagggacgcacgcacagacggagtacccctggacccgcccccggagaccc

SEQ ID NO: 343252 - DNA, 122 bp, Homo sapiens
ccggggagggggcggaggaggctgagccaggcagagtcgccagcggagactcgcgagtggcgcgcgggaggagcggccgccggcgctgggcttgccttgctgctgctgctgctgctgcctcc

SEQ ID NO: 343253 - DNA, 122 bp, Homo sapiens
ccggcagttgctgctgcccccggggttgccactgctgctggggaagatcatcgctgcgggcggcggcggcgggtgcgggcgcgggcgcgggcgcggggcagcctcgccgcgagggggagggc

SEQ ID NO: 343254 - DNA, 122 bp, Homo sapiens
gccatggcacaagatctgaactctcgtctcctgggagtgtggaaggttttctctgtctaccgagaacaagaaattaattctaatcacatggaacagtgtctgcccctaagagggagacccag

SEQ ID NO: 343255 - DNA, 122 bp, Homo sapiens
gtagacgtgatgtcaagaactctgaattagaatgccttgcctttgtccttgtcacatctccgtgacctcatctgcctagtttagtgcctacattgcaggttcatttgaaactcacctcttct

SEQ ID NO: 343256 - DNA, 122 bp, Homo sapiens
gccagaaggaggagggccatggggccaaggaagaggaatgccagcttcatgctgctcttccggagagggaaaggacagagtttaacagatctggctgccttcaatggcacagccaaccatgc

SEQ ID NO: 343257 - DNA, 122 bp, Homo sapiens
cccgccagccgctcccgcattaaaatttcatgggcgctgcagcagctacaaagacgacgccggctgcgctcgcgggaccagagggagggaggctgcggacgagtgcggggaggagtttgaga

SEQ ID NO: 343258 - DNA, 122 bp, Homo sapiens
tgagcggtggagcaaggaaagggcttggcaaagaactgtgtttacgaggactggggtcagcgagctggcagagaacttccaagggagtcaggctccacaattcctgaggattgtcacccaac

SEQ ID NO: 343259 - DNA, 122 bp, Homo sapiens
gggtgcttcctctcccacctccgataattttaggtataaaaacaatccaggtaaattagccgggtgtgatgacgggcgcctgtagccccagctactcgggaggctgaggcaggcgaatggcg

SEQ ID NO: 343260 - DNA, 122 bp, Homo sapiens
ggccattgtggcgtgagggtggccaggtgtttgtgaaagaggggcccccagagagcagcacgggagcgatttatacacacgaatattaacatggagaagtccgagaaacccccgtaaatatg

SEQ ID NO: 343261 - DNA, 122 bp, Homo sapiens
ggctgctagctgatttggggatcccatcatcttcgaatttttatgcagagcccatggaagcgcctggtcagagaagcgggaggaaaccgaacctaagaaaggggcttggagtcagcagtgaa

SEQ ID NO: 343262 - DNA, 122 bp, Homo sapiens
ctgaaaaactaagctgaagtactaagtacattcagctttcactaagctgaaacagcaaagcgctgaaacagcaaaccgcaggcataacagaaaaacctcaacttaaatagtgctgagctgca

SEQ ID NO: 343263 - DNA, 122 bp, Homo sapiens
caacagatcggccaccaattttgctccctctggactccgaagccccacccataatgggggcggggtgagcgggagggctgttaacttccaagagacctggactaatttccccgccatatccc

SEQ ID NO: 343264 - DNA, 122 bp, Homo sapiens
gtccgcatagcaaagcaaaagcaagtttattaagtactttactccgtagacagagtagggcgttcccgaaggtaagaggacgaacgcgtccatcctaggtacaatgctcgtacctagatcat

SEQ ID NO: 343265 - DNA, 122 bp, Homo sapiens
ctgacctggtgaagttattaatattaacagctccaactaataaaagagtcaagcataggccgggcatggtggctcatacctgtaatcccagcacttttgggaggctgaggcgggcagataac

SEQ ID NO: 343266 - DNA, 122 bp, Homo sapiens
accttgtgatccacccgcctcagcctcccaaagtgctgggattacaggcgtgagccggtgcgcttgtttaagaaacagtggaaggccaaagtaatgagtagagaaaatgagacagccaagat

SEQ ID NO: 343267 - DNA, 122 bp, Homo sapiens
agtactgcaacagttaatttactctgtctcatgggaacaagtcaataggttgatcgtagtcgctgagtctaacatgctcccagcttgagctgcacccactctgtaaacagcccctaatggta

SEQ ID NO: 343268 - DNA, 122 bp, Homo sapiens
cggcggcgaccgggaggagcctgcgggcactccggaactggaaggagcttgttgctgtcacgatttgcattttcactgcactgctgtccttaaaaaggaattaccccggtgcccttcagagt

SEQ ID NO: 343269 - DNA, 122 bp, Homo sapiens
acctgtgcacggtcagacatgagccagaaaggccttatgatagttctttgctcagatgggcgactgtttgcttttaatcattttaatataagaaagactgcagaaaatattccaattcaaat

SEQ ID NO: 343270 - DNA, 122 bp, Homo sapiens
ctcgcgtgtggccggctgcccatcgggccggcgccagaattcctgggttgggggtggcaacgtgggcgggggcagtgggctttgtgggctgctcctacagttaccaccccccaaatcctgcc

SEQ ID NO: 343271 - DNA, 122 bp, Homo sapiens
attttacaattcccaccagccacatataagagttccacttgtttcacatgctttccagcacgtggggttgtcagtctctaatgttcacccttctggccaggcactgtggcttgcgcttgtaa

SEQ ID NO: 343272 - DNA, 122 bp, Homo sapiens
ctgcagtactaccctttcccacccctgtcaccttgaagcgggccaggtagtcgccgataacgctctgttgccagatctcctcagctcttttgggggactcgggcagcttgccccgttcctcg

SEQ ID NO: 343273 - DNA, 122 bp, Homo sapiens
accatattaaaaaccggagatgtcggcattttcctccccccacccctacccagaccacaacgatagcaacctcaccaacaaaggcaagttttcaagagaacaaagggtctttgcatttgagg

SEQ ID NO: 343274 - DNA, 122 bp, Homo sapiens
cccgagcaccgctcagccggggggcttccccgacctcgggggagggctctgcggagcatgcgcggcggccgtcaggccccgccccccccgggcgccggagccgaggcggcgggaacctcaaa

SEQ ID NO: 343275 - DNA, 122 bp, Homo sapiens
cctctccggccttttaaactgtctgtgcgaaccactgcaaaggaagagccctgttagcgccgcttttccgagcccaggcccagctgctgcctcggtccctccccggggaaggccgcagccgc

SEQ ID NO: 343276 - DNA, 122 bp, Homo sapiens
ttatcatacttttgagtctggatgaattttgtcttagggcggagagctcatcagttctaccggtcttggagaacaagattttctaaagggaaaggaagattcttgaacatattgtgaaagag

SEQ ID NO: 343277 - DNA, 122 bp, Homo sapiens
cagcttggggcatggtctccaaccgggacaccctcatcaggaattgcgatgctgaggtaccggtgggacaggaggaggtctgctaggtcacatggaagaaagaccatggcatgggcctgtgg

SEQ ID NO: 343278 - DNA, 122 bp, Homo sapiens
accgcagaactgagctgacgacccggaagtgctcgcggaacctggaagtgacaccccgcccgagggacgggaggccccgcccagccctgctctcgcccgccactcaagccttgtcagggaag

SEQ ID NO: 343279 - DNA, 122 bp, Homo sapiens
taggccccaggcaaaatgggcgcaccccctgcgggggcccgaggtgacctgctcgaggtccggtcgcccaggttccacctggagaagaaaatcttcgtaatttggctgggggaggggggatg

SEQ ID NO: 343280 - DNA, 122 bp, Homo sapiens
aacttggtctatgtagaaacccacatctacatcactttactcgtcttcctcttactgggccgcatctccattttcttctcctggctacatcttaccagtcaaagattcatctgagctattac

SEQ ID NO: 343281 - DNA, 122 bp, Homo sapiens
gagacgacgccaggaaacgctatcctggtattttttcggaccgtctcatcgcccccttcccgacctccagaaccccaatccccagctaggggggagatgaatgggaccctgtctttttttcc

SEQ ID NO: 343282 - DNA, 122 bp, Homo sapiens
gtggcagcataattcattcatctccaaatgtttaaaacttctgaaaggactatgcatatgcgtatgcttgttatctatgagattatgaaatatcaacattggaagaaattgtttcaccttca

SEQ ID NO: 343283 - DNA, 122 bp, Homo sapiens
ctaaggactctaggaggtccagagtccgcgagtgtctcggtgggaacagccagccagccacgcaacaggcacataactctttcagggctggggcatgtgcggatgctttaagtcagcagctg

SEQ ID NO: 343284 - DNA, 122 bp, Homo sapiens
atttgcagtcaaagaccctgccactgctctgccattaggagagaaatcccgacaaggaatcgtgatggtaaattaaacaacatagtccccagaatgcgattaatgcatgtcataaaaccagg

SEQ ID NO: 343285 - DNA, 122 bp, Homo sapiens
acacagctgtgagggggcagctggggttctcctcactctcctagttctctccatctacatcgttggttcagtggcctgcagggttcagcaggtaaagtcctcaaacatgcctcaggctggat

SEQ ID NO: 343286 - DNA, 122 bp, Homo sapiens
ggctgaagtgatcctcctgcctcagccttccaaagatctgggattacaggcatgagccaccgcaacatttgtaatcttaagaagagcggtttcagtgtaattggggtgataaacctaaatgg

SEQ ID NO: 343287 - DNA, 122 bp, Homo sapiens
tcaacggcagaagcttcaccacaaaagcgaaatgggcacaccacaggtaagactttaatccggtttcttctcccctctgggaagtttcgggctgaaattacattcacagctctcactcacat

SEQ ID NO: 343288 - DNA, 122 bp, Homo sapiens
tgcccttcctggggctgaaaagtgactcttcacctccttgggtccagccagctctggaatcgtgggctcaggacaaagagcagaggcacacacacacacacacgcacgcacgcacgcacgca

SEQ ID NO: 343289 - DNA, 122 bp, Homo sapiens
cgacacccggcgctccattaaatagccgtagacggaacttcgcctttctctcggccttagcgccatttttttgggtgagtgttttttggttcctgcgttgggattccgtgtacaatccatag

SEQ ID NO: 343290 - DNA, 122 bp, Homo sapiens
tgcgattttgttttgttattcctaagcactgcctcacctgctctagcgtgggagctgagtcgtcaaggggaaagacaatgaaattgctctaagttatcatctctccaggcattgttctgtaa

SEQ ID NO: 343291 - DNA, 122 bp, Homo sapiens
gtagggatttcaccctctgtcatttctcccgttccaccaggacaaatgtaccagctgaagcgtttaggcagctccatgctaactcaaagtctctagatcagccacatttgtaaagctccctc

SEQ ID NO: 343292 - DNA, 122 bp, Homo sapiens
cgcggagcccgctcaaggctaaagcggccgcacctgctgcctcggaaaggggtaccggagcggttgtcaagacacaatgaccccgacgccagactcaagcggggaaaagcgggcctagagct

SEQ ID NO: 343293 - DNA, 122 bp, Homo sapiens
ctaaattaaagacagtaagtacattatgagtatacgcacctactcactaaattacacacacgtatgcatgctaaagaccatttcaaaacagaatatgcaaagacctcatttccctaggctat

SEQ ID NO: 343294 - DNA, 122 bp, Homo sapiens
gcctcacgaggggcatctttctagaggatcgcggagctcctcctccttcctgaggcttcacgggcatctttctagaggatcgctgagctcctcctccttcctgaggcctcacgggcatcttt

SEQ ID NO: 343295 - DNA, 122 bp, Homo sapiens
gcagggtgagaacaggctgtggaagcagattattaaagaggctacagttaactttaagaacgttaagagagtgctaccaaacagggtaattgggaaaaataattgatgcaatagtttaattt

SEQ ID NO: 343296 - DNA, 122 bp, Homo sapiens
tgtggtcacatctagagggagatggggaatgggctgaggaggacccacagatggacacgacggcctagtcacggtctggtccttcagggacatagtgaggctcaggttttcattctgtcatc

SEQ ID NO: 343297 - DNA, 122 bp, Homo sapiens
tttccctctccctcccctggagcacttttaccatccgggcttactgcctgtagaagaggacgaggtcaaagatgcctcaggatacagaagacagaaagataccctgaaaccccaggaaaagt

SEQ ID NO: 343298 - DNA, 122 bp, Homo sapiens
agagagagaggaaggcagagaagtatttggagaaatatgaaataaaaatgagaaagcatacgaaaagatgctcaatgtcatatgacattagggaattgcaaatcaaagcaacagtgaggtgc

SEQ ID NO: 343299 - DNA, 122 bp, Homo sapiens
tctttcccgagctcttctcatatcaaaccttattttagtgttcttttacaaagagggtggcgtgacatcgaagtgagtggggtggggtgaaatgcgttgagtgtagctggattaagtgtggt

SEQ ID NO: 343300 - DNA, 122 bp, Homo sapiens
ataaataagcggctagctttctctttctcctgaagtgaatctagctctgaaggcatggcgcgtacgaagcagactgctcgcaagtccaccggcggcaaggctccgcgcaagcagctggccac

SEQ ID NO: 343301 - DNA, 122 bp, Homo sapiens
gacggaagcgttcacactcaagtgtttatggttgcgtgtcttcttgcacagggatgtctgcgtttccaataccggcttctggacaggactcactccgagaaataaatgtgtaatggatattt

SEQ ID NO: 343302 - DNA, 122 bp, Homo sapiens
cagctgcctagaatatatgggtggaagggaatcgactctgtgaaatcagagggaaaatagcgcttgtccttgccatgagtcttgaggagaccgaaaacgcttaaccttttacgcccccgcag

SEQ ID NO: 343303 - DNA, 122 bp, Homo sapiens
cacttggctgccgaggtggagggcaagtgcttacagtcaggcttcgagatgcttaaggttcgacctttgcccctgcatagcccctcaggctgagtgcagcgtagctttgcgtagcctgggat

SEQ ID NO: 343304 - DNA, 122 bp, Homo sapiens
gtaaaaacacgagccttggttaccaggatgcaggcactgggggaatgatgtgcccagaaccgggcccagtagcatgggccctggtctgatccatctgtgcccccagtgccctgcaccgggct

SEQ ID NO: 343305 - DNA, 122 bp, Homo sapiens
ccgctgataacgcatgtgcgaaagagacgcggggcccagtcagctttctccgcactcagacgcacgccctaactgtcgggcgctcccacttgacacggacacacgcccctgccggccgccca

SEQ ID NO: 343306 - DNA, 122 bp, Homo sapiens
aagtatgacaaagtctccaagggcacaacctcagcactgtgattacggaaggccatgagtcggtttcttggaaaaccatctggaatgaacacccataggagcatcagcgaaaacgacagggc

SEQ ID NO: 343307 - DNA, 122 bp, Homo sapiens
tgctgaactgtgctctgagaccagcacccacctgatctctgggagcagagcccctgccggcgtgggccaacctgacagcagctgcctgggcactgggcactccctcgtctgtcaggcgggca

SEQ ID NO: 343308 - DNA, 122 bp, Homo sapiens
tggtcctcctgttccccatcatttctttgccttccttatcttgatgtttcagagccaacccgacagcgacatctttgcaccctcagcagagggtgggagctgtaggcagttggtagggctga

SEQ ID NO: 343309 - DNA, 122 bp, Homo sapiens
ttcgtgtgtcccgagtgcggcaaggccttcagcgtcaagcacaacctcgaggtgcaccagcgcacgcacaccggggagcggcccttcccctgccccgagtgcggccgctgcttcagcctcaa

SEQ ID NO: 343310 - DNA, 122 bp, Homo sapiens
tgcatgctctctgagcaccaggaggaagtgactgaactggaacaagctctgtgtaagctccgggtggattctgtcctactcagacgcaatgtacagaccttctctgccctggcaatggtgag

SEQ ID NO: 343311 - DNA, 122 bp, Homo sapiens
gccgtgtacgacccggcgcatgctcccggcacgctccacgcgctcctcccatccaggccgcgcctgcgctgtatgccgtgtggccgctacctcgcaggctctcccggtccctgctggcgcgg

SEQ ID NO: 343312 - DNA, 122 bp, Homo sapiens
cgccctgatagcaccgcagaggttctgatctaattgatctgggatgcggcctgggtatcgcgatttttttaaaactcctcaggttattcccagcttgaaaactatggatataaatttctcat

SEQ ID NO: 343313 - DNA, 122 bp, Homo sapiens
aaggggctccgcggtggggccgcgactcccggcccccgccccaaccgtgggagctctgcgcgcgacgcgtcccaggtggccccgctattgttttaccttgcagggtgtttatatctcgctga

SEQ ID NO: 343314 - DNA, 122 bp, Homo sapiens
aaattgggggaggggaagtgagtggcaagtaagggggttaactgcttcccggaccctatccggagtttaaactacacgctcccagctgtgggatagtaaagagaacgcagcggtgaggggat

SEQ ID NO: 343315 - DNA, 122 bp, Homo sapiens
ctttacttgacccttgaggctgcgagtcttctggggcagggggattagtctctaagctctcgcatcaaagacagcctgagaaggctctgagggatctgttctcccagggtctgcccttccca

SEQ ID NO: 343316 - DNA, 122 bp, Homo sapiens
tcgcgccgcgagcagaggggcgcgggtgggcgcgcaggagttagcgaactgacacggaggcgccaggcggacgcacggacgcaccgagggccgcagggccgcacagccgggcacacatcgtc

SEQ ID NO: 343317 - DNA, 122 bp, Homo sapiens
gaacaaaaccctacgaaagaatggcaacagccagggtggccgggccctgccagtgggcggcgtgtgctagcaaggcctgccgggtgtgccgcagtcaccacagggttctgagaacatttcac

SEQ ID NO: 343318 - DNA, 122 bp, Homo sapiens
catctctagaggccttgacttcccttatcaccctgcattataatatttgataacatgggccgggagtggtggctcatgcctgcaaccccagcactttgggaagccgaggccggcggatcacc

SEQ ID NO: 343319 - DNA, 122 bp, Homo sapiens
gaggcagcaactccagcagcttttaacgccatctccttacaggtggacctcgagtcccagcgccggaggaagcggcggcctccgcacatcattcgcaacgtctcacacaaatgaagaaaatc

SEQ ID NO: 343320 - DNA, 122 bp, Homo sapiens
atggtgggagggaaccagaggcctaaagcccaaactcactatgattcaacttggaatactcggaacactcatccttcactaatgagcgaggatgtgctccttcttgtgatcatttccccttg

SEQ ID NO: 343321 - DNA, 122 bp, Homo sapiens
tgcactccagcctgggtgacagagcaagacaccatctcaaaacaaaaacaaaaacaaaaacgttacgccatgtgtaattaaaagtgttggtagcatttcacaaccatctgccttttgtttgt

SEQ ID NO: 343322 - DNA, 122 bp, Homo sapiens
gttgagattttctatcgtaagcacacctcacccaaacgcttgctccctgaaagctgctgacggagctttggcgagggctcatcctcccgttggctgataagcgaagccctgttttatattta

SEQ ID NO: 343323 - DNA, 122 bp, Homo sapiens
tcccaaggccccggcttggcgggcactggcccgggctattttatcagtgtgacaattgcccgggttggtgtgataaatcatcgtaagtaattcctgaaagggtgcgagactgttgggggccg

SEQ ID NO: 343324 - DNA, 122 bp, Homo sapiens
gaaacctatactaagaaaggtgaagtgatttgctcgagggcacacagcaagtaagagaagcggtatggattaaaacctagagctgtacactgggtgcagtggcccacgcctgtaatcccagc

SEQ ID NO: 343325 - DNA, 122 bp, Homo sapiens
ccctctggtggccatatgaggaataggccacagtgacaccagggcggacgctgagagacccggtggggccatggcagtgtccaggcaaggggacggaggcttgggccagggaggtgatggtg

SEQ ID NO: 343326 - DNA, 122 bp, Homo sapiens
gcaggactccgggaggaggcggcttcagaaaggcaaggatgctcgcaggactgcgtgtcacggggggtcacgcaccacacggctggaccgagcccggggcctcagtgaccgaggcggcggct

SEQ ID NO: 343327 - DNA, 122 bp, Homo sapiens
atgtttaaataattatttgtagttgcatttgcacgaacaacatatttgttatgattgattcgttgctgttaacctttaatgtgagttacagttctacacatagggggaatagaatggcccac

SEQ ID NO: 343328 - DNA, 122 bp, Homo sapiens
agggttttctttctgttatatcccccaaacctccgcttccccccgacaggaagtctacagcgccttccccagggttttgtaagtctctgggcgcccaggcttaggctgtaatgaagaagcct

SEQ ID NO: 343329 - DNA, 122 bp, Homo sapiens
aagagccggcgtgctcccggctcggctcagctcgcccccttccgtggagtgctgcgcccccgtttccccaggctgcccctcccagcaggagccaattcgccaatcacagccctccttttcct

SEQ ID NO: 343330 - DNA, 122 bp, Homo sapiens
tcttcctcatgaggtcagcatttggggcccctgggcttctgcattgggtggcgtcctctgcgttgggtggcgtcctctgcgttgggtggtgtcctctggtggggccaagccacaaccagaag

SEQ ID NO: 343331 - DNA, 122 bp, Homo sapiens
gcggggaggagtttgccaaactcccggctgagccctccccccgcctgccgagggggctggcgggggggcattcctgggtccctggaactctgagcccgcgtcccccacccctaaggggcgtg

SEQ ID NO: 343332 - DNA, 122 bp, Homo sapiens
tccgccttccttcccactcccaccgcaggccccactacggaccggaagtcacagagtttccgccttcatgcaactaagcgccgccatattgtcgtacggaacacaggcttcctgtggccgga

SEQ ID NO: 343333 - DNA, 122 bp, Homo sapiens
ggactttccactggaggctcttagacttagacgcagcgtcctctcctggagggagcgcagcgccccccgggcgcaagggggacgcgttcaagcgagggcggacgccgactgcgagtctcttt

SEQ ID NO: 343334 - DNA, 122 bp, Homo sapiens
ggagaataggggcagatgaggaatggggctggcttcagggagaactctgcttctgttccacgcctggaagatgtgtgggtgtgaaaagaaagtaactgaggtagaaggaagagcttgtgcaa

SEQ ID NO: 343335 - DNA, 122 bp, Homo sapiens
cgcgggggcttttgtttgtttactcgcctcggggggcttcaacttggctgagtttccccacgacccgcacctcccccgcccccgggcgccgggcgagcgtttgcctcgcgctccgccgtggc

SEQ ID NO: 343336 - DNA, 122 bp, Homo sapiens
accaacacaccaccttatgcagatgcagacacacaaatggggacacacacaccatttactcgtttcctagtttctaaagttggaccagtggagctagatataagttccttttctttttgata

SEQ ID NO: 343337 - DNA, 122 bp, Homo sapiens
gtcaacttcaagccaaatgggaagacaaaaaaataagaagagccagtgagccccccaaaacgactccttcatgatccaggggtacagtcaaccaatcagccaatcaatgagaccaccttgag

SEQ ID NO: 343338 - DNA, 122 bp, Homo sapiens
ctaatttattcgtttcatcggtcgaaaggggcgtatagaggtgggtcagcggggcacaaccggatccctctaaccggacctcacctcacaagtttgtcctggaccaacccgcccgcccacca

SEQ ID NO: 343339 - DNA, 122 bp, Homo sapiens
gcgcgctgtgcgagctcgagtctggcatccccgcagccgagagccaggtacgccgggcagcgagccgggcctgccccggagctaagccctccccgcctcggggcctcactccctccctttgc

SEQ ID NO: 343340 - DNA, 122 bp, Homo sapiens
cggttaaaactggggtcggttgggactgcaggtcccaagaggttcttctcttaaagggaccgcaggatgaaagaacgggcgctcggctccctttggaactgtcttttcttttgccctcccct

SEQ ID NO: 343341 - DNA, 122 bp, Homo sapiens
ctgctcgctcgggttaaatcggctgccagaggccaagttaaaggctttccccacaccgcgcgtcacctccctctgcccaggcagaggtaacaagtaagagtgcgccagtctctccccatccg

SEQ ID NO: 343342 - DNA, 122 bp, Homo sapiens
accctatcttccatgagtgattattacgcattgcatgcctctatcaaaacagctcatgtacgccagaaatatatgaatctattatgtgcccacaaaaattaaaaacagaaaaattaaaaaaa

SEQ ID NO: 343343 - DNA, 122 bp, Homo sapiens
agccgcacctggacagcaagatgctggctgcctggaatggtggggcagcacacctgagaccgagcctgtctgtaggatcccccttcacaaagcccctgtctttccggcagcggctaaatgct

SEQ ID NO: 343344 - DNA, 122 bp, Homo sapiens
cactgccccctcctatgagcaagatccccgcagaccgctacagggtggagggcagcttcgcgcagcccccgctgaatgccccgaagagggagtggtccaggaaggcctttggaatgcaaagc

SEQ ID NO: 343345 - DNA, 122 bp, Homo sapiens
cccggggcgcgttgttgaggcgcttcttgtctggagcgaggagtgagacgcggctcggtccgatgccccggttcactccgccctcgctgtcacctctccgtagtcctctccccgaggccgtt

SEQ ID NO: 343346 - DNA, 122 bp, Homo sapiens
atattttaagttagaaatgcagtgttggaaatttcctaatttcatcgtctatttgagagtcgtaccaaactttgtgatttttaggaagaataatttttaagagtggaagggcattcctcccc

SEQ ID NO: 343347 - DNA, 122 bp, Homo sapiens
agtggcattctaggcacccactcaatggttttgaactttttcaagatgacaactcccttacggtattttcaaaactttcagtatccccttagagtggtagttgtattttagtatctgatgca

SEQ ID NO: 343348 - DNA, 122 bp, Homo sapiens
gcgcgggcggcgaggtgagctgggccagcgcagcaggcgggggcggtggtgggttcgggacggctcaccccgcgccggagcgagtgcggggccgcgcgactgcggcgggagatgcgctgcgc

SEQ ID NO: 343349 - DNA, 122 bp, Homo sapiens
tgtgttgagaggtggggacgggggagggatgtgtcagactctgagcgtggaccagaactgcgctcggagactttcagtgaaagcagaggagagatttccaaaggttgtattttccttctggt

SEQ ID NO: 343350 - DNA, 122 bp, Homo sapiens
gctcctactggatggaatgggaaatagaaggctttggtggtaaggggcggtgtgggctggcgcatgctgagaatgtgccaagcggcctttccacaccccaaatgcccacccccaacatccat

SEQ ID NO: 343351 - DNA, 122 bp, Homo sapiens
gtgagccagctctcaccttccaggcaaagtcaggaatatcctccagggaactgaaggtcacgcagctctggttccaactgttgccctgaggccaggagcagtaggtgaggatgccaaaggag

SEQ ID NO: 343352 - DNA, 122 bp, Homo sapiens
ttagccgcagcctgcctctctcccagcctgccttacaagcactgtgagttgctggctggccgaggccctggcagatcagacctcctgcagccccagggatggcacgggcaccgccactcacg

SEQ ID NO: 343353 - DNA, 122 bp, Homo sapiens
ggccgcccgctgcaatcctttggggtctgtggctgagtggggaaccgccgacccgcgatccggaacgcgactttgaggccgccgggagcatcctgtggcctctctctgcgcggccacccggc

SEQ ID NO: 343354 - DNA, 122 bp, Homo sapiens
agccaccagcccagaggtgacaatggggctgctgtgtgctatgggcccttgggtagggcacgggctcaggcaaatgagccagagcacacgcagatatagaggcatgtgcactggctgcgctc

SEQ ID NO: 343355 - DNA, 122 bp, Homo sapiens
ttctggatttatttcccacatgacatcccttcttattgcaatatctaacagtaataataccgggtatttgatctcagaagactcttaaacgcatcttttatgttgaaatggtctgtttggga

SEQ ID NO: 343356 - DNA, 122 bp, Homo sapiens
tgcatccgggtggccggcgtgtccctctagaaacgaacaggcccctcccgtcctccatggcgatgtggcccaggcacaccctcatcagcactgcaggccccggcatctgagcagccatccct

SEQ ID NO: 343357 - DNA, 122 bp, Homo sapiens
gagcacaacaggtttctctctatttccggtgtattgtatcctcacgtttccggagattgacgttgctcttgtgttctcgcgagaggcgggaaagggcgcagggtttgaaacatggcggacga

SEQ ID NO: 343358 - DNA, 122 bp, Homo sapiens
gttagggaagaacagggacttggaacagccacgtctatctccaaaggagaataaatccaccggggaagctcttcaaacgcctacaggtcctggggcttgaaggagaaaatcggcccccacgc

SEQ ID NO: 343359 - DNA, 122 bp, Homo sapiens
ttgccaccaaaccttcttcctcaatgctaaccttaaaaatagcatatgacttgttcacaacgtgcaggtttgtaccctagaacttaaagtataataaaaataaataaataataaaacactaa

SEQ ID NO: 343360 - DNA, 122 bp, Homo sapiens
gcggggggcccggggccgggcggggaccgggccagggagcgcgccggccgcccctcagggcgcaagctttgtgccctgtactcagggaagaggaacaggctcagaagggcagaggcaggtat

SEQ ID NO: 343361 - DNA, 122 bp, Homo sapiens
cccgatggaccagcttcctgcatggcaccgccctccggccccaccccgagccctgagccccgccttgagccctgggcgctcctggccctggcctggcactcaagggctgctttcagggctgt

SEQ ID NO: 343362 - DNA, 122 bp, Homo sapiens
gagtagagttagctagctatgtttgtaaacaatattccgatatgcttcgttaaagtaagccgatattaaacatttatataaatccatcctcacagggtcaatctggagataaactcaccgct

SEQ ID NO: 343363 - DNA, 122 bp, Homo sapiens
tgaagagaagacacagcaggaaggcccacgtcagatgtggccccttgatctcggacttcccggcctccagggccacgagcccaccagctcattgttggtcacccagtctggtgcttgccatg

SEQ ID NO: 343364 - DNA, 122 bp, Homo sapiens
atcccatccccgccccgccccagcttttacctgcatagaattcaggcccgtagactgcgccgaccactggatttagcttccagcctaaaacaaaggcacagagacctagtcactgccttccc

SEQ ID NO: 343365 - DNA, 122 bp, Homo sapiens
cattttttttttgtatctcttgccaagttgccctttgtcctaggcctctgggctcccagccggctggaggcacagagttatctgtggggcctggagtgctgggcctgggctgtgtaatgacc

SEQ ID NO: 343366 - DNA, 122 bp, Homo sapiens
cagcaggtccatcagaagtgatatggagcttaaatgggaactggaagaggcaagacctgccgtgggttacttggcgagagagacaacctggcaggtgcaagaattttgaaggggataatgcc

SEQ ID NO: 343367 - DNA, 122 bp, Homo sapiens
gactgagggtttggaaatgctgctaaagtctagttacagtgttgctcttgaggagtctggcgctatagggagtctgagaattccttatttgaaaaacagccaatggaaccgcacagacacac

SEQ ID NO: 343368 - DNA, 122 bp, Homo sapiens
ggcgggtggatcacttgaggtcaggagttggagaccagcctgggcaagatggtgaaaccccgtctctactcaaaatacaaaaattagcagggccttgtggcgcacgcctgtaatcccagcta

SEQ ID NO: 343369 - DNA, 122 bp, Homo sapiens
tgcctcttcgcggcggccaggtgtgtgtatagactataggctggggaggcgcaggatctacgctgccggcaacttcatcttcctgcagctgcttcccagatctcctgcctcccagatggccc

SEQ ID NO: 343370 - DNA, 122 bp, Homo sapiens
cgacttccccggctggcgcgcctcggcgtcactcacgcctgtcggggagatggggaaaggcgggcgttaatattcctggcctcacacggggctcccccaagggcagctgcggggaaatggag

SEQ ID NO: 343371 - DNA, 122 bp, Homo sapiens
ggggcggcgtgtgttgggggatagcctcggtgtcagccatctttcaattgtgttcgcagccgccgccgcgccgccgtcgctctccaacgccagcgccgcctctcgctcgccgagctccagcc

SEQ ID NO: 343372 - DNA, 122 bp, Homo sapiens
gcagcttggttgccaggcaatgcagaggcccaacacaggggatggttgtgggtactgacgcgccaggtcctggagcatctatcccaagcactgcctttcctgttccctttgtggtgctggtg

SEQ ID NO: 343373 - DNA, 122 bp, Homo sapiens
taggagaaaagtctaaaataaaattgtcctttgaaggcatctttgattgccttctccaggcgtggacagagccaacgcctcctcccagcggcctgccccggccacctggcccctcttccacc

SEQ ID NO: 343374 - DNA, 122 bp, Homo sapiens
agggggccttgcaggaggggcagcgagggatccaaaacaatccctcagcgctaaggcggacgaccagaggggatcccaggacccaggaccgtgggccctgggccctgacgcctcggagcaca

SEQ ID NO: 343375 - DNA, 122 bp, Homo sapiens
gccccttccctgtccctgggaagctccagccagctacaagccagctgctgtccagaggcacggcactgccacatggtggacactggtggtactgaggtccagccttccaattaggaaccctg

SEQ ID NO: 343376 - DNA, 122 bp, Homo sapiens
cactggccgaaagtggatacatttccatgcgctagcctcagaggagagtgggagagctagcgtggatgtcgtcaggctttttcgcaggaagccagctcagccagcagggaaaaggacattag

SEQ ID NO: 343377 - DNA, 122 bp, Homo sapiens
tctggactccttttcctcaactacaaaatagggtataaaacagtatctacttagacctggcgctgtggctcacgcctgtaatcccaacactttgggaggccaaagtgagcagattgcttgag

SEQ ID NO: 343378 - DNA, 122 bp, Homo sapiens
cggctggtcgcaggccgcctgccaatcagggccgggggaagggaggaggctggggactagcgccgcgagtgccacctggagggaccccggcccccacccttggctccgcccggcccacggac

SEQ ID NO: 343379 - DNA, 122 bp, Homo sapiens
actaggtggcttagctcctcagcctaactactgcagaaaccaggagtgcgtcctccttttcggattcttgacgtcaagctccgacagccttggagcgtcgcaagggcggtagagagctgagg

SEQ ID NO: 343380 - DNA, 122 bp, Homo sapiens
agacgactggcttgcatctgggggtcaggaaggacagttccatctccctctgagggaagacggggttgaggggtaatcctcccccagaaaatgcagagcctggaactgtccagactctggcc

SEQ ID NO: 343381 - DNA, 122 bp, Homo sapiens
gctgtttgcagcacagtggtgaaatcagcaggcccctctccaccccagctcaccttccagcgaaacaaaaaggtgagcacagagcaatgctggagcccaactgggagaggggccagcagtcc

SEQ ID NO: 343382 - DNA, 122 bp, Homo sapiens
ttgtgcaatttaggaacaaagaaaatctatcagagacaatgaagtttctctcacaattttcgatacatgtgatgtgtgctatggcttttggtccttggagcacgtggaccctcttatcagaa

SEQ ID NO: 343383 - DNA, 122 bp, Homo sapiens
agtctcctcccttcccgattccttcaggtcagtgtgagcctcttgttcttctcgggctcccgatgggttgactgatgcttctttcatcctatcagatgctccactgagtggatccccccttg

SEQ ID NO: 343384 - DNA, 122 bp, Homo sapiens
aagggcgaccaaagtggcgctgcctgccagcactgggctctgctggcactgaacctgcatcgcgccgtgttcctcgccggtggccgctgccctcccagaagagagcgcggcccccgcaaccc

SEQ ID NO: 343385 - DNA, 122 bp, Homo sapiens
ccatggttacgcctcccccccaccaccaccacacacccatcatgtcagctcaagagagcacgggctttgcctgtcatttccccagcgttcagatccgtgcctggcatacagtcggtgctcaa

SEQ ID NO: 343386 - DNA, 122 bp, Homo sapiens
cattctcgtggccatacatcttgctcatggtgttggcaagcagcccctccttctcaggggcgtcatccccgctgccgtcgtggctgtggcggtacatgtaggatgcctgcttcatggagcgc

SEQ ID NO: 343387 - DNA, 122 bp, Homo sapiens
caggtgggtggagcctgtctgcagcattagcagcccggtcaggttggtggagcccgtgtccgagacattagcacccctgtcaggtaggtggagcctgtgtccgaggcattagatcccccctc

SEQ ID NO: 343388 - DNA, 122 bp, Homo sapiens
gcgtggggaggtttggggcgcgcccggcctatgacggcgtccttgcggaagtacgggtgccgagagaagcagtagtcaataaagagagtgccgtatttcgcagattggagctgagctgtggc

SEQ ID NO: 343389 - DNA, 122 bp, Homo sapiens
gggacgacatgagggaggccgccaccaaaggcggtggggtacgggggtgatgagcgagcccggagaggggcgggcggctccgggagccccgcagcaggccccggcacctccggccgtagtcg

SEQ ID NO: 343390 - DNA, 122 bp, Homo sapiens
gaagtaagacctaaagaggaactttccgcatgttatgggagagcccctggggcgaggaggcgagggcagccttccccaggccaagggagcagccatcgctcttggatctgtttttcctcaag

SEQ ID NO: 343391 - DNA, 122 bp, Homo sapiens
tgatagtgtccatttcccacatctgccaggagtgtggctctttgtgggctgagtcacctgcggggaagggtttcaggttagaatgttcatagggtgtcacccaaatcactgtttttaagccc

SEQ ID NO: 343392 - DNA, 122 bp, Homo sapiens
ttgttagcggctgttgggagaacgggtcacggaaacagtcccttccaaagccggggccatcgtggggtgggcgagtccgccctcccaggccgggggcgcggaccagaggggacgtgtgcaga

SEQ ID NO: 343393 - DNA, 122 bp, Homo sapiens
ctcttccccgccacccgtttctacgcagatcggtgccccagtccctggaggagcctccgccgcctccgccaactccgcaggaccccgccgggaagtagagcccacccctttaccaatcaccg

SEQ ID NO: 343394 - DNA, 122 bp, Homo sapiens
tcagcctggaggagtcttggatgcctttacagggaagatgatgagtgaactgagacttgccgaatgagtgtagtaatgtttttgctaggtatagtgtaagtagagggagggcattccaagca

SEQ ID NO: 343395 - DNA, 122 bp, Homo sapiens
tccctccttggtggtacggagacaggattgtggggccgcctgcttcctcctcactggacccgccctcttgcctaagcaggaccccgaggggtgcggtgggggctggatccccgtccttcttg

SEQ ID NO: 343396 - DNA, 122 bp, Homo sapiens
aaatgtttaattgtaaagcatgagtctgacctaaaaacaagtgtgcccgcagaagtgaggcggcacgcccgttactcctcacgcaggaagcgcagcaatgaaacaaaacgccgtgcgtttaa

SEQ ID NO: 343397 - DNA, 122 bp, Homo sapiens
actctcacacggaagcaggaaccagacatcatcagagagccacacgctgccacacactctcgcacggaagtgggaactacactcatcagagaaccacatgcgctcacatggaagtggggacc

SEQ ID NO: 343398 - DNA, 122 bp, Homo sapiens
ccagtaaagtctttttttttttttgagagggagtctctctctgtcgcccaggctggagtgcggtggagcaatcttggctcactgcagcctcagcctctagagttcaagcgattctcctgctt

SEQ ID NO: 343399 - DNA, 122 bp, Homo sapiens
ggcggcttcagcggcgggggcgggaggctggtcctggctgcagactgcgcgcctgggctccgtgcgcggtccctggttctctgcatcgcggaggtccccggatcacagggctccctggcggg

SEQ ID NO: 343400 - DNA, 122 bp, Homo sapiens
tctaacaaccttcttactaaatgcaagaaatttctgtcacttcctggtaagtagatattccggcttcttcatgaataactctgataacatggagtccactatttcactagacaggtcatgtc

SEQ ID NO: 343401 - DNA, 122 bp, Homo sapiens
tgcttgcactgaaacgaaatccatggaaaagtgttctgagttttgcatttacaaaaaaaccgggacttcagcagaactgagtcccacctcagcatcagccagcatcaccacccgcacacctg

SEQ ID NO: 343402 - DNA, 122 bp, Homo sapiens
gggcttaatttcaagatctctggacagaaaggtcaaactcaatcagccttagctcttccacgcgctgtggagaggtagggctgggtgatttttttgctcctgggagccttggaaacccagac

SEQ ID NO: 343403 - DNA, 122 bp, Homo sapiens
gctcggaccggcacagggggacggccagacgggatgtcggaagccaagggacgcagaggccggcgggtggcggcgatggagaggacagatccggctcccagaggaggtcgtgagcgcggggc

SEQ ID NO: 343404 - DNA, 122 bp, Homo sapiens
tagagaaatgagcatgttgccttgttgcaggatgaataaacaagttttttaaaagccctccgtgtcgagcccacacctcacacccatcttgctgttttttaaacagaagcccaacataggga

SEQ ID NO: 343405 - DNA, 122 bp, Homo sapiens
gggcggggcccggcggtgagagggtgcggcgcctggctggcccgaggcggggcggggaggcgcggcggcgtggcggcgcaggtggggcgcactcgggctgccgcgagggaggggcggagggg

SEQ ID NO: 343406 - DNA, 122 bp, Homo sapiens
gcctcagcaagcctcacaggttggggaccccaccctcattattctcaagtgcatcaaccccgaaggactgaagccccgagtcccaataaacaggtcccatccatccgtaggccagtccgctg

SEQ ID NO: 343407 - DNA, 122 bp, Homo sapiens
atacaaatggacaccatatgtcctagagttctctgttaataatggctgggtcatgctcaccggcattttcttggggatgtgtgaacttgtgctgtagaatgcgatttctagaagaatctctg

SEQ ID NO: 343408 - DNA, 122 bp, Homo sapiens
accactaggggcggccgcctccttccggcaggagccagaggcgtgaaccacgcaagacgtcgtcagggaggggcaggttggagtagctctagttgaagtcaacttggtccctctcctggagc

SEQ ID NO: 343409 - DNA, 122 bp, Homo sapiens
ccacatggtcacagcctaaccaaacacagaacataactaataaactgaagcaacattccacgttatcactttcagctttgcacaacatatggaaacaggctcactgcaccacttggttgtgt

SEQ ID NO: 343410 - DNA, 122 bp, Homo sapiens
cacggaagcagaggaagagcgtgtccacacacatgccgaaaacgctgaagaagccgctggcgatgacataggcccccaggatggaggtctggaagacatgacccgttggggttattgggttc

SEQ ID NO: 343411 - DNA, 122 bp, Homo sapiens
ccaagcagccagacccttcccttcaatgctctgctccgagccgggagcttttgtgaacgtcggtggcgcgtgagtcaccagctcccatggcatctcaacatgtggcaaaaatgtacaaaacc

SEQ ID NO: 343412 - DNA, 122 bp, Homo sapiens
cagaaggcaggcgaggagagggatcaggcagccctccctccctcggtcacagtcacggggcggcctcgggccagacaggaggagatgacagacgacaaccagacggtaatatccaaggacta

SEQ ID NO: 343413 - DNA, 122 bp, Homo sapiens
agagggacaggagcctgggggatgggaatgtgtcttcccctcctggagtctgaacatcctcgttggacttctagatgaggccagaacttcctttgagtactgggccacatcttcataagctt

SEQ ID NO: 343414 - DNA, 122 bp, Homo sapiens
ccttgccagagtcttcctgccagaaaggtggaacggctcccctccggcttggggagcattcgaggggcaaggcgagggttgggacgttcggagagtctgatggtattgtctggggagggggc

SEQ ID NO: 343415 - DNA, 122 bp, Homo sapiens
agggggacgcccggccctgacatcatgggaacaagctagagcagaacaccatgaggaccccgcctctgtgagagcaaagccagctccctgggtcctctctcacctgcccgggctgccctggt

SEQ ID NO: 343416 - DNA, 122 bp, Homo sapiens
ggctccccttctttcctgctccctaaggcggtggaagaagatatccccatagcgaaagaacggacacatttcaccgtccgcctgaccgaggcgaagcccgtggacaaagtgaagctgatcaa

SEQ ID NO: 343417 - DNA, 122 bp, Homo sapiens
gttccggaggctacgtgctttctttgtcaatgaggcgccgctctgagctgcggtagcactcgcggcccgggaacccgagccggagccggggctggaacccgaagcccagcgaggagcgagga

SEQ ID NO: 343418 - DNA, 122 bp, Homo sapiens
agccacaggaaacgagagccatccatacctcaataaagatggctcacagaaaggtatccacgctggacagatgggagagaatgattcattccctgcatgggccatagttattgtggtcctgg

SEQ ID NO: 343419 - DNA, 122 bp, Homo sapiens
gtgaaatcgctgctctcagatcagcacacgggagaggccagcagtcaggagggggctcaccgagtttgtctgcactcgctccctccgcagccgccctctccagctggaagaagtcgtaatcg

SEQ ID NO: 343420 - DNA, 122 bp, Homo sapiens
acttggaagctggaggccgaaggcatagctgtcaattttcttgcgttccttctgcttcctcggggcagagatggtgaaatctacttgttaggacagttgcaaacccgattgcagtctgggct

SEQ ID NO: 343421 - DNA, 122 bp, Homo sapiens
tgggcgaggtcattcacggaaaaaagaatgtgcagtggtgccgaggttggtaagagcaggcggcttgtacatgtaaatgcatggtttgcaggaatctgggagtggataggctgacgggtgat

SEQ ID NO: 343422 - DNA, 122 bp, Homo sapiens
tgagggcgaggctccaggggcttggtggcgtctgagcgcgtgtggaggtccgggtctctgcgtgtcatcgtgcacgtgtctgtgcacgcccactcgcgtccgggagtgagagtcagcgccct

SEQ ID NO: 343423 - DNA, 122 bp, Homo sapiens
cgctggcgcccggtccagcgcgctggagttgttggcaggcggcgggggttgggacgggggcgggtgcagctctgcctggagagttttaggttacccgcgagccacacaaggaccttgtgttg

SEQ ID NO: 343424 - DNA, 122 bp, Homo sapiens
gaaaccaacctgatacttatcgtgtgccgagttccctccttgtatcctgactaagcacagcgaataaccctgtccttgttctaaccccaggtcttgaagaaatactgtcccagctgagcccc

SEQ ID NO: 343425 - DNA, 122 bp, Homo sapiens
cgctcgactagaggctgcaggaaaggcttgttaaacttgcggtggtaactcttcttctcccgtccttgaaaggtacaagttgcttaaccaagaagaaggtgagtactacaacgtacccattc

SEQ ID NO: 343426 - DNA, 122 bp, Homo sapiens
attttttttcctctagtctttgatgggttcttctaatttgaaggtccctacttctctggtcggagactgattctgcaaagaagtaactgagaaaaacagagaatgcatgtttgtagaaggtg

SEQ ID NO: 343427 - DNA, 122 bp, Homo sapiens
tagggcgccccagagagtaacacagcgacaggttctcatttgcaaccagggtgccgcacacgactgttttatggcagatgttgccatagctacctggtgtgggagaccccacaaaagtcaaa

SEQ ID NO: 343428 - DNA, 122 bp, Homo sapiens
ctgtcttcataaccccacagctcctaagaattctctcacctgccttctgcccttaggctccggtagattgcaaacgacctgctttctttgtgatcccggctgcattcggacccctgtcagac

SEQ ID NO: 343429 - DNA, 122 bp, Homo sapiens
aagccacagacgatgacagacaaaaaaatcttctgttctggctttaaaagaacagtaactcggaacaaggatctctaaggggaaaaaaaaagaacaatacaaagtactggtatgataactag

SEQ ID NO: 343430 - DNA, 122 bp, Homo sapiens
gcgaggccgttttcctcttaggaccattcattgtgttaggaccgcggaacaaggaaggaccggttggggccatgtgaataatttagtagggtctggaatcctgcagagcgaatgcctcagag

SEQ ID NO: 343431 - DNA, 122 bp, Homo sapiens
cagccttgcgtttgtatcatggtcgtgtgtacctctgcctgccctgtaggtgggaagacccgtggggtaaagaccgcgtgtttggagtgtctggcacagtgccgacgtgggagcagcacggt

SEQ ID NO: 343432 - DNA, 122 bp, Homo sapiens
acccacccactcccaactttcagggaaaacaaatacctatcggccgggcgcggtggctcacgcctgtaatcccagcactttgtggggccaaggagggcagatcacgaggtcagggatcgaga

SEQ ID NO: 343433 - DNA, 122 bp, Homo sapiens
gggttgttgttagaagttgggctccgttttcccagccagaaatcaagctcacattccagccgccagagaagagcaatgctctaaatgaggtcactgtgtttgcaagggagaaacaattatgt

SEQ ID NO: 343434 - DNA, 122 bp, Homo sapiens
gttctcccgtcagtgaggccaggcccccaggtgccactggagtcagaggagggcagctggcgtgcgccaagcagccactaggagccacttcatgccaatgctccacttcctgcacgccacag

SEQ ID NO: 343435 - DNA, 122 bp, Homo sapiens
aggatttgttggtgcggtgccggcctccaggtgtgtctgaggagacctggcatcgtcgggcggcttcttcagcctgaaaggccccattgtagctgcagcctccctctgatgggctctatttt

SEQ ID NO: 343436 - DNA, 122 bp, Homo sapiens
gttaatgatagagcattaacgtgtatttgtcagcgtggaaagtttcgctcctgcattgcccgcaggagacggaagatgcatgggtttcctggcgcgcaggttgggtggaggctcagcgtggc

SEQ ID NO: 343437 - DNA, 122 bp, Homo sapiens
gaaatgctgagggtgaattattttgttttttttttccttgacagtagagcctctgaggcccgatcctgtcagatgaggaaaatgtttaatatttaggaatcatggctgttagtaatctactt

SEQ ID NO: 343438 - DNA, 122 bp, Homo sapiens
catgatctacttttaagttctgtgaaagtccttctgcagtaacagttcatgcgctggccacgatggcagcaagggcagctttaagttaattcaggctgtttttggaacaggctatggggtct

SEQ ID NO: 343439 - DNA, 122 bp, Homo sapiens
ggtggagggtgccaacgccgccctcctcgacattgacttcggtatgtccgggagggtgtgcgtgccaacgacctttcgtgcctgccagggaagacccagctgcggagagccgtgggaaccga

SEQ ID NO: 343440 - DNA, 122 bp, Homo sapiens
ataaccagtcgtgctcaggtgctctccctcactgagatatactggcgaggcttccctggccgcaacgccgccgtaagtgctgctcccacgcgcggtatccccgcgtactgctcagtgcccaa

SEQ ID NO: 343441 - DNA, 122 bp, Homo sapiens
tcctatcttctctggggagggagaagatcaggaggctgggccagagcaggctcttctccacgcacaggcaggctgtgggtaggcgataacatagggcaagaaactcccgaaggcatgaggca

SEQ ID NO: 343442 - DNA, 122 bp, Homo sapiens
aggccttcacggactggccagagaagaaaccccagcagctaaggatacttaatccagccccgactaggaactgcccccacccatcgttcagatattcctgctgtgtctgggaactcttcctg

SEQ ID NO: 343443 - DNA, 122 bp, Homo sapiens
actggaaaagagaagacacaacagctctgatgcgagggaggcctcggccccgccccctcccgccccgggagaaccttggccgagcctgcagcgcccgtaatccccaccgcacctgctgcggg

SEQ ID NO: 343444 - DNA, 122 bp, Homo sapiens
cacggagaaggacaagcaggcgtatctggaggcagcctatgcagccggcgtccgcaatatcgagatggagtcctcggtgtttgccgccatgtgcagcgcctgcggcctccaaggtaagcggc

SEQ ID NO: 343445 - DNA, 122 bp, Homo sapiens
tacctacctacagttcaagcagttactgggatgtcctgactaatcgaagatgctgccgcgcgcgtgggtcgctctgcgcaagggcctcttcgaaaacccgactaggcgcaactcagcgttca

SEQ ID NO: 343446 - DNA, 122 bp, Homo sapiens
ggttggacctgtccaacaacttcctggaccggctgccccgctccattttcggggacctgacgaatctgactgagcttcagctgcgcaataacagcatcaggaccctggacagggacctgctg

SEQ ID NO: 343447 - DNA, 122 bp, Homo sapiens
tgctgcaggctgaggctgcggcagaggcggcgaggcgcgggcggtgaggacggacaggtccgttgaagcagcattccctccctcccctaatccttcaactcgggggcgggggaaagttaagt

SEQ ID NO: 343448 - DNA, 122 bp, Homo sapiens
atgtctctactaaaaatacaaaaattagccccgcgtagtggtgcatgcatgtaatctacccgggaggctgaggcaggagaattgccagaacccgggaggcagaggctgtagtgagccaagat

SEQ ID NO: 343449 - DNA, 122 bp, Homo sapiens
ttaatcactttgaaggcacttgaactttatactctctcaattcctcctggcaccagaacccggaaacctaaaattgtctgtgccatatccacctactcccaatgatggaaacagtaatgcag

SEQ ID NO: 343450 - DNA, 122 bp, Homo sapiens
gctgggctgcattttactggccaaacagcaatggctgtgacacctgatccatctagccagcgttcgtcccttggtttttttggtgtttgtttgtttgttttgagacagggtcttgctctgtc

SEQ ID NO: 343451 - DNA, 122 bp, Homo sapiens
taaagaataaaaataaaatcctattggcgcagcggccaccaagtctttgaggcctcgcctcggtgggcggggccgacgccggaggagaggggctgcgcatgtgggcgtgacctcgcggaagg

SEQ ID NO: 343452 - DNA, 122 bp, Homo sapiens
ccggcgcggaggtgtctgcccccgccgggcttgaaggcacttgttggtaaaagacacagacgtgtcggtgtttgcctctcccggggaagggcgaaacgctctgaagttctctggcgctcttc

SEQ ID NO: 343453 - DNA, 122 bp, Homo sapiens
tcggcctcgcgcagctcgcaccccgccgctgccacctgacgccccgtgcgaaccggggttcgaggggagaccctgatccatgccatctgagtacagattagtcgggactgggactggcgaag

SEQ ID NO: 343454 - DNA, 122 bp, Homo sapiens
gcctgagactcccccaccctccgtgggctcctggggggcccaagcctccccgacgagtgccgccacctgctccacggtgcccagtcccatagaccacccaagggctgaggagtgcgggcgca

SEQ ID NO: 343455 - DNA, 122 bp, Homo sapiens
aagggcgcgcggacccggcaggccagagtgccgagcagcgcggtgggtgcggctgtgagacggcaggagacttctgccccgcggtgcacgcgaccctcgagacgacagcgcggctactgcca

SEQ ID NO: 343456 - DNA, 122 bp, Homo sapiens
agagggaaggtgggccacgcccctggcctgccccacgactcgggtgatttcccacctctgcgggtccctggccctgccgggtaactcccgagatcctatcctggtctcccctttgactccgc

SEQ ID NO: 343457 - DNA, 122 bp, Homo sapiens
aaaaggcctagtgaggcacttgggaactagcaacattataaaagtttcactacactgggtcgtaagagggatgtgtagaaggaagggcatagctagaatccaatgagagctgcaaccaagaa

SEQ ID NO: 343458 - DNA, 122 bp, Homo sapiens
agcagcctccctcaggcccctgacgcgtctgggcagctgctcagcacgtcccgcgtccctcggccccaaggccagcccactctggctcagccaggcacactaaacttagtggccactcccag

SEQ ID NO: 343459 - DNA, 122 bp, Homo sapiens
tgagcaaagagtgaagaaacagaggcttggggaagctgagacattttcccaggatcacagcgggtggagctgtatctcagaaatgaagctcacagtcttaactcactgtgtaattctgcaga

SEQ ID NO: 343460 - DNA, 122 bp, Homo sapiens
atctactcagtgattcctttggtcgaaccaataattatcgagtgcccaccctgataagtgcgctggtgatatatcagttgatttaccaactagtgtgggatgaaactgccttattgagatga

SEQ ID NO: 343461 - DNA, 122 bp, Homo sapiens
gagaggagaggaaggaggcaggaaaaagcaagtcagagctgcagcaacagcaggagagggcgggctggctgtgttcttacaagggagagagaaacccaatacacacacacacacatacacac

SEQ ID NO: 343462 - DNA, 122 bp, Homo sapiens
agaatgatcctttatatagtaaaacgcacaattctccgtgtcccccttgtgcatcagaggcgctgtggctctgaaagaatgagctttcttgcctttcaaccatagacaaggcaggaacaacg

SEQ ID NO: 343463 - DNA, 122 bp, Homo sapiens
acaggcacggtagggctgagacagaagtcctgcttgtttccgcttatttatttgaaacaccgctcatttaggtcttactttgtttgccaggcactgttctaagctctgtataaatattaact

SEQ ID NO: 343464 - DNA, 122 bp, Homo sapiens
cgtgactgcagccgtggctgtggctggaagtgcagggtagcctaaccggaagcatggcgtcgtggggggttctgggagttgtagtccctgggggagctgcttttacgcagtgttttgaggtg

SEQ ID NO: 343465 - DNA, 122 bp, Homo sapiens
agtggccccggacggaatacccactaagaagtgctctctgaaaaaggcgggcgccaacctcgaacgaagtcgttttgagggactggctcgccagctcctaagcaacttcggggctcgtgccg

SEQ ID NO: 343466 - DNA, 122 bp, Homo sapiens
ttgctgcacctatctgttctttttgaagtttctcaagtggtgtaattaatacatcattagcgttttgggtcagtcttcgcttttcttctactgcaatgagtagtcttgcaaattattttagt

SEQ ID NO: 343467 - DNA, 122 bp, Homo sapiens
acacaaagaattcctttcctgcctgaaaggagggtttccctcagcaggtactctaagcagcgaagatgagagggggcactatcctagacagcaagaatacaatcgtaaatggacatggaata

SEQ ID NO: 343468 - DNA, 122 bp, Homo sapiens
tcagcacgctcggctgagagctttcatttttagggcaaacgagccgagttaccggggaagcgagaggtggggcgctgcaagggagccggatgaggtgatacacgctggcgacacaatagcag

SEQ ID NO: 343469 - DNA, 122 bp, Homo sapiens
tcccagtatgttcccaagacagcaatgaaaaggcaccctttccacattgggacctggtgccgtgctgttgtaaatgctgggactcaaacatgtgcgtgtccacactgaccgtccacactcaa

SEQ ID NO: 343470 - DNA, 122 bp, Homo sapiens
ccagagtggggagctcctgcagggttgagaggaccggcggggcgaggtcggggcggggctcgcaggacctgggcggggctcgcaggggctgggcggcctgggggcggggctgggcggagcgc

SEQ ID NO: 343471 - DNA, 122 bp, Homo sapiens
agaggagagcaccagcagaaccaactgtgaattccaacaacccttaccaagagttcagctcgtgcctgttccccctgggcccgacgtctcttctttaaatctttcactctttttaaatggtc

SEQ ID NO: 343472 - DNA, 122 bp, Homo sapiens
tcacatcccagtcagttggacggccgggcagaggaactcctcacttcccagacagggcggcggccggcagaggcgttcctcacttgcccgacgggccttctcacataattttttagtagctt

SEQ ID NO: 343473 - DNA, 122 bp, Homo sapiens
tcttgctgctgggctcagacccgggtctcctctgtgcgcgtgctccgtcagtggtggtgtcgctgccatgggaagccgccctcagtgatggctgtttgttccttcttgccgtgtgggttgca

SEQ ID NO: 343474 - DNA, 122 bp, Homo sapiens
ggcacggaataaagtaaagtacatgggtaacggccccagaaaaaccagagcacagcccagcgcattaccactcatcgcctgggtgatcttgggaaggttacctaacctccggtagctttaat

SEQ ID NO: 343475 - DNA, 122 bp, Homo sapiens
taaggatgctgggacgcaaagagggcgcccggggtcatctggagccctggaggctaagctcggcagcctggcgccccgagtggcttcgagtccccgcgaccgccgccaggcccggccacctc

SEQ ID NO: 343476 - DNA, 122 bp, Homo sapiens
gccccggcctgcgcgggttcccatccctgttctcaccagtacgagggctgcggccgccagcgccgcgccgagcaccgccagctgcaacagaagcggagccattctccatgccgtggcagccc

SEQ ID NO: 343477 - DNA, 122 bp, Homo sapiens
ggctgtggctcctaaagacccgatcccgggcactgtcctcggtgctgaaaagccagatgccggtacagaggcgagttgctctgggtcctagaggctactgagacaaatgctggctgaagccg

SEQ ID NO: 343478 - DNA, 122 bp, Homo sapiens
tccacgcgcgcgcaagcacagttaagccacctgcaggaataaacacgcgagaacatccaccgcttccttgcaccccgaaaccctgcacaaagacacatacattcaccgcccccccgcccccc

SEQ ID NO: 343479 - DNA, 122 bp, Homo sapiens
cgctttgggtaaggtggggtcagggtcgggggcgaggcttgcccggtgggcccggtgcggcgcggtgcccgccgttttcgggacggggaggggccgcgccccgccaggagccgggcctgggc

SEQ ID NO: 343480 - DNA, 122 bp, Homo sapiens
tttgaacggcaaatttttgggtgtcagcacagacttcctgaatgagaacaggaaatccagcgatctgtgctttgataagaactcccagagcatctgatgcgttctctaagaatcattgacat

SEQ ID NO: 343481 - DNA, 122 bp, Homo sapiens
ccctcctctgggctcactggaggggacgggtctggagcaggcagagtgagccgctgcttgcgggatccgggatggagctcaggaatggagctccacactctcccagctgcctggcccgggac

SEQ ID NO: 343482 - DNA, 122 bp, Homo sapiens
ggcgcacaggcggaggaggcgttaccttgggcgggagggcgaagaccaccggcagcagcgcgagcggcgtgaacagcagcaccagcagccgccgcgcgctccacaccttcttggccgctgct

SEQ ID NO: 343483 - DNA, 122 bp, Homo sapiens
aaggctgagatggaaatcattggtttctctccttttgtatctatttgaaaatttccaaaacgaaagatataactcctcctaacccccttgaataggaccatttctcactccctccattgcct

SEQ ID NO: 343484 - DNA, 122 bp, Homo sapiens
tcagcgagagaacctgcggaaagcgaatatgtggggcgcgcagacggggaaactgagtcccgcgagagggccggcctgtgcgctgccccgcccgcgccccgccagcaccgccgtgcccgggc

SEQ ID NO: 343485 - DNA, 122 bp, Homo sapiens
atgataacttgctttaattttctatctccaaattttgtctttatgttaacagttatctaccggccaaaggaagggagttaaaatatagaagaaaaaagatattagtgagtgataccatcaaa

SEQ ID NO: 343486 - DNA, 122 bp, Homo sapiens
caggaagggaccatctgagagcaggagaggccactgggcagggctatgaccagagggtaacgtctatccaagtcatctgccaagttgggccaagctttttctcaagtggaggagagacgaag

SEQ ID NO: 343487 - DNA, 122 bp, Homo sapiens
tgtatcgagaaccacccttgcttatttagtgttgggtgaaccttgaacctatttaaaccacgatacagatctttgaaaggagggcactggttaacaaaatggtggatggggtggattcaaag

SEQ ID NO: 343488 - DNA, 122 bp, Homo sapiens
cttcactcctgtaatttcaggttcttgttactctcctaacatttctaaatgccttactttcgaagttctccatcaccaagacatctctttagtaataatcaaagagataaaatcagcccaat

SEQ ID NO: 343489 - DNA, 122 bp, Homo sapiens
aaagcggtctccatccctgaagccaagctgggagagtagccgaaggtcgcgcttcctggccgccaaaaccgaggtggaggaaacttggtagtcagcgagctacgccctctcggctcctcctc

SEQ ID NO: 343490 - DNA, 122 bp, Homo sapiens
aaaaagccctccccaaccttcagcccccaggggcctctgaattggagctcagcttgtccccgcccagcttctacctaacttgatggactcagcgggtggagcttatagatacaggctcctcc

SEQ ID NO: 343491 - DNA, 122 bp, Homo sapiens
tcatccaacgtcagctgagtttgccctcaacccagtttgagaagcaaacccatccttccccgattatcagactaaggcagactccgcaggctctcagaccccggagacccccaacaggaaga

SEQ ID NO: 343492 - DNA, 122 bp, Homo sapiens
agctcctgtaacatactggcctggactgttttctctcggctccccatgtgtcctggttcccgtttctccacctagactgtaaacctctcgagggcagggaccacaccctgtactgttctgtg

SEQ ID NO: 343493 - DNA, 122 bp, Homo sapiens
agtggcaggcaggagcaggccccctcgcggctgcacaggggacagggtaggggaccccggcggcttgggccacctccaaggctgctgctgtcttcccctggggagctgccctcctcctcctc

SEQ ID NO: 343494 - DNA, 122 bp, Homo sapiens
gtggtgggcgcgggcggtggggggaagcgcagtgcgcaggcgcaactgcctggctctgctcgctccggcgctccggcccagctctcgcggacaagtccagacatcgcgcgcccccccttctc

SEQ ID NO: 343495 - DNA, 122 bp, Homo sapiens
cccccgcccttggagatcccgatgcccttcaggtccagaagctcttgagcaaatatttggcggcgcctggagctgagaccgtgggtgggtggggggctggaccaaggctgcctggccaggcg

SEQ ID NO: 343496 - DNA, 122 bp, Homo sapiens
taaccacatttttgtcatccctttcctttttctctccctcagtcatgcaatattattgcacgtgaagaaagacactaaatggcctttgaggctcagttttccaccattccagtggctaggca

SEQ ID NO: 343497 - DNA, 122 bp, Homo sapiens
gcgcggtcggttccgccgtgggccaggacttacctttcgtcggttctccgccgctggcgtcgctgcttgctcacgggtcccacagccacaccacagacagcagtacccacaccgggagagag

SEQ ID NO: 343498 - DNA, 122 bp, Homo sapiens
tccgcctatcagccaatgaagagacagcagtgagagcggttgcgcagtgaaggctagacccggtttactggaattgctctggcgatcgagggatcctagtacaccgcaatcatggtgagatg

SEQ ID NO: 343499 - DNA, 122 bp, Homo sapiens
tttccctgggacagagggctctgcgcaggcgccagcagcccagggttcccgggccgcacgcggcactggagcaggtaccatgtgatcccagggagcgcctcgtgccccagtgacacactttt

SEQ ID NO: 343500 - DNA, 122 bp, Homo sapiens
actgctggatcgtgagaggtaagcatgctggcttctactgaaacgccccttgtcatcacacgcccatcccctggggcgacacgacccaggccccgcccctcggggggctgctgcgagtccgg

SEQ ID NO: 343501 - DNA, 122 bp, Homo sapiens
cgccgtggacggaagcaggaagaaggcctaggccgcattacctctcggatctgctgcaggcgctcctccaggctgtggcggctctccaactccagcttcagcttttccagcctcgagatcag

SEQ ID NO: 343502 - DNA, 122 bp, Homo sapiens
tgctctgaccttgaaagggtcctatctggagacgagggagtagaacgtgctgaatgtgtgcggttcagggagcatttggtaaccctgcatttgggagcagtgggcagtaacaggttttggag

SEQ ID NO: 343503 - DNA, 122 bp, Homo sapiens
aggcggcaagcgagcggctcttgctgatgggggagctcatggcagcgggggacaccggagcgcgggaaggcaggaggatggggtggggcgaggttggtacgaggtgctagtgggagtcgggg

SEQ ID NO: 343504 - DNA, 122 bp, Homo sapiens
cgcgggcacgtgacggggcggggcctctggagcggggaggggccgagggtggcgttcgggcgccccctgcgggtctccgccactgctacgttttgacctcgtagggcagctccggagctcgc

SEQ ID NO: 343505 - DNA, 122 bp, Homo sapiens
gtaggagctgcagtcagagatcagagtgacttaacagctagagggcacttgatgaataaacggaaataaggaaaccacatcagatgacacctcccttctgagccccacccatgtctacattt

SEQ ID NO: 343506 - DNA, 122 bp, Homo sapiens
catagctcttaccccgttttttgttgtttttttttaatactccctcgacttcgtgtccagcggcccattcgattttgaagctccgcagagagtgcctccagcggccgccaggggtcgcagtc

SEQ ID NO: 343507 - DNA, 122 bp, Homo sapiens
tcaccaaaccccgcctctttgtttaactcagcccctacaccagcagccaggagctgcctacgaggagggacgaaggctggccaggcctccactctagacaggaagtctagtctagagtctat

SEQ ID NO: 343508 - DNA, 122 bp, Homo sapiens
gaaaagtgccgaaaatgccacagtcacatgggccactgctccttaaatgccacaatcacgcgggccactgctcctttcattctctacagacaacctgagtctcacactgtcatagcaccaag

SEQ ID NO: 343509 - DNA, 122 bp, Homo sapiens
gctgcagaggccagtgtggcggaggaggaagaggggtgggggagggagctttttctctgacggaccttggagaagggcagtggacgagcatgtgtccctccgcttccgcagaggacggaaag

SEQ ID NO: 343510 - DNA, 122 bp, Homo sapiens
ttcccagtagacacagggacagcggcttccactcccgggacctctggacatcctccatcccggtttggcgggaaactgacccaggagaaagtgtttgcagaggttccaaaaaaccagcccgg

SEQ ID NO: 343511 - DNA, 122 bp, Homo sapiens
gctgttcacagagccaggagctctttgcagtttggtgtattctgctgagatttatggctccgaccctcctctgctctgccattcctggtagtaactgctcagctgcctggtttgctccagtg

SEQ ID NO: 343512 - DNA, 122 bp, Homo sapiens
tagagaaataaggtgctcttaggggctggagtggcttccttcggaattataccctatttccgacttacctgagagcctgacattccaaaatctacctttttggtgttttgcacccacttttt

SEQ ID NO: 343513 - DNA, 122 bp, Homo sapiens
acagtcttcgggggtaggtgtagggggtgcaacagcgagacttccccacaacacctccaccgaaggctgggtcgtcagcgtttgagggaccctcccgccaccccgcagcctggcggggcgct

SEQ ID NO: 343514 - DNA, 122 bp, Homo sapiens
ggctgcactaagtacttggagggtttgtttttttccttcttgctgctgctgctgtttcctcgaggatgaagggaaagataaaaccctcctgcctccgttcgtgctttcattcgccccattcc

SEQ ID NO: 343515 - DNA, 122 bp, Homo sapiens
cattgttctaaaaagcgctggtttcttggcagagctgaaccaggcttggtgtgtaaaccacgcgtgccacacctgggagacgcacgcccatgcccgccaaggattcagagagctgcagattt

SEQ ID NO: 343516 - DNA, 122 bp, Homo sapiens
gaagtgtaatttttcattgcagaagtgcaattccactgctgagagtttgagaaaccccagcgtggggccccttctgagacagatggcctgccttcctgggtttcagttctgccagcctctcc

SEQ ID NO: 343517 - DNA, 122 bp, Homo sapiens
caagcccaaaaaagtagcaggcatccagttaaatgagtccttagtcatccctaaaaggctcgaagtaaagtgcgccgcgtcccccctcggtttcaaccacttctctgcaacccgacaagaga

SEQ ID NO: 343518 - DNA, 122 bp, Homo sapiens
ctctcaattctgaagccatgttctgttgaccttcctctaaaagcggtacccgcaattgtgcggattccgtggttccctagtcccaagccgtctgcttcctgggccctttcattggctccgcc

SEQ ID NO: 343519 - DNA, 122 bp, Homo sapiens
aaggtgaaaaaataaattgaaaaaaattagtccaaaacaaacatgcaaatttgcagtgcacgattgagcatttctgtccatgaaaagtgcttctgtacagctctctgcaggcagctcttcac

SEQ ID NO: 343520 - DNA, 122 bp, Homo sapiens
cttcaccagggggagcaggacgtggccgccttggcgttcgtgggaaccctgggcggtgaccgcgccccctcacagacttggcaccgcccagagcccagccccttccctctccccggcatcct

SEQ ID NO: 343521 - DNA, 122 bp, Homo sapiens
aggtagacatcaatgtaaaattaatgacaggaattggtgcccttttggttgagggacaggcgtactcctgcacacattcaaagaaaacatgtggaatgaggtacactgagatgttaacagta

SEQ ID NO: 343522 - DNA, 122 bp, Homo sapiens
agacaagaaatcttttttgcataaataacttgtatgtgttcattcccagaggaagttgtccgcataagcaaacatcacccagatataagtttaacctctttaatcttcccctccaccctgtc

SEQ ID NO: 343523 - DNA, 122 bp, Homo sapiens
gccctgaagccctcgccgagacccccggccgtcccaaccacggccgcgatccccacggcccgccactcccctcgaagccaacgctgctctcacccgcggtcttacggccgcgcgctcggcca

SEQ ID NO: 343524 - DNA, 122 bp, Homo sapiens
agtaactccttccgtggcatatttcgctgggcagatagaacaaaccatgtcgttttcccccgtctctaaaatagacatattattatcattcacacttttgcacccggtcgttttgcgggagt

SEQ ID NO: 343525 - DNA, 122 bp, Homo sapiens
aaagctgggggcggttctaagctctgccgacgccccagttcttccaggtgccctacacagcgctcaccatgctgctgactccctgcccaagggagcgggactcggccaccgcctaccgtgag

SEQ ID NO: 343526 - DNA, 122 bp, Homo sapiens
cacagactgtttaatgtcacagccacagcgccacctagtgtatgtgtgacttccaaacggcgtattttcttagaaacattagtctgtgaacatttcaaaactcaacgggtggtatttctttt

SEQ ID NO: 343527 - DNA, 122 bp, Homo sapiens
ccaaatcccttcctccacgctggtctgttctccctaactgaaaatgcaagtgaaggtggacggtttgccgttctgaggagccccttatcagtaataatgtagcaacttcagaaaagttagct

SEQ ID NO: 343528 - DNA, 122 bp, Homo sapiens
ggccaggctgctcctcgcagtacacccacccacgcctgcacctgcctcagcgaagccgctcgccgctggttccagcacaggctaaagagcttcggcatccagaaaaccagaagcgcgccgcg

SEQ ID NO: 343529 - DNA, 122 bp, Homo sapiens
gaatccctcagctgacactgaagacgagcctggggtggagaggagggagccggcatctgccgagcacctcctgtttgccaggcgctttctatacttaatcccatgtcatgcgaccctaggac

SEQ ID NO: 343530 - DNA, 122 bp, Homo sapiens
aggctaacataatagcctgattagaagtagctatttcgtggatataagacagattacaaacgcataaatatggggtcaggctgcccatcatacatttgggagttgggtcattttaaatgttt

SEQ ID NO: 343531 - DNA, 122 bp, Homo sapiens
gtatgctgggaagacagaggaacccgcagccactgggcactgaccagcatgccgcgccgccggaagcccatcatgcacaggcggcacttgaacgtgaagctgtcgtagtctgtggacgtgat

SEQ ID NO: 343532 - DNA, 122 bp, Homo sapiens
cagtaaggaaagacccagacctcccaggctcccttcctttattggctgcctgtggactaccgggtactggactttagtctcaaagaaagtatataagtcgatgtcagaattagtagtggaca

SEQ ID NO: 343533 - DNA, 122 bp, Homo sapiens
ctatggccaaactgaggctgcgagaaccctgggagagttgcagggtgaccctcgccagcgcgtcaggggccacgccctccaccatgggctccgactcagctatatgtacacacacacacaca

SEQ ID NO: 343534 - DNA, 122 bp, Homo sapiens
tggccggggcatgaccctgtcgcgatagggtccccacgggagggtcgggagccggcagctcgcccagggccccaacgcccaggatggcacggtctgcccttgccctgtgaaaacgcccctgg

SEQ ID NO: 343535 - DNA, 122 bp, Homo sapiens
tacgccgccgccggtgccaccagtcccagacccgctgacccaacgccccgcgcaccgccgcgggccagccacgtgaccagccgctccaaccccaaaccccgaacttggcgctggaccgctcg

SEQ ID NO: 343536 - DNA, 122 bp, Homo sapiens
gccgcggccccgcccctcccagccaggccccgccccaccccgcgcccccggcccgcctgtcgcgtccgcagaattaactttggactcccgccagggagcgacctctggatccccgcaccgag

SEQ ID NO: 343537 - DNA, 122 bp, Homo sapiens
aggctgaggcaggagaatcacttgaacctaggaggtagaggttgtagtgagccgagattgcgccactgcatgccggcctgggtgacagaacaagactgtctcaaaacaaataagtatttgac

SEQ ID NO: 343538 - DNA, 122 bp, Homo sapiens
tcctgcctcgcctttcttggttctagaaccttcagtaggcttttctgggttgcagggacccggaaaagcagcggcttccactcggggggcgggtcccaagggtcttgctgctgctctggggc

SEQ ID NO: 343539 - DNA, 122 bp, Homo sapiens
tcaatgctttcatgaagtatcccttaggaacccaggcaggcttcccacaccaccattaaccgccacataagtccatgcaactgtgactcagagttctggcagcactcagaacactccagtca

SEQ ID NO: 343540 - DNA, 122 bp, Homo sapiens
cgaaagtgaccctgcagggacagcagaggacttccatcttgggaccatgaggttactgcacggaaatctttactcttgggagtgatctgcttacattccgtgttgagaaccagcacaacata

SEQ ID NO: 343541 - DNA, 122 bp, Homo sapiens
gtgctcctggagagttcttagacctctccactccttggcacaactgacctctccactcttcgacaaactggcaagcgcttgccgccgttcgccaaaccttggtacgacagtcaatccagaaa

SEQ ID NO: 343542 - DNA, 122 bp, Homo sapiens
gacacaggttcaaatcccagttctgccaaggcactttaccttcctgaggttcagtcttctcgcctgtaaaatgggcacaatgatacctcccaggattgtggctaaagtacactttgataatc

SEQ ID NO: 343543 - DNA, 122 bp, Homo sapiens
cgccgccgccgccgccgccgccccgcccccgagtgcctcatctgcatagccccaccccagcgccgcgcggtgtcctgggaaactggggcccacaacaaagggcaaagcaccgccccgcctcc

SEQ ID NO: 343544 - DNA, 122 bp, Homo sapiens
gaattccatgagcccctgggaccatgggtgcttttctttcccgtcttggtcgggtccaggcgcgcgctctccagaggcgcacccgggcaccctccggcgtctgctcggtgaagctcccgcct

SEQ ID NO: 343545 - DNA, 122 bp, Homo sapiens
cctaaacacagagtcctaaacacagagtcctaaacacatgcagggttggagggagactgacgaactcaactaccagcctgcagtcggcagccatcagcggattgcaggtaccccgcgtgcgt

SEQ ID NO: 343546 - DNA, 122 bp, Homo sapiens
acatgaacacacgccaaggagcgctgccagcgacaggagctgggctcccggtgtttgctccgtggtgcttctgtccgagagaccctggaacattctcaagttgtgcgtctctcaaatcttca

SEQ ID NO: 343547 - DNA, 122 bp, Homo sapiens
ctggggttcaaacgcagaataaagctagcgaaagggtgagccaggcttaagccacatcagcgggtggaggttccagatcactgaagaacaagtcccctgacccctttgctggtaagaatccc

SEQ ID NO: 343548 - DNA, 122 bp, Homo sapiens
acccccactggtctttgattcctttaggggcctcagctgagtagaatcatggtatttgtgcgtgtgtgtgactggcgtgcttcaccgtgttgcatgcgcgtcaggatttccttccttgaagg

SEQ ID NO: 343549 - DNA, 122 bp, Homo sapiens
gccttcagggcggggcctggccgttaaagcacctcaaggggtggggcccggctgttgtggcgctcgaggggcggggcctggagttagagcatctccacccgccgagcctagttattagagcg

SEQ ID NO: 343550 - DNA, 122 bp, Homo sapiens
ctttggaagatgaaaacaaactagtgccaaggaggcgtattcttcaatatttggaatagacgtgttctcaagacaatggcttcaaaggtctcctgtttgtatgttttgacagttgtgtgctg

SEQ ID NO: 343551 - DNA, 122 bp, Homo sapiens
actgagagcttccgggcagcatcagcagcaacgaaatactgcggtggccgccaagcccagcggcatcactggaatccaatcacgaggaaacatgccgaaatcccaagctgaaaaacatttta

SEQ ID NO: 343552 - DNA, 122 bp, Homo sapiens
acgtggttgagctccatctgccctgctaaattcagcctccaagagcccatatggcaacgccgcagcttgaggccgccgtacagccaggctgtgtgtgcgtgtgtgcacactctgtgtgtgtg

SEQ ID NO: 343553 - DNA, 122 bp, Homo sapiens
atccaggatgctgctgtcagcctgtgcattgtgaagaaggcaatcataggcgagcagccgcgggagcaggaacagcagcgtgctaagaagcagtcacataaacagcagcaggagtaggcctc

SEQ ID NO: 343554 - DNA, 122 bp, Homo sapiens
tccctcgccggagggaagccgcgagttgcgagtcgtgatagaaacttaaatcgggggttgcgctgggtggtccctgctgtgcctgctattgcgctcctggcttcttaagaacattctcaagg

SEQ ID NO: 343555 - DNA, 122 bp, Homo sapiens
gcggaaggcgggaagagctgggaagtggcaacgaagcgaggcttgcaatgccagagccttcgaccagccttgcacaggggctcaacggccaggagtctcaggtaaaaccacaactcccagaa

SEQ ID NO: 343556 - DNA, 122 bp, Homo sapiens
ccaagacgtcaagtcggggaactccaacattggggtgtccagaaacactggggtttcaggcgctctgtaaatgcgtccgaggtccgcggttctgcccgcaagcccagaccccggcctcactt

SEQ ID NO: 343557 - DNA, 122 bp, Homo sapiens
ggccacttgttcccagagcttctcagactgggtgctggggccctgacagtttgggacaatcgtccttgtgagcactcccagctttgcctctggggtccacattccctgggctcccacagttc

SEQ ID NO: 343558 - DNA, 122 bp, Homo sapiens
taaacctttttgcttcgttttcgtttcatcaaacgttgcattggatttctgtatccgaaacgtggtgtgagctttcagaagtagatgaatacacatatccccggggtgtcatttcttgattg

SEQ ID NO: 343559 - DNA, 122 bp, Homo sapiens
ggcctcggattggggaccgtttgaggtcactgaccttgaagagcagaacgtggagcttcccgcgcgccaccagcagcccgtggttggcctccagccgctgcacctgggctgcgcggcgcacc

SEQ ID NO: 343560 - DNA, 122 bp, Homo sapiens
ccaatggccagagagccggggggtgacagacaggggggccggcagccgagccaggcaggacgctgcgcgccgcgttactggagccggtgtcccggcaaccccggaacgcgcctctgtgggag

SEQ ID NO: 343561 - DNA, 122 bp, Homo sapiens
gtttgggtgattggctggtgactccgccaagcattctgcagtggagtaatgactgggctccgcgcccccacagccccttcgctggacctgtcctgagtggctccttgggcaaatcgcagttt

SEQ ID NO: 343562 - DNA, 122 bp, Homo sapiens
acccccttattcacgcccatggcatattctactttgcctctcggtaacatctagcaaggtcgtctttatacagaaactcgtgttttgagtactgcttgtggccagcgtacgagcgtagcttc

SEQ ID NO: 343563 - DNA, 122 bp, Homo sapiens
ggctccctccgatgacttcttcagagatgaaggtgctggcaggacactggtgagtacctccgcacctgaaagcttcttccaaggccattttaattgcatccaaggatagtttgagttgagtc

SEQ ID NO: 343564 - DNA, 122 bp, Homo sapiens
aatttccctttgaggacttgcacattcctctcggcacagaggtcggagccggtgggtgcccggctgccgccgccccgcgatcaatggcacctgaagcttccccgggcgaggccgtggctgcc

SEQ ID NO: 343565 - DNA, 122 bp, Homo sapiens
ggacaggggtggaggcgggaacccacaactcgcggccccctgaaaatctcctttcccacacgcccccaacagtgagcctgagctcccctcgcagatgcgtgcagaacgaatcctctttccct

SEQ ID NO: 343566 - DNA, 122 bp, Homo sapiens
cctgacccaaggtgggcgggctgggcgggggccctcgtcttacccagcagtgtttgggtgcggttgggagtctctaatactgccgggtaatgatggaggcccctgtccctgtgtcagcaaca

SEQ ID NO: 343567 - DNA, 122 bp, Homo sapiens
ttggtagtaaaagaaccaattagactgggaaaaaaagaagcaacgccccaggtttcaccccggcttgacagacgcaattgaggccatccttgagtccctccgcccccaagtccagtaatgcc

SEQ ID NO: 343568 - DNA, 122 bp, Homo sapiens
gtgcccaggcagccacaggccctggggtgagagggctgccaaccactcccctgggctatgcgttagtctccgtcagcttggcctctgtgtcgctgtcactcagataactgtgggagtatcgc

SEQ ID NO: 343569 - DNA, 122 bp, Homo sapiens
gccttttcattcttgacaaaacataccaagatctctgggataagcataaattcctataaacgccttcctcaaatataagttgactccactttcctaaaaaatatgaggaaatcaggccagac

SEQ ID NO: 343570 - DNA, 122 bp, Homo sapiens
cggagcaggtggtgggaaatgtggtggctggcttaactggtcaaggaggcagggtcgcaccgtaggggtggggcaaagtctttctaggcggttggggagtgaggatttttttggtgacgtcc

SEQ ID NO: 343571 - DNA, 122 bp, Homo sapiens
cggggagccgggccagcaccggcttgggggccggaggcgttcactccagactgggaaagccgagaagtttccactggggtgaggaaggaatcggggttcataggacgtgcacaaggcctgac

SEQ ID NO: 343572 - DNA, 122 bp, Homo sapiens
atgtttatttacccagagatgagaacctggaggccacactatgtggtggttactgtaccacgtaggacagcccagctagcgaagtccctggggttagtgaacaacacacaaaaataaggtta

SEQ ID NO: 343573 - DNA, 122 bp, Homo sapiens
ctttaaaattgtgaagatgaaaacctattctggcgtggggtaaagattctccacagagcccgagtcaagtccaacgacgaccaccctgacagctcttggcgcgcagcgtggggtgtgcagcg

SEQ ID NO: 343574 - DNA, 122 bp, Homo sapiens
caggaaaaatcctccatgaacacaatgaaacttggcctgcacctgggacatccttctccacggctagtctacaatgcaggtgctctgcacacgctccctggctgaccccaacgcagagaaga

SEQ ID NO: 343575 - DNA, 122 bp, Homo sapiens
ctctgtgtgggaaatgcttctcccgcttgcccttccctgagggttgggagacagtgacaccgggagaaacccgcgccccgcgcccccatcccccaggagcccctccctccgcggcgctccgg

SEQ ID NO: 343576 - DNA, 122 bp, Homo sapiens
ctgaggggtgagatccagatgaatgacactttcctgccttctcaagtcccttcttcctttcgaagacaggcctcatggtcaaatgtcacctccttctcttgctaaaaacagtgtggggaagt

SEQ ID NO: 343577 - DNA, 122 bp, Homo sapiens
ctgccggcgaggctgccctcccctctgccctctccgaccggctgtgggtgggtcagagcgcggggtgccaggggcattactcagcgctgggctgctctgcctgggttctttcatctgccagc

SEQ ID NO: 343578 - DNA, 122 bp, Homo sapiens
cagtcctctcgctagggcgagggtcttttcctccgaggtcccccaaccctctggtccccgcgcaggaacgcccacccccgttgtgcccgcgtctgcgttcccgacgtttccctgaacaggaa

SEQ ID NO: 343579 - DNA, 122 bp, Homo sapiens
cagggttatcttttcagaccaaaaatctggcctgctgctcttcaccctcaaaccctgcgacggctcccttacatgcaggaaaaaaagaacactccttataatggtcaattcagccttgctat

SEQ ID NO: 343580 - DNA, 122 bp, Homo sapiens
cagagtttctcggcctgctcccagatcggcgaagtttctacttgttactctctctgccggcgcccttcgttcctcctctgcttcccttccctagtctttcctccggcagggagctgggcagg

SEQ ID NO: 343581 - DNA, 122 bp, Homo sapiens
aagtcagagcacgcctgaaagggtttgtggagagcccagctcaccagggactctggttgccgtagcaaccttccagactgttctctctatcttctgctttgggcatcaagggagaccagggg

SEQ ID NO: 343582 - DNA, 122 bp, Homo sapiens
gggctggggctgggggcggggtggggggcaggggccacgcggagctggagggacccagggcgggtggtctcagagcccaggggaaacttgctatcccccagccgtcggcttgtcggcttcgc

SEQ ID NO: 343583 - DNA, 122 bp, Homo sapiens
cgcgaggcgggcaccggtctacccgggccggcttgcaggcgggcaggagggcgggtggggcgcgggggtggcgcggcctgcggggcgcggggaggggagagcgcgcggggagggggtgggag

SEQ ID NO: 343584 - DNA, 122 bp, Homo sapiens
cagggagccggagatggggagaccaaggcgagtctcagggcccagcccacctgcatcagtcggggtgaggctggaccagtctgggcatcagtccccacccagccgtgacccccggcagagtc

SEQ ID NO: 343585 - DNA, 122 bp, Homo sapiens
tgtctgtttctcagcctgctcacctgtgaagcctgtacaatgataggcactcccagcaaccgctgcccagtcagcccaatggccagtggcacagactggatttcacagaattccacgtaggc

SEQ ID NO: 343586 - DNA, 122 bp, Homo sapiens
cttgaactccatttcacagtttctggttttcacagcctttaggcaaacacaattcaaacccgttactatgcttgaaaagatctgtttcagaaactgttacacaaacagagaagctagcacac

SEQ ID NO: 343587 - DNA, 122 bp, Homo sapiens
ggtctctgggcttgtgagtgctgggggtgagtccctgggtgtcctggctgcggtgagccccggctggggtcccccaaatgctccccagtaccagaggcgttgggaagagctggggaactcca

SEQ ID NO: 343588 - DNA, 122 bp, Homo sapiens
cgcagcccacggcacagcagcctgcaagacgcggtccacgacacagcagcctgcacgacacggtccatggcacaccagcctgcatgacacggcccacagctcctaaaacagcaacaaacctg

SEQ ID NO: 343589 - DNA, 122 bp, Homo sapiens
gggtcccggcctctgggttttagggagcgcgaatgggtctccgacagcaacgggagcagccggtggcgcctcaggctgcggtggcaacgagcccgactgcactacggctttgcgggaccgcg

SEQ ID NO: 343590 - DNA, 122 bp, Homo sapiens
ggtcatgttgcggtgctttgctggaatcgagtaatgtgcttaattcgaaggtgtctttgtcggttacagcaatgctgctgctgaatgccgtgggaagcgccatggcttaagccgctgggggg

SEQ ID NO: 343591 - DNA, 122 bp, Homo sapiens
aggaagcagagtcggaatgtgaacccctgtctgtgagattccaagcatccctcagaaaggcgtggtcctcgactggcgttggtgccctggcacagcccaagggccttggaaatgccattctc

SEQ ID NO: 343592 - DNA, 122 bp, Homo sapiens
agcctccgctcagtaccgcacagagccgagccgggacgcccccagacgccgcgccgggagcgatcccagcccgccgcgctccgcactccgggctcctccgcgcgcccaccctgggagaagac

SEQ ID NO: 343593 - DNA, 122 bp, Homo sapiens
aggttgggtggtgtgaacagccttccccttccatgtcagccacgtctatagagaagctcacgcggccctttccctttgcacttctctcctctgtagcaggccgcggggtgagggtgggatta

SEQ ID NO: 343594 - DNA, 122 bp, Homo sapiens
tcggttgcaggccctattcctggtctacgttttccctctgttgaacgcaaaccacacccccggcccgctaaacctcaccgtcggtgtgcagcgagccgcagccacagccacaggcgcagggt

SEQ ID NO: 343595 - DNA, 122 bp, Homo sapiens
cagttttctggtggctgatgaagagggcagtgccaggcgtcagctacccacctgtgcctgcgcccacctgtacctgcacccacctgtgcctgcgcccacctgtacctgcgcccacctgtgcc

SEQ ID NO: 343596 - DNA, 122 bp, Homo sapiens
gcaaacaggaggtcgagggtcagcatgcatagcccagtctatcatctccgtgaagtggagcgcaatgaaataccagaattagctgcttcatgtcttaaaatgagggaagagaaaagcccaag

SEQ ID NO: 343597 - DNA, 122 bp, Homo sapiens
ttccctcaattgccgggtgactgaatttcctgggattgctcccaactccctgggtgcctccggctccagctctgtgcgttcttccctagtttgagggaaatgccgttcctccagctgctatc

SEQ ID NO: 343598 - DNA, 122 bp, Homo sapiens
gcgacttgccccgggagggctgcgtcttgatcacgctgcccccgcggcctttggggtcctcgcctaggccaaagtctgaggagtccacgtaggggtagttgtagtcatgcttggggacctcg

SEQ ID NO: 343599 - DNA, 122 bp, Homo sapiens
gccctggagcaggaggcggcgctcatcggggaggctcgggctgcacaggagcccatggagcgggtgggaggctcgggctgcacaggagcccgtggagggggtgggaggctcaggcatggcgg

SEQ ID NO: 343600 - DNA, 122 bp, Homo sapiens
gtccactagctgcgcgcgttaggaaaccagaggtcagcgcccccgaccccgccaccgccgcgggtccctttaagggagagtgggcggggtcctgcctttaactccgcccacggctaaggaga

SEQ ID NO: 343601 - DNA, 122 bp, Homo sapiens
taaaaagcttaagttgagttcatgggagaacattaagatcgttttttttcccttttagctcggtaatctcatgtaccacaggtaatgaccaagcatctctgctagaggatgtaactctcata

SEQ ID NO: 343602 - DNA, 122 bp, Homo sapiens
tttcaaggtcccccatttcctacttttgttaagctgggtcaagtctctttaaactttctccgttttcttgtccataaaaagagtatactaggtaagtcttctgtctacctcgggacttctgt

SEQ ID NO: 343603 - DNA, 122 bp, Homo sapiens
accctgccgaccttccaagcagcaccggaatccacccacctctctcgctctgcagtgccccgtcctgctccgtaccaccagcatctcccacctggactgctgcaaacaccacctgatctccc

SEQ ID NO: 343604 - DNA, 122 bp, Homo sapiens
gtccatcatactcccaggccagtgagaagtgccctctagtgattggatgggttcgcttggcgcccgcctccatgcagacagagcaatgcctgtgtgggtgcttcctgatcaagactgatgag

SEQ ID NO: 343605 - DNA, 122 bp, Homo sapiens
acatttctgtggttttcagccacctggtttgtgggaatttgttatggcagccccagaaaacgaatacaggcaacatcacttagtgcttaagaaagagcctgtgcccgggcgcggaggctcac

SEQ ID NO: 343606 - DNA, 122 bp, Homo sapiens
ccagatgtcctatctgttaaatgagagagtgccctggctctgcccactctcagtgccatccgctgggctgcagggggcagagacaggaccaggaggtgccgctctctctgagagccacagtg

SEQ ID NO: 343607 - DNA, 122 bp, Homo sapiens
gggccaactgcaacagaatatacccgccgcgtgtaggggaaggcggcgccagggagagggcgcagtctctgaatctttccacggggtccatcctagggcccctccaggttcaacggtctcct

SEQ ID NO: 343608 - DNA, 122 bp, Homo sapiens
cgtccgcgccacctcgcgggcgaccccgcggccaaggcccccggcggagcggctcccgggcgccccgaactagcccccaactttgggcgaagtttgcctgcgcctctccccgcccccacgcg

SEQ ID NO: 343609 - DNA, 122 bp, Homo sapiens
ggtgcgctaggggcgcgtccgggggcctgtagggtgcgctctgagctaggcctcgggccccgcctggcctctggctgccaatgtggcccaggagcctgagctaaacgcctggactgcttcag

SEQ ID NO: 343610 - DNA, 122 bp, Homo sapiens
caccttccgcgtcggagcgggcccgcagcggcggagactcggacgcaggcctggggaagacggctcgcaaggtagaggctgtttattttgagggtccttgcctgcgccacacgcgggtctgc

SEQ ID NO: 343611 - DNA, 122 bp, Homo sapiens
tatcacgggacctactggctctgtcaaaatcggggacctgggcctggccacgctcaagcgcgcctcctttgccaagagtgtcatcggtgcgtctctccaggagggtccatgccattccttcc

SEQ ID NO: 343612 - DNA, 122 bp, Homo sapiens
ctgtatgtttctccccccattgtttttaggcaaatgcattgtatatttcatatatgtacacgtatgtatatacacacagagatacatatgcatgtgtgtacatctccctcctctgtgtgtgt

SEQ ID NO: 343613 - DNA, 122 bp, Homo sapiens
tcagagaccataaggggatttatcgagaagcattcggtgcccatgcccggtttggaaccgcgagcacaatatctggttcctttgcagtacggtggtttgctcttgagttacgaccagaaacc

SEQ ID NO: 343614 - DNA, 122 bp, Homo sapiens
tcaggccccctgcttggcctggctgggttggtttgagggcagagggacagaggaaagtcccggagtgatggggagctgaggacaaacattcctcacttcacaatttggccttgggtggactc

SEQ ID NO: 343615 - DNA, 122 bp, Homo sapiens
tagaatgggcactggtgcaaataccgtgaggccttcctgcaatgaagtgccaatctcaggcgccagggcacagacccagtgcgtgtcacagatcctgtcctgagtgctaggccgggtgacgc

SEQ ID NO: 343616 - DNA, 122 bp, Homo sapiens
ggggggtgatattactgcccgcacggcgggggggtgcccccgcctccctgcgttgtggatcgtcatatccatggtgggattggggggtgatattactccccgaatcgaaggggggcccgccc

SEQ ID NO: 343617 - DNA, 122 bp, Homo sapiens
aaatgttgctcctaaagctcaaaaacaggagcagatttcagcagctgctccagtttctctcggcgtgatgaaataatgagggagaattgccccgtgacatctgatacagaacgttcctgttt

SEQ ID NO: 343618 - DNA, 122 bp, Homo sapiens
atggagggaatagccacaaataatattacgtttggccgtcctaaacattctcggttcccacgaagtagccgcctttatatttcagatggtagcaacaaaagcactgttctcttcctcttccc

SEQ ID NO: 343619 - DNA, 122 bp, Homo sapiens
attgtcagggtgacgttggcgagaggaggaggagtaaaaactgaagcaggaaaagcagctcgatgtgtctgtctatcagttgagactgtctgaaagctctgcgatccgaatgtgtgttatat

SEQ ID NO: 343620 - DNA, 122 bp, Homo sapiens
atctgaaggggagtatcacaaggcctctgctgcatcatgggtatccccctgcattccccccgatggaagacctcgggaagctgagcccctcaatgcagggattcctagaggaatgtttgtaa

SEQ ID NO: 343621 - DNA, 122 bp, Homo sapiens
tgtagttctgagaaccgagcttggtgctagaatctacctgaggttttctagtccagctaccgtttctccgcccacagggcagaatctgggcctgtggcgggacagcaataaaaggaggaatt

SEQ ID NO: 343622 - DNA, 122 bp, Homo sapiens
aatatctatattgttttcaaaaacctatttcctaagctagtttccttagacggatattatcgaaaattttcttgcaaaagcattaacatacatttaaccctacttaaatgcttcaagagcag

SEQ ID NO: 343623 - DNA, 122 bp, Homo sapiens
gttaagctgttcgtgggctatcagaggtttaatttttgttcacagcctcaacacccggggcggtggatcagtccgtttattcagattccacgggacgctgcgttggcatctctgttcaacaa

SEQ ID NO: 343624 - DNA, 122 bp, Homo sapiens
aaagggccgccagtggtcgcttccacaggaagtcctgtagatgagcacaggagattggctcgctggggaacggaaagggagattaagcaagacaagactgttaacagttctagagctcgtgg

SEQ ID NO: 343625 - DNA, 122 bp, Homo sapiens
ttctcttgaagtgaggagctccccaaaggcgaggagctctccctcctactcccactcccacggactggcgcacacgaagcgggtagggcttttgtatccagtatctctctgctctccagagc

SEQ ID NO: 343626 - DNA, 122 bp, Homo sapiens
ccacttcccgggttcaagcgattcttctgcctcagcctccagagtagctgggattacaggcgcccaccaccacacccggctaatttgtgtatttttagtagagaagaagtttcaccatgttg

SEQ ID NO: 343627 - DNA, 122 bp, Homo sapiens
ttactttttttgtaaagtgcaaaacaacaatagcacccatttgcgtcatactttatagttcgcaaagcacatgggaaaaataaaggtaatgatggggatcgttgcaattcataggaaaggag

SEQ ID NO: 343628 - DNA, 122 bp, Homo sapiens
actggaaaggatgcgcacaggtggactcgtgcttcatgccaacgtgtggccaaggagccccgccggggccgtgtggatgaagagcgtggaactggaatctggtttctagcttccagtgtttg

SEQ ID NO: 343629 - DNA, 122 bp, Homo sapiens
aacgtagcaggtgctccatggcacacagaaggtgcttggtacacacggatgcttggcccccgaggaacctggcaaaccctgggcggatgactggctgttgcaagtagtggcagggctggaaa

SEQ ID NO: 343630 - DNA, 122 bp, Homo sapiens
tcccacactatggagtcggtttttccgagatctttctttagtcaatatggtggcaccttgcgtgatcttttttttttttgacggagtctcactctgttgcccaggctggagtgctgtggcgt

SEQ ID NO: 343631 - DNA, 122 bp, Homo sapiens
tttcctaaatgtctacagtggacgccctgttggtttggcttgctgggttgtgggtggacacgcaaggaggggatttttatttggccagcagtctcacccactgatctccaccccagaccttc

SEQ ID NO: 343632 - DNA, 122 bp, Homo sapiens
ctacctgagaccaaagaaaactcggcaatcgactccatactcccctcctgctcctgttcacgagttgcccagagattccctgaagtggagtagatgagcctctcaagcaagtaaggctcgcg

SEQ ID NO: 343633 - DNA, 122 bp, Homo sapiens
ggccttcctctccccctcccctcccctccctcgcgctgtcattcaccccgctcctctccgcgcacagccaatggagagacccagtcgaaaccgcgaagctctcttgcaccgggctttttcgc

SEQ ID NO: 343634 - DNA, 122 bp, Homo sapiens
ggtcctacgaggaagactggcttccatgaagcaaggaacgtggctgactgtctacacttgcgctaacaatagctcgggaaagaaaacacagtttttgtgcatgattttctgaccctcaccaa

SEQ ID NO: 343635 - DNA, 122 bp, Homo sapiens
ccgggtgtggggcggaggtgtggggcggcttccggagaacccagcggcgcgggactggggcgggacttccggcgacaccggaagtgcattagcgccaggttggggttgtggggtcgcgtcag

SEQ ID NO: 343636 - DNA, 122 bp, Homo sapiens
attgcttcctatgctggagttattctggctgtcattcacatgggatctggagagggtcgtcgcaaagctttcacgacctgttcctctcacctcatggtggtgggaatgttctatggagcagg

SEQ ID NO: 343637 - DNA, 122 bp, Homo sapiens
agtgggtccgtggccgcgctatgcatgctaggattagtagttcctccgtccctcatggcgcggggtcagggcggagctcaggttgactctgcagcagagaactacaattcccatggggccgc

SEQ ID NO: 343638 - DNA, 122 bp, Homo sapiens
gatctgccccgctctgcctcccaaagtgctgggattacaagtgtgagccaccgtgtccaccggggaaggcttttggtcagaacaatggctggcaaaaccacaggcatcggaaggccagagct

SEQ ID NO: 343639 - DNA, 122 bp, Homo sapiens
cccttccaccggcacatgcctggacaccaccgtttgtttcacggtggccctgtatgcctccggtgacacacgttcacaccatccgctgtgggatatgccagtgccgcgtgtggtcacatggt

SEQ ID NO: 343640 - DNA, 122 bp, Homo sapiens
tgtcctccctctcccaggcctctgcttatctgattgggggctgtgcttgactctgaaacccgggcacctcctacagggcattttgcctgtcacaggcctagcattcaatacctatcatattt

SEQ ID NO: 343641 - DNA, 122 bp, Homo sapiens
cggctcagtggcgctgccggccgtgatgcgctcgggctccagcgggcctgagaccttcaacgttggcagcatgccctcgccacagcagcaggtcatggttgggcagatgcaccgaggccaca

SEQ ID NO: 343642 - DNA, 122 bp, Homo sapiens
tcttagttctagcattattcttgccctgaggttgcccttttcaaacagctatagagttatcgtcttccaaaccattaaaaacaaagttgtcttcaaaaaaactttataagttgtcactacat

SEQ ID NO: 343643 - DNA, 122 bp, Homo sapiens
cgcggcttgcgctctccccggaacgcccacactctcaatcgctacattgttgacattcggcgctgacgtcacccgctccccattcacaataactttacgggagccgggcagcgcacctcccc

SEQ ID NO: 343644 - DNA, 122 bp, Homo sapiens
ctcacctggtaggtaggtgagtttcccccagctcacacaccactcctgtctcccaacaaacggttgtagtgggagcctaggaagtatggggacactcactgaatttaggggggggtgctgat

SEQ ID NO: 343645 - DNA, 122 bp, Homo sapiens
acctccccccaactccccccaattcaccattttacagatgaagaaacaggctcggccaggcgcctataatcctgacactttgggaggctgaggcgggcagatcacaggtcaggagttcgaga

SEQ ID NO: 343646 - DNA, 122 bp, Homo sapiens
gaatagggaatcagaattctaaagggaagcgcgccgctgagaggccgaggggagaagcagcgccgaggctcgcaccagacctcaccctggagaccgtcgtggagcacacggcctctgcagct

SEQ ID NO: 343647 - DNA, 122 bp, Homo sapiens
agaacttaataaaagtcaactcatttgctggttccaggtgccctctggttgtgcggccttcgtgaccctcacacgttcatggtgtcaatctctctgcccccgtgaagagctgcacttgatcc

SEQ ID NO: 343648 - DNA, 122 bp, Homo sapiens
tgccgtatcctgccgcccgttttacccgcgggaaagccgaggcccggtgctgtattctgccgcccattttacccgcggggaagctgaggcccagtgctgtttaatatcttactcatgttcac

SEQ ID NO: 343649 - DNA, 122 bp, Homo sapiens
gcaggcttcagtgggctgggctctcccggccatggctgccttggtggctaactcaggctgcggcgacagactggtgaggcaggcggactcttcccctgatgtttaatataacctgacagata

SEQ ID NO: 343650 - DNA, 122 bp, Homo sapiens
acgcaggcaggcttaggttcaaatgcaacccaagtttaactgacctcagaacccaagtttcggtttagaggcggctgccttgagtatatttgccctcttttcacctctcttcgcttatctgt

SEQ ID NO: 343651 - DNA, 122 bp, Homo sapiens
acgcggcgcgggaaggcggcctggaaggggcgggggcgcgcactcagccctctccgctcccgtttcccttcagaaaagctgaggaagcaggcggagaagagacaaggtgagcggggacaggg

SEQ ID NO: 343652 - DNA, 122 bp, Homo sapiens
tacttctgttaggtctagctgattcttattttggttctgtttggttgtggtcactctgtccgcttcttaccatctccactaccactactctggtccaagatagcatcttttctcccctggac

SEQ ID NO: 343653 - DNA, 122 bp, Homo sapiens
tgggaaagaagtcataacacatggggcaggaacaaaataccaacagagcgaagttgcacacgctgtccaacctggtggcctgcttatgaatttgaaatcccagaccttcacatgagtcccca

SEQ ID NO: 343654 - DNA, 122 bp, Homo sapiens
aggagagggccccaggggcaggagccactccctggatctcagacccgcttgtctcgcaggcgggaggcacgggcctgcaccctccgccgctcccacgctccagcagaccacggtggggcatg

SEQ ID NO: 343655 - DNA, 122 bp, Homo sapiens
agaagcgcttaagacttgcaaacacccttggtggggacctggaaccccgggagatgccgacgagcaagcaggtaagtggcggcgccctcccagtgggtgctcttcccaggcgcgagagtccg

SEQ ID NO: 343656 - DNA, 122 bp, Homo sapiens
agccgaaagcacagatgcccaccccagcaacgttcccgccacctgcccaggccagtgccccgtgcccaaccccagagggtgcgggatgacagactctgacaatcattaaaccagccgggcct

SEQ ID NO: 343657 - DNA, 122 bp, Homo sapiens
gacagcactagcaattccgcaactctggcgtgtgtctttgaaaatgtcttatttcctctgcgttgcccagcctcctctcttgatggttctgctgggggtggtggggagcggttggagcgggg

SEQ ID NO: 343658 - DNA, 122 bp, Homo sapiens
aaccaggacgtgcaatgcgactgcccccccctccccgctccccggcagagcttctgtccgcgccaacccacccaccaggctctgcccgcgccacgcgcgcccctggcaggcctggggcgggg

SEQ ID NO: 343659 - DNA, 122 bp, Homo sapiens
gtgcgggaagaggctcgtttcagaggaagcgtccaatgggccgttcaggttagggagttccgagactctccatgatttctgaaccgtgggggacggggtggtcgcaacctagaatgtgggct

SEQ ID NO: 343660 - DNA, 122 bp, Homo sapiens
cctacccagagaagtgaccttggatttaaatgtgaaatgctagccccccatgttaatgcccgaaaaaaaaaggcatttcactcaagaacaggaggtgaagtgtttctcttttctgtgttgac

SEQ ID NO: 343661 - DNA, 122 bp, Homo sapiens
ctcttgcagctggagctgttctgagaagctgggtggcggcctcctgtgactgcgagtccccgtcagggggtgcgagcagctccctgggcctgcacctgccctgctcttgctgcgggagccag

SEQ ID NO: 343662 - DNA, 122 bp, Homo sapiens
ggagcactgttccgggagcacggtctgttgggtgtgacggcccagcaaagaggcagtgaccggctcctgaggaggggcacaaggcacccaggggttctgcctcgacagggaaggggactcca

SEQ ID NO: 343663 - DNA, 122 bp, Homo sapiens
agtcagcccgtatccctagttgtccttctcaccctctggtttcctgtgcagacaaagaatcgaaggggacagagggctttgggactctgggctcactccaggcccacttttccttccattac

SEQ ID NO: 343664 - DNA, 122 bp, Homo sapiens
ttctgtacattttgctcatgttgtttcattatctgcctggattgctcttcttctgctgtgcgtgtccctatttatccctcaaagtctagttcaaatgctacctcttccatgacatgaagctt

SEQ ID NO: 343665 - DNA, 122 bp, Homo sapiens
agggacattttatgtgtgttctgttacccaaaggcatacattacgaaatatatagatgctcgctggagaaactggcacaatctagaaagcgctgttttccccgtttgtttttcttggtgtgt

SEQ ID NO: 343666 - DNA, 122 bp, Homo sapiens
cccagcaccagctgcaaggcttacagagagggcctgcttcctgagctgacaaaagtgcaccgggagtacgatcacgctgacatttaaaagtgcatagcgaactaaaacacagggtgggagca

SEQ ID NO: 343667 - DNA, 122 bp, Homo sapiens
tggcaatgatttcttccagtgaaataaactttcctcagagaaattatgtgggcttctccacgctgtaattacacacattggtattacttgtcacacagatataaacagaaacaatgtttgat

SEQ ID NO: 343668 - DNA, 122 bp, Homo sapiens
tacgcccggactccggtgcgcagccagtggagctcttttcacccggtgcttctacgactccgccaatcagaaacttcctgcctggggcccaaccgccggagagtagcgcgtagggaggaccg

SEQ ID NO: 343669 - DNA, 122 bp, Homo sapiens
acgcccgcctggtggagctcaagaggcaggccctgaggttgctcctcccggggcccttcccgggcaaggtgagcgccgcgcggggctggctggggaggcgccgggagggcggggccgggccg

SEQ ID NO: 343670 - DNA, 122 bp, Homo sapiens
gccctcactccgggctctagagccctccggcactgggaagcagcctgcccaggttcagtgcggttggggtgactcacacacctgcccgtaggtccctctgtgtgctgcctgccgacctctgt

SEQ ID NO: 343671 - DNA, 122 bp, Homo sapiens
gtgcgacgcgtctgtttcgcacccctcgcgcccctctggccccgcggcggggcccctttacgcgaccctccccacaagactcaaaggctgcggcgggcactcgctctccgcccttcccggaa

SEQ ID NO: 343672 - DNA, 122 bp, Homo sapiens
tggcaacagatgtctgaccacattggctcttgctctcctgtaggtacatgtctactccatcggttagtctagccatctttctttaaacacttgaattagggtaagggagagtttaggatccc

SEQ ID NO: 343673 - DNA, 122 bp, Homo sapiens
attgcacccctccagacctctgccatggccagtttctcttattttcctcattgccctcctcgtcctatccccttgctccgaaggaaagtgggtgctctttctgtccccacggagtggggcag

SEQ ID NO: 343674 - DNA, 122 bp, Homo sapiens
ccctttgtgtttgcttagggaactggctgaggtgcccggcttggggtgcctcctaacgaccgaaggccacatgtggaattggcaatccactggttccccagcaaggaacagtgtgtgctggt

SEQ ID NO: 343675 - DNA, 122 bp, Homo sapiens
cgtgctgaggttcatgaggaaggtggtaaaggctccccagggattgtaactgttctcccccgttcccagcatcaggaaagcgaaacagatgtggaagggcataaagcagacgagcacctgca

SEQ ID NO: 343676 - DNA, 122 bp, Homo sapiens
tcaccttcaagtcacctgggtacttaggtatccaactcaaaactacttttagttttgtttcgttttgccttttttttttctttaaccgataacccaattctagacggaacataaggtgcaag

SEQ ID NO: 343677 - DNA, 122 bp, Homo sapiens
caggcgggagggaagcagctaggcggggaggcggctgaggcggcagcggcggcagccagccggtgctccgacagcccggggcgcaccctagcctcgccgccctcagcctgggacttggggat

SEQ ID NO: 343678 - DNA, 122 bp, Homo sapiens
gtacaaaacgggacactgatcaaaatcaacttggacaagtgacaagagtgagtcttatgtcggtggatgtcttttaaggtcgttggagggaagaggacgggaggggtgtgccgaggggtagg

SEQ ID NO: 343679 - DNA, 122 bp, Homo sapiens
ggcgggtcaggctgtggccgttgaggatgcgccagagcatgcgtgccgcgatcttggtgtcgatccatagcaggcggaagccatggtagtagtgcttcagctcgtccagcacccgctgcccc

SEQ ID NO: 343680 - DNA, 122 bp, Homo sapiens
cagaatgaatgggaaagagtgacgctataaatatttactgagaagataactagattccttcgtgctgggccaattatgatgtactaaaatatattagtaaaatgcttaaaaaattgagagga

SEQ ID NO: 343681 - DNA, 122 bp, Homo sapiens
catgatcccagggcaccggctcgccgccgccgtgctcaactttcaaagctcgctcccgcgcgcgcgccgagtcgttcctgtggaccaatcacaacgtacagaatttcccactggccaaccac

SEQ ID NO: 343682 - DNA, 122 bp, Homo sapiens
attcttagcctgtcctaggcaattgtctgaaagtttagtcccagtccagactaccccctccgtgtatgctcagtctataacaagtagcaggggagagtgatctgttttaggaaaatattact

SEQ ID NO: 343683 - DNA, 122 bp, Homo sapiens
ggtgatgagtacccacatacaggaaggtggccattcggtctaggaccttcactgagtgaacgagctgctggaggcgacgggagttgatgaggccaccaaacaccgtagacacggagatggga

SEQ ID NO: 343684 - DNA, 122 bp, Homo sapiens
gatggttccacccgcactcagtcatgaaagtgtgacctgcacggatgctccgtcctccctcgctctggtctaaaggccctggacagtgcagagcgggtccacagccattggtggccccggct

SEQ ID NO: 343685 - DNA, 122 bp, Homo sapiens
ataaaacaaaaacagtcttacttgtcccattggtggccctcccatagggggcatcatctgcggcatcattccatgaggtacaggaggcatattcgctctctgacccatagggtgcattccca

SEQ ID NO: 343686 - DNA, 122 bp, Homo sapiens
gtcttacccatccgagtctcctccagcctgatgccagccaaacgacccctgccagcctggcggtggaggagaggccatcactgtttctcccatagtttatacgtccacgtggagagtgagct

SEQ ID NO: 343687 - DNA, 122 bp, Homo sapiens
tgatcacggctcactgcgacctcaaactcctggtctcacacgatcctcctgcctcgcctccgaaaactctagttttacagatatgaaccatagcgctagctcttactgtctttcttcaacac

SEQ ID NO: 343688 - DNA, 122 bp, Homo sapiens
caggaggctctcaaaatggagcgccggcatggggttgggctgcggaggggacagcatgggcggccttttggtatggatgcgcttcccaactgtcaggggctacgtgatggtgttcccagaga

SEQ ID NO: 343689 - DNA, 122 bp, Homo sapiens
cacaccaagttaggtgtatctcaggagcaccttgttcccagcagacagagggccgcagcacgtactgtgcgctcttgcatgaaattcccacccacagaggacgagctcgccaggcagctgtc

SEQ ID NO: 343690 - DNA, 122 bp, Homo sapiens
cactctagcttgggcaacaagagcgaaactcagtctcaaaaaaaaaaaaaaaaaaaaggccgatccaatttgttaaatgtgtgtatgtatgtatttttagtttttgagacggagttgctctg

SEQ ID NO: 343691 - DNA, 122 bp, Homo sapiens
tggcagtgacaaaacatggcatccatgtccgaaaccgcttcctattcagatgcactcctgcgcggcctacgggacgctgagcggtgacgatgatggagtgaggcgtggaccacagagctagt

SEQ ID NO: 343692 - DNA, 122 bp, Homo sapiens
ttcattagttccggcttgagggaagcgccttctttcacaatttcttttcattgttcattgcggatatctggaagccttccaggtcccctgaatgtagtagacacttcagcagccgtctccta

SEQ ID NO: 343693 - DNA, 122 bp, Homo sapiens
gagcctcactcaggcacggagcccacagagcgaggctgaggaggactccatgctgttgtccgtcgggaaaccggactactctggggcgcgctggagccaccattctgccagcagccggggag

SEQ ID NO: 343694 - DNA, 122 bp, Homo sapiens
tcgcctctccgtgtctctggctctctgcctggctcccttgggtctgtttctctctcctgccgcctctctctggccgcccctggctttatttctcgcgcgcttggggtctctcccagtctccg

SEQ ID NO: 343695 - DNA, 122 bp, Homo sapiens
ggtccttgatgagctcgtacagctgctctaggatccgctggcggccagaggtggggccgtcgggggccgcatggggaagtggccgcgtgcagcccccgggcaactcccaggccctggtgcgc

SEQ ID NO: 343696 - DNA, 122 bp, Homo sapiens
cgctctgtggcccggacaaccggtcctatgcagcgccgtccgaggcagttcgcggagaggcggcttaccttttaacccaggaatgcccatatcttgagaaaaagaacaacaagggggtgggc

SEQ ID NO: 343697 - DNA, 122 bp, Homo sapiens
tttttccaagaatcttttagtagacaatgatatacagaagccaagaactggccacaggtgcgctcaatgctaatggcatgccaatgcttctaggcttccagatcattttaatggacagatca

SEQ ID NO: 343698 - DNA, 122 bp, Homo sapiens
agaactaattcagtttttaaacaccagagcattcagacatctgatttgcatcccgctctccggtaagcagcatcataatttaaaaccctgccagtggagatgtatgggtagctgtgtcaggg

SEQ ID NO: 343699 - DNA, 122 bp, Homo sapiens
agggctgatattgatccgtgtttttccggtggtccggcgttgcagaagtggaaactgcagcgggctggtaagccctccgagccttctgtctaatttggcagaaaaacacagaatgtaggaca

SEQ ID NO: 343700 - DNA, 122 bp, Homo sapiens
atcaaggaaccatgtttgtagaaatccagtgcataggcattaagcgacattttccttcctcggttatcaaatttctgtgacaacagcactggagcctgagagcgattgacaccgattgtgcc

SEQ ID NO: 343701 - DNA, 122 bp, Homo sapiens
ccctatcttcccttatatggtgaaggcagttcctagaggagggggggtggggacaaaggtcgctcttctgcagccagcttgccacaattccctgagatctcccaggtggcagctgcctcccc

SEQ ID NO: 343702 - DNA, 122 bp, Homo sapiens
tctcagggcaggggctgtcttatatatacatgttctagccttcctgccaccgagtaggtgcgaaatcaatgttgtagtgttgaggaaacacttgaattttatttatttatttatttatttat

SEQ ID NO: 343703 - DNA, 122 bp, Homo sapiens
gtgccattgcgctgcttctcctcctttctggtggagtggttcacaggcttcccactggcccgggaccaggtcaggttcacggtccccttgctgggtgccaggtccaccaccagacaggtgat

SEQ ID NO: 343704 - DNA, 122 bp, Homo sapiens
taaggaatagcacaaaacaagatgcacccaaaacgtcaaggccatactggacaagggcaacgttagccatttttggtctggggtaattataggcagtatcttaaaacaaggcttgaaaaatg

SEQ ID NO: 343705 - DNA, 122 bp, Homo sapiens
cgcgctgggaggcagcttcgcggggctccagcccatggggctgctgtgggcgttggagcccgagaaagccttggtgcggctggtgaagcgcgacgtgcggacgcccttcgccgtggagctgg

SEQ ID NO: 343706 - DNA, 122 bp, Homo sapiens
cccccagccgcatcttctggccgacagtgcgaggcatacatgctgcgccacaagaccaagcgaggccatgcctccctggactgcctcaaggtgtttgacggcatcccaccgccctacgataa

SEQ ID NO: 343707 - DNA, 122 bp, Homo sapiens
tgtagaatcagatcatgtcctcgttctcgccacggcgcggaaagctaacaagagtcagcccggctgcaatctgcagtgctggcggttcccgttgaatgagtgaaattggtgtgagggtgaga

SEQ ID NO: 343708 - DNA, 122 bp, Homo sapiens
tcagtcatcatccggtgctgcactgcagcacaccttgggaggtgtgatcctaaggagtcacggagtctggagtcagatgactggattcacattcacgctctgctaccttttcgggtttgaca

SEQ ID NO: 343709 - DNA, 122 bp, Homo sapiens
acagagagggagcggctgcaagaggtaatgaggtatgtttgtgaaccttgtattcttttacggttacagatgtgtgtctacaagtgtgtgtgaatttgagttgatctcttttagtcaaaatg

SEQ ID NO: 343710 - DNA, 122 bp, Homo sapiens
acgacacattctgaaggagggaaataagctctgagctatatttagtgctgcatggctgtgcgtagcggacttatggcaagcgcgtgcatgcgaattcatcagatggaaacacaggcatgtgt

SEQ ID NO: 343711 - DNA, 122 bp, Homo sapiens
aggactctgcgggcgaagtggctgcgcaaggagagaacttttcctgcacaaggaacgcctcgtggggagacccaaggcaggagcggtccggagccggctgcggcgtgtgcggccggccttgg

SEQ ID NO: 343712 - DNA, 122 bp, Homo sapiens
gctggggggaactgcaagtctagtttacagggtttctcagctgagatgccaggaacacttcgcgagtgagcatgccaccacatttgagtgcatatagaaagttagctgtttgctacaactgg

SEQ ID NO: 343713 - DNA, 122 bp, Homo sapiens
caacgaggaagtggcaggcagcaccgcaaactaggtctcccctcttccctctttctgcagcgccttctgctagagaagctcatttggaagccactgtttttacgtgcctttgaaagttaacg

SEQ ID NO: 343714 - DNA, 122 bp, Homo sapiens
gtcgggacccatctggcccattgtgctgtgccctgctgtgcgttatcacatcaaggtgcgcgccggcagaggcttcagcctggagctcagggtggcgggcattcacaagaaggtgacccgga

SEQ ID NO: 343715 - DNA, 122 bp, Homo sapiens
ggagatagagactgcagttagctatgattgcaccactgcattccagcctggttgtcagagcgagaccctgactaaaattaaaaaaaaaaaaaacagtgggggcaaaggaccgcagggacaac

SEQ ID NO: 343716 - DNA, 122 bp, Homo sapiens
ccactggcgctagctgaggcgagactcaccttgagccgtggccccctcactgctgtaacccgggttccatggctgcatggacagctcaattttcatcagaagggagcctcaaaattctagca

SEQ ID NO: 343717 - DNA, 122 bp, Homo sapiens
gggagggggaaatgctatcaagacttttttcttttctttattttttttaagtgcagtaggcgcagagacgtgacactgcatgttgtgggggtagtattggtgttccagccaattctctcctg

SEQ ID NO: 343718 - DNA, 122 bp, Homo sapiens
tggggccttgatgctgcgtttttcggggagatggcttcttggggctggctgaggttgaggcggtatggccgctgtcatgtcgtccagaccattcagactgtcttctgtgggtccttgtgttt

SEQ ID NO: 343719 - DNA, 122 bp, Homo sapiens
attctccagcacccaggcatcagaactcaggactgtgcacttcaaacacccagcccccagcggcctagaactccactgcccacctgcctgggatccgggagacttgttctcctcaccaggtg

SEQ ID NO: 343720 - DNA, 122 bp, Homo sapiens
tgtggcaacaggctaacttaaattatgtaaggctagtgctttccagagtgtactggaggacgggaaacaagccccatttaagcagtgcctcgggatttgagttgcctgtgaaacgcagcagc

SEQ ID NO: 343721 - DNA, 122 bp, Homo sapiens
tagtctgtctacttcttatctcctagaccaaataggcttctgctcaaattttctctgcctcgagttttcttttcttctggaggcaacttctgagcaccagctctcctcgggccctatgtcac

SEQ ID NO: 343722 - DNA, 122 bp, Homo sapiens
ccgccccggccagcgcggagtagggaggagtggagggcgttgggagtggctgcagtgagccgagatggagccactccactacagcccaggggacagagcaagactcagtctcaaaaaaaaaa

SEQ ID NO: 343723 - DNA, 122 bp, Homo sapiens
aactcggcccgggcgcggcggggttaagacacccgggccttgagggccccgcctccggagcgctccacccgcgtgggggaagcctccccggaggctccgacctcgctcctgcttatgaccct

SEQ ID NO: 343724 - DNA, 122 bp, Homo sapiens
ctgagcacgcaaagccacagccgtccctgctatccccaccctggcctgacctccctaggtcgaaacccttgagagttgccccaggctcaccagagggcacagggtgagtgctgtgattccct

SEQ ID NO: 343725 - DNA, 122 bp, Homo sapiens
ccagctcaccagcagggagccagcagaccagggccccgggatgcccaggcacaccccggccgtcccagagcagtgcccacacagtgcgacgtcccccccaacagccgcttcgattgcgcccc

SEQ ID NO: 343726 - DNA, 122 bp, Homo sapiens
ccccttggtgttttagacaggcttgcctgggtaagcattttctctggaaatttcttactacgttggccctggcagagtgctaaatacctctctactttctggcaggaattccccatgttctg

SEQ ID NO: 343727 - DNA, 122 bp, Homo sapiens
ggatcttgctctcccagtgagggagcaactcgaggacaacttcgggacccacaggccaggcgtgtatctgctctggtgggcagcctgggtgcctggagtatcactgagtggcaaactgcttg

SEQ ID NO: 343728 - DNA, 122 bp, Homo sapiens
agaaacgactcctccggggagaatttccccctgcctggtcccctctcctagagagcccttcgccaaccctgggacagccccaaacgacagctcccgagcgccacccggaccagactccagtg

SEQ ID NO: 343729 - DNA, 122 bp, Homo sapiens
gagaaccgtatattgtcctgaagagcggtgatgacttaaaaataatgctcaataggattacgctgaggcccaccctaagtgagaaatttggtaggggatgttgggatcccgagatttctggc

SEQ ID NO: 343730 - DNA, 122 bp, Homo sapiens
cgggagacctccttggtttgggaggtgaaaggggtgaagagtagcccaagggagaggcctcggtgatttcccgacctctcctgtgaagcctgattcggaactcttccagctgcgaagaactt

SEQ ID NO: 343731 - DNA, 122 bp, Homo sapiens
cattcaatttcttcaaagatctatgtccacagttcaatgaccattatgaccaatttcatgcgtcatggaatgctatcctcctacctccctcacaaaggctcccccttcaccctctatcctat

SEQ ID NO: 343732 - DNA, 122 bp, Homo sapiens
cgtcttcctctgtggagttggcgtcggccactggctgtggggcaacctcagcctctccagcggacgctgcaccatccctatggtggagtctcagctttggggatccagggtgcctgccggat

SEQ ID NO: 343733 - DNA, 122 bp, Homo sapiens
agcgggaggcgggattgcccagacatccttcagcgaagtgcatgtgtgtttgtaaaccatcgttggctgtcgggagaccgcgaggaccggtccaggctgcggcggagtcgagggcgagggag

SEQ ID NO: 343734 - DNA, 122 bp, Homo sapiens
attgcccttggctggagctatctagcgggaggcggaggaccaggctctgttctgttcggccgggaagaagaccctaccgtcactccgccggtccctggctggcgccacaaagactagaagtc

SEQ ID NO: 343735 - DNA, 122 bp, Homo sapiens
aacagcctctctcaaaaccaaaacaaccaccataacacaagcgaggacaggagacggccgcggagtccagaacatcagaacatcggctcctctgtccccggggaataaacatttggaaaatc

SEQ ID NO: 343736 - DNA, 122 bp, Homo sapiens
cccagagggaggtagggagacaggggtcacctacctgctgcccgtagcctagcgccttgtcgtagagcgcgatgcctgccgccagcccccgcgcacgctcctctgggctggcgcagccgacg

SEQ ID NO: 343737 - DNA, 122 bp, Homo sapiens
agccaactcctcacccgcctggggactgcttggggcagcccatagtgggagccctggggccgctagattgaatcacttttctatttttggagcagcctatactcccctctgcctctggctta

SEQ ID NO: 343738 - DNA, 122 bp, Homo sapiens
gcccaccttctgccactgctccttagttcaggccgggtgaagggcggtgctggcagaacacggcacctgcggacgcctctgcatggccaccggccctcagtcgaggaacttgggtgagccac

SEQ ID NO: 343739 - DNA, 122 bp, Homo sapiens
atacaacccctttgagcatgagaactgtttcttaacgtaaaagacttcacccccacgtcacggttctggtgcttttagtatctgttaattgagaaaataactaaggaacaaaagcctccagg

SEQ ID NO: 343740 - DNA, 122 bp, Homo sapiens
ctctgcttcctgcctgtgtgtctcacacagattcctcttgctggaaccttttgtttccttcggaacagcctcaatctttgaaaagcaactgagccttaactctagtatgatggctcttgagt

SEQ ID NO: 343741 - DNA, 122 bp, Homo sapiens
taacttaagtacccacaaatcaggaagcattcccggatgaaaagcattcacagaaccatacgctggttcgccaccttcccggtgcaaaaaccctttcctcggaaattctcagcgcaaagact

SEQ ID NO: 343742 - DNA, 122 bp, Homo sapiens
agtagagaaggggtttctccatgttggtcaggctggtcttgaacacctcgggtgatccgccggactcagcctcccaatgtgctgggattattacaggtgtgaaccaccgtgcccggcctaga

SEQ ID NO: 343743 - DNA, 122 bp, Homo sapiens
ctccgtggaagggcacgccacctcgccgatgagattcacccagacccttgaccgagcatccgctgaggggtaaagcgcctgcggacgctatttcccatcagattttgtgcttcctgtgagcg

SEQ ID NO: 343744 - DNA, 122 bp, Homo sapiens
ctgctgagatttggaggaccagggcaagctgttgtagccactcacactgcaaccaagagacgccgcaactcggtccctcgcctgctttgtgcgttcgggagcagggagaggccagggaagct

SEQ ID NO: 343745 - DNA, 122 bp, Homo sapiens
acacccggggaactgcatcattaggaacagggcgtcagacattagaggggacggcgcagccggatgcccgccagtggcaggtgtgcctgctggcctggcttcccgtcctgctgcacacccgg

SEQ ID NO: 343746 - DNA, 122 bp, Homo sapiens
gggcagtgatctgttctgtcggcttgggaccagacttctgagtccacattccaacggtgccgcttcctagctatgaggccttatgcagtttccttcgctttttctgaatctcggattctctg

SEQ ID NO: 343747 - DNA, 122 bp, Homo sapiens
gggcgggcgcggcgcgggaggcgaccatgcgcggcgcgggggcgatcctgcggccggcggcgcgtggtgcccgggtgagcacccccgccctgcaccagcccccgtcccgaaccccagccggg

SEQ ID NO: 343748 - DNA, 122 bp, Homo sapiens
aatgagacctactgagcaagttcgtgttttaatcagggagacggacctgcgaacagatcacggccacacaatctggcaattgctctgatgaagattagtatggagtgtcatgaatgcacaca

SEQ ID NO: 343749 - DNA, 122 bp, Homo sapiens
tgtcaaatgctggtattgaatggggactgaggatgggtctcagagagcaacctcctccctcgtagagggagattatatccccaactccagggacctctttatctcaatctatttatttggca

SEQ ID NO: 343750 - DNA, 122 bp, Homo sapiens
aggtgttattaagtccctgtcacagaaaaaaatctgagaaacgaaggcctggtcagttgccgcctcctccacccagagagctgcactgtggcccgagggtccgaggacaaggtctcagctcc

SEQ ID NO: 343751 - DNA, 122 bp, Homo sapiens
gcgggccgttcgggcttggtttcctgggcgaccaccgctggctagtccgttagaggcgtgcgggcttcggaggcgtgcgggcttcgggtgccatggggactcctcccggcctgcagaccgac

SEQ ID NO: 343752 - DNA, 122 bp, Homo sapiens
attaaagcctaacctgaggtaatccctcaccggcagtgaagctcctctgctaggcactgtcgtcccgtacactgcccaagctctgggggtgtcacactaaactgtggtgatgtcacactagc

SEQ ID NO: 343753 - DNA, 122 bp, Homo sapiens
gagctactactttgcctgtagctgtttgtttgttcagaggcagatggaaggcagaggctgcgcagagaatggagagctgtgtctgaggagccttggaacattcacccaggtagaggaaggcc

SEQ ID NO: 343754 - DNA, 122 bp, Homo sapiens
ctggagtgcagtggtgtgtgtgatctcggctcaccgtagcctccgcctctggggctcaagcgcttctccgggctcggcctttcaaagtgctgggactacacgcgtgtgaggcactgtgcctg

SEQ ID NO: 343755 - DNA, 122 bp, Homo sapiens
cggggcagcgcgctgggcggagccgctccgtggcccctaacaaagggcgagctcattgcccggtgggaactgtgagttggtgtcagagtcctcctaggaactcagtatatgaaacttatcta

SEQ ID NO: 343756 - DNA, 122 bp, Homo sapiens
tctcctttcgaaggtcgaagggccgccacccctgggatccggcttctggcctgaagaggtcgttcataaaacagatggggcaaaacctgttttgggagccttcccagtgtccgcccccgctc

SEQ ID NO: 343757 - DNA, 122 bp, Homo sapiens
gcacagcttctccagtcaggcagggcctcatttcagatttctttgctgccacagctacagcgtcattttgctacgagggctcaggctttgagatctgatgtgtgcaacttctcaccatcacc

SEQ ID NO: 343758 - DNA, 122 bp, Homo sapiens
ctgcaaagccaagctgctgtggccaatgggggaaagggtgggtgtcagagaagaagagaacgtgctagagtccatgtctgcagcaatattggaatgtctaatggatggttcccaaagtggtg

SEQ ID NO: 343759 - DNA, 122 bp, Homo sapiens
ttttaccctttgaaaatgtacttcaaaaatacaagcagtcttctgagtaacaaacctctccgtggtatcttgccactgccctccatttccctggcctggactttgctttagctgcttaaatc

SEQ ID NO: 343760 - DNA, 122 bp, Homo sapiens
tccccctcggcggggcatctgcctgtggcttcggaaggtttccgtttccccaggccttaccgtggcgccaggttcccagcctgcagccggtgggcccctcgcttggccggctcgggtcttca

SEQ ID NO: 343761 - DNA, 122 bp, Homo sapiens
tatgttctcatccttgtttttatgcagttataaatgtgactataaaataatatgcctaatcgtcacgtatgcttctgggtctgcctcattattctgcataacatttttccagtcacagttct

SEQ ID NO: 343762 - DNA, 122 bp, Homo sapiens
cacaaagcctggggttctaaagggtgcactgtggctttgagtgtcgtcagggacatccgtcgctgcatccgtgcctgtctgggagttgagggtttgtggccagcggcaggtgcatggctggt

SEQ ID NO: 343763 - DNA, 122 bp, Homo sapiens
tattaaaacacggtgaccagatcgctgcttcgggcctcctgaactcccgcctctcccacccggaaagtactgacccagagaggacacacctttgcttctgcgcagcccaacttctgcaagcg

SEQ ID NO: 343764 - DNA, 122 bp, Homo sapiens
gactccaaacgtgatcagaggggtcgacgcgtcccaggatgagtggttcccggggctgggcgttgccacgggccttgcatggattttgctgatgaatctcagggctctgaggctggcgctca

SEQ ID NO: 343765 - DNA, 122 bp, Homo sapiens
agaagacgagtaagcatccgagtgcacgagagtggagccggagccacgtggaggcagggccggcccgtctatctgttgttgagctgtggagagccggtaccatcctcctcttcctccttgtc

SEQ ID NO: 343766 - DNA, 122 bp, Homo sapiens
cagcgggcgcgcgccgttccgggcaggcggcggggcgcgcggcacccgaggttgaaaggacggtagcagatgttgcagtccagctcgccccgctccggaagagagggtaccctcaccaagag

SEQ ID NO: 343767 - DNA, 122 bp, Homo sapiens
ttcaccatctgcttcttgcttattttattttaagctgcatgactaaactttattatctgacggacgggtgaaggtgggccctgctgctgctgtgctctactccttgaggcttggaatgaatg

SEQ ID NO: 343768 - DNA, 122 bp, Homo sapiens
cgccactgatctgagctcaggcggtaatgcttgctcacctcctgctgtgtagcccagcaccgtgggttggggacccctgccctagggcatgaatatatttacaaaagagaagcagctgaaag

SEQ ID NO: 343769 - DNA, 122 bp, Homo sapiens
ggggctcgggcggccgggaggaatcgcagatcctggcctgtagctgccgcgtgccctcagcgtgtctgtgtgagtgcctcagggtgtatttctgtgagtgtgtctctgagtctcagtatccc

SEQ ID NO: 343770 - DNA, 122 bp, Homo sapiens
tgaagctgacaatcttaagagaccttagagccgccaagctcaggttagtccgttaagcgccgcccagccagtcctccccgtcacagggggcgctgtccgccttcctctcgcctacacaaaga

SEQ ID NO: 343771 - DNA, 122 bp, Homo sapiens
gcgtctgctcgctctggtgactcatccagagtgagaaaagcctttttgttgtttgatgctcgctggaggctctgtagcctgagaacctggcccgatggggccttccctgctgagactcctgg

SEQ ID NO: 343772 - DNA, 122 bp, Homo sapiens
aagcctccgaaataaaacaaaagggcgagacaagagccagctgagagcaggatgaaatagcgttttttggcctgcatgtgtcctgcctgggtcaagaggattgtaaataaacacaagaatca

SEQ ID NO: 343773 - DNA, 122 bp, Homo sapiens
gccggtgcagatacggggttgctcttttgctcataagaggggcttcgctggcagtctgaacggcaagcttgagtcaggacccttaattaagatcctcaattggctggagggcagatctcgcg

SEQ ID NO: 343774 - DNA, 122 bp, Homo sapiens
gaggcttcattttatcatctgtggaaatgcaagatgttagagcacctaggagggtcttaacgtgcaaaacactgtcttgaggctgcctgcagaacagagggtcatctgctttcattagattc

SEQ ID NO: 343775 - DNA, 122 bp, Homo sapiens
cgaatcacggcgtggggcctgcagctatacctgcagtcccctcactgtggtggatctcatcgtggacatcatgttcgtcgtggacatcgtcatcaacttccgcaccacctatgtcaacacca

SEQ ID NO: 343776 - DNA, 122 bp, Homo sapiens
gcggccgcacgctcaggggcgtggcatgggtgggtcgtgagttgggcggggcccacagggcgtgcgcgacgcagcggcgcggcgcgtggcgtaaggggcgtggcgccagtgggcgtggcgtg

SEQ ID NO: 343777 - DNA, 122 bp, Homo sapiens
aagtggcaaaaccctacctctaaaaacatacaacatattagctgggtgtggtggtgcatgcggtcccagctattcgggaggctgaggtaagaggatccctgagcttgggaggtggaggctgc

SEQ ID NO: 343778 - DNA, 122 bp, Homo sapiens
taagaaaatccatgtggcagcggccaaccggaaacagttttgtcccaggctgcacagggtcggaggccccaaggtcaccggggccactgcccgtcacaggtccaccttgaccccctttatga

SEQ ID NO: 343779 - DNA, 122 bp, Homo sapiens
gactccagagttctgaaaacacaaacctgacttctccagctgaggagaaagaaaacctaccgctgcacctgttcctgggacctgtcccgccctcagtgagtcccgagcgccccctggtagcc

SEQ ID NO: 343780 - DNA, 122 bp, Homo sapiens
ggtatccacggtggcggttgtgacaaagttctccgccagatctttcaagtactcctgcctcgttcgagtggccattgctcgaaacttttctgatttatgggctgcattttctgcattgatta

SEQ ID NO: 343781 - DNA, 122 bp, Homo sapiens
cgtagagttacagcttttcttttcaaaacgaaccttcagtttggagccgaagcggaagcacgtggcgtctgacgtctccagggagacccgccgccctcgctgccgcctcaccgcgcttctgt

SEQ ID NO: 343782 - DNA, 122 bp, Homo sapiens
cgcgtcccggattcggtacccggaaccgtgcagacgtggtctatggagcccgggccatctcgcccccgcggctcccgaagccgaagaacttcttggtggtggtgacttctcagacccccaac

SEQ ID NO: 343783 - DNA, 122 bp, Homo sapiens
aagttgccgccctgcaggccaagacccggagcatggaggacgaccccatccaccacaagacgccgttccgggggcctcaggcgcgggtggtgcagaggtgcggcggcgggtgcccggagggg

SEQ ID NO: 343784 - DNA, 122 bp, Homo sapiens
ctactatcctgtctcacatgccatcaccctttgcctggactatgacaataacttccttgtcggtttcccctgtctactccagctccacgccactctgtcctccatactgcaaccagaatggt

SEQ ID NO: 343785 - DNA, 122 bp, Homo sapiens
ggaaccatatggaagcctgtgcgcctcacagggaaactgtcaggagccggggagccacgccgcgcgtgggaagcgggggctcatgcgtggtgccatgatccgccccgcgctggggagaacat

SEQ ID NO: 343786 - DNA, 122 bp, Homo sapiens
ttttactgtcaccagtttatagttcagagatgaccttcccaaggacacagagctagtgatcgtggaagcagagctagaatctcgtcccctctggctctaaagtctgggcttgctgcgtgggc

SEQ ID NO: 343787 - DNA, 122 bp, Homo sapiens
cctgatgagccccaggatccccgctggcctagcccggccttgcgtggtatctgctatgggcgtccggaagggtccggagttatgggtgcaggggatggagcagaaacggccatgacagagag

SEQ ID NO: 343788 - DNA, 122 bp, Homo sapiens
gcagctagcgcagtgaagtttggcggcggaggggccgggcgtcccggggtcgcgaggaggcggcggcggcgcggggaccggggccatgggggcgggcgcgggctgcggagcgggcgcggagg

SEQ ID NO: 343789 - DNA, 122 bp, Homo sapiens
tgagaatgatcatgctggcaaggaagacatatatatgagatgggttatcctttacacctacgtcagctaaaaccgtctcctacgaacaaatccagcacttggcactttattcgacggtccta

SEQ ID NO: 343790 - DNA, 122 bp, Homo sapiens
cctcccgcgttgctcgccgcgtttgctgcagcggcgcaggcgagatcagctccggatctgcggccgagccggggttacgccggcaaaaccgcccccagctttgcatttccggactttttaaa

SEQ ID NO: 343791 - DNA, 122 bp, Homo sapiens
aagggtgtttcaggtagaaaattcagcaagtacaaaagtcctaagactaaaacatgtctacgttatagaaacaagaaagccagtatggggcagaagcagaacaaacaagggacaatattaaa

SEQ ID NO: 343792 - DNA, 122 bp, Homo sapiens
cgggtccgagcccacagcccaccgctggcagctgggcgctgccgaggccaggggcacgcacgattggcacctgccagtgccaagactgtgccgcccccacaaccaaggcgccaaagggggtc

SEQ ID NO: 343793 - DNA, 122 bp, Homo sapiens
cagctgaggtcctctgaaagccagcgtgtgggctgtcacgcttcctttacagggaagcagcgcccgtgcgtgaggcggttcctggcttttaccgccctctgcccgttctggcaatcgcgccc

SEQ ID NO: 343794 - DNA, 122 bp, Homo sapiens
aggacgatttgggcctgcagaggccgccgggaggcgcaagatgggcctagaggaacccaccgaccggaggccgttgggggcctggagacgccgtcggagggcaggagctgagcctggagagg

SEQ ID NO: 343795 - DNA, 122 bp, Homo sapiens
ttcgttctacaggactagttttataaaggaacctacagtgaacttcaaaactgaaagacacgcttgtgttccaggtctgaagacttggatttctgggtctttattgtattttagattttgac

SEQ ID NO: 343796 - DNA, 122 bp, Homo sapiens
accgaggaccggatgtggcgatcttacggtgcgacagtcctcttctcaggccctctggcccgagagcctgttgactctgtgacacactctgaggagctggttgtggtgttttccagcgaggg

SEQ ID NO: 343797 - DNA, 122 bp, Homo sapiens
atttagtattagcaaaaaattcttcaggcagaaggccaaggatgctacatgcaggcgcagcgcccagggaaggggtgggcagccgtggggcgaatgcgcaggcagagctgccgagcacagct

SEQ ID NO: 343798 - DNA, 122 bp, Homo sapiens
atggattttaaaaacaggatctggcagcagccaatgggaggccccaacagctcgtgctggcgcacacagcgggaggggagggagcccaggatgtgcacgcaccctctccctcatccaccgct

SEQ ID NO: 343799 - DNA, 122 bp, Homo sapiens
ccgctgcgccgcgggaatcgcgcgcgccgggctggcgtggagttgccagggacacggcggcgcagtgtcggccctttgtgtatttctttccagagggcgcacctgtctgctcccttcccccc

SEQ ID NO: 343800 - DNA, 122 bp, Homo sapiens
caggcaggaggggcgggagccgcagagccaagggattccgggttccagacccggctcggccgcctcgtgcaaatcgctgctcttacccgaaagtcgtgggcagtgtccttcaccggctgcac

SEQ ID NO: 343801 - DNA, 122 bp, Homo sapiens
ggatcaaaccactgacccttccagggtggaagagacctaaggtagtcagcttccatcaagcggccagttggtctcattgaggaatggtgtcacatcaagggctcagtgttggtctctgttgc

SEQ ID NO: 343802 - DNA, 122 bp, Homo sapiens
ggcactggggatccaggacccgcgagccccggcacgctttccaggcggcgctgtagtttccgctcccgaggaaagtgcacccgcctcgctagctgcgggcgcctcttcatagagagacgccc

SEQ ID NO: 343803 - DNA, 122 bp, Homo sapiens
aaacttttcacaggaggccaagaaatagctctcttggccatgccgtaaaagactgagagccgagtggagcagaaaaattaactcctagaagttctgcaaatacctgtgtgctaagtttcaag

SEQ ID NO: 343804 - DNA, 122 bp, Homo sapiens
taaacagcttttattcttttatcagagacacgatctagctttttagcccaggccggagtgcggtggcatcctcacagctcgctgcagcttcactgggctcaggcgatcctctcgagtagctg

SEQ ID NO: 343805 - DNA, 122 bp, Homo sapiens
aatcttgcagacctctcaaatctcgagagtgatctctcactagacacagggctgggggatcgtgggcgagttctctctggagtaggtgaccttctttctgtgtcatcttcgtattcctcagc

SEQ ID NO: 343806 - DNA, 122 bp, Homo sapiens
caagtccccaccagactcaggagtccagctggcttcacccagtggatgccgcacggggttcgcaggtggagctgcctgccagtcccgcgccgtgcgcccgcacttctcagcccttgggcggt

SEQ ID NO: 343807 - DNA, 122 bp, Homo sapiens
ccggttttaccataggaaaaacgataatattccggatcttctcccagttttttcccctcacgtggtatatttctttgagacttctcagtgattgtttgttttcggccagggtgaatgattta

SEQ ID NO: 343808 - DNA, 122 bp, Homo sapiens
aaaacccagccttgtaaataaatactaaatatatatgaacagagacgacagcgagcaacgcggaggaggggaagggggtggggggctgcgggtgggggggcgcgagggtgtgggtagcagcc

SEQ ID NO: 343809 - DNA, 122 bp, Homo sapiens
cggaacttccaaatccacagctggcgcctcagctcccgcactgcgcatgtccggagcgtgcgcaagaaacttggtcccactgaccgccccacccctgcccactaaagaattacagggcccgc

SEQ ID NO: 343810 - DNA, 122 bp, Homo sapiens
cgaggggaaaggacagccttctcgggcggagggctggagctggtcctggcagccttgacccggagacaggcagtcaggcgtgaccgcacggacccgtttctcgtaggctaggttttcctacc

SEQ ID NO: 343811 - DNA, 122 bp, Homo sapiens
ttcaagacagggaggtaggggatcctgagctctgggcggttggttcacctagcagctccccgtccccagctgggaggcatttgttctgcattctgcacgatgattacagccctgccaaggtt

SEQ ID NO: 343812 - DNA, 122 bp, Homo sapiens
cctgagcgctgggcccgggcgggaaagcccgcgagcgcccccagtggccgcagtcgccgccgcctcctgctgggggtcatcccaggggagctgccggcctgaatctccccagcccctgggcc

SEQ ID NO: 343813 - DNA, 122 bp, Homo sapiens
aaaacataagattatgttttagaaacaaccagtaatacacctcacaaagacattcctattcgtggcagctaacatgtttcctgagcaacggtctttattcatcaaactctccaccaggtggt

SEQ ID NO: 343814 - DNA, 122 bp, Homo sapiens
acgtaagctgacgtggaaatctatccccatccttagcagggaggtgctggtcatgtgacccgatgttgaaattgacaagctgctagctagtccgggccttttccccccccctttcctttttt

SEQ ID NO: 343815 - DNA, 122 bp, Homo sapiens
aggaccgtataaaaagttaaagaagacttactgctcacctgaccacccttctcatagacccgaaagttagattttactttctgatttttcacaatttctcctggatgctgcggtcccgcccc

SEQ ID NO: 343816 - DNA, 122 bp, Homo sapiens
cggaaacgcctcgtacctgttagccacctggtgtgtacgagtgcgcacgggcgactgtagcgtgcgtgtgaaatggggggaggaccatgccagttggtaactcagagtgcaatgtagttagt

SEQ ID NO: 343817 - DNA, 122 bp, Homo sapiens
aaagtgaaagccgcagctctctggggtttttaccctccgttgaaaacgtagggcgaaaatcgcagctgcaaagggcccgcggctctgtgcggttccatccccaagtctctgccaggagccga

SEQ ID NO: 343818 - DNA, 122 bp, Homo sapiens
tctggagctgaggactcgggaaaccatgcaattgaggcaagccttgggctgctttagaggcgctgacatccgaggagacttctcctgggtatgctgcatcttcgtggggggcccatcaggct

SEQ ID NO: 343819 - DNA, 122 bp, Homo sapiens
actattttcacagccccaccatgaactgggcctacagctctggaggaaaggactccagtacgggttttccagccagccttccctgggcagggctgaactaccccctggaagaacattttaat

SEQ ID NO: 343820 - DNA, 122 bp, Homo sapiens
acgggaaaacttgtcagcgattagccatccataaaaatgttctcccagcgctcctccttccgatcacaaagctggcgtcaggcagtctcctgtatctgcttcccacctcgccccctcccctc

SEQ ID NO: 343821 - DNA, 122 bp, Homo sapiens
gcatgtaatataaccagctcttaatacatgctcccaccatcagtgcataagagttccagacgctctgcattcttatcaactaagtattctcagtctttttaaatgttagccatacgaaggca

SEQ ID NO: 343822 - DNA, 122 bp, Homo sapiens
ccgagttgttgaccgccttaatctcgtgtccatagagcaaaacgtctgctcagatggatgcgaggcacagcgtccgcccacgctgctgtttttaatccatctcagtagagttgaacccattc

SEQ ID NO: 343823 - DNA, 122 bp, Homo sapiens
tggaaaaagatctttaggagcagaaaaggggagtgctaactgggggagcgagaagggagacgagcaaaagaaacaaaatcttgccacgtggctctgttttgtcagcaagaggatttaagact

SEQ ID NO: 343824 - DNA, 122 bp, Homo sapiens
ggctcttgctctgagaaccccagcaagtgtctccggggttgaggctcccccttgttcatccgaggagagatgggagctgaaggaggctcactgatgctgtggataaagaaggactgagcaca

SEQ ID NO: 343825 - DNA, 122 bp, Homo sapiens
ccagcaaggtttgagaaacactgttttcccattgggggaaacatttattttttaaataaacgagccaatatattttaaaaaagagagtttggttggtgccagatgtagcttcactctcaacc

SEQ ID NO: 343826 - DNA, 122 bp, Homo sapiens
cagctgctcctccagctgctccttggtgaggcccggaggcaggcggcggatgaccagctgcggggagcgcggccgttcccacaggggcggagcgtggacaaggagctcaaaaggcaccgcgt

SEQ ID NO: 343827 - DNA, 122 bp, Homo sapiens
ttcctgtgcgctggatgctgattggtccgacagtcggaagtgagggcgggcggtgggggccgttgccgcagtgacagtgctaggggagtccgaagatggcggcgtcgcgtcgctctcagcat

SEQ ID NO: 343828 - DNA, 122 bp, Homo sapiens
tgtcgctaatgtctgaaaaacttctacctttaatcattctcggaagagccggcaaacaagcggccctttccttttgcaattatgtgcctggtagccgctgcccggccggcgagcgggaaggc

SEQ ID NO: 343829 - DNA, 122 bp, Homo sapiens
caggaaccgcggtgggccgacaaccgaacctcaggcccccagcaccctcccaggaaccgccgtggccgacgaccgaacctcaggcccccagcaccctcccaggaaccgccgcggccgacgac

SEQ ID NO: 343830 - DNA, 122 bp, Homo sapiens
caccatatgctggtgaacaatcttgtcaccaacacgattctggaactccagtagcattgtcgcagccgccacttactcagatgttatagagagacttcaaaatgtcatgcaagtatttattt

SEQ ID NO: 343831 - DNA, 122 bp, Homo sapiens
ttctctcgcacgatccggccaagagatggcggggtggcgggaggggcgctctggcgaccccggaagcgagaagcaggcctctgcagggccagggatgaaggtgcaagggaaagccctgggac

SEQ ID NO: 343832 - DNA, 122 bp, Homo sapiens
ttccactcaccttttcatacagaggactacactgaaagattttgcagagggttgtatgtacgtctaaacacctggcacctagtaggtgcatgtcactttggtaaatgaaagaactgaaaaac

SEQ ID NO: 343833 - DNA, 122 bp, Homo sapiens
ccagcactcagtcacagaatgtcatcacccccgaatcccagccgaggtcagggccttccgcgcgctccctcgtgcttttcactgtctgagtgattaacggagaggctggctgtttactacac

SEQ ID NO: 343834 - DNA, 122 bp, Homo sapiens
aaaggttatcagcaacggaaattccaacagctcctcgctgctgcccatcggaatattgaacgactgccaggttgtcctcttatctagtcagagtgccctggcctgcattcggtctctgggcc

SEQ ID NO: 343835 - DNA, 122 bp, Homo sapiens
aaggggtcctcgaagggcctgccgcctgtgcagccgccctccgcccccgcctcgccatagcggtcatagatatcgcgtttcttggcgtccgacaacacctcgtaggcctcggccacctgctt

SEQ ID NO: 343836 - DNA, 122 bp, Homo sapiens
acccttaagagatggagtgtccagaatttcagggcactctccacattggacatgtagccccgaagatttctcctggtccttaaaatgccagtacggcataaaggcagacaatgggactttag

SEQ ID NO: 343837 - DNA, 122 bp, Homo sapiens
ggcaggtctgatgatagttcgacttttatgggcgaagtgccacaagagaccagccagggtcggggaccttgttcttaaactttccagattgtccccaggctcgcgtcgctcccgggaacggc

SEQ ID NO: 343838 - DNA, 122 bp, Homo sapiens
cactgctcttaaaggcaatatgctcttttcttagcacaagagaattgactatttttaaaacgaaagcaacagactccccattaaagcattatgaaaactcattgtattgcacatgcaattag

SEQ ID NO: 343839 - DNA, 122 bp, Homo sapiens
gaaaatactttcttacctgaggctatcaaacgggaggaaaagcgaaggaataagtaataacggtttttgccttgacagatttttgtttgctttcgctccctaatctggactgaaagattccc

SEQ ID NO: 343840 - DNA, 122 bp, Homo sapiens
ttgttccttctgacgttcggatgtgttcggagtttctttctttaggcgggttcgtggtctcgcgggatcaggagtgaagctgcagaccttcacggtgagtgttacagcttttaaagtggcgc

SEQ ID NO: 343841 - DNA, 122 bp, Homo sapiens
aacaaacctcggcgaattgtgggatgcgtagttatcttcagtggcgcccggaggtggccacggaggggtgcgcagggggcgcgggaatgcgacggaaacccagagtcaaggcccgcatctgg

SEQ ID NO: 343842 - DNA, 122 bp, Homo sapiens
aattccagggtcctgagatttgcacatattctactttgctgtgtaattccaaacccgttccgaagtgaccacctaaatgtatactacagagagttatgaatgagagttctacttcctctaca

SEQ ID NO: 343843 - DNA, 122 bp, Homo sapiens
catcgatcctgccgttaatgacataaccttctcccctaattaactgacaactgcattaggcggcgcgcctccgccgcacgccgcccacagcttcccccacgcagttccgcccgcgccggtgc

SEQ ID NO: 343844 - DNA, 122 bp, Homo sapiens
cttctcagttctctgagaaaacagaagctcttaaacaaggacttctcatctccttttttccgcagatctatcgagctgcctttggctattcctgtatcctcagattctcattattactggag

SEQ ID NO: 343845 - DNA, 122 bp, Homo sapiens
agctcagtaaccatcagggacaaaaaccacaggctgtggatgacagagcagggtcggaggcgcttgagagccgtcacttctttgggtggccgtggcagccctgcactgccggcctctctcta

SEQ ID NO: 343846 - DNA, 122 bp, Homo sapiens
aggggcgccagaaactcaactagaggacacagcagcttcaggaacactggtgaattccgccggacttgccgggacgcggctctttggaaaacgacctaatctttgggagaacgcccctctgc

SEQ ID NO: 343847 - DNA, 122 bp, Homo sapiens
ctttgtcaacggacatgagaatgctgtttggccaatgaccatagtctgccctccagggcccgtgaagatggaagagaccttgggcagagtgaagggcagtgccaggcctggcgcagctactc

SEQ ID NO: 343848 - DNA, 122 bp, Homo sapiens
agaacttggccttttccaaaaattttctgcccttggttttggggatcatttgggcaagcccgaggtgctgtgcatgggggctcctggaatcctgggaagggcagaaagccttggccccagac

SEQ ID NO: 343849 - DNA, 122 bp, Homo sapiens
actaataatacaatcatcatcacgccaccttctatttgggaagcactttacaatttgtgccgagttttgtcacacactgccttgctgacttcatcacatcgccaaagcagaattcatggatg

SEQ ID NO: 343850 - DNA, 122 bp, Homo sapiens
tgtcagcggagaggtttggggggatgtttttttcctggctcaccgtccgtttgccagatccgtgccttctggtctacaggtttgattgacccgttgcgtggtgactcatgcttctgcttttc

SEQ ID NO: 343851 - DNA, 122 bp, Homo sapiens
cctcctcttccaggtgggctgcccagcttctgcttggggaatccgacttgctgtgcatcccgatgaggaagctgtaaaagaacagaggtcagcatcagtagagggtcctgggactggggctc

SEQ ID NO: 343852 - DNA, 122 bp, Homo sapiens
ccagcaactccacagcaccccgggttcaggcgcagggcctgctgggaaggcactggcttccgcgggacgaccccagccttctctttggcctcaccgctttttttccccaccctgccttgttg

SEQ ID NO: 343853 - DNA, 122 bp, Homo sapiens
cgtggtcttcctactcgagctggacccctggtctccgaaggtgagatgcaggctctggggcgtgcagcggcccttctccaagccactctcgggctgtgctgtccaaggctgtgcgggaggag

SEQ ID NO: 343854 - DNA, 122 bp, Homo sapiens
ctgttatccaggccagacaaagacatttcctccattttcatttgtaaactcttgtggagacggcgctctgactgctcatagcacagcgggcggcaacacggctgcacacacgggggtggggg

SEQ ID NO: 343855 - DNA, 122 bp, Homo sapiens
cccttgtgggatccctggtgtcacggtgaagggctctgcctggggaaggttcctgccgtgcgggtccctccggtgctctgtcgttccgggctccctgtgtcaccacggaggctcctctctcg

SEQ ID NO: 343856 - DNA, 122 bp, Homo sapiens
ccatctcagtcccataaatacctgaacctatcctaaaagttgcagaagaaatttctgcttcgattgggatgttgggcaaaatgagctctccaattttacccagctctaagattcaacactaa

SEQ ID NO: 343857 - DNA, 122 bp, Homo sapiens
ctacccagacacgattcagttcggctctatttagaaagatgaattaaaagctagcactgccgtacatccaaccctttggattaggaaaatagtcagagtgcaggtgtggcataatatgcaac

SEQ ID NO: 343858 - DNA, 122 bp, Homo sapiens
acagaacccactgccggactcccaccaccagagcctgcagaagagctggtactataaacccgcctgctcattgaactaaacgcggactgagaactaaattggtggctcatgtttgctggagc

SEQ ID NO: 343859 - DNA, 122 bp, Homo sapiens
gggagggccaagctacagctatttgctaccaaacacctttttcctattaactaagcataccgcccagctgggcaggaacaggctgagggcctgacaagcagggagccaggctcctgccaaca

SEQ ID NO: 343860 - DNA, 122 bp, Homo sapiens
ccagaaaggagattgagaagggtctggagcacgggattaagtctaaaaagaaaggtagagcggtgtgatgattaggtccgaatcctgggttcggtctcaatccgctgtttagcctctcctac

SEQ ID NO: 343861 - DNA, 122 bp, Homo sapiens
tgaatatagatgccattacattatttagttacgttacaaagcaaacggcaggttcataaacgttgttctattatgtatcaactgaaaaaaatatattcaaaaaaaaagtttttgaagactca

SEQ ID NO: 343862 - DNA, 122 bp, Homo sapiens
tggcggctgggttcaagtgagtgttggcgggtggcgggtagagttctgtaccctggcggacggcagcttcctttaactcttagctgggattctctcacctggaggccgaccccgttggggtg

SEQ ID NO: 343863 - DNA, 122 bp, Homo sapiens
ttgtcaggagcgctggtggtttaggttctccacagacgcaggaaaacatcagtcacgaggcgaatgtcccagtcagtgtgcatgctgcacagacctgttgctgcacttgtctgttgttacgc

SEQ ID NO: 343864 - DNA, 122 bp, Homo sapiens
gttcttttttcacaaagtgagagaaggtctaaggtctattaacctgaactggatctacaacgaagctggatctttaagatacaatgtatttttgtttcctgaatgttcaatggtcaaaaggc

SEQ ID NO: 343865 - DNA, 122 bp, Homo sapiens
ggaagaatggaaaaacaaagagcatgcctgtgcctttcagggaagcgctcataagttgcacgtgccgctttctctctgcattagcagaattagccatatgaccacacctagctgcaaaggtg

SEQ ID NO: 343866 - DNA, 122 bp, Homo sapiens
ccgccctccccccgacgctgcgagcctcctcgctccgcgcggggaccgtccagtcacgcacggggaggggtcacattcctcggtcccagcccctgagtccaaccactggcgggggggtgggg

SEQ ID NO: 343867 - DNA, 122 bp, Homo sapiens
ggatgtgtgacagacagaagggtgaggaccagtgtgcacgcgtcctctctaaagagaacacgcatcactcagctctccaattgctgtcaggcaggaactggacccagtattatatgtggata

SEQ ID NO: 343868 - DNA, 122 bp, Homo sapiens
ggcagccagaaaggcagctccaagttgtggatttcctgggggctcttcatttaaagcggccgcaccactttccacaattctgttttttcagagaatgctctcaaggcctggagggagggcat

SEQ ID NO: 343869 - DNA, 122 bp, Homo sapiens
cgccagaaaggtagactgagtcccagggagctgcgccgctaacagcccacctcctagccccgggctacgcgccgccagcccagtaaccccacttttgtgtgtcctcccaggccccgatcgaa

SEQ ID NO: 343870 - DNA, 122 bp, Homo sapiens
gctccgcagcggccgcccctggagcccggatgcagggaccagctctgctgcctgacgccgcggccgacatcagggccacttccggtccgcacccagccctcgctgcccctcaggaacgaccc

SEQ ID NO: 343871 - DNA, 122 bp, Homo sapiens
atccggaggctcacagcagcccctgagggagattggccaagggagactggccaaggcggccgggagcttccaactgagggaggccccgaggcctgcaggtgcctttctcttgctctgaatga

SEQ ID NO: 343872 - DNA, 122 bp, Homo sapiens
cttctcggccccctccaactgtgcattggccagccggagggcctccaggtcccgccgcagcgcctggcgctcagcctccagctcgcccagctcactctccaaggtctgcgtcttgtggctgc

SEQ ID NO: 343873 - DNA, 122 bp, Homo sapiens
gaaggagagaagaaaagaatgtcagaagaatgctggattctgcattttcagaagggggtgcgggcagggattaaaaaggtagtgaaatagtcagggggcatctaccaaagtaagctgagcaa

SEQ ID NO: 343874 - DNA, 122 bp, Homo sapiens
tgtggctccccaagtcccgcctctcttctcagagctcacctgtgtccctccttaggatggcgccgccttttcaagggctgagcactggctcccctccaggccccgcccccggtcccctggcc

SEQ ID NO: 343875 - DNA, 122 bp, Homo sapiens
tgctggggccagcaggctgcgtgtgcagcggggccagctgtctcagggctgatatgtagacgtgtattctgtttacaattagttccccaactctgtggggaagaacttaagcggttttagtg

SEQ ID NO: 343876 - DNA, 122 bp, Homo sapiens
tcccttggcctcgctctctgcccagccccgggctccttttctccacacgtggctgtcaagcgccttctgtatgccccacactcctgggagcttgggctacatcgatgaacaaaaacaaagga

SEQ ID NO: 343877 - DNA, 122 bp, Homo sapiens
cttcaccacgtgtgtggacattcgctggcggtggatgctggttatcttctgcctggctttcgtcctgtcatggctgttttttggctgtgtgttttggttgatagctctgctccatggggacc

SEQ ID NO: 343878 - DNA, 122 bp, Homo sapiens
tatgatcaggcaggaatcagccccccagagcgtgaccgggcaggaatcagtctcccagagcgtgatcaggcagggatcagtcccctcagagagcctcccggagcacggtcaggcaggaatca

SEQ ID NO: 343879 - DNA, 122 bp, Homo sapiens
cttctgaaggccaggggtgggctacattttttggagagtaggaagcccaggggtcctcttcgtgctgctcctgagaacagaaggtagatagggtatgaagaggcagccgttgctagggctgc

SEQ ID NO: 343880 - DNA, 122 bp, Homo sapiens
cacctgctgatcagacaagccagttgtcatcaagggtcttcacctacttggtcccatggccgatactgttgacccctccatcttcacagctgccatgagctttcctgtctggattttcccct

SEQ ID NO: 343881 - DNA, 122 bp, Homo sapiens
actgactgtcaaaaagaaaggagggggtggggaggaagagtatctcttctgcagcaaaatcggcatcttggagtggattccagttatacatgcgtaaataatcccattgattcacatttttg

SEQ ID NO: 343882 - DNA, 122 bp, Homo sapiens
gcgtccacgcgcgtcgcctcctcttaggtggcctccattctgcagttggggaaagcgaggcgcagaggagggttaagggacctcctcactgtcccggccagggaggggcggatccgcactcc

SEQ ID NO: 343883 - DNA, 122 bp, Homo sapiens
tcggatgcctgggtccacccgctgagaagccagttgtcgtccctgggctgtggaaccaagcggcagacgcggtccgttggcgggccctcgcgcgggcccccagagatgctgatgggtaagga

SEQ ID NO: 343884 - DNA, 122 bp, Homo sapiens
agcctgcacacgtctcgggtcctaaaagcctcccagtgggcaagtgtggtctggaaattccgtgaagactttaccgagaagttacttcgagaccattctctaggaaacgacactacccagac

SEQ ID NO: 343885 - DNA, 122 bp, Homo sapiens
tttctgaaatcaaaagatcctctcaatgaagtccagcagccccatcctctctttctaacacgcttacctggatcaaaataatttagcatagttatctgtgtctaacatgatctcccaggaaa

SEQ ID NO: 343886 - DNA, 122 bp, Homo sapiens
cgccccggtgaccttctgggtagcacaggccgaaggcgggcgggcagcaggaaggcaggccgccggccccccagacttgtctcctagggcaccgtcccgcgggtgcccccgtggccgcccag

SEQ ID NO: 343887 - DNA, 122 bp, Homo sapiens
cctcccccgccccggactcgcacactcaccccgcagaggtccggaccccctcccccgccccgtgcccctggactcacacactcaccctgcagaggtcttcttcagcttggcacacagtagga

SEQ ID NO: 343888 - DNA, 122 bp, Homo sapiens
ggcaggaccaggatgcagagcgcatggactgagcatacatcaagtgcctgggtctctgcccgtgcagggcttactttgattcaggctctgtcagggcataatgagagttctgtggaccagga

SEQ ID NO: 343889 - DNA, 122 bp, Homo sapiens
cagccttccagaggccgtggctggtctggatttaatgcactatcctgcctgtgactgtggcgggtagaatgctgtcaacgttaggggtgagcgcctttttcgaacacagattgtctgccttt

SEQ ID NO: 343890 - DNA, 122 bp, Homo sapiens
gtgtccacctccttggctgccagctcctccacgtccgacctcttcctcagctcaaacctccgggataaaccttctcggggtttccataattcctggatcaagaggggcttctcactgtcccc

SEQ ID NO: 343891 - DNA, 122 bp, Homo sapiens
ttcctgcctgcagacctggcctgctgcttctttctccttcctccctccctgcctgccctgcggtttcaaagtagattagaaataacagtgtcccacatggaagcctctacttcttcctgggt

SEQ ID NO: 343892 - DNA, 122 bp, Homo sapiens
cacgaacctgggacgtagttagaatgtcttgaagaaaatatttcagtaatattccaagtccgtcgccctggcaaagcaacaaggccacctgacggagtaagcccgagacccctgtgcctcca

SEQ ID NO: 343893 - DNA, 122 bp, Homo sapiens
ggataccccaacctcaacccgggcctgcgctggaggagccccagctctgtgcccacgtggcggtgcctggagattaaaaggacaacaaaaacaccccctgccgccctcctttctggcgcttc

SEQ ID NO: 343894 - DNA, 122 bp, Homo sapiens
acgggccgcccttataaataaccgggctcaggagaaactttagcgagtcagagccgcgcacgggactgggaaggggacccacccgagggtccagccaccagccccctcactaatagcggcca

SEQ ID NO: 343895 - DNA, 122 bp, Homo sapiens
actagtcaagtcatcagcattggccgactcacaaccccggcgggtaccgactcacacccccggcggggaccgactcacacccccagcgggcaccatcttacacccccggtgggcaccatctt

SEQ ID NO: 343896 - DNA, 122 bp, Homo sapiens
aggcgcggcccggctgcccacgggcgccctttgcagctgctgccccctggcggccgcgggcggctactagcgggaaagcgaaacccgcccggtccattcaagccccgctgcctggcgccctc

SEQ ID NO: 343897 - DNA, 122 bp, Homo sapiens
gggacctttaatggccatgccttgtctgtacttgtttcactttcctcaggcaaagatttccgttattttcctttggtatgtcagtagcaatgagaggcatccagacagggtatgcttaccct

SEQ ID NO: 343898 - DNA, 122 bp, Homo sapiens
ctgtggcctgtcgggaggcgctcccttcttgtggaggaaggaaggtcaagaaggagctcccggcagaccagggttcgctgcgcccagagacctgcccagagacctgctgcacgccggggcgc

SEQ ID NO: 343899 - DNA, 122 bp, Homo sapiens
tccgtgtcggattcatcaactagtgcagcgcctagtgcagagcagggggctcaagaaatacgtgtcgaccgcatgattgctaagatttccctgtaacaggcggtttttttttcttgtctctc

SEQ ID NO: 343900 - DNA, 122 bp, Homo sapiens
tgtggtaggacccgtcccttcttcagctctggtacccacctccatcccgtctgtaggtggcgtcccattctagaatggattaaaagtttggaacgctctagatgcttaggaaggagcatcca

SEQ ID NO: 343901 - DNA, 122 bp, Homo sapiens
tttttaaagcaacgcttagcgagcagagttttatttaactccttcctctgctggtgacagcgaagtacttatcttcttttaaagaaagttaaaatgaaaaggagagtagcccagcaaaacag

SEQ ID NO: 343902 - DNA, 122 bp, Homo sapiens
ctctattaaagagtcattaaaatcatgtggccagggaacaaatacagtcttcgaatgtgacgattcaagcttcctcattgctgaacatgtttaggcaggtacaggcatccttaggtgtccac

SEQ ID NO: 343903 - DNA, 122 bp, Homo sapiens
actcccgcccagaacaagatagcgacaggccctagcgggccaccgtccacagggcggatccgccagaagctctcctgcgacgcgaagatccactccctgagcccccggcgctccctccgcct

SEQ ID NO: 343904 - DNA, 122 bp, Homo sapiens
ctcccagggtttcaggtgaacaggagacgtggagcgaggacaccagccctggcgtgtccacgctcaatgatggacaggatttcatgggagaagaaatgcacctgaattcagcagaagagttt

SEQ ID NO: 343905 - DNA, 122 bp, Homo sapiens
taataatgtattatatttttacaattccagaacctggcacacagtaggcactcaacaaaccgttcctctgtctgtcttgagagactgcggtgggccctgcagggcagctgcctgcctctgcc

SEQ ID NO: 343906 - DNA, 122 bp, Homo sapiens
gcgatattttggagggggtgactcgttagtgaggaaaccacccccatccctaaatcaaagcgccaggctcgttcccaacagcgctgtccgagagacactttgagagagacacgacacggagc

SEQ ID NO: 343907 - DNA, 122 bp, Homo sapiens
aatcgttccgcccggtgaggtttcggcgtgagacccgaggagggcggggaagaggcgtgacggagattcctgaggtgtagtagcctgaggttcccttatgtggccctatagctgttactgaa

SEQ ID NO: 343908 - DNA, 122 bp, Homo sapiens
caggcgcggtcagggatggtggggatggcggcagcagctagacccgcgctggtccctcggcggcagctgactcgctggatcccctccggcccgcggtccctcacctcgggccgcgcgccccg

SEQ ID NO: 343909 - DNA, 122 bp, Homo sapiens
cgggactcacttagcccgccaggggcgcggcttgcggggcgcagcgggcggcgggaggaacgccaagcgcccagccgcccccaaactagtcaaactcggcgccccccgatccccagcccgct

SEQ ID NO: 343910 - DNA, 122 bp, Homo sapiens
cctcctcccaggaaggtacagaatccacagcctcaggaatgccaggcattctgccaagggcgcccttccttttctcggtctggtttctcagtctctctcttcccaatctagactagactgtc

SEQ ID NO: 343911 - DNA, 122 bp, Homo sapiens
gaggcaacccctggctgcggtggccaggaggcgcgcctggggggctccgggaggggagtgcgccagctaatgccttggtgcagcctgcctccaagcgtttggattgagaggagaggggcttt

SEQ ID NO: 343912 - DNA, 122 bp, Homo sapiens
agcccgagaaggcagggaggacagtgggcctggtccttccccggccggcagagggagtcccgagatggaacgtccagctctcctctaacgaaaagcgtttgcatggctgtctcgccaattct

SEQ ID NO: 343913 - DNA, 122 bp, Homo sapiens
acgcctgcctgcctcacccccaacagcacagatggccagggtgggggctctggatgggcccgatctactcagggaaaggctcaacagtcccctcccgccacctggggcagagctagggcccc

SEQ ID NO: 343914 - DNA, 122 bp, Homo sapiens
cttttctggtcatctttgatctgagtgtgctgttgtgtatgtgaaagaaaataacacaaacgtctttaaaacttttgagagtctgttctaaatagctgtctcgaatgccttatctttttgtt

SEQ ID NO: 343915 - DNA, 122 bp, Homo sapiens
cactgctcagtgcatcacagcagctattttggcctacttcctagagttaaacactccgaccgcccttgtaaaaatatttttagggtcctgttttccaccactagcattctgctgaataaaca

SEQ ID NO: 343916 - DNA, 122 bp, Homo sapiens
tggagccaggagcgacgtcaccgccatggcaggcatcaaaggtgggcctgggttgcaggacgcgggagggctggggccggcgggggaagatgggccgggggtcccacgcggcccccgcactt

SEQ ID NO: 343917 - DNA, 122 bp, Homo sapiens
cttgggtctcaagactcgcacggccttgtgcacgggctttgtgcggcctgagtaatctgtcggccctgagtatcaccagggcttttgaatctttgccaagggagcatggggaaggttttgca

SEQ ID NO: 343918 - DNA, 122 bp, Homo sapiens
atgtagaaaatagaacttctcagtaatttaattcctgttctttaagtaattgctgttattcgtttgtcatatatacttccagaaaatgtcctgtgcacatataagcctgttttttgtttttg

SEQ ID NO: 343919 - DNA, 122 bp, Homo sapiens
gacttctgacagctgagtgtgcgctggctgcattggagccctccgctctctgacaggggccgtcgctggcctgtgccccgtgccggcaacccaggcacacctgtgcccctgcagggagcccc

SEQ ID NO: 343920 - DNA, 122 bp, Homo sapiens
agatagggggttggtgacttccacaggaaaagttctggaggagtagccaaagaccatcagcgtttcctttatgtgtgagaattgaaatgactagcattattgacccttttcagcatcccctg

SEQ ID NO: 343921 - DNA, 122 bp, Homo sapiens
ttaactgttaaccaaggcacatggtcaatgccttagtatttttttttttaattctcctaacgttatttctagctgtacattcccaaaaggaatgggtggaagcaaatcagattctgaaaggt

SEQ ID NO: 343922 - DNA, 122 bp, Homo sapiens
gttctctttttgtataagtatgacaaaaatttagcatttgctatcttgagaaaattaacacgcataatgaaataaaagctcaggattaggcctggctcaagtgatcctcccgcctcagcttc

SEQ ID NO: 343923 - DNA, 122 bp, Homo sapiens
cagtatcctcctagcacctgagcacagagtctgtgcctgagcagagtgtgacaaaggaggcgaccgggtgatgcagcacagtgcagcgggcttggggccgggaaggttttctgaaaggtgtg

SEQ ID NO: 343924 - DNA, 122 bp, Homo sapiens
gataataagtgtcggtgatgtgcggagcaaagggaaccttgtacactggtggtgggaatgcggactggaacagccattatggaaaaccctacggaggttcactcaaaaagttaaaaacagaa

SEQ ID NO: 343925 - DNA, 122 bp, Homo sapiens
tcggcgatgcgaactgcccgcctctgttcggcgagggcgcccggattggttcacccgacccggatgctatggcaacaggtggtgtttgatagctttccgcggagtccctgggtgtagtggga

SEQ ID NO: 343926 - DNA, 122 bp, Homo sapiens
tgcctgtaattccagtgctttgggaggccacggcaggaggattgcttcaggtcaggagttcgagaccagcctgggcaacgtggtgagtcccaccttgcccgtttctacaaaaaataaaatta

SEQ ID NO: 343927 - DNA, 122 bp, Homo sapiens
gccaccccctctccgactgaggtttgcacacacagtcgcctcctcccccgccaccgccggcggtacacactcggctgggttcccgctctgcaagggaaggtcacaatagctgctctatcggc

SEQ ID NO: 343928 - DNA, 122 bp, Homo sapiens
ctcggggccctgggcggcgacgagtgtgtccggccggtggctggggagcgcgctggggagcgcgggtagcggcgggcagagcggatgggcagccccggcgagcggccgggcacggcgggaga

SEQ ID NO: 343929 - DNA, 122 bp, Homo sapiens
agtgcagtcctgctaactgggagagctctgtggttgctcttttctgaaaatcagtaattacggtgggaaatgctgccagaatgatgttagctatgaatttaatctctgtttatctaactaga

SEQ ID NO: 343930 - DNA, 122 bp, Homo sapiens
cgcccaggtgaggaggggctcaggcggccgcgcgcccaggtgaggaggtgctcaggcgggcgcgcgcccaggagaggaggggctcaggcggccgcgcgcccaggtgaggaggggctcaggcg

SEQ ID NO: 343931 - DNA, 122 bp, Homo sapiens
aggaagataaagctgcctcctcctatcctaatctcgctcctcgctcagtatggagtcgtccggtttacctacaaagccctgccctagactggcggcaaattcaacgcccagaggcaggaaca

SEQ ID NO: 343932 - DNA, 122 bp, Homo sapiens
tcttttcccagtgcccagcctgggagggaggagtcaatgtggcagccatgtctaatcaggcggggccccatgacacagaagctccttcatctaggcctgcggaggggtcagactggggttct

SEQ ID NO: 343933 - DNA, 122 bp, Homo sapiens
gaggcagaatacgggaagaaccgcgaaacaaccctaaaccaattctgaggaccacgaattcggattatccgggagttcttttgccatggcaccgcccccgccacttccgctaggaacccgga

SEQ ID NO: 343934 - DNA, 122 bp, Homo sapiens
tcgtgcacattctgaaagcccgtacctttgaggaccctctaccagggacccagacccctccgatgctttgcaggggcagcatttggatgaatggataggaaaggttgatttctcttttttat

SEQ ID NO: 343935 - DNA, 122 bp, Homo sapiens
gagctcgggaagctgagcgcagggcggacaacgggaaggccagagccgtgggcaagcacgcggagggcagcgaggggcactggcaccggagccgcggggaggcaggaaaacgcagaggcgga

SEQ ID NO: 343936 - DNA, 122 bp, Homo sapiens
gacggagaaaccgctcgggacttagccacgaggaacttggacggatccagggagcggggacggggatacactgggagtagccgaggatcttagcagcctgggatgcagttggggcaaatgtt

SEQ ID NO: 343937 - DNA, 122 bp, Homo sapiens
acagaagcagaggccggctcaagctgatgaatattcatcatgccagaaatccaatcccagcgcccctgcatccacccagaagccagggttctccagggaccgccacgcaggaggagggaatc

SEQ ID NO: 343938 - DNA, 122 bp, Homo sapiens
cagacaatgtgtacagctgtttatgggtaattatagaaattacctggggactgacatatccgtgaggatcattttcatgagtcgatctatagcccacttgatttcttttgttttgttttgtt

SEQ ID NO: 343939 - DNA, 122 bp, Homo sapiens
ggggcctgtggggcggccccggcccacaccggggagtgcggcgaccagacggccagctgccgaatctgaggcctcggtgggtccgtcgcccgcctctcttggacaagtccaggcgatgtgag

SEQ ID NO: 343940 - DNA, 122 bp, Homo sapiens
gggtctggggagtagaggctctccctgccacacgtttccatacctaggagcaatgcccatcgcgggggattgccttgtgctggggagaacaccgtgtgttattcccttatacaaaaagtcag

SEQ ID NO: 343941 - DNA, 122 bp, Homo sapiens
tgagcacgtgtgtgcagatgtctgtccgtgcgtctatctgtatgagggtgtgtgcgtgtccggggagcacgagtgtgtgggtgggaatgcttgctgtgtgtggcacgtgcacacgcacgtac

SEQ ID NO: 343942 - DNA, 122 bp, Homo sapiens
ctgctcagggcttcctcaaggtgagctcaagacccgcagggcttccctatggcaagccgtcgaggctttctttggatgcaggtggccgcagagcgctcatgcggcgtcggtgctggcagcca

SEQ ID NO: 343943 - DNA, 122 bp, Homo sapiens
agagtggagggccgcgggggcggcgagtggggcggcgccgggaggatcacctgcagaattcgggaaatgtcgcacggccgggccccgctgtgagctagctctacaatcttctgccgggtgga

SEQ ID NO: 343944 - DNA, 122 bp, Homo sapiens
agccccctcccccatcccaggtttggggcagagtgagagctgattaaaactggccaccagcggggaagaaggtgccagcctgctctggttctgggggggtgggggcgtgtaggaacgggagg

SEQ ID NO: 343945 - DNA, 122 bp, Homo sapiens
ccccgcgctcttccccgaccctcccagagcgttcccgctgctcagggcgaggagcagctgcggccagtttgtcctagcggtttaggaggcagggaggtttcctccagcctggagctctggct

SEQ ID NO: 343946 - DNA, 122 bp, Homo sapiens
aaaagggtacccaaatccctccatatgaggagtagcataagtggcttttctactggctgccgctgtagacccacctccttctccagcacataaatatcgctgttaacattaactaaatcacc

SEQ ID NO: 343947 - DNA, 122 bp, Homo sapiens
ggggcaccccagccctgcctcaacacctgggtccctccataactaccacaggcaggtgggcgaccccaaagaagatcccaggactcacagtaccccgtgagaacatggacattatgtggggg

SEQ ID NO: 343948 - DNA, 122 bp, Homo sapiens
cacgcaggggcggtcgtgccagccaggctctcgggctcttgggcgctcgccacactctggcggccaaacaatgcccacctctgagtagagctgtgggtggcggtaaccatggtgaggggccc

SEQ ID NO: 343949 - DNA, 122 bp, Homo sapiens
ctgcaggcgatgggccccagcgctgagggagtggagctgtggtagccggaccacacagcacgtgcagacagaagccctcccttggacgtgaagggaggaaaccttggcctaggcagtctggg

SEQ ID NO: 343950 - DNA, 122 bp, Homo sapiens
gggaagggggcggaggccgaccgaaggcggctagggactggctgaagagggttagcgaaacgttagcggtcgggtctgggcagggggtggagctggttgaaggaacggggcagtcccctgag

SEQ ID NO: 343951 - DNA, 122 bp, Homo sapiens
cttctcgaagaaattcagttatctctactgccagccaaacacggactgggcagctttcctcgggggctgctcggtaactgctgagccgggggcgcgctgaagccctgcagaagcccacaccc

SEQ ID NO: 343952 - DNA, 122 bp, Homo sapiens
agtctccctgtttgttttccctctgcgatgtcctcttttaattcactaggtcaggaaaagcgctaagcaaatcacatctaaataatgacctgttagtacgcaccccacctttcctttttgtc

SEQ ID NO: 343953 - DNA, 122 bp, Homo sapiens
ggaacgaggaggggccgtgtcgggggggagccagcgagtcgtgcgctgccgtctctaagtcgccggtgccagccgggtgtgcagcgccgcgctcccgcgggaggacggcccggggggtcggt

SEQ ID NO: 343954 - DNA, 122 bp, Homo sapiens
gggtccggcggggagactcgaggtcgatcgggagtttgggttgagaaaacgcccactgagcggtagctcttgtctccttgacatctgagccctgggaattaaactcacgctacataaaacgg

SEQ ID NO: 343955 - DNA, 122 bp, Homo sapiens
accgcctcggccatagacccttccgcggcgccgtcaccgtttgtttttgtcaaacccctgcgcttcaagcaacctgcccggttctggcctccggactgtcacatgatcgaatctccgccact

SEQ ID NO: 343956 - DNA, 122 bp, Homo sapiens
gatttttttttttttcctgtcatactttgttaggaagggtgagaatagaatcttgaggaacggatcagatgtctatattgctgaatgcaagaagtggggcagcagcagtggagagatgggac

SEQ ID NO: 343957 - DNA, 122 bp, Homo sapiens
acatttggattttaggaaagtgactccacagctgtgtgggggatggatcaaggggatacacgacatactgtgttttgtgcatcactgtgtctccagcacttagtgggtgctgacaccaagta

SEQ ID NO: 343958 - DNA, 122 bp, Homo sapiens
gcaaggagatcgccattatccccagcaagaagctccgcaacaagatagcaggctatgtcacgcatctgatgaaatggattcagagaggcccagtaagaggtatctccatcaagctgcaggag

SEQ ID NO: 343959 - DNA, 122 bp, Homo sapiens
aaaccacccacacctactggctgtacctttcctgcatgatttttgccaccgcatgggaagcgggccaattgctatttgcctgggtgttttaaatatcaggagatcaggagatttgctcctga

SEQ ID NO: 343960 - DNA, 122 bp, Homo sapiens
tggtcaggagtttgagaccagcctggccaacattgtgaaacctcatctctactaaaaacacgaaaattagcggggtgtgatgacaggtgcctgtagtctcagctactcaggaggctgaggca

SEQ ID NO: 343961 - DNA, 122 bp, Homo sapiens
tttgtctggaagatttagactgatttaagggtgacacacagcagagttctagtggacattcgtgttaaccgtttggtgctcagaatggagatggccaaataccaagtgcttagtgacagaaa

SEQ ID NO: 343962 - DNA, 122 bp, Homo sapiens
aacatgacccatgtagatactcttttggctcccatctctctagttacagtatggtttcatcgctgttcagcattggtgagttataagtttttcctatgtatgtaagtttcgtgtctctagat

SEQ ID NO: 343963 - DNA, 122 bp, Homo sapiens
aaggtggagggtgatcaaattaagaacatctgagctgtattggtgggcggtatcgctaaacgcctccggggagcggtttccaagtgatttgcagtaatcccccaccttcatgatacatgggt

SEQ ID NO: 343964 - DNA, 122 bp, Homo sapiens
ctgctgactccctgaagggagtcaaatgctaatcttctgctggggtggaaaagggaccgtcgccagctgcaggggcagaagcgatctgcggatatgtaatcaattgtaaatgattttcagca

SEQ ID NO: 343965 - DNA, 122 bp, Homo sapiens
cagcggcggcggcggctgcccctcggctccaggagaggccgccacccggggttccggtggcgttaggctgcagcagtggcgcttcccgccgcccgagcttcggaaacttcccggccgcgacg

SEQ ID NO: 343966 - DNA, 122 bp, Homo sapiens
cctacggtggaaacccaaggaaggcacgaagcaggtgtgctttggaaggaacagttctggcgcagcgcctcttcctgtcggcccccttctacagtgcgcctggacacagggtgacggcgcag

SEQ ID NO: 343967 - DNA, 122 bp, Homo sapiens
gagcacacagaatattctgttccgctcttgcggcagctaggctgggagcagagtgaagagcgttactttgggacaaagcattgcttagcagtgcgggatcttccaggactttcttcccctgc

SEQ ID NO: 343968 - DNA, 122 bp, Homo sapiens
gagccggcccaggaaagtcctgcggcaggggttggtaccgcctcccgcgcaggtatgtgacgtcatcgcgccgacgaaggcgcccgctaggccccgcctgctctatttaaacttctggactc

SEQ ID NO: 343969 - DNA, 122 bp, Homo sapiens
tgtggggggactgtctagctccaggctcagacgtggtgtctgctcttcctggctggggtccgggagtcccccggggagtgggcactgccggccgtcgtagagcagctttggccagggacggt

SEQ ID NO: 343970 - DNA, 122 bp, Homo sapiens
ctccaggtcgcttcccaacgctcagctgggcgggcctgagaccaactccacgccagtggccggaaagccaagtgaaagctggtgactctgccggcagctgcgtgttacagaccagcagagtc

SEQ ID NO: 343971 - DNA, 122 bp, Homo sapiens
gtacttctgtgttgcctctcatgtgccagagcagttggaacagctttacacatattaattcgtctgctctcctgcaactctctgatgtaggtatagtattatgggcacagaaaagtaacttg

SEQ ID NO: 343972 - DNA, 122 bp, Homo sapiens
agctcctccagcgcccggggctccggcgtaccctacgcctctgcgctcgcggccccgccccgggcctcccgtggggctttaatgacataagcaactttcctcgcgcaccccccgccccgtct

SEQ ID NO: 343973 - DNA, 122 bp, Homo sapiens
atggcctgaggacgcacccttggctaaagcagacactgtgagccccgctgaacacccgcccgctgctgccactaaagctcccccaggcagctcctgacaagccgggagggacctcggatcct

SEQ ID NO: 343974 - DNA, 122 bp, Homo sapiens
tgctccgggtagggctagagaccttcccctcattgcctgggggagaacctggctccggggcgccgacgggggcgggtggtaggggatgtacgggtgtgtatatgcagaggtatgccaggctc

SEQ ID NO: 343975 - DNA, 122 bp, Homo sapiens
agcttcaacctttgggtttcatctgcttttgaaaatctctttgcccagacctaggcctaacgattatgagctaatgttggaaggtggccagagatggttgtacatgctaatgcctcagaaac

SEQ ID NO: 343976 - DNA, 122 bp, Homo sapiens
ggctgttcgggagtttgccaaggagatcgacgtgtcctgcgtcaagatcgaggaggtgatcggagctggtgagtctcccggggcacagtagagatgagaagctgaggcgggctgggtacagg

SEQ ID NO: 343977 - DNA, 122 bp, Homo sapiens
caggcatggctactgcctgcattgtgtgcagacttggaaatgaagtcggctctcaatcagcgaaagactctacaggcccaactgccacacacattgcaggaaggccatatttgaatcccgcc

SEQ ID NO: 343978 - DNA, 122 bp, Homo sapiens
tctgtcttcaggtgcgaaaactgcgttttcttcttgagttccgtgtttcagggagagaatcgtgaagaaacagactaaaggactttgttgcaagctacagtcatgaagaaggacacgtgggt

SEQ ID NO: 343979 - DNA, 122 bp, Homo sapiens
cccgatccctgggggaggtcgacatgggacctctgccccacatcttaccttggctgcaagcgttcaagtggatctcctcccgtcctgtgccactcgatcctcgctgcttgctaaaaagttat

SEQ ID NO: 343980 - DNA, 122 bp, Homo sapiens
cggggctccccagcgccccacctttaccccggaggccgccctcttccatttgctcttgggcgtcagggcggtaccccactccgctcgaccctttggatccactcgcacttcctcccgtccag

SEQ ID NO: 343981 - DNA, 122 bp, Homo sapiens
gcgcccgtccgagcgcccgccgagcgcccgcgcactttttgttgtcggcggctcgggccgcgccggcaaatatggccgtccgcgccctgccgccgccgcagtctcacccaggccccgggtgc

SEQ ID NO: 343982 - DNA, 122 bp, Homo sapiens
ggtacaaccaaaagactggcagctggcatttatcttgtcccttcaaggctcagaggttaacggttttatacataagggtagtcctgatcataaacctagcgacagcagaggataaaaaattt

SEQ ID NO: 343983 - DNA, 122 bp, Homo sapiens
ctctctttttacctggttctgtccttctcacatctctgtgtctctgcactcatctattctcgtgttatccatttccttggtgatgacactcagtaagtgatactctctcttgcattattttc

SEQ ID NO: 343984 - DNA, 122 bp, Homo sapiens
tgagaagtgctgaataaaaatctggaaataactcagacatcatcagattctccatgactacgacacttttaggttctggaagacctactttagaatagtagataatttatttgttttagctt

SEQ ID NO: 343985 - DNA, 122 bp, Homo sapiens
tgtgcagtagagcacacattcctgcaggtcaagagtgtctttcatgtcttttgcatccctcgcagggagtgtcctggttattaaggtgttgtctctcagctccaaacacacccctttatact

SEQ ID NO: 343986 - DNA, 122 bp, Homo sapiens
gagacattagctgaattccctgggggtgattggatgcaattcactgaaagtagacaggcacgtcctggatgttagaaattcactttttctcaacgtgacaaggccggcttcgatctacaatt

SEQ ID NO: 343987 - DNA, 122 bp, Homo sapiens
cctgatcgaggagctgagggaccgatttccctacctgagtgaaagctacttaatcaccaccgatgccgccggctccatcgccacagctacaccggatggtgaggaagtggagggaggggtga

SEQ ID NO: 343988 - DNA, 122 bp, Homo sapiens
tccccagcctgaagaacaccatgttcctcttagcgatcatcagtaacaaggcgtgccactcgaagaactacaaagataagggtttggggtttgtgctggggaaagctcatgacactagctgc

SEQ ID NO: 343989 - DNA, 122 bp, Homo sapiens
aaccaagccattagcaagagaggccttaggagagagaatggactatctctgaaatgtgatcggaagacagtcttcggggcagaccaagcttaagagctattgtttgatatgtagtaacaaag

SEQ ID NO: 343990 - DNA, 122 bp, Homo sapiens
cgtgatccgcccgccttagccccccaaagtgctgggattaccggtgtgagccactgcgcccggccaaaaaaacctaaatgtttaaggaaagggccactccagcagatttattcaaagtgcag

SEQ ID NO: 343991 - DNA, 122 bp, Homo sapiens
ctactatgtacgtgccctcacagacgtgatctcacccctcattacacacctcccatggtacggatgatgccactgaggcacaggaggcacacatccacaccagaccataggtgccttggctt

SEQ ID NO: 343992 - DNA, 122 bp, Homo sapiens
ggcgcagggtggcacgagcggaggcggggcccgggcgtggggcacggctggggaagctgccgcctccggccctgcccggctgcctccgccgcggccagtggctatggagcaggcgggcacca

SEQ ID NO: 343993 - DNA, 122 bp, Homo sapiens
ggcggggcacggggtgtggcgaggcgcggggcggggcataaattgcgccaggggcgagggcggggcacgaggtcgtgccgagagactgggagaggcgtgagtcgcgcggaggcgcgacatgg

SEQ ID NO: 343994 - DNA, 122 bp, Homo sapiens
agacaagatctcactccttacaacaattctgaggcaggtacttcctacaggtgaagaaaccgagactgagacttggccaaggcaaccgagctaatcatagttcccccaagaaagggcgacct

SEQ ID NO: 343995 - DNA, 122 bp, Homo sapiens
tcccgcgcgcacctttccgagtgccagtggggcggccccgagaccgcaattgctctggcccggattgacgagcctccgatgcccatttactgcgcgcggcagccactctggagccgcggcac

SEQ ID NO: 343996 - DNA, 122 bp, Homo sapiens
aagtgcaccccgatgatcagcaacagctgagctcggcccgagccacatcttctaactcaacgctgggactccggaggacacagcaaggatctgagccatgcatgcaaagttacgccagtggt

SEQ ID NO: 343997 - DNA, 122 bp, Homo sapiens
aactcatgtcttcatacacagaagttttaaaattaaactccgtgatcacacaatgacaaacgcaccatggatgcttctgttctagcctgtcattacaacatcacaaagcctagcaaaacagt

SEQ ID NO: 343998 - DNA, 122 bp, Homo sapiens
gcctctgagaaataaagcctcgggtcctgattatgcccttctaattcccccaaggctcagcggcactttagtacctgtctgttgatgcccatggcatttcctgctgtatctttacatagtta

SEQ ID NO: 343999 - DNA, 122 bp, Homo sapiens
gaagtctagaagccttagctagatcaggccataaacaaagggctttggagacaggcagtccgcggcagataatgatcggaattccggctcctcccttccagggtggaacctgaatgcagccc

SEQ ID NO: 344000 - DNA, 122 bp, Homo sapiens
ttttaacatggattcatattcacttggcataggagaggttagattttgatgatactgatccgtatttgtggtgttttgtcttcaggttaatcactttgtatgggattggaggtgactctgag

SEQ ID NO: 344001 - DNA, 122 bp, Homo sapiens
cattcactctatcttgacacatattcttggaagacttgggctaacacattggtcccccgccggcccccctttatcttcttacccctggcttcttcccacaccacgagaagccccatgcgcag

SEQ ID NO: 344002 - DNA, 122 bp, Homo sapiens
gaagcccgcgcgggctggggcaggcggagccgtgaggcggaaccttgtaatgagcgacgccggctggatttatggggctgcgcacgtgcgcctggccttcctgcgagggcctccgcatggga

SEQ ID NO: 344003 - DNA, 122 bp, Homo sapiens
tctacagcaagttcttgaacttctctgggcctgttttctacctcgccgagtggttaactgcgtttaggatcttggaagcacctaagcacgaaaagcacataggccagaagttaagatgtccc

SEQ ID NO: 344004 - DNA, 122 bp, Homo sapiens
gtcccgaggtcgctccagcagcccggcctcacgcgacccaccattcccgccgccccctcacggtgcccgccgttcccgccgcccggctttctaaccgggcccctagttccccgccccgtgcc

SEQ ID NO: 344005 - DNA, 122 bp, Homo sapiens
caggcgccagcccattcaccagatgaggcaaaaacccaagataaatatctgagcaagtcacgtagactggggcccccgagccccaataccaagcgcccctttataagctcttacattttgtc

SEQ ID NO: 344006 - DNA, 122 bp, Homo sapiens
aaactaaaaatcacttctagacattgtcagcaccaagtcaaacttccttaccactctgtccggtccataatgtatatgtcctttttatcaactttttactgtaaggtatttaataagcaaac

SEQ ID NO: 344007 - DNA, 122 bp, Homo sapiens
cctcttcacctttgttcccacgagttctttcttttccagcttgaattgcttttcccatcccgcgcatttgtcttggctgtgcctatccatatcccaccttttctaatccctccttttccagc

SEQ ID NO: 344008 - DNA, 122 bp, Homo sapiens
gcatgccattcctgccaaactcccttttaaaagcactcacttcctgctccaaaagtgaagcggtacccttaaggcaggaagcctgtacttcttccccaaactagctttggaataaaaaatca

SEQ ID NO: 344009 - DNA, 122 bp, Homo sapiens
aagagtacaacgccggggacacggagggaacgattacatctaagatcagtgaggcaagtacggttacttcgggaaaagggattgctgttcaagagactgttactgaaaataaatgtaacgta

SEQ ID NO: 344010 - DNA, 122 bp, Homo sapiens
gcatgctggctgtggccggagttccagctggggtttggcggccaggagagtggctgccagcggcgggtgctcctacctgacttccgcgtggggctcgcccctccctcctcctcctccagcgt

SEQ ID NO: 344011 - DNA, 122 bp, Homo sapiens
tctaaagggtgtcgcttccgtaaactcacccacccggtgggggggctttattgttttaagcgagggccccgggcttgcacgcgctcacccatcccgcagccctgccggcaagcggctgttta

SEQ ID NO: 344012 - DNA, 122 bp, Homo sapiens
ctagtgaccccatgttaccaaggacttgggtccgaagcatagagctgtgtggattcttggcggccactcaggcatgcgtggagacccaggaggttttgcatactccagccctgggaattcca

SEQ ID NO: 344013 - DNA, 122 bp, Homo sapiens
ttctgcagttggtcatattgtagaacctgagtgatcaggtagagaatgcctcactttcttcggtgctaataaatatacagtatcttgggaaagttggtctagggcttttgttttttttccta

SEQ ID NO: 344014 - DNA, 122 bp, Homo sapiens
gagtgtgaaatactaacaccaaatgtctgaaggcagaatttttgtttgtggaagacagagcgaagagatagatgcacctaatcaagaccaaatagaagacagtgaagaatatgaaaaatgct

SEQ ID NO: 344015 - DNA, 122 bp, Homo sapiens
tatttccatgctgggtgcccgggaagtatgtagacggggtacgtgccaagcatcctcgcgcgaccccgagagcctggggagcgggggcttgccggccgtggcactcatttacccggagacag

SEQ ID NO: 344016 - DNA, 122 bp, Homo sapiens
gtcatcttcccaagggcagaggccacgtctatttctgttcaccctcctgctccctgtgcccggcacagtgactatttgcagaagaacggattgaacaaatggaagctacttaagatattaca

SEQ ID NO: 344017 - DNA, 122 bp, Homo sapiens
ggcgcggcgccgcgggcgggggcgcggcctcgggggcccgggcccgagctggggccggcgcgggggccagggccgctgccgcctcacccgcccctccatcgccatcttgggcgagcggcccg

SEQ ID NO: 344018 - DNA, 122 bp, Homo sapiens
gaaagggagggaggggctgactgtgatgtgacagtagaagagagaacaacacacagtgcccggagccaatatgagtgagcagactggacaggaagagtgagcaggaagaaatgggttggggt

SEQ ID NO: 344019 - DNA, 122 bp, Homo sapiens
acctgcaattcccttctctcttcatccacaccaacccatccctcctccttcctatgcacacgtgtcaggggctggctccgggtcaggtatggagcagtcttgctccataccacaggctgatc

SEQ ID NO: 344020 - DNA, 122 bp, Homo sapiens
cttctttgttctctccccagacaagtttctttgacaaactggagagttacatccagctcccgcttgcctgttagggctgcctttacaataatctgctttcgcggggagaaaatttaaacttt

SEQ ID NO: 344021 - DNA, 122 bp, Homo sapiens
ctcctcctctcccccgactgcttcaggcaggggtcgcaggcagacgcatggcttgtccggcgccccctccgttttccatcactgcaactccagctccagtttgccaataaaggtttctaaag

SEQ ID NO: 344022 - DNA, 122 bp, Homo sapiens
ggagtcactttcagcctttcaagggagggtccaggtggttggggaggtactgcctggccacgtgggctagctctctggccactcctggggactgaggagacccacagccagacacagctccg

SEQ ID NO: 344023 - DNA, 122 bp, Homo sapiens
agatgcctggcaagggccaaccttgccagcaggactttctggggatagcagtcccaggcacgtgtttgcacagtggttcagatcaatgtgcttacattgggtagaggggacctatggaagtc

SEQ ID NO: 344024 - DNA, 122 bp, Homo sapiens
ccagcctgcatacctggggatcagatttcagtttcctagtgtgtcctggtctcaggccctcggcaggaggagctgggtctcctggagcggttgggggagggtcccgtgccagccaggagggc

SEQ ID NO: 344025 - DNA, 122 bp, Homo sapiens
gtcacggcccccgtttacacaagagtaaagctgaggcctggagaaatccagtcacctgcccgagggccacacaactggtccggtgagggctgtgagtaaccctggatgtccctctgcagagt

SEQ ID NO: 344026 - DNA, 122 bp, Homo sapiens
tgagaccccagagatggagtcctgggtgcgtgggggccctgtggtccctgagtctggccacggggtgtggaagggagtcccctgagtcctcccaagtgacccggcgggcatgcgttttggga

SEQ ID NO: 344027 - DNA, 122 bp, Homo sapiens
aagaacttcactggccaaaactgagtgtgtacacttgcatcatccaaaacccaaaaacaacgtgcagaaaagaaaccttacataaagcctcaccccagcaaaacaaaacaaaaagcaaacac

SEQ ID NO: 344028 - DNA, 122 bp, Homo sapiens
gcaacaaccctcgctagtctccattaagctcctttgacaaatggggaactgttctttgagcggattacctgcagccccaaagcctccttaccacacctaagacgggagggaggttgctgggg

SEQ ID NO: 344029 - DNA, 122 bp, Homo sapiens
tgtcgctcttccccctccatgttgctcctccccctccaagtttctcctctccctcctcgtcgctcctttcgctcgatgccagcagtgcctgtgctccttaggcctgctgctcacagtccctg

SEQ ID NO: 344030 - DNA, 122 bp, Homo sapiens
ctccttcctgtccctgcaagatcaaaactcctcctggaagccctgctagctctgtctgctcgccttcgtggcagatattgctattgtactttcatgctcatttgtgtggtaagtacttcaat

SEQ ID NO: 344031 - DNA, 122 bp, Homo sapiens
tggcgctggtgagagtgggtcctgaccccagcccagcacatcataggcccacagggcacacgggccacagggccacgcaagcatgggcactgggcagcagacagtgttataattgtgcattg

SEQ ID NO: 344032 - DNA, 122 bp, Homo sapiens
actttatcaactcatccattcttttcccacaaatacttactgaacactctctatgcctgtcgtattgcagacatgcggaatatatcgacaaaactgactgaacttcctgcccttggggtgct

SEQ ID NO: 344033 - DNA, 122 bp, Homo sapiens
ggagcgggtgggcagcaccgagggccagctttgaaaaaggctgtaccggcttaccaaatccggggaccattttcgtggcaaaagtgtccctcactctgttaaaagaatgcatggtgacacag

SEQ ID NO: 344034 - DNA, 122 bp, Homo sapiens
catgtcacccttggctccctatattgtctcttcatctggtttcttagctcctccttttcccgcttccaccgagtttttgtactgctcctgtcactttgcttctcagaagttcagaagcaatt

SEQ ID NO: 344035 - DNA, 122 bp, Homo sapiens
cggctactgctccgacatggggatccttcaccagggctactcccttagcacagggtctgacgccgactccgacaccgagggagggatgtctccagaacacgccatcagactgtggggcagag

SEQ ID NO: 344036 - DNA, 122 bp, Homo sapiens
ctcactgcgcaggcgcggagcggtgggcaggagcgggcgtggcctgactctgcgcctgtgcggaattccagctgcgactgctgagggagaaaatgatgcccaggttgggctccccggcccac

SEQ ID NO: 344037 - DNA, 122 bp, Homo sapiens
gggacacggcactgggacccactcccgaggctgcccacaggtgcgtgtagcaccagggcacgcccagggaggggcgcgtggggaggggctgagggcgggcgcagggcagctgcggcagtgag

SEQ ID NO: 344038 - DNA, 122 bp, Homo sapiens
tgccattaatgacagcccctgctgaatcatgactcaatagcagtactttttcttcaaaagcgttcaagtgagagaaaagaaaaggctgctctgacctctggcccatgttcccctggtgcaga

SEQ ID NO: 344039 - DNA, 122 bp, Homo sapiens
ctctccacagcctccctccgcccgccctggcctcttttaaatccgctcctgccctcgcagcgagcgagctcattaatatgcagaaccactcggtgactcactgagatttctcaatgtggtga

SEQ ID NO: 344040 - DNA, 122 bp, Homo sapiens
ctgcaacctccctgcctgattctcctgcctcagtctgtcgaatgcctgcgattgcaggcacgcaccgccacgcctgactggttttggtggagacggggtttcgctgtgttggccgggccggt

SEQ ID NO: 344041 - DNA, 122 bp, Homo sapiens
agcccgcccccgccaagcactgtctccgtcacacgccaggcacacacacgcccactcacgcggacaaggcacgctcgtgggcaggtctgatctgcagctgggagcctctccaggcacccaga

SEQ ID NO: 344042 - DNA, 122 bp, Homo sapiens
taattggctttggtacgcacaccaatgagattggaactgagcctagaaaagtagtatcaacggaaggtgcaaatgaacgaatagaaaagcttcccggttggactcatggtgctcagtcaact

SEQ ID NO: 344043 - DNA, 122 bp, Homo sapiens
ctccacagtcacggtgccggaccctctcccgataactggacacgtgtctcccacaggacacgcactggcactaaatccacactgcccatctcggagacaggcggaggaactcccgagctgag

SEQ ID NO: 344044 - DNA, 122 bp, Homo sapiens
ttcctgctaagagcggtggcccaatgacagtcctggcgagtcaatctgctcgtatctgcccgtgccatctctgtgccagcctccccactccttccctccacttcccctgtacttgcacttct

SEQ ID NO: 344045 - DNA, 122 bp, Homo sapiens
tgatgtcagtcataggatcaaaaggatcatgaggcatgtccctgttaatgaccagcttttcggttctatgtagagtcgatgggcccactttccgctccaggtccctcaatacttgaaaattc

SEQ ID NO: 344046 - DNA, 122 bp, Homo sapiens
caagacatcacagcaactttccaaatgcctccttagtaaacgtggtttacagtttacagtcgactcaccgtccctgacctcctccctgcattgtgtggaatgtagacaagcaatgtttcact

SEQ ID NO: 344047 - DNA, 122 bp, Homo sapiens
agaggtttcagctgaaacagcccgcgagcttcattcgagctccacgtgggggcgagactccgaggagatgtctggtcggatgctattgccatgatcaactctccttagtgtttgcaaacctc

SEQ ID NO: 344048 - DNA, 122 bp, Homo sapiens
tctgacatgtcatataccatcatgaaagtgctgagaaattcctgctacaacttatgtacacgtttcagaagacatcctaaagttgcatgtaactgactggacttttcctttatttcagtgtc

SEQ ID NO: 344049 - DNA, 122 bp, Homo sapiens
aacttttggttctcttctgggcgtttctgcccagagtcccctggtttggacagcagcgatcgtctgtaggacacacacagtgaatccagccaccggatgaggaattctgctaattgtttaag

SEQ ID NO: 344050 - DNA, 122 bp, Homo sapiens
gaacaacatttagcttaagactgcaacggggggccaaggttaggcgcacaggagtggtgacgcccagtcacctcggccgcactacatggaaaatggaagcacctgcggcccctctcaccccg

SEQ ID NO: 344051 - DNA, 122 bp, Homo sapiens
ccgtcaccccaccttacgggtacagacagcaaaaactcatcctgcccaaaatgtccatagcgcggggttgagaaaccctgatgtagaaaaatcccttattcttaggggatacatactgagat

SEQ ID NO: 344052 - DNA, 122 bp, Homo sapiens
gctctctcggtcagtctgtgcctgggccttgtagatctgtgtgttccggtcccaatactccggcccctcctgctctatccacggcgcccgcggctcctctctcggactcgcggcgtcgctgt

SEQ ID NO: 344053 - DNA, 122 bp, Homo sapiens
tgcagcagccaccggcatccgagcctggaggaaagtcaggtctcagagggaatggggtggcggggctctgtttagattgaaagaaaatcatcagacaacccagagctttggttccagttcag

SEQ ID NO: 344054 - DNA, 122 bp, Homo sapiens
ggaccgtgcttgctgccagaacaaccaatagaaactccttgaaggccttcctggcacaaacgtagtctccagcaccctctgccgaccaggccccgcgccctcagtgctgagacagcctccag

SEQ ID NO: 344055 - DNA, 122 bp, Homo sapiens
agaatcagaaaaaatggactagggattagtttggggctgtttctgcatccacatggcttacggtaaattacttaataaaacagactgtttcctcatctcctttatccatatgaggattttat

SEQ ID NO: 344056 - DNA, 122 bp, Homo sapiens
gccgctcccgcacgccgccgccgcccgtcccgcgctccgcggccccaggtctccagccggcgggcactcacatcatctctgccatcaccgccgccgccgatgcccttcacgaccaccgccgc

SEQ ID NO: 344057 - DNA, 122 bp, Homo sapiens
acgcggccgcagcccaggtcccgggagcgccacggaacctaacggtggcagcggaggtcgcgcccctcagtgcccgcgctctccccgtcgggagcttcctggtcgcccctgcggcggcggct

SEQ ID NO: 344058 - DNA, 122 bp, Homo sapiens
ggatgccacccatccaaccccaccttcaacacaagcagtgcccgaggggctggctgactgcgatggactcagcgacaaacggcacccaccgaccctgcactggagctgcagtgacttcatcg

SEQ ID NO: 344059 - DNA, 122 bp, Homo sapiens
tgggtggaaaaggaaagggcccattagacgaatctgattcatcttctgtgactaagcacccgcaacagttaggaatttaggcagagctggtgatcctgggacaatagcacttcctaggtaat

SEQ ID NO: 344060 - DNA, 122 bp, Homo sapiens
cctgagggatgccacgctggggtgacggggccacatctgccagtgcaggagaacaaggaccggaaggagcaggcggcgaaggcagagaggaggaagcagcagctggcggaggaggaggcgcg

SEQ ID NO: 344061 - DNA, 122 bp, Homo sapiens
ctgaggcgcggcgcggggcacacacggttaatcctccgcggctgctgtttggacgaaaagcgctgggggtgttggaggctcctcgctgctcacatctggctgggcttcgctccttgcgcgtc

SEQ ID NO: 344062 - DNA, 122 bp, Homo sapiens
gggctgccacctccttccccagtttgctcctgtgcccgaggcctgtcagcgaggcagccccgggaccactcgcacctgctgttgggttaattacccttaattaggttgcatccctcaccaga

SEQ ID NO: 344063 - DNA, 122 bp, Homo sapiens
tttcaagagaccttttccccctgacccatgccactgggggcaactcaggaaaggaggggacggcgcagaactgggtggaatttggcagacactcaggaatgaagagggtccttagctcaggc

SEQ ID NO: 344064 - DNA, 122 bp, Homo sapiens
tgtgagccaccccacccaggttgctgctaattttctgtatgcacacagtagaggctcactcgggactacaggaagtgccaccccgagcccacttcctcaccacaggcctttatcccttacct

SEQ ID NO: 344065 - DNA, 122 bp, Homo sapiens
tgggggcgcgggggcgggggtcggtaccttccttggcgcgcgcccccgggggcagcggggcgcagagcagcagcaccagccctagccccaggggccagcgccgctccatagctccgggccgg

SEQ ID NO: 344066 - DNA, 122 bp, Homo sapiens
tgaaggtactcaaagtgggctgaggtaatgagaggtgccctatggacttcaggactgccacgtagaaaagggattaaattgattccgagtcattgcagacggccagatctgagatagaatga

SEQ ID NO: 344067 - DNA, 122 bp, Homo sapiens
gccgaggaatggaccaggcccacagcaggtgcctgtggggctccaaggggccaggctccccgcagctctcctggggccaggaggggagcagggacctggctgggtgtctgatgcccgtcgca

SEQ ID NO: 344068 - DNA, 122 bp, Homo sapiens
gaagtcaaagaaaaagttggaagacagtttgtggactttgcatatctgggctttccgggacgtaggcctgtgtcccatccaagacactgctcacgtcttagcctgattacctggccgcctcg

SEQ ID NO: 344069 - DNA, 122 bp, Homo sapiens
gcagtgcggccccggccaggcaggacagcgggaccgtccgccgccgccattggcccgcgccgccggcccccgccaccacccattggccgccgcgctgcaccattgttacgtcactggccggc

SEQ ID NO: 344070 - DNA, 122 bp, Homo sapiens
aacccagcccagagagaaacaaaggctcgggctccaggacccgctcggccaggccagccccggcccgctccctgccaggaccccaacaaagcccgagctgccgcctcgcgcccccggcctgg

SEQ ID NO: 344071 - DNA, 122 bp, Homo sapiens
actgggctccgggttctgtcactgagagacgccctggaacgtctgtggcagcttctgtctcgctgggacccgcactgacagcgggaggcagagggaggaacctggacgccggaagccgggaa

SEQ ID NO: 344072 - DNA, 122 bp, Homo sapiens
gggcagctcccgccgagaggctgattagttttatccttcttccagatgaggctgagccttcgggtgaccctgtgagtgagcacaccctccttgatgggccgctccaggctcgcccttcccgc

SEQ ID NO: 344073 - DNA, 122 bp, Homo sapiens
tgccccctaagctaaggctggggacccaggaggggtggtccgtgcaggagctggggaggccgctggggaaaggggcgccccctgggctcggcctcggaggagcgggccggcccccaggtccc

SEQ ID NO: 344074 - DNA, 122 bp, Homo sapiens
agatcgtaaatcataaccagtagggattatctgaaatggatttttccctgtttatgtttacgtggtcaagttttaaaataacagtggccaggaaatctgagagaggctgaaggctctgttct

SEQ ID NO: 344075 - DNA, 122 bp, Homo sapiens
gttgcaagacaggagaactctttagcactggttctgggtttggattctctgctctgcacacgcactcaccggcaccgcactctgcacatacactcaccggtgccacactctgcacacacttc

SEQ ID NO: 344076 - DNA, 122 bp, Homo sapiens
caggccactgaccacgcaaccgggcctctgtcagcggccaggggcagagggaggcaggaccgcccctggacaaccgacacgagctcagccacagtggaaaatctcagaaacggaacccaaag

SEQ ID NO: 344077 - DNA, 122 bp, Homo sapiens
gtcctaagtaagcacaagtttagtagtagagtactcgtaacacagaactggctgaaaccccgccctcttgtctacgggcgttctttcagggcgactttgtcagtaccccaaactgtccccgc

SEQ ID NO: 344078 - DNA, 122 bp, Homo sapiens
cgcgcacggagcagctgcaggtgcgtgaggatgtgcacgaggtcggccacacgggcgttgcggttgatccagggccacaggacgctggccgtgcgctgcccggagcgctcgcacagccgcag

SEQ ID NO: 344079 - DNA, 122 bp, Homo sapiens
aaaggacaatctggaaacattattatacaccactcccactccttttttgagacagcatctcgctctgtcacccaggctgcagtgtaatggcaggatcacagcttactgcagtcttgacctcc

SEQ ID NO: 344080 - DNA, 122 bp, Homo sapiens
ggagggagcggtcgttctgctggctcagggctgtgtaatgggggctcagactctggctgtcggaagggcaagaactgggtgcctgggcctctttcggggctccagcttatttctgtttattt

SEQ ID NO: 344081 - DNA, 122 bp, Homo sapiens
ggggacgcagcggtctccgggctccagaaacctccttagccttttgtggtaactttggtccggcggcggggggccggtgagcaggaactggagggaggcggtggggaaaccgtggatccgtc

SEQ ID NO: 344082 - DNA, 122 bp, Homo sapiens
tggcatgaaaagtagctggcattcaagcctcaagtgacctcctctgggctcagagaggatcgtgtgactggcacagtgataaaatgtttgctattattattatctctatttctagtaaaact

SEQ ID NO: 344083 - DNA, 122 bp, Homo sapiens
ggtttttttccttcaagttatagaatcctggcttgcagcgatcacaggccttcccctcaacgttttcctgtaagttagggtaaaagattagcttttgaaaccaatgtgtctgtccagagaga

SEQ ID NO: 344084 - DNA, 122 bp, Homo sapiens
tcaagagagtaagactgttagtatatcgttaatcagggtgttttaagagatgggctaagacggagaagcgcatttgggacactatagtcaaatcccgtccaataaaaggtaacttttcctat

SEQ ID NO: 344085 - DNA, 122 bp, Homo sapiens
accgctgggacaggggtgatgcccagaacggcgctgatgacaccagtttcagcaccagtgcgaggtgctgagccccgattcccgccaggtgctgagtgaccgtcatttgcacgtcacgtgca

SEQ ID NO: 344086 - DNA, 122 bp, Homo sapiens
gctagtggccttgccagctttctgaagccccagaagaggaatgtttctgaaagaaggaaacgctatgtgctgccaactgtgtgtgagcagatgacttgcaggaagatgggagagccgtctgc

SEQ ID NO: 344087 - DNA, 122 bp, Homo sapiens
gaacattgctcatggggcaggtctctgaagtgtacggagtctgcctcctgccctccacagcgcccgtgtttttctgaggccatcagcgcacctgctatctctgcatgagtccagtgcccatt

SEQ ID NO: 344088 - DNA, 122 bp, Homo sapiens
ggtgagttacatacaggccctcctaactggagtcttcgctagtaccaatagttagttgctcggcgagagctcggtaaggactagccatttggaagctcgtagtactcaggttgtggtacagg

SEQ ID NO: 344089 - DNA, 122 bp, Homo sapiens
ttcccagtcctggtctcctgcgcctaccaggtggcccgaggcatgcagtatctggagtcccggaaggtacaggcgctagggctctgagcccctctcagtctctccagctccactctcaggcc

SEQ ID NO: 344090 - DNA, 122 bp, Homo sapiens
tatcccagccccgtctgcagggagccggaggctgctgctgctgctattgtgtggatgccgcgcgtgtcttctcttctttccagagatggctaacaggggcccgagctatggcttaagccgag

SEQ ID NO: 344091 - DNA, 122 bp, Homo sapiens
aaataatctatatatagtagtccctccttattcagtttcactttccctagtttcagttaccggcagtcaaccgcagtctaaaaatgttaaatggaaaatttcagacatacaaaaatcatgtt

SEQ ID NO: 344092 - DNA, 122 bp, Homo sapiens
ggacggcccctacctccgagaccgccccgcctccgggaccgccccgccccgcctcgcctccgacccgtcccccgcgcgccactgcagagcctgtccgtcagtccctaggtatccgcactgct

SEQ ID NO: 344093 - DNA, 122 bp, Homo sapiens
taggcaggaaaacgggcactgacgggcagtgaattctcttgctcggaatgcggctgctggcggcctgaggacacacccagcgtcaacaacctctgtcctcaagactctcccagaatcctggg

SEQ ID NO: 344094 - DNA, 122 bp, Homo sapiens
cctagtcagttcccggggactgtggagatgctgcacgggctcagcgcgaaccttgctgcacgggctcagcatgggctcacggcagaacccaagcacccaggggactccacgcttacccggaa

SEQ ID NO: 344095 - DNA, 122 bp, Homo sapiens
aattgcatcagtggaaggggacatagcttctctcttagagagaacagattggaaagcaatcggaaaattgcagttttggtctgtagtcctcatgatatctgctatcagtggggaaaatggag

SEQ ID NO: 344096 - DNA, 122 bp, Homo sapiens
ctcgtcggggggcctcgctgagcctccgtgtcccacccggagccagggtgggcaccctcccgtccccgcagccccggaagatctggcaggtggcatgacacccacccgggggccctggtcac

SEQ ID NO: 344097 - DNA, 122 bp, Homo sapiens
tgtcctcttaccagggtcagcctcatggaaacaggcacaataatagcttcagacaaaagccggggatgatatcgaactgactttcccaggagaatcctttctcagaaggccacgacattctt

SEQ ID NO: 344098 - DNA, 122 bp, Homo sapiens
cggcccttcccatcccgcggccccaagccactatatgcccccctctgctgtttccattcacgtccaggccaatattgcattccacagaggaggcgtctcaacgtcaagccaataatgtactt

SEQ ID NO: 344099 - DNA, 122 bp, Homo sapiens
gtggaggaaagtattaaggaaaccttttacagaagaggaacacttaaccctgcttgaaggcgggtggaggaaagtattaaggaaaccttttccagaagaggacttaatgtgcctctcgtttt

SEQ ID NO: 344100 - DNA, 122 bp, Homo sapiens
gggacatctgaaagggagagaactgacaaggaaacctgcatagattctagagcaggtgctcgctaaggtgtaacttgctggcttagaaggtactggcaaagacacagggttgcagacatcga

SEQ ID NO: 344101 - DNA, 122 bp, Homo sapiens
gtttcgttcttggggacttggaaactcgtgggcacctttgcaatttgtcaagaagctgcacggcccttccgacaaaagcaaggaataggaacagaagtccaagacttcggatcaaggtgcca

SEQ ID NO: 344102 - DNA, 122 bp, Homo sapiens
ttcttttcccccacactgatacagtacctgggtatcgctgctggttgttcaggtcccaagcgctcttcatttagcagatgctgaatgctggccggactgggtcctttccttcaaggtggcag

SEQ ID NO: 344103 - DNA, 122 bp, Homo sapiens
taaagcaagtttgtctttttccagacgtgcattaagattcctttttcaagtgttctaaagcgcaggcgcaggctgttttgcggttgcctcccggcgcctcttgtgcaggccggggtcgccct

SEQ ID NO: 344104 - DNA, 122 bp, Homo sapiens
tttccaaagcagggtaccaacatgtgtgaattccagtacagcaaatagaatatttaataccgaaagtgtgtggtatggaggaatcagcagataaatgttctggggagagatagccttttggc

SEQ ID NO: 344105 - DNA, 122 bp, Homo sapiens
aaaacaggcactcctgttttcgcctcaatgttgcattttctgagaccactctagctgtcacgtcccccccatcctgtgcccatataaacctgagaccttagcgggcacacacacaagcggct

SEQ ID NO: 344106 - DNA, 122 bp, Homo sapiens
gcgggcggggcggcaggctgggctctggcaaagtggtctggcctccatcagtctcttcctcgaccctgcggggacccgcttcctccctactccgggcctgggagcggaaaaagtttgggcag

SEQ ID NO: 344107 - DNA, 122 bp, Homo sapiens
aatccgagggtcctcagggggtccccgagggggcggggccgcagggagtgtctgaaagttcggggactgggctgggggtcgccagacggacgggggctccggggtgctggtcgcagccggga

SEQ ID NO: 344108 - DNA, 122 bp, Homo sapiens
ggcgggttgaggtggcgcttgctgctggttaagaccagacctctgctgctttgtagcaaacgcgcgtctcccggtttcacaagtggctgactcgttaacctcgtggttagctcagtttttaa

SEQ ID NO: 344109 - DNA, 122 bp, Homo sapiens
cgtccctattacgatcacatcaaactccgaagggagagtatccgccatcttgacgggaaacgtgtcatgtgactattacttgtggaaatgagatcaagttaggcattccctccgtggaaggc

SEQ ID NO: 344110 - DNA, 122 bp, Homo sapiens
catactccagcagggtccttattttaatattttttactgtaattacctctttaggagatgcgcaactagttgtgttcttcttttttatattttttctcagttttcttccatatagactgaga

SEQ ID NO: 344111 - DNA, 122 bp, Homo sapiens
ctggagagttgaggtttggggacctgttataaacttacccacacagtgatggatgctccccgtacagtagaaaaaatgtagcacggaagcacgtcagcttagctggctgagcagatgttgtg

SEQ ID NO: 344112 - DNA, 122 bp, Homo sapiens
gcctgtcccctagcaatgcctccccgtacccgggtcccgcagacttacgcgcaagccgcgcgtagggcccagaagcagcagaaccagcaacagagggaggatgcgaaccaggaaccccggca

SEQ ID NO: 344113 - DNA, 122 bp, Homo sapiens
agcagcggttccatctccacactgagacttgcctttgagtatcgcatcacacacctccaccggttccattcatcagtaagcctgtgggttttgcctccaaatctctctgaagtccttccgct

SEQ ID NO: 344114 - DNA, 122 bp, Homo sapiens
ctccagcctgcccttcctacagacacatgtggctcctcagtttctattttcacatctttccgggatgctgacagcagggagtgaaggtggaggcagagaagcccgttaggaggctggtgctg

SEQ ID NO: 344115 - DNA, 122 bp, Homo sapiens
cgagggccccccggagccccgcccagcgcctgcctcgctccgcccccgcccccggagccccgcccagcgcctgccacgctccgcccccgccccgccccagagccccgccccgccctcaccgc

SEQ ID NO: 344116 - DNA, 122 bp, Homo sapiens
gctggtgcgcctgaatcggatgctctgcactgacacttggctggagccggagctggagtccgactcggtggacgagtcctcctcctccgagctgacttcactggaatccgaggccccgctgc

SEQ ID NO: 344117 - DNA, 122 bp, Homo sapiens
acgtcgacatttcaaaatccactcagctgtgtgttagggagctcccgcctgagcttcagtcgaaagcgattggactgtagcgtaaccccgtgctgtaatataggggccccaagaccaccctc

SEQ ID NO: 344118 - DNA, 122 bp, Homo sapiens
ctgggggcagcagggagccaaggtaggtgtttgagctgaagaggagcaatgtcagatctgcgagtaagaaagatccctatgtggccagcttggcagccagaaagaagatgataggttcctct

SEQ ID NO: 344119 - DNA, 122 bp, Homo sapiens
agtatctgtgagttagctgttggctgatttagacccatttccactgctgagtgttgttctcgcattcttctacaacctcagtctccctgagcccacaaacagaagttaatggcgagtctagt

SEQ ID NO: 344120 - DNA, 122 bp, Homo sapiens
ggagcaggttggagggacgctggacgcagagcgagaagttaaggtctacgtgacttccaccgcgcgttccggcccccctcgtgccttcccgcttgaccccgtggcctgggctgggacacccc

SEQ ID NO: 344121 - DNA, 122 bp, Homo sapiens
cgaggagcggcgcgccgaccgggccgagcggagaggccgcccattggccggccagcgccacgtggccgcccccgccggtatattaggccactatttacctccggctcactcgccatgggttg

SEQ ID NO: 344122 - DNA, 122 bp, Homo sapiens
ccccggagccccgccccgcgcccctagccaatgagtccgaagcgcctgctctcggagccccgcccccacgtctcagccaatgagcccggagcgcgccctccagcagcccctccctcacgtcc

SEQ ID NO: 344123 - DNA, 122 bp, Homo sapiens
ggcaagggtggacaccgtgtgggattgagaggggcctggtggggtgggttccaaccaacccgcccctcgagtgccggaatcagcaggacgaatcgggtcccaaagatgtgggcaagactgtt

SEQ ID NO: 344124 - DNA, 122 bp, Homo sapiens
gatgcaggcacccagtcctgggcagagatataaatttcacgcctgttctcactggacctacgcactcccttccttccttcccattttcttggccttaattcctggcaacgggaacccatgga

SEQ ID NO: 344125 - DNA, 122 bp, Homo sapiens
gttaagtgcacacgtatgtcagttcatatgatacaaaatagcaataatccaagtgctcagcgggggcgctgcccggtggctctggccccgccgggccgttggcccagcccgccggcccctga

SEQ ID NO: 344126 - DNA, 122 bp, Homo sapiens
cggctgggagccaggaggtctgaattcaggccccagccagtgtgcactactgtgtggcctcgagcaagtctctgctattctctggcctccatgggctgtactccatggtcttccctaagttc

SEQ ID NO: 344127 - DNA, 122 bp, Homo sapiens
taaacccccggctcggatccagctatgcccgatgctgccctaagctttatgaggtcgccacggaaccgcaggtgagggccctctgaaactccatagctttcgccatggagctacaaactaga

SEQ ID NO: 344128 - DNA, 122 bp, Homo sapiens
ctgtgccccaacacactgttcacacttgcacagtgtcacacacgtgcacacatgcctgtgcgtgcagtcacacacagaagacagtcgccaccctgtgtgcacgtacatggcaatcacacaca

SEQ ID NO: 344129 - DNA, 122 bp, Homo sapiens
agtctcatgagcgtgctctggtacgtcatcttcgcgcgacgttcggttcgctgtgtgtgtcgccggctccttgagggtccatgtgatttttacgccagtgctgctgaactgtgcagggtagg

SEQ ID NO: 344130 - DNA, 122 bp, Homo sapiens
actgcctggccgacacactcacgggtgccggggccactgcacgcatgacagtgccaggagcgtgcacttactccccgagcccttccctccacggccaggcccgcagtgtgagtgccagggcc

SEQ ID NO: 344131 - DNA, 122 bp, Homo sapiens
gtgtgcctagaaatacgtacatgggagcgctcagctcaaagccccagggtttctgggactcgcgtgtccggggtcggggtcccaggtgggtacaggtgggagggcgaacctgcgggtagggt

SEQ ID NO: 344132 - DNA, 122 bp, Homo sapiens
accacctagccgctccgcatggcggatccagccaatcagcgcgccgtgcaccgagcttcccgcctacgcgaggctgctcatccaatagaaaggagctttaccgctcgggacttgtcaattga

SEQ ID NO: 344133 - DNA, 122 bp, Homo sapiens
ccttttctgcacaactctttcctgagtctcgacaccatcctacactcacagagtactgcacgcctttctgacatagccgtgtgtcggtgtgctgtgtgaagtgtttttgtgtatatgactac

SEQ ID NO: 344134 - DNA, 122 bp, Homo sapiens
tccccattcggtcactgccacgggctgtacacctgagggggaaggacgggggcggcggcgcgaggaggaagggcttcgccgccaatctgtccctaaccagtctgcctctcaacccctgcctg

SEQ ID NO: 344135 - DNA, 122 bp, Homo sapiens
tgagacggagtctcaccctgtcaaccagagctttgccctggaactcttggagtgcaacggcgcgatctcgggtccctgcaacctccgcctcccaggttcaaacaattctcttgactcagcct

SEQ ID NO: 344136 - DNA, 122 bp, Homo sapiens
gctacaagcagggacagggcaagctcgcaaacaaaaaactgagacccgatgcggtgcatgcggggagcagagctgtgcagggcgctgcaggagcagaggagggggcggggcaggacggcttc

SEQ ID NO: 344137 - DNA, 122 bp, Homo sapiens
agtcgttgctagaggaggtctgacttcctgcaggtcttactgcggagcaggccagccccccggactggctgctgcaggtgtggttggctctgtttctgttttttgttttttttgagatggag

SEQ ID NO: 344138 - DNA, 122 bp, Homo sapiens
gggaccaagtcctatatctctttcaaacttccaggttggaggtgttcaagaaatagttatcgaaaatgtatcaactatttctactcatgagtaagtgagctgcttctcatgattacttttga

SEQ ID NO: 344139 - DNA, 122 bp, Homo sapiens
ggagcaggagggggtggggaggatccagagaagcagaggaccaggaagagagcaccccaccgtgggctcctggaccagagcaactgggggacttacacttgccagcacagcacactcctctg

SEQ ID NO: 344140 - DNA, 122 bp, Homo sapiens
tgatcccggatccccctccagacgctgctgtcttgacctcacccccagcccctgctcccccggtgacccctagcaaaccaatggccggcaccacagaccgagaagaagccactcggctcttg

SEQ ID NO: 344141 - DNA, 122 bp, Homo sapiens
gcagcggaattggagcgccagaattggagcgccagagagacaccggatcttaccttcttgcgctggagttgcccacgctgtctccatagcacgaaaaagaaccagggtaggcatagcaaagg

SEQ ID NO: 344142 - DNA, 122 bp, Homo sapiens
cgggggcgaggctgggtggggggcagggagccgcagagcgccaaggccatgctgaatgcccgttctagagaattcaggggccccatcccgggtttctggggtgcccgggcggcctgtgctcg

SEQ ID NO: 344143 - DNA, 122 bp, Homo sapiens
aaaaataaatccgggacatgccattccccccccccgccccctgcccccattgcctgtccccgtccccaccccttgtcattgcattgtgaactcttggacttgatagtgaggttgctggttgc

SEQ ID NO: 344144 - DNA, 122 bp, Homo sapiens
ctgagctgcgatctcaattccgatgcttttcatgtggctgaaatagctctgtgcctctcccggtattgagaactgctcctggctcggggctggaggggaacttaaaccgttaaggctaagtg

SEQ ID NO: 344145 - DNA, 122 bp, Homo sapiens
gaataaccaggtctgacacgcttcagtggccacacatgggggtggtggggaagcgggaggcggaatggacaggaaaccccatgaccttgggagctgccaggagcagcctctctccagctggg

SEQ ID NO: 344146 - DNA, 122 bp, Homo sapiens
atatgggctcattggctgggtgtggtggctcacatctgtaatcctatcactttgagaggccgaggcaagctgatcacttgaggtcaggtgttcgaaaccagactggctgacatggtgaaacc

SEQ ID NO: 344147 - DNA, 122 bp, Homo sapiens
tgagatgttcccatgtagcacatgtggatgagttcacactcagaaatgccaggccattcacggtctcacagctagtgagcactgcactctagattctgcccggcttccacactttgcctgca

SEQ ID NO: 344148 - DNA, 122 bp, Homo sapiens
tccacactcctgctctctggctctctgtgtctctcgctctttcgaaaattttcctaagtccgggcgcgcgctccctccccttccgcccaccccagcccctcggcggcgcccgcgggaggggg

SEQ ID NO: 344149 - DNA, 122 bp, Homo sapiens
ggatcgaggacttacagcaggaggtaagcggtgggtaagtgagctttaccgcctgagctccgcctcctgccacatcagtgacgacattaggttctcataggagcacaaactctattgtgaac

SEQ ID NO: 344150 - DNA, 122 bp, Homo sapiens
atgtgttcaggaaggtggaggtggaggtggaggatacaaaatttagccagatgctaataccgatctaatggaggaaaaaacaataacttcaaaggggttgagttagaaattattcttggaac

SEQ ID NO: 344151 - DNA, 122 bp, Homo sapiens
tcatggccgcgccgccgcccgcgcccgagcaggcggggtctgcaggggacgaggggttcccgccccaaaccccggctcctgtccgcaggccccgcccctgcagcggctccgccctgcgtccc

SEQ ID NO: 344152 - DNA, 122 bp, Homo sapiens
ctttcctcctataggaaaggaagatgtgctagggcatttacttagatgtgggtcagctggcgctagtttgtttaaggagttcctgctgtgtgccagtagcttttccgggccctagggtcctt

SEQ ID NO: 344153 - DNA, 122 bp, Homo sapiens
agcagcatggacaacgcggtacaacggggcgagagcgccaaccgcggacaacaggaagggcgtgagtgagggccaacgcacttccttcttggacagattaagtacgcaatgaagcatattca

SEQ ID NO: 344154 - DNA, 122 bp, Homo sapiens
gttctcgctcccccgcgttgtggttctcaggaggcctcaggaccacaccgtgggcagagccgggccactgagcctgcgaggacactggatcaggagcaggaagagggcagggctggtacagc

SEQ ID NO: 344155 - DNA, 122 bp, Homo sapiens
tgattaacgtcccaagtttagcagcatatttagccaaccttctttccatctggggcagaccgggttgaaaatcaagtgagaggaatttatataataacattacaactatttagctgtttcta

SEQ ID NO: 344156 - DNA, 122 bp, Homo sapiens
ggctctgggaactctgaagtcacacaatgtcacaagggccacacttgtgttggtgcagcgcggtggctgcgagctcggacccgaggtcccagggctgggtttggatcccactccgccatttc

SEQ ID NO: 344157 - DNA, 122 bp, Homo sapiens
tgtcaccagcaaataatgaaacttcatcacacaaactcctatgcgcttgccaaagttccccgtacctttcaacttgcccgtagctgaagggctccctgtacaatggaagcccttctgccttg

SEQ ID NO: 344158 - DNA, 122 bp, Homo sapiens
gagaagccggggctcagaccctggtctcgcctagggagagcagacgctgacagataatctcggttttttcctcaggcacttcaaggtccattttagttcactgcttctaatcttgggcttca

SEQ ID NO: 344159 - DNA, 122 bp, Homo sapiens
gaggcaggcacacaggagaagggctggagaggagaggggccccaagttgtgtagggctgccggggttcgcccgcttcctttataggccaccaagtgggcgtagcgattacaacaggcttgct

SEQ ID NO: 344160 - DNA, 122 bp, Homo sapiens
atttgttttctctacggctggttggtgtaaggagtgtttcaccacacggagatgtggtcacgtgacttgtcaactttcacccaggatgtctcccttctgacttccccttagcaaccaagtcg

SEQ ID NO: 344161 - DNA, 122 bp, Homo sapiens
ctgggtgcctttccccggggggctccgaaccttcccggcagccgcgtggaggtaaaggcgcgcgtcccacggcagcgtttttgttcccgtagcgtgctgggatttgcaaaggcttcccaggc

SEQ ID NO: 344162 - DNA, 122 bp, Homo sapiens
ctgacaatgaggtgcaaaatttagttgtgtggggtagagttacaatgtaagttgaattcacgtcttcactaagtttctcacttgaaaactagggcagtcattgggaaagagtgaaataatga

SEQ ID NO: 344163 - DNA, 122 bp, Homo sapiens
ttcccaaagctgagtttgcagaagtttccaagttagtgacagatcttaccaaagtccacacggaatgctgccatggagatctgcttgaatgtgctgatgacagggtaaagagtcgtcgatat

SEQ ID NO: 344164 - DNA, 122 bp, Homo sapiens
ccaagatgaagcccatcggggaagtggggcggggccaacccggcaggccccgccccttcgcggcgcttcctagttcggctggttcttctgtcgccggcttcagcagcccgcgcccgggcagg

SEQ ID NO: 344165 - DNA, 122 bp, Homo sapiens
tgtccctgtcggccctgggcagcgtcatcttggccctggtcaacggagccaagcatgtgccgtatcggtgagtgtagggcctgggcaggtgccgaccagggtggccccttggtgacctggta

SEQ ID NO: 344166 - DNA, 122 bp, Homo sapiens
aaggctttcccagaaaagaaaaaatgaggagtcttgcgacttgaacagccctcccctgcccgtctgcaaatttgaattcctggatttcacaacagtgagctcttcttgtgcctaccacccgg

SEQ ID NO: 344167 - DNA, 122 bp, Homo sapiens
gcccggccatgggctgtatcggctctcggagcccggcgggtcagggtaagaggcggaggccgggtacgggttggggagtcgggctgcggccgccggtgcgcgggccgcgggtgggtgggggc

SEQ ID NO: 344168 - DNA, 122 bp, Homo sapiens
tggaactctttcgcagaaatcgctagggcctccctagctctgggccccttctcctccaggcgctccagtttcatggaaaggcttccctatgaaactgaaaacgcgctggtaagaaggagaaa

SEQ ID NO: 344169 - DNA, 122 bp, Homo sapiens
cggagggggacccaagagccgagcgccccacccttcccgggatggttggaatagttggagcgggagactagggcctccgctggcggcgggagcgggacgggcggaggaatgcgagctgagga

SEQ ID NO: 344170 - DNA, 122 bp, Homo sapiens
caacacccccctgtgcctcccagatcaccagggatcgtctcttacctgacacccagtgcgcgccgctcggtgcccgacgcccactgctccgcagccttagccaccgagttcctctccagcag

SEQ ID NO: 344171 - DNA, 122 bp, Homo sapiens
gtggtcctgaatgtattgaaaccacgtcaacaaggtggggtcaccatgtgttataaatgacgtgtggtcctgaatgtactgaaaccacatcaatgaggcgggcgtgggacacagaagtgcat

SEQ ID NO: 344172 - DNA, 122 bp, Homo sapiens
ggatgccgagaacgcgagcgatccgagcagggtttgtctgggcaccgtcggggtaggatccggaacgcattcggaaggctttttgcaagcatttacttggaaggagaacttgggatctttct

SEQ ID NO: 344173 - DNA, 122 bp, Homo sapiens
gcttttccattctttcttgcccaggggaggagcgctacatctgctggtactgctggaggacgtttagataccccaacagccttaaggcacacctgcgtttccactgcgtgttcagcggcggt

SEQ ID NO: 344174 - DNA, 122 bp, Homo sapiens
tccctcgcacccagcaccgcccccgtcccaccaacagcacccagtccccccgctccgccacggcacccagtcccctcagggcacccggttccccgcctccgccaaggcacccggttccccgc

SEQ ID NO: 344175 - DNA, 122 bp, Homo sapiens
ccctaggaacacggactaagtaaaatcgggggagctgctgcagctgagggggcctggagacgcagaagagagagagctgaagtacccagctgccccggcctccccagtggcacctgctggga

SEQ ID NO: 344176 - DNA, 122 bp, Homo sapiens
tttgagaaaccttgtgttgatggttctagatgtacttaaagatcaattcaaaataagttacgtttactctggtcttctgcttgagaaactttgggttgatggttctacatttacttcaagat

SEQ ID NO: 344177 - DNA, 122 bp, Homo sapiens
cagaagacgcctccgcttggctgtgggcctggctggggatgaacccctgtagccaggccccggggtctcgcctggtttcggtacgggcaggcagcgcaggcccgcggggaacgtaccccgca

SEQ ID NO: 344178 - DNA, 122 bp, Homo sapiens
agagcattgaggcaggttcacatctgggttggtagagctcagagatggcagcaagtgacacgcctgcccattttttcctccttcctgagcatgttggcatccatctttggactttttgcccc

SEQ ID NO: 344179 - DNA, 122 bp, Homo sapiens
ctgtggctgattaatatccacccaaagccacaatcaccttctgatctgaggagcaggtgacggggagattctgaagtctcttgataaattatgcaaacataatcaaacaatacacattgcag

SEQ ID NO: 344180 - DNA, 122 bp, Homo sapiens
ggatccgtagttgacttgacgtcgctgagcaacggaagagtgggcagcatttgctctgaacgctcgtgcgcgctaccgcccagacggaagcggaagtgccggtggagcgcgagtaggaagtg

SEQ ID NO: 344181 - DNA, 122 bp, Homo sapiens
cagctgccagtgcgtcatttcggaaaacgagtcaccttactttggggaagcaggggtccgcgaggtctcgcctctggtactcttagttgctagccttcagtaccagcagacctcaggctctc

SEQ ID NO: 344182 - DNA, 122 bp, Homo sapiens
gtggccacctgtagtggcaaggtgtggcaggaataactgccctgtgtgcaaagtactctgcgctttagattttgaagcattcttgaaatttctagtttttttttaaatctcctttgttttgt

SEQ ID NO: 344183 - DNA, 122 bp, Homo sapiens
caaaggtttcaaacccaaagttgctgctctgacggccaaaaactaccgtgggtcacaccccgtaagcccccggggcccggggaccccagacacaggacccaggagggagatggggcccgtgg

SEQ ID NO: 344184 - DNA, 122 bp, Homo sapiens
aatcacattgtcctgcatctctcaaagagtttacagtttagctaggtaagaccagaagcacgtgaaaagtaaaatatgtatatcagacataaccaggtaatgtcagagtacaggaatggtac

SEQ ID NO: 344185 - DNA, 122 bp, Homo sapiens
tgcagatactctttcttctttctccgggactggcaggctgactcccggttcttgatcattcgctgctgccgcttcagcagctttgcctaggcacccggaaggtcaaaaaagaatgacagatg

SEQ ID NO: 344186 - DNA, 122 bp, Homo sapiens
cgcgctgcccacaccgagatgtcatcctgggagcggccatccgtgaagaccaggccaacacgaggcacgttaagggcacggggccgtgcaccctgcgcctcggagaagctgtgctccaccat

SEQ ID NO: 344187 - DNA, 122 bp, Homo sapiens
cacgtgacagcgcgacgatgggccatcctcccagcctctctccccacagcctgcctcatccgagggtcccaggcttccagagccatggcttctccgcccgccggatacccctctgggtgtcc

SEQ ID NO: 344188 - DNA, 122 bp, Homo sapiens
agtgggtggacccaatgccaggccggccgtgcttcacgggcttgtaggtgatggagaactcgcccaggtcgtggccgatcatctccagcttgatctccacctggttgaaggtcttgccgttg

SEQ ID NO: 344189 - DNA, 122 bp, Homo sapiens
cttaccacagggttaggtgcttaagagctggtgaagtcatcaggcaaggtggaagacagacgatgtgcaagaagtgtgtcacagccactcagctggccacacccctgcccatctggtcacgc

SEQ ID NO: 344190 - DNA, 122 bp, Homo sapiens
gggctccatgtgcagcccagggagacccaccctcccgattccacacactcaggcccagagcgagtcaggggccccctgctcccacactcagacccttgcagggcccccctccttgacttccc

SEQ ID NO: 344191 - DNA, 122 bp, Homo sapiens
cctttttcacatcctcagatgaaatccagcacttctgctgcacggcagcgtgacagttgacggcagggggcgctcatgcggtcgttggagtgagagttcgctgcctactttttggtagctct

SEQ ID NO: 344192 - DNA, 122 bp, Homo sapiens
tactgctatggctccagtttctgattcctccaagttaagatgggttggtaaattctgccacgcagaatgcgcttctagccacgcccactgtgtatcaaaccatgcccactgtacataaacca

SEQ ID NO: 344193 - DNA, 122 bp, Homo sapiens
gatcttctattgtggctgtgcattaaaataacttggggagcttgtaagaaccctttgccccggacgcatcccagaacaagtacaggacaatgtctgggtggggcccacccaggtatcagtag

SEQ ID NO: 344194 - DNA, 122 bp, Homo sapiens
ccgcgcggcccacacaggggacactcctgtgagggcccggccagggcagcccccgatgcccgtgcccaggttccaatgcacctcctcacggtgaggggtcttgctgggaagaggaacccagg

SEQ ID NO: 344195 - DNA, 122 bp, Homo sapiens
agcgcgtacctgattcaccacgtccatgtccgccagcagcagcatcagcaatgcagggggcgggaggctcggctagcaagggcggcgcggggcgcggcgggggcggcgcgcgctcgttggaa

SEQ ID NO: 344196 - DNA, 122 bp, Homo sapiens
gaggtgaagaaaggaactcaagtcccgtaaagatcttccacacagctgaataataaaagacggtatgcacccaaatgtcaagtaaggagaacccagagaatgacctattgcagctcaagaga

SEQ ID NO: 344197 - DNA, 122 bp, Homo sapiens
aggacggtgcccagcaggggcggccccaggcaggtgtgagaacctcagcgggcccaggaccgtgctcagcaggggtggccccaggcaggtgtgagaacctcagcgggcgcaggacggtgccc

SEQ ID NO: 344198 - DNA, 122 bp, Homo sapiens
cctttctccccaggagcagcagcccaaagctactggaggagagaagaagggaggaggaagcgtctgggcatgagagcagcaggagttgaggttacagagctgtcgaaatctctcctgcctgg

SEQ ID NO: 344199 - DNA, 122 bp, Homo sapiens
ccccagccaaccgcagggattcattgagcctattatgagggcggtgctggcagctgtttccgcccttttcctcggaacttcaggcaggtgtggctgctccacccagtctggggccccaagcc

SEQ ID NO: 344200 - DNA, 122 bp, Homo sapiens
cagagccgagtacaacatcaccatcaccatcacagacttggggactccaaggctgaaaaccgagcagagcataaccgtgctggtgtcggacgtcaatgacaacgcccccgccttcacccaaa

SEQ ID NO: 344201 - DNA, 122 bp, Homo sapiens
aagagtcaggtggattttgtggagtgagccgtgctggggacttcaccctgtgtcacctggcggggccaccggagggtgcatccccccatcttgattggctccccctagtcctagttcttgag

SEQ ID NO: 344202 - DNA, 122 bp, Homo sapiens
cgctggactccagaaccccactgcctcctgggcctctccctgcagaggtctcaggcatctcgggcttggccgtagtagggagctggtctcccccacctgacctgctctcctgcagcctcatc

SEQ ID NO: 344203 - DNA, 122 bp, Homo sapiens
tctaccgcggtccttcccctccccaccgtcttcccggtgtcggcccggggctgggcatcacgcttctgctcttacagagctgacagcctgcaggggagacacggagacagacacgtaaacaa

SEQ ID NO: 344204 - DNA, 122 bp, Homo sapiens
atttccaggaaactccatccaagaagggagcggtaagctgtaacaggcaaggtgagccatcgttactgtgcagaggtagcagaggaaggaaggatcgtgcctccctaacaccataatgccac

SEQ ID NO: 344205 - DNA, 122 bp, Homo sapiens
ggtccactgaagcctgctccccggcaggcgcgcaggcctcgctcccccagggcccagcgacgtgggcaccgctccccaccagcccagccgacactgccagccctgagatgccttccctcacc

SEQ ID NO: 344206 - DNA, 122 bp, Homo sapiens
ggctgcttcctgggcgcgcgtcgggttccggcgaccgaaaccgcgcgccgggcgctcttgcgcctaggctttgagtacaacaggttggtgattcagttcgacagaaactcaaagtgctgagc

SEQ ID NO: 344207 - DNA, 122 bp, Homo sapiens
tgttttctgcctgtgcatgtgtcaacatgtgtccccgagtgtcggagggagaccccgccccgaacccagagccccgtgtgccagcatgcaccttctcgaaatggccgctgcggatgtagtag

SEQ ID NO: 344208 - DNA, 122 bp, Homo sapiens
cagacgcttatcgggtcagctctgggacctgggagaataccacaggtgcacacgcacacacgtggacacacgtgcatctgcgcatatggacagagacaacagcgagcctctgcaaagcgcag

SEQ ID NO: 344209 - DNA, 122 bp, Homo sapiens
cttaaaggtcggagaatgtgcagaaacccgtgggaactcctggtgtgtacttatagagtgcgtgcatgcaggcggggtcgactcactatttatttcatagcaatttgatgatgatgatgatg

SEQ ID NO: 344210 - DNA, 122 bp, Homo sapiens
caccccgtttgccagtcggctccctctccctctcccgagggctccatgcgtcattaaaaccgaaacaagcccctgctctgatggttaaaccagatgcccaggccccatcctgcctgggcccc

SEQ ID NO: 344211 - DNA, 122 bp, Homo sapiens
tcaaaataatgtacctcctggcacgacgggctgagaaaagcaccgcttcactgccgcaggcgtcttgccacacaaacccaaactgagagacattgtacaacataaccagcgagagtgtcaag

SEQ ID NO: 344212 - DNA, 122 bp, Homo sapiens
atgttcgaattgttatttcactaagtaatctctgctaatttagtctctatttcatctcaacggaatgccttctgagttcctataattgtgactaattctctgagacaacatcagcagtatca

SEQ ID NO: 344213 - DNA, 122 bp, Homo sapiens
gtgcccgttgcggaggctcgggccgcgcgggagcccaccatggggggggctcgggaatggcgggctgcaggccccgagccctgcccctctgggaggcggctgaaacccggtgagaattcgag

SEQ ID NO: 344214 - DNA, 122 bp, Homo sapiens
cctggctagtgagcatcagggctgcggtacgtacttgagtatggttctagcaccttcccccggagcgtgagtgcgtggcaggtgctgtcactgtggctgagttagctgctccgcttccccaa

SEQ ID NO: 344215 - DNA, 122 bp, Homo sapiens
ggctccctggctggctgcggctgcaccctcgagggttgttatagtaaccacacagacgcacgcagcttcgcgtgtgtgccgaggaattcacgggcagtacataaactggactccctgcttca

SEQ ID NO: 344216 - DNA, 122 bp, Homo sapiens
agttgtcattaatgccaccctcacctcccaggaactgcaccactaggacggacgacacaccgacgtaatgaccatagtaagaccccatgtacgtggctaatgaggcagtgacccgacgtggc

SEQ ID NO: 344217 - DNA, 122 bp, Homo sapiens
aattgtccttagaggtgatcctggtttgcagtatgcgttgggtgaggtctatcctgggggcgagaagttagactcaaagattatctttgggtttggagggaagaaaggcaagcatgaatgtt

SEQ ID NO: 344218 - DNA, 122 bp, Homo sapiens
aaacaggcagtgaaaggcttcaacagttcctttccagttttccacgggggccccaaggaacgcctgcggctggaattccccgggagacagggagctgtaacaatagaggtctgcactgtggt

SEQ ID NO: 344219 - DNA, 122 bp, Homo sapiens
gctctgcagccgacagcatctctgaacttagctctgtggggagagttcatccccaccctgcgccatgactccctcactccccggtcacaaccctccatctccagcacgctgaagccctttct

SEQ ID NO: 344220 - DNA, 122 bp, Homo sapiens
gcgtgttggagcgggaggcgtgtgttcagggcagggcgcctgtgtcctcggatggggttccgagttcctccaggtgcatccctgcaggctgagctgctgcataacttgtagctcctccagtt

SEQ ID NO: 344221 - DNA, 122 bp, Homo sapiens
ttgaggtaatttttatttctcattccgcaggacaggaaacagggacaaagaaaaagagaacggcaggcatcaaggaagacaatgggaggaaaagtgccctggaaagctgcctattaggaatt

SEQ ID NO: 344222 - DNA, 122 bp, Homo sapiens
tagagcggtgagtggggtctcgagcgcatcccgggtgtttgtgccgaggctggtgacgtccgaggtggcctctgagtgtgctgacttgtgaccctgagctgttgggggctcaccggtgactc

SEQ ID NO: 344223 - DNA, 122 bp, Homo sapiens
aacgcccgggcgtggggctgggggtgtggcgcagcgaggccgcgcagcaagcagtcctcccggcaccgtcggaagcgcagttgcagcagccgtcggacaagcggccggagcagccacggaca

SEQ ID NO: 344224 - DNA, 122 bp, Homo sapiens
gctgcagctgggacccccccccctgcatcttgctggcctggcacctgggtccctgggaggcgccacactggatatagccacgtggggcagcccggtctccataacccacactccagtcctcc

SEQ ID NO: 344225 - DNA, 122 bp, Homo sapiens
ccccgcagccggctccacaatggtctgctccggttgccgggtgcggattcgggttccggacgcaaggctgcgagttctccgctgcttgttgtggccggggttactgcggcgaccgccagagc

SEQ ID NO: 344226 - DNA, 122 bp, Homo sapiens
caggctcccaccgaagggcggctttcctcggtcaaaaccttgcctaagaaagcatcactacgtggtgttttctattccttatttcaaatgatcctcgcaatatctctttgaagtatctttaa

SEQ ID NO: 344227 - DNA, 122 bp, Homo sapiens
gaaagacttctcttgatgaactgtagagggcttgccctgggaaggcaagcctgaagggggcgctgcagggtctaattcatgttcccagcacaacagagctgatctctccaccacctgatgag

SEQ ID NO: 344228 - DNA, 122 bp, Homo sapiens
cttgggctccagccccacaagggcgtcttctttggctggccaggcggacgggacgggggacgggggcggggactggcgggaggggggcgggacaggctcgctctcctcctacttagcgagct

SEQ ID NO: 344229 - DNA, 122 bp, Homo sapiens
ccacctccgacgctggagatgacatttcaacatgagattctcaccaggtgccacctccgacgctggagatgacatttcaacatgagactctcaccaggtgccactccgacgctggagatgac

SEQ ID NO: 344230 - DNA, 122 bp, Homo sapiens
gtaggcacgtcatgttgtccatgtgatccgtggggacgtgtgggcacgttatgttgtccacgtgattcatggggacgtgtgggcacgttatgttgtccacgtgaaccacggggatgtgtggg

SEQ ID NO: 344231 - DNA, 122 bp, Homo sapiens
ctctgctgcttcccctgccttcacctcctaaccaagcggtacctgcctgagaacaagggccgcggaaggacgggagtgcctgagccctgccaggaaattcaccaacaagaaggcagaaacag

SEQ ID NO: 344232 - DNA, 122 bp, Homo sapiens
cgacagacggcaaacaatggcttctattctccagctttcctcgaacccaaggagcaaaaccgagtctccctaaccagcaacacagcttccaaccaaatgtaccaacaacccaccaactcaca

SEQ ID NO: 344233 - DNA, 122 bp, Homo sapiens
agaagcaccgggtcctcgaaggagcccccgcacagaggacacgtcgccagctgctccagacgctccaccagccccgggcccagctcgggcgcatccatggaaagccaggatctggacgccgc

SEQ ID NO: 344234 - DNA, 122 bp, Homo sapiens
ctgcacacaaggcgccctccgtcgcagcctgggggagactacattacccagaaagccttgcgtcgagcggcagtactttgatccaatgaaaatccaagacaggggcatttccgtgtgggtct

SEQ ID NO: 344235 - DNA, 122 bp, Homo sapiens
tggccaggctacccggatcgtccagcgcgacatggagtctgtgtgtcctcaccagtgctgcgtgacaggagccgggcaccaccgacgccataggcttgtcggtgtctcagcactgacaccgt

SEQ ID NO: 344236 - DNA, 122 bp, Homo sapiens
ggtaaggaaaacgtactagtaaatggccaggggaaacttgaggatactaagtgctgagcgcgtaaacagaagggtaggaaagatagcaggattaacatagaaacaaaaaaagtcacagatgt

SEQ ID NO: 344237 - DNA, 122 bp, Homo sapiens
agattaacacgtcagcaaatcaaaatcagagaattcctaaggcactctgtgcaacaggagcgggtggacgtgggggtgggtgcacgactggcgcggctgcctccacacgggccctcctgaag

SEQ ID NO: 344238 - DNA, 122 bp, Homo sapiens
tcttctgttttggcccattagccacgggctgtggtgatgatgagatgggctcccggtgagcgcagtgggagtttaggggagacggcgtgagcatccaggaatggggctgggcggaactcaga

SEQ ID NO: 344239 - DNA, 122 bp, Homo sapiens
gtgatgcccatccttctcccacagctgctggcccagctggcccaggagtgtcaggagcagcgggcgaggctcccccaggagatccgccggagcctgctgggcgagatgccggaggggctggg

SEQ ID NO: 344240 - DNA, 122 bp, Homo sapiens
ttttggaaaatgctaggatcaggcctttttgtccctgagaactggctgttaaccatgacccggcacaccaccatcccacctcttggtgttccgccaggtgccagtgagctgccagccagtgc

SEQ ID NO: 344241 - DNA, 122 bp, Homo sapiens
ggtccttaaggcggggccatccccggaccaagggactgggcggaaccgattagggcggagcggagggaatgtgaggcaaggggcggagccctgggaatcggggccggagagggcggggctct

SEQ ID NO: 344242 - DNA, 122 bp, Homo sapiens
aaaacatgtggaaggaacaaagaggtcaaccccattatccattaaaaaccatcaaggtggcggccctcactgaggggtacagttctccagctggccctcatctgccctccaaacccacatgc

SEQ ID NO: 344243 - DNA, 122 bp, Homo sapiens
cagccacacaggcctgcagtaggatggggctggggctggggctggcactggggctggccccgtttatcacttgggcctcatgaggggaaaagaaagaacagggggcagaggaggagcatggg

SEQ ID NO: 344244 - DNA, 122 bp, Homo sapiens
aagtgaggggtcttagctgtgcaggtggaaacaagtgagacacaaaggttaagggaggcacgcatcagttgagtcggggagaaccaggaaatatggatcacattcagatgagatctgggagg

SEQ ID NO: 344245 - DNA, 122 bp, Homo sapiens
attattctaatgaggactcacaaaagaacattctgtccacactgaaaatacttcgtgagacgagagaagagaggaggagcacacagatttaatccagaaaaacatcactttgcttcttcagc

SEQ ID NO: 344246 - DNA, 122 bp, Homo sapiens
cctcctgctgggcgaattctgggatgaccctgtgtcctgggcacatggctggcagggtcccgggggctctctggccagcctcccctgcaccctggcaccaaccagcctggccgagggtcagc

SEQ ID NO: 344247 - DNA, 122 bp, Homo sapiens
gctgggcggggagccagagactgattcgctgcggtcctgggcccagcggctgggaggtcccgccctggccgaggaaatgaagagggcgcagggcatgggggcggcgcgcacccgggacagtt

SEQ ID NO: 344248 - DNA, 122 bp, Homo sapiens
tggcgggataactctctgcagagggaaggagctcgcaaagaagggtggaggaggggaaaccgcaatggggaactgtcaccgaggctagtggactctccctgcgctttttttttttttttttt

SEQ ID NO: 344249 - DNA, 122 bp, Homo sapiens
cctccgagggcacggggaccccagcagggctggccatttattcccgcgctgtgcctgaaacgtgcaattaacacaggctggttaattaccccgagcaaggagacattcttccaccaccaggc

SEQ ID NO: 344250 - DNA, 122 bp, Homo sapiens
cacacttactttccggcagccggccgcgccgcgtttccgagaaaggaagctgtcactgtgcgtcttctgcgcaggcgcccgagccctcatgggaggtgtagtccaagtttgtgggaaatgta

SEQ ID NO: 344251 - DNA, 122 bp, Homo sapiens
cgagactccctgggcgtatgaccctcccagccaggtgcgggatataatctcatggtgcgccgttttttaagcccgtcggaaaagcgcagtattctggtgggagtgacccgattttccaggtg

SEQ ID NO: 344252 - DNA, 122 bp, Homo sapiens
gtccacaccgccaccccggccccgccgcgcgggcccctcgtacctggccggcggcggctgcggctgcggctgcagcgctgctcctcacgtacccgttccgtacttccccgttcgccacgcag

SEQ ID NO: 344253 - DNA, 122 bp, Homo sapiens
tcgagatcctcacagacgcccgggaacaaaaggccagccagcgtgaagtacagcgtgagccgtactttgcaccctattcgtgttgcgcggttcaagaatgttggctgcaaagtcttgccaag

SEQ ID NO: 344254 - DNA, 122 bp, Homo sapiens
gtttgcaagacgcgcctccctcccacccctcccccttcctcgcccaacttcccatagccgcggcctcaactaaaagtggccattgacctttcaagctttcgagcagtgatgcaatagaatag

SEQ ID NO: 344255 - DNA, 122 bp, Homo sapiens
acacaacaaaaggcagatttctctttctcactctgctaatctttaaatgtaaattctctccgccagctaagaggagcgacagataacatgttacatcttcacttctcctggtcttatcgact

SEQ ID NO: 344256 - DNA, 122 bp, Homo sapiens
ctacagcgcggcgccctccaactcgctcatccgcaaccttttggaccaggcgtcccacagcgcaggcaccaaagccccagccctaaaagggggagctgcggagctccggccccctgacgtgg

SEQ ID NO: 344257 - DNA, 122 bp, Homo sapiens
caggtctgaaacctggtcactgagccatggctgctggaggtgcttctccctctgcctggccgcattccttcaccccatgctgagcctttgctgagcgcctcctatgtgccctggctttagtc

SEQ ID NO: 344258 - DNA, 122 bp, Homo sapiens
atcttaagcggggaaaaaagtgaatgtaaaggaatgtacaagttttatggtgctcatatgcgatgcctataatgtgtttatataacacttgatgttttcattgattgctaccaggaattaaa

SEQ ID NO: 344259 - DNA, 122 bp, Homo sapiens
aagaaaaagggagtttcctccttttctcttgggctctcagccagacagccactggcaaaacgttggaaaggcctaaatttgtcctggatgcacttccctgatcctagtcccaccaatcccag

SEQ ID NO: 344260 - DNA, 122 bp, Homo sapiens
gaaggattctgcagggcatctagggttctgtgtctcctggcagtgtcctgatgactcaggcgccccaggcggtgaatgccctgttgactcgggagcctaagccttctctggtgggtgtggga

SEQ ID NO: 344261 - DNA, 122 bp, Homo sapiens
ctcggtgattggtccatttggagaggcctacgaaaaactcccggcctgagtccgggaggccgcggaggtttgagggcgggagtgagttagaaacaaggctccagacggccgagtctcccaaa

SEQ ID NO: 344262 - DNA, 122 bp, Homo sapiens
caccgtgctgctgcagtacctgctggagcagccctgaaaacagagcagctcagcgaaggccggcgaggccaagcagcacaggctccccagtcctgtcctctctcatgctgtggctctggttt

SEQ ID NO: 344263 - DNA, 122 bp, Homo sapiens
tttcccccacgttcctcagccgccacctcagagccttccccgcatccagctctctctcttcgggagaggcggcccgtcttgcccatccactgaataaccccttcaccccagttttttcgacc

SEQ ID NO: 344264 - DNA, 122 bp, Homo sapiens
gtgtgcagctcgaggctttgcaggaggcgcacctgcgatggccttaccgccaggtgagcccggcgggctctcatcgcctcagccggagattccaactgcagggagcgcacctcctctggcta

SEQ ID NO: 344265 - DNA, 122 bp, Homo sapiens
tgtgtgacgccgcctgtgtgagcctccgattctgtgtgtgacgccgcctgtgtgagcctccgattctgtgtgtgatgctgcctatgtgagcttcctacactcatggtgtgctgggtctttca

SEQ ID NO: 344266 - DNA, 122 bp, Homo sapiens
tctttttgaactttgggaacaggcctggtacaggctgagttctcacaagagacacacacccgtgtcactgtctcctgagctgtgccggacccgtcctacagactccacctcctctaggtcct

SEQ ID NO: 344267 - DNA, 122 bp, Homo sapiens
ctcccaggttcaagcgattctcctgcctcagcctcccgagtagctgggattacaggcatgcgccaccacgcccagctaattttgtatttttaatagagagagggtttctccatgttggtcag

SEQ ID NO: 344268 - DNA, 122 bp, Homo sapiens
tggctcctgcccacctccctactgtccccaaagtaactttgctgcatgctgagaggaccacggcacaatcctgcccaaaagtatacatgtatcccccgcggctactttaaatgtacttttgc

SEQ ID NO: 344269 - DNA, 122 bp, Homo sapiens
acctggcagatcttaagtcccccaaataaatgtagataaatgaatgaataaatgtaaatccgtgagtcatttcatgggaatgtggcactaatggcctgatttcaggcagggaactaggcaag

SEQ ID NO: 344270 - DNA, 122 bp, Homo sapiens
tcctagctcttttcccctgcagaagtttccaaagagactacggggctccgggagagcaggcgcttttaaatagccggcccctggctgccagccagtttgtagctgcaatttgagcttcccaa

SEQ ID NO: 344271 - DNA, 122 bp, Homo sapiens
ctccatattgacaactcctagcccaatgccagattataaatgcagattgaagtctggtgacggaatgagtgaaagaaacacaaggccagacatggtggctcatgcctataatcctagaactt

SEQ ID NO: 344272 - DNA, 122 bp, Homo sapiens
gagaatgcatttgggggccaaggtgtggggtgccgctggtgtaggatgaaggcatgacaacgccaggcagaagggcaatggggagccatagaaggtgttagagcacaggacagatgggggca

SEQ ID NO: 344273 - DNA, 122 bp, Homo sapiens
tctgcagccggcaggcggtgaccggctgggcgccgcagtgcatgccgtgacgcgtagtcccgcctgcgcctcctgcccggcagcggtgaagagaagaactaccactcccgaagtggagcgca

SEQ ID NO: 344274 - DNA, 122 bp, Homo sapiens
gcgcgcgtgccgccgccgcgggcactgcgcccgtttgcctgcccctcgtcggggatcgggcgctccctctgagacctgaaagggcacccaagtgccccctgtctgcgaagtccggcgcgggc

SEQ ID NO: 344275 - DNA, 122 bp, Homo sapiens
gccacgaggagaggccccgaggccaggacttcctctaatggacacagggcctttgagcaccgggtgactggggccccactccccagcagccatatgtgtttgcgagcgttttcagtcggtcc

SEQ ID NO: 344276 - DNA, 122 bp, Homo sapiens
ctgagttctattctactgttgccagtatgttttcagctgtgccagaaccgagcaggtctgcggctcctttgtaacatcaaaacggagacatttatcattgagatttatcatgggacagcctg

SEQ ID NO: 344277 - DNA, 122 bp, Homo sapiens
tgtctgtaatcccagcactttggcaggctgaggcgactggatcacttgaggtcaggtgttcgagaccagcctggccaacatggtgaaactctgtatctactaaaaatacaaaaaatcagctg

SEQ ID NO: 344278 - DNA, 122 bp, Homo sapiens
aaatctagatatgagtcaggtgaaaaccattcattgctctccccaattcagatctgcttccggctaagaacggtgaggagcaaaccgtgcaattcctcctggaagtggtggacatactcctc

SEQ ID NO: 344279 - DNA, 122 bp, Homo sapiens
ctgcctcgtgaactagacagcagatatcttattacttgcacttaacatggggcagcctagcgattgagtaactgggttgggttggcaacagctacccggcttcacttatgaataatagtaat

SEQ ID NO: 344280 - DNA, 122 bp, Homo sapiens
agctcgcaaggcgtagaactttttcacgttttcatttgtttcccgtaggggccccgagaacgtgcatgacaccatgatttcccccccattataaagatgagaaaaccgaggctctgagaggt

SEQ ID NO: 344281 - DNA, 122 bp, Homo sapiens
ccactggaggcagagctcattgaggcatctggaacccacggaggcctgtaagggctccctcgctgctccttgccttccctgggttggaagtgggggctagccactcccaccacaagtttctc

SEQ ID NO: 344282 - DNA, 122 bp, Homo sapiens
cccgaagttgtggaggagctgaccaggaagacctactgtgagtgctcccagcccccagcccgcgccccgcggtcacccccacacccaccgcccccgcccccgccccccggacccgcgcgcta

SEQ ID NO: 344283 - DNA, 122 bp, Homo sapiens
tcagtaggttaatgaataaataaagacatagataaattaacacacttaggaaaaaatatccggaacgtaaatcaaggttttctaggaagactttcccataatggaatgtctatatcctaggt

SEQ ID NO: 344284 - DNA, 122 bp, Homo sapiens
tcagtgggacaattaaaatttaatcataatccaagcaagataaaaaccctagccaagtaacgttaactaactctaaatgaactagattaagatttttctcttcactggttaactattaaact

SEQ ID NO: 344285 - DNA, 122 bp, Homo sapiens
gctgcattgtccaactcgtgaatgggttccttctgcttgggccaagaggaccatttgcagcggggaggcatccagaaacagcccaaggtccaacataataacctgcatgtgcctccacgcac

SEQ ID NO: 344286 - DNA, 122 bp, Homo sapiens
atgttactagaaggcgggaggggctgtgggaagctgatctcttgcacagatctacaggggcggagaggtgagctaaagtccagagcttgctcagagagggcagtgggtgttggagggggact

SEQ ID NO: 344287 - DNA, 122 bp, Homo sapiens
ggtgcggcggcagagcggccccagcagcctcctcctgtggcccaggcgcaccaaggcgagcgcggccacgagttccggcccagcgccacccagactctttgatgtgggtttgtgtgtgggag

SEQ ID NO: 344288 - DNA, 122 bp, Homo sapiens
ttctgctagtagttttggatggtgtttgcatctctttaggctctggaaatattctttggacgcatttaggggtcctggcttaggagttgctatttcctgagctgtcaatgaatggggctccc

SEQ ID NO: 344289 - DNA, 122 bp, Homo sapiens
agagagttggtgtcttttgttgaggtgcgaggacccgaggcggcgaccctcgcctttattcggagaagcccacttccacccacagagttggggtagtcctccgaaatgcatttttgttttgc

SEQ ID NO: 344290 - DNA, 122 bp, Homo sapiens
gcatgctcagtagccggggcaggttttttggtcgcaagtaggaagctttctgcactacaccggagaggggagccgcgatccggccgcgccgcccgcacgccgccgcgcccgccccagcccgc

SEQ ID NO: 344291 - DNA, 122 bp, Homo sapiens
gcgtgcggcggggctcgggtgggatgagcgcgcgcggcggggaccatggcgtggggagcgcgcgtggcggggcgcgccctcggtcccttcccgggaggtgggtggttgacgggcccgccggg

SEQ ID NO: 344292 - DNA, 122 bp, Homo sapiens
tgatctgtagtctcattaatagtttggtttctgtgttgatttcctggtttccattctgaacgacagttacacaaggtgtcgccacggggagaagtaggtgagggagattccctatgctgtgt

SEQ ID NO: 344293 - DNA, 122 bp, Homo sapiens
cggccgcgctcagcggcagagcggagcggagctgtgaggcgccagtgcggagcgggcgggcgggcgggcggcgtgaggcggagcgcgggcggccggcgaaactccaagggcggaccgcggca

SEQ ID NO: 344294 - DNA, 122 bp, Homo sapiens
gtccgctggcctgagcaaataaacgcgtgtcttcaaaaaactacaatccccatggtggcacgcgcctgtagtcccagctactctggtggctgaggcaggagaatggcgtaaacccgggaggc

SEQ ID NO: 344295 - DNA, 122 bp, Homo sapiens
gggccaggagcagaggggccaaggatggcgtggaggcttggtctgctggcttgcgctctacggatcttgtggagacgcataggtgcgggaaggggggtggggggtgagagggtgccgtagac

SEQ ID NO: 344296 - DNA, 122 bp, Homo sapiens
gcaattgtctcctgatctactggcctcaccatacctgaataataaaattcacattttaaacgacccagatgatctccaaagttccatctagctctaaaattccaatatttctgtgttcacat

SEQ ID NO: 344297 - DNA, 122 bp, Homo sapiens
ggtgctctgaatccagggaacacgctcgccgggaactgcggaatccctcccgttggcctgcgataaaaccgtgttgacttacggaacatcatctttggtttacactgaactttcttaaaact

SEQ ID NO: 344298 - DNA, 122 bp, Homo sapiens
taaacttcagctgtcccctctgtaaaatgaggacaaatactacatacctcttaaaacttccgtgaagactgaggtaataaatacattttgcactgtagctggcatggagttaaatgtttaat

SEQ ID NO: 344299 - DNA, 122 bp, Homo sapiens
ggcgccccttaaggggccctgttatagtgtgcatcgcctgatgggagatgtagtccgcctcggtcagactcgccctattactgcgtgaacgactgggtttttttttttttaacctccagaaa

SEQ ID NO: 344300 - DNA, 122 bp, Homo sapiens
tatgggggaaagaatgctgacctcatggaattttccataaaaacccaagaggactgggttcgaagagcttctagatggctgaacacagacagtggaacacaaggaggttccgggaggtgacc

SEQ ID NO: 344301 - DNA, 122 bp, Homo sapiens
aatccttggagaaagatttatttatattagtatcaaaacatctgacttcaacacttgagtcgctttttttttctttcattgtgggttttgaagcagttaaaagcccagaagcataagacata

SEQ ID NO: 344302 - DNA, 122 bp, Homo sapiens
tcgagttccatatccagcagtccaagaggctgtggctctccactgctgcctgggaccgctcggagaggcgcccagcttccttgcctcccgggcactcccgggtccctcacagcccctctccc

SEQ ID NO: 344303 - DNA, 122 bp, Homo sapiens
gaagatctgagtataggccagccagggtgggtttaaatagcctcgggcgcaacctagcagcggaaagggtggagcttcactcctcctttccgtcagtcacccccaactttcccaggctacac

SEQ ID NO: 344304 - DNA, 122 bp, Homo sapiens
aactgaaaactggagaccatgagatgactttaaaaagaagttccaaatgccccatcgagccgcacaaaacctccatctttcctttcacttcccctgcccctttagttttctattaaaaacaa

SEQ ID NO: 344305 - DNA, 122 bp, Homo sapiens
cactggtttaagagctgtaacacttaacgaagaaagtctgcagcttcactcctgagccagcgagaccccgaccacatctgagaccctgagcacatctgaacataagaaaggacaaactccag

SEQ ID NO: 344306 - DNA, 122 bp, Homo sapiens
caacccctttacaaaatgcaagcaattttgggggaagagtcttgaatccggagatgaaaacgagatcttacttttgaaagtggtttggccagatcaggttaagcctgctaattagaccccta

SEQ ID NO: 344307 - DNA, 122 bp, Homo sapiens
ctggattcctgctgcagtttccagcaggccttgcagaaatccagtgcccagctgaaggagcgaggccgcagcgtctcccgccagcgaaagtagctcaggtagcgggcgtggtccttgtccag

SEQ ID NO: 344308 - DNA, 122 bp, Homo sapiens
tcgggactggctccttttccgcgcccctcccgccggaggtgaggggaagatgtccatgtccgggttcaagggcaaaccgaagttactggcctctatcttccaggagaaccaggagccacagc

SEQ ID NO: 344309 - DNA, 122 bp, Homo sapiens
cctctgagggggggcgcaggacacgcatcccccgcgatcgcccgggccactcgggagcctcgcggcagcccggcgccccacttggccatccgctccttgcccgcctcctcttgtcacctccc

SEQ ID NO: 344310 - DNA, 122 bp, Homo sapiens
gcgtcgttaagcaactggcccaaggtcacacagacaggaacctgaccccaggcggccctgcgcctcacagagtgcacaatcctctgcagaggtgggaggaggaacgaggtgaagaggcacag

SEQ ID NO: 344311 - DNA, 122 bp, Homo sapiens
agaacagcttgcgagggaccgtgggaacttcaaggaaccgcaccgccctcctggaccacccgagaaaacaggggaagtgggcgaatgagtagaccaaagtactcatgacagggcaggagcaa

SEQ ID NO: 344312 - DNA, 122 bp, Homo sapiens
ataagtcttggacaccaactgaattccacattttaaattggggccaggcatggtggctcacgcttataatcccaacactttgggaggctaaggtggggaatgacttgaggccaggagttcaa

SEQ ID NO: 344313 - DNA, 122 bp, Homo sapiens
ggctgaagggctcctcaagcgcggccagagtgggcgctgaggccaaggaggcaccgagagcgagcgagggctacgagggctgccagcgcgctgtcacctctcaccaacactttcagaggcag

SEQ ID NO: 344314 - DNA, 122 bp, Homo sapiens
ggatttgtctaacaaccaaatccatgctccatcccattatttcaatcaggagaagtagatcggtggattgtttcctataggagctttggggctagggggtcccaaactgcagtctcagggac

SEQ ID NO: 344315 - DNA, 122 bp, Homo sapiens
aaaggaaatcatctcaatgcctgaacatcttgaaatcttccttcttttatttgaaaaatacgaagcctatatttatagcttcaggaagcccagcatctttccaaaaagtactagtatttcta

SEQ ID NO: 344316 - DNA, 122 bp, Homo sapiens
gagcacgtgagcatctgtcctttctacccgttcctctttatctttagtgttcagtagcagcggggatagcccggggcccggtgtatggccacggagttacagtgtccggactccatgccctg

SEQ ID NO: 344317 - DNA, 122 bp, Homo sapiens
cagggaggcgaggagacacggacagggaaactaaggcctgagcatcgacgagggaggggacgttcttcttggaggcagaggatggcggaaattaaaactgcccgagccttccttccacctgc

SEQ ID NO: 344318 - DNA, 122 bp, Homo sapiens
acatgcttatgtttctcatttgtaaagggagggcagtcatccggtggcttcttgtggcctcggtgatgaaggccacatcagagccagggggaaaggatatgagagaaaaagattcatttgaa

SEQ ID NO: 344319 - DNA, 122 bp, Homo sapiens
tcggcagtcgcggagctgcttcccaggggtgagctctccgggaggcccacggggtggccccgggcgcctccgccctcagctgtcgctccttataaggcgggggccgggcggcgccggaggag

SEQ ID NO: 344320 - DNA, 122 bp, Homo sapiens
atccgggacgagatctggcgaaatcattgacaacgttatctcagtggggagctgggaggccggaaggaatgaagtgtctgagaaccgtgcgccaggcctccgggacgcgggaagggctgagg

SEQ ID NO: 344321 - DNA, 122 bp, Homo sapiens
gccgtggagaggagctggcggccgggtggccgggcgggggttagctcactggcgagggggcgggccggggcggggccagggcggccacgcccgcggagggctgcgcgctccctcgcagaggg

SEQ ID NO: 344322 - DNA, 122 bp, Homo sapiens
gcccagagtgcagctgcgggcgcccccacgcccaccccggccccacggccgcaggaccggcggcccccaggccacacagccgaggcccccagcccgggcgcaggccacccaagggggccggg

SEQ ID NO: 344323 - DNA, 122 bp, Homo sapiens
tctctgagtcttctggtctctctgcctcagcgtctctatttcttctccctgttgctgcctcggggtctccacctccgttccaggctcaggggaggcagattcagggccacggtctttgtcca

SEQ ID NO: 344324 - DNA, 122 bp, Homo sapiens
gtcatttagaggaggggtcagcttcctctgctggatctcccaccgcccttttcctgaggccgaggtcatgcagcggaggacctttccagagggcgaggcctctgtcctcctgctcaacccac

SEQ ID NO: 344325 - DNA, 122 bp, Homo sapiens
ccttaccatgaagccagtaagtcgtcgcacgctggactggatttattcagtggtaagtcccggggatcgcgggcccccaccgtgtcgactcactgggcccgcaggcggaaaggccctatttc

SEQ ID NO: 344326 - DNA, 122 bp, Homo sapiens
tctgaaaattcttcattagcaccaaatccaaacttttcctcagcagtggcaggacccaggcgcgggtcctccttcctcctcccgccccctcgcggtcagacaacaggtacgcggggagcagc

SEQ ID NO: 344327 - DNA, 122 bp, Homo sapiens
acgttcacatggagctcctgccgtggtggtgaaatattgtggactgcttggctgactacacgggtcagttgctgcaaaaagccagtctgcaggtggggcagtccaggaccgtttccgtgaca

SEQ ID NO: 344328 - DNA, 122 bp, Homo sapiens
gactacgtgctgatcctggccttctacggcctcctctccttcaccgccatcttctgcttccgcggcgacagcctcatggacatgtacaccctcaacttcgcgcgctgtgacgtcgtgggcct

SEQ ID NO: 344329 - DNA, 122 bp, Homo sapiens
aggcagccttcccggggtgcggcggcagctccggctcccgggccgcgactgctgtgcgctcgtctcgccgctccgtcacccgctgcccgtccgcccgctgacagctctgctgcgctcgcggc

SEQ ID NO: 344330 - DNA, 122 bp, Homo sapiens
tcccagcggacagtggttcccctgatgaatttgaacgtgagcacctgctgtgagcgggagcgggggcctcagcctggggtccctcctggaggggcccttgctgcccagccccgcagcagtgc

SEQ ID NO: 344331 - DNA, 122 bp, Homo sapiens
ctgcggaagagatcagcaaatgagtgaaacaaaatcataagatgctgctccccaggctcacgaacctgatccagaggagcttctctctgttcctgggcttcaggaacaggcatgtgatgagg

SEQ ID NO: 344332 - DNA, 122 bp, Homo sapiens
gcaggattttgttttccaggtttgggagtatttgtgactatttcttgtcctgtgaagcagcgttgctccttgcccattttaaattaatgtttcagaatttaaggttgaatcttaaagttgtg

SEQ ID NO: 344333 - DNA, 122 bp, Homo sapiens
tttgtggtcatctcacgtcctgtgtttgcttggctgcagcaagaagcaggctgctgcaaccgctggtcatttgtatctgtttggaagattcaacaggagagggaggcttgcagaaaacaagc

SEQ ID NO: 344334 - DNA, 122 bp, Homo sapiens
gtgctctttccccaatccaattctctcttgcccctttgactttttttcttcctctaggcccggctgccccaagctacaggggagaccttttccatgtgtatcccacctcccaatgtcactgg

SEQ ID NO: 344335 - DNA, 122 bp, Homo sapiens
agagccggaaggtgttaggaagatataaacgtagagagcgagtaacaggaggcaattccacggccaaacaggtttatttacaggaaaagcctgcgaagagttccagttaggaatctggctga

SEQ ID NO: 344336 - DNA, 122 bp, Homo sapiens
ttctgatagtagggttagggattccttaaaacgtcattcattactttaagtagcatcaaacgtaagtaacatcgctgaagctggaaggcgtccttgttagaggtactgcccttaatggatta

SEQ ID NO: 344337 - DNA, 122 bp, Homo sapiens
ccagtttgtccgacgggaacttcttggagcggaatatctgcagcaacgccaggcagcaggcgcccagggacagcaccgcgccgggccccgcgcccgagcccgagtccgccgagctgccgcca

SEQ ID NO: 344338 - DNA, 122 bp, Homo sapiens
aaatgctaaggtttatttttaaatatgattacgacctgtcttttgctttccggaaaatcacgtgtgctcttcagagatacaaaatccgatcattgcacttttaaaaccaacgttttaatctt

SEQ ID NO: 344339 - DNA, 122 bp, Homo sapiens
gccaccaacaccgcctagtttggaggaaattcgttgtttctgccgccaatagtctgtggacgggcagaacaagcattacaattgaagcaggaagggccaagctagtggctgaataagagctc

SEQ ID NO: 344340 - DNA, 122 bp, Homo sapiens
tgtgggaggaaacaagatgtggggcgagagcggcgcggggagaagcccgcagtgcggggccgggcgggctcagccaatggggagcgcggacggcggcgcgcgcggcgggggggcgggggcgg

SEQ ID NO: 344341 - DNA, 122 bp, Homo sapiens
cctctccttggggcctggtggggcagacgtcctgagcacctgccctggactctggggacccggtggggaggggacatgtgcccttgctggagccacagaagcctggagtcggttcacccggc

SEQ ID NO: 344342 - DNA, 122 bp, Homo sapiens
cgccttctccatgtaaacttttgacgtaaactgtgtgcttcagggtggcctcttcttctccgagatcctctcctgcgtcccgagtttgggaatggcccggccgtgctcaggcccaggcggtg

SEQ ID NO: 344343 - DNA, 122 bp, Homo sapiens
agtttccaggcgttccgtgagagccgagggagcgcgtgagggcttcctcctatcagcgtccgtattcatggtgggaggtggcaaacctctatcggcagtttctgataaccttgctccgggtc

SEQ ID NO: 344344 - DNA, 122 bp, Homo sapiens
aagcagagctgggacttctctttgcctgaaaataaaggcatgacaaggtggaagacattgcggatgaactcctcgccctctcggttctgacccctggtccagcgaggatagcccaacctatc

SEQ ID NO: 344345 - DNA, 122 bp, Homo sapiens
ctgaagcaccagcaggtattaacttagaaagccgagtagcagcgactctgtgggccccagcgtcaggatgcttcccctccggctgctcgttgccagcgctgttgttctgtgaacctgtgtca

SEQ ID NO: 344346 - DNA, 122 bp, Homo sapiens
cagatatttttcttgatttgaaacattagattttgtttaatttaaaaggaacttaaaaatcgtggtttgccaggtgcagttgtgcttgcctttagtcccagctactctggaggctgaggcag

SEQ ID NO: 344347 - DNA, 122 bp, Homo sapiens
tcattccctctgtggcatcaatacctgacacttggtcctatcctgaacataaactctgcacgtggcaaggaaggcaaaggcaaggggcactatgagaatgacaaggcgaagcgacaggcaga

SEQ ID NO: 344348 - DNA, 122 bp, Homo sapiens
tcgcgcactgggcttcatttattctaacacctgaacctgagacagcaccgcagaaaaagacgctccgcagatacctgggcttttttcctcaggaaggctcaatgttgctgggcgagtgttgg

SEQ ID NO: 344349 - DNA, 122 bp, Homo sapiens
acacctgtcttcactggggaatccaccggatagtcccgcgttcctagaagtggtcagtgccgacccagcctgaagaaacgtcaagcggagccccggggatgcagcacgaaatcactaaggat

SEQ ID NO: 344350 - DNA, 122 bp, Homo sapiens
aatgaatggcattatctcgggagtgggttcttgataaaaggatctgttcagccactttctcgtgcatgcacacactttcttgccttccaactctgccatgggacgacgcagtgagaaggccc

SEQ ID NO: 344351 - DNA, 122 bp, Homo sapiens
tcaggtcattccagggctcctcagtggctgtgactgaagcttttgtgcggctctacaaggcggggttgctgtaccggaaccatcagcttgtcaactggtcatgtgctttaagatcagccatc

SEQ ID NO: 344352 - DNA, 122 bp, Homo sapiens
gaggtcgttgggggctcgaccttgggatagaacgcctgccttttattggtcaatactcttcgggccgggcaatgtggctccccgaggctgcctgcgattggtgaacgcgtcgcggctcgggg

SEQ ID NO: 344353 - DNA, 122 bp, Homo sapiens
aagaattaagatgacttttgggacggaacgactgaaaactacgctttcagaactccctgccgcctgaggctgtggccctgaccccggcgcagggcccgccccgcgcggttccgggaagccgc

SEQ ID NO: 344354 - DNA, 122 bp, Homo sapiens
aggatgtatggcccacatccctttggcccttcgcagagctggcgggcagagaggtgccagcgacaccacttccccttggaacactgtggaccctctttgagccagctctggtgccagtgggc

SEQ ID NO: 344355 - DNA, 122 bp, Homo sapiens
cacacgttcacctaggcctccccggggccagcatcatcacatcaccgccttccacctgcacgtcctgtcccgctgggaggtctccaggggaataacacaaggtgtgccgtcgcctcccacga

SEQ ID NO: 344356 - DNA, 122 bp, Homo sapiens
gttccgcatcttcagaggctttgttcaggaagcaacatggctgctccctggagctgtttccgcatggggccgccatcttgagagcccggtcgtcttcgtactagcggaggattcgcccagtg

SEQ ID NO: 344357 - DNA, 122 bp, Homo sapiens
ccagggcaggggagaggaaaatgactcggaaaccctgttgtgagaagcacgttgctatcccggatgaagggccatttcagccctaagctcaaagccggagctccgaccagcactctcaggac

SEQ ID NO: 344358 - DNA, 122 bp, Homo sapiens
tgaacagaaggagcggctttctctgaatttgctgctgaaactgggtgcaaggggaagatacggcaaagtagcatagtttaactggggacaaaaaaattgcatgttgcattagcatttaccaa

SEQ ID NO: 344359 - DNA, 122 bp, Homo sapiens
cctggaagtcctggatcacctcctgaaatcccagcggaggtggtgagggcctgccttccccgtgagcagcaccccctgccccgctccccctccctgctccccctcccatgcggggcctctgt

SEQ ID NO: 344360 - DNA, 122 bp, Homo sapiens
ctcggcactcgcagcgtgcacggaagcagcactcaggggcagaggatctgggtgtctgtgcgctgaggctggcatgggaccacgtagcctcatgccaggccctaggagatgtgcttctgagt

SEQ ID NO: 344361 - DNA, 122 bp, Homo sapiens
aacagcagatcagccactgcataaaatccaactcttcttcccactatacccagccctttacggtctggccttgctgagactccttgtgtgagcccagagcccactcccctttatgctggaaa

SEQ ID NO: 344362 - DNA, 122 bp, Homo sapiens
gtgaactgccaggcttcagccttagaaggaatcatgcctctgtctcacagatggggaaaccgaggtgctggcaggggctttggctcagatttgtgtagatgaggctgggctcctctccttct

SEQ ID NO: 344363 - DNA, 122 bp, Homo sapiens
gtgcactgggtcagttagttgactgggtcgattagttggctatcctgggcccctggctttcgttttttgatggagttttcctctcccgacgtagggaaatgaggctatggcagtttgtgccc

SEQ ID NO: 344364 - DNA, 122 bp, Homo sapiens
gcagtgacggctgggggtcaccccgaaatctctgcactcagggctgtcagacggacgttacgcggtatgtgaactagagacactaagagcctattattctgttttgcattttaaaggaggtc

SEQ ID NO: 344365 - DNA, 122 bp, Homo sapiens
acccaccccgcccacccggcaggttctgtgatgtctgtgatctcacctgctgcaggcctccgggctccggggattcttgagtcgggggaaggaacagctttgagacgaggaggcagaaagag

SEQ ID NO: 344366 - DNA, 122 bp, Homo sapiens
cccgctcctcgcggccacagcggaacagggctccctccgcctccggtgcctgcctcgggccggccaccaccaaagagagcgttaagctgttgtgggctcgtgcctgaaagggactgggctcc

SEQ ID NO: 344367 - DNA, 122 bp, Homo sapiens
tgtcaccagagtcacaccacctcctttttatcagctataaaacaggactactgctgaactcgtagagttgggggaaagagtgagataacatatagattaccaacccagtgctgcgacacaca

SEQ ID NO: 344368 - DNA, 122 bp, Homo sapiens
gcggtcttgccttggaatttctatactcagagggtaagaaagattgggggatacggggtgcggttcaaattccgaaaccctcttgggaggcatgaactttgtgtatcttccttcccctgggt

SEQ ID NO: 344369 - DNA, 122 bp, Homo sapiens
tggggggccttcttccccccgtttcactgtcggtataactgaaaaggcacgagtggaggccgcagagcaaagtccagtctcctctcctgggcgtccgtggcacccccccgctctgcccggcg

SEQ ID NO: 344370 - DNA, 122 bp, Homo sapiens
ctcctttctcttggaatatataattcattttacatggcgtttgctcttaatgcttgaaaacggggctcaaagaaacaagccaagtgaataagaatttgcccatgttttatttcatgtaacca

SEQ ID NO: 344371 - DNA, 122 bp, Homo sapiens
ctggaagaattctttagatagcagccagggtgcaaaaaccgcttgctcgttttcaatcgacgatccgacctcttcgaatgtgccaggtcccatttcgtgttcattacgactgtagaacgcca

SEQ ID NO: 344372 - DNA, 122 bp, Homo sapiens
tcaatgttttatctggtcctacgttttctccagagaacaatgtctaaactataatttacacggaatcattaatctgagaacgggtgtatggtaggctgtctcacaaataaacctacggattt

SEQ ID NO: 344373 - DNA, 122 bp, Homo sapiens
atggaggctgcaccagggacacactcagccatgctacagccactttcacgggcatatccacgccagctctcacagacacccttaaccagattattggacagaccaaagcaccctgctcacgc

SEQ ID NO: 344374 - DNA, 122 bp, Homo sapiens
cttcttttccatcttcttcccctcctggagccccagagcaaagaactctcagtacctgtccgatgcatgattggctctggacactccaaaagctacttggaaaaagttaggctatgtaatca

SEQ ID NO: 344375 - DNA, 122 bp, Homo sapiens
gcagtattgttcacaagagacaaaaagtggaaacaacccaaatgtccattaaccactgagcggataaacaaaatatggcatatccatacaatgaaatagtatttgacaataaaaaggagtgg

SEQ ID NO: 344376 - DNA, 122 bp, Homo sapiens
tttatgtaaatactgctgcaaacaccaaaatacacatacagtcagtcatgagtcacttaacgatggggttacactgagaaacacatcattagatttcatcattgtatgaacatcagagtgta

SEQ ID NO: 344377 - DNA, 122 bp, Homo sapiens
atttggtaatatgaaaactccagtgaactcccaaggacatttacaacatttatattcacacgctgtatggaagggtgtgggtgtgtgtgaaggggcgagtggagacactgtgtgtatctcta

SEQ ID NO: 344378 - DNA, 122 bp, Homo sapiens
gcactatttttaaaggaggtcattagtgagtcatgtttaagctcaatgcttagccatcatcgccatttgggtgcttgttgggaaggtcctaaattgagcggcctttgggcacagatctctgt

SEQ ID NO: 344379 - DNA, 122 bp, Homo sapiens
aatctcactgaccagagggactgtggtgatcacaacttcactcttggggctcttctccatcgtcgctgccatgtgagcctttggggctcccaggatctccttgatgggctcttcagtcattt

SEQ ID NO: 344380 - DNA, 122 bp, Homo sapiens
cttggctccgcgaggcccgtgcattccagagagcccagcgagctagagcaacaaaggagccgggtcgccggcggggagagttcggggggctgcggcgcgctggggcgaaggtggctgctggg

SEQ ID NO: 344381 - DNA, 122 bp, Homo sapiens
tgctttttgttttttccggttatggagacatggagccaatggacggttcgcctcactggtcgctgggatatgggtggatctatttgccactttattccctggaagtgttggatgcatctgag

SEQ ID NO: 344382 - DNA, 122 bp, Homo sapiens
tgggatggttgattaggacgcgttgctgtggcggtagctcaccaatccaatgcatgcacccgctcctttattaggctatagggccagtggctgcgacagggacctgatacaacagtgcgtta

SEQ ID NO: 344383 - DNA, 122 bp, Homo sapiens
ggcctgggtctcttccactgcattccactggtctgctcatgaaacgggaggcggttcagccgcctgtgggagataaacacgccaagccttcagaacaactgcagaaatgcccagagacactg

SEQ ID NO: 344384 - DNA, 122 bp, Homo sapiens
ttgggattgaattttcttgtagcaggaaagctggcaccaactccccatccaagcggatgccgtgatctccttttacagctgagccaatagcctgtgtttgccttttacagctgagccaatag

SEQ ID NO: 344385 - DNA, 122 bp, Homo sapiens
acatgccgattctctgagcctttttgccttcttttaaaactagctagcctgcccagtactcgtgtttgtttagttttatccctgagcttaggaggaaaacacacaaaaccacacacacttac

SEQ ID NO: 344386 - DNA, 122 bp, Homo sapiens
accactggtacacctcagatatacaactttgatctcgctggggtcaaacgtaggtggctgcggttggttgaactcaggttcaggatgactgaagcaagttgcacttggctttctctgagccg

SEQ ID NO: 344387 - DNA, 122 bp, Homo sapiens
aagaaacaaaaagccattcgtgtttaatgattcacctgtcagtacatctactcatttcatcgtccaagaagtgttgagcatctccaggctggcatttggtgcacagtaaagaataaaaacac

SEQ ID NO: 344388 - DNA, 122 bp, Homo sapiens
cgttggcgttacttgcagattttgcaaaggtccgggctccgctgtcgaggcctttgctgtcgaggtctcattttggctgcttcgggtcgccacgttgcctgatgtcccagactctctgttga

SEQ ID NO: 344389 - DNA, 122 bp, Homo sapiens
ccgtatacatacagcatataatccgagtgagctttccccactatgtttgaagcttcacagcggtatgtaccattatctgttttgtttaggttattgatgaacaggttgggcccagacagtac

SEQ ID NO: 344390 - DNA, 122 bp, Homo sapiens
cgggccgcgcaggctcctttggaggcaagtcgctttctgtacactgctggttaactgcttcggaagaggacagcccgcagtctggagtgagcagcgaagcagagaaaaggagacgccctttc

SEQ ID NO: 344391 - DNA, 122 bp, Homo sapiens
gctgtggtcaccatggaggaggacggcctagctccacgttgtggtcaccatagaggaggacggcccagccccgtgctgtggtcaccatggaggaggacggcctagccccgtgctgtggtcac

SEQ ID NO: 344392 - DNA, 122 bp, Homo sapiens
ttgggaatgacgccagatccaggagacgatcagcttggtctcattccccaccacgaacctcgtgtcccgacagcgtcgacacatcccttcatacacggctggccagatgctcacccgcagtc

SEQ ID NO: 344393 - DNA, 122 bp, Homo sapiens
ctccaggcctcgcttccggtcagtcccacgatcacttccggtcaccccttctcaaccccacggcttagaaccaaatccaggtttccgctgagccgacttctcgccctctgtagccccccacg

SEQ ID NO: 344394 - DNA, 122 bp, Homo sapiens
gggcggcgctgaagcagagagaggcctgggtgggagagccggccccgggcagggtgcgggcgttgaaaagtgcgtgtctgcaggtgccaacccgggctgtgaagactcatctcctggagggt

SEQ ID NO: 344395 - DNA, 122 bp, Homo sapiens
tcccatccagcaggccctggctcaggagcgggtgggcggcgtggggcctgctgacacccacgagcccctgcgccctgaggcggagcctggggagctggagcgggagcgtgcacggaggcggg

SEQ ID NO: 344396 - DNA, 122 bp, Homo sapiens
caggctggagtcacctacctctttgtccaactctgcaaggtgagggccaccgggaagccacgtgttctggcccccaggctctgcagacccagggacccgcccccgttgcctatccgcgcccc

SEQ ID NO: 344397 - DNA, 122 bp, Homo sapiens
cctggaggtggctgcagtcgctggtctgtctgtgacttccattcatgaactctctgaagtcgctgctccgcaagtccgccacacaagcctggttcaggggatcacacacacactctccttcc

SEQ ID NO: 344398 - DNA, 122 bp, Homo sapiens
ccagaccacctcagaagaaagaacccggagtacaggaagacatgggaacaaaaacggaggcgaaagaggacgaacgggaaatagcaggaaagaccgtcacaacttttccctgtgactgcagc

SEQ ID NO: 344399 - DNA, 122 bp, Homo sapiens
ggagctttttatagagttgtgcttctcaagcctttcaaatgcctcacagcggcagtccgacgtgcagtcagtgacagctgagtagattaccaccctcaggactaaatgcaaaatcatcttca

SEQ ID NO: 344400 - DNA, 122 bp, Homo sapiens
agtttgagaccagactggttaacatcgtgaaacccccatctctactaaaaataccacacacgcacacacacaaatcagccaggctgtggtgatgcatgcctgtaatcccatataatagggag

SEQ ID NO: 344401 - DNA, 122 bp, Homo sapiens
cttaaaagacaacaaatttatttaaatggtgcactaaactgtagtgaacagagacatgcacgattcaagaataaaactcggctgggcacggtggacggtgcctcacatctgtaatcccagca

SEQ ID NO: 344402 - DNA, 122 bp, Homo sapiens
agaattctaaaactgtttttaccagcagagaaatgaagctgatttccaattcaaatctcccgtctccctctccctctcagcactctgaaggtgttgcagaaatgaaatgggggttatctgaa

SEQ ID NO: 344403 - DNA, 122 bp, Homo sapiens
ccgctgctgctgttttcttacctcctgaacttagagatcccactctattgccccaagagtcgataacctgtcagtctggggactggccactggaattgttaaagtcactgaatcatggcccc

SEQ ID NO: 344404 - DNA, 122 bp, Homo sapiens
ttgggaacatttagggaaaatatcaggcagaagataaaaggaaaggaaattgcctcagggcgagagtataatgaggtctaaaaagtagtagggggctcttggagggacagccatgtcctcct

SEQ ID NO: 344405 - DNA, 122 bp, Homo sapiens
ggaatgagggtgggtcacaggaggtcctaacggggaggcaaatctgctttagcagcagctcgtttcaagaggctgggtgttgcggcattaattctcctgggttgggagcctgggcagggtgg

SEQ ID NO: 344406 - DNA, 122 bp, Homo sapiens
attcattcaacaaacatccatccagcaccaactacgccctacgtgctgtgctggttgctgcgaatccagcagagaacaaggtcctggagttccctgacctcccggtgtcacaatccaacgag

SEQ ID NO: 344407 - DNA, 122 bp, Homo sapiens
ccgaagccggcagccagaggcaggcgccaggcaagtgcccaggggcaggtggtgagagcccggagcccctgtcgggggcgtggggaggggacagcagccaacactgccccacgcacttctgg

SEQ ID NO: 344408 - DNA, 122 bp, Homo sapiens
cagacacggtgtccagcaccgtcgcgtccctgttagaccctcagcggagggcacaggccacggcggacactcggctcttcagtcgctcatgcacagcatggtccccacctccaaactggggg

SEQ ID NO: 344409 - DNA, 122 bp, Homo sapiens
gtgtgtgtgtgtgtctctgtcttattctttgtttctctccccctgcctctgcatgttcctcggcgtctgtgtaggagcctggattgtcactgggggtctgcacacgggcatcggccggcatg

SEQ ID NO: 344410 - DNA, 122 bp, Homo sapiens
cgcattggggttgggagcacatggccactggctaccgcccaagtgctgcggagtgagaggcgagaaggcatcctgggaacctcagggcacagcagcatggagcctggggcagcaccagctca

SEQ ID NO: 344411 - DNA, 122 bp, Homo sapiens
taggatttgccagctctgttggtaccgtaaagccaaataacatggctgggattctttagacggtgcaggttgtgtctacaagtgagagagcttatatgttaagtctactatctattccttaa

SEQ ID NO: 344412 - DNA, 122 bp, Homo sapiens
tgagcaggatttggactgtgttgctgggaacgggggcctacactggccccaggatgagttcgtccgtacctgggggccctgggttctgactctcaggtcagacgcagccaagatgcaactca

SEQ ID NO: 344413 - DNA, 122 bp, Homo sapiens
gtgcgccaaggtggcagtgagcagtgtggccggggtgggggccggcctaaccagtgtctccgtgttcccttgccatcccgtgcccaacagcaggagctcatcgagagcatcagccgcaagct

SEQ ID NO: 344414 - DNA, 122 bp, Homo sapiens
aaggttgctaatcatgaatgagctctcaagatgagtcagcctcaaacaactcaccagctgcgtggccctaggtaacttcttcactcctctgggctcagtagtgataggttttgttttgtttt

SEQ ID NO: 344415 - DNA, 122 bp, Homo sapiens
gcttctgtggcctttggctctcagtggcatttgggacaccctgtggtgctcaccctccagcgaattcttctggcacctaatctggtggcttctcaatgaatttcaaaggcaccccagcaggt

SEQ ID NO: 344416 - DNA, 122 bp, Homo sapiens
gcaaggagaagacagggagaatgactatcagttagtcaatcagaagtatccaccatactccgcaaattgcttatcttttttggctttagtattttcatgtgtaaaatggcaatagtaataat

SEQ ID NO: 344417 - DNA, 122 bp, Homo sapiens
gcaggggcggtccctgcctcgctcgctagtctccaccttttattttgaccggtccgatggcgacaggctcgcactaggacccaggcgccagagtgcctccgtctgtcctgtaggttcattca

SEQ ID NO: 344418 - DNA, 122 bp, Homo sapiens
ctgaacccgggaggcggaggttgcagtgagccgagatggcgccactgcactccagcctggcgacagagcgagactccctgtcaaaagaaaaaagaaaagattacttttggccgggcgaggtg

SEQ ID NO: 344419 - DNA, 122 bp, Homo sapiens
gtgtcccttaaaagctggggcctgggacaggaacgacagacaatgcagccaatggcgtcacgcgcggtgccccgctacccaatcgaaaggcgtggctgagggaaacgcggtgggaaccgccc

SEQ ID NO: 344420 - DNA, 122 bp, Homo sapiens
ggaaggaagtacttactgagcagcgtcctctgtgtgagcagtacccccatgctgggtgcccgtgctccggcccgcgcccgctgggggtgacacctctcggctgggagccctgcaggctggca

SEQ ID NO: 344421 - DNA, 122 bp, Homo sapiens
ggacccaggctgagccgcggccggtagagaccatggctcggggacgctctctagctcgcccgcttgctccgtccctagttgatgatatttgatttgacctatctttatagttgcttcagcag

SEQ ID NO: 344422 - DNA, 122 bp, Homo sapiens
aattaacatgttatcctttctttctctctgtttctctcttttggaacgcactggccatcacggctcactgtaaccctggactcctggccttggcccccagaagagccgagacaacaggcaag

SEQ ID NO: 344423 - DNA, 122 bp, Homo sapiens
gggggtagagggcagcacgtggggatgtcttcagtgagcaaatggggggcctgacctactcggccgtctggtgctgctccttccgtgaggctttggagtctgagggatctgggttctgtctt

SEQ ID NO: 344424 - DNA, 122 bp, Homo sapiens
atatgtattctgaaattagatgacaaaaatatgtgctgatgaatttgaggttggttgttacggaaagcaaagatataagaatgccacctaggtttttggtctgatcaattgggtaaactaag

SEQ ID NO: 344425 - DNA, 122 bp, Homo sapiens
gaggaggagggtctagtgaggcgggtcccacccggcctttcccatcagagcccgaactcgcggttcaggttccctctaggacgcccttggccgagaggaggcctccaatggctggctggggg

SEQ ID NO: 344426 - DNA, 122 bp, Homo sapiens
cgtagtggccccaccctacaaggatgcccttcctacagtattactgatggctgtctaatccggttagctcccagtcactacaccccagcctcccagcgcctgcaggtggattgggttatcct

SEQ ID NO: 344427 - DNA, 122 bp, Homo sapiens
tcccctttgccttctacataaaaccaaacctgtctgtggtcccagcaacttgggctaaggcgggaagatcacttgagcccaggagtcaaggctgcagtgagttaggatggcaccactgcact

SEQ ID NO: 344428 - DNA, 122 bp, Homo sapiens
gcagggggtaatccccgactccagctgctcctgacgtcaccgcgtggagccaccgccccccgcgcgcccctgctccggggcctcctcgaagccccgcccccagccttagccacgccttctcc

SEQ ID NO: 344429 - DNA, 122 bp, Homo sapiens
tagaccctcaaactgtacaaactactacctcagcctggaatcaggcaaaaggaaacggagcgctggaggaactcttcaggatgcacttgagacaggaaagggaacatcctcacagcagaggc

SEQ ID NO: 344430 - DNA, 122 bp, Homo sapiens
gccacattcctctccgggagctggtggccacaccacctggccgcccctccactagcgccgcgctccgaggtcacgcagctgcctgcgaagccctcagtgaggccgcctcccaccccctggag

SEQ ID NO: 344431 - DNA, 122 bp, Homo sapiens
cagccccctcctgccagctccagatccgcgtgcctccagtgttgggaccgttctcagtggcgttgttccctgctggagttaacttgggaggtgaggagggaactttcatcttgaacttgacc

SEQ ID NO: 344432 - DNA, 122 bp, Homo sapiens
cagactaattctagtaaaatgtctccacccactgctgcccttcctgagcccattatctgccgagaatcaaagggcctggctataaatgtgggtgtccaatgtccttataagctccataagct

SEQ ID NO: 344433 - DNA, 122 bp, Homo sapiens
acagctggcgctcctgacgtcccagtccctgagaattcctctctgcaggttgtggcagttcgagatggttgatttgcgcgcagccctggggcgtttggggcccggcctttggtatcatgggt

SEQ ID NO: 344434 - DNA, 122 bp, Homo sapiens
ctggctgctgcctgtgggggtgggcagaatgagccttgcattcccggaccctccagtgcccgaaggctgattctcggagagctcacagggtactacggggtggcgggcgcaagccagctctg

SEQ ID NO: 344435 - DNA, 122 bp, Homo sapiens
gggcgccgcgggctcggcccggactgacggcggtggggggcggggatggggccgtggtgccgggccgcgcagaacccttgggacccccgcggcgcccaggttggggctcagggcccggagaa

SEQ ID NO: 344436 - DNA, 122 bp, Homo sapiens
gccagagccgcgactaccaagacatctgaaacgctcacccgggggcgggggcggagggggcgggggacgaaatctcccgctgtccagggagccgcccccggtcttcccctgggtcctaaaca

SEQ ID NO: 344437 - DNA, 122 bp, Homo sapiens
tggggcctggcctctgcccccaccgccctgcctttggcaaccagcgaatcaggactgaaacgtagggacacagagggacagagactaagtccaggatagcgacgatcagtcaggcagacatg

SEQ ID NO: 344438 - DNA, 122 bp, Homo sapiens
cccacagcgccggggccgggggacggcggagaagctagcgggcggcctcttccgggcaggcgttcgcgccgggcagcccgagcggccgcgaaggcccccgctctccgcttctcccgcccctc

SEQ ID NO: 344439 - DNA, 122 bp, Homo sapiens
ggcggggtccaggtggaggtcttgaggctatcagatcggtatggcattggcgtccgggcccgcaaggcgggcgctagctggctccgggcagctcggccttgggggcttcggggccccgagac

SEQ ID NO: 344440 - DNA, 122 bp, Homo sapiens
ggctagttttgggtctagttcttctggaagaccttattcttggggagctacaggttctggcgtttggggctctttcaggttctatctccattttcccctcaattcctccccattctgctata

SEQ ID NO: 344441 - DNA, 122 bp, Homo sapiens
ttggaaacaagacattgatggaacactgaagcaaaggaaatcagcagaccgtaatgggagcgccagggaccaaactcttctacgaggctgggtttcctgatcatttaatacacagattcttc

SEQ ID NO: 344442 - DNA, 122 bp, Homo sapiens
gtggttttctaacttgctttttactgttacccatagtaacaaatatgctttccatcacaacgtgtgtatgtgtgtgtgtgtataaataattttaaagtggtaatttcaaaaacattggtctc

SEQ ID NO: 344443 - DNA, 122 bp, Homo sapiens
attttgcctagagtatatacccaatgttaggaggatccgacacaagtttctgtcttgtcacgccaaaaactagaggtttatctggttgtcactgattatgtactggacatgctattttaaaa

SEQ ID NO: 344444 - DNA, 122 bp, Homo sapiens
ctgagctaaaagacaggcaaggacagccactgctaggcacacagttgctgcagaagccagcgatgtgggaagctcaattcctgccaatccctgactcacccctacaggctcttttaacccag

SEQ ID NO: 344445 - DNA, 122 bp, Homo sapiens
gcataccgaggcatgttggctcccggagccgcccgccacactcccttagccttcgcgcgacgcccactgagctccgggaaagtgaagtgcgaaccaatcgcaatccacattctttctacgcc

SEQ ID NO: 344446 - DNA, 122 bp, Homo sapiens
tccagcagcaaacgtgcacctcatccccaacactgagccgcgtctgcagcgaaggagctgcgtgacctccctgggtttgatgggctcagggcctcttgctagtgtgagcctagctgttgctg

SEQ ID NO: 344447 - DNA, 122 bp, Homo sapiens
taaaaaaaagccccccaaaataaacctaacaggttttgacattcgaagccagggggaccacgggcctgcggatgcaagcgagtcctacggactcctgcgcgcgagctcgcgggcgccgctgc

SEQ ID NO: 344448 - DNA, 122 bp, Homo sapiens
ctcagcggacccttcactggctaacaggagccagctgagcgaacacagaggcgctgtaaccggcgcagatcccagcttcctctgaaatttccaggcctcttttttcctgtcggattccagac

SEQ ID NO: 344449 - DNA, 122 bp, Homo sapiens
ttaattgtcctgaaagcttcaagttcttctgacccaatgtcactgtccgtgagctcaggccggcagggaagcatgctgcgtgtatagcatgtgtccagaacaaggaagtgcgtccctgggaa

SEQ ID NO: 344450 - DNA, 122 bp, Homo sapiens
atgtaggcggcgtaggtgctaatggccaattggagtgcggcccccagcgcgaaccagcgccgcttcacgccaaaggacatgaaactagcgcacagcacggctgcccccatgtcgaaatacag

SEQ ID NO: 344451 - DNA, 122 bp, Homo sapiens
gtggccgaaagtccggagtcgctgtaaaacctgagattgtgagccatggtggggagatcccggcggcgcggagcagctaagtgggcagctgtgcgagccaaggcaggtcccacgctcaccga

SEQ ID NO: 344452 - DNA, 122 bp, Homo sapiens
ctgaggtacagaatacaccatgcctgctgggcaagcgggctccggttccaggaaatccttcggtccccagcaaactaggccagttagttgttctgtttgccgagaggtaatgcgcaccctcc

SEQ ID NO: 344453 - DNA, 122 bp, Homo sapiens
gctcgcagacaccccaactccctcacgcgttactcagcactccttaacttaggagacgtgcgcttccgagagatgagaagaaactaaaaaagtggttggcagggcgaagagaggaagccggt

SEQ ID NO: 344454 - DNA, 122 bp, Homo sapiens
cgctgcgcggttggcccttctcccgcgccccgcgctcaccctcctgctcctcctcatggccgctgttatcaggtgcctggagcaggcctagaccaccgactggagggccaccctgaagacca

SEQ ID NO: 344455 - DNA, 122 bp, Homo sapiens
aagaaaacagcaagtcacgtacaactgaagcccatgggggcaggatgctgttctctccaccggggcaatccaagcacctgagtgtctgacaccacccatcacccaggggatccgagctgaat

SEQ ID NO: 344456 - DNA, 122 bp, Homo sapiens
gcccaccgagcacttgggacccgctgcacatatccagagcagggaaagctgtggctttctcgggggagcgagtgtctaggggaagggtgtggcaggcccacgggatgccatgccctagaaca

SEQ ID NO: 344457 - DNA, 122 bp, Homo sapiens
gcaagtggcactgagaacttggggagagcagaggctgtgcctagatttgtagggagtccccgcagctccaccccagggcctacaggagcctggccttgggcgaagccgaggcaggcaggcag

SEQ ID NO: 344458 - DNA, 122 bp, Homo sapiens
aggggccgcggtggctcgctcccggtgttgggatccgaggagcgggcagaaccatccttacgaagagggggctgagtccagctggccgggcttggagccttgaggcgggattgaaggaggga

SEQ ID NO: 344459 - DNA, 122 bp, Homo sapiens
cagcagagttttccaggaacggaggctgtgacggtggagggtggccaggcagcaggaggccggggaagcgggtgtcctgaagcagaggccgcggcgccacgtgtatggcagcttgcaggtga

SEQ ID NO: 344460 - DNA, 122 bp, Homo sapiens
ggggagtgcctgcaatctctgaagccccagaggagtgttacaacactcttttagctctgtcgtctgcggagggcttaagtgttaacagcttagtggaccctctgtctttacacgtgaggcgg

SEQ ID NO: 344461 - DNA, 122 bp, Homo sapiens
cttcccatcatcattgcccaagtgtgtcttctttcttctccttgtcacatttcctttgcccgctctcacatatgcagagatggctcttggttttccttctgaaatctcatagtttggaggta

SEQ ID NO: 344462 - DNA, 122 bp, Homo sapiens
aaaggccccctttcgggccatttatcacaggatacctcaagcaaaggggaactgtggtcacgtgaaaacactctgtcctcggtagtcgccttctgcctttgctaaagcgaacggaagcgaat

SEQ ID NO: 344463 - DNA, 122 bp, Homo sapiens
ccccctgccccagtcaccaatagggccactcgagccaccacggcaaagccatgggcagcacgtggccttctagttccaccggcttcagctgggttcatggcccgggggggcacagctggcgc

SEQ ID NO: 344464 - DNA, 122 bp, Homo sapiens
cacccacagtcatccaggtgtcgacgtagggcaatccgttcccttggcgcacccgactgccgtggggtgtcccagcaaaagctcatcaacctagcggagcaacacgcagcctaggtctctgg

SEQ ID NO: 344465 - DNA, 122 bp, Homo sapiens
gggtgggtaaaggtcaacgaatgaccgaccgtgcgctaggaacaacctagtgtgggagaccgtgccttagtggtgtaccaggaggtgcaaacaatttcctataaagttatggttccgggaga

SEQ ID NO: 344466 - DNA, 122 bp, Homo sapiens
cggcgcaggtgggagtctgggaagaagtgcggtgtcggcaggaagtcccagcgcgacgtccgggaaagccacaggaggaggcgacctgcaggaggctaccctttgaccccaaccctactctc

SEQ ID NO: 344467 - DNA, 122 bp, Homo sapiens
agtattgacatcaggggaaaaaaattgtagatgatgatgtcatgagtatgctagatggctcggctatgagccatggtaaacactaaaaaggatttaattaaatatgctatatttgaaagatt

SEQ ID NO: 344468 - DNA, 122 bp, Homo sapiens
tcccgcgcatcacctccacgtcggctttgggcgcctgcgcactgcgcctaccctgccgggcgcgggaacgcctctgaactggaagtttaaaaatggttaaaacggggccgggcggagtggct

SEQ ID NO: 344469 - DNA, 122 bp, Homo sapiens
atcagagggttctcgcttcagcacaagatccggagttttgaagaagcgcgaggtctggaccgaattaatgagcgaatgccaccccgaaaggatagcatacacgctggtgggccaatgaaatc

SEQ ID NO: 344470 - DNA, 122 bp, Homo sapiens
tccccccgtgtttatgcatttttaactaagttcccccaagtccacacgtgactaatgtgacgtccaaccaccgtgaacgagaggagaccagcacgacagagctgctttgtcaaaatttgtat

SEQ ID NO: 344471 - DNA, 122 bp, Homo sapiens
cattacttttatttcatcgaatatttcaccttccggtcctgcgtgggccgagaggattgccgtacgcatgtctgtacgtatgcatgtaactcacagccccttcctgcccgaacatgttggag

SEQ ID NO: 344472 - DNA, 122 bp, Homo sapiens
cgggggggagaggcgggtgatattacttcccgcatcgcggcgggcgccctctccccactgcgatgtggctcttaatatccagcgggggagagagggtgatattactccctttctcctagtat

SEQ ID NO: 344473 - DNA, 122 bp, Homo sapiens
gtatttcttgaccaagggcaaactggaagctctaaagacagcaggtacagacctttttgacggctccagaagctcttggctataccttgaagtggaggggtgtgtgtgtgtgtgtgtgtgtg

SEQ ID NO: 344474 - DNA, 122 bp, Homo sapiens
tttagactagtgagagtgcatttaaaagtataaactaatttatttaagtgctcagtaccacgaaagagtaaggtttgtcattctaggaatgaaacaaaaggtgcaattctgtgttcagctta

SEQ ID NO: 344475 - DNA, 122 bp, Homo sapiens
cggttgagcgcaattcaggggcaaacgtgggccaaggagagggtcagtgcgcgggccgcccgcgtcctccgagttgccaaagttgcacagggcgctgcctccggatcctgttccctcgcttc

SEQ ID NO: 344476 - DNA, 122 bp, Homo sapiens
tgaggacagcaaatgtgacttactcatctcccccactccctccctccacattccagaacacggtacagtgctctgcatataataggaatttagtaagcatttgtttaataaatatgtttagg

SEQ ID NO: 344477 - DNA, 122 bp, Homo sapiens
tatgcgttcctgcgggaggcactccgaagcagcgtgggcagcccgctgcggctctgctgccgggacctgcgagctgaggacctgcccatgcgcaacactgtggccctgctgcagcttctgga

SEQ ID NO: 344478 - DNA, 122 bp, Homo sapiens
gggaggccactgagccctcaggagtgtctgaaagctcagaagattctggtctgggctctgcggggggaagccccataagggagcgcctcctggtctttggtcagcttgacagagaggcccag

SEQ ID NO: 344479 - DNA, 122 bp, Homo sapiens
gtgtcttaaaccttggcgaagatgtccttgtagatttttgttgaaaaatcggaatcgagtcgtgtcatcttataaagaatttaaaactattgggactgagtgttcacgctgtcaacagataa

SEQ ID NO: 344480 - DNA, 122 bp, Homo sapiens
ggggagcgtccctggcaccttgcgccctatcaggaggaagagggcgggccttcctgggagcgcacctcgctgcctgtagctagaagatcagaaaaggaacaaccgcgagtgctttgcagtct

SEQ ID NO: 344481 - DNA, 122 bp, Homo sapiens
cctggcgcaggcgcgccgcggggtacttgtcctgggcgcggcgcagccaggcgtccacctcgcggcccagctccccgtcgctcagctgtgcctggctccactgcgccagcagcgcctcgagc

SEQ ID NO: 344482 - DNA, 122 bp, Homo sapiens
aatgtctgcccccgcttacccagctacaggccatcaagtgagaggcactgaggggatgggcgggggaccagagtgggagttggggctcctggtggcttgggagagagaaccaaggggcatgg

SEQ ID NO: 344483 - DNA, 122 bp, Homo sapiens
agccctagggaggaagggcgtgctgcgggtgcagtctcagggtgaggacggagctggggccgacgcagcctcgggagttggtggacgggacaggtgcggcctgtggggaagaagggccggcc

SEQ ID NO: 344484 - DNA, 122 bp, Homo sapiens
tctaagtctggcacgatttcacctcagacgcactcggttggtttggatgttgagggagaccgcacatgagagagggagaaggaggaaaagagagctggagagcaaacctaccgctcggcggc

SEQ ID NO: 344485 - DNA, 122 bp, Homo sapiens
cgagggccgagctgcgctagggggactgtgtctggagcccagagtcgctgcaggggggcccgggccccgccacagcgggttcctctcggttccacccagtccctcctttcgccttgggactc

SEQ ID NO: 344486 - DNA, 122 bp, Homo sapiens
cctggagacagcgactccagagaacctcttgggagacagaagaggcatctgtgcacagctcgatcttctacttgcctgtggggaggggagtgacaggtccacacaccacactgggtcaccct

SEQ ID NO: 344487 - DNA, 122 bp, Homo sapiens
gcggggcgtggcggggcgggcagagggcggggcctgcttctcctcagcttcaggcggctgcgacgagccctcaggcgaacctctcggctttcccgcgcggcgccgcctcttgctgcgcctcc

SEQ ID NO: 344488 - DNA, 122 bp, Homo sapiens
ttcattctggaagtggggagccacacacaggaatcctttctttattctttctccctggtacggagggctctgcaggtgatgtgctccagaagttaccaacaagctgcttctttgagacccca

SEQ ID NO: 344489 - DNA, 122 bp, Homo sapiens
tccactcgcaagaaagcggaggagggcccattactctgtctccagggactcccagaatcccgtacgccccgacataaggaaagtcatccagggaacacacacgtcgctcccgcctagagagt

SEQ ID NO: 344490 - DNA, 122 bp, Homo sapiens
tcacctcccggacggggcggctggccgggcgggggggctgacccccccccacctccctcccggatggggcggctcctgccaggttcttttgtttggcattgttgaatacttgggcagctctt

SEQ ID NO: 344491 - DNA, 122 bp, Homo sapiens
aaatcctacaaatatgaagaatgtgacaaagcttttaaccacttctcaaccctgcctacacgtaagataattcatactggaaggaaaccctacaaatatgaggaatgtctcaaagcttttta

SEQ ID NO: 344492 - DNA, 122 bp, Homo sapiens
ggttgggcttgggagtaagaacatcttccaaataggttgactcgatcagatcaccaatggcggcatatttttatccatcccccaccccctttttttttctaagagatagggtcctattctgt

SEQ ID NO: 344493 - DNA, 122 bp, Homo sapiens
tcctacagacaccgctgctgctaccttgctaccttcagcgctgggcacagccaggggcagcgcgagagggaggcaacgagagggttcccgggccgggcagcagcccagccccggcccggagg

SEQ ID NO: 344494 - DNA, 122 bp, Homo sapiens
cagaggtgagcacaggccccctcccttgtccctccactgcagagacctctgaggggacaccgagtcctccgagcattccccaggaagcagccctctcaggatgactgggttgctggagagct

SEQ ID NO: 344495 - DNA, 122 bp, Homo sapiens
cccagagtagaacaggctgctttgtatcagctgagcacatgccggcctgtaggaggcttccgcactggggagctcaagaactaaaaccccacctttaggtcatttgtttttaaagatgctgc

SEQ ID NO: 344496 - DNA, 122 bp, Homo sapiens
gggaggggaggaaattggagaccccagcacccccttgctcactctcttgctcacagtccacgatggcccggtccctggtgtgccttggtgtcatcatcttgctgtctgccttctccggacct

SEQ ID NO: 344497 - DNA, 122 bp, Homo sapiens
caactccttgaaagcgagctctcgacacctagaagccaggggcattcatattcccgtggccgagctcagcgcccagtggacgggaacccggtccttcttgccatgagaacacccagcccagg

SEQ ID NO: 344498 - DNA, 122 bp, Homo sapiens
ttgcggaaacttagaaatctgctctttggttagggtcctgcgggtctctgaggccttgaccgtcctcggtccgtttctgtgtgttcaggcagatgaattctgtctgtcctcggggtcaccgg

SEQ ID NO: 344499 - DNA, 122 bp, Homo sapiens
ggggagttttgggcaggggcctaatggtgggggttgagggagaacctttgcctttggctgcggaaacaggcagccatcagcaaagctgctcccggaataacaggttgttctggcactgccca

SEQ ID NO: 344500 - DNA, 122 bp, Homo sapiens
ttttccaacttggtcttcttattttcccttcctgctccataactacaacgtgtttctgttcgtaatcatctcggcttttccttacctctgcttgtaagaaaagtcctttgcgccattcccct

SEQ ID NO: 344501 - DNA, 122 bp, Homo sapiens
gggcttctggcttcagagctgggaattgtgggaggagggcccagatcccactggagataccgaaggagatactctttagtattgggatcccagaaaccagtcctatatctggccagagggac

SEQ ID NO: 344502 - DNA, 122 bp, Homo sapiens
gagagagctgcgatccatccaggccaagaccacagctctgtgatccttccggtggagtgtcggagaagagagcttgccgacgatgccttcctgtgcagagcttgggcatctcctttacgcca

SEQ ID NO: 344503 - DNA, 122 bp, Homo sapiens
catggctctcgagaaaaacagaggagcagtgtacagaagaccctcacatcggtggccctgcgtcttccctgtgggctgtgccaacccactctctccccagtaatgactctttgtttttacta

SEQ ID NO: 344504 - DNA, 122 bp, Homo sapiens
cccccttccggccccgccaaccggctcccggcgcacctgccctgccccgcccccccgggacgctgcccacctgtcctttgtgcagggcggtaccattcgatcttgccagctctccttcaggg

SEQ ID NO: 344505 - DNA, 122 bp, Homo sapiens
gcatccttgctgtgtttatccggcaggtggtgacctcactcctcgctggcctgagcactccgtccagcatcccaggcggtggctttagggaagtctctgcagctgagcacagggtggactct

SEQ ID NO: 344506 - DNA, 122 bp, Homo sapiens
atacatgacattgtattacattttcaaggggatagtacatatgagaaggaacactagcttcgaattaggcaaataaaaaagaaattggtaaagagctgtcctaccatgcatttctttcttcc

SEQ ID NO: 344507 - DNA, 122 bp, Homo sapiens
aagagccaggtgtgggaccagcctcccgggggtgccacggcagtggcgctgggcaggtgacggtggctgctgacccccggtgcccatgtaagctgctggctctgcgcagctgccgcttcagg

SEQ ID NO: 344508 - DNA, 122 bp, Homo sapiens
tcaccttggagaaagatggatcatgtgagcgggactgagagctttatggagccaaactcccgcagctgtaaatcaccctgtcctcctgggtataaagcgcctgtccatctcggcgtgggaga

SEQ ID NO: 344509 - DNA, 122 bp, Homo sapiens
ttttcccatcacgggttgagaaattggagggaggggcattgctggggcttcctgtgcccgcgtgtgcggggggttctggggcctgctgcctgcctgagccagccccttttcccgccagaggc

SEQ ID NO: 344510 - DNA, 122 bp, Homo sapiens
gggacccacggcggcacccgagacgcgcgccctcgcggtcctcaacgcatccttgctcgccgctccctgcccctcgtcacggccccagaaagaaagcggggttttctaaagatcgaaacgag

SEQ ID NO: 344511 - DNA, 122 bp, Homo sapiens
gaatgctttggaatggctcaagaataaactcaacagagttgcataagagattatccaaaacgaaacaaaagggggaaaatgtgaggagagcgggcaggggaaggtagacagaacagaaaacc

SEQ ID NO: 344512 - DNA, 122 bp, Homo sapiens
ccgcgccgccactggagccgtgtcctgggcttccggggcggaaactggggccccgtgtcccgtgcgggcctccgtcctcgggcgagcagggcccttcgctccgggaggggaggtgacgcggc

SEQ ID NO: 344513 - DNA, 122 bp, Homo sapiens
agtcagcggcgatagctgaggctggcagcctttgctgggtgagtcacagaccagaagttccgtcgagtctgaagtttctggaaggcgttgaagtttctcctcttctctctcttaaatttttt

SEQ ID NO: 344514 - DNA, 122 bp, Homo sapiens
ggaagatctggggggtgaggatgctggttaggctggaacacctgaagcgtaaccttaaggcgagtctgtggttgcctgaggtggcaagcagccctgttggagtgccgggcatggggaggatt

SEQ ID NO: 344515 - DNA, 122 bp, Homo sapiens
agggggagcgcgggggtgggtcccgaagcgtcccatttctcctcctggctgttaactgagcgctctcgctcagtgcagcgaggccagcgatgccttctggaccacacgctgtcctcgccgag

SEQ ID NO: 344516 - DNA, 122 bp, Homo sapiens
agccaccgggggagatctggggggaggggtctcctggcgcgtggggtccgaaggaggcagcggcacaccgggaagagggtctccctgggagtccaaatttccacctggagaggatgagtggg

SEQ ID NO: 344517 - DNA, 122 bp, Homo sapiens
acagggacagacttccttttgtccttttttctcttcgtgcagagtaacgcggagtcttgccgtaacccaagatggcaaccatctctcaaatgtcacgccgtacaatgacgtcacacagcgac

SEQ ID NO: 344518 - DNA, 122 bp, Homo sapiens
tcccctcctcttctccgtcttccttccccagcaacagaataaataggtttcccacagctgcgccccggacccatcccgcacgaagctgagccccagagcccccgcggcccgagaggagctgg

SEQ ID NO: 344519 - DNA, 122 bp, Homo sapiens
tagttgaatgttttaccactacctcaaacccagcattacccaaactgaactttgatccttcgggcttcttgtatctgaatcctcctgcagaagcacaagatgtaggaatttatgttcaccat

SEQ ID NO: 344520 - DNA, 122 bp, Homo sapiens
atctccccaaccttcaacaatgcaccctggggtgaatcaaacacatagcccgatgttagtcgcatgagtgtctatctctgacaaccctcgggaaccaatgcggcacctggcctgggagacct

SEQ ID NO: 344521 - DNA, 122 bp, Homo sapiens
ctcaccaggcgccctggcccctgtccagctgcacaggccctggagggaacccagagaaaacggagtcagcctctcaaccactcctccgcccagtgaggccgaggggctgggaggagcggctg

SEQ ID NO: 344522 - DNA, 122 bp, Homo sapiens
tataagactctgaggggactcagagtcagcgagagcctggcctagcaggactctgtcccccgcctccatgctgccttcctggaggccttcctggctgcctggaggagcggagcagagtgggg

SEQ ID NO: 344523 - DNA, 122 bp, Homo sapiens
cggcaacttttggttgttgctgctgttgccagtgcgcttagcagagtaggaagctcgaagcgcaaagcaaccggaccgaggcagctctgccttcttgcagcccaagggtcctgcaagccgct

SEQ ID NO: 344524 - DNA, 122 bp, Homo sapiens
acaggcagagcatggcaagatcaggttgtaccagagccgaagggtaagtttacagaaacccgtatctaattaatgcctgtaacacgctagtaaccgaatcggggacagctttgtccctttcc

SEQ ID NO: 344525 - DNA, 122 bp, Homo sapiens
ttacaggccaaatcattgaagaatgacaagtctaacctctaattaccatggcgggtagagcggggaggagatggtgcactgtacacagagcaccaggaacccaagggaagttaggggagatc

SEQ ID NO: 344526 - DNA, 122 bp, Homo sapiens
ggctctgcagtacagagggggcaggtgaagcccgggatgagaaaagactgggccttggagcggaaatcccaactgtgcgggcagatgtcttggctctgccttggtaggccaggcacagggat

SEQ ID NO: 344527 - DNA, 122 bp, Homo sapiens
gaaggagcactcctgggctttaagccaacggtttgcaaagcagcctgcaggagaaaatggcggcgagggcctgcggggcgtcctgggcgggctaacagcgccccctacaggacgcctgagcc

SEQ ID NO: 344528 - DNA, 122 bp, Homo sapiens
acactgaaaatatttacctatcggtctgcacagaaaccaacaagtcagagctgtcagcaacgcctgtggctctgcaggtgatgagtatcacctgaagtgatatttaggagcagtttgaaggt

SEQ ID NO: 344529 - DNA, 122 bp, Homo sapiens
aataataaaagcaatagctgatgcccgccgagagcgctcgggtgccaggcaccagactagcgcatcgcccgaacgaactccgcgcatccctgctaacagatagggtggcggtacgctgttcc

SEQ ID NO: 344530 - DNA, 122 bp, Homo sapiens
cgcacgtggccgactccaggctggagcgggcgtgttacaggattgtgggcttggggtagacggtggaattgggccgcgtggcctgggcagatgatgcggggtgtgcggcccagagtggctcg

SEQ ID NO: 344531 - DNA, 122 bp, Homo sapiens
taggccgcagctgcttctccctctgccgaattgagctgggcggtggtaaccatagtggaccgcacttcctcttcgttcagtgcctcccctcattcttgtcctttaggggtgtggtggaaatt

SEQ ID NO: 344532 - DNA, 122 bp, Homo sapiens
ttccaggctggaactgcgaagtttcctgtctgattttccaacaatgtaatttctttctagcggaaggaccctcagaaagcaatcagaggggtgcggagtaaaaataaatcaagttcttgtga

SEQ ID NO: 344533 - DNA, 122 bp, Homo sapiens
ctgatgtatagcaagtgtttcaaactcttgttagcaaagatggttttcggtgtctgtgcccgggagatggccttccgctacgggagggcaggaggtggccggggagctgtccccgctcacta

SEQ ID NO: 344534 - DNA, 122 bp, Homo sapiens
tccgtcctcacacccatgcgcgtttattccacccgccgtgcgccttcctctcttccatcacgctgacctgcagccccgcagcccgctttctccgccgtcgggccagccgcttgtttccacaa

SEQ ID NO: 344535 - DNA, 122 bp, Homo sapiens
aatctgaaagctaatgacattattgtgcagagacacaatgtctgtgggcatttgctgacccgagctttggtgagagcttaatccagcattctcaccctgcttttcgcaggagcacagcggtc

SEQ ID NO: 344536 - DNA, 122 bp, Homo sapiens
caaagtgagctgggagcgtgcctcccacattccaagcccgggccctctgcgtgacgctgacgctgggtagggacagatggcactgttcagcattgtcgcagggagagcacaggttgagccca

SEQ ID NO: 344537 - DNA, 122 bp, Homo sapiens
agactgcttgctgcggcagagacgccagaggtgcagctccagcagcaatggcagtgacggcgttggcggcgcggacgtggcttggcgtgtggggcgtgaggaccatgcaagcccgaggcttc

SEQ ID NO: 344538 - DNA, 122 bp, Homo sapiens
acttgctttcaagtatgtttaatagttacatcagctaaccccaatgtggcctactactttcgttccctttacatcaagccaagggatgcccctgaggacaattagcaggtatgtaacacctt

SEQ ID NO: 344539 - DNA, 122 bp, Homo sapiens
gggggcccggtggagatgtgttcgcggggtcctggtctgattctgtcttggaaggaacatcgggcccctgagaggtcagagcagtggccggcccacggctccgctcaggcgccacggcggct

SEQ ID NO: 344540 - DNA, 122 bp, Homo sapiens
acgcccgacattacaaagcttgaatgacacttcagcggcatctcaggtccgcttgcttcccgagcatctctacttctccctctctcgaacgatcccttcacttcctcccctcatcttccctt

SEQ ID NO: 344541 - DNA, 122 bp, Homo sapiens
agaccaccgaatcagcctcttctccatgcactgttttcataggcctgttgcattctacagcgtttttctcttgctgtgtttctctccagcatccttgaccagctctggtcaagagtctcact

SEQ ID NO: 344542 - DNA, 122 bp, Homo sapiens
tagataaaaggccaggagtcgtaccaacatagataccaaatccaggagaacacagaccagcgataagagggacgcttccccatgacccagaccagcctaaagcccctgtgggggcagccagt

SEQ ID NO: 344543 - DNA, 122 bp, Homo sapiens
gctgctggatttttgctgacacccggctacttactggtactcctgaaaaacaggaatcagcgggtggggaaagcgatcatcacagcttcaatgagcacccacagtcccacagtcccacagcc

SEQ ID NO: 344544 - DNA, 122 bp, Homo sapiens
ctgtccattttactgcctcctacgtccctcgagtcctcccctctgcttctttgttcaccgcggccagctgcctccccagacccgcaaccccggctgggccgggaacctgcaccgcggcgctc

SEQ ID NO: 344545 - DNA, 122 bp, Homo sapiens
aaagggatcccctaggtccccagggccagcagctgtgagaggtcatcagcctctgatcaccggtctccaagagggtgacctgacactcactgtaagtagagataaagacagacaagtttggg

SEQ ID NO: 344546 - DNA, 122 bp, Homo sapiens
ttcaagggaatttgggttactcttctcttaactccacagctgtctgtctaagtgcttactcggtatctctagcttaatgttcaacagatatctcaaacttaacatgtctaaaactaggcttc

SEQ ID NO: 344547 - DNA, 122 bp, Homo sapiens
ggcccaacctccttcagcgccccccaaaaccccactgctcccattcagcccctgtcctggcgtcattgtgtgtcccagccaggtgcttctgccgtctccgacagtgacaagtgcctcgcact

SEQ ID NO: 344548 - DNA, 122 bp, Homo sapiens
gagatggagccagggccaaagccaccagcctgagggctctgagccgggttggggctatctcgctgctttcgcaccggtgtgagctgccgccggaactctaacctctttgtagggatgtctgg

SEQ ID NO: 344549 - DNA, 122 bp, Homo sapiens
gctttgaagcagggttctctgtgccacagaagagaacagtttttcctgtagtaatgaactcggaacccagtggtttttcaaataagagctgctttgctacttctggccagatagtatccagt

SEQ ID NO: 344550 - DNA, 122 bp, Homo sapiens
gaagtgtagtccgaagttgcgggccggggccaagcaggaggcgcgtgggactacacttcccggcatgccacgcggccgccggcgccctcggcccgtccgccccgccccgccccgcggcccca

SEQ ID NO: 344551 - DNA, 122 bp, Homo sapiens
ctctgcgcctccagggccggccgagcactagcccaggcccaggagaatctactgaatgaccgggtctcagcttgagcggcacagacacatggctggtgtgacccttccactgtccccagcgc

SEQ ID NO: 344552 - DNA, 122 bp, Homo sapiens
ggctgaggcttgcccgggcgcccccgctgcctcttcgcagggaccctgagcctgcggacccggagtcctcccacctgtaccctgggcttgagtgatcctctaccccacgcgggctaggaggc

SEQ ID NO: 344553 - DNA, 122 bp, Homo sapiens
gcgccgtgcgtgaatctgctcgctgatctgctccaggttacgaagggccacggagtagcgcgtcttggcctgagctacctgctgctccagttctgtcaccttggccttgtgctcctgcagag

SEQ ID NO: 344554 - DNA, 122 bp, Homo sapiens
cagctctggcagaggaagcctggccctggcgcgtctcctcaggagcgctcatgacgggcacgggcgtcacaaacacaccaacagaaacaacctgtttccatcgcaagagaacagctccttaa

SEQ ID NO: 344555 - DNA, 122 bp, Homo sapiens
gctccaggaggaggagaggctcctgcaggagctgctggagctgtaccaggttgactgatgcggcaagctaccctcagaggtcccagtggtcactggaggcagttttttggttgttgtcttgg

SEQ ID NO: 344556 - DNA, 122 bp, Homo sapiens
cccctgacataaggcattggatggtcagggaacagccacattcagtacccgctcagctaacgcccttcagccgcccaccttcttcctgcatcccgggcccaccctgaggagctgggcaagtg

SEQ ID NO: 344557 - DNA, 122 bp, Homo sapiens
caaatccagacacaaaaatacagtggaacgtattcgcatctcaagcacgtccaaatgtctcggccaatgtgatccgatcactgccgtttccagaaacacacagtaatggcttttaattcatt

SEQ ID NO: 344558 - DNA, 122 bp, Homo sapiens
acctggcctgaggtgctcgcggcccccaccccaccagtgggcgtcccccccacgcgtggtcgaccatcattggtcggtggtgaggccaatagaaatcggccatctgggaacccagcgttccg

SEQ ID NO: 344559 - DNA, 122 bp, Homo sapiens
tagggctttagggcacctcacaggagccctgccaggagagaccagaaggcctgaagtcaccgttccatggagtaggggtggtttgcaaccaatgacctgaacctcaccctctcatctgtgct

SEQ ID NO: 344560 - DNA, 122 bp, Homo sapiens
ccatgggctgcccattgccacctctgggcagccctccttgatggtgtggagtccgcggtccgcattggttaacttaactgtgcttcctcagatccagtctggaattaattattgaattgtat

SEQ ID NO: 344561 - DNA, 122 bp, Homo sapiens
gccacgcccaccgtcatccggggtcctggcccgctaagatggcgatggctgcggtagcagcggcggcggctgttgcctggcccggtaccctggggacgggggccgagtagcgccttccccgg

SEQ ID NO: 344562 - DNA, 122 bp, Homo sapiens
tccccaatattacattgtgggtgttcatctatttttgtattggcttgtaagagctctctacgtattaagggcattaacctttgtctgccacatatgttaaaacgtacttctcggtttatcat

SEQ ID NO: 344563 - DNA, 122 bp, Homo sapiens
tggcatccaatgtacactcttttgtcaaagggtaagttttgagttttcatagggccaccacgcccggctaatttttgtatttttagtaaagatgggatttcaccatgttggccaggctggtc

SEQ ID NO: 344564 - DNA, 122 bp, Homo sapiens
gtgagtaaggatgagggctgaacaaaggcaggctgggggggtggggatgaagtcaagaagcgttcaggaaacaatgtgcagaattctatgactgatgaggcaggcagcacagtgctcagaga

SEQ ID NO: 344565 - DNA, 122 bp, Homo sapiens
attgaggctggacttgggaggggtttaccccctcaatatcacaaaacccccaagtcccagcggagccggagcaggaagtggagaaaggcctggggccatcatgcgcagctgcaggctggcag

SEQ ID NO: 344566 - DNA, 122 bp, Homo sapiens
cggggggggggggggggggcggggcggattcagggcgtgcctgtctctgattggctgtgccgcccgtcgctccgccccgtgttctataagatgcgcggacggcgggcgcgcctctggggtgg

SEQ ID NO: 344567 - DNA, 122 bp, Homo sapiens
gactggccttggtcactgctgaggccggagcaggatgaggatgcttgccttggtgcctggcgtaggcccggtgggtaggttctggcagccactccctgggtgacccggcccctctctccagt

SEQ ID NO: 344568 - DNA, 122 bp, Homo sapiens
gtgcggctcgccctcctccgcgcccagacgcaggagccgtccccagggctgcggcggcggcgactgcttgccttcctcgggccgctccatcgggattcacatctgcggagaccccggaaacg

SEQ ID NO: 344569 - DNA, 122 bp, Homo sapiens
accggggtcggctcccgaggcccccggctgctcccccgatcccccgggcccggtggcccgcgccccgccccctgactccgcgcggggcccagtcggcccccgccccctacggctctcggggg

SEQ ID NO: 344570 - DNA, 122 bp, Homo sapiens
tggctgaaggcaggggaaggatggagtttagctggccagcactaatgtcacacagggcaacgccaaaaatggcctttctcccaggtgggctcaaagttaacagaaggcagtgagtaaacagt

SEQ ID NO: 344571 - DNA, 122 bp, Homo sapiens
cagcgagagctctgtttatccgagggtgctgagcctcaggccccacggagattcccttttcggcacttggaggcctgaactcaggtctaacctttcgtgtgcgcgctctgatactcaaccac

SEQ ID NO: 344572 - DNA, 122 bp, Homo sapiens
aaagagagaagagcagcgttcaagggtggatgtgtgaggcacaaaggtgagcaaagcaggcgtgtgaggacgcacagctgaccctgccagcgggccccgcacccaccagcacgagccgcacg

SEQ ID NO: 344573 - DNA, 122 bp, Homo sapiens
caatttgttaaaagacctggggctggagataggagaacttgctgtgaggggggccagggtcgtttccaaaggaaaaaaaatgcatttgcagttcgataggcagaccggggatttgttgttaa

SEQ ID NO: 344574 - DNA, 122 bp, Homo sapiens
ttgcgggccacgcccacaccggggtgcccacacctgtcacctcccacgctacgctagccccgcccctgccccgttacttgacctacaaccctgtgcttggccgcgcccacagcagctgaccc

SEQ ID NO: 344575 - DNA, 122 bp, Homo sapiens
agtcatccctcagtatacactggggattggttccaggatccctgtgtataccaaaatccacgcatacccaggcccaactggccctgtgaaacccatgtatatgaagagtttcatactctatt

SEQ ID NO: 344576 - DNA, 122 bp, Homo sapiens
caaccaaacactccagtcagccagctcttggggacctgcctggggccagggccaccttcgcgggagagtggcccctgtcctcatgttctaaggtcttttgggcattgtcagaatgggcagtt

SEQ ID NO: 344577 - DNA, 122 bp, Homo sapiens
agttttgcccacgcaggccccttgaaggggacacacagacgccaggagacagacgcgtggcggccgggtcactcccagtggggagctgtggtttgggcgcctgagcctggagcccccgtctt

SEQ ID NO: 344578 - DNA, 122 bp, Homo sapiens
caatcccccgcgtggcccggacctaccggtccacagcgcgtgacaatctcccatctcgggcgacctggaggccctcgctgtggccagcttagctcccggggctgccccaggccgaggccagc

SEQ ID NO: 344579 - DNA, 122 bp, Homo sapiens
catgaagacagacaggtgagcaccagagggagcaaccactccaaaaaagagcagagaggacgatccctctgctgcccccgccctgcccactgctatcacgggacaccttgcacctgtttacc

SEQ ID NO: 344580 - DNA, 122 bp, Homo sapiens
gacccccggcagggacgtttttctgcaaactcacagcatttgacaaagttacataaacggcgcccggccggccccggcgcccgcccgcccccgccctcactcccggcggcccggagcccacc

SEQ ID NO: 344581 - DNA, 122 bp, Homo sapiens
cgcctgaggctccagctgcccccctcccaattcaagccacgtcagctcgggaagcccgtacgcgacaccttccaccgccgcgccccgccagggactcagccactagcagttgggacggaaga

SEQ ID NO: 344582 - DNA, 122 bp, Homo sapiens
gcggggatccggttcagttttcttacaggaccctgaattgggctactctcctctgacatgcgcccgggccagaaccctcggacacggatctgaacctggtgtcccgtgggttaggaaactcc

SEQ ID NO: 344583 - DNA, 122 bp, Homo sapiens
gtcctggccgaagtgagaacaattgtatcagataatgagtcatgtcccattgaggggtgccgacaaggactcgggaggaggccacggagccctgtactgaggagacgcccacagggagcctc

SEQ ID NO: 344584 - DNA, 122 bp, Homo sapiens
ctataaataatgaaaaaatcacagtaatgaccagaaatgtgtgtgaggcgtcgcggcgagcgtgtaatggatgctttgtttgtcttcggggactgtattaccagcatgtaactgattaggct

SEQ ID NO: 344585 - DNA, 122 bp, Homo sapiens
ctacagaggaagaaactgagtcccaggcatatgaacatgtgatttgccagagtgataggacgaagttgagggggcagaaccgaggctgggcgtcctttctccaaactcttgaaactgtgctc

SEQ ID NO: 344586 - DNA, 122 bp, Homo sapiens
caacacaggtgtgggctatggttctgagacaccattcatctcacacgaggtacggcgatacgcgacaccacccagtacaacagctctctctccacctggaacccggacccagcttgattcgc

SEQ ID NO: 344587 - DNA, 122 bp, Homo sapiens
ctctctccatggttcctcacacaacagatggttctgtttgtgcaaactccatggtagttacgttggtcaaccaaaaagactgctttttcgttatcttgtttggtcactttcccaccagatag

SEQ ID NO: 344588 - DNA, 122 bp, Homo sapiens
acttctctgagaccacaccacttccatgacagcattcagcgcgcggggttccctccaaagcggaaccgaatcattctcaccagtatccaggtaacacctgcagtgacacaagctcccaggtg

SEQ ID NO: 344589 - DNA, 122 bp, Homo sapiens
tgcctcatctacgacccagacaatgagactgacccctttcacaacatctgggtaagacgccgggggccctgaggcgagcccctccccaggtgtggccccgtgccggaccaggcgccatccac

SEQ ID NO: 344590 - DNA, 122 bp, Homo sapiens
ccgcactctcgtcgccccctttgaggcaggagctctcttggctctcggcttggggtcgggcggcgagtggcagacaggcggtggcgggagccagaggaagcgggaaggcaaaggttccactc

SEQ ID NO: 344591 - DNA, 122 bp, Homo sapiens
gggctcattcttccaccagggctcctggaaatcccagaagctaaatcaggtaaaatgtcccggtaacctctgggaggcgggacatgactgctaaaccaaggttgcaggcccgtcaggggtgt

SEQ ID NO: 344592 - DNA, 122 bp, Homo sapiens
ggtgccagacactcagactctgatggctctgtagctaactggcccatcctcagagactaacgcaaaggaacgaatttccaggatgttcgactatgtggagaaaacaaaaaaaaagcaaagaa

SEQ ID NO: 344593 - DNA, 122 bp, Homo sapiens
gggcagctgcggtggggagctccggctctatccgcagggctttctttagtccctagtcagcgggaatatttttactgattggaaaaataaccagtcgtgctcaggtgctctccctcactgag

SEQ ID NO: 344594 - DNA, 122 bp, Homo sapiens
tgaaatacaaagtcaaataaataccatatctaattgtggagccctatactatttcattaacgaagatgctacaggtagactgagggacaaaaaaaaaagacaatataatgaaatggaaaaaa

SEQ ID NO: 344595 - DNA, 122 bp, Homo sapiens
ggccccctcaggccccggtagtggcggcggtcgggccattgtgcggtgcattgtgggagccgcgcgagcgggcgctcgggtcgtggagggggcggtgccgcgggatctctatggtcccgccc

SEQ ID NO: 344596 - DNA, 122 bp, Homo sapiens
gcaggggcttccctggagactcgcgcgggagaccgggaggtccaaggccccagtcgcagccgcccagttcctcgctttctggttcaggacgccagtggggacttcccgggcgcctcctccca

SEQ ID NO: 344597 - DNA, 122 bp, Homo sapiens
agttctcccgaagggagccaggcgcgagcgcgacctggggaaagtccagagtgccagccacggggaagggcgggcagtgcagagtggaagagaagccagcaagttagacacagcccctctct

SEQ ID NO: 344598 - DNA, 122 bp, Homo sapiens
accaaagctcccggccccctccgccctcgcgcgcccacccaccgccgccggggagcggcccggcccgcactcagcaccatgaggggacttgggacttgcctggcgactttggccggactttt

SEQ ID NO: 344599 - DNA, 122 bp, Homo sapiens
ctcagccctgagcacaagcaatgggaactgagctccccagccctgagggcccggaaacgacgctctgccacacagaagagccggggagctgtaactggctataagtcgagcccctggagctg

SEQ ID NO: 344600 - DNA, 122 bp, Homo sapiens
gcggtgggaaggaggtgtagcgtgagactggactgcccgcattgggtacatgcgcagtgccgctcgcgcgggccgcgccaatcctgcagcgccttcaacaggtttcgggcggcgaattccag

SEQ ID NO: 344601 - DNA, 122 bp, Homo sapiens
tttaaaaaaaaaaaaaaaaagcgaggtaattagcattctccgattccactggctctccgccgcccctgctttgcatacgcccgtcccactggctgcccggggtttgctggggttcggcaagg

SEQ ID NO: 344602 - DNA, 122 bp, Homo sapiens
cttaagactaaagctctgtttcatcctaaactccaaatgccaacgtgctcactgacttgacgaacgttggttaggcctcgtgcatgcgagggagcgtggtggttgcagggggctgtcgtgac

SEQ ID NO: 344603 - DNA, 122 bp, Homo sapiens
agtaccctcacacccagaggcgatgacagtcctgaggcctgcaaggcggggcagcagcggcgctgtggttaccacggtgaagcctccagctcctcccacagcttctgtgccccaaaacactg

SEQ ID NO: 344604 - DNA, 122 bp, Homo sapiens
cccggactcgcggctgctgcaaaacccgcttccagcccacctcactgcgaactttgcttccgaggggctggaaggagtcccaggcagctgtttcccaagctgtggaacacttcctttcccct

SEQ ID NO: 344605 - DNA, 122 bp, Homo sapiens
agccggtctgccagagagcgccagccttgcccagacatcaggtggaaactgggccactgccgggctgcagtgactttcggctgatgattttttttttcctgcaaacctaatcactttaatat

SEQ ID NO: 344606 - DNA, 122 bp, Homo sapiens
accctccctgtttattgatcacctttggcatgaaatatcttgtatatgggttcggaccatcgcgaaggtttcagacacaaacaagctacagcaacactttctctacgcatcccctagttatt

SEQ ID NO: 344607 - DNA, 122 bp, Homo sapiens
gggagtgtgggggctgcggacacctagggtcaggcgctgagtgctgggtggtctcatgttcgcagggtggggcggtcggagcagcccggctggggtgggagtgtgggggctgagggcaccta

SEQ ID NO: 344608 - DNA, 122 bp, Homo sapiens
ttcttcatgtctagccacttgcagccttcagtgaaggactggatgccatcaccttaaaaacgaggttgttggccgagcgcggtggctcactcctgtaatcctagcactttgggaggccgagg

SEQ ID NO: 344609 - DNA, 122 bp, Homo sapiens
cagcaacgtcggtggcccaggggcccagcctcctggggacaggcaggcagatgaggcagccggtgtggggcgagctcccaggcccacgttcccagccagcaggcctggcccttcgtgggtgc

SEQ ID NO: 344610 - DNA, 122 bp, Homo sapiens
ggggtgcccttggcccttcctttgtcttcctgttttgcagggtaatcccagggttccatgcgtatcctctgcacattcagcatgggctcctcggtgcttgtgtctccatttttctgtcgttc

SEQ ID NO: 344611 - DNA, 122 bp, Homo sapiens
gacctcctctctatgagcgttgcctcctctcccagacccttcgggcgtccctaaggcccacggggcccaggcctcctcaacaggggccgcagaccaggtctccacccactgctctccctgcg

SEQ ID NO: 344612 - DNA, 122 bp, Homo sapiens
gcgggtgtacagcacagagaatgcggacaagcttgtggccagcgtcctctgggttcagggcgtcttcaccttggcagggatggcagagccctcttgcgccccggcaggtcggcggggcaggc

SEQ ID NO: 344613 - DNA, 122 bp, Homo sapiens
cgccctgcccagcatgtcctcaactttctgggcgttcatgatcctggccagcctgctcatcgcctactgcagtgagtaccgcgcggccccggccccggcacggccctctgggccccggaccc

SEQ ID NO: 344614 - DNA, 122 bp, Homo sapiens
cgcgggcgcggggcagcgcggagcctgcctgggatgaggagcgggggggcaggtggggcccgatctatctgggaaggactatagaggtttgccacctgagtttctgggctgactgttgggcc

SEQ ID NO: 344615 - DNA, 122 bp, Homo sapiens
gttgggaccatgagcagccatgcgcacctccacgcacggccgagctcaacccgaagaccacgcgtgctccctggcaggagcaggaggcctgaccacagacgcagcagctccccagcctgagc

SEQ ID NO: 344616 - DNA, 122 bp, Homo sapiens
acataattctctaaatcttaaactacagcatttagtgaaaggagggaaaacacagctgcacggctcaggagactgaaacatccaaagcctgaattggtccttatatcatgattagctgaaat

SEQ ID NO: 344617 - DNA, 122 bp, Homo sapiens
gccaaagaaggagtctgagttagcaggaagagcagtggtttgcattcacaacgggacgtccgaatggaacactgctcatttggaattgcctctgagagtcattggtgccccaaacccccatg

SEQ ID NO: 344618 - DNA, 122 bp, Homo sapiens
gcacattaaacaaaaatagctgctgtataaacatgcaggggtgaaactgcagataggactcgtcattcatacagtcaacagcaattctgttgttaattacccactgggaaggtatgttatgt

SEQ ID NO: 344619 - DNA, 122 bp, Homo sapiens
agagaacgtgaaagatttgagtctgaccgggacagagaccatgagaggaggccgattgaacgaagtcaaagtcctgttcacttgcgacgtccacagagtcctggagcgtctccctctcaggc

SEQ ID NO: 344620 - DNA, 122 bp, Homo sapiens
ttacaggaactgcagaaactgggactgggttcctggggaaaggattgggggtgttggaggcgctggccaggggattatggggaggtgttcttatcagtgtgcgaatactgggcgttcaggca

SEQ ID NO: 344621 - DNA, 122 bp, Homo sapiens
taccttttagagctcccaggctgtagaccaaaactgacatgaatacctgctcttgcccagcggatgtggatgcccagggggtctctgggtggggaagaagtgggtgtctattggcccagtgg

SEQ ID NO: 344622 - DNA, 122 bp, Homo sapiens
agtgactcaaatgatgtagagccaagcagccccagaagcctacctgccaagagccagagtcggtggtgaggattgtggggatgggaagggaagtggcttgagacacagagcaaataggtggg

SEQ ID NO: 344623 - DNA, 122 bp, Homo sapiens
cccactctcaaatccgacgattagcagcaaatccaagcatcgtgacttagactaagtgggcgattagcgttgttccccgtgaaagagcaggcaagagaccaggctaagtcacttccctaaag

SEQ ID NO: 344624 - DNA, 122 bp, Homo sapiens
ccctgctgattgcttgcagtggaggtgccctgggcgtagggtcggcagtaagcgtgaggccgcaaccccaaaccaacccatgggagataacagcgagaagagggccccgaagcccccactca

SEQ ID NO: 344625 - DNA, 122 bp, Homo sapiens
aaatgctacagaataaattcataggttgaaatctggaagagaattatcattgcagagtctcgggagtgaaggagattatactcagagagaaaaaagaacaaaactagtacctcaaatactta

SEQ ID NO: 344626 - DNA, 122 bp, Homo sapiens
ccgcttctagtggcaggtgcccctcctcacagggccctcgcagccccgccggcccccgcccggctccttctcagcatgatacaaccgcgtcggccctggacagcgcatgcgcgggcgccggc

SEQ ID NO: 344627 - DNA, 122 bp, Homo sapiens
aaattaaaatccagccagtcctgtcccttcatttcacagagaagttaagactcagagaggcgaagtgacttacccaaagtcacacagcacatgagcatctagtgacatgacggctttcctca

SEQ ID NO: 344628 - DNA, 122 bp, Homo sapiens
cccccgctggaggaggcgcgggcagctcccgccggactggaacaagagccgaccccaggacggatggctgcagccagctctgcctcaaggagggccagctcctcgccctgtcaggccgcggt

SEQ ID NO: 344629 - DNA, 122 bp, Homo sapiens
tgggggcacggggagggatggctcatgagctggggggtgagcaaggctgcctcgctcaggcgtgggactgtgcggctgcagtgtctgtccacagagctccagagctgggggcaggttcagcg

SEQ ID NO: 344630 - DNA, 122 bp, Homo sapiens
ccggggtcacaagactccagggcttcacagtgcccaaggcttggtggacatcgagcccaccggggaatctttgccatcagcgccgtgttttgatgcccgcggcaaggaacaccacgaaatag

SEQ ID NO: 344631 - DNA, 122 bp, Homo sapiens
ccgacctcagcccccgtccagcccgttccgcaagcccacctttactccccatatcggctccgagtgagaggctggggacaccgctgcttctcggggattttgcccacttcagtagaacccgg

SEQ ID NO: 344632 - DNA, 122 bp, Homo sapiens
ccggggattgctgggggcggcggagagcgtggcgcgggccatggggctcagcaggcggttcgagcggctgtgcgaggaggagagctggcaaggagctgcctgtggcccgggctctgtggctc

SEQ ID NO: 344633 - DNA, 122 bp, Homo sapiens
cgggtgggggcgggtgtcctcgggcgcgcacccgctgcggcctccggctctggaccagcccggtggctccaagggatcaaagcgaaaaacagctttggccgcaaagggagaacgccctgagc

SEQ ID NO: 344634 - DNA, 122 bp, Homo sapiens
agctgtggcatcagcgagcccctcagcccgagtagcaaaccaagttttgtttcacacgcgcgcacacatgcaaacaaaacaggaaaagaaaagaaaagaaaacaaacaacaacaaataaaac

SEQ ID NO: 344635 - DNA, 122 bp, Homo sapiens
gtgaggctgggagggaggacttggcttgagcttgttaaactctgctctgagcctccttgtcgcctgcatttagatggctcccgcaaagaagggtggcgagaagaaaaagggccgttctgcca

SEQ ID NO: 344636 - DNA, 122 bp, Homo sapiens
gagtcgaacgtggaagtagggagcaggcggaggccggcgcggagctgcagttaagcaagccgggtctggctttgggccctgggccttccagccggggactctgcgcctgcgcccgcctggcc

SEQ ID NO: 344637 - DNA, 122 bp, Homo sapiens
ggctgatttcattctcccactttccctgaacccgcaccccccgtcccccccgccccatcccgtccccacctccgaactgtaaggtcagagtatccgcaagggagatttaacggtcagaccag

SEQ ID NO: 344638 - DNA, 122 bp, Homo sapiens
cgaggacgtaagcggtggtggcggtggcggcagaattgcccagaacatccagctgtcccgcggcggggcagtgtcggtcaggggccctaacgtgggagtcagcccgggagatgcaggccacc

SEQ ID NO: 344639 - DNA, 122 bp, Homo sapiens
gacctgggctcgccctgcttccctcaaggaaactaccggacgcagctgtatgacaagcagcgggaggagtaccagccggccaccccggggcttggcatgtttgtggaggtgaaggacccaga

SEQ ID NO: 344640 - DNA, 122 bp, Homo sapiens
tccaaggagtcgctggcggggaacaagccggccaacgccgtcctgcacaagggtaagggccgcggcggccccgcgcgggggagggcccacaacgctgcgtaagtcttcaccccgcacccctc

SEQ ID NO: 344641 - DNA, 122 bp, Homo sapiens
ggaagagaacagagggcagtaccgggccttcccacctcagcacaggtgggtctttctccacgcatgccccccccccagaaaactcctacacatcctgcaaagccccaccgatgtcatcccct

SEQ ID NO: 344642 - DNA, 122 bp, Homo sapiens
catcttcctagtgggccacccctaatcactattgcttcctaaaggtattttcaccctcttcgcctggtacagccctcacagctcttcagagcaagcactggactacaagggcatggctcaca

SEQ ID NO: 344643 - DNA, 122 bp, Homo sapiens
agaagggaaaagcaactcgtcgagggagagccaggaagaaaagtgctccaaaaaagaccgcggctgtaagaacacctgaggaagggagcgggccagcaccatccggccccagtgtcccgctg

SEQ ID NO: 344644 - DNA, 122 bp, Homo sapiens
tctcccttcactccaaaaccacgcacttctgtgcgctcactatgagaagctgtgtttactcgctccgtgctcgtcacaggaaatggtgcatattgggatatatttattgcagaaacttaggt

SEQ ID NO: 344645 - DNA, 122 bp, Homo sapiens
agaagcttgagcaagttatttctctcccctgagtctggaaagcaaagtctccgacatccacgctgcctgggttgggataaaatgaggcattcagtgtctggtggagaaagctgagcgtatac

SEQ ID NO: 344646 - DNA, 122 bp, Homo sapiens
aagcgagagtctctcttaccctggtgcgtggggccgcagggctaacaccaacaattcatccgatggagcatgtcgaggtcgagccagaagacttgtccaagcaggttcctgagcaacagttg

SEQ ID NO: 344647 - DNA, 122 bp, Homo sapiens
ccgggctcccctccctgccctctcctcccggtggccccgagaaaacgagccgaagccccccggagtccgccgcagcgacagccctgtccctgcccgctcctgggtgtcaccttggcctcgcc

SEQ ID NO: 344648 - DNA, 122 bp, Homo sapiens
ttcgcagcctgggccccgccgccagccgctgctcggagggagcgagcgagaaaggggagccggcgcagctcgctgccctgttccagaactcagaatttgagaggcgagagttcggtaagccg

SEQ ID NO: 344649 - DNA, 122 bp, Homo sapiens
aaccagctgcagtgaagcctccccagaacctctagtggggatggcctcctttcctgaacccgctcagcacttccttggtcaggacgcaacatggctgtgtgcatcctggtcatctccttcac

SEQ ID NO: 344650 - DNA, 122 bp, Homo sapiens
acctggtacatcggcatggcgcaaccaaagcaagagagggtggcgcgtgccagacaccaacggtcggaaaccgccagacaccaacggtcggaaaccgccaagacaccaacgctcggaaaccg

SEQ ID NO: 344651 - DNA, 122 bp, Homo sapiens
agagcgatgctcttccctcgctcccggtcccccttccctgggccaccggcctttcccttccggcatcagccagagccaagtgttctgaacactacccccgcccccacgaaaagtgaggacca

SEQ ID NO: 344652 - DNA, 122 bp, Homo sapiens
cagtctggagtgcagtggcacaatctcggctcactgcagcgtggacctcctgggcttaagcgatcctcctgcctcagcctcctgagtagctgggaccacaggtgcaagccaccatgcccggc

SEQ ID NO: 344653 - DNA, 122 bp, Homo sapiens
acccgctgccctgcccggtgccctgccaccgacccacccttgctgttctgaaacccgggtcgtctttccacactgcgagcaggcactagacgagcaggaggctggacctaggagcgcgggtc

SEQ ID NO: 344654 - DNA, 122 bp, Homo sapiens
aatagctgtttgtcagctgcctgacagatgttagtcacagggtcatttggctgcaggggacgggggtaagagttatggaagattttgagatatgctgggagcccccttgtaagaggcttttg

SEQ ID NO: 344655 - DNA, 122 bp, Homo sapiens
atgctcttggtgggagagtggtgagtcccattccctggactggatctggaggcgggagggcgcctccctgtggcccctccggccttctgcactcggcgcagcctccagaatcctgggggtaa

SEQ ID NO: 344656 - DNA, 122 bp, Homo sapiens
cggccccgctctctgaggtgttcaggacagggcctcctctttcccagccttcaggtcagccggatcaccagggccttgcgggccagttccccctgccgcggttgggagggtcagtgcagcgg

SEQ ID NO: 344657 - DNA, 122 bp, Homo sapiens
ttgctggagaacccagcttgaggctcagtttccaggaatgacatccaccctacactgtcacggtggtccaatgagaaccccatactgcagccacatggcatgagacacccagagtggagtga

SEQ ID NO: 344658 - DNA, 122 bp, Homo sapiens
aactgctttagaactttgtgcttggaacattcttagccaccgaagtatgggcaccaaaagcgataaggagcatgtgttccttaataaatgtcacatcagaaaatgactgttccaggacagta

SEQ ID NO: 344659 - DNA, 122 bp, Homo sapiens
ccaccctaaaggcgacttcaagaagatggaaggatctcacggatctcattcctaatggtccgccgaagtctcacacagtagacagacggagttgagatgctggaggatgcagtcacctccta

SEQ ID NO: 344660 - DNA, 122 bp, Homo sapiens
aggtggcagtgagctgagatcgtgccactacactccagcctgcgcaacagagcgagactccgtctcaaacaaacaaaaaagtcagatctgtgctagacgctgaaaggaattaatcagacagg

SEQ ID NO: 344661 - DNA, 122 bp, Homo sapiens
gagggcggggcctggatccccggcgccccctatcgcccacctcctgctttgccgtggcggcgctaaacgcacccccaaagctgccccataggaacttgggagggtcgcagggttcggaaagt

SEQ ID NO: 344662 - DNA, 122 bp, Homo sapiens
cggacgggagctcggctggggcctgggggacccaggcggcgcagccccagccgccccaagcgcccatgcccgcgctagtgggaggaggctggaaagcgccttcccattttcctttggactca

SEQ ID NO: 344663 - DNA, 122 bp, Homo sapiens
tctctcacatagctggggttgtgtgtgtgcattttcttttgaagttctctagtctgagaacgaggagggagctcggtaagccagcatgtggcccagtggcattgctagattcatgacaatgg

SEQ ID NO: 344664 - DNA, 122 bp, Homo sapiens
atggtggcccctgaggtgacacgtgcgccacgagggcaggcgtgtacgtgcgcacactcccgcagactctgctctcgcacacacccaggctgcgttgctgggaaacgtcagctgctgcggtt

SEQ ID NO: 344665 - DNA, 122 bp, Homo sapiens
gtcagaaatccaggggggtgaggtccccaaagtcacagtcgaagaggtctctgatgccctcgccctcctcgaggccgaagtggtagtcgagggcctcgtggggtggggaaaggctgatgaac

SEQ ID NO: 344666 - DNA, 122 bp, Homo sapiens
cccccaccctcgcaacgcaagcaatccatggcttagccacaggcctggcggggaggaggacggatagattaccaggttagccctggaaggtcaaagaatctgtcatttaaaactccaggctg

SEQ ID NO: 344667 - DNA, 122 bp, Homo sapiens
gaccgggcaggttagaaacgttgaacttggtgaaaccccttgagactgatccaggcaggccgtagaaccctcagagtttcccagttaaggccaaaaagttaagcagccctaccacctgttga

SEQ ID NO: 344668 - DNA, 122 bp, Homo sapiens
gccataagcatcctgcatgttaatattggctcccatcttcaacagcagcttcactgtgtccgcttgacgtccagaaaccgcatgcatcaagggcgtgcatcctggaatgagacatttcaaca

SEQ ID NO: 344669 - DNA, 122 bp, Homo sapiens
agtggctaacctccttcctgaacaggcagatgtgtcatgctgggcagcacctctccctcccgacacctgcatggtgactcaaactcccaggtaaagcccaacccgatgggaaatgactcagc

SEQ ID NO: 344670 - DNA, 122 bp, Homo sapiens
acaaactcacaactttgctctttcaaagcctctgtttacaagtcaaagcccaggctcagtcgggctttcttcccacactcacctccagaggtgctgcctgcgggcgtttcgctatcaaagac

SEQ ID NO: 344671 - DNA, 122 bp, Homo sapiens
cgtgcagctgccctggttgtggccctggaatcctcgccgggaggaagaaggcggcgggcacgagtaggagagcctctccagctacggaggaagagggttaaacctggagaaggggagactca

SEQ ID NO: 344672 - DNA, 122 bp, Homo sapiens
tctcgccctcgaagagcaagaacgactcgaaggctggaggggcgttcacgctcccgcctccgttgcgtccagaccccaagtgtctgccgccgccgccaccagagccctaataagaggcctct

SEQ ID NO: 344673 - DNA, 122 bp, Homo sapiens
tggaggcagtgcccaggcagtgggggctggcactggagcaccatctgccgtctgcaccctcgcggctcccggctcggtctcctttctgccttcctgcgggtctctccatcatgaccctgggc

SEQ ID NO: 344674 - DNA, 122 bp, Homo sapiens
ctctttctccacgggctgagggatcaatgcacttccgcataggcctagggccccacgctccgcgatcagcgccggaagcgcacggcatgctgggatttgtagtcctccacctgtggccggca

SEQ ID NO: 344675 - DNA, 122 bp, Homo sapiens
agctgcttgaggatccatgtccagaaactcggggaatcactgtgtccgttttccttgcctcgggactgtgcctcttgtctggagatgatgaggtttctttcagcctcccatgctctccacca

SEQ ID NO: 344676 - DNA, 122 bp, Homo sapiens
gtccacgtgcctcagcacagaggccgcagacaaatgccactgctcccggagagaagctctcggcagagcacaggcgctgagcccgacaaacgtgttccgtaagggtccaggtgggagatgtt

SEQ ID NO: 344677 - DNA, 122 bp, Homo sapiens
tcagctgcaggaaactgaaatccaggcccatctccaattacaacaggttccagatgagtccgagagttctcgacactcatttctcctccatctcctactccatcatctccatctccatcttc

SEQ ID NO: 344678 - DNA, 122 bp, Homo sapiens
gcagccgagccgcagagttctggtcgactccagcgcttgaggcgaagtggccggtgaggccgggtgggcgggagagggaccggaggaaaggagacggggcgctgcgccaagttatcaaggcc

SEQ ID NO: 344679 - DNA, 122 bp, Homo sapiens
ctccttgcttagttacagacttcatgcaggctgccatgtcatcatattgctcagcctgctcggccagtttggccttctgaaccagctcatttttatccgtgactggatgttctgtgtccgga

SEQ ID NO: 344680 - DNA, 122 bp, Homo sapiens
ctgcgagtccctcgagggcaggggctggttctttcgggaggcattttgttctcagtgcctcgcccagtgccagtgaagacacacttccaggtgtcatctgctataacctgctagcccttcta

SEQ ID NO: 344681 - DNA, 122 bp, Homo sapiens
ggtactttggcctgcccttctcactcctttctactttgcttccgtagcttctgagcaacccgtgaagaaattgacggaaaacggaaggaattaccgccagtttctttccacgggccgtcaag

SEQ ID NO: 344682 - DNA, 122 bp, Homo sapiens
tgcgactaggtagtttacttttgtgttttctttccttttttaaaaaaatttaacaaacttcgcatgtggcattcaatttacttctaaagtgaaataggccagacacagtggctcgcgcctgt

SEQ ID NO: 344683 - DNA, 122 bp, Homo sapiens
agaggtggtccagggcctctgtgctgttatcttggccaggaattgttggagcctgaatcacgtgcacacacgggagctttaacagcacagggaacctactgaaaggtccaatgatgtggctg

SEQ ID NO: 344684 - DNA, 122 bp, Homo sapiens
cagcacactcagtgcattcctgggggccgttcctggaagttgtcagcaacaggaacgtggcgctggaagcaggaagggcccagatcccagagaaccaaggcaggagaatgtcatgcgtggag

SEQ ID NO: 344685 - DNA, 122 bp, Homo sapiens
tctgtgtttttacctctggccgccaccttgagccatttggatgtggtgtcaaactgcacacgtgcgagggtgactgaaccctggctctggcacgagaaagctaaacccattcatggtagatg

SEQ ID NO: 344686 - DNA, 122 bp, Homo sapiens
cgccctccttgcccctgggtgcccgggggcaccacccacttaagctttcgggggagtttgcgccgggtgcccttctaataaccccgtcctctctcgccttctctggtctcccaaatcctccc

SEQ ID NO: 344687 - DNA, 122 bp, Homo sapiens
ggaggtgacgctgcgcggtggggcggggtgaccagacgggccccagcggcatgtgggagccggcagggtctccgaccctgggatgttgaggacgaagaggacggtggcggacgggggacagg

SEQ ID NO: 344688 - DNA, 122 bp, Homo sapiens
aacatgggaaatacttcaaacatttgagaaaagacattaaaattaaagaaaacaaaaagccggggttattttcacaggaaacaaagagcacttaccaaaatcaccatcttttgctttgcctt

SEQ ID NO: 344689 - DNA, 122 bp, Homo sapiens
caagaggagcccgctataaacgttgatctccggagggccaagatgctgctccgggatgggcgttttattgatcagatgtgtcttagagtagctagaaagactcatccctaccaaaaagtttt

SEQ ID NO: 344690 - DNA, 122 bp, Homo sapiens
tcgaccctcttcaaaaaccacgcagcatttgcctaataagctgacgctctcttgacagctcgattgcgtgctgcctctgctcctgcataaatcatagggccctgccaaggaacgaggggcag

SEQ ID NO: 344691 - DNA, 122 bp, Homo sapiens
atcgacagtgtttttcagtgaaactgtatttactgctttttctcagagctccctccgcaccgtgttttcccagagccagggcgctgagctgtgggaactaggtttggccagctccctgaaaa

SEQ ID NO: 344692 - DNA, 122 bp, Homo sapiens
aatgagcttcctggagcaagggtgaacctcccagagctctcatgaacttcatagagcctccgtttactttctaaagcccaggtgaacttcctgtaacctgggtgaacttcctggagactagg

SEQ ID NO: 344693 - DNA, 122 bp, Homo sapiens
cggagaggagccgccctggatggacagagggacgagggacgagcatctgccgtcgtgtcccggctgccctgcagtcgcctccaacacccgctgctgcccgcccgctgcctgcctgcctggca

SEQ ID NO: 344694 - DNA, 122 bp, Homo sapiens
tctcgtgctaaagtggacgctgagggtccacacagtgcagtgctctagggtgcccaaggccgagagaccttgtgccttccttgcctgggtttacagtgggggtcccagaaagctttgcccct

SEQ ID NO: 344695 - DNA, 122 bp, Homo sapiens
tgatgccggacttgccggctccagggccctgagaagcatgttgctgctgtgtaagccgcccgggcggtgttactgtgtacacagcccaatagcggcgactcacacaaggcctcacctcacgg

SEQ ID NO: 344696 - DNA, 122 bp, Homo sapiens
tgagctggatgatttcacatgaaaggatactgggaagatttcagaaccaaacagcagggacggcatcttgttgctcaaatctatgaaggtcatcttgatggattcgagagaataaagtgcca

SEQ ID NO: 344697 - DNA, 122 bp, Homo sapiens
tgcagcagcagcagcagcatgcggggagggttgcatgtccctcagagtcactaagtgtagcgaagcgaagggggcggcttcacgcagcccaaagtcccctgcatctcttgccaccagtctgc

SEQ ID NO: 344698 - DNA, 122 bp, Homo sapiens
cggcaagcaggagtcagtgtgaacgtctgtgcaggctcagggccggccggcagcactgcccgcaggcagcactcaaggcggttctctggcctgcgccaccggaaccgtcccttcagcacgat

SEQ ID NO: 344699 - DNA, 122 bp, Homo sapiens
ggccccggcgcccctccggccgcgcgtacccctggccactggaaactgctccgggccccccgggcccctccttagaacttcctggaggcctccccggagctgctaagcacggagcagcgccc

SEQ ID NO: 344700 - DNA, 122 bp, Homo sapiens
cgcggcccccagcgtctgtccgggagcgccgtgctgggtcgctccccagtcatctctccccgcagctgccgcgaccctggcagctagactccacagagtcgggagtcagctgacccggaccc

SEQ ID NO: 344701 - DNA, 122 bp, Homo sapiens
gggactacctcaagaggtgaaacaaacaaaatcctgcctggcggagctatcgcccagtcccgcacgcactcggcctcagggtcacactcggcggtcccacgctcaagtggcccggccagtgg

SEQ ID NO: 344702 - DNA, 122 bp, Homo sapiens
tcagggttggcccagcacctgggtggtgcccatgcccccagtgtaaaaagatcctcagctcgtcgggcacgaccttgctttgttatctgctcttggcctctgtccattctcaagccacgtca

SEQ ID NO: 344703 - DNA, 122 bp, Homo sapiens
cacacttgtgtcgcctgctgttgtctgtgggccttttctttccgtggtgcctggtgtgtgcgtgcatggcgtgagagaacggggggtgggggttggaggtggctccccgacaccggtgcctg

SEQ ID NO: 344704 - DNA, 122 bp, Homo sapiens
cggccataacaaacgaagacaccaaaacgccaccagcctgacagagcaaaagcccagagacgcgggcgaagttccggaaaccacggctccctcttccggtcccggggcactgtgggatatgg

SEQ ID NO: 344705 - DNA, 122 bp, Homo sapiens
acaggcttgtaatcttttaagcaaagaaatgtcaagagaggacagaaatcagtgctgctgcgatctactgccctctagtgacttcatcctaggaagagggcaggagagtggccataaatacc

SEQ ID NO: 344706 - DNA, 122 bp, Homo sapiens
tctgcacagagttcttagatgcggctgccaatgatatttcctttttctgccattccagaacgcaatggcgtacattacagtaaatattgaaagcagaaggattgctatgtagtttgatatct

SEQ ID NO: 344707 - DNA, 122 bp, Homo sapiens
acatgagcagcgctccgagcagcgagcccagctgcaccgccgccccgcaccacaagagggcgctgcggctgaggtcgcgcaggaccacgcccagcatcaccttgacgtaactgaggcagccg

SEQ ID NO: 344708 - DNA, 122 bp, Homo sapiens
tccatatgacaagtggaataacgacagaagctgccattctctagctgttaaaggctataccgtgtatgggaaatactacagtagatccactttcacaacttcgtggtgcttcttgttggcaa

SEQ ID NO: 344709 - DNA, 122 bp, Homo sapiens
ggaagttgcgccagtagtcaccaacgaattcttccggagtgaggttggcaaagcggatcgcgatggtgtggttcaacatctcctgtgtgacttgtctgatatgcactgtgatgtcggccacc

SEQ ID NO: 344710 - DNA, 122 bp, Homo sapiens
ggcagggggtgtgtcctcgctcactggttactgctaggacggagcttggattttggtcaccgtggctcagaggtgggaaaggttccgtgctctgggtctgtccaggaccctggctccctaac

SEQ ID NO: 344711 - DNA, 122 bp, Homo sapiens
gacctggtggtgaagtacctgcagggcgtctaccaggaggtgggggccaaggtgctccagcgcaccaacggcgaccggatccggttcattctggacgtgcttctgcccgaggtgagccgcgg

SEQ ID NO: 344712 - DNA, 122 bp, Homo sapiens
ctcaagtgatcctctcacctcggcctcccaaagtgctgggattgcaggcataagctaccgcgcagggcagcattagcactcttaaatagtattctgaccctcaaaagtgttgatttaatgaa

SEQ ID NO: 344713 - DNA, 122 bp, Homo sapiens
gaaacccgcgccctcctcagcctactagaccctttcacagggtcccttctgttttattgccgaggagaggagctttgcttcccggagatccaaagggaaccgctccgagtttctctctccct

SEQ ID NO: 344714 - DNA, 122 bp, Homo sapiens
ggctctcgcagggggacctaggctgggtggcggggcagtgccctctggaatgggggttaacggtggccgaggagggggcgccgctggtgccggcgaagtccccgcttctttctcccctcaaa

SEQ ID NO: 344715 - DNA, 122 bp, Homo sapiens
agaatcacaagatttctgcagcacaaagcactggctctggagctttatgaaagcttcaagcggaagccctgagagctctggctgtgaatgcactttattttggacccagaagatcctggggc

SEQ ID NO: 344716 - DNA, 122 bp, Homo sapiens
tcatctcagggtcgcagaagggcaagacgccgctcaatggttgccaagggcaacgcgggacgccggctagcgaggccttttgttctctgggctggggctcgccggctccagccttagggcgg

SEQ ID NO: 344717 - DNA, 122 bp, Homo sapiens
caggaggcggggcccggtgcggggggcggggcttgtgaggggcggggtcggggaccgccccggaacacaaccacaccggacaagagccttaatgtgatagataagaattacaaatactagcc

SEQ ID NO: 344718 - DNA, 122 bp, Homo sapiens
gctccccagtcctctcccctcctctgctccccctccccttctccgtccccctctctgagccggcattcactgggctcccatgatgtcatccagtggaaatctgccatgctcaaagactggaa

SEQ ID NO: 344719 - DNA, 122 bp, Homo sapiens
cccacctaggaagtgaggagcgcctcttcccggccgccatcccatctaggaagtgaggagcgtctctgcccggcggcccatcatctgagatgtggggagcgcctcagccctgccgccccgtc

SEQ ID NO: 344720 - DNA, 122 bp, Homo sapiens
acttctcgatcgttccaggaaagcccgatttgtagcttggctgccccaggaaggggcctgcgaccagaaagatgcaaagggcgggacaaggttacgagtgggtgcggggaagcctccctaac

SEQ ID NO: 344721 - DNA, 122 bp, Homo sapiens
caagtgccattgaagcaataatttatatgccccaaattaaagcacaaataggaatttatgcgtttatttaatttttggggcttgaactaccttgatcagtgttctaaccttggctacaaatt

SEQ ID NO: 344722 - DNA, 122 bp, Homo sapiens
ttgtcggggatcagtctgctgtgcgtgctcagactcttcccagagccagcagcaagaacccgaggcattaataaacttgagatgtagcttcgcttaactcgtgcagagggtttccgtgtcac

SEQ ID NO: 344723 - DNA, 122 bp, Homo sapiens
aactatcagtctggggaaactccacaatccctctataggcattgctccaaaaagattcctcgtacttttttaatcaatgctaattattcattatattattatgggtatgcaaaataatatac

SEQ ID NO: 344724 - DNA, 122 bp, Homo sapiens
gcgggggcggggcagggcctctgcggggcggggccgcggtatgctgctagctgttactcccgccttccccgcagccctgtgaatgctcagccttgtgaatgctcatcccgccgctgttcgct

SEQ ID NO: 344725 - DNA, 122 bp, Homo sapiens
ctgttatagtcttacggaatcacctcatatatgcggtctgtcacctgtcagtaactaaaacgttatgtggcacgtgactgtatttgtatattggagctatgtttactgtccttttgatgtaa

SEQ ID NO: 344726 - DNA, 122 bp, Homo sapiens
tttagatgtgttttcaaatacacaaattgcttttgaatttttattttgaatgaaaggttgcggtggcacgacatctgatttcctacagaagagaaaacccgagacatgggactttccgaggc

SEQ ID NO: 344727 - DNA, 122 bp, Homo sapiens
gagggatagttgagcaaggatcctgccgggtctgggatctcccaccgctacctcccttcgcgaggcctccagttctgcctgttatcaccggacacccacaccagagtccaagccatgacggg

SEQ ID NO: 344728 - DNA, 122 bp, Homo sapiens
ccgcggatgagtctccaggtgcgtgggggctgcagttcctgtgccccttccggccgcccgcgcccccaggctgcctcacacctgcatcctgaactaacaggtgatggtggtggcggcgcttc

SEQ ID NO: 344729 - DNA, 122 bp, Homo sapiens
accttctctgacccccatgggcccccagggcctgctgagtctggacagattcagagatcccgtccctgcccatcagctgagtgctggtagggttgttgcaaacccactctgggcgtgggctg

SEQ ID NO: 344730 - DNA, 122 bp, Homo sapiens
acctgcaggcacgggccattcttcccgcgacccagggctctgccggaccgcttcccccgtcgctccagtcagacgccaaagctggagaacttccggtgcgtttccgctgtaccggaacgtgg

SEQ ID NO: 344731 - DNA, 122 bp, Homo sapiens
tcttcgtcttccagcggggtggagctgctggtggaagagtcctccccggatcccgttccccgggccacccagcccagatggtccaaccgaagcctcaggtcttccagagggcgctcggatgg

SEQ ID NO: 344732 - DNA, 122 bp, Homo sapiens
ccggtctgagcgagagcttggcaagcaagctctggcttcagggcttccgtcgggcgccgtcgctcgccaggcacaaagatggcgccgccgggtactgcccagggcgatctcgcgaggcttcc

SEQ ID NO: 344733 - DNA, 122 bp, Homo sapiens
acatttagtacatttatagggcttatgcccagtatgaaacctctgataaaccgtaagttacgatttccagatacaggttttcccacattcagtaaggcttctctcctgtacaagtcctctca

SEQ ID NO: 344734 - DNA, 122 bp, Homo sapiens
acgcccggggtggggaagcccacagtctggcagggctcgcactgggcagaataattgcaacgtagtcatgaggatcgggctatgacctgcctgacttttcactcctcccatgatacaccgat

SEQ ID NO: 344735 - DNA, 122 bp, Homo sapiens
gtgactgatttgctgtttggggtcactggctttctagcctctcctggcaccacccaatttcggggagcagccagctcatctttctcctacgacaatgtcttctgtcccccataaacactgcc

SEQ ID NO: 344736 - DNA, 122 bp, Homo sapiens
tggaagagaaagagctgtttctccctaggaagcacctactcagtagaggttgccatattccgtctttctagcagtaaagccgtgcctttcagagggcagaaggacggcttcctggtggttcg

SEQ ID NO: 344737 - DNA, 122 bp, Homo sapiens
acacacacacacacacacacacacacacacacacacaactgcggaaaatctgaataatatcgatgaattgtgtcaatgtgaatatcctagttgtgataatatgcaatagttttgcaaaatgt

SEQ ID NO: 344738 - DNA, 122 bp, Homo sapiens
ggcttagaaactgtgctgagtcctctgcgtgcattttttcatgtaatcctcaatgcaatgcgaagttagaaatattacaatacccattttacagacggggaagtggaggtttagagaggtcc

SEQ ID NO: 344739 - DNA, 122 bp, Homo sapiens
tgtggcggaagaggaggtgatgccctagggccgggacaggagagtctcggggctgccattcgaggtggttttgatggatttccagaaacaaaccaagggagaggaaaggaaaagtgatccta

SEQ ID NO: 344740 - DNA, 122 bp, Homo sapiens
ccgcgatcctgccaccagggggcagcaagtggaagggaccctagagccctcacctgggagcggccgtagctgccttggtcaccattcccagaactgccctagatgggggagaggaggatcat

SEQ ID NO: 344741 - DNA, 122 bp, Homo sapiens
cattgactcgtagttccttttggccttctcagacacttttcttaaaagacagttttatatcggtaacctcactctaaagtctgtagaataatagcacattctgattatagagtcagtctaac

SEQ ID NO: 344742 - DNA, 122 bp, Homo sapiens
gcaaggtgaaggtaagtgccctttcgggaggcagatggggttggtggggaggaggctggacgagggtgaataggagagaggggaccaccatgttcaattgggacaggaatggaagaactgtt

SEQ ID NO: 344743 - DNA, 122 bp, Homo sapiens
actgccttatcttgtccacatactcgcccaccaaacctggtattaacccacagcaagatccgcccatcaaacctaatgcccgcccacaacctcgccccggaacttagtctctgtcctgacag

SEQ ID NO: 344744 - DNA, 122 bp, Homo sapiens
gaacgcagtgcgaccagggactgggtggaaacttttacaacagtaatgcaagggcagaagcgtcctgtcctgagcttgtcacgcaggcagatctgaccaagtccgcctctcagcctcacgtt

SEQ ID NO: 344745 - DNA, 122 bp, Homo sapiens
cgggcgcgcgtcttttggctcttgcccctgtccctgcggcttggggaaggcgtaacccggcggctaggcgcgggagaagtgcggaggagccatgggcgccgggagctccaccgagcagcgca

SEQ ID NO: 344746 - DNA, 122 bp, Homo sapiens
tcctgacccagggagcttggttcctgcccctcaggtacagctggagagctgccgccaccccgctccagcccctcaccatgaaggtcaactcccctatccttcccccacatcctggatgactg

SEQ ID NO: 344747 - DNA, 122 bp, Homo sapiens
gatgttttaagggctatcccataaagccgggaaggcacaacgggtggagctggcggccgccgggggcaggcacttttgagctaaggaggaagcgggggagggaaggagggcgggaaggacgc

SEQ ID NO: 344748 - DNA, 122 bp, Homo sapiens
ccaagccggaggttccaggagcgtctagccctctggatctccggcgtctgaggagataagcgcggtgtgggtcagaccccgaggggtcctcgcatctccgtctggaactcccctcaacgctc

SEQ ID NO: 344749 - DNA, 122 bp, Homo sapiens
cctctgcgcttcagcttccttgcgtacacgaagcgaggatggtggcacatctgcctgctgcgggctgtgagcattaaatgagcacaaggaccttgggtttaacaaacccaagtccggccagg

SEQ ID NO: 344750 - DNA, 122 bp, Homo sapiens
cgctttcttctctcctcccagctggaagtgaaaagcaccctccgtccggggactgggtggcggtggggtaaaaagcaagacgaaacccacccagacagctcttccgactcccagaggaccga

SEQ ID NO: 344751 - DNA, 122 bp, Homo sapiens
cccagggatctgtgccccaccctcacctgcaactcatccagactgaattcgcagtactcccggcgggtgcccttgccattggtcaggattccacagccgctcatcatgatggtgcctgggtg

SEQ ID NO: 344752 - DNA, 122 bp, Homo sapiens
tccactgatattaattgaacgatcggagtaagactctatggaagagaaaaatgagtaagccgcttctgctgtctagttagaggaaataatggaaaccacagtataaaaccctgtaaaagagt

SEQ ID NO: 344753 - DNA, 122 bp, Homo sapiens
cctgtcttacttgtgttgagtcatttaatccgctttgcaattgagacattgaaacggagacgctcaggaacgtgcttcaggtcacagatccaagatgagttagggcctggaattgagtcggg

SEQ ID NO: 344754 - DNA, 122 bp, Homo sapiens
tgttcataccaatgacactctaaagctagacactggaccttgcagatagaactgctatcacgactgctcctggcaactggacattgctgctgcaactcacaccacacttactaaaatgtgtg

SEQ ID NO: 344755 - DNA, 122 bp, Homo sapiens
gagggcgtggcagcgcggcagtgcgcctacgcaccgggggcactggggatcccgcccccacgctggttcccgcgctttcaagagcctcagagccccgagacaagggggtgtcggctctaccc

SEQ ID NO: 344756 - DNA, 122 bp, Homo sapiens
cgctgaagtgtcccaactttgcggtcggcacagcaaacttcaaaggcgggcgagggcgggcggcgcgcggtcgccgaagttgctgcgaagtggagtagggagccgcgcggggctggggaatc

SEQ ID NO: 344757 - DNA, 122 bp, Homo sapiens
ggaggtgctgggcagacgcgtggggcggcctccacctccggtttcctccctgttgcctcccgcagcctctcattcagaaagaaacgtgtttccggaagctgtgccgttgccatggagcctgg

SEQ ID NO: 344758 - DNA, 122 bp, Homo sapiens
gctcagagaggttaagtgagtgggtcagagtcacacagccagtgagaaacagggccaggacgggaagccaggctcccggccctctaagagaaactcttttaagtacctcaaggtgcccacgt

SEQ ID NO: 344759 - DNA, 122 bp, Homo sapiens
ggcggtcgaggctgcagtgagctatgatctcaccactgcactccagcccgggtgacagagcgagaccctgtgtcaaaagaaaacaaaaaaagaaaaggaaaaagaaagcaagggaaggaaga

SEQ ID NO: 344760 - DNA, 122 bp, Homo sapiens
gttcattccttatcttggctgttgtgactagcagtaaacgcaggagtgcaggtatctcttcggcagactgatttcatttcctttggatatatatacagtagtgggattgctggatcatatgg

SEQ ID NO: 344761 - DNA, 122 bp, Homo sapiens
agagaaaatcaacaagctagtgtttaaataatgtgcagggtgtgataccaaccgaacctccgccctccttcctggggaaatgcaaagtttgctgtggccttttcacaaacctcggagagaat

SEQ ID NO: 344762 - DNA, 122 bp, Homo sapiens
ctgggatgagacgctgacctgagctggagctggggtcctgcaaccatggccaaggccccccgtccacaccgccgaggccaggaaagccgcgccatgtgagtgacgggaagaggccgaatgag

SEQ ID NO: 344763 - DNA, 122 bp, Homo sapiens
ttctgtggtcctttgtactagggaattcctttctgccatcctcgtggtgcgctcggatctcgggccccggcgtgggctccgcggccgccgctcccttggcgctttgggttcctcctcccttt

SEQ ID NO: 344764 - DNA, 122 bp, Homo sapiens
aaggacaaaaaactgaacaccgcttgttctcattcataggtgcaaactgaacaatgaggacgcatggacacaggaaggggaacatcacacaccagggcctgttgtggggtggggggaagggg

SEQ ID NO: 344765 - DNA, 122 bp, Homo sapiens
tccgttgtcagggttggtccaggtttggggttacccttctccgtctctctcagcctcagccgttcctggtgggtctgcattcctgtcacgagctggtcttctgcagcctttgaacccgtcgc

SEQ ID NO: 344766 - DNA, 122 bp, Homo sapiens
tttcacttctttttgacactctatccgttctcccttagatgttgccttcatcatgtctatcggattgctataatagtcattctatcttctatggtttgaaggtttgtcctctccaaagctta

SEQ ID NO: 344767 - DNA, 122 bp, Homo sapiens
tgtctctttctttctcccacccttctcttcctctttaatgtggctgtttcctttcctccccgcttccctgggctcctgtggccagctcttacagtgaggggactgttcctactagcccctcc

SEQ ID NO: 344768 - DNA, 122 bp, Homo sapiens
gattcttttaccactttcccgaaggaaaaggaactgaaaatatctaaggaaggactactacgaatcttctctgagtggcaaaaaccagaggtttttggagctagggctgcagttaagttgcc

SEQ ID NO: 344769 - DNA, 122 bp, Homo sapiens
cactgcgttagaacggaagtaagcccatgacgggggccctcccaactctcagacctcacccgagcctccacgtcccgagacgccggcctctcaaacgaccgcgccctgaccctcgctcttcc

SEQ ID NO: 344770 - DNA, 122 bp, Homo sapiens
ggctgtgtggtgtagccattgcccctaggtgacaaaccacagctgtcatccacttaatgccggaagcagttgtgacataatgctgagtatgtgcctgaacacaaaagctaatcctagaaaag

SEQ ID NO: 344771 - DNA, 122 bp, Homo sapiens
gcaaatggagagagcagagcaatcaaaatttataaaacttctattttggtgttcaaagatcgggataaatatgtaagtggagaattcaggtaagttcagatttttccctccagttggtttaa

SEQ ID NO: 344772 - DNA, 122 bp, Homo sapiens
ctggcgcggtgccagtttctagccgctgagtgggcgtgtgcgcggctccaagtgcgcctgcgtactgctcactccccagctccgcgccctgctccgttcctcccaaaactctgaatcgaaga

SEQ ID NO: 344773 - DNA, 122 bp, Homo sapiens
tctctctctctctttttctctcagaacggaactggaaacagcaacatgtttgctcagcaacgaattagggacaatttaaaatagccataacataccatacatgctgtctaagtttaaaaaaa

SEQ ID NO: 344774 - DNA, 122 bp, Homo sapiens
gggaaaatcattgtttcttatacctaaggtggcttgtcaccttacaaagctaaccccaaacgtaaaatgtaaagcacaaatagatttggagttagaagtatttcatctcttgagtattagca

SEQ ID NO: 344775 - DNA, 122 bp, Homo sapiens
acattcaagaaaatagccagctcacaggcacaacaccaacacaggagggctttataacatcgcatgcttgaatcaggtgcattctgtttcatcttgctttgttttggtttttttcttcagaa

SEQ ID NO: 344776 - DNA, 122 bp, Homo sapiens
gccacagctttaaaataaccacaatcgagctgtgtcccagaggcacagaggcgagagcttcggctcccagcccagctgctgccactgcggcatctgcggactgcgaggctgcaaggcctgga

SEQ ID NO: 344777 - DNA, 122 bp, Homo sapiens
gaaaagtcgccaactattggccccgggtgcaaaggcaaaggtcacaaggcatttacttggcggaggtgtccggcctggaccctagtgtgccttgagcgtcccttctttttcttggtagctct

SEQ ID NO: 344778 - DNA, 122 bp, Homo sapiens
aggcgggggtcctaggaggaagggatggggaggagcgagaggagggaggcggagggagggcggcagccaggatggtccattccattcttggagctgcactgttgacttcgaccacaaggggg

SEQ ID NO: 344779 - DNA, 122 bp, Homo sapiens
cgccgcaggccgggccagtgaacactgagggccagcagggctgggcggggtgggtgtgtgcgggagatctctgaggacggcgaagccagacgggggccggggccgggcccgggcttggggag

SEQ ID NO: 344780 - DNA, 122 bp, Homo sapiens
ccaaccgacagaaatggagaacagttgattcagattcagctgatattctcaggtctggagcgggcctgagcgctttaattagcccggggctaatgtcctcacccatctttgtttatagaacg

SEQ ID NO: 344781 - DNA, 122 bp, Homo sapiens
ttgttcctctcagtgagcttgtggtctcgctaggctctgaagtgaagctgcagatcttcacggtgagtggtacagctcataaaagcaatgtggacccaaaaagcgagcagcaacaagattta

SEQ ID NO: 344782 - DNA, 122 bp, Homo sapiens
aatccccaagggctgtcaaaacaagtctccctccctgtcacaacagagctgagtggaggccgccgccgccgccgcacttcctgggaccgctgcgccgcagtccgcgggcaggtggcgggtgc

SEQ ID NO: 344783 - DNA, 122 bp, Homo sapiens
agccgctattaaaggttcgtttgttcaacgattagagtcctatgtgatctgagttcagaccggagtaatccaggttggtttctatctattctacatttcttccagtacgaaaggataagaga

SEQ ID NO: 344784 - DNA, 122 bp, Homo sapiens
ctactaaaaatataaaaattagccaggcatggttgtgtgcacctgtaatccttgctacttcggaggctgaggcaggaaaatcgcttgaaccgaggaagcggaggttgcagtgagccgagatc

SEQ ID NO: 344785 - DNA, 122 bp, Homo sapiens
gaccaggctcggcagcccctagtcactgagaaagccctccctcatgcccgcccctggggccgacccaggtgtcactcaagatggcgcctgcgcaatcaacctcgggcgccaccctgtggcta

SEQ ID NO: 344786 - DNA, 122 bp, Homo sapiens
caatctaaaaggcggagctcggagtagcctgtgccgtcgggacgggaagatgtcagcgggcgttgtcctgccactcgggcgctctgggcgtgggccttgggtggggcacgtgcctggaaatc

SEQ ID NO: 344787 - DNA, 122 bp, Homo sapiens
gagtccgctccagcggggcgctccagtccctcagacgtgggctgagcttgggacgagctgcgttccgccccaggccactgtagggaacggcggtggcgcctccccagcaaaccggaccgact

SEQ ID NO: 344788 - DNA, 122 bp, Homo sapiens
cctgagaatgtctcactggacgacgagttgctctttggttgggacaggtgaagggaggagcgcggttctttctgaggccaaggaagaaacgggtacctaccttgtcgcttcccatgggggga

SEQ ID NO: 344789 - DNA, 122 bp, Homo sapiens
gacgacgacgcccgcagggacttcgagagggcggcacggctgggcagccccttcgcgcggcgccagctggtgctgctcaacccctacgccgcgctgtgcaaccgcatgctggccgacatgat

SEQ ID NO: 344790 - DNA, 122 bp, Homo sapiens
ctgtaggcatttgaccctgtggtatgttggcttagttgttagctatctcattccagttagcgtccctcagaaatgaaggtaagctgtttctaaaaggatgatgcaagccagttaaaaatcca

SEQ ID NO: 344791 - DNA, 122 bp, Homo sapiens
tgggttggttccaagtctttgctattgtgaatagtgctgcaataaacatacgtgtgcatgcgcctttataggagagtggtttataatactttgggtatatacccagtagtgggatctgggtc

SEQ ID NO: 344792 - DNA, 122 bp, Homo sapiens
aaagacagatgcttcttgctgacagctgagtaatttttctagtgcttgaaaacacgttcacggcctttcttggtcctttgcgaccccccagttcatcactagatggcggctagcctcagagt

SEQ ID NO: 344793 - DNA, 122 bp, Homo sapiens
gctaggcgcgggccaggggcgcagcctgccgctcttgccgccggggcgcccggctggggccgccgcccaccctggcgacccgccagaaccagcccggtcgcaggataagaccgagatcaggc

SEQ ID NO: 344794 - DNA, 122 bp, Homo sapiens
tcttcgtggttcccaccagcagctcagagccaagcccttcagcaatggctcgcacggccccgaagtgctcgggaatctgcagagtggtagcagaatgtcaagagcccactgactattgctct

SEQ ID NO: 344795 - DNA, 122 bp, Homo sapiens
ttgcctttgcaaaggtccagggtcaccgtctgcgtgctctgggggcttaaggccccacctcgcctcccgtatcgaactcgaacgctggtacgtctgggtcccagctcagcctctcggctgcc

SEQ ID NO: 344796 - DNA, 122 bp, Homo sapiens
atctccaaacttggactgccttggactgaccctggcctggaaggtgtgggctcaggactccgagctcaagtcagtctgttcccccaacccctaacccactgcatccgggtgaggagttgggc

SEQ ID NO: 344797 - DNA, 122 bp, Homo sapiens
tgtttgccgccatcgcagacccacagctgacttccacccctccagatccggcagggcgtccgctgggctactgatccagcgaggcgcccattgccgctccccatggggctaagggctctcca

SEQ ID NO: 344798 - DNA, 122 bp, Homo sapiens
tttataaagttccaggatccagacccggttaacactgaagttgctttttaggggtctgcgcgctctcgcctggctgctgggaaggagggctgggaggcgctgaagcgagggcagatctgagt

SEQ ID NO: 344799 - DNA, 122 bp, Homo sapiens
tttgccagctttgttatgcaaggtgggcaggtgttgtgaccgcatcctggaactgtctgccggttcagctgaagtcttttgaacaaacagttactggaagggtcagtggggaggaggtctac

SEQ ID NO: 344800 - DNA, 122 bp, Homo sapiens
gctgtccgtcaagggggctagtaagccactaaacaaagggtagccttcagccctgcggcgcgggccagcgagcattcagaggcccaactcgctgtggttgctccccgggtctggtcccgcgc

SEQ ID NO: 344801 - DNA, 122 bp, Homo sapiens
catggcccagactctccctctctgttcatcctctgagccacatacctgagcttctgtccccgcagattgcacatagccgtttgccagccccagggccacctggagggggtggacagtgcagg

SEQ ID NO: 344802 - DNA, 122 bp, Homo sapiens
cagctgccagacttctcttcatgagcatcaagtgggctaagagtgtgccagccttctccacgctgtctttgcaagaccaggtatgaccacactgaggccttgggagaaagagagctgggaaa

SEQ ID NO: 344803 - DNA, 122 bp, Homo sapiens
aggaaaaggagacatttgttgtaattgtacaaatttacggtcaagccaggacccaaaacccggtgacctggagattcacccattttcctcccctcccttcatcaaagggtaattggaaattt

SEQ ID NO: 344804 - DNA, 122 bp, Homo sapiens
attgcaaacatgttagcatagaagcatgtaccgaacatgcagggaggtaacctggtgagtcggccacggggccatcatctaaacaagagtttagaacactcatatgctaatgagctgaattc

SEQ ID NO: 344805 - DNA, 122 bp, Homo sapiens
ccttgaagacatcaaagcctgtaatagtttgcctgtagggagtttaattcaaacacagagcggtaaggagatccgggctggtccacacgatcgtctccacaggtctgggcgacctgaaagtg

SEQ ID NO: 344806 - DNA, 122 bp, Homo sapiens
tccattgacaaaagtgacttcccacgctttgcccacagagggcatccctgcgcattgatacgcagaccaggcaaatgcagctcctggaagcctcctcggtccgctcttttttccctaagcca

SEQ ID NO: 344807 - DNA, 122 bp, Homo sapiens
ttcctggtttctgaataaaactatgctccatttcagagatctcatctttcttctcagccacgcccccattttgtctcttgctcacaatgctaattctcaaatctaattctaaccttactcaa

SEQ ID NO: 344808 - DNA, 122 bp, Homo sapiens
ggaccctggcggcccaagcggcacgtgggcctcgcaggtggggctacaggggaaggggtgcgacagcttggggtgctgcttggaccccagacccactccctgggttttaggggcccaattcc

SEQ ID NO: 344809 - DNA, 122 bp, Homo sapiens
gtccacaccgggtgccctcgggcactggttcatacgcagtgccatcctctgtggtgagcgcgtggcacacatccacgatgcagatggcacgccccaggggctgctgcccacccttgcactgc

SEQ ID NO: 344810 - DNA, 122 bp, Homo sapiens
gcggctagggaggtggggcgaggcgaggtttgctggggtgaggcagcggcgcggccgggccgggccgggccacaggcggtggcggcgggaccatggaggcggcggtcgctgctccgcgtccc

SEQ ID NO: 344811 - DNA, 122 bp, Homo sapiens
gcgctggagcttgctgccccctgtctgatccagcccctcatgttgtaggagggaggtgggcgactgaagctcagagagggagtaaatgagctcaacttcacacagctagtgaggggctggtt

SEQ ID NO: 344812 - DNA, 122 bp, Homo sapiens
cagcagatttcaaagcttcagtgagctcacgcagagagcctggcatactataagcccccacggaggctggtttgctcctagtctgcttcctgcaggactccggtgtggagtttaggatctgg

SEQ ID NO: 344813 - DNA, 122 bp, Homo sapiens
ccgatatacagtttgttcattgtgaagagtggttgtttaaaaaaaaataacgagaaaaaacgaaaaattaaaaccacccacggtgatggatggatccagctggttttgttcccctcgtcttc

SEQ ID NO: 344814 - DNA, 122 bp, Homo sapiens
ccaccaccatcaccaccaccaccacccgcccatgatcgctctgcagccgctggtcaccgacgacccgacccaggtgcaccaccaccaggaggtgatcctggtgcagacgcgcgaggaggtgg

SEQ ID NO: 344815 - DNA, 122 bp, Homo sapiens
atgtgggtgggctggcgcacttggggaatgcacctgcaagcttggcaggcgccttggaaacgtagttgttcaggagtgatcggcgtaccagtgtttggaatgaaaatgaggctgtgcatatc

SEQ ID NO: 344816 - DNA, 122 bp, Homo sapiens
tgcagccagtcaagctaggtggaatgtctcaggccctttttgtaccaagcacatgtcctacgtcatcacccacaatgcagcagcctccccttcctcccgttgcccctttgggatgccagggc

SEQ ID NO: 344817 - DNA, 122 bp, Homo sapiens
tgggcctgtgtggtcatcgtgtgccccggcgcccggcgagagttcggtgaacatctgccccgtcgggatcacccgggaacccgagatctcccccacccgtagcagctccctttcttaatcct

SEQ ID NO: 344818 - DNA, 122 bp, Homo sapiens
gtcctacacaatggtgccaggacagtctgacttcggggtggcacccaggaagccggaatgcgtccgcctgcctccaaatcccgcactccagtctcaggaaggccgggagatgtgccctgcgc

SEQ ID NO: 344819 - DNA, 122 bp, Homo sapiens
ggtggcggcggggtcagtctcggggggagtcgtgtccccctcagggatggcggtgggaaacgggctcgcgacgtcttcgggagcacagaccacctcctccgccttgtccgtggccggggcac

SEQ ID NO: 344820 - DNA, 122 bp, Homo sapiens
atgcatggaaggagcctgtaggtgtctggggctagaggtaccctgcatatgtgcagctgccggggagaggggtactgagcacatgtttgtctggcacacagtaggtatgaggtaagtgtgtg

SEQ ID NO: 344821 - DNA, 122 bp, Homo sapiens
agctgtgggaagacaggaggacaagaacaggctccacgaagagatttcagagcagagctgcgtactcctttttctttttgtttcttttgctctgtcacccaggctgaagtacagtggttagc

SEQ ID NO: 344822 - DNA, 122 bp, Homo sapiens
actgggccctccttcctgggctctgggccaggggaggtgagacacctctaggggaggccccgtgtttcagccaggctcccagatggtccgcttgtcccctcaccacgcaggctggggtgttg

SEQ ID NO: 344823 - DNA, 122 bp, Homo sapiens
ttgctgacatagtcaatggagttcagtcgggaaataggagcagccaaatgttccccaaaacggaggtggtgtggcttccaccagcccaccaatgtcagccagccttacttaaaacttactca

SEQ ID NO: 344824 - DNA, 122 bp, Homo sapiens
ggttttctgagaaagccaaaacatatttgccttccacacccaaattagcttaattgaaaccgccacataaaagaacagaaacacgagccgggcgcggtggttcacgcctgtgatctcagcac

SEQ ID NO: 344825 - DNA, 122 bp, Homo sapiens
ccgttctgatgatccggcttcgagcgtcactcacactctgcatccgggacatcctcagaacgtgagcggcggaaaccactgtccccactgtgcaaattattgaaagtgaggctcaaaaagga

SEQ ID NO: 344826 - DNA, 122 bp, Homo sapiens
gagtgagtgcacccggcccaggaggcttcccgggccaagcccacaggcctgagtgggaaccggaacgctgaaggaacactccccaaggggcgatgaagttcccatcacttggggacgtggcg

SEQ ID NO: 344827 - DNA, 122 bp, Homo sapiens
tcccgccacccctcccgggcaacccactagacgtcccctttctaatttggagtgcgggtgcgggcgcacgcgcactgccgagcttccgcgagggcgcgaccggacggcggaggaggacccgt

SEQ ID NO: 344828 - DNA, 122 bp, Homo sapiens
cagcaggtgctcgcgccgccgcagctgctccgcctgtgaccgctgctcgcgcgccgctcgcgtcagctcctcctcgcggctcagtagttcctgcgcccgagacagcgatggtggagaggtca

SEQ ID NO: 344829 - DNA, 122 bp, Homo sapiens
aaaaagtctgactgttgagaaactgacgatccaaatttaaaaagtgattcccccccctcccgttccctcctcttctctctgggaggcagatgggagccatggcttaccccttactcctctgc

SEQ ID NO: 344830 - DNA, 122 bp, Homo sapiens
gagcgaaagtgatgtgggcggggcaaaggcggcgggaagaggagagcactgaagctggcgcgggaacttggtttcctggtggcctcccatccaatccccacgaaccagctttcctcttaaac

SEQ ID NO: 344831 - DNA, 122 bp, Homo sapiens
gccccatgacatcacagaggtccctcctcaggggagttcaaccactctctgggaccatgacgtcaaagttcccacccatggacctgccaatcattccttgaccccttgacatcagaggtcct

SEQ ID NO: 344832 - DNA, 122 bp, Homo sapiens
tggttggcctgaatctcaagcatttatgccatagagagtcctacattctcattctggaatcgccacgctcacagacaagtcagaatgaatggtcactcagggcatagattacttgatgctgt

SEQ ID NO: 344833 - DNA, 122 bp, Homo sapiens
acacttacacatgctcagtgaggacactccacctgaacacactcttgctagcatctgccacgtgcccacccattgtccattccccttctgccttgctaacattttgtcctccatcccaccca

SEQ ID NO: 344834 - DNA, 122 bp, Homo sapiens
ggcggtcacttaatgatctggtcggctggcctggccgggggaggcactcagctagattggcgtgggagggacgaggagagaaagaggggagttactgctgagctaaaagcagtacgaccttg

SEQ ID NO: 344835 - DNA, 122 bp, Homo sapiens
ctcgacctcggcttgggaggcagcggccacgacagccagcagtgtggtcagcagcttcaacgcgcgtaccgccatcgctccctcagacctaacggaaccgccagccacccgccaccaaggcc

SEQ ID NO: 344836 - DNA, 122 bp, Homo sapiens
ggctccgcgagcagggtgcctattggcctgagggccggcgggctctgggcgctaattgggcggagggcggtggcgctctggcacgcttgcgcggcgagtagaacgtgtggcggcggcggaga

SEQ ID NO: 344837 - DNA, 122 bp, Homo sapiens
cagcatggggagcttctgagccccggaggttcgggccctggccagggtcgtgctgtgctgcgtctgctggtgggacccagccggaacccaggcttctcgggagctgctgtcatcggctgtgc

SEQ ID NO: 344838 - DNA, 122 bp, Homo sapiens
catgggtctcacttggaaaacaggcaagcaagtgtcagccgtgagatcctcctgttgttccgttacggctctggtgggcgtaacctgggtcccccggtacccagggatctcaggcgccatgg

SEQ ID NO: 344839 - DNA, 122 bp, Homo sapiens
cagggatggtgggcgctaggtgtgcgctgaggggatgtggtggcaggcgctgggggcaggcggcgcccaggtcctggttatgaggtcggcgcggggtttgcagcgagcctcgggtctggtgg

SEQ ID NO: 344840 - DNA, 122 bp, Homo sapiens
tccgaccagaggccggatccagaataaagaaggagcctcagactctgccgcaaagacggccgggttcacaggagcccagggcttgaccttcagacgtttgtctgaagaagacacactcgcgg

SEQ ID NO: 344841 - DNA, 122 bp, Homo sapiens
tctctacgttgaaatcctaacaccctaatgtgactgtatttggtaatagggccctgaaggcggtaattaaagttaagtcacaagggtgggaccctaatccaataggactggtgtccctataa

SEQ ID NO: 344842 - DNA, 122 bp, Homo sapiens
gtttattgctgcacatggttaagcttccttttggctttggttggagagggtggagaaaagcgggaggggcatggcctgtgacctggtcacaaagtaccttccacagtcctttactttaaggt

SEQ ID NO: 344843 - DNA, 122 bp, Homo sapiens
aaccctctctggctggactgttaaaagcaacgagaggccccggcacacctggaagctggccgcgaattcggcctctgggcctgtgtgtctgtgagctcaacctggctaaaggcagagtcact

SEQ ID NO: 344844 - DNA, 122 bp, Homo sapiens
cttatccaactgtaatgctttcacccttgcttggtacctttgtacttctcccttcatagtcgactagttaaaaaaaaatacatttctcggctcttttttgaagtaggtgtgattgagttaaa

SEQ ID NO: 344845 - DNA, 122 bp, Homo sapiens
acctggctaactttgtatttttagtagcggtgcatttctccatgttggtcaggctggtctcgaactcccaacctcaggtgatccgccctggcctcccagagtgctgagattacaggcatgag

SEQ ID NO: 344846 - DNA, 122 bp, Homo sapiens
caaactccggaatccctggccggcctcggcctccctccccacctccggcccggccccctccgttcggcccgtggccaggagccccaccaaaggacaaagctcacacgccgaaagcgcgggga

SEQ ID NO: 344847 - DNA, 122 bp, Homo sapiens
ttagacataacctctggccacctcatggggcctgtcgcgcacagccatgcaattagcaagcggggctgctgcagacttcaggcacagggaacgccaggactaccgactgattttccccgcta

SEQ ID NO: 344848 - DNA, 122 bp, Homo sapiens
ccaaaaggggggaagtaaagggaagacgaaaatgatcctggaggagtataaccaccagcccgcccctgcatggtcactgcatcataatggcggtcacaatgcaggtatcaaagtgcctacgt

SEQ ID NO: 344849 - DNA, 122 bp, Homo sapiens
ccggttgcgagtggtggtcctgccgcggaggccatagtgccgggatgggatgtcattgctcgtggaatgagatgcctgtttgttcacagtctttttgatttgccatcggagtggtatctaaa

SEQ ID NO: 344850 - DNA, 122 bp, Homo sapiens
agagatcagtgccacatcgtggacctgacgatgcaggggctggagactccaccacagccccgtttgcctgccttctttggcctgtgtggaaggcaggaggatctggaagaaggacagggaat

SEQ ID NO: 344851 - DNA, 122 bp, Homo sapiens
cccaatcctgggaccttctgccccttttggctgtagccatccctgcaggctataatcctacggcttccaaccagcctgcttggacgcaggtgggaaagagggctaggcaccatgcaagggat

SEQ ID NO: 344852 - DNA, 122 bp, Homo sapiens
ttggttccattcccactctgtacctcctataatttaatactctcgtcaacctagtgagaacggtactattttttcaacccccttttgaagtaccttgagcatagtcattgagaatattgaaa

SEQ ID NO: 344853 - DNA, 122 bp, Homo sapiens
tagaatccttgactctttaaaagagtgaggggggttacaccagcaacgctccagaggccgcgtcccacatttccgggcacggctgatgcggggcttacagtctcctgtccccggccgaccgg

SEQ ID NO: 344854 - DNA, 122 bp, Homo sapiens
ggcgtcggggggtgagcgggcacccggcgtgaccggcccatgggcgctcggtctcacgcccgcttcgcagagctcaccccgccagctcctgctcggtccccagtcccctgccccgagccctc

SEQ ID NO: 344855 - DNA, 122 bp, Homo sapiens
actagatggaacaataattcaagataaaccactggagtgtgtcacacaacctggcacatccgaacccaccttgcctcttctgcattccaagcccttcttcttaaatcattgccctatctaca

SEQ ID NO: 344856 - DNA, 122 bp, Homo sapiens
ggccaacatggcaaaacactgtctttactacaaatacaaaaattagccaggtgtgctacacgtctgtaatcccagctactcagggaggctgaggcaggagaatcacttgaacccaggaggtg

SEQ ID NO: 344857 - DNA, 122 bp, Homo sapiens
agagtggaagcggcaggtgatggtgcggaagctgcaggcgcgcctgggcgcagagagctccgcagaggcccaggtaggcccccggcaggggcgggaccagtgggcggggcggggccttttcc

SEQ ID NO: 344858 - DNA, 122 bp, Homo sapiens
gttggactttttcattcttaggattctgatccaaatgcaagaatacagctgagggcacaacgtcctcagtcggcgggcgcggtgcagagggggcctgcggctcggcctgcgggcacccgcgg

SEQ ID NO: 344859 - DNA, 122 bp, Homo sapiens
caatgaccctgtgtggccaggggctggcaagacctctgcactgagttagacagtggcccccgcaaaatgcatgtccttcccagaacctcagaatgtaacattatttggaaattggatcattg

SEQ ID NO: 344860 - DNA, 122 bp, Homo sapiens
gctgtcggctggaggagggcgcgggtgcaggcggcggtgaagggctaggcagggctttggcggtgtgaggggaggaaaggtggtgagctccggaaaggctgctagagggaaagcaggatggg

SEQ ID NO: 344861 - DNA, 122 bp, Homo sapiens
gctcagtggagtgaaaagttgtgccttcaaatccattaattcggagcagactgacagatgcggagtaaagagtttaggcaaaatacctctcgcactcagctctccgccatcatcttgctccc

SEQ ID NO: 344862 - DNA, 122 bp, Homo sapiens
ggggtcggggccaggttctcacaccatccagataatgtatggctgcgacgtggggtcggacgggcgcttcctccgcgggtaccggcaggacgcctacgacggcaaggattacatcgccctga

SEQ ID NO: 344863 - DNA, 122 bp, Homo sapiens
gagaatcaccaacaacattagtttggaaacagcaatttgaaagcgaggctctggcggtgtcgccgattcctacaagatagcatcgcacccctgggtgtcaggaagctaagaggcccgcaggc

SEQ ID NO: 344864 - DNA, 122 bp, Homo sapiens
gtggccgcgacctccgcacccggtgtggccgcgacctccgcacccagcgtggccgtgatgcgaggcctctgcacacggtggctgtgccctggtcacgtggccgaagccctggagctgtggca

SEQ ID NO: 344865 - DNA, 122 bp, Homo sapiens
catgccaccttctaccacctggatctgaaccccacttctacctgggccagcatgccctctcggattgtggccctagggtctggcattaaggctgccagctcctcccacagcggggtccagat

SEQ ID NO: 344866 - DNA, 122 bp, Homo sapiens
gctcagctaatgagctcctcctgttacccaaagttgacccgagggacccactgcagagcccgggatggcaaagaattctctgactcaggctctgacccggactcggaggggcaaagtgagca

SEQ ID NO: 344867 - DNA, 122 bp, Homo sapiens
ttgtggcttgcttttcgtccgtgtttttgtattgctttggcaattctgtccttagagctgcgagtcacacacatccaggcagctgtgagaaacccagccagcctgagtctgacgggagatgc

SEQ ID NO: 344868 - DNA, 122 bp, Homo sapiens
gggtcaccctacccggttaacaatacaggttttgttttcgtttttttagagactgaatctcgctatgttgcccaggctggagtgcagtgactattcacaggcatggttatagtgcactgtgg

SEQ ID NO: 344869 - DNA, 122 bp, Homo sapiens
tgacgcctggcttgtgggcagtggagggtgtgtccgtgtgtatctgcacacctacacacacgggccaggtccactcctggaaggagtacagcaaggcaggacagccatgccccagggcagag

SEQ ID NO: 344870 - DNA, 122 bp, Homo sapiens
ggctgcgaatcccggtgctctctcgccgccgccgcaggttgtctgctcgggagagcggctcgatgtcccttttaatccgctgacactatcgcccacatcagacaggcagccatcgatcgcgt

SEQ ID NO: 344871 - DNA, 122 bp, Homo sapiens
gaggagcgctctgtgggtaccttgatgtaggcccgctgcaggtagttgtagggcactctgcgctggaagtcgctgcgcacatcctcgctgacgcggtggcgggatgcggggcccccgaggcg

SEQ ID NO: 344872 - DNA, 122 bp, Homo sapiens
atggagtgagccacaatcctaattaatccattaatcacagaggcggtgattaataatggtcgacttttttcacaaagttttgttatggagcacatatataaaacagaacagtttaataaacc

SEQ ID NO: 344873 - DNA, 122 bp, Homo sapiens
aagggttctgggttcttatcagaaactcaagtggagccattggcataaaatctattaaatcgcctctctcctgcccttgtctctatggctgtcctcattccaaaatacttgaaattcatccc

SEQ ID NO: 344874 - DNA, 122 bp, Homo sapiens
tggggtcctgctgccctctccttgcctgacccactcaggtcccaccttttccccgggccccggcgcacccgctagcaccgctttctgcccaccctggcctggacgcctctccctccccacag

SEQ ID NO: 344875 - DNA, 122 bp, Homo sapiens
gtcctaggcgctcgggtctgccgccctctttatacggtggccctgaccgcagccggcagccgagccagctcctacgtggagcatcgaggccactgggcttaactcgctcgcgcccagagatg

SEQ ID NO: 344876 - DNA, 122 bp, Homo sapiens
ggggctgtgtccgctcatctggcctccgggctcggcccgcccccaccgcgccgcctgccccgcccctcactagctttgcaggtcccccgcgtgccccttcaggccgcgccgcactcgtaggc

SEQ ID NO: 344877 - DNA, 122 bp, Homo sapiens
tggaaaactcgccacatggtcctcacatttgatggttggaaaacagctagcggtggtatccggcctaacagctggaaccgtgatcagggctgggcctccatataggtgtggcctcctctcgg

SEQ ID NO: 344878 - DNA, 122 bp, Homo sapiens
gccaaacttctagttggagacgagactcagctttccgctggtacaatgcggagcggagcacgagggtcgcaggtgcagaacagcgggaagatgcgctcccccagggggccaggcgcctggaa

SEQ ID NO: 344879 - DNA, 122 bp, Homo sapiens
cagtagcagcagcagcagcgaagacaggggtgtcagagtccccagcatggcgtccgtggacgtgctgcaaagaagaacagagaaagtcatcaagccagccctgggtggtttggcactaggcc

SEQ ID NO: 344880 - DNA, 122 bp, Homo sapiens
tctgtggatggttgttccctaaacgacacaacagtatctcccattcccacgttcttctcacgatgtgactttaacactcctctcagcaatcgtggggtctatgttccctccccttgaacctg

SEQ ID NO: 344881 - DNA, 122 bp, Homo sapiens
gccaagccaacctttgatacccagacgttttcaagaccctcagtctggtggcccaattgccgattcatctcctggtccaaagccatccagcacatcaccatcagattaatttctaaattaac

SEQ ID NO: 344882 - DNA, 122 bp, Homo sapiens
tgggagggtaaaggtcaaggatgggtcacaagagagccccacaggctgtccattcagacacgctcaatactctttcatctctttctgtttttgttgacaccagctgtgcctaccttaatcct

SEQ ID NO: 344883 - DNA, 122 bp, Homo sapiens
tgacaggctgggctatacacttaatgtctaaaggtttttgcctttcagttcatatcaacgcgagtagagttagctagctatgtttgtaaacaatattccgatatgcttcgttaaagtaagcc

SEQ ID NO: 344884 - DNA, 122 bp, Homo sapiens
gagcccatgaggccaattttagccaattatacccacaagattcagggtctgggagatagacgtcaagttgttccaggatggtggcctggatagcccctcttccttgccaagcagccctggga

SEQ ID NO: 344885 - DNA, 122 bp, Homo sapiens
cgtagacctagatacactgctacatatacatggaggacggtgattaatcgtaacaaggcgcgctttgtggggacgttccccgcctaccaaagggttaggaggacactaccttgccaggcttg

SEQ ID NO: 344886 - DNA, 122 bp, Homo sapiens
ttgcagagtgggcagacggggcggctccctgagatggggcggacgtctgtggtgcagctgcggcagaagacgtggccacagtcaatggtcacagggtcccgcaggtaatcaagacagatgga

SEQ ID NO: 344887 - DNA, 122 bp, Homo sapiens
aggcgttgcaagtggtggacagcgcccagccgaggccggaaaagtcgatggggctcagttcggcgacgctcggctaggttcggtgcggtctgggcgcggggctcggagggagtcggcggtgt

SEQ ID NO: 344888 - DNA, 122 bp, Homo sapiens
aagaactatacaaagaaggtctcctaggtgacacctatctttggtgggtgatcctggtctcgggcagaccagagggaagggcagtttctcaagataacaggtgcagactcacagagatgaga

SEQ ID NO: 344889 - DNA, 122 bp, Homo sapiens
gggtggactagaagaggctacccatggagagagttccaggaggcagaagtgcggccagaccgaggctggagaaagagcgcagccagagacggaaaggcagccaggctgcaggtgctggagag

SEQ ID NO: 344890 - DNA, 122 bp, Homo sapiens
ccccatgttggaatcccagctctgccattcacagctgtaaaattcagagcaagtaacttccgtggcctcagtttcctcatcttaaaatgggcattgtgacatttatctcctaggatcacaat

SEQ ID NO: 344891 - DNA, 122 bp, Homo sapiens
cgggtcacctttgtaccacccggacttcgccggccctggaggctttgctgccatatgggccgctgaacctaatcaacttcgcacaggtcctggaggggtgaggaccggccttggggccgcgg

SEQ ID NO: 344892 - DNA, 122 bp, Homo sapiens
gggcccctggttcctgtgcagaattcctcgtgggtgtgacaaaaggctgcccccaggctccgctggggtgggggccaggccaagaggcacatcccacactggcccacctgtccacggtaggc

SEQ ID NO: 344893 - DNA, 122 bp, Homo sapiens
ctgcgggaagggcggaagcaggctcaggaggcgccgcagccggatggggctcagggtcaccgcgaggagggacacaggcctgggtgcagaggccccagccgcgggcctcattcactgcggaa

SEQ ID NO: 344894 - DNA, 122 bp, Homo sapiens
cttttctgttatgaggaccaggaggctgtatgcttgatatgtgcaatttcccacacccaccgggcccacaccgttgtgccactggacgatgctacacaggagtacaaggtggggaagcagac
